United States Patent Application Publication US 2017/0009304 A1 - sequence listing, part 4

SEQ ID NO: 64358 - DNA, 146 bp, Homo sapiens
tcccctcccttccctatccccgacgaccggatcctgaggaggcagctgcggtggcagctgctgagttctcggtgaaggtttggtgcacctcgatttggaggaagtagggcagggcccttatctggaaagaagtttggaaaccctgg

SEQ ID NO: 64359 - DNA, 87 bp, Homo sapiens
ccttatattatcagtacatggagacatatatgggtcctgctctttttgcaatttccatggtgtcagtgattcatattcctgatagga

SEQ ID NO: 64360 - DNA, 100 bp, Homo sapiens
acaccattttctgccgctggacgcaagcttattgcaggagtgaccaggacactacctcctagaagtaatgcccacagaaagcgcaagttgttcgactgct

SEQ ID NO: 64361 - DNA, 100 bp, Homo sapiens
gtggagcggcgctgggggacacaggtggcgacctgcacatgacccagtttttccgaggcaatctggctggcttaactctccgttccgggaaactcgcgga

SEQ ID NO: 64362 - DNA, 98 bp, Homo sapiens
gttcgagaacgaccccgagacggccaggttgctgtgctggctcatcctccttagaaagatatgcaacctccaatgagttccctgatgataccctgaac

SEQ ID NO: 64363 - DNA, 76 bp, Homo sapiens
ctagagaactctttcatttattcaggcaagaactagttgcagaactggaccaggatgaaaaggaccagcaaaatac

SEQ ID NO: 64364 - DNA, 68 bp, Homo sapiens
gaaggatcaaggacggatgatgaagtagtacagagggtggtgatgggactgatccaggtacagaaaca

SEQ ID NO: 64365 - DNA, 75 bp, Homo sapiens
gccatgcccctcaggctggaacttgccctgtctcctcgcagatgagaattttcctgcatggagtgctacatcctc

SEQ ID NO: 64366 - DNA, 90 bp, Homo sapiens
tttgtgacattgcttcgctatggagaaggagtttcagagcagcggttaagaagattgtctaccaaatatagaacagaaaagatatatccc

SEQ ID NO: 64367 - DNA, 82 bp, Homo sapiens
cccgggcaagcactaccaggctgtgggtctgcacctctggaagacctgcctagagctggaacgttacctccagagcgagccc

SEQ ID NO: 64368 - DNA, 75 bp, Homo sapiens
tgttttataagtattgacattacacagtgttaacaatgcatccacagagatcagcacttgactgtttattttcaa

SEQ ID NO: 64369 - DNA, 75 bp, Homo sapiens
cgaacgaccaagagggtgttcgactgctagagccgagcgaagcggacctgatgcccagaaccctggacgggcaga

SEQ ID NO: 64370 - DNA, 90 bp, Homo sapiens
cttgttctttgaagctgatggccctaaacagatgaaggaaaatggctttgtaaagaagtttgaacctaaatctggctggatgacttttct

SEQ ID NO: 64371 - DNA, 96 bp, Homo sapiens
atcttctgcactgtttacaggcacaggtgaaagaagaacgtccagaaaaaataccagatttaaaattattggtagagaagaaatttttggctttac

SEQ ID NO: 64372 - DNA, 100 bp, Homo sapiens
gattggggccatgccaaggactatgtggagtgtctcaggatgatacataccggtttttaactttggtgtcatcaaatgcaattgcaatgtgactgtttct

SEQ ID NO: 64373 - DNA, 85 bp, Homo sapiens
gatcacctccttggacctcagccccaacggcaagcaacttgatgaagcccggggcaagaactgtggtgtcttggtacattgcttg

SEQ ID NO: 64374 - DNA, 98 bp, Homo sapiens
gtgctctcgccccaacccgcgcgccagaagctgcacacatacatgtaagagaagcaaaaatgtcagatgatatcaggaaaaggtttgaatttccaaat

SEQ ID NO: 64375 - DNA, 90 bp, Homo sapiens
cgcatgtctactgggctcagcgacaccgcgagctatatctgcgcgtggagctgagtgacgtacaggaattgcattttgtgaaaaaagaac

SEQ ID NO: 64376 - DNA, 90 bp, Homo sapiens
atcagattccatttcaacttctgccgacaacttttctcctgatttgagggataaaagaatcagagtgtctcaacccttgacaagaggacc

SEQ ID NO: 64377 - DNA, 75 bp, Homo sapiens
ctgtcttcggtggactccttcggcagtccacccaccgccgccgcctcccagcatgtccggcatgatttcgggtgg

SEQ ID NO: 64378 - DNA, 75 bp, Homo sapiens
cctacgctatcaggaggccctgagtgagctggccactgcgtgattctcctaggtcactggctgctgacaacctgg

SEQ ID NO: 64379 - DNA, 51 bp, Homo sapiens
aaacactagcagaactatttcccggtcctttggagtagaatggattgcaag

SEQ ID NO: 64380 - DNA, 97 bp, Homo sapiens
caagggtcctgaagtcagttgttgcatcaaatacttcatatttggcttcaatgtcatattttggattcacaatgacatcctttcaagaagtcccatt

SEQ ID NO: 64381 - DNA, 98 bp, Homo sapiens
ctcaacttcttgccaaccacagggaccaagctgaccaaacagcagctaattctggcccaaacggcacattctgtattgggctcagatgcaaatgatgt

SEQ ID NO: 64382 - DNA, 75 bp, Homo sapiens
ctttcttcagccgaggccgccgccgcctctccttgctgcagccatggatcccaggggcagccactggcctcccag

SEQ ID NO: 64383 - DNA, 83 bp, Homo sapiens
ggagataacgcggccttgggctctggtgtcgtgaaaactacccctaaaagccaaaatgggaaaggaaaagactcatatcaaca

SEQ ID NO: 64384 - DNA, 74 bp, Homo sapiens
gaacagttgcagggtcacagaaacatcggaacgtcaaggtcgtgggaaataaaaggcagttctacacagactgc

SEQ ID NO: 64385 - DNA, 101 bp, Homo sapiens
ttggcaccccggctgcagctccaggagcaagtactccaggaagcacagagctgtaccagtacacggcccacgttgccaggaccagtcctgcctctgttgta

SEQ ID NO: 64386 - DNA, 88 bp, Homo sapiens
gccagaagcagtatttgtcctggctgctttgactctcccgcgaagacctttccttcactgttctactgtgattcccgttgtggttctg

SEQ ID NO: 64387 - DNA, 74 bp, Homo sapiens
gtggaagctgtgagcgcccccatcccggaggtctccgccggctcccggaaatctgaacggagaggattaaccaa

SEQ ID NO: 64388 - DNA, 100 bp, Homo sapiens
ggcctggtcccctgtggttcactgtgcatcgcccactccagaagtagcatggaaatggagggcatcttcaaccacaaagaaatgagccgtcagactgcta

SEQ ID NO: 64389 - DNA, 98 bp, Homo sapiens
gctactgccgcttcagttctcccggtgtggccacgagtcggggcaagaagactatgaccggctgcggcccctgtcctaccagaacacccacctcgtgc

SEQ ID NO: 64390 - DNA, 100 bp, Homo sapiens
cacggaagtgctgttgtcacacctcagttacctcagggaaaatcttcaaagctgctgcgggcattctatgtccccttcctgtcagatcagtatacagtgt

SEQ ID NO: 64391 - DNA, 98 bp, Homo sapiens
ttgctgatatagaaagtgaaccagtggtagaaagcacagaaactgaggggacataatcatcactcagtaggtaatgtaatccagggaagtggaaaaga

SEQ ID NO: 64392 - DNA, 75 bp, Homo sapiens
ccgagcacctccacggtccaaggcaacagcattattgagaaaagcccttacagaagagtgtggccgtaggtcagc

SEQ ID NO: 64393 - DNA, 75 bp, Homo sapiens
gacctggagagaggaaaaaaaatgttcaccggcaacctgtccagatcaggagaacctcagtctgacgacattgaa

SEQ ID NO: 64394 - DNA, 100 bp, Homo sapiens
cgggagagagaatgagccagagggacacgctggtgcatctgtttgccggagggatgaactggacctcacagacaaacacagagaagccatgtttgcactt

SEQ ID NO: 64395 - DNA, 98 bp, Homo sapiens
tcgtcgacatgagtgatgtggaggaaaacaacttcgagggcagacatggatagtgatggatcaatgacagtagactgggatgaatggaagtactactt

SEQ ID NO: 64396 - DNA, 74 bp, Homo sapiens
aaattccgtggggaagaaggtttggattacggtggtgtggccaggctgctgacttgagtaaaccaatagataaa

SEQ ID NO: 64397 - DNA, 49 bp, Homo sapiens
agctccagcctgagccggctcgaggcaagagggcacattgggagattca

SEQ ID NO: 64398 - DNA, 108 bp, Homo sapiens
ccagaagcctgtgaagtccccagataattccattaagatgcccgaagaggaagacgagatgaggaaaatgaggcccaaagaagtgatgccacttggttaaggtcccag

SEQ ID NO: 64399 - DNA, 133 bp, Homo sapiens
ccctgttgctgctcctgctgccgccgctgctgctgggggccttcccgccggccgccgccgcccgaggcgtccgacctccgatcatgaacgggcccctgcacccgcggcccctggtggcattgctggatggccg

SEQ ID NO: 64400 - DNA, 90 bp, Homo sapiens
taattatcacaattactgatgggagcaagttgactaccaccagtggagtccaggatgagctccatgttcatgcatgtcttttaacccgga

SEQ ID NO: 64401 - DNA, 75 bp, Homo sapiens
cctgtgaaaacagctccactctttagcaatgacaggttgaaaggcccgtaggtggaagggacttgccttgtctcg

SEQ ID NO: 64402 - DNA, 49 bp, Homo sapiens
ggatgaattgcttgctttggagcgtctgcttctgcgctttgcctgggag

SEQ ID NO: 64403 - DNA, 75 bp, Homo sapiens
tgtgtgggacattcattgcggaataacatcggaggagaaggcgaggccttcttgggcagctttgtggccagcggg

SEQ ID NO: 64404 - DNA, 83 bp, Homo sapiens
tgttttgaagagaaggggaataagactgcatctgttcatatgaggttggatgaagctaacttaccaaaagaaatcaatctggt

SEQ ID NO: 64405 - DNA, 109 bp, Homo sapiens
atgttacagaagagtcaattaaggaattctttcgaggattaaatgtgggctctaccatcatgcccatgtccccagatggactgttcccagcagtgggcatgcactccct

SEQ ID NO: 64406 - DNA, 90 bp, Homo sapiens
gaaatgataaaacatttagaacgatgtgaacatcgaatcatggaatcccttgcatggctctcagcgtgaattacccttcactaagtcggc

SEQ ID NO: 64407 - DNA, 75 bp, Homo sapiens
agaagctgaccagacaaagagaggccggtcagtacggcgtggcccagactaggaggcgggccatcatcctggccg

SEQ ID NO: 64408 - DNA, 90 bp, Homo sapiens
tgaaggctggataccactacatgcagcagcttcctgtggatatcttgatattgcagagtgtttcaaaatcttgagtgctaatggtgaggc

SEQ ID NO: 64409 - DNA, 89 bp, Homo sapiens
ctggaagaggcatgccagaggtagagcagtattctaccttgtaaatactgttatttgtatatactgtaaatgatgacatcggtgggcac

SEQ ID NO: 64410 - DNA, 98 bp, Homo sapiens
tttggccatgtggttccccagaaggtatctaccaaagatctttcggaatgaccgatataaagatgaagcgcagctgtataaagaagagcacctgagga

SEQ ID NO: 64411 - DNA, 100 bp, Homo sapiens
cctgcagatgaaaaagtgtgacttggcagctgtcctgagaaacatctttgtcctcacctgcatcatcatcgtctgttccctgctcttccctgtcctgtgg

SEQ ID NO: 64412 - DNA, 100 bp, Homo sapiens
ctttgatcctctctttgttgagcaaaagtggacagcatggaggatgaggtgcagcggcggctccagctggtccgggggggacaggctgagaagctggggg

SEQ ID NO: 64413 - DNA, 96 bp, Homo sapiens
gcgcgcgcgcggcggaggacgaggaagagttgtggcgaggcagatcctgccccgtggccgcggccgtctcgtagagagttaagaaagacgtggaca

SEQ ID NO: 64414 - DNA, 90 bp, Homo sapiens
ccgaggtgttgcggacgctggccgggagaagaaatgggtgaccgttggtgacacatccctacgaatctacaaatgggtccctgtgacgga

SEQ ID NO: 64415 - DNA, 85 bp, Homo sapiens
cctggctggagccctggacgcccggcagcagagcactggcgcgatataaaccacagtacttcaggatcccattatgaaaattccc

SEQ ID NO: 64416 - DNA, 100 bp, Homo sapiens
tccaaacttctgggctttgtacaatgctttggacaaagtgctgtctgtcatcggatatccagctcctcccaatgtcaccatcagccgcctgacctacggg

SEQ ID NO: 64417 - DNA, 90 bp, Homo sapiens
tcttttaccgatgctttaacatacagccactagctcaccatgttaaaacgggaacttgtgaggtggtggcactccacagatgctgtaata

SEQ ID NO: 64418 - DNA, 98 bp, Homo sapiens
aggagcatgaatggagcaaaatggcggatcatgtgcaggactggacctcactgtgggaacaacaagatcaacaagaggagcaagaacaacatcaagag

SEQ ID NO: 64419 - DNA, 97 bp, Homo sapiens
ccaaatgcagaggggaagacctccagtctataagcccaggaagccgtcttcgaactcaggagaagagtatgtatgtaactgctctgtggttggaagc

SEQ ID NO: 64420 - DNA, 114 bp, Homo sapiens
gggacagcaaataccatgcacttattgattaagtaccaaaaacttctgtggacaggcaggagcgatttggcaacatgacccgagtatactacaaggaagctgttggtgcttttg

SEQ ID NO: 64421 - DNA, 98 bp, Homo sapiens
agcaggcacacacgatggaccctcagctgcggctgctgctggaagtcacctatgaagccatcgtggacggagatgacctcgaacctaatagcctggca

SEQ ID NO: 64422 - DNA, 96 bp, Homo sapiens
taagaagcaacaacctctcctcttcgtctccgccatcagctcggcagtcgcgaagcagcaaccatggtggagtaactaatacggcacaatatcaga

SEQ ID NO: 64423 - DNA, 98 bp, Homo sapiens
ttctaaagcatctttaatctgccaggcggagggggctttgctggtctttcttggactattccagagaggttattttgtccacaaatattgctgaaaca

SEQ ID NO: 64424 - DNA, 96 bp, Homo sapiens
cagaaaatgtgtccagagattacaaggtatgcagtgccattcagaatcaggatttcactgtgatcgaagactactgcactggcctcaaagccctgc

SEQ ID NO: 64425 - DNA, 75 bp, Homo sapiens
tgggaaggtgatcgtgtgggattccttcaccacaaacaaggtgaacctgatgcagcacatgaagctcagcacctc

SEQ ID NO: 64426 - DNA, 78 bp, Homo sapiens
tgctccgccccagacctgtcggcgaaagggcgaccatggccttgctgggtaagcgctgtgacgtccccaccaacggct

SEQ ID NO: 64427 - DNA, 100 bp, Homo sapiens
gagacatgagatcttcagcctccaggctctccagtttttcgtcgagagattcactatggaatcgacccaacatgagtgaagtttcctgcaagaaacggga

SEQ ID NO: 64428 - DNA, 82 bp, Homo sapiens
gaattataggaacctggtctccctggacgtggacgaatgtcgcgagcgaggcccagccctgtgcgggtcgcagcgctgtgag

SEQ ID NO: 64429 - DNA, 82 bp, Homo sapiens
ggagcatagctgctacactgaagatgaagcaaggcccaatgacccaggcgattcggaaaccccgacctcagagagaacgtgc

SEQ ID NO: 64430 - DNA, 90 bp, Homo sapiens
gcggcgcgcgtggatcctgctcaccttgggcttggtggcctgcgtgtcggcggagtcggctgaagaaaaagtcccagtcggtggatatta

SEQ ID NO: 64431 - DNA, 75 bp, Homo sapiens
aagaagctgccagacttggtattcacaccattaagcccatgcagaatgccaccaagtatggcaacatgacagagg

SEQ ID NO: 64432 - DNA, 100 bp, Homo sapiens
agcgtggcctccgccaccgtgcacatccgaatgggcaagaaaactgatcagtgattttgccattatcttgtccattctcatcttttgtgtaatagatgcc

SEQ ID NO: 64433 - DNA, 75 bp, Homo sapiens
acattctcatgcatttattgatctgactgaagattttacagcaggaaattcagttcatgaagataagaagtttct

SEQ ID NO: 64434 - DNA, 76 bp, Homo sapiens
cctcggcagtcacctttccaggaatcaaggccttctcccgtctcatcctgattctgcgtgccctacatgtgaacaa

SEQ ID NO: 64435 - DNA, 76 bp, Homo sapiens
ctggaactcacctacctgcccaccaatgccagcctgtccttcctgcagttggttgaatctggcgatgtggaaccca

SEQ ID NO: 64436 - DNA, 75 bp, Homo sapiens
tgggaacttgtgtgttaaagtaacagatgatttagttgagggtgcatctgcccggaagactcagactcctgcagc

SEQ ID NO: 64437 - DNA, 83 bp, Homo sapiens
ccgaaagattcgggccagagacgacaacccgggcctccgagacactgccctaaccatcatggaggtggccgaggtggaaagtc

SEQ ID NO: 64438 - DNA, 97 bp, Homo sapiens
ccgctgccgccctgagtcactgcctgcgcagctccggccgcctggctccccatactagtcgccggccagaccaagaccgagacttggagacctgatt

SEQ ID NO: 64439 - DNA, 83 bp, Homo sapiens
aaagacgctggggaaacttcaccaagagcctcggcagctccagagcgacgggaaacgaaagggagtggggaaggccagggcca

SEQ ID NO: 64440 - DNA, 82 bp, Homo sapiens
attaagaaggaaaggcaaaaacttcgaaactcatgcaaggtcctggacccaagccagaagcctctgcaaagcttccttccag

SEQ ID NO: 64441 - DNA, 76 bp, Homo sapiens
tggctgttgttcttttcttttccatgatatcattatatggacagtttaggaaaccaaggtgtatgttggtaacctg

SEQ ID NO: 64442 - DNA, 83 bp, Homo sapiens
ctagtaacgtcatggaggatgaacgacagagagaagaagaaggaggttcctgctgtgccagaaacccttaagaaaaagcgaag

SEQ ID NO: 64443 - DNA, 78 bp, Homo sapiens
ttagctgtgctcgcgctactctctctttctggcctggaggctatccagcgtcaacaacggttccagcctcagggatga

SEQ ID NO: 64444 - DNA, 100 bp, Homo sapiens
ggctgactgagagcgtctgcttggggtctctctttttggcatgtcggccctgttactccctgggaactttgagtcttatttggaacttgtgaagtccctg

SEQ ID NO: 64445 - DNA, 82 bp, Homo sapiens
ggcggatgccctgcagtacctgcagaaggtctctggagacatcttcagcaggaccatggccaacctggagcgcaccttcatc

SEQ ID NO: 64446 - DNA, 147 bp, Homo sapiens
actcaccagccattgacttctctgttctatagctttttgcctctttggaataggcatgtcatgggtgcaggtattgataacagaacatggcgacttgggaaatggaaagtttttggatccaaagaacagaatctgttttaaatttga

SEQ ID NO: 64447 - DNA, 75 bp, Homo sapiens
ttctcagccaagttctaggagttcaaaactatgcatcaattccacagcctatgggggcaagcgcgatgaagagct

SEQ ID NO: 64448 - DNA, 119 bp, Homo sapiens
ggggcggcgggactcacggcagaagtgagctggaaggtcttggagcgaagagctcggaccaagcgctcaggagaagaatttggattggtttcctcggatgcgagccatgtccctcgtta

SEQ ID NO: 64449 - DNA, 83 bp, Homo sapiens
ctgctggtgggccgcgtcgaagacatggaccagggctacggagacctgcctagagctggaacgttacctccagagcgagccct

SEQ ID NO: 64450 - DNA, 75 bp, Homo sapiens
ctggtcctcgatccgcccacagacctcaaattcaaaggacccagatgatgtggtaccagttggccaaagaagagc

SEQ ID NO: 64451 - DNA, 75 bp, Homo sapiens
ttcctgtacagcctgcagaactgttctcttagaagcacaagatatggcagtgagagaccataacgtggaattcag

SEQ ID NO: 64452 - DNA, 75 bp, Homo sapiens
ctgagcagaggacgacatgttgcttttcgtggagcattttgaaagcgaagcagaagccgtagaatcagcggcgag

SEQ ID NO: 64453 - DNA, 75 bp, Homo sapiens
acccggaggaggttcgaagctgagtatgtgacaggtgactctgacatcattagaagcatgccagaacagactggt

SEQ ID NO: 64454 - DNA, 100 bp, Homo sapiens
atccgcaagaacaagtaccgccccgacctgcgcatggtcgcgtctccttcttcacctcggggtccgagaacctacaccgcgtggagaaggtccactgggg

SEQ ID NO: 64455 - DNA, 98 bp, Homo sapiens
aagaacgtgctcagcaaccggcccgtgcacgcctacaaattcttctttaagtccatggaccaggacttcggggagctgcctcagccgccccccttgct

SEQ ID NO: 64456 - DNA, 97 bp, Homo sapiens
catgaatgcaggcatcttacagactatttcaccttcaaacaggaattattttcatctcagcctagtgacgatgaatcaagtagtgatgaaaccagta

SEQ ID NO: 64457 - DNA, 101 bp, Homo sapiens
gacgaggcggaagaccgcgcgcagggcctgcagcgggagctggacggcgagcgcgagcggcgcgagaaagccccttcccagctgcctgcctgccctagcca

SEQ ID NO: 64458 - DNA, 100 bp, Homo sapiens
cctctttcctgctggctttggagcctgagctcgaggcccggctggcgcacctgggcgtgcagtgatcttccattgtttgaagcactggacctttaatcca

SEQ ID NO: 64459 - DNA, 98 bp, Homo sapiens
atgagcacgccctttacctgcgtttcctggatgctcttaaagggacagagcagaatgggctgatatagatccggtgccgcagaatgatggccccaatc

SEQ ID NO: 64460 - DNA, 51 bp, Homo sapiens
agaagcagatggattcgtccttttaggtacaccaggggttggaaaaaccac

SEQ ID NO: 64461 - DNA, 75 bp, Homo sapiens
agctcaacggcggcctgcctccgggcacacccggctccccggacgcctcggttatgaagacagtatggagtttcc

SEQ ID NO: 64462 - DNA, 90 bp, Homo sapiens
atggcacttcattggccacctacagaaacaaaatgtcaacaaattgatggaatagcctaacatggcagaccagagacagcgctcactgtc

SEQ ID NO: 64463 - DNA, 100 bp, Homo sapiens
tggcgcgtccaggtggccgtgaagcacctgcacatccacactccgctgctcgacagcttcttggacacttaatgattgttggcaagaaatgtgctgctga

SEQ ID NO: 64464 - DNA, 75 bp, Homo sapiens
aatcccccactctttccgccctaatggaggtctccagtttcgtctctctgccttctggggaaaagataacttttc

SEQ ID NO: 64465 - DNA, 75 bp, Homo sapiens
caaggggctggtgtactccagcaacttccaggaatacaaacagaagcttgcacgagtaacccaggtccgcaagga

SEQ ID NO: 64466 - DNA, 101 bp, Homo sapiens
gatggatacacacagtctgcataaatggaagatgggatccagaagtgaactgctcaattaaagccttccatctgaagtatgatgaagttcgtctggatcca

SEQ ID NO: 64467 - DNA, 74 bp, Homo sapiens
tggtgcacacaccctcgtattctcctgcccttccccagttcctaaggacggtctgaagagccaagagctatttg

SEQ ID NO: 64468 - DNA, 147 bp, Homo sapiens
caaagtcacagaaataatacctaaatatggcagtataaatggagcaacaaggctgactataagaggggaaggaatgaatctgaagtctgctgcagtaaaacacagaaggctttaaaatgttttcttgcataaaattcaaaactttta

SEQ ID NO: 64469 - DNA, 97 bp, Homo sapiens
catgcgcgggagggcgccgcggggcagccgccgctcctccgggtttgctaatccagactttacacaacctatctcagaagttgtagatgaagtaatt

SEQ ID NO: 64470 - DNA, 50 bp, Homo sapiens
tcagcataacacaaagcagctaagtgatgaaggccgctgcttgtttgtca

SEQ ID NO: 64471 - DNA, 100 bp, Homo sapiens
gtgcctcatcccctcttcagtgcaggaatatgttagcgttgtatcttgggagaaagacacagtctccatcatcccaggaggagagacttcagcatgcaaa

SEQ ID NO: 64472 - DNA, 100 bp, Homo sapiens
gcctcccagaacaaagtgggaaagggaagcttagcccgccgctgccgcctccgagcagcccgccagcactttgtcagcgagcgtaaatatgacgaggagc

SEQ ID NO: 64473 - DNA, 96 bp, Homo sapiens
ttggcttttgctggacctgcaattacggtgcaggccctagcaggtgcaggtggagtagacaatctccatgtactggactttcagaagtataaagct

SEQ ID NO: 64474 - DNA, 100 bp, Homo sapiens
gtagccataaatgtctggctaatggcatttacaggagactacacttgctgctttgaaggatgaagttgtatctgttgaaaatgaactctcagaattgcaa

SEQ ID NO: 64475 - DNA, 75 bp, Homo sapiens
cagattcgcagtggtcgcttcttctccttggggtcttgttcctcgccttctaggtgacatcctttctttgtggct

SEQ ID NO: 64476 - DNA, 75 bp, Homo sapiens
gctggctttaatcctgaaagccatgcagcggtgagacggtttaagcggaagcatcttactgccattgactgccag

SEQ ID NO: 64477 - DNA, 87 bp, Homo sapiens
acaagcaagagctaactaggggaagtcagcctcataccaaaccatccgtttttgtcatgaaaaatggaacaaatgtcgcttgtctgg

SEQ ID NO: 64478 - DNA, 90 bp, Homo sapiens
acaaagccacccagccaatgaaggccccatcacaggtatatggaggagtgacctactataaccccgcccagcagcaggtgcagccaaagc

SEQ ID NO: 64479 - DNA, 74 bp, Homo sapiens
gatgctgaggagctcctggtcgatgaagaggatgatgtttttggtgaagagctaagcttgtctgctggatccct

SEQ ID NO: 64480 - DNA, 82 bp, Homo sapiens
gaagatcctggtgtcgccatgggccgccgccccgcccgttgtttgctggcctagacctgaactcttcagataatcagagtgg

SEQ ID NO: 64481 - DNA, 100 bp, Homo sapiens
gcccaccagaatatgtttcttggctatgcccaccctaatagaattaatgaaagaccccagtgtagttgttcgagatacagctgcatggactgtaggcaga

SEQ ID NO: 64482 - DNA, 89 bp, Homo sapiens
atgatgcctagtaaattacagaagaacaaacagagactgcgaaacgatcctctcaatcaaaataagggacactccggacgcaggcccgg

SEQ ID NO: 64483 - DNA, 101 bp, Homo sapiens
ggacactttgttattggagaaacatgcagattatatcgcatcctatggctcaaagaaagatgattatgctttaaaggagatagatgaagttggggacctat

SEQ ID NO: 64484 - DNA, 100 bp, Homo sapiens
gaagaagatgcacgatcagttacatctatggatatcactactttaactggagttccagaagagcatataaaaactagaaaagtcaggatctttgttcctg

SEQ ID NO: 64485 - DNA, 51 bp, Homo sapiens
cagacaacaggatcgtctcgtccaagtgcctttactttcccgaattctgcc

SEQ ID NO: 64486 - DNA, 83 bp, Homo sapiens
cgacagcaacagctctgccggctggaagtgcaccgtccaggtgaggttagagctggggcatcgcgcccaactgcgcaagaagc

SEQ ID NO: 64487 - DNA, 135 bp, Homo sapiens
gctacagtgcctacctgctgtttggcaccgactaccccttcttccatgacccaccatctgtcttctacgtgaaagtaagtgaacacagtctcctgccccttatgctggagcagtttccgtttctttatgtttctg

SEQ ID NO: 64488 - DNA, 101 bp, Homo sapiens
atttatagctaagactccaggacacccctgaagccgagaaatggtgactgtaggacgaggatttggtgtcacataccaactggtatcaaaaatctgccccc

SEQ ID NO: 64489 - DNA, 82 bp, Homo sapiens
ctgaggatttctgtgcctggaaaatatctgttaacagactgcttttacacctactggaatgtatcctgctttcatcttggag

SEQ ID NO: 64490 - DNA, 106 bp, Homo sapiens
caacaccatgccgtccgccttctctgtcagctctttccccgtcagcatcccagccgtgctcacggagacgttctcttccagatggctgaagtccacaggcagatcc

SEQ ID NO: 64491 - DNA, 75 bp, Homo sapiens
ccgtttatgttttgaaatcagctctgtaaccacagcctctgagtcaggcacgaaggcagttccagtctcagctgg

SEQ ID NO: 64492 - DNA, 83 bp, Homo sapiens
ctgctttccactcggctcctgtcgtccgttctctcaggctcccgttcaggttgtgaccgagattcccgacgagagagactgag

SEQ ID NO: 64493 - DNA, 98 bp, Homo sapiens
ccacagctgagccccagcaccagtcacctccagcttatgttcctgaggaagaattgaaggcagcagaaatagatgaagagcacgtggaggatgacggg

SEQ ID NO: 64494 - DNA, 75 bp, Homo sapiens
gcgacgcccaacacctgtccaaacaatggaatggggcgagtccttgctcaagatgtatatgcaaaagacaattta

SEQ ID NO: 64495 - DNA, 101 bp, Homo sapiens
atagtcttcctatcacgggcactagtgtggctctcctgttccagcaattggattgaatacctgcttaagaagcttacagaagctatgggaggaggttggca

SEQ ID NO: 64496 - DNA, 100 bp, Homo sapiens
gcattttctaagctgaaggagaagtttatgaatgagttgcataaaattccatgtgtcatggagaaactccagctgggcccagagattctgcagcgggaaa

SEQ ID NO: 64497 - DNA, 98 bp, Homo sapiens
tttttttttaggtaccagcatcaagatgatttatggtaataagatttgacaagatcaaagctgcaggaaaatggacagtgaggttcagagagatggaa

SEQ ID NO: 64498 - DNA, 98 bp, Homo sapiens
gacgctgctgggtccgctgagcggggcgacccgaggagtgtgaggaagaggctgtctgtgtcattatgtgtgcgtcggtcaagtataatatccggggt

SEQ ID NO: 64499 - DNA, 97 bp, Homo sapiens
tatacttggtgaaaaaatcacccaagatacactgtactggaacaactataaggacgattactgagagccaatcagattagtttcaactgggacaggc

SEQ ID NO: 64500 - DNA, 82 bp, Homo sapiens
aggcgttaatacctgttggaaatggattatcattggctgggacgattggaactgtggctgcaccatctgtcttcatcttccc

SEQ ID NO: 64501 - DNA, 98 bp, Homo sapiens
gatgctggggacaagaatgccaccaaagcaggcgatgacgagccagagtacgaggttcctggtgcatcgatactctgtgctgcagcagcatgcagagg

SEQ ID NO: 64502 - DNA, 100 bp, Homo sapiens
cccagggacctggaaagacagacaggatggggaggaggttcttcagtgtatgcctgaaaaggttaagaagttcttacaagagttctaccaggatgatgaa

SEQ ID NO: 64503 - DNA, 100 bp, Homo sapiens
ccaggagaatgggtctcttgttgaaatccgaaatttcttgggtgaaaaatatatccgcagggttcggatgagaccagaaactggcgatggaatatgagag

SEQ ID NO: 64504 - DNA, 100 bp, Homo sapiens
ctgaccaagctgctcacctcggtggagccccctgagctgcccgctgatctgcagcactggatctcctacaacgaggccagcagccagctgctccgcatgg

SEQ ID NO: 64505 - DNA, 100 bp, Homo sapiens
cagtcaagaaccatttccaaacaaggacatggagggaaggcttcctaaggctcttgggaaagctggtgctgctgctgcctgattcccgccgacagacctt

SEQ ID NO: 64506 - DNA, 95 bp, Homo sapiens
aattgataagaccatggcacaaaactgtgacgattggctttggagtaaccctgtgtgcggttcctattgcacagtagagacgggggttcaccatg

SEQ ID NO: 64507 - DNA, 100 bp, Homo sapiens
ttaaagcttcagaggcagaaaggcagaagtggaagcaacttctatttagtgatcatgcgtttgtccaatggttctatagactcaaccgatgaaactagtc

SEQ ID NO: 64508 - DNA, 100 bp, Homo sapiens
gtgtcgcaggagcacatcgagaccgcttaccgcatctggctggagccctgcattcgcggcgtgtgcagaggagcccacgttccgctgtgacgagtgtgac

SEQ ID NO: 64509 - DNA, 90 bp, Homo sapiens
gacagtctgcatgtgcagttttcaggttgcccccaagtttcctggcagtgtgtgatactgaggaggtgagcttgtttctggagctgtgct

SEQ ID NO: 64510 - DNA, 100 bp, Homo sapiens
tccagccatcaagcccaagactgaatttcaattggttttcggctttgtgagaaaccttaccatcaaacacgatggccagcaacgttaccaacaagacaga

SEQ ID NO: 64511 - DNA, 90 bp, Homo sapiens
cgcaggggctggaggtggtgctgggggttatgggtgctacatgtgtgctttcagagcagtagtgtgaggaagcttggagtgggatggcag

SEQ ID NO: 64512 - DNA, 100 bp, Homo sapiens
tgtgaacaagatgaagaaggaagggaagctgatcatgggcattggtcaccgagtgaagtcgagacaggctcttgccatgttgcccgggctggtcctgaac

SEQ ID NO: 64513 - DNA, 95 bp, Homo sapiens
gttgcttgcttacttactcttatcaatttctatgagaggattttttatcaagcagaaatgcatcgaacaacgagaatcaagatcactgagctaaa

SEQ ID NO: 64514 - DNA, 101 bp, Homo sapiens
ccccgcccccaagccgcggccatggacctggcggatccggcctgccctggcccagctcaacacctgatttcgcgtgagtgcatctccatccacgttggcca

SEQ ID NO: 64515 - DNA, 98 bp, Homo sapiens
gcccaatcccgaccagaaggactctgacggtgatttgaagatattaaagctagaaattggaactagaaaatcaaaagaattcaaggcatcttaacgtg

SEQ ID NO: 64516 - DNA, 100 bp, Homo sapiens
gctgattttaaaagatctggaacatcgaaaggaccaagtaacacagctttcacaagagggccgttgttcgagagagaactgcaagtatcttcaccctccg

SEQ ID NO: 64517 - DNA, 100 bp, Homo sapiens
gaggaggcgatggctactatccctcgggaggcgcctggccagagcctggtcgagccggaggaagccaccaggtccttggatgtggctgtgttgcccaagc

SEQ ID NO: 64518 - DNA, 75 bp, Homo sapiens
caacatgacggcctgcttcagcagagtgagcagacttaattcagtgcacaaatgagatgaatgtgaacatcccac

SEQ ID NO: 64519 - DNA, 100 bp, Homo sapiens
ggctacagcctcctgcaccagctggacccctacatgaagaagctggcagccgagttccagcgctgcagccatttcttccagatgaagaacatctccttct

SEQ ID NO: 64520 - DNA, 50 bp, Homo sapiens
gcctcctgagtagctgagactacagggaatcatcatccagggacgtgcca

SEQ ID NO: 64521 - DNA, 100 bp, Homo sapiens
cggacaacctcagaggacaacgaagtgttcgaaaccaatagagccatggcgactccctctgctgccttcgaggcccttatgaatggtgtgacaagctggg

SEQ ID NO: 64522 - DNA, 100 bp, Homo sapiens
caacatttgatattgcttcagatgcctttgctactttcaagaacaccaatcagggtcttcaggcctggaagattgaagacattccagccaacaaaatgtc

SEQ ID NO: 64523 - DNA, 96 bp, Homo sapiens
caacattgttcctggaacgccctctttttaaaaaaggcaatttgtgtatggtgattggtggagccaacctcggtcgtgttggtgtgatcaccaaca

SEQ ID NO: 64524 - DNA, 90 bp, Homo sapiens
gcctgtcatgagagacacgatgagaagtccttaaaggctaccaagcagtttctcgaagagattaacaagtggacagttcagtacaatgtt

SEQ ID NO: 64525 - DNA, 76 bp, Homo sapiens
actactcacgctcctacgggacgaggagagggaggtgaatccgtggcagagcatcactgcaaaacttgaaagagcg

SEQ ID NO: 64526 - DNA, 116 bp, Homo sapiens
aactccaggacagcatccaggcctcattggacagcattcgagaataccctctaccatctgctttggtcagggtgccgctcgaggatttaaaagcaacaagaagaaaaccaaacaat

SEQ ID NO: 64527 - DNA, 83 bp, Homo sapiens
gccaagatggtgaagcagatcgagagcaagactccatcaagaatgctggaggaagggtgtttgtccactgccaggcaggcatt

SEQ ID NO: 64528 - DNA, 82 bp, Homo sapiens
tagacactcctgctctcttccatccccatcttacagatgtattaagaagcctcagggcgaactttctgaccaagtatacaac

SEQ ID NO: 64529 - DNA, 100 bp, Homo sapiens
gagcggcgttggaggccaccgtttccagtgcttagatgagtacgaagatgatgaagcagggcagaaagagcggaaacgagaagatgcaattacacaacag

SEQ ID NO: 64530 - DNA, 100 bp, Homo sapiens
ctcagaagaacttgtacagagatgtgatgttggagaactatagcaatctggttttcttggtgccaggccgggcacctggtgtgtaaccaatgccgccaga

SEQ ID NO: 64531 - DNA, 75 bp, Homo sapiens
ttgcagaaaaaacttcagcatgtgccaggaacacaacctcaccttgatcagtgccaccatggcaactgcaccata

SEQ ID NO: 64532 - DNA, 83 bp, Homo sapiens
atggattatttccagcgcccattcatgttgaacaagttgaaatcatcgcagaaggataaagttcgtcagtttatgatcttcac

SEQ ID NO: 64533 - DNA, 76 bp, Homo sapiens
tcagctctcatctgtcatcactactaaggagtctaggcatctcccctcagatggaagtcacatgtgtgcccacgcc

SEQ ID NO: 64534 - DNA, 99 bp, Homo sapiens
ctgcgcaacaggaacttctggatcctgcggctccctccaggtattaagggagatatcccaaagccaccttctgggtgaaccctcagttcaagatccggc

SEQ ID NO: 64535 - DNA, 90 bp, Homo sapiens
ctgaattacccatgctttaagaattgggatgggtccccagtgagctcctggattctgctggtcagaagccaatgacctggccctgaggct

SEQ ID NO: 64536 - DNA, 75 bp, Homo sapiens
gcatctcccttcatgtctgggtcatgatagccgcaatggctgaaaatggtgataatgaaaagatggctgccctgg

SEQ ID NO: 64537 - DNA, 97 bp, Homo sapiens
caccacctcaaagagcagcaccacatccgcgggtccatcacacaagaacaatgtctcccttttgcagagctgtattgacttgttcaagaataactga

SEQ ID NO: 64538 - DNA, 100 bp, Homo sapiens
ctcgaccggatccaacccagttagttacttcctgtctagagttgtagcttccacctgcttgtacaataactgcatctgcgacgtgggagccgagagcttg

SEQ ID NO: 64539 - DNA, 100 bp, Homo sapiens
ctctctcctctgcaacctgataggatttggctacccagcctacatctcgttttgtgatgaaggaacctgtacagataaagccaatattctgtatgcctgg

SEQ ID NO: 64540 - DNA, 75 bp, Homo sapiens
agacagcgagtggcgacgattattgagcaagtcaacaacctacgagagatccaagcactgaggcgcctgaatccg

SEQ ID NO: 64541 - DNA, 100 bp, Homo sapiens
aagttgcttattgtttcaaatccagtggcttccggaagttcctggtccacaacgtcaaggagctggaagtgctgctgatgtgcaacaaatcttactgtgc

SEQ ID NO: 64542 - DNA, 109 bp, Homo sapiens
gccatggatggcagagaaagaaggcccaggagatcccagttcagggcccttctagcccaatccagagctgtaccatggcagagacaagagaagaggagacagtgtcagc

SEQ ID NO: 64543 - DNA, 100 bp, Homo sapiens
gtccggggcttgccctggtcttgctcggccgatgaagtgcagaggtttttttctgaccagcagagtggttatgggaaggtatccaggcgaggtggtcatc

SEQ ID NO: 64544 - DNA, 90 bp, Homo sapiens
cgagctgagtggttgtgtggtcgcgtctcggaaaccggtagcgcttgcagcatggtttatcttgcagattatggactttcctacagatat

SEQ ID NO: 64545 - DNA, 75 bp, Homo sapiens
ttgcttctatgccttcgtgggctttgactgcatcgccaccacagggggtggcaccgagagccgaccagtccttcg

SEQ ID NO: 64546 - DNA, 82 bp, Homo sapiens
tccgtcccccgcgggtctgctctgtgtgccatggacggttaccggtattgtaagaacaagccgtacccaaagtctcgcttct

SEQ ID NO: 64547 - DNA, 75 bp, Homo sapiens
ccgcccaccgcgcctcgctcggctctgggcgtggggaggctgagacacgggagtgcatctactacaacgccaact

SEQ ID NO: 64548 - DNA, 75 bp, Homo sapiens
caggaacccgccaagaacagccttgaaggaaggtcattaagaaggcaaatgataccttaaatggaatcagtagta

SEQ ID NO: 64549 - DNA, 75 bp, Homo sapiens
agaaaggagctgcttcccaataaggaaacaatgatcatgacgcagtcctgaggtttaatggggcacccacagcca

SEQ ID NO: 64550 - DNA, 100 bp, Homo sapiens
aacgcctcggaccccgcctgggacttcgcctctgctctcttcttcgccagcacgctgatcaccaccgtggggagcagctccccgagtcagcctatatgca

SEQ ID NO: 64551 - DNA, 100 bp, Homo sapiens
tgacatctgacgacgtgaaggagcagatttacaaactggccaagaagggccttactccttcacagatcgtactggagaaaatgaaactgggattgaccca

SEQ ID NO: 64552 - DNA, 102 bp, Homo sapiens
catcagtgacgagagggagagcaagaccatcatgctgcgcggccttcccatcaccatcacagagagcgatgccatctggctgctgtgcacaggcgctcgtga

SEQ ID NO: 64553 - DNA, 92 bp, Homo sapiens
atgtctgtggactgtcttgggcagcatgcagtgctttctgggtgtttcagtcacctccagtaacacgggcgtgccagatatctcgggttctg

SEQ ID NO: 64554 - DNA, 90 bp, Homo sapiens
gcggggaagatggcggatgacaaggcgaaaattttgaccagagtcctttgagaagaacattcaaatccaaagttctcgcccactatcctc

SEQ ID NO: 64555 - DNA, 101 bp, Homo sapiens
ccagaggagagttctccaaacatgatcgtttactgcaaaaatccagcaagctaaagtgcaaattcttcccgaatgtgtgttgccttcaaccatgtctgcag

SEQ ID NO: 64556 - DNA, 89 bp, Homo sapiens
ttcgtctcttacgtctgcggaagtgcagctgcctcagttcttagcgcaggtcctgtatggtggaagagtcggggaccctcgaatcccag

SEQ ID NO: 64557 - DNA, 101 bp, Homo sapiens
ctggacccggcctgggagaagcagcagcgcaaggcctccggtgtggctgtctctgatggtgtcatcaaggtgttcaacgacatgaaggtgcgtaagtcttc

SEQ ID NO: 64558 - DNA, 74 bp, Homo sapiens
aaaaaagcagagaggagcggggagcaatgcagttgatattcactgatggactccaaagaatcattaactcctgg

SEQ ID NO: 64559 - DNA, 74 bp, Homo sapiens
ctctccagagccaggcacacagcaggcgctccataaatgttcgttggacgccatcgtagtagaagcagggagcg

SEQ ID NO: 64560 - DNA, 133 bp, Homo sapiens
gccgcagcaccgcagccttgggcctcgcgccggctatggccgtgccctggggctgagccctcagacaatgcagatcttcgtgaagactctgactggtaagaccatcaccctcgaggttgagcccagtgacacc

SEQ ID NO: 64561 - DNA, 97 bp, Homo sapiens
ccttggctggtcagagggctgtgaagacgcacggtgccaggaccaagtatctgcttcacttaaagagaggaaacttcttggtgctcaaagcaaagga

SEQ ID NO: 64562 - DNA, 100 bp, Homo sapiens
actgtcatgcaaagtgtatcctttcttgtcctttctgcaccagtggagacttcgtgtccccagggccttccccgtatcacagtcacgtgcagtgcggccg

SEQ ID NO: 64563 - DNA, 75 bp, Homo sapiens
gcttcagccgctctcctccccctggcaaacagatccccaagtaagcccttggcacggaaattaatggattgggaa

SEQ ID NO: 64564 - DNA, 89 bp, Homo sapiens
gcctccaaagtagctgagactacagattggcccaagagagagaagcagcaaaagctaagaaagaagaatcaacaacaggtaacgccaac

SEQ ID NO: 64565 - DNA, 95 bp, Homo sapiens
ggacggtgggtctgcatcgagaccccgagctctggagctggaaaaacccgggttcgagaacttgtcttggacaattgcaaatcaaatgatggaaa

SEQ ID NO: 64566 - DNA, 90 bp, Homo sapiens
cttgcgtcaaaatcaggactgaaatacattaatgtgggtgatttagctcgagaaggaagccagcagacctgcagaacttggctcccggga

SEQ ID NO: 64567 - DNA, 89 bp, Homo sapiens
cttgggacccaccgctgccctcagctccgagtccagggcgaggttgtgaccgagattcccgacgagagagactgaggggaagagaggaa

SEQ ID NO: 64568 - DNA, 102 bp, Homo sapiens
gatcaagaccctggagggcgagttctcggtcaccatgtggtcctcagcatctgcaaacatagagaattctgggcttccacacaactccagtgctaactcaac

SEQ ID NO: 64569 - DNA, 100 bp, Homo sapiens
cgggagtcggggatagtgtcatcggttcgggtcgagctgtgcagttttagcgggtacaagatctaccccggacacgggaggcgctacgccaggaccgacg

SEQ ID NO: 64570 - DNA, 90 bp, Homo sapiens
ggggtgagggtggaagctgggaaacccacaggaggcaaccacactagtttagacaggggcaagtgtccgagtggtgaatcagctacttac

SEQ ID NO: 64571 - DNA, 75 bp, Homo sapiens
atgacctggaggggaaaaatgaggactcagtggaactgctggtgttgggacaatcatatcctgattcagcccttc

SEQ ID NO: 64572 - DNA, 50 bp, Homo sapiens
tagaagacccagaggacactaaccaagatttggagcaagaggtggtggtg

SEQ ID NO: 64573 - DNA, 82 bp, Homo sapiens
gaggcgcgggaggtgttcgagaacgaccccgagacgtccctagatgacactgagctccggctgttgggacggacgcactcgg

SEQ ID NO: 64574 - DNA, 74 bp, Homo sapiens
cgagtcgtgctctcgccccaacccgcgcgccaggtcatctacacgaacaatcagaggtacatggctgccatcat

SEQ ID NO: 64575 - DNA, 98 bp, Homo sapiens
tctcctggtgaccgagcacccgcctccgggcatcttcaactcacatcaggtccacccatctggccgggcagtaccttcttcaagagaaatggagccct

SEQ ID NO: 64576 - DNA, 50 bp, Homo sapiens
gtctccgccttccagttcggagagcataagcagtactataatggatgtag

SEQ ID NO: 64577 - DNA, 96 bp, Homo sapiens
tggcgcacttcatgaacgccctgcgctacgatgccatgggtttggacagaggagccaaaggccaaatttccactttcagcagttttatttcagctg

SEQ ID NO: 64578 - DNA, 75 bp, Homo sapiens
ttaccggtgtcgaagcgccttcaagctcctggaggctgaagtttctctttggctcatcagccacccaggccttgg

SEQ ID NO: 64579 - DNA, 82 bp, Homo sapiens
cccgggtgccgaggagcgggaagagttgctggggtattagaaaactactcggatgctccaatgacaccaaaacagattctgc

SEQ ID NO: 64580 - DNA, 90 bp, Homo sapiens
ccccgagcgaggccaaccttcaggaggaggaggaaacctggattagaagcatgtgctgctctcagacctggcctacagagaagaactgac

SEQ ID NO: 64581 - DNA, 82 bp, Homo sapiens
gaagcaggactgcgccgcgtcttcctcaagcaaattgtggctactaatttgccccctgaagatcaagatggctctggggatg

SEQ ID NO: 64582 - DNA, 99 bp, Homo sapiens
ccacgggcgaactgcagctcagccgcgacctggacaacaaccggccgctggaggcgctcatggaggtgtctgtgtctgaggaggagctccggaagctgc

SEQ ID NO: 64583 - DNA, 99 bp, Homo sapiens
caaattttactttctgacaatgcagcttctcttgcagtgcagggtcgacatgttaaaacgggtcagttggcagccatcaaagttatggatgtcactgag

SEQ ID NO: 64584 - DNA, 98 bp, Homo sapiens
ttagacttgtttcttatatgtgatgccattccagcactggactcatggaggctgagcatttattcaggttctaaatgagaagaaacttcaagaggttg

SEQ ID NO: 64585 - DNA, 51 bp, Homo sapiens
tgtggagacacggccagatctgccctccagagaatggtgttgaacgcgtgt

SEQ ID NO: 64586 - DNA, 90 bp, Homo sapiens
gagctggggcgacgaggcgattgcgggggcctgggctagcgttccaatccacatgctgcctatcccaaccctggaccaagcacatcacag

SEQ ID NO: 64587 - DNA, 50 bp, Homo sapiens
tattataccagtcaatttagaccaatcacgatgatggctcctgtggagtc

SEQ ID NO: 64588 - DNA, 100 bp, Homo sapiens
taatgcccagagttggagccaattaaaccagttactggggcttccggatgcagatgacgatgcgtttgaagagtacagtgctgacgtggaagaagaggag

SEQ ID NO: 64589 - DNA, 87 bp, Homo sapiens
cttcctctggcccgaagccttcctttatcgctttcaggtggtattaaagataatcaaacattatcaagaagaaggacaaggaactga

SEQ ID NO: 64590 - DNA, 98 bp, Homo sapiens
tgtgaacagctgtgtgtttgttcatcagactcttcaccaggtcaaggtcagcatctcctcgacgatcaagatctatctctcttcgtagatcaagatca

SEQ ID NO: 64591 - DNA, 49 bp, Homo sapiens
ataatactcaccctactattgagtttgtgaagtgtggatatgcaggctc

SEQ ID NO: 64592 - DNA, 96 bp, Homo sapiens
ggtttggactgccaggctgggctgtggcttcaagcccaagaaagagattccagctagtccttccaggacaaaaatcccagctgagaaggaatccca

SEQ ID NO: 64593 - DNA, 100 bp, Homo sapiens
tcccgctcgctgggagagaggtacctctccttttccctctccctttccctaaggttatcaatactctggctgaccatcatcatcgtgggactgactttgg

SEQ ID NO: 64594 - DNA, 100 bp, Homo sapiens
gaaaaacttcgcaatgaaaccaggcgggtaaacatggtggacagaaagtcagcctcttgtggtatctctgatgaatatataacacctatgtttagttttt

SEQ ID NO: 64595 - DNA, 100 bp, Homo sapiens
tttatattcgcagagtccataatctcatcacagatttccttgcacttatgccaatgaaggtctgggaggggctgaacgtggtgaagacaggccgagtgat

SEQ ID NO: 64596 - DNA, 88 bp, Homo sapiens
cgggcttccagtcagcaccacgcactgtaagcatcccccgggagacctcggccccgctgcggcagctgctcctggccctactgcaacg

SEQ ID NO: 64597 - DNA, 75 bp, Homo sapiens
agcgaccatctttaattttggagaacagaatggctacaagatttataagattggccagggctaccttatcaagga

SEQ ID NO: 64598 - DNA, 100 bp, Homo sapiens
ggggttccatctcccaacttgtccatgttccagcaacagatagaaatgctttaagttcactctggggaaagctggcctctgaaatcttaatgcagaattg

SEQ ID NO: 64599 - DNA, 74 bp, Homo sapiens
tggcggagctgacggtggaggttcgcggctctaacggggctttctacaagggccctcatctttgtgtcccatgg

SEQ ID NO: 64600 - DNA, 83 bp, Homo sapiens
ctgtcactggagtggccttcaacccatcagcgccccaggagtccaaaactacttacctggaagaccttccaccaccccctgag

SEQ ID NO: 64601 - DNA, 101 bp, Homo sapiens
tatggctgtagcattcgtgctatccctgggggttgcagctttgtataagactcagaaccgtgctgcatactatcctcctagccaaattgctcaactaagac

SEQ ID NO: 64602 - DNA, 75 bp, Homo sapiens
ctgaaatgattcatttctggaagcattctactcctcaaggaataggttctcctagtgtctatcatgcagttatcg

SEQ ID NO: 64603 - DNA, 90 bp, Homo sapiens
accaaaagtgccatttgttaaagcttctagaattcctctccagagctactctcaagttatatccaggggacaggcccctttggctccaac

SEQ ID NO: 64604 - DNA, 75 bp, Homo sapiens
attgggagagatcgttggttcacagggaagtcgcctggaaaaaccaatagtgggttgatatagaagcagctcgaa

SEQ ID NO: 64605 - DNA, 74 bp, Homo sapiens
aaaggagtcagggatggctcttcctcaggccctggctgcagggagttcccaggaggtgacgtatgctcagctgg

SEQ ID NO: 64606 - DNA, 80 bp, Homo sapiens
atatctatatttacacagatcacatgaaaggagtcaactctgggaaggtttggttaataaaaactctaagaactgtgcca

SEQ ID NO: 64607 - DNA, 100 bp, Homo sapiens
caagaagattatgacagattacgccccctatcctatccgcaaacagtttttcgttggaatatacgttgcacatttatggcgattctgagtgtgagggcag

SEQ ID NO: 64608 - DNA, 80 bp, Homo sapiens
cgagctgcggtagcagcgactcatgagagcgcggccggaggacaggtgcgttatccagaacgcattacaatattgagagg

SEQ ID NO: 64609 - DNA, 75 bp, Homo sapiens
cagcacctgtgaggcctgacgtatccgagtgaagcctgacaggaccggtgtggtcacggatggtgtgaagcactc

SEQ ID NO: 64610 - DNA, 82 bp, Homo sapiens
ctgaccaccaatcagatccgtaagatggagttttaacattgaatgcggagaacactaattatgcctatcaagttccaaactt

SEQ ID NO: 64611 - DNA, 74 bp, Homo sapiens
gagaggatgtggtggtctactctgatgtcaatcttgagggctagtgaggagatttctagtgaagatgatgagct

SEQ ID NO: 64612 - DNA, 75 bp, Homo sapiens
taacacattcagactacaagtccagacccaggagagcaaggcccagaaagaggatgtacagttacccagcacgtg

SEQ ID NO: 64613 - DNA, 75 bp, Homo sapiens
gtgcggccagtccggcgctggcgccgcgtggcagtggggtctgctcaccaggtggccagataccgcccacgtgcc

SEQ ID NO: 64614 - DNA, 100 bp, Homo sapiens
cacctgctgcagatggggcaggtgtggaggagctactgctttctggcatgccagaaattgatgtgagtgattggataaaaaatacagaatacacaagtgg

SEQ ID NO: 64615 - DNA, 101 bp, Homo sapiens
gcacgccctgagctctgaagtcagtcggaaggcagcctcagcctacgattatggctcctcccatgggttaattggactcctgagattaacaaagaacactt

SEQ ID NO: 64616 - DNA, 100 bp, Homo sapiens
cgaagaggtgagaacaaaatcatgagacgtctcagagaggctgtgcagctgctggaggactataagcatgggaccctgcgcccgggggtcaccaatgaac

SEQ ID NO: 64617 - DNA, 75 bp, Homo sapiens
cattgacatttaattttagggtcctttatatagaagggagagtaggaaaatgtttataggaggccttagctggga

SEQ ID NO: 64618 - DNA, 100 bp, Homo sapiens
tggaaatgttaatggctgtagcactgccgaagaatctgtatctcaaaatgtggaagggacccaggctgattcaggaatttttgagagatatcttcaatct

SEQ ID NO: 64619 - DNA, 74 bp, Homo sapiens
acctgcacacctggatccaggataacggaggctggctgatgttctaatcatgtcagataaagatgatattgaga

SEQ ID NO: 64620 - DNA, 51 bp, Homo sapiens
acccttaccgggagtttcactgaaggtttgtggtaaatatgccagctctag

SEQ ID NO: 64621 - DNA, 75 bp, Homo sapiens
ctgctttacaccacgcagccttaaatggacataagtatctctgatgaatatataacacctatgtttagtttttat

SEQ ID NO: 64622 - DNA, 100 bp, Homo sapiens
cgtcaacctcagcaagactgagaagatgcaatcagaaacggagactgttcatctgtttatcccagctctatcagtcggtgccatcatcggcaagcagggc

SEQ ID NO: 64623 - DNA, 75 bp, Homo sapiens
ggggctcatggcatcatcgtggtgtatgacgtcactgaccaggagaccctcctgttcttaactgtgggcgatgag

SEQ ID NO: 64624 - DNA, 101 bp, Homo sapiens
cgatttctggtacagttagatgactacaggttccttgcattgactccatggagagtatatcacctgatttccgtcatgatacttgggcgtgttattatgca

SEQ ID NO: 64625 - DNA, 51 bp, Homo sapiens
ggattccaagtaactcttatttggtgatcatggagctcagcttggtctcca

SEQ ID NO: 64626 - DNA, 82 bp, Homo sapiens
cctggagcctcagttggaagcagccgatccagcctgcggagcctgtggggcagctggactgggcagcctttggggtcatgac

SEQ ID NO: 64627 - DNA, 100 bp, Homo sapiens
atcctcagattcttgcagcccttcaagaaagacttgatggtctggtagaaacaccaacaggatacattgaaaggcttgcattgatgacaatgttgatatg

SEQ ID NO: 64628 - DNA, 97 bp, Homo sapiens
ccttggtcccagagtcatcatgaagcaggtggtccattatggctgacatgcaaaatctggtagaaagattggagagggcagtgggccgcctggaggc

SEQ ID NO: 64629 - DNA, 82 bp, Homo sapiens
gtgaggctgccgggtctcctgttccaactccacctaggcaggggaaatggaaggtgatgcagtcgaagccattgtggaggag

SEQ ID NO: 64630 - DNA, 96 bp, Homo sapiens
gcaaatctctaggtcacgcctgcataagaattctgcttggtcagaatcgtgatggcattgtgttcagcactgatgactattttcaccatcaagatg

SEQ ID NO: 64631 - DNA, 100 bp, Homo sapiens
cgcagctgccgcgccggggcctgagctgccgcctcctccgccgcccgaaaacccggagtgccccgcacagtgaagctgaacctgccctcggacatgcaca

SEQ ID NO: 64632 - DNA, 75 bp, Homo sapiens
tgtcctggctcttgccctcatcctggttctggaatcctcagttcaagcctcccgcgacgatgcccctcaacgtta

SEQ ID NO: 64633 - DNA, 100 bp, Homo sapiens
cctggatcagctggtgtcaaccctcgtgggcctcctcagcccacacaacccggccctggccgctgccgccctcgatgcttgggatttgctttacattcta

SEQ ID NO: 64634 - DNA, 83 bp, Homo sapiens
cgctgcgagctcatcaaggagagcgaagtcaaggccctgtgcgctaaggccaggtgtccctggccagtgtccttccacctgtc

SEQ ID NO: 64635 - DNA, 100 bp, Homo sapiens
tggaagcaagccaactgtgtagcatggactcgaaagcaaatattgtacatgaaacctctgtagaggagcaggatgcaaccgacaggctgtggccggacag

SEQ ID NO: 64636 - DNA, 90 bp, Homo sapiens
caagtctttgaggccacgataagctatgatagtagtggagcttccaaagatgaaattaaggagagatttgctcagaccatggagtttgtg

SEQ ID NO: 64637 - DNA, 83 bp, Homo sapiens
ccaagggtcgctttgctgtacatcgtattacacctgaggaggccaagattgtctgtgattggacagactatgatgagcgaatg

SEQ ID NO: 64638 - DNA, 82 bp, Homo sapiens
gtctcgaccaagagctgaagctgatcgctagtatgttcaacacaccaggaatgcagagcttgttgcaacaaataactgaaaa

SEQ ID NO: 64639 - DNA, 98 bp, Homo sapiens
ctgccatctcctatgaagaatggaatgaccctcctgctgtggaacttccagcaccattacttgatgataaatgtaaaaaggaatttgatgaagatgta

SEQ ID NO: 64640 - DNA, 100 bp, Homo sapiens
cggaggcggcggaggccagggaggaagatgtcgtaatgagcgatctgccgacaccccaggccatcgagccccaggccatcgtgcagcaggtcccagcccc

SEQ ID NO: 64641 - DNA, 100 bp, Homo sapiens
tcaaatcagagagaaggaatccaccttcttacgctatggcaggttcttgctatgcactaacatacaatacacatattgatgaagataatactgttgccct

SEQ ID NO: 64642 - DNA, 82 bp, Homo sapiens
gccggcgccgcggcctcttcggctgcggaccctgccattccggaggagaaagaagttttcccatttccagaagttagccaag

SEQ ID NO: 64643 - DNA, 97 bp, Homo sapiens
gtggggactccgaaaaaacaaaacaaatatgaactatgataagctgagcagagccctgcgatactattatgacaagagagcagtatctttattgagg

SEQ ID NO: 64644 - DNA, 100 bp, Homo sapiens
gaaatacaaagcaaagattgtttttgcagtgaacacctacctcttcatgatgcaagcccaaggcattctgatccgggacaacgtgagaacaatcggtgct

SEQ ID NO: 64645 - DNA, 74 bp, Homo sapiens
ttcctaaaccagaagaggaggttgcccagaagaaaaaggttggatggcaagcatgtggtgtttggcaaagtgaa

SEQ ID NO: 64646 - DNA, 83 bp, Homo sapiens
gcgggagctggacggcgagcgcgagcggcgcgagaaagtctggcggcttctctgttgacaactcagctggttccacaccctgg

SEQ ID NO: 64647 - DNA, 75 bp, Homo sapiens
tcgaacgatgttggactcatagtcactgccagaaaggtgcaatggatgagcttcatagtctggatccaagaaggc

SEQ ID NO: 64648 - DNA, 75 bp, Homo sapiens
aatccatcttcagcttcaattacaaaaactgttcaggttccattatcaaaacgagcaaaatttgttggacctggt

SEQ ID NO: 64649 - DNA, 75 bp, Homo sapiens
aagatggcggcgctaggggaacccgtgcggctggagagagacctcacattccaatcagcaaattagttgtttcag

SEQ ID NO: 64650 - DNA, 100 bp, Homo sapiens
gccatcagtggaaccaacccagccgaccccccagctggattgccttttgcaattcttacttcaaggcatacccccttccaacgaggagtattctgtaatg

SEQ ID NO: 64651 - DNA, 74 bp, Homo sapiens
ggtggccggcattcacaagaaggcataaacatttttttggatggctatgttccaacagaaaacttgagattcag

SEQ ID NO: 64652 - DNA, 75 bp, Homo sapiens
gtttttccaaatattcatctgtacaggatgggagcaaagtgtttacggcatcgtgtgataaaactgccaaaatgt

SEQ ID NO: 64653 - DNA, 101 bp, Homo sapiens
tggtatctgggacattccgagcaactcccacatcaacagggtcttactctttgcccaggctggagtgcagtggcgcgatcatggctcgttgcaacctcgac

SEQ ID NO: 64654 - DNA, 100 bp, Homo sapiens
atccgccagtcaataggaagtacgagtgtgattgattatggaagattcccacaagagtaccacgtcagagacagcacctcaacctggttcagcagttcag

SEQ ID NO: 64655 - DNA, 82 bp, Homo sapiens
gaacaacatagcgagaccctatctctaccataaaaaagactccatcaagaatgctggaggaagggtgtttgtccactgccag

SEQ ID NO: 64656 - DNA, 106 bp, Homo sapiens
gatcataagtttcttgaggcctccccagccctgcagaacagagatattgatcaacaagagatgattccaagtaagaagaatgctgttcttgtggatggggttgtgc

SEQ ID NO: 64657 - DNA, 75 bp, Homo sapiens
attataggtgatgaactagtccagaagatgattgaagaatcactgaagattaaaataaaaaaggaattagaaatg

SEQ ID NO: 64658 - DNA, 98 bp, Homo sapiens
agactcctgaccctcagaatgggttattttagggacacagtgatgtactatggcttttacaccaattccaccatccagcacgggaacagcggggcatc

SEQ ID NO: 64659 - DNA, 51 bp, Homo sapiens
cttggacatggagctgtccttggtctgctcaccaggtggccagataccgcc

SEQ ID NO: 64660 - DNA, 75 bp, Homo sapiens
gagaaacctgggtgaactttcacggacaacctcagaggacaacgaagtgttcgagatgaatgtgaaggtgctgga

SEQ ID NO: 64661 - DNA, 74 bp, Homo sapiens
cgggctggacctcttagattctacagagctggatattgaggaagcatctcgaagaacagccctgccacactctt

SEQ ID NO: 64662 - DNA, 82 bp, Homo sapiens
atccacctatgtgtcacctgaccgtgcgaatcaataacatgaacgattggatgcccatcgccaaggagtatgatccactcaa

SEQ ID NO: 64663 - DNA, 75 bp, Homo sapiens
ccccttccaccattggctctggtaccctttacagaagaagaacagggaggtggggaagacagggctccagctacc

SEQ ID NO: 64664 - DNA, 100 bp, Homo sapiens
ctttccgcgcgggactccggggcgccacgggggccatgtaagcaggtaaaatgtcggttccaggaccttaccaggcggccactgggccttcctcagcacc

SEQ ID NO: 64665 - DNA, 125 bp, Homo sapiens
tccccctctacttcatctcccctgtggccaacagttcactggagttttcccagatctttgctgagtgatggagtgaagtgaccaggaaattggaattctgggttcaaatcttggaacagaatgag

SEQ ID NO: 64666 - DNA, 90 bp, Homo sapiens
gtgttggccgcagcttctatatccatggactcagtattatcaagtgcctctgatccccaagtcgcatctccgccacgtcctgcctgactg

SEQ ID NO: 64667 - DNA, 100 bp, Homo sapiens
aaacacagctcgacagtacgcctacttctataaagtcatccaggtctcctctgagcctccggcctccataagacccaaaacagatgacacctcttcccag

SEQ ID NO: 64668 - DNA, 100 bp, Homo sapiens
cttagctgtgctcgcgctactctctctttctggcctggaggctatccagcccttgccaacattccactaacccccgagactcagcgggaccaggagcggc

SEQ ID NO: 64669 - DNA, 75 bp, Homo sapiens
taggctgcgctaccggaatgtcatccagcgagtgattaggatgttgtgttatgcacagctgggaagggcacataa

SEQ ID NO: 64670 - DNA, 51 bp, Homo sapiens
agatctggacttcggagcacgtctttgagctgaccccgcactacatctacc

SEQ ID NO: 64671 - DNA, 100 bp, Homo sapiens
gaaaaatggagtgctggcatacattgggaattttcgcctgcttgcagagctttccagcccgtttgtgaatcagcggtaagaatgattgatgttggctgat

SEQ ID NO: 64672 - DNA, 100 bp, Homo sapiens
gtggccactaccagcatgaagagcccaacaattcaaactgacaagttggatggcttgaggactggtactaaaaggaaacgtgactgggaggccattgcca

SEQ ID NO: 64673 - DNA, 51 bp, Homo sapiens
gcccacggtagcgcagccgctctgagtgagggagataaatctgcaggacat

SEQ ID NO: 64674 - DNA, 90 bp, Homo sapiens
gcagtatcatgctggccaagaagatcatcattaaggacggaggcacgttccagatttcggaaggttcacgagtgttgccgacacgccctc

SEQ ID NO: 64675 - DNA, 100 bp, Homo sapiens
cccacccctcctgtaacccagcctgtttcacttcttgatccagacatttaatgtggatgcaccatgccagaccgtggaagatttaacgaatggggttgtg

SEQ ID NO: 64676 - DNA, 75 bp, Homo sapiens
gctcttctgcctcttgatctccgccaccgtcttcaggccagggaccagccaccactgttgccttttcaagaacgg

SEQ ID NO: 64677 - DNA, 90 bp, Homo sapiens
cgcctcggccccatggacgccctgtgcggttccggggagctcggctccaagttctggttactaaaccaaggagatttaactgaaagacgg

SEQ ID NO: 64678 - DNA, 97 bp, Homo sapiens
gtgcttggctggaaaaccccaaaagtgtacataagtgacgagtagcacagcccctctatggtttagatggcagtgctgcaaaggaggcaacagagga

SEQ ID NO: 64679 - DNA, 101 bp, Homo sapiens
cagccacgtgattttttcaagaagaggaatagggtgaatgaatctcatcagaaaagcagctgttcaataatatgtcttataacatgtcactaatgtatcta

SEQ ID NO: 64680 - DNA, 74 bp, Homo sapiens
ctgactaaagcttgaaatgctacatttccaagatgacttgtggggggaccacagtctggaggtggaggctggcc

SEQ ID NO: 64681 - DNA, 100 bp, Homo sapiens
cggccgtcctccaccgtttcctccaggacagcacctagtcgtggccggaggagtctcagagctgtcagaaaggtaatcaaatgcaaagcagctgtgctat

SEQ ID NO: 64682 - DNA, 100 bp, Homo sapiens
acaggctggatgaagattgggaatcctcactatggatgggctcattgaggacattaagcatcggcggtattatgagaagccatgccgccggcgacagagg

SEQ ID NO: 64683 - DNA, 83 bp, Homo sapiens
cctcatcttaaggtctcaactggtgagccagaaagaggccatccaacccaaggttgggcatggagggactagagactgcagaa

SEQ ID NO: 64684 - DNA, 82 bp, Homo sapiens
ggcgcggcagcggagggacggcagtctcgcgcggctctgggcgtggggaggctgagacacgggagtgcatctactacaacgc

SEQ ID NO: 64685 - DNA, 100 bp, Homo sapiens
gcctgattaaatactggtttcacactccaccaagcatcccattacagatagaagagagtgccaagccccggctggactgcttgattgaagtatacaggag

SEQ ID NO: 64686 - DNA, 74 bp, Homo sapiens
catggggaaggtgaaggtcggagtcaacgggtacttcttcaataaagaaggggattttaacaacctgacagctg

SEQ ID NO: 64687 - DNA, 90 bp, Homo sapiens
tcggcgtgagcgtgaggtgtgggtgttcgtttctcaggtgagccccaggtgtatcccagagggatccgggtgacttctctgcagactgtt

SEQ ID NO: 64688 - DNA, 131 bp, Homo sapiens
gaatacctgaagttcgataaagggccgtggctcaagcaggacaatcgcactttataccacctgcgattactcttctgaaccgaatctgaaattacggtccaggctaaagcagaaagtggccgaaagacgga

SEQ ID NO: 64689 - DNA, 100 bp, Homo sapiens
tgaagatcagtacaaaaattcttcaagaaatctaagaggctggctatgtggctacccccatagctatggttcaggcagccatgactcttctaagtgatgc

SEQ ID NO: 64690 - DNA, 100 bp, Homo sapiens
tgggcggcgcagacgaggcctgaggcggcggcgcgaggcagatgccatggacaatattaccaggcagaaccaattctacgatacccaagtcatcaaacaa

SEQ ID NO: 64691 - DNA, 142 bp, Homo sapiens
cttccttggtggcttggaataagctataagggaattggccaatatgatatacaagacaaggtgaagcctcggaaggatgtaatccctgttcattactacttaatacctccaccaacaaagactaagaatggcagcaaagata

SEQ ID NO: 64692 - DNA, 75 bp, Homo sapiens
cagaagtacaacgtgcgatccatgcccatccgaaaggatgatgaagttcagggaaccccaagagcatccaataga

SEQ ID NO: 64693 - DNA, 100 bp, Homo sapiens
aaagagggtggagagctactcaaaattctacgttagagagactgaaaagacatctaatttcattgctcggcaggagagacaggctggaaaccgagtggaa

SEQ ID NO: 64694 - DNA, 100 bp, Homo sapiens
caccaccacgggcaggactcactgaaggagtttgtgcagtttgtgtgctcggatggctcgggccaggccaccggacagttttcatggagtgataatgaaa

SEQ ID NO: 64695 - DNA, 98 bp, Homo sapiens
cagatcatgtcagagagagagcttggttaacttgggagaaagtttcatctgtggatggagtattgggggcagctggcattttatgctatgtgggagcc

SEQ ID NO: 64696 - DNA, 100 bp, Homo sapiens
agctgctgtcaatgttgtagactttgatgacaagtacattgtttctgcatctggggatagaactataaaggtttattgttggccaaaaccaggctttgat

SEQ ID NO: 64697 - DNA, 100 bp, Homo sapiens
gaaggtggagcaggtcctgagcctcgagccgcagcacgagctcaaattccgaggaatctggtgaacagtaacaaactttggtgaaatttcaggaaccata

SEQ ID NO: 64698 - DNA, 100 bp, Homo sapiens
ctacaaggcccaggcacagactgaccgagagagcctgcggaacctgcgcggctactacaaccagagcgaggccgggcgatgtaatccttgccgtcgtagg

SEQ ID NO: 64699 - DNA, 100 bp, Homo sapiens
ttccatccctgatgcttggagaagctgaggacacacagggatggctacttttctcatcggccgaaagagaaagtgcgaacagacagcaacaacgagaact

SEQ ID NO: 64700 - DNA, 83 bp, Homo sapiens
ccgacgagatcttccgcaacctggagaacgccaagcgcttcgccatcgacatagggctgggttacgacccctacaaccctgag

SEQ ID NO: 64701 - DNA, 75 bp, Homo sapiens
ctcgcgtcgcatttggccgcctccctaccgctgccagccttgccctggctctgaatggcgtctttaccaacacaa

SEQ ID NO: 64702 - DNA, 96 bp, Homo sapiens
gatatcgacgtcgtgatccagaagtccagagctgaggactgcctgtttgcagatgcagcagcttttttatgagaattacgagcagaacaaaaaggg

SEQ ID NO: 64703 - DNA, 87 bp, Homo sapiens
gatctacaaccttggagcccagagccacgtcaaaaacccagacctggactcagaggcgctgctagccctgcccctgcctcagctggt

SEQ ID NO: 64704 - DNA, 134 bp, Homo sapiens
ggccaacctgctgctggaggaggataacaagttttgtgcagattgccagtctaaagtatctccagatgaaatggccactgcttgatgtccaggcagggagcctccagagtagacaagccctcaaggatgcccgg

SEQ ID NO: 64705 - DNA, 77 bp, Homo sapiens
ggcctaactggatgtttatcctagcgtcaacccaccaaagatttggggaacatgctggagtacagtggtgcgatctc

SEQ ID NO: 64706 - DNA, 73 bp, Homo sapiens
aataatcttgctgtcacttccaagttcaatattcctgacttaaaggttggtgatgacaaaactgtgaagcagt

SEQ ID NO: 64707 - DNA, 100 bp, Homo sapiens
gaggctgcaacacgaggctgccgttcagcacccgtcgagcgtgcacattaaagatccaaagtcatgactgactccaagtatttcacaaccaataaaaaag

SEQ ID NO: 64708 - DNA, 85 bp, Homo sapiens
actttcgccagcccgtgccgcgagcgcggcctgcaggaggtgacttaagagattaaaattaatttggttgctgttggttctgaac

SEQ ID NO: 64709 - DNA, 98 bp, Homo sapiens
gcgtctccgccgccgccgccctcccttcctcttccccatcttcttctctcggtcccgggagcccccgcccggagttctggctccttggcagcaatggc

SEQ ID NO: 64710 - DNA, 75 bp, Homo sapiens
gtttgtgtcgcctcagggccacgggaatgggccttgacgaaggagaagtcggtgaagcacatggatttgtgcctt

SEQ ID NO: 64711 - DNA, 75 bp, Homo sapiens
agtagctccagcgccgtaagcgaggcctccttctcctacaagaaggaagaggcccagcagaagggactcgctgag

SEQ ID NO: 64712 - DNA, 50 bp, Homo sapiens
aggaagattcatcagaaaagcatttgagggcagccactacattagatgag

SEQ ID NO: 64713 - DNA, 100 bp, Homo sapiens
aacaagcaaggagtcatatatccttcatatgatccatcttagtgaagaattaggatacaggattacatccatcgagtaggtcgaacagctagagctgggc

SEQ ID NO: 64714 - DNA, 75 bp, Homo sapiens
ccaacttctgcgggatcttcaaccacctcgagcggctgctggacgaagaggctgaggggatctggcggtggagcg

SEQ ID NO: 64715 - DNA, 100 bp, Homo sapiens
ctccagcggggacctgctccgggacaacatgctgcggggcacagcatcaacaaagagagcattgtggatgtagaaggtgttgtgagaaaagtgaatcaga

SEQ ID NO: 64716 - DNA, 82 bp, Homo sapiens
ttgcagtacacaactcccagctgaaaggttttaaaatcaaagatgggaaaatcggagaaaattgcccttccccatggccagc

SEQ ID NO: 64717 - DNA, 100 bp, Homo sapiens
gcctgacccgaagtaccgacccgagttatgcccaccctccaactttgcgacggaaatgtgtcatcgaaagccaggatggtgccatgacaatggtgtgaac

SEQ ID NO: 64718 - DNA, 80 bp, Homo sapiens
tataaccgactgacctggatagtagttgttcttcaggacttccccagcgtggtgctagttggcctcggcaaaaaggcagc

SEQ ID NO: 64719 - DNA, 75 bp, Homo sapiens
tggggaccgactctggggaccctcgccgaagagccattgccgaaatctaaaaaaacttgtagcaaaggcagtaaa

SEQ ID NO: 64720 - DNA, 50 bp, Homo sapiens
aagtggcaaggtgatcttgagagtgacagtgtactaatggtcacttgatg

SEQ ID NO: 64721 - DNA, 75 bp, Homo sapiens
gtttcggtggtgctgaatgttactttactacctgcatatggatggcagaggcaactatgaattcaaacagataac

SEQ ID NO: 64722 - DNA, 100 bp, Homo sapiens
ccaagcgtttatgttatctgatgatgagatctacagtctaagaattattgacctgattgatagagaacaggactactgttcgaagatttttggaagaata

SEQ ID NO: 64723 - DNA, 83 bp, Homo sapiens
agcagcgccctgggagccctcacgagtcccgacctgcctagagctggaacgttacctccagagcgagccctgctatgtttcag

SEQ ID NO: 64724 - DNA, 100 bp, Homo sapiens
gatcatgcagagtattacctttacaagttggtgttagcatcaaaatgagcagtttcaacctttcacgaatagttaccctgactcccttttgtaccattgc

SEQ ID NO: 64725 - DNA, 100 bp, Homo sapiens
tatgacgcttccttagaggatcaaaaggggctcgtggcatcctatcaagccctgagtattccctctttgtgggggacctgaccccggacgtggatgatgg

SEQ ID NO: 64726 - DNA, 100 bp, Homo sapiens
gtgaagaactcagcaaacgggcccgggtggcagagttgccaaccccagagctgccgagcaaggatgcctgagacccttgccctgttggatgaataggcac

SEQ ID NO: 64727 - DNA, 101 bp, Homo sapiens
gcctactacgatggagtggccaagatcggtgagattgccactgggtcccccgtgtcaactgaactggtgcttcaccgatatagacacattttgggattgtg

SEQ ID NO: 64728 - DNA, 101 bp, Homo sapiens
gctacggctgcgctgtcaagttcaccctcttcaagaaggagagatgcccgagtggtaaaagacatggcaacaggaaagtctaagggatatggctttgtctc

SEQ ID NO: 64729 - DNA, 75 bp, Homo sapiens
atagtcggagtggagaactgcaagggcgatgctggatcttttcttgtctgaatgttatgaggcttccattcatga

SEQ ID NO: 64730 - DNA, 100 bp, Homo sapiens
accgtatttcatctgtagcattcaagacttcaaactggcccaacacagagatactttcattgaagaacgctatggaaaatataacatcagtgatccttta

SEQ ID NO: 64731 - DNA, 100 bp, Homo sapiens
cccggctctcgtcagcctcccgccggccgtctccttaacaccgaacaccgttgtccttctattcaggccactcttcgttttccatgtactgcatgctgtt

SEQ ID NO: 64732 - DNA, 90 bp, Homo sapiens
gctgccttcgtgtgtcccgagtgcggcaaggccttcagcgtcaagcacaacctcgagggccatgtgtccttcaagcccagcttagaccaa

SEQ ID NO: 64733 - DNA, 82 bp, Homo sapiens
attaattatgtatacatgtcatggacttgggggaaaccagtaaatgaactgtcagctctcatggaggatggacgttgtcaag

SEQ ID NO: 64734 - DNA, 87 bp, Homo sapiens
aacatccagaagatcacacagtgttgaaaaccagtagattcccagacatcgcgaagtgaatctgaaattgtgccaaaagttgctaaa

SEQ ID NO: 64735 - DNA, 88 bp, Homo sapiens
gctgaggcgtgagaatggcgtcccgcggccggcgtccggagcatggcggacccccagagctggacagagcgggatgccaccagcttgt

SEQ ID NO: 64736 - DNA, 75 bp, Homo sapiens
gaggtggcttatgaaagtgtgatgttcgcgtatttcttgacagggctattcacgaaaagcagcagctctagagtt

SEQ ID NO: 64737 - DNA, 85 bp, Homo sapiens
tggttggaaatggcacctatggacaagtctataaggcagcagtgaggatgccagagttcatgggtttctagaagacaagttttca

SEQ ID NO: 64738 - DNA, 100 bp, Homo sapiens
tagcaactaatggatttgtaagaggagaatacaaatggagagatttgcatgggatgcagaaatatggaagactaaccaagcagaccaggagagaccagca

SEQ ID NO: 64739 - DNA, 100 bp, Homo sapiens
actcgctggtttgtgctcaagggggatcagctctattatttcaaagatgaagatgaaaccaagcccttggagttgatccccctcatattgtgtacagcat

SEQ ID NO: 64740 - DNA, 75 bp, Homo sapiens
cagtgctcatggggatgaagaaccagctcgaaatctccaaattggacatccagagcagcattcttgttctgtcta

SEQ ID NO: 64741 - DNA, 75 bp, Homo sapiens
atagaccctggagtgaaaccattaagcttgtgcgtcaagtcatgttgttcagcacttctggtctcttcagttctg

SEQ ID NO: 64742 - DNA, 90 bp, Homo sapiens
cacacagaggggcagcttcaaaatgaagaaattgtgggcacctcctctgaatttgaagtggtcactcctgaggagcagaattcaccagag

SEQ ID NO: 64743 - DNA, 60 bp, Homo sapiens
tgtatggcagtctggagtgaagatggacagtgtgagcgacgtctcctcaccacagtgctg

SEQ ID NO: 64744 - DNA, 88 bp, Homo sapiens
gtcgtggaagcaggactgcgccgcgtcttcctcaaggatgacgatgtcgataccaagaagcagaagaccgacgaggatgactagacag

SEQ ID NO: 64745 - DNA, 76 bp, Homo sapiens
gttcagcctttcaatgtgacacaaggaaagtattctacaggcacttctccttgctgctgccacatgaagaaggacg

SEQ ID NO: 64746 - DNA, 75 bp, Homo sapiens
gccggaatttgaaaagtgcctaaagtctttatctcttgcaaggttcagtagtggcagatcatgactacattggat

SEQ ID NO: 64747 - DNA, 87 bp, Homo sapiens
ggtttacaagcaggccacgattgaatctctgaagaagaaaaagtcagcactttttgaagtgtctgaggttataccagtcatgacaaa

SEQ ID NO: 64748 - DNA, 82 bp, Homo sapiens
ccgacggctgctcaaacatcaggcgagacggtcatctgttccagccgggccactgtgatgctttatgatgatggcaacaagc

SEQ ID NO: 64749 - DNA, 100 bp, Homo sapiens
cccgggtctataatgggcggctcaaggtgcagcgcctctgctcaggttgcagattatattcctcaactggccaaattcagtcccgatttgtggggtgtgt

SEQ ID NO: 64750 - DNA, 97 bp, Homo sapiens
gatgtcccttcagcatcatgcagccgccgccgaggaagcctcccgcgacgatgcccctcaacgttagcttcaccaacaggaactatgacctcgacta

SEQ ID NO: 64751 - DNA, 75 bp, Homo sapiens
agcacattgggaaaaagaaatctgttgctctaggtcgtaaccagcctttgaaaaaggagaaaccaaaatggaaaa

SEQ ID NO: 64752 - DNA, 80 bp, Homo sapiens
accccttctggagaggtgcgctatgctgctgtaacacagtttgaggtggcgacatgtctaagaatgtgagccagtcacag

SEQ ID NO: 64753 - DNA, 90 bp, Homo sapiens
tgcagtgggtgaagttttggtaggtctcctactccctccctccagtactgcgagaactgtgacacccacttccaagattccaaccaccgc

SEQ ID NO: 64754 - DNA, 50 bp, Homo sapiens
attgtgagaggaaaacagcctacccggaaagattctgaagcttggcggag

SEQ ID NO: 64755 - DNA, 75 bp, Homo sapiens
aagaaatctatggcaattcactggggaacttttgccttagcaaatgagggccgttgctccagggagaactgcaaa

SEQ ID NO: 64756 - DNA, 75 bp, Homo sapiens
gtggctgttccaatcgctcctgtttgtcttctgctttggcccagggctccagcggggccccacagacgagcagga

SEQ ID NO: 64757 - DNA, 100 bp, Homo sapiens
cgaagctgctggataattttatcccagggtggctgaatcacggaatgactcaaatccagtacctcaagcaagtccagcagccgagcgttgcccaactgag

SEQ ID NO: 64758 - DNA, 100 bp, Homo sapiens
gtggaaaaggctttagccatggacagtctgaagatgatgagaaactgaaaaagaggaaggagcgatttgggattgtcacaagttcagctggaactggaac

SEQ ID NO: 64759 - DNA, 96 bp, Homo sapiens
agcgggagtcggggatagtgtcatcggttcggtaaagtttctgttctctggtccatggacagaaagctgcttgggaggacccagtggaatgggtcc

SEQ ID NO: 64760 - DNA, 90 bp, Homo sapiens
caggtgttattatggactttcaaacatctgaagatgacaatttattagatggtgacactgcagttgacttgctacatttgtgatgaacaa

SEQ ID NO: 64761 - DNA, 99 bp, Homo sapiens
ggggcctggggctgcctgccgggcggccgggcgcggcgagcccagggttttggccaaattgggcgagggcacaaaataaccacttaccccttctcaccg

SEQ ID NO: 64762 - DNA, 50 bp, Homo sapiens
gcacgatggaggaggagctgagagaggtgcccagggtggctccgtggccc

SEQ ID NO: 64763 - DNA, 75 bp, Homo sapiens
agacgaagcgagccccctggtggaagccagcagaaccagattaagatgttctacgaggagcatttgcacttggac

SEQ ID NO: 64764 - DNA, 98 bp, Homo sapiens
agcaaatcgagaaaaacctcagcgacctgatcgacctggtcccccagcctcctgccaccatcattcagcagctccctcagcagccactcatagcacag

SEQ ID NO: 64765 - DNA, 145 bp, Homo sapiens
gccgggagccgcggcccggaatcggggcgcttcgccccgggccccccagcatgaagaccccggcggacacaggtgtggacactgccagcggctgcagccgacttggaatgacctgggagacaaatacaacagcatggaagatgcc

SEQ ID NO: 64766 - DNA, 76 bp, Homo sapiens
cagcaagcagtggtttataaacatcacggatattaagactgcagccaaggacaaattattggattccagcacagtg

SEQ ID NO: 64767 - DNA, 100 bp, Homo sapiens
gtttcagaagacgaggcagacgtggctcctgctgcacatgtatgacagtgacaaggttgattgtcctgggctgtggctggctgtggagctagagccctgg

SEQ ID NO: 64768 - DNA, 82 bp, Homo sapiens
gcacattaaaaaggaatgcccacagtttaaaggctcttcagggctccagcggggccccacagacgagcaggatgcctgtccc

SEQ ID NO: 64769 - DNA, 75 bp, Homo sapiens
ctttttgagaaaatcaatgacaactgtaatgaagaaatgtcttactctgtagagagatcctacagtaaggaattg

SEQ ID NO: 64770 - DNA, 50 bp, Homo sapiens
ctctgacgttcccagggagttgataggtgacaaacagcatgtttggtgct

SEQ ID NO: 64771 - DNA, 100 bp, Homo sapiens
cttgttctcgagttttctctgccatgttgctattgcaggacggagctgcgggcctctcgggtgcttcttgtcggcttgaaaggacttggggctgaaattg

SEQ ID NO: 64772 - DNA, 100 bp, Homo sapiens
tgacaggggacctgactctcaatgacatcatgactcgagtaaatgctggcaggaagggctctctggcagaacatacggtccctaatgagcacagagaaga

SEQ ID NO: 64773 - DNA, 51 bp, Homo sapiens
atcgggtgtgaccgccgccgcccaggaactgtggaaggtgcatcagtgaag

SEQ ID NO: 64774 - DNA, 96 bp, Homo sapiens
tatgcagagagagcttgggagactgagacaacagcactctacacccccaagtgcatatgggtctgtcaaagcctatactaactttgatgctgagcg

SEQ ID NO: 64775 - DNA, 74 bp, Homo sapiens
tggcgattcgtgttcgtgagggccttttctgagagtgataatgaactctcaagtggaacaggtgatgtgtctaa

SEQ ID NO: 64776 - DNA, 51 bp, Homo sapiens
caagttcacccaacataactttcaagagatgccagaggaacaagcattctg

SEQ ID NO: 64777 - DNA, 100 bp, Homo sapiens
taatttctttctcgctgatcgcctaacttctactgacgaagcttggaagttgcagaagatattgatgatgttaagaagttcaaaccgggttacctggaag

SEQ ID NO: 64778 - DNA, 90 bp, Homo sapiens
aggagtcatgagcgacagcggcgagcagaactacggcgagcggtgccggtggtggtgtgcacattgagccccggtatagacagttccccc

SEQ ID NO: 64779 - DNA, 80 bp, Homo sapiens
tctgggtaaaagtagagaaggatcaaggacggatgatgaagtagtacagagctggacagactccaccacgtccaccctta

SEQ ID NO: 64780 - DNA, 90 bp, Homo sapiens
gtcctggacccagctgagcgggcggtcattcgcatcgcaggtccctggtgctgaaccgcctgcgtccagttgccagcgggggtgggaaag

SEQ ID NO: 64781 - DNA, 75 bp, Homo sapiens
tcagcaccaagaacccactgcagtgagaaagatcagtctaaagaaaaggagaagaaagtgaaaaaaacaattcct

SEQ ID NO: 64782 - DNA, 100 bp, Homo sapiens
gggcggagctggagacgtgtggagctgttcgaggactcgcgggtgtgcaggattactacagcatcccatttcccacacccactactccgctgactgggag

SEQ ID NO: 64783 - DNA, 100 bp, Homo sapiens
caatcttaaagcctgtaaccattttcgcctttacaatggcagagcagctgaggtcaccagtgaaaagttgtgcagagcccaacatgagcttcatttccaa

SEQ ID NO: 64784 - DNA, 98 bp, Homo sapiens
agctccgcttctccacctgctcccggggagctattgggtttgacagcaacgcctctgccagctcctccagtaatgagggtgacagtgaccgggatgag

SEQ ID NO: 64785 - DNA, 90 bp, Homo sapiens
cagctggccaaactgctctacgtccacatgttgggctaccccgcccactttggacaggatgaccattctgccccccttggagaaactgcg

SEQ ID NO: 64786 - DNA, 74 bp, Homo sapiens
gacactccagaagagaggtatcagaagcttaaaaaggcagttcaattaacctccagaagatggctgaacctgca

SEQ ID NO: 64787 - DNA, 100 bp, Homo sapiens
cccgagggtcaacgagaaagagatcgttcctctgtgacgagggtgcaggtatctctggggactacatcgatcgcgtggacgagcccttgtcctgctctta

SEQ ID NO: 64788 - DNA, 97 bp, Homo sapiens
aagacttgactggtcttacattgctgcatcaagaaacccaagctgctgagcataagcttaaatcgtctcagaaggacaaggtccgccagtttatggc

SEQ ID NO: 64789 - DNA, 100 bp, Homo sapiens
agataggaatgaagtaattgaagctgcaaatgaagcattacttactaaaggtgatgatgatgcttatctgtgtattcatgaagatcagactgtgtacatc

SEQ ID NO: 64790 - DNA, 82 bp, Homo sapiens
ggaagttaatgtttacggcgaagtctactcaacgtttccaaggtgtcgtgaaaactacccctaaaagccaaaatgggaaagg

SEQ ID NO: 64791 - DNA, 133 bp, Homo sapiens
aattgtagattttcaatttggaagtgatgaagctgcttaccatttaatcattgagctctatgataggcacatggattaattgatgtatgttgagtttatggagctgccttttggtggcttgctttatctgcag

SEQ ID NO: 64792 - DNA, 50 bp, Homo sapiens
gtggaggcagaggtggcatgggcaaatacttccctggacaagaaagccag

SEQ ID NO: 64793 - DNA, 75 bp, Homo sapiens
actgggaggagcgccggaacgccgaggcccagaatgtgagcatttgatccgccatatgttggtgttagatcccaa

SEQ ID NO: 64794 - DNA, 50 bp, Homo sapiens
gtggagcgcagagcgggcgagcgcggaatatgcactttctggttggaatt

SEQ ID NO: 64795 - DNA, 73 bp, Homo sapiens
tttagcaaaagttcatctccttctgcatccttaactgagaatgagtggaagatagatgataagcctgtaaaaa

SEQ ID NO: 64796 - DNA, 80 bp, Homo sapiens
cgaagctatggcctgaagacgggattctttaggtcattgattacaacggggaacgcacgctggatggttttaagaaattc

SEQ ID NO: 64797 - DNA, 90 bp, Homo sapiens
agctaatgtgattacagcaggagattatgaccttaacatcagtgacatgaagaccctgttaccagtaagcaagccagaaattcggagtta

SEQ ID NO: 64798 - DNA, 132 bp, Homo sapiens
atacaggatgcctctcagctgccacctgcctttgacctttttgaagcctttgcaaaagaccctgctttctcggctgtgattcacgacaaactccaggtccccaacaccatccggaaggcatggaacgaccgg

SEQ ID NO: 64799 - DNA, 49 bp, Homo sapiens
gaaccgcagggatttcacaaagtggcagatatcactcaccccatcccag

SEQ ID NO: 64800 - DNA, 75 bp, Homo sapiens
agtatttctttggcatcactgcagctagtaatttgccttctggattaggaattccagggaagaaatgtggtacaa

SEQ ID NO: 64801 - DNA, 100 bp, Homo sapiens
tagacatgggggcctcaaacgtggagatcaactcctctctgttaatggagtgggaaaggtggcccagacagcgtgtatgtcagcttgcaagcatttagcc

SEQ ID NO: 64802 - DNA, 78 bp, Homo sapiens
agccattggcaacgagttaaatatcacccacgggaataccttggcaagcagctccagtccgagcagccccagaccgct

SEQ ID NO: 64803 - DNA, 83 bp, Homo sapiens
gtggaccacaggccctcgttgcccagatgttcgatacaagaggctgttttcctagcgtggcttgctgcctttggtaagaacat

SEQ ID NO: 64804 - DNA, 90 bp, Homo sapiens
tcgccctggacatcgatagggatgcagaggatcagaaccggtacctggatggcatgctctatgttctatgatgaggatggggatctggct

SEQ ID NO: 64805 - DNA, 101 bp, Homo sapiens
ccgcgcacaacacttcaccctctcgcctcgggtctcgggggccgctctgggatcccggccaccagcaattgtccggctgaccaactgactgaagagcagat

SEQ ID NO: 64806 - DNA, 74 bp, Homo sapiens
caggatgccgtgggccgcagccactcaggactgtcaaaggcctccggtgtggctgtctctgatggtgtcatcaa

SEQ ID NO: 64807 - DNA, 75 bp, Homo sapiens
gtgaatacatggataaaaataatgtgaggcgacaagcaacaacaatcatagctgccctggtacctgacagtgtaa

SEQ ID NO: 64808 - DNA, 120 bp, Homo sapiens
cagaccagttccagcttggcgtgtcccatgtttttgagtatatccgttctgagacatacaaatacacatatctgaatgagaagtcgctccaactgacggagaaatgcaaaaatctgcaat

SEQ ID NO: 64809 - DNA, 98 bp, Homo sapiens
acgaggctcccttgacaggcggctttgcatcggaaatcagctctacagttcagattatggattggatatgtctacttctggatgcaaattttactgtt

SEQ ID NO: 64810 - DNA, 100 bp, Homo sapiens
aaacaaacaaaatattcactgatgagcgacttcaagattacaggacaggcccatgttttactgtgatcagcaaccagatgtgccagggacaactcagcgg

SEQ ID NO: 64811 - DNA, 90 bp, Homo sapiens
ctggaaggggccagtctggagacagtcaagaatgagctgaaagccagtggtggcgaaatcaaaattcataaaatggagcaaaaggagaat

SEQ ID NO: 64812 - DNA, 75 bp, Homo sapiens
acaacagaggcatgaatgaatttattagtccaatggagtccaatggatgggaccccaatgaaatgttcaagttca

SEQ ID NO: 64813 - DNA, 100 bp, Homo sapiens
aggaaccagatggaacaagacggctgctgaactatttgcttgataatttgtcaggtactgcaaaaagaagtctctaattaacagaagatggcaaagccca

SEQ ID NO: 64814 - DNA, 73 bp, Homo sapiens
atgaatcaatgtctggtagccaccggcactcacgggccaaagaatgtggtgcttcgcctagctgtaaaatttt

SEQ ID NO: 64815 - DNA, 75 bp, Homo sapiens
agcattcctacagatataaataggttgtggaaaatgcccttaaagtgaacccaatactaggtccacaaatgtttc

SEQ ID NO: 64816 - DNA, 51 bp, Homo sapiens
ggaaaaccccaaaagtgtacataaggttgttgatcattatgaaaatcctag

SEQ ID NO: 64817 - DNA, 100 bp, Homo sapiens
caaggtggtagaggaaatgcggggctccctggtggacaatattcagcaacacttcctcctctctgaccggttggccaggagagaagatgactgaggagga

SEQ ID NO: 64818 - DNA, 101 bp, Homo sapiens
aggcttgccttcaagaataactgcgaactacttgtggaatttaatgacccagtgctgggctcaagaacccgaccaaagacctacttttcatagaattcagg

SEQ ID NO: 64819 - DNA, 74 bp, Homo sapiens
aaaacacagtcatgggcagagttcttgaggaagccagggccgcgatgggcctcttggaacattggtgtgttcat

SEQ ID NO: 64820 - DNA, 100 bp, Homo sapiens
caaacaagccaatcccaggaggaaaaacggctgttgaagctcaaatccgaagttttggacagactccttctcaactactcatagagccccatcctcccag

SEQ ID NO: 64821 - DNA, 100 bp, Homo sapiens
ggcggagcaacgttcgcgtcatcacggacgagaactggagagaactgctggaaggagactggatgatagaattgtagtatttatgaagattcatgtgcta

SEQ ID NO: 64822 - DNA, 101 bp, Homo sapiens
ggcaggtgtggcctgcctccgaggatgaagattctgaattcacattagcctctgattttgaaattggacactttttccgtgagcggatagtcccgcgggct

SEQ ID NO: 64823 - DNA, 82 bp, Homo sapiens
gaaaagattgagcggcgacagcaagaagtggagacagagcttaaaatgtgttgtggcagcactgcctgaaggtatgagacca

SEQ ID NO: 64824 - DNA, 101 bp, Homo sapiens
tgatgacttgggttcaggaccagttggatgatgagacgttatttccatcaaaaattgaaactcccacgttaacccacgaaaccttcaaagcactgaagcca

SEQ ID NO: 64825 - DNA, 75 bp, Homo sapiens
gacgtcccaccgggcaggatgaaggcagagcgtgtggcatctccacctcaagggccagtactaaagtggaagtgg

SEQ ID NO: 64826 - DNA, 74 bp, Homo sapiens
gcctcctcagtagctgggactacaggttttcctgggatcagctgcactccttagcaaaagtatattggagaatc

SEQ ID NO: 64827 - DNA, 75 bp, Homo sapiens
gctgtgaaaaactctttggatgattctgccaaaaaggttggttttaagaacatgcagaatgtggagcatgttccg

SEQ ID NO: 64828 - DNA, 82 bp, Homo sapiens
gagcttggtttcgggatctcggtgctgcagacggcgagacctcctgcacagtcgtcattgaattttgagaagcattctgaaa

SEQ ID NO: 64829 - DNA, 75 bp, Homo sapiens
gagatgcctggcagccccgctctctgcaatggcagaaacggtggacacaagcgaaatggtcaacggcgctacaga

SEQ ID NO: 64830 - DNA, 95 bp, Homo sapiens
gagtgttcatgtgaagcctgagaacctgcgtttggcggaggaacaagcacatcatgattgacttggggactggcaacaacaacaagattaactgg

SEQ ID NO: 64831 - DNA, 90 bp, Homo sapiens
ccaagacagtgcctggataccttcgaataggctgtcttgtcgacggtctcactgatgcctcttctgcattcaaagttcctcgacccgggc

SEQ ID NO: 64832 - DNA, 100 bp, Homo sapiens
aaagaggaatgggcctggcctgtgggcagctccagggcccacaacggcagtgtcctacatgtcggtgaaatgtgtggatgcccgtaagaaccatcacaag

SEQ ID NO: 64833 - DNA, 75 bp, Homo sapiens
cgagtgaccgagaccgcggccgggaccgagggcccttgatgagcctccctatttgacagtgggcactgatgtgag

SEQ ID NO: 64834 - DNA, 100 bp, Homo sapiens
ctttggttcacaacatcatcaaatggctgcagaagatgtcaatgttactttcgaagatcaacaaaagataaacaaatttgcacggaatacaagtagaatc

SEQ ID NO: 64835 - DNA, 100 bp, Homo sapiens
aggccctagaggtcattcctcgtaccctgatccagaactgtggggccagcaccatccgtctacttacctcccttcggcctcatcaagggtaagaaatgag

SEQ ID NO: 64836 - DNA, 100 bp, Homo sapiens
caggcagcggccgtcgccgcatccccggcagcagctccaggcaaagtgacagcattagtgccagcagtagttcccaagggctgtctcagccatccaccca

SEQ ID NO: 64837 - DNA, 101 bp, Homo sapiens
cagcaacggcggcctccaggcctcaggccccctcaccatcctagaggtcaagatcagctctggctaggcgacgttgtggacgtttaccagcgggagttcct

SEQ ID NO: 64838 - DNA, 121 bp, Homo sapiens
gaggcaagtgggggaggagcgttccttgtcctccctctgcacaaggtgtgcaactgaggaacatggctcaagaaactaatcacagccaagtgcctatgctttgttccactggctgtggatt

SEQ ID NO: 64839 - DNA, 75 bp, Homo sapiens
cgaggcgcctcgctggggcggggaccttgccttgcccgggatgaagatgtgtgtgtctttaagtgctcagtgtcc

SEQ ID NO: 64840 - DNA, 100 bp, Homo sapiens
cttccctttgtaaattgagctctgcacgctggggagtttgttggggtgcagaggccaagaccgttttgcccaagaaggagaaaatgaagctgaggcgtga

SEQ ID NO: 64841 - DNA, 118 bp, Homo sapiens
ccctgacaccggcatttcgtccaaggccatgggcatcatgaattcgtttgtgaacgacattttcgagcgcatcgcaggatgtaatccctgttcattactacttaatacctccaccaac

SEQ ID NO: 64842 - DNA, 83 bp, Homo sapiens
ccgcgtcttcccggtctcctttcccggccgcacagggagccattccgtagtgccatcccgagcaacgcactgctgcagcttcc

SEQ ID NO: 64843 - DNA, 82 bp, Homo sapiens
ttgagcctttttggcctggcttgtttgcaaaggttgcagaggcagtgttaacatcccaactgaaagcacatcaagagaaacc

SEQ ID NO: 64844 - DNA, 100 bp, Homo sapiens
gaacacctttcggcgcacaggaaatgcaactcgaagtggacaaaatgggaaccaaacttggagagctttcccgatgggtcccggctcggacggtccgatg

SEQ ID NO: 64845 - DNA, 100 bp, Homo sapiens
aggtttgctgagctggttggccctgtgatccctcaagactggtccacggagtgtatgaccacaaacagccatcaaggaaaggagatgtggcattactgaa

SEQ ID NO: 64846 - DNA, 90 bp, Homo sapiens
caaagagctcatacggagcgtccttggccagaactacgacattacaatggaagtggcagtagagaagagcatcacagaagttgctcagga

SEQ ID NO: 64847 - DNA, 100 bp, Homo sapiens
tttctggtcactccccaggattatgcgcgatgtttctttctcagcaaaatagaggagaagcttacccctcttccagaagataatagtatgaatgtggatc

SEQ ID NO: 64848 - DNA, 99 bp, Homo sapiens
aagatccacaaaccagagaaagctttccagcagtcagttgaacaagacaacttatttgataacaaaaagagcctggtagcctttaagatcatgcccctg

SEQ ID NO: 64849 - DNA, 49 bp, Homo sapiens
tctccttttccctctccctttccctaagacattccacttcttccatcta

SEQ ID NO: 64850 - DNA, 75 bp, Homo sapiens
gtagcgaggaggaacgcgctaaggcaaagcacctggactttctgcagggcgactgcaccaaagcgaaacagaagc

SEQ ID NO: 64851 - DNA, 90 bp, Homo sapiens
gcacggctgaggcccgcaagcgcaaggctgaccccgcactacatctacccaccagccatcgtgcagcccagcgtggtgatcccagccgcc

SEQ ID NO: 64852 - DNA, 84 bp, Homo sapiens
gagcctgttggaggaactggcccggaaacaggaggacgagggtgaggacaaaatcttcttaatcaacaagcttcactccatcta

SEQ ID NO: 64853 - DNA, 98 bp, Homo sapiens
caaggcagacattcaacacctttacatttagcagttccaggaatggatggaggtgctttaactgatacaagtctcacagattcctattttagcaccag

SEQ ID NO: 64854 - DNA, 117 bp, Homo sapiens
ctgggctcccttggagacagagcgccatgggaaaccgggtctgctgcggaggaagctgctggctccaaggctgcatctctccactggactagcgagagggttgtcagtgttttgctc

SEQ ID NO: 64855 - DNA, 80 bp, Homo sapiens
gttttcgctgggcaactgagaaggaactgtggctgcaccatctgtcttcatcttcccgccatctgatgagcagttgaaat

SEQ ID NO: 64856 - DNA, 98 bp, Homo sapiens
tgacatctgatgctgtggaacttgcaaatcgaagggagaaccttcaaaaacttccccagttggctgctattcatcacaacaactgtatgtacattgct

SEQ ID NO: 64857 - DNA, 97 bp, Homo sapiens
gaatgatgagaaacttaaaagatctggctcaccgaatagccagtggcgaagagcatgtgcagtctttgccaacaaaaaaaattaccaagaaacctat

SEQ ID NO: 64858 - DNA, 75 bp, Homo sapiens
cagaagagccaaggaataaacatgcaatgaacccaaaaggggactcgcaagaagctgcgcctgtaccagttcctg

SEQ ID NO: 64859 - DNA, 100 bp, Homo sapiens
ctagcgcggcctgggatgcgcttgggctccctgctatatgttctcctttcagccaagacctttcaccagtgcaggggatagaagattcattccacaaact

SEQ ID NO: 64860 - DNA, 82 bp, Homo sapiens
ggggtcccttttgcctcagatactattttgaaggccttgaaccggggcattgctgctgtcaaggaggatgcagtcgagatgc

SEQ ID NO: 64861 - DNA, 50 bp, Homo sapiens
gctgaatttgctttgtgatacctgaagttaaaatgcattttgctaatcag

SEQ ID NO: 64862 - DNA, 100 bp, Homo sapiens
ggcaagcagctggaagatggacgtactttgtctgactacaatattcaaaagaaagcagatgagcgtcccactttcaaaattcttctgagcaatattctag

SEQ ID NO: 64863 - DNA, 104 bp, Homo sapiens
ttggacctgctgcaggccagtgaggaggttggcgcgctggagtacaaccccagcaggtacatcaggaacgtctctatcaagaatacaatttcagcaaggctgag

SEQ ID NO: 64864 - DNA, 100 bp, Homo sapiens
tcttccgtaacccctgcacagagcagattctgaaacttcttgacaatttgcttgcgcttataaggcaacaagtttttacagccttcacagaggagtttct

SEQ ID NO: 64865 - DNA, 76 bp, Homo sapiens
gaaaacaaagtcttgcagtggcgtggtctgggaggggctgaacgtggtgaagacaggccgagtgatgcttggggag

SEQ ID NO: 64866 - DNA, 101 bp, Homo sapiens
gcggcgccatggcagggcttgcagagagagcaaccaagagcgaggagcaagggcacggcttggtcgtcaggtagacagcatgtgggcagaacaaaagcaaa

SEQ ID NO: 64867 - DNA, 97 bp, Homo sapiens
tttcttttaatttttaaacttggtttgaaagattactttctatgaagacaaaaattttcaaggccgtcgctatgactgtgattgcgactgtgcagat

SEQ ID NO: 64868 - DNA, 75 bp, Homo sapiens
ctaaggaacttgatgtccaaataattggggttaaatgtgttcagagcaacattgttttgttgacacaagcattta

SEQ ID NO: 64869 - DNA, 100 bp, Homo sapiens
ctgcatcccctctgtgtggagatgcgacgaggacgatgactgcttagaccacagcgacgaggacgactgccgtaaggaaactgcccacaatgaaaataag

SEQ ID NO: 64870 - DNA, 100 bp, Homo sapiens
aacaagaggaaagacacacctaccaagaagccagtcaagcggccagatgcataagatgcctgacctatttatcattggcagcggtgaggccatgttgcag

SEQ ID NO: 64871 - DNA, 83 bp, Homo sapiens
ctgaaaggtctcctaaccgctgcagagagtgctttcttccagaggccccagaggtgatccgaatgcaggataacaacccattc

SEQ ID NO: 64872 - DNA, 100 bp, Homo sapiens
acaccctgacggccacgaacttccgagtgggcctcattgctacgatttcagagtaccctggtaatagctgagcatgcaaatgattccctagcacccatta

SEQ ID NO: 64873 - DNA, 100 bp, Homo sapiens
gacggctgctggggcgccacgagcaggtggtggagcggctgctggaaacgcaagacggtgccgagaagcagctgcgaggcgtggtgaccaagatgaagat

SEQ ID NO: 64874 - DNA, 100 bp, Homo sapiens
ccagcgtcgggctgctgctggccatccacctgtgcctcttcaccatgttcggaatgctgctgttcgctggtgggaaggagcagaagttctgccagcgcta

SEQ ID NO: 64875 - DNA, 103 bp, Homo sapiens
gaaagagatgcgaaacaagttgcagagctacgtggacgcaggaactccatactggagaaaatgaaactgggattgacccatcaagatgcttggctcaataaga

SEQ ID NO: 64876 - DNA, 98 bp, Homo sapiens
gaaaaagaagcgtatggactactatgactctgaacactctacattaatcatactcctccaccactgtccaagagtaaggagagagaaatggacaagaa

SEQ ID NO: 64877 - DNA, 99 bp, Homo sapiens
cacaaatgcacgcgacaggaaccagggacaagaatccttcaagaaacaggaaaaaactcctaaaacaccaaaaggacctagttctgtagaagacattaa

SEQ ID NO: 64878 - DNA, 86 bp, Homo sapiens
tagcaatcagcgagactccgtgggcgtaggaccctccgagccagattctgtttctggcgtctgcatacgcaagtccccaactcgct

SEQ ID NO: 64879 - DNA, 87 bp, Homo sapiens
ggaagttactgccgcgccaccgagtccggaccggagactttggggcctaactagaaggccggggtcagaaagaaaaaagagggtccc

SEQ ID NO: 64880 - DNA, 76 bp, Homo sapiens
cattactgctgtaaaccctgctacaattggaaggtatcatcaaatggtattcagtccactcctctgaatcttgcaa

SEQ ID NO: 64881 - DNA, 98 bp, Homo sapiens
atttataccaggagacttacatcgatgaccttggacacctccatgttatggacacggtctttcttattcagatatgtgcagcgggggctacagcgagt

SEQ ID NO: 64882 - DNA, 100 bp, Homo sapiens
gctggctgaagatggctactctggagttgaggacgtgttcctcatgatccggcgccacaagaccaccatcttcacggacgccaaggagtccagcacggtg

SEQ ID NO: 64883 - DNA, 100 bp, Homo sapiens
cgaggcctcgcgaccgccgagcctgcagcctgccccgcggccaacatgagcttcttgttaaacgatggaaagaactttctaaggaagacttatctcctgc

SEQ ID NO: 64884 - DNA, 100 bp, Homo sapiens
atggcatctttcatctaacacgagagaagtatgagctccatgcagggactgagtccaccccaagtgtcgtcgtgcacgtgtgcgacagtgacatagagga

SEQ ID NO: 64885 - DNA, 80 bp, Homo sapiens
ccaaagatttactttcccatccgtgactcctggaatgcagcagctaccaagggggtgccagctggaaacagtgacacaga

SEQ ID NO: 64886 - DNA, 100 bp, Homo sapiens
cggaaacaacgttctcccgcaaaagagattatttggtagcaattgaagagaaaaacaaagctacatttctacgtgcttatgtgaactggagaaataaaag

SEQ ID NO: 64887 - DNA, 74 bp, Homo sapiens
atggcaaacagtatatcatttcagaggagaaatttgcctgtaatggtactgtgattgaacatcctgaatacgga

SEQ ID NO: 64888 - DNA, 75 bp, Homo sapiens
tgttgagcagcccatcgtgcttaaagaagggaacccaagacagaccaggatgaggagcattgccggaaagtcaac

SEQ ID NO: 64889 - DNA, 75 bp, Homo sapiens
ccggtgtaccgcggcgagaagccccagctgcactacgcgcaccctgtggatgacattgacaagatgaaagagcga

SEQ ID NO: 64890 - DNA, 80 bp, Homo sapiens
caccgcggcttaaatgatgtattttgtgatcgcagcgatgaaagatgccgctcctacgaggactgctgtggctccaggtg

SEQ ID NO: 64891 - DNA, 100 bp, Homo sapiens
tttccttcttcctcatcatcgtcttcaggaagccagacagattcaagtattgaaggctcccaggccagtgccagtacttgggcttgccagtggcggatta

SEQ ID NO: 64892 - DNA, 75 bp, Homo sapiens
cggagggcggcttcctggacatcgacgtggaggtggtatcttggccaacaaacaaaactgctttgatgactttca

SEQ ID NO: 64893 - DNA, 100 bp, Homo sapiens
tgaaaaaagaatatagagatgacccttttcatcagactcctgtggaagaggtccctgctgctattgccccattccaggggagggtgttgattggtgtggg

SEQ ID NO: 64894 - DNA, 100 bp, Homo sapiens
aagatccggctcacaggtggagagccgcttatccggccggacgtggtggacattgtggtgccacacccccctgtcccagtgcactggggctgtggatccc

SEQ ID NO: 64895 - DNA, 100 bp, Homo sapiens
catcgtgtctgaactgcagctcaagctgaactccagcggctcctcagaagattcctttgttgaaattaggatggctgcaatttcctgccatttcgccagt

SEQ ID NO: 64896 - DNA, 100 bp, Homo sapiens
gtcaaggtcaaggcacccaggagcagacagggctcagacagcagaaaggacccaggagcgataacagtaaatcaaataagatatttgtcggtggaattcc

SEQ ID NO: 64897 - DNA, 80 bp, Homo sapiens
cttggtttcgggatctcggtgctgcagacggcgagacctcctgcacagtcccacagaacaacgagaagcttcaggagagc

SEQ ID NO: 64898 - DNA, 75 bp, Homo sapiens
catctacaaccttcgatctcctgacgagtggcattggtagggtggtcaacggagccttcatggtgctgaaagggc

SEQ ID NO: 64899 - DNA, 75 bp, Homo sapiens
ggcatggaaagttccagccggttcgagagctaggcactcaaggagttgcccctggtcctgtaattggacttcagg

SEQ ID NO: 64900 - DNA, 101 bp, Homo sapiens
ggctaagatgctgccgactctgggcggcgaggaaggcgtctcccggtgttctaagaacggaagcatctgggctggatggaatttagcatcaagcagagtcc

SEQ ID NO: 64901 - DNA, 78 bp, Homo sapiens
tcaagtaatggtgcaaagcctgaaagatggccaaggagaagcagtgctacctgcagcaagtcaagcagttctgtatcc

SEQ ID NO: 64902 - DNA, 75 bp, Homo sapiens
tcattgaagatcagcacaaattccctcattactttggaaaggccaaagatgaagaggaagcctttctggattgga

SEQ ID NO: 64903 - DNA, 83 bp, Homo sapiens
gtgaaaccaacagccagtgatatgctatacatgagaaaagaaaccttgtttattccctgtgaaaatgagaagatttctaaaca

SEQ ID NO: 64904 - DNA, 100 bp, Homo sapiens
gtggaataggtgtatcaagtaatggtgcaaagcctgaagtctgtgcagacttttgcagacaaatcaaaacaagaagctctgaagaatgacctggtggagg

SEQ ID NO: 64905 - DNA, 100 bp, Homo sapiens
tgaacagacagaaggatgtaaaggatggaaaatacagccaggccagcaggagatggaaccttccagaagtgggcagctgtggtggtgccttctggacaag

SEQ ID NO: 64906 - DNA, 90 bp, Homo sapiens
cgcaagctgagcgagctgtcagagcccggggacggcgaggccctcatgtaccacacgtgacgagtagcacagcccctctatggtttagat

SEQ ID NO: 64907 - DNA, 80 bp, Homo sapiens
tcttggcaaagcttctccctcagtatttagaccaggttttaaaatcaaagatgggaaaatcggagaaaattgcccttccc

SEQ ID NO: 64908 - DNA, 75 bp, Homo sapiens
ccccacttgctcgtgcactttacacacatgagcttttcaggatgtccagcaaagaatcctgtgggaaaaaagaga

SEQ ID NO: 64909 - DNA, 132 bp, Homo sapiens
aggtaaccactcctttgtggaggtcgccagggtcattgtcgtggatttgcacagtcggctgggcggtgcaatggcggctgcacggttaggtattttacctgtgggtcgaggaaagaccatgtcctctcaagg

SEQ ID NO: 64910 - DNA, 80 bp, Homo sapiens
agggcggggaccggcggcgctggaggagcgaggcagctgtactaggactgggaacggaacactctgctccagccaaggtg

SEQ ID NO: 64911 - DNA, 89 bp, Homo sapiens
ccgctctccccagcatttccacagacctggtttctgtgtggagacagtagaatataaaaataacaccttcgctgtctgggatgttggca

SEQ ID NO: 64912 - DNA, 100 bp, Homo sapiens
gcgaggacgaggacgaggacgtcaaggtggaagatggatgcctgaagtgtagactgctgctagctgaataccatctgggagcataaaggtgacctgaagg

SEQ ID NO: 64913 - DNA, 83 bp, Homo sapiens
aaaccagtctaccatggttactgctgacatggtgttgacctaaccaatgaagaaacaactgattccaccacttctaaaatcag

SEQ ID NO: 64914 - DNA, 90 bp, Homo sapiens
tacggcaccatgtacatgaagacacggcttttccagctgctctgttaaaagcgaaaatgaaacaattgcctgcggcaacagttcgactcc

SEQ ID NO: 64915 - DNA, 87 bp, Homo sapiens
gaagaacatcggcaatgggattatttcctccccactgactggaaagaattccttcgacaatcctgagtggttttatcggcatgtgga

SEQ ID NO: 64916 - DNA, 104 bp, Homo sapiens
gaagctgcagccaggcttcctggagattctacacgccaggtggtggtgcgctcaggtgattatcctgaaccatccaggccaaataagcgccggctatgcccctg

SEQ ID NO: 64917 - DNA, 97 bp, Homo sapiens
acttcctattccactggattgggaaagaccatggcaggtctccatcatcaccagttccagtagtgaaaaacagaacccaacaaactcaaaatacatt

SEQ ID NO: 64918 - DNA, 74 bp, Homo sapiens
gattgcagcagcgaaccaatcccaagaaacttgaggagaggctggagttctggatggagaaatacgataaggac

SEQ ID NO: 64919 - DNA, 100 bp, Homo sapiens
ccaattccggacacataacaagcagcagtgaggacaccaaaggtggttgcctatcactattgtcaagcagataatgcctacacttgcttggtgccagaat

SEQ ID NO: 64920 - DNA, 95 bp, Homo sapiens
accgagagtcaccacaaggccaagggcaagtgatttgacaggatcttacacatttgttccatggcttctcagctttaaaaggggaagtgccctag

SEQ ID NO: 64921 - DNA, 100 bp, Homo sapiens
gtgaatgctgctaaaaacaagactggggctgctcccatcattgatgtggtgcgatcgtgctgtccccggcataggtccatctctgcagaagccatttcag

SEQ ID NO: 64922 - DNA, 75 bp, Homo sapiens
gattgctcctggccccctcaccacaccctctgtcccaggtttctgcataaagaccaactcctcggaagggaaggt

SEQ ID NO: 64923 - DNA, 75 bp, Homo sapiens
gcacaacctcaaggagcgttactactcagggctcatctacataccgtcatgaatttaagtcaaacgagttatgga

SEQ ID NO: 64924 - DNA, 100 bp, Homo sapiens
gtcgtctggtcctactacgcgtacgtggtggagctctgcgtgtgaggaagaaggcacctacgatcaaactctggagttccgtaggggaggtgatggccag

SEQ ID NO: 64925 - DNA, 50 bp, Homo sapiens
tggatccaggataacggaggctggccaccattggttcaggcaatcttcag

SEQ ID NO: 64926 - DNA, 100 bp, Homo sapiens
cgatgatttactgaaatttgatgacctagatggaacacatgctctgatgaaaaactgcttaaggttgaaaagagaaatttaagaaattgctgacggaata

SEQ ID NO: 64927 - DNA, 74 bp, Homo sapiens
caacaatccaaatggccatgggcacaattataaagaatgctgacaaggtactggagctgatgaacaaactgctg

SEQ ID NO: 64928 - DNA, 50 bp, Homo sapiens
tggacacacccagccgctgtgaattaaatatgggtgatgttgagaaaggc

SEQ ID NO: 64929 - DNA, 100 bp, Homo sapiens
aaatccatgccatatgactttgatattcgtgtgcctttttttattcgtggtccaagtgtagaaccaggatcaatgacaagaggaccctgccttggtgtga

SEQ ID NO: 64930 - DNA, 51 bp, Homo sapiens
aacttcggctttgatgacctatgaccaaagacttgaccactcaaagtccag

SEQ ID NO: 64931 - DNA, 98 bp, Homo sapiens
tgggagcgagcgcagcaaagcgcccagcctgccgcctcgctgtccctgcggcttctgggggtatattcgaattgttgggactcacaacacagtgaaca

SEQ ID NO: 64932 - DNA, 100 bp, Homo sapiens
ctctgccgtgaatcattcctgcagatgaaaaagtgtgacttggcagctgacgataacagcaaccagagctccatcgcagatgcctcccccatcaaacagg

SEQ ID NO: 64933 - DNA, 50 bp, Homo sapiens
cgctggttcaccccgtggtcgaggagtcgatatgaagagcattttaagag

SEQ ID NO: 64934 - DNA, 97 bp, Homo sapiens
tatatcgccagtccagcagctaaggatattttgtgcagaagacctatggagcattcatgatctagaagcaagataccaggaaagccaagctggaaat

SEQ ID NO: 64935 - DNA, 82 bp, Homo sapiens
ccttgatgacgagggccacagtgggattaaaaagaccactgaggagcaggtgcagccgcggcgagtcctttgcacatgttgg

SEQ ID NO: 64936 - DNA, 75 bp, Homo sapiens
ctcgcccggccgggagccgccgcgggcaggacgcgcgctgcaggtcatcatcagatttgaaatatttaaagtgga

SEQ ID NO: 64937 - DNA, 100 bp, Homo sapiens
gcatctcccaggcgaccggctccgcagcaagatggcggacgagaaggacagggaagcttcctgcctgacacagctcacttcaagaagtgcacaatgtcag

SEQ ID NO: 64938 - DNA, 100 bp, Homo sapiens
tgagaatgaggatgatttcatccaagtcactaaaaatggatcagattgatgaactcccagagggcgctgtgaagcctccagcaaacaagtatcctatctt

SEQ ID NO: 64939 - DNA, 74 bp, Homo sapiens
cctcccgcccaaggagaatgcgctcttcaagcggatcttggaactgtggctgcaccatctgtcttcatcttccc

SEQ ID NO: 64940 - DNA, 74 bp, Homo sapiens
cagcttcaagcttaggaccacccaccatgcctatccaggtggacagtgcaaagccctttggtgagaatatttca

SEQ ID NO: 64941 - DNA, 133 bp, Homo sapiens
ttcaaggcaagaccgaattcagaaggatatcgacgtcgtgatccagaagtccagagctgaggactgcctgtttgcagtctgcgctcctcagaccaccggcaggtgaacagcctgatgcagaccgaggagtgcc

SEQ ID NO: 64942 - DNA, 98 bp, Homo sapiens
atattttgcactccagcatgccgatagttcaaacttctatatcacagaaaaggtgaatctggattgggaaagtcgacattaatcaactcattattcct

SEQ ID NO: 64943 - DNA, 88 bp, Homo sapiens
tggcgagcaaaaaatgcttgagccaggatgcagaaagcctcagtgttgctcttcctggcctgggtctgcttcctcttctacgctggca

SEQ ID NO: 64944 - DNA, 75 bp, Homo sapiens
ggactttgggcgtcccattgccatgggtaagcttgatgattaccaggaacgaatgaacaaaggggaaaggcttaa

SEQ ID NO: 64945 - DNA, 98 bp, Homo sapiens
tgaccttcgcttggtgtcctcctggcctcagcaacctgacaattctgtcgtgtcccggtttctgggtgtctctggggagcccctgggccagattttcc

SEQ ID NO: 64946 - DNA, 82 bp, Homo sapiens
cttccctttggatgtagcaaggaagaaattgttcagttcttctcaggagatacaactcgtcaacgaatcaaattcagtgatg

SEQ ID NO: 64947 - DNA, 76 bp, Homo sapiens
gtggcctgtatagagacactgaggaaagccttaaggaggctgctggaatcttccctcatttcattatcccgttatg

SEQ ID NO: 64948 - DNA, 100 bp, Homo sapiens
gaagccttgggtttctttcttaaaggactgatttttagaactccacatttgaggaaatatatcctggacaattccagccatctctctgtcacaaattcat

SEQ ID NO: 64949 - DNA, 82 bp, Homo sapiens
cgcggtgcgcgaccgggagctggacctccgggccgccgccgcgccgccgtcgctctccaacgccagcgccgcctctcgctcg

SEQ ID NO: 64950 - DNA, 98 bp, Homo sapiens
cacagatactttgtggacaaggccgcagcccggaaagtcctgagcagggaggagaagcagctgattgggcagaaagtggcccatgctctggcagaggg

SEQ ID NO: 64951 - DNA, 90 bp, Homo sapiens
ggcctgcgcgccgctgcccgcgccacagagagggtgtcttgctatgttgcccaggctggtcttggactcctggcctcaagtgatcctccc

SEQ ID NO: 64952 - DNA, 100 bp, Homo sapiens
atcccagaggatgccataagaggaaaagtcaggggagtgttgaagactctgcctcctacaaatatacaacgtgcagtccgacctccttcacaaatatcag

SEQ ID NO: 64953 - DNA, 131 bp, Homo sapiens
gtcggccgtgcagacctcctgtgtgccctgttcttcttgttatctttccttggctactgtaaagcatttagagaaaacttagaaggttttgactccgtggtatcatctactgagaaactcagtcatccgac

SEQ ID NO: 64954 - DNA, 100 bp, Homo sapiens
catttttcttcagctttatcagagttggagaatctaatgctggacaaagatggccacataaaaattacagattttggactttgcaaagaagggatcacag

SEQ ID NO: 64955 - DNA, 74 bp, Homo sapiens
tgcgcgtccagtggtacccggagggcgtcaagcagcatgtgaaggagaccaagattggagctggagtgagcctt

SEQ ID NO: 64956 - DNA, 82 bp, Homo sapiens
gccaccgagcgtgctgagcaaccgcagcctccgcggccgagagtgcagcgataagactttgaccccgacgcaggcttcagtg

SEQ ID NO: 64957 - DNA, 100 bp, Homo sapiens
agatcttttcatatttctcccagtttggcactgtgacacggttcaggctgtccagaagtaaaaggatgatgaggagtctgatgaggaagctgtgaagaaa

SEQ ID NO: 64958 - DNA, 75 bp, Homo sapiens
gaatcaggtctggaatactcctaaccaagaagttgcccaggatttccatcaccaaggagtaagaagaccttcggg

SEQ ID NO: 64959 - DNA, 80 bp, Homo sapiens
caggcagagtgctgatgtgaaaaataccacgacaaaaccaccctaataacaacgaacttgatgcaagtgataggtttgcc

SEQ ID NO: 64960 - DNA, 50 bp, Homo sapiens
ggcaaaggaatcgtctaagtctcagctatctcacgtgagagggcagtgga

SEQ ID NO: 64961 - DNA, 74 bp, Homo sapiens
agcacgaggtcccagcaaagtctgatgtttactgtgaggtgtgtttggtggccggggccgaggtgggatcccgg

SEQ ID NO: 64962 - DNA, 50 bp, Homo sapiens
ttcaaatataatgccatcttcaagatacgtaggtaacctttccagagatg

SEQ ID NO: 64963 - DNA, 58 bp, Homo sapiens
cctggggttgggtacctggaagaaaccaatagagccatggcgactccctctgctgcct

SEQ ID NO: 64964 - DNA, 100 bp, Homo sapiens
catggaggccgtgaagaccttcaatagcgaggagctggaggagggaatgatattcagtggtgtttttctcaggtgaaaggagcagtagatgatgatgtag

SEQ ID NO: 64965 - DNA, 101 bp, Homo sapiens
caatttttacaccactgggatgtaacagagataacgaaggaggcccaacttcattcaataaggagcctgacggatttatcccagacggtagaacaaaagga

SEQ ID NO: 64966 - DNA, 78 bp, Homo sapiens
gtcagcctcccgccggccgtctccttaacaccgaacacctctggctcttgctgattgaattcctttggtgcagtttag

SEQ ID NO: 64967 - DNA, 75 bp, Homo sapiens
gtgctcacagcttttgtcagaagtgtattgataaatgggtgcttcaaggatgaccgcatcgtcttctggacttgg

SEQ ID NO: 64968 - DNA, 83 bp, Homo sapiens
ctcttttccagtgtccttcaggagatctgtgatgaggtgtgatgaatgcagactctgctaccattttggctgtttggatcctc

SEQ ID NO: 64969 - DNA, 80 bp, Homo sapiens
aagaaaatgtccacccccatcgaagtgttgtgtaaaggctacccttgttggtggttctgtcagatgaaagcaaagcgagg

SEQ ID NO: 64970 - DNA, 100 bp, Homo sapiens
gggcagccgcggcgcgcccaccccccgcgccgattacgtgtgaaaatgaacttgtgcaaacccaaccccatgctgataatccatctaatactgtcacttc

SEQ ID NO: 64971 - DNA, 100 bp, Homo sapiens
cccactccggagtcgccgctgccgcggggacatggtcctctgcgttcagggctctgtccctgatgaccacccagctgccccctctgcaggatgccggtgc

SEQ ID NO: 64972 - DNA, 82 bp, Homo sapiens
ttggtttcgggatctcggtgctgcagacggcgagacctcctgcacagggcagcagcgttctcggatgctagctactcttttt

SEQ ID NO: 64973 - DNA, 100 bp, Homo sapiens
tggccgccccgagcggagcctggagaaatatggctacacacacctttctgcaggagagctgcttcgtgatgaaaggaagaacccagattcacagtatggt

SEQ ID NO: 64974 - DNA, 75 bp, Homo sapiens
tatggacacagcttctagtgttgctttggatcttgtggaaagtcagatttctggcccccaaagacaaaccaagtg

SEQ ID NO: 64975 - DNA, 75 bp, Homo sapiens
gaggaacaaaggcgacccaagacacccagagagggacaggtggaagttaaacgagctgagcctcgggacagcaag

SEQ ID NO: 64976 - DNA, 98 bp, Homo sapiens
tctgcgaaggccgggacccggttccccggcccacagtgggggtgtgcaaacccgagagaactggagtgatcagcagctggactgtgccttggacctaa

SEQ ID NO: 64977 - DNA, 113 bp, Homo sapiens
caagatggcggcgcccagacaggcctggagcactggacatttgggagcaataaaaataagaagaaaggaaaagccagaaaaatagagaagaaaggaaccatgaagaaacaggc

SEQ ID NO: 64978 - DNA, 51 bp, Homo sapiens
acaaaagaaacgggccccgactggcttcatccctccacccctcatcttcgg

SEQ ID NO: 64979 - DNA, 75 bp, Homo sapiens
ggttaagaaagctatatatgccatggttgagggagactgtgatgagaatgcagtaatagtggccttgtcttcaaa

SEQ ID NO: 64980 - DNA, 75 bp, Homo sapiens
ttgccaggcttcccaacattcttgtctgtggacacagatctggaggacgtggactggggtaggaaaccaccctga

SEQ ID NO: 64981 - DNA, 75 bp, Homo sapiens
tgtactttggacagctgctaggcatgtgtgaccagatcagcttcccgctgggaggctgaggcaggagaatcgctt

SEQ ID NO: 64982 - DNA, 98 bp, Homo sapiens
agtgcaaatcttccaagtctaatagacctaaagccacagtcttcaagagcccacggacaccacctcaacgggctgcgtccaaagaggactctgcggct

SEQ ID NO: 64983 - DNA, 142 bp, Homo sapiens
cgcggacatcgtcaaggtggccatagaatggccgggcgcctaccccaaactcatggaaattgatcagagcactagacaaactgaatggatttcagttagagaatttcaccttgaaagtagcctatatccctgatgaaatggc

SEQ ID NO: 64984 - DNA, 75 bp, Homo sapiens
agcctgcaaagtaaaccctttccccaaggacagtgtctagtgaactagaaaatcacccaatgaatgaagaaggag

SEQ ID NO: 64985 - DNA, 100 bp, Homo sapiens
ctccctatgcctgcttttatggagcatctgcaaagaaggttaaatcaggatggctggataaactctctcctcaagggagaacttcttcaacgaatttcaa

SEQ ID NO: 64986 - DNA, 75 bp, Homo sapiens
aggtggtgtgtgtgtggccgcagcaagaagcagatcaatgagctgagcaatgttcctgttcctgtcatgctaatg

SEQ ID NO: 64987 - DNA, 51 bp, Homo sapiens
ggcgagacggcggcaggacggcggcagcacttacagaatcctgccaacttc

SEQ ID NO: 64988 - DNA, 75 bp, Homo sapiens
accaacacggccggactgcagaagctggcggacattatccagaactggttccgaacatcagcagacccacctccc

SEQ ID NO: 64989 - DNA, 87 bp, Homo sapiens
cgccgccaccaccaccgccgctgccccggctgcctcctccctgagctcttccaccaaagccacctaagccaatgacttcagcagttc

SEQ ID NO: 64990 - DNA, 75 bp, Homo sapiens
gctagaattacctggaacttcatcatcatctacttcacaggaattgccatttgcagttccggcgaggggggagcc

SEQ ID NO: 64991 - DNA, 100 bp, Homo sapiens
ttacctgtttttccagctcacccactgccagcagaggaaagaccacagcaagattctttcattcgtctcctcctagcctgggggaccaggctcgaactga

SEQ ID NO: 64992 - DNA, 98 bp, Homo sapiens
gcctagggggcaatcccctgttccggatggaggcaaaagtgaccgccaataacgacaagaaccgcaccttctccgtctggtacgtccccgaggtgacg

SEQ ID NO: 64993 - DNA, 75 bp, Homo sapiens
tgaagataatgaatgtcgaatgtgactgactagcagcttcattttgaacacgagtacacgagacaggattgagaa

SEQ ID NO: 64994 - DNA, 80 bp, Homo sapiens
gattttttattcgttactatgtggatgttccacaggaagaagtgccattcagattgcaagactggaggaagataaagaag

SEQ ID NO: 64995 - DNA, 89 bp, Homo sapiens
tgtgctgttagaaggttctggtcttgcactaagacacctggatttcattagcatcatgacctacgattttcatggagcctggcgtggga

SEQ ID NO: 64996 - DNA, 100 bp, Homo sapiens
ccccaatcctctcatcttgtcctacctgaagtatgccattagttcccagtattatgatgacacattcccctccatgaaggagcagatggttttcgagaaa

SEQ ID NO: 64997 - DNA, 75 bp, Homo sapiens
cctgaagagggaagacacgcggaaacaggagcatggggaagtgattgactgtgtgcaggagctgagccactccgt

SEQ ID NO: 64998 - DNA, 100 bp, Homo sapiens
ttagttccatcaaacacagaggaatgaccaccatggcagatggcaacagaggatgtcaacaattttttggaggaagggaaaaggccgaggcatcagcgtg

SEQ ID NO: 64999 - DNA, 100 bp, Homo sapiens
gctcgtgttccaaatcatcgcctttctggtgggaggcttgattgatggaacttgctaaggaagaaaagtgtgaatttctgccattcctgtccccacggaa

SEQ ID NO: 65000 - DNA, 90 bp, Homo sapiens
caccgtgtaaccactatgagcagtgcctacaaaaccttaaaggagtgaaacctcggtccggctgggctattgatccctttggacactcac

SEQ ID NO: 65001 - DNA, 98 bp, Homo sapiens
tctctccctcctttaaacagcttctccgggtctcagcatggttacaggaggttccagtggcatcgggaagtgcattgctatcgagtgctataaacaag

SEQ ID NO: 65002 - DNA, 75 bp, Homo sapiens
tctaagcaggttcatgccagcccagaacagagaatcagatttggactgagcaacaaatttgaatctgaattccct

SEQ ID NO: 65003 - DNA, 97 bp, Homo sapiens
tcgcaacgaacgaaataaaccagaacatcgttcttcaaggcgtgcagtatggtgaatatgttaataaccaagctagctccgcaccaactcccttgtc

SEQ ID NO: 65004 - DNA, 98 bp, Homo sapiens
tggctatcgaggcatgcttgacacacatcataaactctgcacattcattctcaaaaacccacctgttggactaaatgctcttccttcagaggattatc

SEQ ID NO: 65005 - DNA, 75 bp, Homo sapiens
gagttcctccgatggccaggaaccttttagtacttccgctgtcggaaaaggtaacagaagatggaactcgaaatc

SEQ ID NO: 65006 - DNA, 73 bp, Homo sapiens
ttctgtgaagaaggcagtacattttgggttaccgacttggagtgtgtgtgggtgaccaaatcattatctttaa

SEQ ID NO: 65007 - DNA, 49 bp, Homo sapiens
ttcatccctaagggtcctaaccggggatatggtttggagtgcctttttc

SEQ ID NO: 65008 - DNA, 75 bp, Homo sapiens
atgagggacctagaccaaagaacagagggtctctgctgctgatgaagctgtgaccaaacgcacccaacccttggc

SEQ ID NO: 65009 - DNA, 75 bp, Homo sapiens
aagaggctggcccaccccttctccttggccgtctttgagggtgtgtgttgtattgatgaatttgataagatggac

SEQ ID NO: 65010 - DNA, 86 bp, Homo sapiens
ggtcagccccccgcccggccagccgccccgtccgggagggtcctatccttcccccaaagctggagcaactctggtcgtgtacaagg

SEQ ID NO: 65011 - DNA, 74 bp, Homo sapiens
tcccgccggccgtctccttaacaccgaacaccgttttccggacagacttgatcacagccatgaagatcccggac

SEQ ID NO: 65012 - DNA, 83 bp, Homo sapiens
tcctgcgggcttagcaggaaagggtgcctaaggttaatttggagtggcccctggagtcagtttcctacaccatccgaggcccc

SEQ ID NO: 65013 - DNA, 75 bp, Homo sapiens
caggagacggaggaccagaactacggcatgccacggcgtatgcctccgaggacggggtcctgaccgaggccatga

SEQ ID NO: 65014 - DNA, 82 bp, Homo sapiens
ttgacctctttggatctgatgatgaggagctctggattaatcgaattacagctgctagccaggaacatggactgaagtatcc

SEQ ID NO: 65015 - DNA, 75 bp, Homo sapiens
tacaagagctgctgcctcagtacaaggagagggaagtaaactttcctgagaatggctttctctctcctgataaac

SEQ ID NO: 65016 - DNA, 100 bp, Homo sapiens
tttcaatgacaccaagttggacgctatgctggaagaatttaagaaagatcctgacattgatgctgccagtgccatgatgcttttgaatactccccctgag

SEQ ID NO: 65017 - DNA, 100 bp, Homo sapiens
ggcaagggcgagatcctggcgagcctgcaggatggcgcggccgagtccccgtacggccacccggcgggttgcaccccttaaggatcttcctgtaaatgat

SEQ ID NO: 65018 - DNA, 74 bp, Homo sapiens
ggagatgccccgcggcagccgcgctcggggctctaagaagacccttttgaggacttctttgggaatcgaagggg

SEQ ID NO: 65019 - DNA, 117 bp, Homo sapiens
tcaggaacagggacagcacctcatcccctggatgggggaccacaagatcctcatcgacaggtgagaagccctaccactgcaactgggacggctgcggctggaagtttgcgcgctcag

SEQ ID NO: 65020 - DNA, 100 bp, Homo sapiens
ttcaaggatctactctgaagatccctgtggtagagagaaaaatcctggatctgtatgctttgagcaaggtcctgagaagtatttctcgttttcattggag

SEQ ID NO: 65021 - DNA, 115 bp, Homo sapiens
tcccatgggcagaggccggacggttctggaagcgggctgagggccgtttgggggggacacagcgattgccacgcgccattggaatgtccctggccaaggagctcatattctctgc

SEQ ID NO: 65022 - DNA, 114 bp, Homo sapiens
gattcccatggtaacagaagagtttgtgaaaccatcacaggttgtggccatggaacagaggatgaagagacaccttctgaccagaatgtttctgtaggagtgtcacagtcaaag

SEQ ID NO: 65023 - DNA, 83 bp, Homo sapiens
caagctttgtctccttcgacttggagtctttgtccaggacgcagcctcccgcgacgatgcccctcaacgttagcttcaccaac

SEQ ID NO: 65024 - DNA, 89 bp, Homo sapiens
tgtatctcaacaccctgagtgcggatttctgctatgatgacagatgtgtatatctcatgattgatatggagaaactagtcatgggccaa

SEQ ID NO: 65025 - DNA, 100 bp, Homo sapiens
aataatgacaatctcctcagggaaggggcagcacacaaaccagtccagctacgggggcccagccagccagcagctgagtgggggttacggaggcggctac

SEQ ID NO: 65026 - DNA, 98 bp, Homo sapiens
gagcactcagtcccggctggacaatgtgatgaagaaacttgcaaaagtatctcatatgaccagtggggtgagcccctccagactccgaataggagatc

SEQ ID NO: 65027 - DNA, 74 bp, Homo sapiens
gaaacttcatgacaacctcattatttctgatctagagacgagtccctgtggcccatcgaggccagaaacgcagc

SEQ ID NO: 65028 - DNA, 90 bp, Homo sapiens
tgcctgccaaggattctgcctggccctgggaagagaagcctagatatctggacttgtcagtcacatctgtaacctgctcactgaaactgc

SEQ ID NO: 65029 - DNA, 90 bp, Homo sapiens
cgcagtggtcgcttcttctccttgccctagaggtggtagatgctttctgcagtcgctacccccatgagaccttagagttcttttgatcct

SEQ ID NO: 65030 - DNA, 73 bp, Homo sapiens
gggacatcaactttgtcttcactgggttctctgtgaatggcaagaatgtactcaagactgatcttctaagttc

SEQ ID NO: 65031 - DNA, 98 bp, Homo sapiens
tttgagctacttcgggtacttggtaaagggggctatggaaagggtccacatatagcctcagttacattagctgcttatgaatgcaattcagttaattt

SEQ ID NO: 65032 - DNA, 100 bp, Homo sapiens
atgatttatctgggttacacattctgtggctggattgtcttaggaccataccatgacaaggttgcagtattttacagagctagcccaaggcacaagatga

SEQ ID NO: 65033 - DNA, 130 bp, Homo sapiens
aggatgtgatgccagaggtcaacaaggttctggacaagatgaagtctttctgccagctgctggagccagttctgcttctcggcaaggagcgatttgctggtgtagacatccgtgtccgtgtaaagggtgg

SEQ ID NO: 65034 - DNA, 75 bp, Homo sapiens
aagcacacactatggcgctgaaacggattaataaggttgctgcagcaactggtcacacagtagtgttggtagacc

SEQ ID NO: 65035 - DNA, 100 bp, Homo sapiens
aagagtggaaatggagaggtgacatttggaaagaccacagcaagattctttcattcgtctcctcctagcctgggggaccaggctcgaactgaccctggac

SEQ ID NO: 65036 - DNA, 87 bp, Homo sapiens
aacttggaaagagcaagatcggcagccctaaaaccaaactagagtcagaacgaatactagcatcagtggggaagaaacctccccagg

SEQ ID NO: 65037 - DNA, 100 bp, Homo sapiens
ccccaggtgtaagcgcagaaagcaggcgaacccgcggcgcaataacgatcgtcagtatttaaacagatcacatcatgcgtgagtacaagctagtggtcct

SEQ ID NO: 65038 - DNA, 97 bp, Homo sapiens
aacgacttaaggattcagagaaagagaactctttgttaaagaagagaataagatttttggaagaaaagctctatggaaggcgcgccccctgggagga

SEQ ID NO: 65039 - DNA, 101 bp, Homo sapiens
gccacgatattttgatggctactatgctgaacggtgcagcagtgatggatgcagctcttctgttgataggtcataactccatgcaggaagctcatcttgtg

SEQ ID NO: 65040 - DNA, 100 bp, Homo sapiens
aagagagcaacgccagagcccaggtgcccagaggactttcttccagcttctgctgtccttctttgtggagagcaaggttcaaaatcaaaggaagcccaga

SEQ ID NO: 65041 - DNA, 83 bp, Homo sapiens
tcagcaggctccgggctgaagattgcttctcttctctcctccaagaatgaagaagcagtacgacgtctcatctgggaaaagaa

SEQ ID NO: 65042 - DNA, 82 bp, Homo sapiens
agaaaacggagacgcaggagaagaacaccctgccgaccaaagagagtgtgagatcaaccatgagttccgttgcagttttgac

SEQ ID NO: 65043 - DNA, 87 bp, Homo sapiens
aagacagtgacgacaaaacaccagatgatgaccctgagcaaggaaaatctgaggatgaagaagatgactttatgtgtaagaaggcgg

SEQ ID NO: 65044 - DNA, 98 bp, Homo sapiens
gctgaggcagcgcggccgcagcagccctaacccttaggagaaatcttgagagtggacagcaattgtgaagatcgccagagagttctgtgtttcatcac

SEQ ID NO: 65045 - DNA, 50 bp, Homo sapiens
caggtgatttccttaagaaaaagaaaaagtctcacggctggaaacagagt

SEQ ID NO: 65046 - DNA, 100 bp, Homo sapiens
ctgaaattaagtgaggaattgagtggtggtagattgaaggtatggatggcagaacagaaaatatcatatgataagaagaaacaagaagaattgatgcagc

SEQ ID NO: 65047 - DNA, 87 bp, Homo sapiens
actcggacaagtacttcgacgaacactacgagtaccggtatctctggagacaaagtagagatagaccctgttacgaatcagaaagcc

SEQ ID NO: 65048 - DNA, 87 bp, Homo sapiens
actactatggaaaattcatgcctgtaggtttaattgcaggtgccagaatgtgacagtgatgataacatgggtgccaaaaatacttca

SEQ ID NO: 65049 - DNA, 75 bp, Homo sapiens
gaaaatgtccatggaggaattttagctgatgatatgggtttgacctgtgaccgcatcaagcagtcagcagctggc

SEQ ID NO: 65050 - DNA, 88 bp, Homo sapiens
gggatcgtgaccgagaccgtgaccgagagcgtgaccgagagcgcgaatatcgtcatcgttagaagtaatagtagacgtcgccatgaaa

SEQ ID NO: 65051 - DNA, 100 bp, Homo sapiens
ctcgcatcaggtggccgggcacatgtacgggaaggacaaagtgggaagttcatgatttgttaaaagactatgacttaaaatattgttatgtggacagaaa

SEQ ID NO: 65052 - DNA, 90 bp, Homo sapiens
gcagaggaaagcgggctggcaggcgagggagcccgcgtcggctgagagcccacaggcccccacagtgcaccgtccaggtgaggttagagc

SEQ ID NO: 65053 - DNA, 98 bp, Homo sapiens
acgaattctcgcgtcgtctcgcgagagtccaagttaaagaacatggcgacgtctaatctgttaaaggtccttctatatgatccactctttgactggac

SEQ ID NO: 65054 - DNA, 98 bp, Homo sapiens
cctggtgatgatctaccatcgggaattgaagacataaccgatcctgcaaagtgacaaatggcctacagctgtgagagcaaatggacatctcctcctga

SEQ ID NO: 65055 - DNA, 90 bp, Homo sapiens
tactactcggagaagttggtgttccgaggccacgagtgggcaggagcttgcagatttgaagaacccaagtgattcagcagtgcacagccc

SEQ ID NO: 65056 - DNA, 75 bp, Homo sapiens
caaatcccctgctcagggtcttcatccagaaacgagatacttgccagaactaatacagctgatgaaatacctgac

SEQ ID NO: 65057 - DNA, 100 bp, Homo sapiens
agaagctttatacgctgcacagcgtgaagcagccagggcagcaaagcagcgaaagctcttggagacccacctggcccgagtggaagctatgctgaatgac

SEQ ID NO: 65058 - DNA, 100 bp, Homo sapiens
tacagccgggccctggaaggggaaggaatcgtggagcaggtcacagagatgcggcggaccctgacgcctgccagctccccagtgtcctcgcccagcaagc

SEQ ID NO: 65059 - DNA, 100 bp, Homo sapiens
ggagccagcgtgggaggccgctgccgtcgcgcgccttgcaggttcccagtgcccccgacaagcccctgctggtgtctccatctcctgccaagcatcctcc

SEQ ID NO: 65060 - DNA, 96 bp, Homo sapiens
ctggcctgcagcttccagcacagctaccgcctgctggtgcctgggatttccacaagatcaaattcgattgtggcccatgcaagcaaggagtaatgg

SEQ ID NO: 65061 - DNA, 100 bp, Homo sapiens
cggcgcacgcaccacgacggcgccatcaccgagcgcttgatgtgcgcggagagcaatcgccgggacagctgcaaggagctggtgactgccctcatgtgtg

SEQ ID NO: 65062 - DNA, 75 bp, Homo sapiens
atacatggcttgcaaaaagtaaaccacgatcgttatgctgagagtacgagacccaatctagtgcagaagccaaat

SEQ ID NO: 65063 - DNA, 51 bp, Homo sapiens
tggaacagcagcatcattgtcaaagagacttcagaacccactcctgagaac

SEQ ID NO: 65064 - DNA, 74 bp, Homo sapiens
gctactgcctgggggctgaggatgacaaaaaagccttcatagctggcagagaggctgatgacatcgtgaactgg

SEQ ID NO: 65065 - DNA, 100 bp, Homo sapiens
agactctcaccagtgcgcatgcgtggctctccggcaccgagctgcggtgcaaccctgggcagtttgcgtgtcgcagcggcaccatccagtgcatccccct

SEQ ID NO: 65066 - DNA, 120 bp, Homo sapiens
agaggctgagttctatgatcctttaaaagagaaatggattcctattgcaaacatgattaaagtattattttggcgacttcaatttgccacgggacaagtttctaaaggaacagataaaac

SEQ ID NO: 65067 - DNA, 100 bp, Homo sapiens
cgaatgcaggaagaccgtgatgggagctgcagcacagtcgggggtgtaggttatgggggagcagatgtctcaagtattagatgccatgtttgaaaaattg

SEQ ID NO: 65068 - DNA, 106 bp, Homo sapiens
ggaccgggccatctccgggggctccattcagattggccgcgtaatccaggttgctgctgggagcagcaacctcaagagagtgaccttggagctgggggggaagagc

SEQ ID NO: 65069 - DNA, 75 bp, Homo sapiens
gacggggtggagcccatggaatcggtcctggaggacagtgtgaagcctcagtttaggtcatctggtggttcagaa

SEQ ID NO: 65070 - DNA, 90 bp, Homo sapiens
aacttcttatccatcccatctcttggacagatgatgccagttaattactttgaatggcggcgactggcggcgcgatggacctgaccgggc

SEQ ID NO: 65071 - DNA, 100 bp, Homo sapiens
catgatcaactggaggctcagaagctggaatatcatcaggccaagaagacgctggagggaggctgttaggagggactctgagcttcacacctgtctgctg

SEQ ID NO: 65072 - DNA, 51 bp, Homo sapiens
ctggcagtgacgaggacgaagtgtccgaggaattcattgaagagttgctgt

SEQ ID NO: 65073 - DNA, 90 bp, Homo sapiens
cttctctgaggcggcgagagatggtcaggtctggagctcgaccgggccagctcctgcccctcctaaagctgaagccaaagcgaaggcttt

SEQ ID NO: 65074 - DNA, 75 bp, Homo sapiens
cggaggtcgataagctggaactgatggttcgactagtgatagtggatggtattgcttttccatttcgtcatgacc

SEQ ID NO: 65075 - DNA, 82 bp, Homo sapiens
ccctaacgcacaataatatggctccgatgggctcaaagatgactttgggaaattgctgctggctgaggccctcctggagcag

SEQ ID NO: 65076 - DNA, 75 bp, Homo sapiens
cagattcgcagtggtcgcttcttctccttgaaaggagaagatgagtatgccaacgttgatgccattgttgtatca

SEQ ID NO: 65077 - DNA, 101 bp, Homo sapiens
gccgtggcatgtcgatttgtccttcactacagagatggggtttccccatgttacccaggctggtctccaactcctgagctcaagcaatgcatccatcttgg

SEQ ID NO: 65078 - DNA, 82 bp, Homo sapiens
gagaccttggctggtcagagggctgtgaagacgcacggtgccaggaccaagtatctgacgaaggggaggaccaggctggcga

SEQ ID NO: 65079 - DNA, 100 bp, Homo sapiens
cagaaggactgggatgatacaccttttccacagggaattgagttggagccctggtattccttgaacatgcatacctttcccagcgtgagggacatggacc

SEQ ID NO: 65080 - DNA, 98 bp, Homo sapiens
ctcaagagaagagcccccaggagaaaagccagtattgcttgtgctcctaacaacctgtctcttggtctattacaatggctaccatggagacacctctg

SEQ ID NO: 65081 - DNA, 90 bp, Homo sapiens
gtttgaagcattttaatggaaccctaggctggatcccaagtgataattccatctgtgtgcaagaagagaagatggcgaattagaagatgg

SEQ ID NO: 65082 - DNA, 50 bp, Homo sapiens
aaagagtcaacagcagtggcaacaggcactgggtgcaagttcctgtgaaa

SEQ ID NO: 65083 - DNA, 90 bp, Homo sapiens
cgcctgtgcagccctcccaggtggagtacacggcagactgcttgcccacaggtgacgttcccatggatggcatgtccgtgtctgacctgg

SEQ ID NO: 65084 - DNA, 82 bp, Homo sapiens
cgaggaagagttgtggcgaggcagatcctgccccgtggccgcggccgtctcgtaggcatctgcatctgggaccgacctcctg

SEQ ID NO: 65085 - DNA, 102 bp, Homo sapiens
cgccgggggccggggagcgccaggaaattgaagttggtggtggtcggaaagctatcataatctttgttcccgttcctcaactgaaatctttccagaaaatcc

SEQ ID NO: 65086 - DNA, 98 bp, Homo sapiens
ggcgcagctggcggagctggagctggagctctcggaggcacctgcagcagcatgagagtggtgtagaaggtgagagctgctactaccactgcgttctg

SEQ ID NO: 65087 - DNA, 75 bp, Homo sapiens
agcccgaaaagaagattactctgcaacagctaaagtttttggctttcacccccaaccagtgaccaaagacttgac

SEQ ID NO: 65088 - DNA, 100 bp, Homo sapiens
cgacgacgaggaagaggaggtttctgaggtaccaaccaagaagctgaagaaatatgagaaagaatatcagacaatgcgagagagtcagctgcaacaggaa

SEQ ID NO: 65089 - DNA, 75 bp, Homo sapiens
cttggatcaacacctttaacttcaagaagacaggtatggcatttcaaatatagatacaaccattgaaggaacgtc

SEQ ID NO: 65090 - DNA, 100 bp, Homo sapiens
cagagactgaagaggactcaggagcaaatcagtaatagtatggaagagttggagaagaatcatgataatctacttactggtgcacaaaatgaatttaaaa

SEQ ID NO: 65091 - DNA, 87 bp, Homo sapiens
gactgcagccgcgagctcctggaggcggcgggatggaggcggcggccggtggagcatgaccccgcccatggtgaacgcctactactc

SEQ ID NO: 65092 - DNA, 74 bp, Homo sapiens
ccagacatggggaacgcggcgaccgccaagaaaggcagcgaggtggagagcgaatacagaaactgcagccatga

SEQ ID NO: 65093 - DNA, 100 bp, Homo sapiens
ccacattttacagaaagcacagtgtttccaagatgaccttgaatgatgccatgaggaacaaggcaaggctgtcaattacaggaagtactggagaaaatgg

SEQ ID NO: 65094 - DNA, 121 bp, Homo sapiens
agaaaatcggtgaagagaggttttgaattcacgcttatggtagtggagttcagatcattcaggatcaacaactccatcatctggtcaagaaaccttgtctttagctgtgggttcttcctca

SEQ ID NO: 65095 - DNA, 96 bp, Homo sapiens
ggccggctgaccaggaacctgggcgagcagcggcgggggcccgagggacaatgcagatcttcgtgaagactctgactggtaagaccatcaccctcg

SEQ ID NO: 65096 - DNA, 50 bp, Homo sapiens
ccagcctcttctgaaacactggggacagaatgacttggaagataacggag

SEQ ID NO: 65097 - DNA, 78 bp, Homo sapiens
tgagaggggctgcggccggagcgggcggctgagacaaaggcgacggccaagatgttcataaatataaagagcatctta

SEQ ID NO: 65098 - DNA, 92 bp, Homo sapiens
atccagcaccatggggaagcgggacaatcgggtgcggagctggagtttgttcagatcatcatcatcgtggtggtgatgatggtgatggtggt

SEQ ID NO: 65099 - DNA, 74 bp, Homo sapiens
accctggtggcctttccctccagctctgtctatcctaccaaggagccaaggcaaagagggaccactgtgctcat

SEQ ID NO: 65100 - DNA, 83 bp, Homo sapiens
ctcgcggaagcagaggtttgggcttcctgcctgacacagctcacttcaagaagtgcacaatgtcagaacgtggaattaagtgg

SEQ ID NO: 65101 - DNA, 76 bp, Homo sapiens
aagaacaagcctatcagcaagaaggaaatgattcagaggtccaaacggcaggcagtggttaaaggttcccttccac

SEQ ID NO: 65102 - DNA, 96 bp, Homo sapiens
cgcggacctccctgcgaccgtcgcggaccatgggcgacaaagggacccgctctacattaatcatactcctccaccactgtccaagagtaaggagag

SEQ ID NO: 65103 - DNA, 75 bp, Homo sapiens
attctggattccagcagtatcctcaagaactgccttctgttgaagaactcactattattctgcctgaagatattg

SEQ ID NO: 65104 - DNA, 100 bp, Homo sapiens
ccatgtcagccttcccagtagctgggaccacaggagtgtcaccttctggaccaggtgtagtggtcatgcagctgaatgtccctaatggaccccagccccc

SEQ ID NO: 65105 - DNA, 74 bp, Homo sapiens
cagtcggctttgattataaaggagaagtggagaagcacacatctcagaaagagatcaatggcttttcaaaagca

SEQ ID NO: 65106 - DNA, 82 bp, Homo sapiens
ttgtttgcacggagcagcaaacgcagagacaaaagaaacgggccccgactgtagtggccacagaagaagtagttactgcaga

SEQ ID NO: 65107 - DNA, 90 bp, Homo sapiens
ctcagccgctgtgggctcctggggagatggaggggccggggctgggctcgcagtggatatgctgctgatgaaatcactcactgcatacgg

SEQ ID NO: 65108 - DNA, 96 bp, Homo sapiens
aggagaaatggaaaaacaaaaatgaatgaatcaagagtgatttgttaatagtcctttgtcatggataaaaggcttgaaatggggggaatacgtggg

SEQ ID NO: 65109 - DNA, 100 bp, Homo sapiens
gaagactctcccttcccttcctttgcccagggcggcgactggcggcgcgatggacctgaccgggctcctgctggacgaagaaggcaccttctccctcgcc

SEQ ID NO: 65110 - DNA, 75 bp, Homo sapiens
acggcgggcgtcgtcaccatggcagcatccgctggaggcccagaatccagcaactatcacaagaatactccttag

SEQ ID NO: 65111 - DNA, 100 bp, Homo sapiens
ggcatctagactttggtttacatacaggaaaaactttccagccattggaaatagctcgtctgctggccctggaggaggctaccctgagtaccgatctgca

SEQ ID NO: 65112 - DNA, 82 bp, Homo sapiens
gctccaagtacaacgaagccaccggcgtgtgccccgacggcgacgaacttcccaagtaagaagcggaagaggagccgctgga

SEQ ID NO: 65113 - DNA, 100 bp, Homo sapiens
ttcctggcatacacaaagaccccccagtacaaggccagcctgcaggagctgctgggccaggagaagggacccaagtctgaaaagaagaaacgcaggcggg

SEQ ID NO: 65114 - DNA, 97 bp, Homo sapiens
ggcgaagctggccgagcaggctgagcgatacgacgagtgatcagcagctggactgtgccttggacctaatgaggcgcctgcctccccagcaaatcga

SEQ ID NO: 65115 - DNA, 50 bp, Homo sapiens
gagtcaacagcagtggcaacaggagtccaaaactacttacctggaagacc

SEQ ID NO: 65116 - DNA, 75 bp, Homo sapiens
caggagttcatctacccggagaagcaggagccctactcggcagatggccaccatgtctgggagatggaagcgaaa

SEQ ID NO: 65117 - DNA, 89 bp, Homo sapiens
cttggaacgccgacctgaaaccatctctgagcccaagacctagaaattgacaatggcccttcagctatgctaggtctataatgggaagt

SEQ ID NO: 65118 - DNA, 105 bp, Homo sapiens
tggcggatgccctgcagtacctgcagaaggtctctggagacatcttcagcaggacctgaaggagaagaaggagaaggtggaggagaaggcaagccggaaagagcg

SEQ ID NO: 65119 - DNA, 85 bp, Homo sapiens
cttatgaatttgcaaaacgacagagcatattggttctgtgggatattaataaggtaatcaaatgcaaagcagctgtgctatggga

SEQ ID NO: 65120 - DNA, 100 bp, Homo sapiens
cctgcagtcgcctccaacacccgctgctgcccgcccgctgcctgcctgcctggcatctctctctcccggagctgacatggacccaaatcctcgggccgcc

SEQ ID NO: 65121 - DNA, 98 bp, Homo sapiens
cttcagcaaaggcttggagaagtccagggcgacaacaaggtgtcatggagaaactccagctgggcccagagattctgcagcgggaaaatccaaggctt

SEQ ID NO: 65122 - DNA, 97 bp, Homo sapiens
cctgtactttgtggacttgcaggatgacttagacgacttttgaagaaaacaggtctgaaacaaggtcttacccccagctgcttctgaacacagtgac

SEQ ID NO: 65123 - DNA, 100 bp, Homo sapiens
aaatgtttgacgacactgatggtttgttggagcagtgccagtcctttccaaagaatgtgcatcaggggagagaggccgccgcatgagtcaaatgaagacc

SEQ ID NO: 65124 - DNA, 50 bp, Homo sapiens
gtcggcgtaactatcgcctgacaggaacaaaatccagtctcatagcagag

SEQ ID NO: 65125 - DNA, 50 bp, Homo sapiens
ccaggagaagccgcccaaagaactggtagctacagcaagctgggtagcag

SEQ ID NO: 65126 - DNA, 97 bp, Homo sapiens
agggatatgacacgaagaacactcgccaggacaactccatccttaagtttgttagctttaggactgaagcattttgaagggactgagtttcttaacc

SEQ ID NO: 65127 - DNA, 83 bp, Homo sapiens
ggcactctgcccttccagagcaagcatggagcaacaggatcagagcatgaaggaagggaaatatggctacacacacctttctg

SEQ ID NO: 65128 - DNA, 98 bp, Homo sapiens
cggcgtggagcagcatgtacgccaaggggggcaagggttcggccgtgccctccgacagccaggcccgcgagaaacgcaaacatgcagatctttgtgaa

SEQ ID NO: 65129 - DNA, 119 bp, Homo sapiens
ggacccgctgcccgcggctgcagtcggggcggcagctgaggcggaggctgacgaggaggcggatcccccggcgtcaggcagttgtgaaaaacttcaggacaaaaatgtttcatttaagg

SEQ ID NO: 65130 - DNA, 98 bp, Homo sapiens
ttctgacgacatgactttaaaggatgaagatttgataaagtggaaggcactgtttgaggaagtccctgagttactcactgaggcagagaagaaggaat

SEQ ID NO: 65131 - DNA, 100 bp, Homo sapiens
caggccgtgcgccggcctttggtcgcctccgtgggcctcaatgacaatgcagatcttcgtgaagactctgactggtaagaccatcaccctcgaggttgag

SEQ ID NO: 65132 - DNA, 51 bp, Homo sapiens
agaagtggagaagaaatcagtcagccgcagcggaagtgaccgtggtggctt

SEQ ID NO: 65133 - DNA, 97 bp, Homo sapiens
ttagcctcctaagtagctgggaccacaggtttcagagcagcgatggagaaattaaatacttgcaattagcagaggaactgattcgtcctgagagaaa

SEQ ID NO: 65134 - DNA, 97 bp, Homo sapiens
ctcactgacttcaagaatgaagccgcagaccctcgcggttcgatacaagaggctgttttcctagcgtggcttgctgcctttggtaagaacatgtcgt

SEQ ID NO: 65135 - DNA, 97 bp, Homo sapiens
gtgacatcaagaggaagcggaaaccagtggccacagcatctttgtctagccccagtgcagttggccagtcagtgctgaaagatgtaagcaaagtgaa

SEQ ID NO: 65136 - DNA, 100 bp, Homo sapiens
tcctgcggaaccgctggctgtcagacagcttcaaggagacgggtggctacaacctccgcgccctggctgaaggcgtcagtgcttcgctccacacccttct

SEQ ID NO: 65137 - DNA, 76 bp, Homo sapiens
ccagctccgtctcggcggcggcggggaacttaggctgcggaactatgtcccggaggatgaggacctgaagaagagg

SEQ ID NO: 65138 - DNA, 100 bp, Homo sapiens
ctcatggtgacgtgacttagaaggtggtgcagaggtactttgacccagccaacggcaagttcagcaagtcagccaccagccccgaagggaagaagctgcc

SEQ ID NO: 65139 - DNA, 90 bp, Homo sapiens
gcggcctggcggcttccaggcgcactaccgcgaatctccctggggtgccctccccaggcagcaatgccaggatgcctgtgtccacctccc

SEQ ID NO: 65140 - DNA, 97 bp, Homo sapiens
atcggcacgtcctgttacaccaaaagtggcatgatcctttgcagaaatgactacattaggtttgtctacagattttgagcgttcgaagttgacccct

SEQ ID NO: 65141 - DNA, 96 bp, Homo sapiens
acgggacgcggaactggtgtaccctggtggacgtgcacccagaggaccaggcggcgggtgtgaaggagctgtgtctgctgctgcttaaccagtccc

SEQ ID NO: 65142 - DNA, 90 bp, Homo sapiens
cttgtggagccggagctgggcgcggattcgccgaggcaccgaggcactcagaggagtgtccatctatggaatttggttttatgataagga

SEQ ID NO: 65143 - DNA, 90 bp, Homo sapiens
ggaatgcacatctgtgaagatgctgtaaaaagattgaaagcttgactgtcatgtggcatgggtctctgcccaagctcgtaatgagactat

SEQ ID NO: 65144 - DNA, 100 bp, Homo sapiens
aaaccggtagcgcttgcagcatgggtgtgggccgaagatatgctcatgtggtgttgaggaaagcagacattgacctcaccaagagggcgggagaactcac

SEQ ID NO: 65145 - DNA, 50 bp, Homo sapiens
ctccgagcccgccgccacatcctctgagccatggacgcatcatatgatgg

SEQ ID NO: 65146 - DNA, 100 bp, Homo sapiens
cggcccttgttaactacaacagaccatctggttgaaaggattgtagacaagaggaagaacaagaaaggaaaatgggagtatcttatccgatggaaaggct

SEQ ID NO: 65147 - DNA, 74 bp, Homo sapiens
agccgagtcactactgcctgcctgcctgcctgctacggcctgagacctgggaggaagctggagaaaagatgccc

SEQ ID NO: 65148 - DNA, 100 bp, Homo sapiens
cggcagctccggcgcctggtagcgagaggcgggttccggagatcccggcctcacttcgtcccactgtggttaggggccgccatccagtcacagttggacg

SEQ ID NO: 65149 - DNA, 100 bp, Homo sapiens
ggcaaattgtggctctttggaaagaagccaaaggatgccacttcctccagtgcagcccagccggaggtaatagttgtccctctctacctggttaatactg

SEQ ID NO: 65150 - DNA, 51 bp, Homo sapiens
aggttcacaagcaggtggttgagagccttatgtttgatcatcggccaaggt

SEQ ID NO: 65151 - DNA, 75 bp, Homo sapiens
atgaaatgctgactaaggaacaagctattgacctgaaaagtggttctggaaaagtgtaccaaggccctgcaaaag

SEQ ID NO: 65152 - DNA, 123 bp, Homo sapiens
cagcggtctttcgagtggtttgtgagcctgctgactaaactggagatggaccaggccgaggaggctcaatacggctgagcagaaaaccaggaaatggatggactccacctccgcagccacgcc

SEQ ID NO: 65153 - DNA, 83 bp, Homo sapiens
cgctgctgctgctgctcggagtcttcgccgccgccgccgcggccccgccaggtgcacattcaggttcccgagcacaaacatca

SEQ ID NO: 65154 - DNA, 83 bp, Homo sapiens
aaggaagcttgtgagaagtggaagaggcccttcagcaaaccagtccagctacgggggcccagccagccagcagctgagtgggg

SEQ ID NO: 65155 - DNA, 82 bp, Homo sapiens
tgaaaagaccagagaaagaattgaacggaggaagtccacaaatgaaggggacaccccattttaaggaagaacagtgtgctcc

SEQ ID NO: 65156 - DNA, 80 bp, Homo sapiens
agccgatccagcctgcggagcctgtggggcagggttacgactcactgattaaaaagagggactttttcaaatactttgca

SEQ ID NO: 65157 - DNA, 90 bp, Homo sapiens
gtttatataactcaagttgtttggctaaattcttcagtatgccaccacgggctgttccctgaccctgcaccatacggagaaaccagaaca

SEQ ID NO: 65158 - DNA, 100 bp, Homo sapiens
ctgccccggcgcaccgactggaccgggaaggagcatcccaggacctaccagaatctgggggacttgatctcatcttcatgccaggccttgggtttgacaa

SEQ ID NO: 65159 - DNA, 90 bp, Homo sapiens
gtggagatatggcgcaactgcggcgcctatggcattgctggttctaccaacgtgacaggtgatcaagttaagaagctggacgtcctctcc

SEQ ID NO: 65160 - DNA, 75 bp, Homo sapiens
gagaaagatctcattgtagttgatctgacacaaagcaaagcactagaatgctgcagggttggcctttggcctaaa

SEQ ID NO: 65161 - DNA, 75 bp, Homo sapiens
ggattctcgacctgctaacagaactggaccttttcggatagaactggaggaacctccacttgttttggctgctgc

SEQ ID NO: 65162 - DNA, 76 bp, Homo sapiens
aacaagccagccaatgcagtcctgcacaaagctggagttggccacggccaagaacgacatgaaccggcacctgcac

SEQ ID NO: 65163 - DNA, 82 bp, Homo sapiens
tgtcttttcagggaaactcatggaaacctattgttcgcagaaacacacaagacatgccttgaattggaacgctacctacaga

SEQ ID NO: 65164 - DNA, 100 bp, Homo sapiens
caacaccctgatctggcatggacatctggtgaatgagcaacaagaaagcagacccctcctgagtccctccatcgatgactttctctgtgaaaccaaatcg

SEQ ID NO: 65165 - DNA, 75 bp, Homo sapiens
aaggagagaaaatggcgtccacggggggatatgagactttctactcggaatatcctgagtgttgcgtggatgtaa

SEQ ID NO: 65166 - DNA, 101 bp, Homo sapiens
aggtgaacaggtgaccataactctgccaaatatagaatcttcaggtcctgtgttgatgttaatgctggtcatctgtgcctgaattccaacgggaggagagt

SEQ ID NO: 65167 - DNA, 100 bp, Homo sapiens
ccagaggcgagccctggtggaggaagaggaccatgcagtgctggaggccgagaggcagaagatgtcagcccttgtgcgagggctgcagagggagctggag

SEQ ID NO: 65168 - DNA, 75 bp, Homo sapiens
ggaagccgtgctgcagctcacgcccgaggtgcagctggccatcgagcagaaatggtggagtcaatgaagaaagta

SEQ ID NO: 65169 - DNA, 98 bp, Homo sapiens
cttcctcctcctcggcctcacctaactctcaggagccttctccgcagttggcttcctcggtagcttccacacggagcatgcccgagagcctggacagc

SEQ ID NO: 65170 - DNA, 74 bp, Homo sapiens
gctggcagccgcggatctcaccgccgctcaggtttgtgaatagcacaatggaagaagctggactttgtgggtta

SEQ ID NO: 65171 - DNA, 75 bp, Homo sapiens
atagagatgtgatgttggagaactacagaaacctcgtctccctggcttattcagctgattctgaatcatcttaca

SEQ ID NO: 65172 - DNA, 83 bp, Homo sapiens
gcgacggagtctacgccatcgtggccacgcttctcatcctggacatctgggcccctctgaagcggtccaggatcctgcacatg

SEQ ID NO: 65173 - DNA, 90 bp, Homo sapiens
gtgaggcgccgcccgggtgtccccgcggcgcaggaggcggtggagcgcagagcgggcgagcgcggactaaaatgtagcagttgtgaacct

SEQ ID NO: 65174 - DNA, 100 bp, Homo sapiens
ctctgtacctcctgcgccgacacgctgcgctaccaggccaacaactgccccatctgccggctgccaacagctgcgaatgcggatcaagcttacatataat

SEQ ID NO: 65175 - DNA, 100 bp, Homo sapiens
gcagtcagagagactttcgaaagaatatgatcaactcctgaaagaacactctgaacttcagtcactctccagttcttcaagaaatattcaacaaatgttg

SEQ ID NO: 65176 - DNA, 75 bp, Homo sapiens
ctttattctgtgggctctgattctccaatgggaataccaagggcaagggcatcatagagcctccagaggggacaa

SEQ ID NO: 65177 - DNA, 50 bp, Homo sapiens
tcggaaaccccgcctcttacagtcacgagtggctgtaaacctagctgaag

SEQ ID NO: 65178 - DNA, 90 bp, Homo sapiens
gagcttctttcttctggcatcattaacggaccttttaccatgaatagttctactccttctacagtggctgagaaaccctggcccccagca

SEQ ID NO: 65179 - DNA, 80 bp, Homo sapiens
aaggattccaagtaactcttatttggtcccgttcaagaagttcttccagttcgcagtcaagatctcgttccagttccaga

SEQ ID NO: 65180 - DNA, 75 bp, Homo sapiens
cgcgcccgtggccgctgccgcctccgccccaggtacagcagggaagaactggaaactcagagaaagaaactgccc

SEQ ID NO: 65181 - DNA, 100 bp, Homo sapiens
aggcccaggcccgaggggtgaggcccaggccactccggagcgcgcgctgttcccgcgaagcgagtcgccgtctcgtacggaaggagagttttacatggaa

SEQ ID NO: 65182 - DNA, 48 bp, Homo sapiens
tttctccaaaatttggaaactatttgctttcccaacgagcctgctgca

SEQ ID NO: 65183 - DNA, 74 bp, Homo sapiens
cgcgcagccctcatcgcaactgggcccgcgcgcagggcgtggtcgagttctctctgtgtctgctgtttgccaag

SEQ ID NO: 65184 - DNA, 100 bp, Homo sapiens
acgaggccacccagtcccacttcaaacattcgtctcggaaaccccgcctcttacagtcacgagaggcacagttgaatgctgttgatgctttgattgactc

SEQ ID NO: 65185 - DNA, 100 bp, Homo sapiens
ctgcttgatattggcggtggctttcctggatctgaggatgtgaaacttaaatttgaagaggtggtctgtttttctggggggccaccaacacctcccgtga

SEQ ID NO: 65186 - DNA, 107 bp, Homo sapiens
acaaaacggcactcacgtggcatcagtccccactgcggtccacggccaggtgaacaatggcctctgtgtcctttgtcccaatagtaacaactccctcctggcctttc

SEQ ID NO: 65187 - DNA, 99 bp, Homo sapiens
aggaccttaaagacaaggccaaagagactgcagatgccatcactaaagaagatttccacatggaagaggcactggattggcctggagtatacttgttac

SEQ ID NO: 65188 - DNA, 100 bp, Homo sapiens
tctggtgatgatagatacaatcagtttcacataaggtactatataaatctgtgccagaaaatatataaagggcccctgggctgctctgaaagggccagca

SEQ ID NO: 65189 - DNA, 100 bp, Homo sapiens
gttcagtataatcctacctatgagaccatgtttgctcctgagttatctgatgatggccgctatgtcttgttatcaataagggaaggatgtgatccagtaa

SEQ ID NO: 65190 - DNA, 100 bp, Homo sapiens
ttaaaagatccaaaaaatgagacttctagcaaagattatttgccttatgttatgggctatttgtgtagcagaagttcaagcaagtttgctgctgttggat

SEQ ID NO: 65191 - DNA, 100 bp, Homo sapiens
atacaccatacatggtacagccagagtaccgaatctatgagatgaacaagagactgcagtctcgcacagaggtcaactttgtagtgtgccaactctttgc

SEQ ID NO: 65192 - DNA, 100 bp, Homo sapiens
cgcgcctccatctgggccatggatggacatctcaacagtgagcatgcgctggacgatagaagtacagcccaatgtagagtacaaatgcaggttgtacagc

SEQ ID NO: 65193 - DNA, 74 bp, Homo sapiens
tgtgtcaaaaagaaataactcagctgaagcatcaggaactgcaagcacatgttgaccagataactgaaatggca

SEQ ID NO: 65194 - DNA, 100 bp, Homo sapiens
atgtgcggggtgcgccggcagaggatccagtgttcaccatcctggccccggaagggcagctggtggaatttttgaagaaaatggaatctcgaggccccct

SEQ ID NO: 65195 - DNA, 101 bp, Homo sapiens
ctcatccgggagagccagaccaggagagggccaagaccagcttcaagtctccatggtaccagaaaacaacaacctcacagcacctgaacctcaagaagagg

SEQ ID NO: 65196 - DNA, 51 bp, Homo sapiens
cggctgcctaatttacagcaaccatgagatgctcagagtgtgtgcacaagg

SEQ ID NO: 65197 - DNA, 123 bp, Homo sapiens
tcaggaacatctctttcaatgacaaaaagtttgtcattaaacccatcgacaagaaggcacctacaatgcagatcttcgtgaagactctgactggtaagaccatcaccctcgaggttgagccca

SEQ ID NO: 65198 - DNA, 88 bp, Homo sapiens
ctttgatcaccatcaccaacaacattggctcaatagcaagaatgtgtgcccttaatgaagatgagaacaagttgagcagtgccaacgg

SEQ ID NO: 65199 - DNA, 80 bp, Homo sapiens
ggaggagctgtgcagccgcgaggaggcgcgggaggtgttcgagaacgaccccgagacgatgtggaagttcacgcagagcc

SEQ ID NO: 65200 - DNA, 83 bp, Homo sapiens
ctgggaaggtggagccaccagcctctccttgcctcctgacaaggtgatccgggcgggccccgcaggaattttatcccctcacc

SEQ ID NO: 65201 - DNA, 49 bp, Homo sapiens
agcctgcagagcgcgcagtacctccggctggagtgcaatggcgcgatct

SEQ ID NO: 65202 - DNA, 82 bp, Homo sapiens
tttgaacagcatagagccaatcacattttgcacaagggcagtcaccatgaaagaacagctgaatagatttgctggatttggt

SEQ ID NO: 65203 - DNA, 98 bp, Homo sapiens
caataaatgacgctgtgctctgtgccgtggggatcgtcattgccatcctcgcgtctgaacaacccagtcctgccagctccagctccagctccagctcc

SEQ ID NO: 65204 - DNA, 74 bp, Homo sapiens
ctgttcctggaggaatccgagaagagcagagcggagggagccccagacacgccatgccagtgacggtaacccgc

SEQ ID NO: 65205 - DNA, 98 bp, Homo sapiens
tcatcgtcttcgcctatgcctgccaggctgctggtacagtctttgcccgctgcctgatttttcctctcatcgtgacgggccagcgagaggcagccagg

SEQ ID NO: 65206 - DNA, 99 bp, Homo sapiens
ggcagcaaccgcagcagcagccttcagacctacaacaagaaaggggcctcccgaaggaaagaccacctgaaggaccaccagaatgggtccatggctgct

SEQ ID NO: 65207 - DNA, 83 bp, Homo sapiens
ggctgagtgaaggccgggggctgccccctccccccaggagtacgagagggcctccaaagtggaccagtttgtgacgcgcttcc

SEQ ID NO: 65208 - DNA, 100 bp, Homo sapiens
cacagctctttagggtgagatctgctgtaccagtctcacaggcagtaacgtgatgagatctattcatggcgtgggagagctgatgacccaggtggtgctc

SEQ ID NO: 65209 - DNA, 76 bp, Homo sapiens
aatggtggatgaagttgttcattgtttgtcaccacaaaaaggacaggataaaagaatcagagtgtctcaacccttg

SEQ ID NO: 65210 - DNA, 100 bp, Homo sapiens
tatggaatatggcaactacatctggctcaaaacaaaggaaaccagaagagccaagtcccaggtggggcagctgcagctctcccacaatctgagtttggtg

SEQ ID NO: 65211 - DNA, 75 bp, Homo sapiens
tatggtgggaggagccgatactgagcttcttcctatttgccatgggtgctgcgacaagagactttggacaaaaat

SEQ ID NO: 65212 - DNA, 82 bp, Homo sapiens
gtgggtggcatgactaggatgcccaagattctgcctgatcaatgcaggagtcctgtacctctacttcagcaattacctacag

SEQ ID NO: 65213 - DNA, 100 bp, Homo sapiens
gtcccgctcattggctgggtcctgcgtgcggccctggattcaggggccttccagagagatggagtttcactgtgtcagccaggatggtctcgatctcctg

SEQ ID NO: 65214 - DNA, 90 bp, Homo sapiens
tttttcaagtctgccctgcaagcgataggagtggaagcccaccaggcactgtttagtacagctgttgaaatgaagataaaacaatcagca

SEQ ID NO: 65215 - DNA, 100 bp, Homo sapiens
caaagagagtggaaatttacagctgccctatgtgctggagaatctggtaaaagcaccattgtgaagcagatgaggatcctgcatgttaatgggtttaatg

SEQ ID NO: 65216 - DNA, 75 bp, Homo sapiens
gggcaggtcatgagtcaccatgatagtttctaatggtgatgaacaattggaaaaagccatggaagagattttgag

SEQ ID NO: 65217 - DNA, 100 bp, Homo sapiens
gaagagataggtcagctcaaacagttaatggagctgttctacttgtccaattctgaaaaggaacgttatgaaaaagaattcagccaagaaagacaacaag

SEQ ID NO: 65218 - DNA, 82 bp, Homo sapiens
ccgaattaaaatttatacttcgcaaaactcagcaattttttgatgaggtcaaaatgtgggtacagctcctgattcccaggat

SEQ ID NO: 65219 - DNA, 100 bp, Homo sapiens
gccctggagaactacatcaccgctctgcaggctgttcctcctcggggtaaagttctttacaaagttcgctggaaaggctatacatcggatgatgatacct

SEQ ID NO: 65220 - DNA, 75 bp, Homo sapiens
tcagaaaacaaggtgtctgcaggaccaacctctcctctggatgctctagatgtgctcatcttttgctacgggacc

SEQ ID NO: 65221 - DNA, 100 bp, Homo sapiens
aaactggagagcttcatcaaaaatagtgatagctttgataaaggactactgagcccagccaggctgtatgccattgctgccaaagaaaaagatattcaag

SEQ ID NO: 65222 - DNA, 73 bp, Homo sapiens
cctgttttgaagagaaggggaataagactgcatctgttcatatgagatcgataaagaggaagtttcacttcga

SEQ ID NO: 65223 - DNA, 100 bp, Homo sapiens
ctggcagatgctggtgtcattagtcacagagacttggaggaggccttggagatgggggtggactggtccttaagagaagggtatgcctgggctgaagaca

SEQ ID NO: 65224 - DNA, 100 bp, Homo sapiens
cccgccgcgccgcgctccaaccgcctcctcctcctcagtaacgcgggtgttgaaaagtctcctctagagctttggaaggctgaatgcactaaacatgaag

SEQ ID NO: 65225 - DNA, 100 bp, Homo sapiens
cttggatgaagaaatctttgatgatgatgacttttaccaccagatttggagcaagaggtggtggtggccttcccccgaagaaatttggtaatcctgggga

SEQ ID NO: 65226 - DNA, 51 bp, Homo sapiens
cttgctaagattgtgaattacatgaagctgccactgcagagccccgccatg

SEQ ID NO: 65227 - DNA, 100 bp, Homo sapiens
gcaactaatagcccttgaacagctatgcatgctgcttttgatgtctgacaacgtggatcgttgttttgaaacatgtggtcaaaggtgaaaagattcttcc

SEQ ID NO: 65228 - DNA, 80 bp, Homo sapiens
cggggctgttttccagagctttgccaagttcagcaaatttggagatgcccaagaagatgaaaggattgttcttgttgaca

SEQ ID NO: 65229 - DNA, 90 bp, Homo sapiens
cttgccctggtcttgctcggccgatgaagtgcagaggtttttttctgtctgcagatctccaggggagcccaccagcctagtcaacatggc

SEQ ID NO: 65230 - DNA, 100 bp, Homo sapiens
ggaatgtgtcctctcaagggagcaagtggatgccctggggctgagaggagtcttctggtgcagtcttattttgaaaagatgcgacctaaagtcatgtggc

SEQ ID NO: 65231 - DNA, 88 bp, Homo sapiens
gtgctcccacgtgcttccccttctccactggctgggatcccccgggctcggggcgcagttctctattcagaaacttgaacctttccta

SEQ ID NO: 65232 - DNA, 90 bp, Homo sapiens
cccgcccgggcagctctgcgaggcagcggctggagagggaaccatggggactgtgcacgcccgggaagtcctccagaacttataccgcac

SEQ ID NO: 65233 - DNA, 87 bp, Homo sapiens
acattgaacgtcataagacttgttggttgctacaagcctcaggaaaaatcagattacttgatgttggcagctgctttaacccatttc

SEQ ID NO: 65234 - DNA, 102 bp, Homo sapiens
gcctcctattttctgttgccttccccgtggatggagagcctggggtgctgggcctaaacctacagccagagcagccccatgggctctaccttctgccccctg

SEQ ID NO: 65235 - DNA, 80 bp, Homo sapiens
cctgatggtttcatttgccgttgtcccccgattcaagatggaaaaggtgatgtaaccattacaaatgatggtgctaccat

SEQ ID NO: 65236 - DNA, 100 bp, Homo sapiens
ttcacaatttctccaataattctgtgggattgttcctccagcagctcaacagcttcacagagaaaatattcaacgaatagtacaagaagctctttctgcc

SEQ ID NO: 65237 - DNA, 80 bp, Homo sapiens
cgcgaagctggccaaagcctgcccagacggctcacctgtgcgggatggaacaaaagagacggggtctgactgtgttaccc

SEQ ID NO: 65238 - DNA, 82 bp, Homo sapiens
cagcaaccgcgtgaaggacctgatggtgtgagatgcacaatgcgaaacctaggccccagcttttacaccatgatgcgcaggg

SEQ ID NO: 65239 - DNA, 96 bp, Homo sapiens
gtgacatgcgtttcatacagaagtacctgcttcagagacatgagaagattcatactggtctccggataactgtgctcctgacatccttccttatgg

SEQ ID NO: 65240 - DNA, 100 bp, Homo sapiens
atcgtcatttgcttccctgttctcattcaggaaatctggaaaggagacttcaaagcttccatcactgggacagaaaggattaatggaaagtggagtggtc

SEQ ID NO: 65241 - DNA, 100 bp, Homo sapiens
gattgatttttgaagataaaccgaaaccttccaaacagtcacttcagtcttaccaagaggctttgcagcagcagggggcttctggcttggtgtggaccag

SEQ ID NO: 65242 - DNA, 95 bp, Homo sapiens
gttggagttgagtctcacgttgaaacagaatgaagtgcttcctggagctaaggatgaatgctatcaagtaagacaagtgtttgcccagaaacttc

SEQ ID NO: 65243 - DNA, 100 bp, Homo sapiens
cgtgatctccagcgccggcctcctcagtgcgaagaagctgcagccgcacctggccaaggctaaagatgtgattaaagagattgaagactttgacagcttg

SEQ ID NO: 65244 - DNA, 75 bp, Homo sapiens
gatatttggcaggatgactccgaatgctccgagaaccacagcttcaagcaaaacagtctcgctctgtcacccagg

SEQ ID NO: 65245 - DNA, 98 bp, Homo sapiens
agaggctgcctccgagcgccgtccgccaggaagactccctgcctcctgagtcccagtggggagcattaagcgggaaatgaccttcacatttcagtcag

SEQ ID NO: 65246 - DNA, 100 bp, Homo sapiens
caccattcctaggctgggagcaaaacggtggccagcatcgaaatgttcagccttttagtgatgaagatgcatcaattgaaacaatgagccattgcagtgg

SEQ ID NO: 65247 - DNA, 75 bp, Homo sapiens
aattcttacgatgtcttctctttgctacgcaattaccagctctggctgggtcgccacaacttgtttgacgacgaa

SEQ ID NO: 65248 - DNA, 98 bp, Homo sapiens
cgggagccctggaggaccgtgtccgtgagatggtggagacctttggcgacttggcctttggcgacatcttcctccacctgctcacgggcaaccttgcg

SEQ ID NO: 65249 - DNA, 100 bp, Homo sapiens
cctcgatgtcagctgaactttccatccaagtttaattggttggggtcagataagaagaggagtgacaatcaagccaacagtagatgatgactgaagaata

SEQ ID NO: 65250 - DNA, 90 bp, Homo sapiens
gttccttcagccaaagaaacaagccgtggaataggtgtatcaagtaatggtgcaaagcctgaattatctgatgatggccgctatgtcttg

SEQ ID NO: 65251 - DNA, 74 bp, Homo sapiens
tctgagaagggagacgacgctgctgggtccgctgagcggggcgacccgaggcattgagtattctgaaacatttg

SEQ ID NO: 65252 - DNA, 98 bp, Homo sapiens
ttgatgtgaagccgaaggacctagggctgcctacagaagcgtacatttcagtggaagaagtccatgattcttactactttgaccgcgatgatgtggct

SEQ ID NO: 65253 - DNA, 75 bp, Homo sapiens
tttttagtgaaaaatgatccctgccgagcttagcagtgtctgcaaaaacgaatcttttcctacaacctgttaact

SEQ ID NO: 65254 - DNA, 90 bp, Homo sapiens
gaagatgccgcagcccgagtcccagaaggcggcgatcctgggctgcgggcaaggcggaatactcccccagttgcaagaggcgcaggaccg

SEQ ID NO: 65255 - DNA, 98 bp, Homo sapiens
ctacgccccgtccgacgtgccctcgggggtcgcgctgttcctcaccatccctttcgccttcttcctgcccgagctgaaacatgatcaggggcaagtct

SEQ ID NO: 65256 - DNA, 82 bp, Homo sapiens
cagacagtgaacaaaggcagtctgttgaggcatctggacaccacacacatcatcagtctgtgtttatgaacctcagttgcag

SEQ ID NO: 65257 - DNA, 82 bp, Homo sapiens
atgtttctcagtgccattgtgatgatgaagaaccgcagatccagtttttctatatgagtggagaagacagctgttaccaggg

SEQ ID NO: 65258 - DNA, 75 bp, Homo sapiens
gagcagatcgacaagtccgggagctgggcggccatttaccagtcttaaaatccttgcacgtttgatgactgccaa

SEQ ID NO: 65259 - DNA, 96 bp, Homo sapiens
gaacaatcttgaatcatgaagctactaaccagagccggctctttctcgttcttttagaactcatcaaattgaagctgttccaaccagctctgcaag

SEQ ID NO: 65260 - DNA, 50 bp, Homo sapiens
cgacagcacagacagaatccctgctaccacctatatatgcaaacagattt

SEQ ID NO: 65261 - DNA, 90 bp, Homo sapiens
cagagaatgatccctttgttagaccaaatttaccacaactatatctaactgattttgagccaattcaatgcctgggacgtggtggctttg

SEQ ID NO: 65262 - DNA, 75 bp, Homo sapiens
ggaggagctagggctggagcctctccagcctcccgcgaaggtcgacatttataactcagaccccctgatctgccg

SEQ ID NO: 65263 - DNA, 95 bp, Homo sapiens
ccagccctcccgcgtccaccaccgcagcgtcaaggtgtacgtgaacggagagtgggtgaccaacatcagcgagggaggcagcttcggggagctgg

SEQ ID NO: 65264 - DNA, 89 bp, Homo sapiens
ccatgaggagggacgtgaacggagtgaccaagagcaggtttgagtaggaaatccatgaagtccagaagtagaagtcctgcatattcaag

SEQ ID NO: 65265 - DNA, 106 bp, Homo sapiens
gtgaggtcttcctgcccaacagcaaccacgtggccagtggcgccggggaggcagccattgagacccagagcagcagttctgaagagatagtgcccagccctccctc

SEQ ID NO: 65266 - DNA, 83 bp, Homo sapiens
cgcgattctcagggattgatcgcctcttcagggggatatgagactttctactcggaatatcctgagtgttgcgtggatgtaaa

SEQ ID NO: 65267 - DNA, 82 bp, Homo sapiens
tgagctcagacctgccaatttaccagagataattgataacaccctgtaacagctgaatgaagtggctgtaattgatgaaatt

SEQ ID NO: 65268 - DNA, 101 bp, Homo sapiens
cggaaagtgctcctgcggctgtatggagcgattttgcagatggttaatagcaatgaacttacaaatggggtaataaatgctgccttcatgctcctgttcaa

SEQ ID NO: 65269 - DNA, 75 bp, Homo sapiens
aagtacgagagtggccctgacggaggggaggaatttccaacatggctagatccatcagaaactgaagccgtggag

SEQ ID NO: 65270 - DNA, 100 bp, Homo sapiens
cccagctccaagtccccctgggtggagtccgaatacctggattacctttttgaaggcgcatattaaatttcctattgactacccctattcaccacctacc

SEQ ID NO: 65271 - DNA, 82 bp, Homo sapiens
gattccggcgggaactcgactcttggcgccaccgcctcatgcactgtgtggtgatgatgtccagcaactctgtgaagcagga

SEQ ID NO: 65272 - DNA, 74 bp, Homo sapiens
tcagcaaggcagagatgctagagatcgtgcaggaaacctatgagaatatcccaggccagtcaaagatcacattc

SEQ ID NO: 65273 - DNA, 83 bp, Homo sapiens
acgcaggagcgatggcagcgaccgatatagctcgccaggtgaacatccagtcatggataaaaatgagctggttcagaaggcca

SEQ ID NO: 65274 - DNA, 89 bp, Homo sapiens
aggggcccagtgtggacggggccaccggctggagcggatcccacacctccggaccgagggacgcgggttcaagcactgtcttcctgttg

SEQ ID NO: 65275 - DNA, 75 bp, Homo sapiens
atcgtggcccctacggtgtcccaaatcaatgcggagttcgtgacccaggtggttcccctctctcagcgaagtggt

SEQ ID NO: 65276 - DNA, 98 bp, Homo sapiens
gtttggagcaagagtcgaatggcgagattgagcacgtgaccaagcgggccatcagcacccccgagagtcttcaaagcttcacctttctccaaaggcag

SEQ ID NO: 65277 - DNA, 75 bp, Homo sapiens
aggttctggacaagatgaagtctttctgccagaactctgagacgtctcctgggatgtttaactttgacactttct

SEQ ID NO: 65278 - DNA, 100 bp, Homo sapiens
ctgatccagtggacaaaagaggggaaactatgggagttcccaattaacaatgaagcaggtgcagattcactttataggaacagcttcagcttcagtgatg

SEQ ID NO: 65279 - DNA, 80 bp, Homo sapiens
gtatcttttctaacaagagatctttcttctagatttgctttgtcagctatggacatggaacagcgggactatgattctag

SEQ ID NO: 65280 - DNA, 100 bp, Homo sapiens
aaaattaaaagcaagatatcctcatctgggacaaaagcctggaggttcagatttcttaaggaaacggttgcagaaagggtgtgcaacttgctttggtgtt

SEQ ID NO: 65281 - DNA, 98 bp, Homo sapiens
cgaggtggagctgcggggccctggcatgaaagccaccccacgtcatgctgcagcgccgcagagatcatggctgtcctctttttccacaccatgcgcta

SEQ ID NO: 65282 - DNA, 75 bp, Homo sapiens
aagtagcaaatgagatgaaccatcttcctgcacacagccaaagtctgcaaagatcctggccaatttggagcaagg

SEQ ID NO: 65283 - DNA, 82 bp, Homo sapiens
ggcgagctgcggctcggacgccagcggacacgcgggcgagatccgagggaagggcttcgactggccgctgctggtgaaggac

SEQ ID NO: 65284 - DNA, 75 bp, Homo sapiens
ttctgcaaccgctttccacggggagttctgggaaatcgttcattcatttacagatgaacagaaaagactcttctt

SEQ ID NO: 65285 - DNA, 83 bp, Homo sapiens
tatgcagctacatcagacacagatggcaatactatactggcaattgctggagaagattttgcaattgttgcttctgatactcg

SEQ ID NO: 65286 - DNA, 75 bp, Homo sapiens
gtcagaggccctgatccgagaggtggccaacaaagtcaaggtccccctgcagggtccgccttagtaagcgccggg

SEQ ID NO: 65287 - DNA, 100 bp, Homo sapiens
gatttctatgcaggaccccaaaatgcagttctcaaaagtctatggtcctgtgttcaccgtgtattttggcatgaatcccatagtggtgtttcatggatat

SEQ ID NO: 65288 - DNA, 97 bp, Homo sapiens
aacatgtgatgggactcctctcccagagccggggacatcagagctgagagggtttttaatgaccacaacaagcaagcatgcagcttactgcttgaaa

SEQ ID NO: 65289 - DNA, 98 bp, Homo sapiens
tcaaacacattagtaacctcaaggtgggtgtgcctgctgctttggacatgatgctgactggtagaagcattcgtgcagacagggcaaagaaaatggga

SEQ ID NO: 65290 - DNA, 101 bp, Homo sapiens
ctgaacattggtctaaagtctttccaaaaggtcaaggttcacaagattgagaggatccagaatccagatctctggaatagctaccaggcaaagaaaaaaac

SEQ ID NO: 65291 - DNA, 90 bp, Homo sapiens
tgaaaacatagtggcacagtctgtcagtgtttcatttagcagccttcaaattaaagctttgcaaaatgcagttgaaaaggaagtccaagc

SEQ ID NO: 65292 - DNA, 100 bp, Homo sapiens
atgaggaagtactgagcctgttggaggaactggcccggaaacaggaggactacatgggctgcatcgaggttctccgctctatgcgctccctggactttaa

SEQ ID NO: 65293 - DNA, 83 bp, Homo sapiens
atctgatgcacgttccatccggcgctcagctgggcttgagcgtgaagcctctgcgggccttcttttcgtcttatttgaagtca

SEQ ID NO: 65294 - DNA, 100 bp, Homo sapiens
aaaatatgttgatgggcttagcggttgcaaaagcttctcatttcagagagatgccaggatcctaagtgcctgccaaacttaccaattctaaggaataagt

SEQ ID NO: 65295 - DNA, 100 bp, Homo sapiens
aaggatgagtctagctgctctagtgaagaagatgaggaagatgactcggaatcagaagctgaaacaggaccctgatgctcccataagacagaaaatgccc

SEQ ID NO: 65296 - DNA, 51 bp, Homo sapiens
cccagttccaaagtgtcttaaagatgctgtattatgtaaaagacatcccag

SEQ ID NO: 65297 - DNA, 50 bp, Homo sapiens
atgggcattttgtttatgagcaaggtggtgttaatggcaaaaatcttggc

SEQ ID NO: 65298 - DNA, 100 bp, Homo sapiens
gaacgtggacagcctggcttggctactcactcttctgttaacagggtcctggcaggtactccaaagattcaggtttactcacgtcatccagcagagaatg

SEQ ID NO: 65299 - DNA, 100 bp, Homo sapiens
ggggcgtggctgtggagaaggcgctccggggcgaagcagtttctacagcagtataatcactacaaatccaatgtggagattttcaaattgcaaccaaata

SEQ ID NO: 65300 - DNA, 83 bp, Homo sapiens
atagtccagtacattgtataaagaccacagtttgctgacctctctgaggctgccaaccggaacaatgacgccctgcgccaggc

SEQ ID NO: 65301 - DNA, 51 bp, Homo sapiens
gccctggcgggtccggaccaaggagagtagttatcttgatggaattagaag

SEQ ID NO: 65302 - DNA, 100 bp, Homo sapiens
aaattatagagctaattacaactttcggggcatgtacaatcagagtattctaccttgtaaatactgttatttgtatatactgtaaatgatgacatcggtg

SEQ ID NO: 65303 - DNA, 76 bp, Homo sapiens
acagtggcaatgagaccagtggaagcagcaccatcggggagacaagcaagcagttgtgaaaaacttcaggacaaaa

SEQ ID NO: 65304 - DNA, 101 bp, Homo sapiens
tgtgagtcttctggcaaacagtgtttgcctctggttcagctcatacaacagcttcttagcggcagtacatacctgtgaaaatgaagagcaaagccttctgg

SEQ ID NO: 65305 - DNA, 82 bp, Homo sapiens
ccttgcagctgctgtcagcatggcccaggctcctgctgacccgggcagagaagcaaattgtggctactaatttgccccctga

SEQ ID NO: 65306 - DNA, 51 bp, Homo sapiens
aatactttgagaggttggagaaggtggaagttgatgggtcgaaactaaatg

SEQ ID NO: 65307 - DNA, 75 bp, Homo sapiens
tcatctgggacactgctggtcaggaacgggaatgttacgttcataacttactaaggattagtgtatattttccaa

SEQ ID NO: 65308 - DNA, 51 bp, Homo sapiens
agatagtgctgcccggagtttgaacaaggctcagaatcattcatgctaaga

SEQ ID NO: 65309 - DNA, 75 bp, Homo sapiens
cgaaaacggtgaaggtcggaaccgacagcctcctccgagaaggagccagccactattcgagctgcgctgctccaa

SEQ ID NO: 65310 - DNA, 90 bp, Homo sapiens
ggggactatgcctgcgccgatggtagtgtccggaaaggtcccctctgagccctctcaccttgtcctgtggaagaagcacaggctcctgtc

SEQ ID NO: 65311 - DNA, 87 bp, Homo sapiens
acgccatgaccctggtactaaagaaagagcttgttgcgctctggattaatcgaattacagctgctagccaggaacatggactgaagt

SEQ ID NO: 65312 - DNA, 73 bp, Homo sapiens
gccacaagctcattcactgtgtagtaagactttgaccccgacgcaggcttcagtgattgccgcggatcagaag

SEQ ID NO: 65313 - DNA, 100 bp, Homo sapiens
gcaaacccgtcacacagaccaaggccacttcttgcaaaccacatacacagcacaaagaatgtcagacagagatacaggtttgctctggagcagcagcagc

SEQ ID NO: 65314 - DNA, 87 bp, Homo sapiens
agctattattccctgtattaaagggatgggctatggggaccggaccagcacattctgtgggaccccggagttcctggcccctgaggt

SEQ ID NO: 65315 - DNA, 101 bp, Homo sapiens
aaggaaagagtgggaaagtgagggcagccaatcctttctttaagttgttgactatgctaatggagtttgctggtggacctccaggaatgcctccctttgca

SEQ ID NO: 65316 - DNA, 74 bp, Homo sapiens
cgcggcccggctggcctcctccggtctcctcctgcaggttcttgttaaacctttgggagaccgaggataccttt

SEQ ID NO: 65317 - DNA, 83 bp, Homo sapiens
gggtccggtgtccacgcagagttacctctggaacctccaagtgaaacttgagcccatagtaaatctcttaccagacaaaggaa

SEQ ID NO: 65318 - DNA, 97 bp, Homo sapiens
gcaacagcagcagcaagttagtggattaaaatctcccaagaggaatgacaaacaaccagctcttcaggaccagctgaagcagtgtttctcccggcag

SEQ ID NO: 65319 - DNA, 96 bp, Homo sapiens
gtttatgctaggcaagcaggaggtgatccgaggctgggaagaaggggttgcccagaccaagatcactccatggatgaaatgacagctgtggtgaaa

SEQ ID NO: 65320 - DNA, 100 bp, Homo sapiens
cgcaggcctaagctaaatcgagagaactttccaggcaccccagcctgcggtccatgtgcaggggcaggagccactgactgcctccatgctggctgcagca

SEQ ID NO: 65321 - DNA, 95 bp, Homo sapiens
aagctgcgttaatgtttgcaaatgcagaggaagaatttttctatgagaaatttctgaataaattggcagaagaacgcagacagaagaaggaaact

SEQ ID NO: 65322 - DNA, 100 bp, Homo sapiens
aaagaactcttcagaattcctggtgtttcatcatatatacgactaagatatcacactattcctgatcagagaactccagttgcttcaacacacagtatca

SEQ ID NO: 65323 - DNA, 100 bp, Homo sapiens
gctaatttgtttaacacatacccgtgcctgcacaagccgaataataatgacatcgatatgaatttactggaagcttcagctttagctgcagctgcctctg

SEQ ID NO: 65324 - DNA, 75 bp, Homo sapiens
gggccatgctcgccatcttcatcctggtgatggcaaatgtcgtggacatggtttgggtacccagaccccacctac

SEQ ID NO: 65325 - DNA, 71 bp, Homo sapiens
aatactgcatatcagaaacaacaggccaaatttgagtttcatcatggtgactatgaaaaacagtttctgca

SEQ ID NO: 65326 - DNA, 75 bp, Homo sapiens
cagtggccggagcagcctcaaagcagaagccgagaacaccatgctgtggagcatccgagtgtgccagagtctcca

SEQ ID NO: 65327 - DNA, 80 bp, Homo sapiens
cagtgaagaacatggacctttggagaaagcttcttgctatctacctccaccatgatgaaagtgtgttaaccaacgtgttc

SEQ ID NO: 65328 - DNA, 50 bp, Homo sapiens
aagaagaagaaacaggagtggattcaagtggacgtgatgctgaatccagg

SEQ ID NO: 65329 - DNA, 51 bp, Homo sapiens
ctcagcctcccgagtggctgggactatagcgaaaaccccaccgaagagaag

SEQ ID NO: 65330 - DNA, 75 bp, Homo sapiens
agctagccgggagttacaccgccaccgccagtggtctcggaaagagggtcgtggtcccgcacggatgcgcttgtt

SEQ ID NO: 65331 - DNA, 51 bp, Homo sapiens
gggaaactatccttggtctggcagatagagacagggtttcgccgtgttggc

SEQ ID NO: 65332 - DNA, 100 bp, Homo sapiens
aaacttcaaaaattaccattttatgatttactggatgaactgataaaacccaccagtctaggtgaaagaacttgtcctggacaacagtcggtcgaatgaa

SEQ ID NO: 65333 - DNA, 75 bp, Homo sapiens
tgtggagtatctgcactcacagggggcccgatgagagaaagggaaagttaaggatgctggagcagaacaatggat

SEQ ID NO: 65334 - DNA, 83 bp, Homo sapiens
ctgctggccctggattatggagcggacattgtttactgtgagtcatgttgtcataggaacaactggagaagaataaagtggac

SEQ ID NO: 65335 - DNA, 75 bp, Homo sapiens
tcagaagataaacgaggggctggaacacctcgccaaagcagagaaataactgtgccctgtccacggtgcctcctg

SEQ ID NO: 65336 - DNA, 90 bp, Homo sapiens
aacctaagtacaacccatacaaacaacctggaggtgagggtgtacaagggagaagaagccacattccaaatctcaggcctccagaccaac

SEQ ID NO: 65337 - DNA, 98 bp, Homo sapiens
cgggaccgccaggccaccaccggccgcctcagccatggacgcgtccctggagaaggtatacagaccagggcggcgaggaggaggaggactatgaaagt

SEQ ID NO: 65338 - DNA, 82 bp, Homo sapiens
ctgggtggttgttggcgtgtccctgcagcgaaggatcctggttggcgccatgtcagaaccggctggggatgtccgtcagaac

SEQ ID NO: 65339 - DNA, 98 bp, Homo sapiens
cgtggtaacgtggctgcaaccttagcgacatcaggaagaacagggtcgaggatcgagtgtttaactgctgaagagatcttttcccttcatggcttttc

SEQ ID NO: 65340 - DNA, 82 bp, Homo sapiens
ggcactctgaacgcggccaaggtgccggccgacaccgacttcccaagtaagaagcggaagaggagccgctggaaccaagaca

SEQ ID NO: 65341 - DNA, 83 bp, Homo sapiens
cttggagaactgccccaaggatttgcaaggaggagctttcatctcctgaagaaaaatgaaaagctacttagagaacttaggaa

SEQ ID NO: 65342 - DNA, 96 bp, Homo sapiens
gaggacgccgggacacctggaagccgagaaatgctgcagtacggagacagcaaggacaaccctctcaagtactggctttataaagaagaaggcgag

SEQ ID NO: 65343 - DNA, 83 bp, Homo sapiens
cacgcaaccccagatccatttacactttacagctatggtgaactaaacggtaatgctggagaaagagaaatatctttaaagaa

SEQ ID NO: 65344 - DNA, 100 bp, Homo sapiens
gtatagaatccccatttgaacaagcaaagaaggtgataaccatgtttgtacagcgacaggtgatgatgaacagtctacacagatggctgcaagttgggaa

SEQ ID NO: 65345 - DNA, 88 bp, Homo sapiens
ttgaagctgtgattgacatttttctcataatgaatcctctcaggacattgtgtagcctatggttgtttacattcagagctctatcaat

SEQ ID NO: 65346 - DNA, 75 bp, Homo sapiens
agctggaagagagaaggaagttgtaccgattagaagcccaggacccaggaaggagacacaggaaatttattcaaa

SEQ ID NO: 65347 - DNA, 82 bp, Homo sapiens
tttgttcaggaaccaccagtgacagacttaccctgaaagaagcagatcccagttcaaaagtagccataagaaggaaggattc

SEQ ID NO: 65348 - DNA, 74 bp, Homo sapiens
acaatgataagactcgctatatggggaaggcctcgggcccccacggcgccttcaatgggaactgtgaagcaaaa

SEQ ID NO: 65349 - DNA, 90 bp, Homo sapiens
agtgacaccaacattctggacacgtgggcggcactggtgaggtggattgatgatgaatcttctggcacacctggagcaactccagaacac

SEQ ID NO: 65350 - DNA, 83 bp, Homo sapiens
cggctagtacgcgaattggagaaaaagttcagtgggaagcatgtcgtctttatcgctcagtccagaagcactggaaatccatg

SEQ ID NO: 65351 - DNA, 73 bp, Homo sapiens
atgaagtgcagaggtttttttctgcacaacagatttgttttggactgtaaagacaaagagcctgatgtactgt

SEQ ID NO: 65352 - DNA, 100 bp, Homo sapiens
tccttgcgtccttccggctccgtcgtggaagcaggactgcgccgcgtcttcctcaaggaatggtcctcgtccgaagtgagaatgggcagttgttaatgat

SEQ ID NO: 65353 - DNA, 100 bp, Homo sapiens
cagagatccaagtgcgcgccctggcgggtccggaccaaggctccctggtcggccagagactctcagaccatcctgatgtgaggaaaatcgggttcacagg

SEQ ID NO: 65354 - DNA, 74 bp, Homo sapiens
ttttctccctgaggacaacctgaggaagatgagaatgtgcctactgctcctgatcctccaagtcaacatttacg

SEQ ID NO: 65355 - DNA, 73 bp, Homo sapiens
ggagaaagtggagtccgagctgagatccatctgcaccacggtgctggaaagagcatctacggtgagcgcttcc

SEQ ID NO: 65356 - DNA, 50 bp, Homo sapiens
aatggaatgctttacctggaatggatgcattctcatcaccaccatcgctt

SEQ ID NO: 65357 - DNA, 80 bp, Homo sapiens
caacaagtactgcgccgactgcgaggccaaagccttgacttatccgaattggccaaagctgctaagaagaagctgcaggc

SEQ ID NO: 65358 - DNA, 100 bp, Homo sapiens
gaacaaagaagctcacagtagcctgggagccccggattatgtttgagaccttcaacaccccggccatgtacgtggccatccaggccgtgctgtccctcta

SEQ ID NO: 65359 - DNA, 98 bp, Homo sapiens
gatatcgacgtcgtgatccagaagtccagagctgaggactgcctgtttgcagatagaaaatgctgctgaagaacctagagtcttatgtattatacaag

SEQ ID NO: 65360 - DNA, 75 bp, Homo sapiens
caccgtcaaggccaacatcacgcccttcggcgccgaccagacaatgcagatcttcgtgaagactctgactggtaa

SEQ ID NO: 65361 - DNA, 75 bp, Homo sapiens
ccggcagtcatctcgcggccgttcaggggcccaaatcccagcaaagtgctacagcagttgttggtgcttcaacct

SEQ ID NO: 65362 - DNA, 100 bp, Homo sapiens
gccgcgacacatccgcacccacacgggcgagaagccctacgagtgcaacatctgcaaggtccgcttcaccaggatgagttccacccgttcatcgaggccc

SEQ ID NO: 65363 - DNA, 90 bp, Homo sapiens
gcgggaaatcgggctgaagcgactgagtccgcgatggaggcaaaagatgtgattgaagagcatggtccttcagaaaaggcaataaacggc

SEQ ID NO: 65364 - DNA, 75 bp, Homo sapiens
gcatgaaggcctcggaggcagtgctggtgattgggtgtggcaactcagaactgagtgagcaactgtatgatgtgg

SEQ ID NO: 65365 - DNA, 100 bp, Homo sapiens
ggcctccctgagctggacattggagaagtgaaatacgagcggattaagttcctggtcatcgccctcaagagctccgtggaggtgtatgcctgggccccca

SEQ ID NO: 65366 - DNA, 100 bp, Homo sapiens
gactgcggcgcgctgctggacgaagagctctcctccttcttcctcaactatctcgctgacacgcagatgaaggtcaccgtgtccaaagggggcgaccggg

SEQ ID NO: 65367 - DNA, 89 bp, Homo sapiens
gcagcctggggactctgcctcgtgccgctgagcctggcgcagatcgatgccatggacaatattaccaggcagaaccaattctacgatac

SEQ ID NO: 65368 - DNA, 100 bp, Homo sapiens
gaacccagcttctccccagactcactggagttcctgctgcacttgacttaattacctcaggtccagccctgctgggagttttctgccacacagatttgcg

SEQ ID NO: 65369 - DNA, 75 bp, Homo sapiens
atcaggcgcggcggcacccccaggccaggggcacctctggtggggcagaaggtgacgcatccaaagaagacattg

SEQ ID NO: 65370 - DNA, 82 bp, Homo sapiens
ggaggcccctgccgtgtggacccgtaaaataaaatggcaaccatgtccaagggacctgcagttggtattgatcttggcacca

SEQ ID NO: 65371 - DNA, 74 bp, Homo sapiens
cccaggctcgcctcgactccaaatggttgaaaacagatatacaggactgtggaaacaacgagcttcaatttgtt

SEQ ID NO: 65372 - DNA, 90 bp, Homo sapiens
ctatacagcccttctatagctctccagaactgtggatcagctctctcccaagctgaccggttccctgatgtgttacctgcttctgctact

SEQ ID NO: 65373 - DNA, 83 bp, Homo sapiens
tcatcggttcggtaaagtttctgttctctgattttcagctgaactctcatctctcaacactggcaaatattcataagatctac

SEQ ID NO: 65374 - DNA, 80 bp, Homo sapiens
ccatgagaaaaagcttggagataaagttgctttttactggaagtccaacccagagatccaggactttatgaggaagaaag

SEQ ID NO: 65375 - DNA, 74 bp, Homo sapiens
tatgacccaagcattggtatctacggcctggacttctatgtggtgctggcggcccacaggtgcggcctccgccc

SEQ ID NO: 65376 - DNA, 100 bp, Homo sapiens
atttgtttgtgcaactacaggccaaggagacccccctgacaacatgaagatgtatgtccctgggaagctgcatgatgtggaacacgtgctcatcgatgtg

SEQ ID NO: 65377 - DNA, 90 bp, Homo sapiens
gcacggaggacggggccgggcgacctgggcaccagcaggacccgaggccaggagccaggggcccagaagagccaacatgccatctcccag

SEQ ID NO: 65378 - DNA, 95 bp, Homo sapiens
ggggaaggcgcctgaagaggacgaagatcccagcatggtgagtgcctacatgtacccagcaggggccactggggcgcaggcggccccccaggccc

SEQ ID NO: 65379 - DNA, 100 bp, Homo sapiens
tcatataatacccttgtgtcttcagtttgagaacaccaccgatagccacaccgaagagttctcccatttgctggttcccggacaaaaaagctgctgatcc

SEQ ID NO: 65380 - DNA, 75 bp, Homo sapiens
ctgggacttcccgtccgcggcgtggaggtgtatgctgatggtagcatatgtttagatatccttcagaatcgatgg

SEQ ID NO: 65381 - DNA, 136 bp, Homo sapiens
catgctgaagattccagaggagtgtgttgctgaagaggaattgcctcacctgctcaccgaaagggtgactgcttagaaaactgcacagcatctgatgaaattagcgaataagaacatcaaccatgtcttacactcc

SEQ ID NO: 65382 - DNA, 75 bp, Homo sapiens
aggaaaatggataacagatcagttggggtggcctatgtatgcacagctactgattgatttattcaaatatttagc

SEQ ID NO: 65383 - DNA, 100 bp, Homo sapiens
agcgcgatgcccaaatccaagcgcgacaagaaagggtgcttcaaggatgaccgcatcgtcttctggacttggatgttctccacctacttcatggagaaat

SEQ ID NO: 65384 - DNA, 97 bp, Homo sapiens
gcccgagcactgtgagttagtggtggacctgtttgtgcgcacagtgctggtctgcctgacatatctgcttggctttgaggaagagtggcagtactgc

SEQ ID NO: 65385 - DNA, 109 bp, Homo sapiens
attaaacaagcagatgaagacattcaaggaacccagaacctgttaacttcgcctgcaagtgtcacccccagggctcagtcggatccagctgcagccgacttggaggcca

SEQ ID NO: 65386 - DNA, 82 bp, Homo sapiens
ctcggggacattattgcgcgtggaacggctgcttttggaagctcctgccagggccatccaggtgaccgtgtccaacccctac

SEQ ID NO: 65387 - DNA, 80 bp, Homo sapiens
ccagcttctttgcactggggttcgctggaactttcctagggaagatcagttttcctgccatccaggctgctccctccttc

SEQ ID NO: 65388 - DNA, 82 bp, Homo sapiens
tcagctccgagtccagggcgaggtcactgattctactaccatctgtcagcgtggattgattgaggagactggccctgctcgg

SEQ ID NO: 65389 - DNA, 100 bp, Homo sapiens
gtcgttccagccgtgcagaagtgtggaggtgtgagcctgcaggcaggtggctctggttggatcccaggaggcatgtgagcgcagcctggcagagatggag

SEQ ID NO: 65390 - DNA, 100 bp, Homo sapiens
gttcaatggcagcccttctaagagagagatcatcattgcctgaatttagctttgtgactgcaagagcaagaccagttcctgtctggagacgactgttaca

SEQ ID NO: 65391 - DNA, 80 bp, Homo sapiens
tggccaagaaggagaagcagctgcggaaaatgctagaagcttcctgcctgacacagctcacttcaagaagtgcacaatgt

SEQ ID NO: 65392 - DNA, 90 bp, Homo sapiens
caaaggagtcagggatggctcttcctcagggcagagcggcttgggtaaatccaccttaatcaacaccctcttcaaatccaaaatcagccg

SEQ ID NO: 65393 - DNA, 50 bp, Homo sapiens
tctggccccgcaggctggcactggtttggtgcacctcgatttggaggaag

SEQ ID NO: 65394 - DNA, 74 bp, Homo sapiens
gaagatgggggatttctacgacccggagcacccgacccctgaatggcccactgcgtgaccttggttcagctgtc

SEQ ID NO: 65395 - DNA, 75 bp, Homo sapiens
tttgtagcctattggaggaaaacacaccaagggaaaagcttcactctgaccatcactgtcttcacaaacccaccg

SEQ ID NO: 65396 - DNA, 82 bp, Homo sapiens
ctgccttgtcaccattgccgcctacctctgctccagtttttcagaagaagtgaagtcaagatgaagaaccatttgcttttct

SEQ ID NO: 65397 - DNA, 100 bp, Homo sapiens
tggattttaagaaactaatgaaatattgtcgcataaaacatgcatgggcaagaactattcacacttttcagtgcaaacatccttttggatgatcagtttc

SEQ ID NO: 65398 - DNA, 50 bp, Homo sapiens
gccatccattcttgggtcctttggagaactgtaagagtaaatgggtccag

SEQ ID NO: 65399 - DNA, 100 bp, Homo sapiens
cctgaggttactatgccagggactgaggcacccagtctgcagactacggactttgtgtgctcatctgaggaggcaggacgcagcctctccgcctctttgc

SEQ ID NO: 65400 - DNA, 75 bp, Homo sapiens
cgccgagccggacgtgtccgcgaagatggcgggccgggtgcacttagaactacctcccagctccaacatagtgca

SEQ ID NO: 65401 - DNA, 100 bp, Homo sapiens
catgttggatggtaacaataacctggaggatgactccagtgtgagtgaagacttagatgtggattggagggccagctctcaatgttgcaagaaaaaatag

SEQ ID NO: 65402 - DNA, 83 bp, Homo sapiens
ggactttcttccagcttctgctgtccttctttgtggagagcaagttactccacaggatccgctgaacataggatgttgccaca

SEQ ID NO: 65403 - DNA, 131 bp, Homo sapiens
tgttggtgagcgtggggaatctggaagaggctggggagtctgtgtccttccagctgcagatacggaggatcaagcaccccaacattgtagccctggatgacatctatgagagtgggggccacctctacctc

SEQ ID NO: 65404 - DNA, 98 bp, Homo sapiens
aaccgctctcgcttcgtcctacacttgcgcaaatgtctccgatcccacatctggtagctgtaaaatcccagggacctgccttgaccgcctcccagtca

SEQ ID NO: 65405 - DNA, 50 bp, Homo sapiens
cctggaagagtcgctggccgaagcactattcctgatcagagaactccagt

SEQ ID NO: 65406 - DNA, 80 bp, Homo sapiens
aaagcattattggcatgggaacaggagcaggcgcctacatcctaactcgatttgctatttgtgggcagattcaagtctcg

SEQ ID NO: 65407 - DNA, 83 bp, Homo sapiens
cgggcccatgaggaggcctggggaccatgggctccaggatcaaattcttgaagtgaaaagtccaataaagcaaagcaaatcag

SEQ ID NO: 65408 - DNA, 100 bp, Homo sapiens
cccagcatgaagaaatctgcctgggcctgtttactctcatcctcactgaacctgcccaagcccagaaggtaatgggtaaagtgccaaccatatccatcaa

SEQ ID NO: 65409 - DNA, 75 bp, Homo sapiens
aaataaaagagccctggaatgtgaagagacatgagacagtagtcaaatactcagtttttggctttcacccccaac

SEQ ID NO: 65410 - DNA, 100 bp, Homo sapiens
tcactgcaacctccgcctcccgggttcaagcaattctcctgcctcagcctcctaagtagctgggactacagggttcgggggtgattaaagctggctttgc

SEQ ID NO: 65411 - DNA, 90 bp, Homo sapiens
gggaccttcctagctctgactgaaccacggaggtacaggtttgcagattccgccagcagcacagcaagctctacagatgagtggctcttt

SEQ ID NO: 65412 - DNA, 82 bp, Homo sapiens
gaagacggtaacccgtgtgactttgactggacaatgcagatcttcgtgaagactctgactggtaagaccatcaccctcgagg

SEQ ID NO: 65413 - DNA, 76 bp, Homo sapiens
ccgtttctggctccgggctgagcttcctggagaagaggaagggcagtcagggcgacagcaagaatgccaagaagaa

SEQ ID NO: 65414 - DNA, 90 bp, Homo sapiens
ccacttttcaacacagatgtggacaacctagaagggaagacaccaccagtttttgcttctgatggagtctcactctgttgcccaggctgg

SEQ ID NO: 65415 - DNA, 75 bp, Homo sapiens
ttggggtctttcagtgcaaaatatacctccttctcttcgaaaaggcgacggcggattgacagaagtatgattgga

SEQ ID NO: 65416 - DNA, 75 bp, Homo sapiens
ggaggagaccggcacccagacaggtggcgaaggcagaggagtgtcctcatgacttctcttgtggaccatgtccgt

SEQ ID NO: 65417 - DNA, 83 bp, Homo sapiens
ggccgccctgttccccgcgctgcggcctggcggcttccaggcgcactaccgcggtgatgtgtccaatctagatcccaacttct

SEQ ID NO: 65418 - DNA, 90 bp, Homo sapiens
gccggccagaagcgggcggcgcgggggagatgatgcagacagacatgctgaactatctggaagtccactgaaaagcaaaagcactaggaa

SEQ ID NO: 65419 - DNA, 96 bp, Homo sapiens
gaaaatgctgatgaatccagcagcagcatcctaaaacctctcaatgatcatagcagggttaagctagcacagcttgctgaaaaggatggcaaactg

SEQ ID NO: 65420 - DNA, 90 bp, Homo sapiens
aacctgtgtaccatgcactgacttgagaattacattgtggaaaacatgaagtcggagatggcccagatacagcagaatgcagttcagaac

SEQ ID NO: 65421 - DNA, 78 bp, Homo sapiens
ccgccgcgggaaccacctacgcgcaggtcaccgtctccaccgggcccgggggcttattgtgtaacagaacctggagca

SEQ ID NO: 65422 - DNA, 100 bp, Homo sapiens
gaaagaacccacaggtgcatttcacagcactctgggcgaaaattggatgtgaaaatgaagccagaccgagtgtcctgggtcatgaaacttaatccacagc

SEQ ID NO: 65423 - DNA, 83 bp, Homo sapiens
ttttgaaacttgtttctaaaatccagtggtggtatctccatcaaggcttctgcaaatatggacctcatgagggctgacatggg

SEQ ID NO: 65424 - DNA, 100 bp, Homo sapiens
gacctcagtgatccactcgcctcagccgaagtgctgcgattacagacctgagccactgcgcccagccttgatcttgagctcctacagaagaagggaaaaa

SEQ ID NO: 65425 - DNA, 83 bp, Homo sapiens
gaacttccctggtcgaacagttttttctaatggctattcaaggactcagtgacctttgaagatgtggctgtgaacttcaccca

SEQ ID NO: 65426 - DNA, 75 bp, Homo sapiens
cggcccgtagtgtggaagcagcttcaggcagctctgtggccatggatatgttccagaaggtagagaagatcggag

SEQ ID NO: 65427 - DNA, 83 bp, Homo sapiens
cacagccaccgccgagcgagctcaccatgtcggaagatgtggacgagtgctcactagcagaaaaaacctgtgtgaggaaaaac

SEQ ID NO: 65428 - DNA, 100 bp, Homo sapiens
ctggaaggcgagcggagtcggctggaggaggaaaagaggatgctggaggcacagctggagcggcgagctctgcaggaagaaaacaggcagattttggcgc

SEQ ID NO: 65429 - DNA, 108 bp, Homo sapiens
ccgcacccaggacggaggctgcatgcccgaggaccaggccggcgcagccatgacagagtcaagcggaacatcctggccatgggcgagaagacgggtatgaccaggaac

SEQ ID NO: 65430 - DNA, 100 bp, Homo sapiens
aagaagcatgatattgagctttacatgcacttgaacagactagaaattgcaccacagatatatgggttccgaccccttggtgggaagtattgccactcag

SEQ ID NO: 65431 - DNA, 74 bp, Homo sapiens
cctggggccaggaggagcgaacacctgccgcggtcctcccgccggcgctggatctgactgcagccatgagcagc

SEQ ID NO: 65432 - DNA, 82 bp, Homo sapiens
attaagaagtacaatagcattcgcggtacaatgactcttcttgcttttcacctaagttgaataagcaccctgtgcactttaa

SEQ ID NO: 65433 - DNA, 100 bp, Homo sapiens
accatgatgagtcttctgaagactgtggtcattgtgcttgattttagtccagtggaacctaattcctcaagtctaatggaaaccaatcctctggaatggc

SEQ ID NO: 65434 - DNA, 50 bp, Homo sapiens
tcctgggcctgcctcaaaccctccgcagactgtgaggcatcctgtgtgtg

SEQ ID NO: 65435 - DNA, 50 bp, Homo sapiens
attactattcgtctgagagaatggctgtggctgacaagattttgaaaaag

SEQ ID NO: 65436 - DNA, 100 bp, Homo sapiens
gcaggacaggctgcattggggccaaacacagaatcagcaaagaggaggccatgcgctggttccagcagaagagtacccagtactatgacatgcgctggtc

SEQ ID NO: 65437 - DNA, 71 bp, Homo sapiens
gagggccgggcccagtcaccgaccgaatctggtggacagtaacaaactttggtgaaatttcaggaaccata

SEQ ID NO: 65438 - DNA, 50 bp, Homo sapiens
gccatggccgccgccgatgccgagcttcaaggttactgactttttatgat

SEQ ID NO: 65439 - DNA, 100 bp, Homo sapiens
tatcgttctatttctctagctattgccttattttttctcatggatgttcttcttcgagtatttgtagaagggaacggtaatggtaggagagagagagcag

SEQ ID NO: 65440 - DNA, 80 bp, Homo sapiens
aagagccgagcacgcgggtctgtcatcatgtcgcgttacgggcggtacggaggagatctgactgcagccatgagcagcaa

SEQ ID NO: 65441 - DNA, 102 bp, Homo sapiens
tccttgacagtttaaaagccttggcagtcaagaagtctggaaagtagatggtaacatgatgtggcaccaggataaccaagacaagcttaaaattataaaaag

SEQ ID NO: 65442 - DNA, 75 bp, Homo sapiens
tagaaaaagtgactgatgggccaggatgagaacaagttgagcagtgccaacggccatgaagaacgtagcaaaaag

SEQ ID NO: 65443 - DNA, 98 bp, Homo sapiens
ccggcgctgctgtacacgctgcggtccagccgcctgaccgggaggcacaagggcgacgtcagctgtctctgcttggaggtgccctgcccatgtttgag

SEQ ID NO: 65444 - DNA, 100 bp, Homo sapiens
agacaggtggagaaggtggtagacaagttcatcaagcaaagggactaccaccagcagactattgcagatatcatccgaacatgtttgggacccaagtcca

SEQ ID NO: 65445 - DNA, 85 bp, Homo sapiens
aaagatggcaaacaatatgagagtgttctaatggtcagcatcgatcaattattggttttagtgccaaagaaccctgcgttcatgg

SEQ ID NO: 65446 - DNA, 51 bp, Homo sapiens
gttctctatcagttgtgtgtggagcaggtcgagtcccgggcgctcaccatg

SEQ ID NO: 65447 - DNA, 83 bp, Homo sapiens
tgtagcctgtggctttcatcctcaagggctccatgcgaccgctgcacatccagaggctgggaggcggcagaatgcagccagag

SEQ ID NO: 65448 - DNA, 75 bp, Homo sapiens
ccgcgctaaggttccccgttcaggctttcccaacgagcctgctgcagtcattgccctcaacaccattaaggaatg

SEQ ID NO: 65449 - DNA, 87 bp, Homo sapiens
aggtgtttgtccacggagaaagcctgcaggaattaagtagactggctggacagattcgaaggttgtatggttcaaacaaaaaagctg

SEQ ID NO: 65450 - DNA, 100 bp, Homo sapiens
gtttttacgtgacaaaagatgggaagaggtcagaggtgccctgatgtctgctttcagtcctgaaaagctgaacgagatgtttggaaactggacatttggc

SEQ ID NO: 65451 - DNA, 100 bp, Homo sapiens
ttggtgttgaaagtgaaatgtcatgcctctgaaaatgaagggacagcaatcagacctattgctttgagagctgtgacctccattgctcgtgctctgcctg

SEQ ID NO: 65452 - DNA, 100 bp, Homo sapiens
ctggagctctacgcctcctacgtttacctgtccatgagttattcccagaacctgtgtcttttggccaagtgtttccttgaccataagacactgtactatg

SEQ ID NO: 65453 - DNA, 50 bp, Homo sapiens
atacccctttgaattaattatggctgtatttcaggacagccaggaggggg

SEQ ID NO: 65454 - DNA, 75 bp, Homo sapiens
gaatgaagaactttttcacttactgcaggattttcagcttcagcaagcaggtagatggcacaaaccttcagggtt

SEQ ID NO: 65455 - DNA, 50 bp, Homo sapiens
ataaactcaaccccttctcttccaaaagaattccctgaccaggagcgcac

SEQ ID NO: 65456 - DNA, 75 bp, Homo sapiens
gcctgggcttcaggatgaaggaccgtctggagcagctgaaggccgttgtggcagcactgcctgaaggtatgagac

SEQ ID NO: 65457 - DNA, 90 bp, Homo sapiens
aggaggagagtgaaaaatgctcacagcaaactgtacaatggcagttgagtgggttttgaaaaacgtctgaattgtagtgtctacatctac

SEQ ID NO: 65458 - DNA, 95 bp, Homo sapiens
tccagaagattgatcatcatatgggttgctgttcacggaagaccaggatgtagatgagggacttgtctatgacactgtattcaagcacttcaaaa

SEQ ID NO: 65459 - DNA, 90 bp, Homo sapiens
gccggccacctggaggggcattgcttggttcgcgtggtagcagaggagcttgaggatgatgactttgagttcactggcagccacctgaca

SEQ ID NO: 65460 - DNA, 89 bp, Homo sapiens
ccatcgactccagcgtgctctctcggaataagacagaggtgtcagcatttgcaggtatacaggaacagtcctagtgatgcactatttaa

SEQ ID NO: 65461 - DNA, 50 bp, Homo sapiens
ggaatctgagggctctgacttacttgagggcttattaaaactactagaag

SEQ ID NO: 65462 - DNA, 83 bp, Homo sapiens
ttggagcatctccacccaggaacctcgccatccagaagtgaacttcacggtagaccagatccgcgccatcatggacaagaagg

SEQ ID NO: 65463 - DNA, 51 bp, Homo sapiens
acgcatccttctgtggccactgttagacacagtctggaaaattgatgatct

SEQ ID NO: 65464 - DNA, 100 bp, Homo sapiens
aaataaacacagaaatagtccagaatgtcacaggtccagggcagaggaccaacatgggcattttgtttatgagcaaggttacgttatatataggattcgt

SEQ ID NO: 65465 - DNA, 75 bp, Homo sapiens
gagtcaccgggatccctacgcgacctccgtgggccacctcataggtacaggacatctgcttcagccatgactgtc

SEQ ID NO: 65466 - DNA, 100 bp, Homo sapiens
accgagcatgagctgaccgtcagcaccaggagcagcgaggcactcatcctgcacgccggcgagtgccagcgacctgatggccaaaagaaaggaagaaaat

SEQ ID NO: 65467 - DNA, 75 bp, Homo sapiens
aaatgagtcgcatcttcaacccccatctatccaacttagaaataatgtttcattcaagataaggctcgtggctta

SEQ ID NO: 65468 - DNA, 98 bp, Homo sapiens
acgacaaagcccgcgtcgaggtggagcgcgacaacctggccgaggacatcatgcgcctccgggagaagtctcttcagagctgctgtgcccagtggtgc

SEQ ID NO: 65469 - DNA, 115 bp, Homo sapiens
tcagttcccgggtacagtcaactgcatttttctctggtgaccaagcttccactgacaaggaagtttctcttcagcaacgggtagcagaattggaaaaaattaatgcagaattttt

SEQ ID NO: 65470 - DNA, 100 bp, Homo sapiens
tggagcaggagcggggccggaactggagccgaggcgcaggtggcgctggggagtaccctgacttctaccggaagctctacggcctcttggacccctctgt

SEQ ID NO: 65471 - DNA, 75 bp, Homo sapiens
ctcagttggaagcagccgatccagcctgcggagcctgtggggcaggtccatggctaatgaaacacagaaggttgg

SEQ ID NO: 65472 - DNA, 83 bp, Homo sapiens
agcaactatagattcagcaacaaagcaaacctctgtacaaaactttttaccaacaaaaaaaagcaagtagttatactcaggaa

SEQ ID NO: 65473 - DNA, 83 bp, Homo sapiens
ctgagcaccgccaccatggggaaggggaagtccattggaatattaagcccaggagttgctttggggatggctggaagtgcaat

SEQ ID NO: 65474 - DNA, 101 bp, Homo sapiens
gaaaatttgaactgccttggccatttaagcactattattcatgaggcaaatgaggaacagggcaatagtatgatggtgacttaagagattaaaattaattt

SEQ ID NO: 65475 - DNA, 83 bp, Homo sapiens
ttgttcccccaaatgtctgactctgactctcggactgagaaacgcaagtgcagagcagagcgggcggaggaccccgggcgcgg

SEQ ID NO: 65476 - DNA, 74 bp, Homo sapiens
aagatttagaggccgctacagaagtccttacaccctggaggagaagaggttctgctggaacaagctggtgtaga

SEQ ID NO: 65477 - DNA, 82 bp, Homo sapiens
ctggaaacaaaggagctggcccagcaactttcccagaacgcaccgcaagctccctcctcgaaagagctcttggaggaagttg

SEQ ID NO: 65478 - DNA, 100 bp, Homo sapiens
cggcggctgatttagaaggaggttcaggctacggtgagccgaaggtgtctgacttccagcaactgctggcctgtgccagggtgcaagctgagcactggag

SEQ ID NO: 65479 - DNA, 87 bp, Homo sapiens
gaaggatatcgacgtcgtgatccagaagtccagagctgaggactgcctgtttgcaggactgaatgtgggcccagttggcgtcattct

SEQ ID NO: 65480 - DNA, 75 bp, Homo sapiens
ttcctcaaataaggaaattgacacctggcgtgccccgacgaagacccatcatgagcaaccacacagctacgcaca

SEQ ID NO: 65481 - DNA, 50 bp, Homo sapiens
catgaactcagggccggttgtggccatgatgaagaactgccagcatgcga

SEQ ID NO: 65482 - DNA, 82 bp, Homo sapiens
caacggtttctgtacagcacagattatgacagcgtctttcttaagacaatgaccgtttgccaagtaaaattatctaatggct

SEQ ID NO: 65483 - DNA, 82 bp, Homo sapiens
cccgccgccgcgcacctgccttcgctcccgcaccggatctagatgatggacttttcttaatttccaagttgcctaaaggcag

SEQ ID NO: 65484 - DNA, 50 bp, Homo sapiens
tggagaccggataatcactataagcatcagaagagctaacaattgctgga

SEQ ID NO: 65485 - DNA, 82 bp, Homo sapiens
agcttcagaagaccgaagcgttcgtatctggaagcacatgattaagtaccggtacatcccgttcacacatgggaagagaagg

SEQ ID NO: 65486 - DNA, 82 bp, Homo sapiens
cgggtacctgcggccaattcggtggaacgaggacgcggactgcgaaggcagggacccagacatggagctgcgggaagaagcc

SEQ ID NO: 65487 - DNA, 90 bp, Homo sapiens
ctcgaatcctctcctggtttagggaggggaagtcttaaaatccttgcacgtttgatgactgccaaattcttgcatacagaaattcgagaa

SEQ ID NO: 65488 - DNA, 76 bp, Homo sapiens
agaacaagtggtactaggattatacattgtaagaggtgacaacgtcaatggtacaacagctccatgaacgtgatct

SEQ ID NO: 65489 - DNA, 83 bp, Homo sapiens
gtgctcccctctgagactggagtgagagggtcttctggaggaagaacgtgcaaaacgtgaggagctagagcgaatactggaag

SEQ ID NO: 65490 - DNA, 74 bp, Homo sapiens
ccagtttcaagcagtattaagagtaaatgggaaacaaaggacccatcgcaaatgttttccatgctgatctccaa

SEQ ID NO: 65491 - DNA, 100 bp, Homo sapiens
tcccaagcagctggtattacagggcatgagccagaaggagagctctaagtctgccatgatgtatattcaggagttgaggtcaggcttgcgggatatgcct

SEQ ID NO: 65492 - DNA, 102 bp, Homo sapiens
tctcgggaccccgacagctgcggttggcgggcaccataggccgaagcacccgggtagaagaagtatgtcttcctggaccccctggctggtgctgtaacaaag

SEQ ID NO: 65493 - DNA, 74 bp, Homo sapiens
cgccagtccagcagctaaggatattttgtgcaggtgaactgtcacccctacaactcagcttgcaaccagccctg

SEQ ID NO: 65494 - DNA, 103 bp, Homo sapiens
gaaaagtattgcaagcaacagtagtcgctgttggatcgggttctaaaggaaaggacagagcgggatgccaccagcttgtccaaagggaagttccaggagctcc

SEQ ID NO: 65495 - DNA, 78 bp, Homo sapiens
gccaatcccaggaggaaaaacgctgcagcaaaaaattattcctgatcaggaccaactgatggcaatagcactagagtg

SEQ ID NO: 65496 - DNA, 83 bp, Homo sapiens
gggagcgcaaggtcgccctcaaggccatgatcaaaactaatagctcttcaagtctgcaataaaaaatggcctccaacaaaact

SEQ ID NO: 65497 - DNA, 113 bp, Homo sapiens
ctttgagttgctgcacaagcaggacgaccgcggctcggaccacgtggaagtgggctctgcgctcctcagaccaccggcaggtgaacagcctgatgcagaccgaggagtgccca

SEQ ID NO: 65498 - DNA, 74 bp, Homo sapiens
ctaaaaacaagactggggctgctcccatcattgatgtggtgcgatcgattgccaatgaagtaattggagaaatg

SEQ ID NO: 65499 - DNA, 100 bp, Homo sapiens
ctccgaggcgaccactcctgtgatcgttgcggctggggctggaggggaggaaggatgctgacctgttggatgttgaaagcaaacactttgaagacctgga

SEQ ID NO: 65500 - DNA, 74 bp, Homo sapiens
cttattgtcttcatactgcctctggatgttagtacgaatgtactcaagactgatcttctaagttcactggaaat

SEQ ID NO: 65501 - DNA, 100 bp, Homo sapiens
aactcgtcatgctctttgtagcgtggtgcttctgttgctcacagatggctctcggtgtcatggccttcgatggcggcgctgccggagtccacggtcagag

SEQ ID NO: 65502 - DNA, 95 bp, Homo sapiens
ccgcggacgcccgctgagcttggcgcacgggccgaccagggggcggaggaaagcgcaaagggaaaagcaagaagtggaaagaaatcctgaagttc

SEQ ID NO: 65503 - DNA, 88 bp, Homo sapiens
ggaggggagacgtcggttgagcggcggcgaacatgcgcttttgacacattggagattctctttgtggccagatgggtttgtatggaca

SEQ ID NO: 65504 - DNA, 96 bp, Homo sapiens
gaagttggaagtgtctcttagcagcgcgcggagaagaacggggagccaggccagaagcggactcctagaagaggggagcagcaaggatggaatgac

SEQ ID NO: 65505 - DNA, 100 bp, Homo sapiens
tactggatgatcaaggtcagctggtccacatgaacaggcttccaggaggaaatgaggtggagtgcaactcaaaattggacccaacaaagaccactctcct

SEQ ID NO: 65506 - DNA, 100 bp, Homo sapiens
atgaagggctaccctcactggcctgccaggatgtccagctcgccgctgtccaagaaacgtcgcgtgtccgggcctgatccaaagccgggttctaactgct

SEQ ID NO: 65507 - DNA, 119 bp, Homo sapiens
gcgcgggaagatggcggcagcggcggcggcggctgcagaacagaaagagctcttggaggaagttggccagaatggcagccgagctcggatctctgttcaagtccacaatgctacgtgca

SEQ ID NO: 65508 - DNA, 75 bp, Homo sapiens
cgtttttcggatgatgccttcaatactacctttatttccaccataggagaagttgccccagtgcaaggcactgca

SEQ ID NO: 65509 - DNA, 100 bp, Homo sapiens
ctccggggacccttccgtatctgcctaggcattttgctgtctcctcctaatacgtaacaaatgtggcaattattttggatctatcacctgtcatcataac

SEQ ID NO: 65510 - DNA, 100 bp, Homo sapiens
atgtcttccttgttgtccagcactggtttgggagctctcatctctatcaagttgtcttctattaattcctcaggcaaaatcctgacagatgactttgcag

SEQ ID NO: 65511 - DNA, 75 bp, Homo sapiens
gtgtaaacatggctgggtggcacatgatattaatgaatgtcagctacaaggtgtatgccctaatggtgagtgttt

SEQ ID NO: 65512 - DNA, 50 bp, Homo sapiens
cagtagcccccgggcccccgtcagctccggtgtcggcgggtggcgcggcg

SEQ ID NO: 65513 - DNA, 100 bp, Homo sapiens
tccgaggctgggaagaaggggttgcccaggtgctgtgtagcatcaattcaattatccacaatccaagagctccagtaataatttataaacagaccaaagg

SEQ ID NO: 65514 - DNA, 90 bp, Homo sapiens
ctcattttcacatctctcctgaatggatcacagcgtcgcagatgtctttggatggaatggccgtatgcatgttcatgcaaaacaccttaa

SEQ ID NO: 65515 - DNA, 75 bp, Homo sapiens
caacatgagccccgaggagaagatgatgaagaggtttgctctggaacagcaggacccctcgtccagtcattgtgg

SEQ ID NO: 65516 - DNA, 75 bp, Homo sapiens
tacatcccatctcaatcagaattactagattttctctcaaactacgagattgaccgactcatcagtcacggggcc

SEQ ID NO: 65517 - DNA, 75 bp, Homo sapiens
ctgcgcctttccactgctctggcaatccacatggagactgatccccagaccatcagcgcctacctgatctacttg

SEQ ID NO: 65518 - DNA, 83 bp, Homo sapiens
cggaggtctcatctttgaactactgccggagcttctgccaggtttaaggagttcatgagtaaacatgttcacttaatgtgtta

SEQ ID NO: 65519 - DNA, 75 bp, Homo sapiens
tccaggcctactcctccatcattggactgcagtcccaccaggacgagatgagcgacgtagtggttcagccctaca

SEQ ID NO: 65520 - DNA, 75 bp, Homo sapiens
acagtgtaaacaccaactggcatccatatcttctccaggtcattatttctggatgctaagtccattcagtccacc

SEQ ID NO: 65521 - DNA, 100 bp, Homo sapiens
gcggacgcgcagcatggcggtggaggacgaggggctccgggtcttccagagcgtgaagatcaagatcgcgggctgacgcacgaggcacacaggaaggagg

SEQ ID NO: 65522 - DNA, 100 bp, Homo sapiens
atgtgaaggagaactgcaaacctctgaagccacgatggaggtgatgaacctgatggagcagcctatcaaggtgactgagtggcagcagacatacacctac

SEQ ID NO: 65523 - DNA, 75 bp, Homo sapiens
tggacacaagcctcattttggaatattgcagattttgtacagcagcaatttcttactctctctgcaagttttctt

SEQ ID NO: 65524 - DNA, 100 bp, Homo sapiens
gcaaacagccctcagtttctggagctgttccgaggtttggacatggcacctttctgctgtgcctggaaaccatttaccagaaagtgacgggcaaggagct

SEQ ID NO: 65525 - DNA, 90 bp, Homo sapiens
tacttccctggctcttctacatcgtcatcttccgacaacgacgagggcagcggaggggcgacaaatacatcgggtgattcttctcggtca

SEQ ID NO: 65526 - DNA, 83 bp, Homo sapiens
cctcgggcgccccgcagccccccaacatcctgctcctgctcatggacgacggctgggttacgacccctacaaccctgagctgc

SEQ ID NO: 65527 - DNA, 100 bp, Homo sapiens
caatgagaggcatgaggtgcagctggacatggaaccccagggctgcctggtggctgaggttggtgttcgaggaagagacattgttgttcttggtgtggag

SEQ ID NO: 65528 - DNA, 104 bp, Homo sapiens
gcgggtacctgcggccaattcggtggaacgaggacgcggactgcgaaggcaggtttggtgcacctcgatttggaggaagtagggcagggcccttatctggaaag

SEQ ID NO: 65529 - DNA, 88 bp, Homo sapiens
tgtgtcttggtgcattggaaaaggagtcaggagccactgtgaggaaaattgcctaagaattatgacccaaaagttaccccagatccag

SEQ ID NO: 65530 - DNA, 87 bp, Homo sapiens
gcggccctgggagctggaggaaccgcgattcaaccctatgaaaagataaaggccaggggcttgcctgataatatatcttccgtgttg

SEQ ID NO: 65531 - DNA, 87 bp, Homo sapiens
tcttaccatcgtgagcttggcatcaagaatgaaggtattggtggcatggatggaacacaacagcagatttttaaaatgttagcagag

SEQ ID NO: 65532 - DNA, 114 bp, Homo sapiens
ggcggctgaggaaagcaggaggaggtggcggcggcgggaagatatctgccgacaccccaggccatcgagccccaggccatcgtgcagcaggtcccagcccccagtcgaatgcag

SEQ ID NO: 65533 - DNA, 75 bp, Homo sapiens
tgcagcatgtgggcggaaccacaccttggccttgacggaattgaagaggagctgggcagcaaggctaagtttgcc

SEQ ID NO: 65534 - DNA, 75 bp, Homo sapiens
ccaatcaaacaaatcacaagccctccccagaccagtgtggaaaagccactggcagtgattcaagtggtgtcattg

SEQ ID NO: 65535 - DNA, 114 bp, Homo sapiens
agaggattggaggtgtcagtgttaaaggaacctctacaacgaaggtgaagccacggaagataagacccaacatgagtgaagtttcctgcaagaaacgggacgactatttggaat

SEQ ID NO: 65536 - DNA, 83 bp, Homo sapiens
gggctttcttcgccgtgctggccgcggcccgcctcagcatctggtacagccgattgttgacctcctgtactggagagacatta

SEQ ID NO: 65537 - DNA, 100 bp, Homo sapiens
gtccccccagagactcttggccgtgatcctgtggtttcagctggcgctgtgcttcggccctgcacagctcacgggcggatgctgatatgctaactggtga

SEQ ID NO: 65538 - DNA, 89 bp, Homo sapiens
ctgctccggcctcgactacggcgagcctgagcgcggcggcggcccacgcgcagcgacagggagaggttattcagcttctcaaggctgga

SEQ ID NO: 65539 - DNA, 73 bp, Homo sapiens
cggaggtggttatgacaactatggaggaggtggcggtgggcggaactcctagcggacacctcgtggagtccgg

SEQ ID NO: 65540 - DNA, 101 bp, Homo sapiens
ctccatcgtgggactcagcagccttggtgctcaggtgccagatgcaaagatggcccactgcgtgaccttggttcagctgtccatttcctgtgaccatctca

SEQ ID NO: 65541 - DNA, 127 bp, Homo sapiens
cgtctacatcctggacccctggttcgccggctcctccaatgtgggcatcaacaggtggcgacaatgcagatcttcgtgaagactctgactggtaagaccatcaccctcgaggttgagcccagtgaca

SEQ ID NO: 65542 - DNA, 75 bp, Homo sapiens
cgcggcccgcccggatcgtggcctctcgagagcaaggtccgcgggagagctgtggggcttggtgagtgtttcgtg

SEQ ID NO: 65543 - DNA, 83 bp, Homo sapiens
atcgggtggcggctcgggacggaggacgcgctagtgttttaaaatcaaagatgggaaaatcggagaaaattgcccttccccat

SEQ ID NO: 65544 - DNA, 98 bp, Homo sapiens
ggggagctgttcgccatcaaggctctgaagaaaggggacattgtggcccgagacgaggtggagagcacatttcagttggactgcgatgcagttcttca

SEQ ID NO: 65545 - DNA, 100 bp, Homo sapiens
gtcaccaggaaggggacgggacggacggtgatggtggtcgccgcggcggcgtgtgcgcccctcagttgggatgaatgggttccggagagcagagtactca

SEQ ID NO: 65546 - DNA, 90 bp, Homo sapiens
tcggcgtccaggctcggagcgcgacacggagactaggtggcaggtaacatctgccggcacctgctgccccgggtccagtgccccgccttg

SEQ ID NO: 65547 - DNA, 83 bp, Homo sapiens
gacgagaactggagagaactgctggaaggagactggatgatagaattgatttcagatgcatgccaggtttccactgattgcca

SEQ ID NO: 65548 - DNA, 100 bp, Homo sapiens
ctctagaagaggcaaggcagtttgctgcacaggctgatgcagcaatcggtggaatcggtttggaatatggcatttgactttattcttgacaatgtccagg

SEQ ID NO: 65549 - DNA, 51 bp, Homo sapiens
ctggcctgcggcgcctgggcgctctgagatcctacatggctttccaccaac

SEQ ID NO: 65550 - DNA, 88 bp, Homo sapiens
ggctacctgtttgaagagattgctagaaacatgacagctgccctacaggcagctctgaagaacccccctatcaacaccaagagtcagg

SEQ ID NO: 65551 - DNA, 83 bp, Homo sapiens
ccagcggagccaagccccacgctggccggacagggccgcctgtcgccggcaaagaatggccgagtggattctgaggaccggag

SEQ ID NO: 65552 - DNA, 115 bp, Homo sapiens
cgggtcaatgtgtggaatattggggggctcggctgcagacttggccaaatggacgggactattaaggtgattgtagagaaggctccaaaagccagggtgcctgatctggacaaga

SEQ ID NO: 65553 - DNA, 100 bp, Homo sapiens
ctctgggaccggaggagacatcggcctctgcaggcttgccgaagaagggagagtttgaggaagaggcaaagaaccctggcctggaaacacacaggaagag

SEQ ID NO: 65554 - DNA, 75 bp, Homo sapiens
gccgcgagcagagccgcccagccctgccagctgcgccgggacgccaacacaagccatcagccccatgctcagctc

SEQ ID NO: 65555 - DNA, 100 bp, Homo sapiens
cattgtctccatgggcttctcccgggaccaggccttgaaagcgctgcgggccacggttggtgttcgaggaagagacattgttgttcttggtgtggagaag

SEQ ID NO: 65556 - DNA, 82 bp, Homo sapiens
tttctggcctggaggctatccagcacgaagttatacggaagcgtctcctcattgatggagatggtgctggagatgatcggag

SEQ ID NO: 65557 - DNA, 107 bp, Homo sapiens
agtatgttgtaccttgtgacagaatatgccaaaaatggagaaatttttgattgatatcagtaaatgccattatttagtggatttggacaccatgagagaaacacccc

SEQ ID NO: 65558 - DNA, 75 bp, Homo sapiens
tttggtagaagatgtggtacacactcagttaattaatctgtgaaagagtttctagccaaagccaaagaagacttt

SEQ ID NO: 65559 - DNA, 85 bp, Homo sapiens
gaccagtgtttccggcaaaaccacattcatgggacacttctccagtttaaggaagaaatctctaaacgttttaaatcacatactg

SEQ ID NO: 65560 - DNA, 102 bp, Homo sapiens
ctcagcctcctgagtagctaggactacaggtaattggatcatgctgatctataaagggggtgatgaatatgacaaccactgtggcaaggagcagcgtcgtgc

SEQ ID NO: 65561 - DNA, 123 bp, Homo sapiens
agtttgcagatcgggagcgcaaggtcgccctcaaggccatgatcaaaactgacctgaccaacggtgcagatgggatgctggccacaagctccaatgggtctcagtacagcggctccagggtgg

SEQ ID NO: 65562 - DNA, 89 bp, Homo sapiens
ggtcagagaagtcgaaggggtgctggcgagacgggggtgatgcccacccgggcgagaaaggtcaaaatgcagatcttcgtgaaaaccct

SEQ ID NO: 65563 - DNA, 100 bp, Homo sapiens
tcgatcgctgcccgccgccagcatgttgggcgccccggacgagagctccgtgcgggtggctgtcagctggacctgtgatctgcagaatgctgagttatcc

SEQ ID NO: 65564 - DNA, 75 bp, Homo sapiens
acctgcttcagagacatgagaagattcatactgcccagctgcagctccagcaggtggcgctgcagcagcagcagc

SEQ ID NO: 65565 - DNA, 100 bp, Homo sapiens
atccatcagcttcattacgtgcacaggatgacttctcggaaccagctggtgcagaaggtgctgcaggagctgcaggaagcagtggagtgcgaaggcctgg

SEQ ID NO: 65566 - DNA, 100 bp, Homo sapiens
tgggctcctgttccctgtgagctgcctggtcctgctgcaggtggcaagctctggtggaacggcacatgtgtgatggggacattgttatcttcaaccggca

SEQ ID NO: 65567 - DNA, 84 bp, Homo sapiens
ccgcgaccgtccgccagtcgtcccgaggattttttatcaagcagaaatgcatcgaacaacgagaatcaagatcactgagctaaa

SEQ ID NO: 65568 - DNA, 83 bp, Homo sapiens
catgaacaactcgggcgccgacgagatcggcggggatctgacgagcttttctctacttgtgtcactaacggaccgtttatcat

SEQ ID NO: 65569 - DNA, 75 bp, Homo sapiens
atttacatgacagaaatcacctatgtttacagcgacagaaatgagccgtcagactgctacagcattacctaccgg

SEQ ID NO: 65570 - DNA, 98 bp, Homo sapiens
gtcagccatgaacggatggatgtgatgcctgctagccaaaagggaaaatatatgcagatgatgaacattcttaagccaattgcctttgatgttattca

SEQ ID NO: 65571 - DNA, 100 bp, Homo sapiens
ttgcaagcaacagtagtcgctgttggatcgggttctaaaggaaagattctttcttgtggagaagttattcatgtgaagatccttggaattttggctctta

SEQ ID NO: 65572 - DNA, 73 bp, Homo sapiens
ttgagcccagggcgacggtcagcttgttaattcctggctgcagtacagaacctgctaaggccatcaaacctat

SEQ ID NO: 65573 - DNA, 98 bp, Homo sapiens
gaaaggcaaaggcaaaggcggctcgggagattcagccgtgaagcaagtgcagatagatggccttaggcgtagaggctccggtgttttttgtgccaatt

SEQ ID NO: 65574 - DNA, 96 bp, Homo sapiens
tgaagtcagttgttgcatcaaatacttcatatttggcttcaatgtcatattttgggtcgggaaagaggttaaagaagacacgcaagtatgatatca

SEQ ID NO: 65575 - DNA, 100 bp, Homo sapiens
agagcaacagatcgtggatctgaaagtgacaagcattttagaaaggtgaaatgacaatggatgctctgttggctcgattgaaacttctgaatccagatga

SEQ ID NO: 65576 - DNA, 87 bp, Homo sapiens
agtccgatggagaggctaagcgtcctggaccggatcaaaggctcactgctgccccggcctggccacaactttgtgcggcaccatctg

SEQ ID NO: 65577 - DNA, 82 bp, Homo sapiens
acggattcatttagagctgcggaacaggacgccctctgatgcccttccaccgcagccatccgcacgggaggcctcgcgattg

SEQ ID NO: 65578 - DNA, 49 bp, Homo sapiens
ccggaggaacccggactccggcgtagcgaccccctggttgtggaatacg

SEQ ID NO: 65579 - DNA, 50 bp, Homo sapiens
ccgccgcttgtgctgcagccatggagaaataactttatttggactgagag

SEQ ID NO: 65580 - DNA, 75 bp, Homo sapiens
cagcggaaaggagcgcgcctctttttggcttggggagctgcagcgttcgtgataacctcctaaggagagcagcct

SEQ ID NO: 65581 - DNA, 96 bp, Homo sapiens
atcttattcagtgtataatggactctcagaataaaggaaagacctcagagtgttctcagtgaggaattttaaattggaacaagagcaagaaaaaaa

SEQ ID NO: 65582 - DNA, 97 bp, Homo sapiens
cagctttgactgctttatgaccatattaatgcagatgaggcgttctttgttagaagaacccgaagaacctaaagtgctaacaccagaagaacaatta

SEQ ID NO: 65583 - DNA, 96 bp, Homo sapiens
tgggcgccgcctgcggcctggcgctggagccatccaaaactctgtttgtcaaaggcctgtctgaggataccactgaagagacattaaaggagtcat

SEQ ID NO: 65584 - DNA, 75 bp, Homo sapiens
gaaacattcaactactgggagccatgtcctgacgttcgtttgaatatcatctccaatttggattgtgtaaatgaa

SEQ ID NO: 65585 - DNA, 118 bp, Homo sapiens
taggacatgaacaagctatcctttcatcgaggacagcaaacattatggtgcaagaattgtttatccgtgattatggagagatttttaatgtccagttaccggataaagaagaacggac

SEQ ID NO: 65586 - DNA, 75 bp, Homo sapiens
ccggctcacctggcggtgcccgaggagtagtcgctggagtccgcgcctccctggatgccggtggccgtgggtccc

SEQ ID NO: 65587 - DNA, 100 bp, Homo sapiens
gcaagcagttcagaagagccaaggaataaacatgcaatgaacccaaaagggcccagacgagagtgaaactgaactacttggaccagattgccaaattctg

SEQ ID NO: 65588 - DNA, 74 bp, Homo sapiens
aaaatgtttgaagcaacaagattgcttgcaacaattgttatgcttcagcagtgttgtactgctacttctataaa

SEQ ID NO: 65589 - DNA, 100 bp, Homo sapiens
gtcaaggtgaccggccgggactgcggcggcggggagagcggcgaatgcaactgccctgcctggtacttggcgaagaacagacgtgcacttagagaaccca

SEQ ID NO: 65590 - DNA, 88 bp, Homo sapiens
tctggctctggaattgctactgctgcctctgtcactcctggtgaccagcattcaagggtcagcagcctctggacccgtgaaagagctg

SEQ ID NO: 65591 - DNA, 100 bp, Homo sapiens
gtgaacagcctccagacggtgtgcaccaacatctacaagatcctcctgctgcaggcgtacagtgtactaatggtcacttgatgtgcgctggctgttttat

SEQ ID NO: 65592 - DNA, 73 bp, Homo sapiens
actgacggtaacggggcagagaggctgttcgcagagctgcggaagatgagcctgatccggggatggcctctgc

SEQ ID NO: 65593 - DNA, 100 bp, Homo sapiens
agcatgtaaaggaaagattgccatatcagtgccagccatttttggagtctcctttggtatccgcaaactctacatgaaaagtctgttaaaaatctttgcg

SEQ ID NO: 65594 - DNA, 100 bp, Homo sapiens
tcccctcaaaaacaggtcataactcctggagaagggattgcccagtcagcaaaggttcagccctccaagttttcataccttggtcctgaccctgtccata

SEQ ID NO: 65595 - DNA, 90 bp, Homo sapiens
tcaagcgagaaagaacatcctctttaacccagttcccaccctcacagtcaggcctctggctgtacctggcagggagcagcctgccctgtc

SEQ ID NO: 65596 - DNA, 100 bp, Homo sapiens
cttccctcgtctccccttactccacagggagcctcccttgccaggaccagggctgcgacggccatgctggggcaggaaatcataggtgggatgctggata

SEQ ID NO: 65597 - DNA, 100 bp, Homo sapiens
cacggtcctaagagctgggcaccaggaagcgaaggctgctgcatatctatgtgagactgaattttcctcttagacttcagctaaaactgtgtattgcatc

SEQ ID NO: 65598 - DNA, 80 bp, Homo sapiens
agccatagtacctacagcagcactccaggtttttagaacttcagccataaaaatgggcagaattttccttgatcatatcg

SEQ ID NO: 65599 - DNA, 100 bp, Homo sapiens
gtgacatcaatagccctgcttgttgttctctacaaaatctatgatctacataagaaaagatcctgcatcaataactagctttctcacagtgttagcttgg

SEQ ID NO: 65600 - DNA, 75 bp, Homo sapiens
cgggacaccccggaagctgggaaatgccaagaaggatcaagaaggtggagaagaaaagaaatctgtgcaaaagaa

SEQ ID NO: 65601 - DNA, 100 bp, Homo sapiens
ctgaagcagaagatcgaggacacgctatgtccttttggcttcgaggtttaccccttccaggggccctaaccacccaggatgaaaatggccagaccaagcg

SEQ ID NO: 65602 - DNA, 114 bp, Homo sapiens
ctgcctgcccgagccggagcgccagctcagcgtgcccatcccggggggcagcaacggcgacatccagcaagatgatgttgaatttgaagtatcatcggaccgacggactgggaa

SEQ ID NO: 65603 - DNA, 75 bp, Homo sapiens
gtcctaaagagcaagcctaactcaagccattggcacacagatggtcatccagactcagagctctctctacagaga

SEQ ID NO: 65604 - DNA, 75 bp, Homo sapiens
ttactgagaattttccacctcctgacacaacaccactcagcagcaattccatttccgtgagggcgtttctagatg

SEQ ID NO: 65605 - DNA, 78 bp, Homo sapiens
cctgtctaagaaaaggaggatttgcctcattgctacgatttcagagtaccctggtaatagctgagcatgcaaatgatt

SEQ ID NO: 65606 - DNA, 50 bp, Homo sapiens
aacatagccatcgacttcggggagcagggaaatattagtcgtcaagaagc

SEQ ID NO: 65607 - DNA, 50 bp, Homo sapiens
agtgaccgagaccgcggccgggaccgaggctattactataacaagcgcat

SEQ ID NO: 65608 - DNA, 76 bp, Homo sapiens
ctcagggaactggatgtcagcaagaatgaaaggaagctgttgaagttattgaagtacctgttgctatattctaaga

SEQ ID NO: 65609 - DNA, 75 bp, Homo sapiens
gagcctagatcctgtgctttactctgaagactcggtaaaatccagtacaaggaatatatcattgaaggatttgaa

SEQ ID NO: 65610 - DNA, 100 bp, Homo sapiens
gaaggatgttaattcatcttcacccgtgatgttggcctttaaatgtacgcaataactgtttggtattttgatgcagatgagagagcacgagctaaagtaa

SEQ ID NO: 65611 - DNA, 95 bp, Homo sapiens
ccaggtgtaagcgcagaaagcaggcgaacccgcggcgcaataacgggtctctcattcatcacttttatctgctatgtggcgtcctcagcatctgc

SEQ ID NO: 65612 - DNA, 90 bp, Homo sapiens
aaagtgtgtggagtttgcaaacaaattattgacggtcaaggtatttcatgccgaggccgttgatgctcactgccatcagctgcatcctcc

SEQ ID NO: 65613 - DNA, 87 bp, Homo sapiens
acaacggggacatcagggagaccaggacagaccaagagaataaggaccctgaggatttgacagctaaggatattgaagaaattattg

SEQ ID NO: 65614 - DNA, 75 bp, Homo sapiens
cggtggagaagctcaaggagcgctgcctcaagcacttcctccgtgtcacaaagcagtacctgccccacgtggcgc

SEQ ID NO: 65615 - DNA, 73 bp, Homo sapiens
cataaaatttgttcagcatgatgctgtagagggaatcttaaaaggtgatgctctcttacacaaccttcattct

SEQ ID NO: 65616 - DNA, 74 bp, Homo sapiens
agaagtggagcccaaattagccgcctggatccaaaaacttaatagctttgaaatgattctggggaccattctga

SEQ ID NO: 65617 - DNA, 98 bp, Homo sapiens
ctcccataggcactcagtcaaggatcagttcttaagagcagccccggtaactggaggaatgggagccgttttgatgagaaaaatgggctggagagaag

SEQ ID NO: 65618 - DNA, 75 bp, Homo sapiens
ataaattaaaagaagaattgcggcaagattacagacgttatcttactcagaaggccaatgatgaggccaatcaga

SEQ ID NO: 65619 - DNA, 90 bp, Homo sapiens
ggggtttgtactatcctcggtgctgtggtgcagagctagttcctctccagctcagccgcgtaggtaacacaagtggcaagacagccggga

SEQ ID NO: 65620 - DNA, 74 bp, Homo sapiens
ttaaaaacaggcatccctccaaggtatcaacttgaactgaaggatgactacatcattagaactaatcgactgat

SEQ ID NO: 65621 - DNA, 50 bp, Homo sapiens
tcaagggggaggagtgtccagcagtcgggaacatgccctgtgtgccgccg

SEQ ID NO: 65622 - DNA, 80 bp, Homo sapiens
cgacaagggtgttcccgaactagagtggcagtgtttggccagcgcttggatgagactgtggcctatgaacagaaattcgg

SEQ ID NO: 65623 - DNA, 83 bp, Homo sapiens
tgtctcccgctccgcagccccgggcacggcggaggcagcggagccctgggccatcgtcttcccacacaggttgagagaggagg

SEQ ID NO: 65624 - DNA, 88 bp, Homo sapiens
caatgctgctaccttgtcacagttttacatcaataagtccagaccttttagccctcccattcattcttccagccctcctccaatagca

SEQ ID NO: 65625 - DNA, 75 bp, Homo sapiens
tcttacttcaggaacaaagctacgtttttccagatatgcacccaatgtccagggagcgtgcaaaatttgtcaaaa

SEQ ID NO: 65626 - DNA, 100 bp, Homo sapiens
ccgcagcccccgtccggcggcctcacggacgaggccgccctcagttgctgctccgacgcggaccccagtaccaaggacttcctcgttctgcccatcttcc

SEQ ID NO: 65627 - DNA, 82 bp, Homo sapiens
ggcgagaacgtccactgcgggccggcgaaagctggtcctgtccctgggcgccgacgtgctgcctgagtacaagctgcaggca

SEQ ID NO: 65628 - DNA, 87 bp, Homo sapiens
cttagaggcagaggcagctcttcagcctatggggggccagtgtcattcaaagatgtggctgtggatttcacccaggaggagtggcgg

SEQ ID NO: 65629 - DNA, 50 bp, Homo sapiens
cacgagtcctgagtcggttaaggtgaccaagaatatggcccaggtgacca

SEQ ID NO: 65630 - DNA, 90 bp, Homo sapiens
ctaaagtggagactacaaaccacagaggaatcttttattccactgacaagttgcatgatcagatggtaaaaatcaaccaaaatctgcatc

SEQ ID NO: 65631 - DNA, 74 bp, Homo sapiens
gcggaggcggcggggagccgcgcgcggcaggccaccagcccctcgggttccaagatgcagctactggagacaga

SEQ ID NO: 65632 - DNA, 100 bp, Homo sapiens
aaatgattctgatcgcaaatacctgaaagattgggcaagagaagaattcagaagaaacaaaagtgccaccgaagaggtgtcgtgaaaactacccctaaaa

SEQ ID NO: 65633 - DNA, 100 bp, Homo sapiens
ctctttgtcactccccggcggcagcacgaaagtaccatcatgcagcagaactgattaaaacagtggcatctcgctatgatgaatatgttaatgtgaagga

SEQ ID NO: 65634 - DNA, 90 bp, Homo sapiens
aacagcatcttcagcctgctcagcttcgagaagattggctacacagagctgaaaccaccaatgggtgaggtcgtcacccctacggccccc

SEQ ID NO: 65635 - DNA, 50 bp, Homo sapiens
gacgaccgacagggtggtgaaagatggcccactgcgtgaccttggttcag

SEQ ID NO: 65636 - DNA, 90 bp, Homo sapiens
gtgtggtctacgggctggcagctaccatgatccaagaggctgcccggcagctctgacagactcagaggacgagtccccagaagacatgag

SEQ ID NO: 65637 - DNA, 100 bp, Homo sapiens
accgtcatcaacgggcagtttgtcgaacgatgttggactcatagtcactgccagaaagagcacgtgcccccggagctgtgggagcccttctataccgacc

SEQ ID NO: 65638 - DNA, 75 bp, Homo sapiens
ggcgctccttcccgctccctcacacaccggcctcagcccgcaccgctgtttaaggaagacagagcaggcattgga

SEQ ID NO: 65639 - DNA, 110 bp, Homo sapiens
acgggccggagggaggatgttaaagccccgcgtccctgctatgtggatatttggtagcaatgactgatgtggaaactacatatgcagattttattgcttcaggaagaaca

SEQ ID NO: 65640 - DNA, 100 bp, Homo sapiens
agcagcagaaaatgaccatgttacagttaaaggcattaggatttcctgaaggacttgtgatacaagcgtattttgcttgtgagaagaatgagaatttggc

SEQ ID NO: 65641 - DNA, 50 bp, Homo sapiens
gggctggagggacgactgccatgggctgagtctgggccccaggacccacg

SEQ ID NO: 65642 - DNA, 82 bp, Homo sapiens
cccaaatgtctgactctgactctcggactgagaaacgcaaggacactcatgaggaccatgatacttccactgagaatacaga

SEQ ID NO: 65643 - DNA, 82 bp, Homo sapiens
tggagctggtcgcagatcctgagacccggacagtggcagtgaaacaggttacccatgcagttgttactgtaccagcctattt

SEQ ID NO: 65644 - DNA, 109 bp, Homo sapiens
gggcgcgtgctacggggacgacgcgtgcttcgtggcccggcaccgttccgcggacgtgctcgacacgatgaggcgagtggtacgacagagcaagtttcggcatgtattt

SEQ ID NO: 65645 - DNA, 90 bp, Homo sapiens
tgcagcagctcttctaccagtggaaggagcaccggcagcaccagtgtgtgaggggagcaggcagcggtcctagccagttccttgatcctg

SEQ ID NO: 65646 - DNA, 95 bp, Homo sapiens
ggcgtcggtcgtcggtggggtcggagctgggcgcggagcccctcacagtgcaggccaagcccagcattcggtgcttcattaaacccaccgagaca

SEQ ID NO: 65647 - DNA, 100 bp, Homo sapiens
catctgcccaggctataatgcggtgctgcatattcatacctgtattgaggaggtggaaataacaatccgagtgatggtggacctgtgcaacagcaccaag

SEQ ID NO: 65648 - DNA, 75 bp, Homo sapiens
tttgatgctcttgtgctcagtgacatcattcagaggaaggcttgctgtaccgggcacgctactttggcgacacag

SEQ ID NO: 65649 - DNA, 99 bp, Homo sapiens
cacagcagaagctctgaatcgtgttcctgaatgaaagaagtcagatctgatgagacgacaggaagaattaagacgcatggaagaacttcacaatcaaga

SEQ ID NO: 65650 - DNA, 96 bp, Homo sapiens
cagcacttccggtcacgccatcgttgctgccttcttcgtcaaggtggatccataaagaacccagccaacccgcagagggaggggaggggctgagct

SEQ ID NO: 65651 - DNA, 50 bp, Homo sapiens
atccagatgaggatatatccctgatggcgaggaagctcagtgtattggaa

SEQ ID NO: 65652 - DNA, 97 bp, Homo sapiens
atggcttagtggttcctggatgttcctggatgcctgacatcacattgatacatgctggaggtctggctcagcccacagggaacccagactggttgga

SEQ ID NO: 65653 - DNA, 73 bp, Homo sapiens
ttagctgaggaggtcaatttaaatggttctggcaaactgctcaagaaatggaatctatttggaatttgcagaa

SEQ ID NO: 65654 - DNA, 75 bp, Homo sapiens
aaccctcgggactttattgattgcttcctgatcaaaatggagaaggtaatcaaatgcaaagcagctgtgctatgg

SEQ ID NO: 65655 - DNA, 98 bp, Homo sapiens
gtgattctcgggccgatgttctcaggaaaaaggtacatgtccagggccgccgggtccccttccccattgccagcccctgaccctgcacctaagtctga

SEQ ID NO: 65656 - DNA, 82 bp, Homo sapiens
caagactctcttcgctctttgcatcttaactgcagcggagctggagtttgttcagatcatcatcatcgtggtggtgatgatg

SEQ ID NO: 65657 - DNA, 100 bp, Homo sapiens
tgaaacttttatctcatctggcttggcgcctgaggttctcccattagaaatacatgctacaggatttaactatcagaatgaagatgaaaaagtcaccttg

SEQ ID NO: 65658 - DNA, 82 bp, Homo sapiens
tggaagatgggaagaaagaagcagctgccagcggaagatggagaaccgtgattaccgggatgcacaggagtttgctgctgat

SEQ ID NO: 65659 - DNA, 75 bp, Homo sapiens
aatgggaagaatgagagaagtcatatgcccggcacatgccagaaatcacatccaaagtcagttccagtttcttca

SEQ ID NO: 65660 - DNA, 89 bp, Homo sapiens
cgcagacctcgcctgtggcagatgcaccgatgctgatggaaagttaagcgtgaaatttggggtcctcttccgtgatgataaatgtgcca

SEQ ID NO: 65661 - DNA, 90 bp, Homo sapiens
gacggactgggggcgccgcccgcgcccgggaccgacccctctgctcgcggccgcgcctttgaggagctgacatggacccaaatcctcggg

SEQ ID NO: 65662 - DNA, 83 bp, Homo sapiens
ctccggggacaagaaactagagcaaataaccgttttgaaattgctcctgcaacacagcagcaatggcaatttggcggacttct

SEQ ID NO: 65663 - DNA, 98 bp, Homo sapiens
cttacaagcataatactcaccctactattgagacttcctgggaatgaaaatggttggtgagctgctacgaatgtcgggtgcctttttcatgcggcgta

SEQ ID NO: 65664 - DNA, 98 bp, Homo sapiens
agaggaattgggtcccacaaggccaagtggggaagcagaaacaactcagatggagttatccccagctcccactataatagagatggtttcagcatgtt

SEQ ID NO: 65665 - DNA, 90 bp, Homo sapiens
accagtgctactgctatggccgtggcattggggagtggcattgccaacctttacagacctatccaagtgaccaagaatatggcccaggtg

SEQ ID NO: 65666 - DNA, 80 bp, Homo sapiens
gataaattcccggaaccgcgattcggcgtgtcaggatatctatagagaaatggggtttggtcactatgaagaagaagaaa

SEQ ID NO: 65667 - DNA, 83 bp, Homo sapiens
gagaagtttttatcaacaaaggcaaaggattcggatttattaagcttgtgagaatgagatggtgatcatgagacctggaaaca

SEQ ID NO: 65668 - DNA, 85 bp, Homo sapiens
cgagaacccgctggtttattgcgacgggcacggctgcagcgtcgcggtgcatcaagagccaaatctcctcagccacctgttgaag

SEQ ID NO: 65669 - DNA, 82 bp, Homo sapiens
gagatcatggacgcggcggaaacaatgcagatcttcgtgaagactctgactggtaagaccatcaccctcgaggttgagccca

SEQ ID NO: 65670 - DNA, 100 bp, Homo sapiens
agaacatgtttttctaagccctttttgtgccaggtgtcccgttaacgtctctgttagttcagagggtgcagcagttggaggaagaaaatacagagcttag

SEQ ID NO: 65671 - DNA, 82 bp, Homo sapiens
acccatgttcatgtctgaggtgatccaggcctatgaaactctgcatgaaacgggctgtaaaggcagaaaaccacgtcgtgaa

SEQ ID NO: 65672 - DNA, 98 bp, Homo sapiens
cctttctgaggcagatacccaggaactaacccagccttcacagttgttgatcacatagcatggtcatccactcacagcttaaaaaaatacagggagca

SEQ ID NO: 65673 - DNA, 50 bp, Homo sapiens
cggcgcccccaccccatccccgggaggcagctgttgtgctgtgtatggac

SEQ ID NO: 65674 - DNA, 83 bp, Homo sapiens
cggtaattactattcgtctgagagaatggctggtatatttgcttacttaaactaccatgttcctcgaacgagacgagaaatcc

SEQ ID NO: 65675 - DNA, 82 bp, Homo sapiens
cgcccgccttccgccgtctcttcgagttcttcgtgctgctcaagctattactataacaagcgcattctgcacaagaccaagg

SEQ ID NO: 65676 - DNA, 96 bp, Homo sapiens
aggtgcctgccaccacacccagcagggcactgtgacctttgaagatgtggctgtgaacttttcccaggaggagtggtgtcttcttagtgaggctca

SEQ ID NO: 65677 - DNA, 80 bp, Homo sapiens
aggagccgcgggcggcgcggcccagctcgttccaggacatgaacaagctgagtggaggcggcgggcgcaggactcgggtg

SEQ ID NO: 65678 - DNA, 75 bp, Homo sapiens
accatgctattatgcatagaaaggctcataggcgaaagggaattgccttatttcgaatgagactttggactgtgg

SEQ ID NO: 65679 - DNA, 100 bp, Homo sapiens
ggcgcggagcgcgcgtgtggtccttgcgccgctgacttctccactggttcctgggcaccgaaagatgccaattctcggaagcaagaagcagagtggaaag

SEQ ID NO: 65680 - DNA, 82 bp, Homo sapiens
ccgggagatcgctcagctggccgtgtcctggcaggacagagcgggatgccaccagcttgtccaaagggaagttccaggagct

SEQ ID NO: 65681 - DNA, 83 bp, Homo sapiens
ctgaaatatttatggatgaaattgtcagatgcctagcatttgctccatgataatctgaggggttcaacagaaatatttggtgg

SEQ ID NO: 65682 - DNA, 88 bp, Homo sapiens
agcagttggtggctctcattccctatggggaccagaggctgaagcccaagcacacgaagctgcacaagccttaatttatgctgagatg

SEQ ID NO: 65683 - DNA, 80 bp, Homo sapiens
gatggagaccaatcacccacccagtgtgcggttgacatcatggacatatgtgagtccatcctggagaggaagcggcatga

SEQ ID NO: 65684 - DNA, 100 bp, Homo sapiens
ggttattgcagtggcaggtgcacgcttatctttatctgtggcatgcaactggttatacattggctcttcaaagacgttcacctcatcagagaaatccctg

SEQ ID NO: 65685 - DNA, 75 bp, Homo sapiens
caaaacttgggacaaactgtcagccttggtgaaattcgatgctactgtgatgctgcccactgtgtagccactggt

SEQ ID NO: 65686 - DNA, 87 bp, Homo sapiens
catccgcatcaacaagatgttgtcctgtgctggggctgacagctctggattaatcgaattacagctgctagccaggaacatggactg

SEQ ID NO: 65687 - DNA, 75 bp, Homo sapiens
ctcaggagaccaggaaaatggccacagggctcctgagagccaaaaaagagaatccaggagtcctccagctgagaa

SEQ ID NO: 65688 - DNA, 97 bp, Homo sapiens
ggtcacgaaatggattggagtgaaccggagaccccgaaaacggaagcgcagggagaaggaagaggtgtttgaaaagagtcaacctatttgatttctt

SEQ ID NO: 65689 - DNA, 74 bp, Homo sapiens
agcagtgaagacagcagtgatgagtctggtgaggaagaggatggagatgaagatgaggaagctgagtcagctac

SEQ ID NO: 65690 - DNA, 50 bp, Homo sapiens
ctggaagagcaggtactataaaagaggacttggatgttgtgggtgatggt

SEQ ID NO: 65691 - DNA, 96 bp, Homo sapiens
taattgggcagaagagaagcagtgaaggagtgcagaggcatcacctgaaagacctcagagaagaatctgactggcattatctccagcttagcgacc

SEQ ID NO: 65692 - DNA, 99 bp, Homo sapiens
caccgggatcgtgaccgagaccgtgaccgagagcgtgaccgagagcgcgaatatcgtcatcgttagaaggtaagaaccttgatgctgtccatgatatca

SEQ ID NO: 65693 - DNA, 74 bp, Homo sapiens
cgctggggtcccttttgcctcagatactattttgaagccctgcctctttcttgtcgcagtcagtttcatcatca

SEQ ID NO: 65694 - DNA, 82 bp, Homo sapiens
ctcggacgaggaggacgcgcccgccaccgacatctactttggctgggttacgacccctacaaccctgagctgcccaagcccc

SEQ ID NO: 65695 - DNA, 75 bp, Homo sapiens
gggagaagagccatgccgaaattgcagaacaggccaagcatggcaattgaaggaacagactaaaaatcgtgtcct

SEQ ID NO: 65696 - DNA, 75 bp, Homo sapiens
cgcggagtgggcgatgccagcgtgccagcgcatcagagcagagtgacgatgatcctgtttgtcctggagctggag

SEQ ID NO: 65697 - DNA, 83 bp, Homo sapiens
gcacctcccgcgccgcacggtggacgaggaactgtggctgcaccatctgtcttcatcttcccgccatctgatgagcagttgaa

SEQ ID NO: 65698 - DNA, 49 bp, Homo sapiens
ataacatttgcagagcgctttcacagtgtatttgtgtggcgatgtctgt

SEQ ID NO: 65699 - DNA, 110 bp, Homo sapiens
cggaagaccgcgcgcagggcctgcagcgggagctggacggcgagcgcgagcggcgcgagaaaccttatgccagcctggaccatcttggaggcagtgtaggatcatggaag

SEQ ID NO: 65700 - DNA, 75 bp, Homo sapiens
aatggcggcgcggtggagctctagacaggtgatttggcttctgcacagttaggaggagcaccaaaccgatgggag

SEQ ID NO: 65701 - DNA, 89 bp, Homo sapiens
gcaagaaaacaagcagcttctgcacgacgcactggcccaggacctgcacaagaggcggccttagcaacatgctgttccagtgctcccta

SEQ ID NO: 65702 - DNA, 51 bp, Homo sapiens
tccatttcaaggacttgctgctgcacgaattggcccaagagagagaagcag

SEQ ID NO: 65703 - DNA, 75 bp, Homo sapiens
ttataccaaggttcaacaagcttatcgacttcttggaaaaacacaggtggctttaaccaagagagcagatccagc

SEQ ID NO: 65704 - DNA, 100 bp, Homo sapiens
atcagagattgagaatgtccatggatttgtttctcattctcatatttcaccaataaaggcttcagcaaccaggagggattgactgagatcttaacaacag

SEQ ID NO: 65705 - DNA, 100 bp, Homo sapiens
ttgaaaacttaacacggatgctggtgacctcttcttccctcacgttgcaacaggaattaaaggttcccagtgcccccgacaagcccctgctggtgtctcc

SEQ ID NO: 65706 - DNA, 75 bp, Homo sapiens
ttccccacgcaaccccagatccatttacactttacacaaattcaacacccaacagcttccttaatagcaaaggta

SEQ ID NO: 65707 - DNA, 76 bp, Homo sapiens
caacagtgcagtctgcagagacttcaacatccctggcttcccgactgtgagggtctgcagaaccatagcttccacg

SEQ ID NO: 65708 - DNA, 100 bp, Homo sapiens
ttcttgtccgggtgcggataagggacccgacactgatgaaagaccacagcaagattctttcattcgtctcctcctagcctgggggaccaggctcgaactg

SEQ ID NO: 65709 - DNA, 100 bp, Homo sapiens
aaggcagtagtttgggtgtgatggagggaaggcagcatggcacgctgcatggagccaaaatcgggtctgaggaaatttggtgagcggcctccacctaaac

SEQ ID NO: 65710 - DNA, 75 bp, Homo sapiens
ggccgaggacatcatgcgcctccgggagaagcatctctgggaaaggacctggggctggtgaggggcccggaggag

SEQ ID NO: 65711 - DNA, 83 bp, Homo sapiens
tttgtggcaagacaagctcagaactgagaagctgtcaccacaggttgatgataattagaagcatgctttccactgaacttccc

SEQ ID NO: 65712 - DNA, 75 bp, Homo sapiens
caccgccgccacaccgccgccacaccgccgctgcctcagtcatgccgaattggttccttccattatgagcaactt

SEQ ID NO: 65713 - DNA, 98 bp, Homo sapiens
gttccggcgccggacccctatttgcaaagcaatcttcctgagctcttttcgggtgccatatgaggaaatcagaatgatgatattggaagtagatgaaa

SEQ ID NO: 65714 - DNA, 82 bp, Homo sapiens
gagaaaaccagctgagacagggcgccacttactaggtttggtgcacctcgatttggaggaagtagggcagggcccttatctg

SEQ ID NO: 65715 - DNA, 75 bp, Homo sapiens
taccgcaagggcaccatctccttctttgagattgatggacgtaagaacaagtgtggcaaaggagcagagaacttt

SEQ ID NO: 65716 - DNA, 100 bp, Homo sapiens
tggagaattatccaacaagaaaaagacctgtggctattaagataggctgggcttggagcccacaggaccctagaagtcctttaagaacatttaacgctgg

SEQ ID NO: 65717 - DNA, 100 bp, Homo sapiens
aagagaagaaggtgacagccctgccccccaaggaagcgtgcaaatgccagaaagaggatttggccagagcgttttgtgcccggaggctgtttgatgtcct

SEQ ID NO: 65718 - DNA, 101 bp, Homo sapiens
gcttcccctttccagagagccagaaagaagtactaggttttgacaagcttgcatcatgcgtgagtataagctagtcgttcttggctcaggaggcgttggaa

SEQ ID NO: 65719 - DNA, 76 bp, Homo sapiens
aatgacttcctgaaaggatgtgcaaccctccaagtggaaatataacacgtgggaaccggaggagaacatcctggac

SEQ ID NO: 65720 - DNA, 75 bp, Homo sapiens
cccggattcaggattcagatgaaccaggaagaagaaattgtcgagacgaataacatgaggtcatatagaatccca

SEQ ID NO: 65721 - DNA, 75 bp, Homo sapiens
tactatgtcggaacagctggatttacctgtgagacaggcagggagacttgcagctcctctgctgaaacgtttaag

SEQ ID NO: 65722 - DNA, 97 bp, Homo sapiens
agagccccttgcagaagacgccgtacgagatgccttcaattaagttgcagagttctgatggagagatatttgaagttgatgtggaaattgccaaaca

SEQ ID NO: 65723 - DNA, 96 bp, Homo sapiens
gcgcaacgccaacctcaggcgagatgctcatgctcgcctgatgtttcgtgatactgtaactctggaagacgctattacggtggtgtcagtcatgga

SEQ ID NO: 65724 - DNA, 75 bp, Homo sapiens
gaatttgctagtaacgtcatggaggatgaacgacaggctttcttagaaatggcttctgaggaagctgccgttact

SEQ ID NO: 65725 - DNA, 75 bp, Homo sapiens
atcgcatcctatggctcaaagaaagatgattatgcagaagaagagttcaacatagagaaaggtcggcttgtgcaa

SEQ ID NO: 65726 - DNA, 51 bp, Homo sapiens
agtcctgtcctcttctgaccaaagagcacgtgtggttctcaaatataggca

SEQ ID NO: 65727 - DNA, 100 bp, Homo sapiens
cctgtgtgggagaccatcgtgtgcaccatgcgagaaggggagattgcccagttcctctgtgacatcaaggccatcaccatcgaggctgagccaagagctg

SEQ ID NO: 65728 - DNA, 75 bp, Homo sapiens
ccttcgagcaccccaacgtggtcagggatcatagacggtatttctatgtaaacgaacagtcgggcgagtctcagt

SEQ ID NO: 65729 - DNA, 96 bp, Homo sapiens
ctacgtcaaggtgaaggtggagccctcaggcatcacatgtggagacccccctgagaggttctgctcccatgtgaccttgggaaaggtgttgaaagt

SEQ ID NO: 65730 - DNA, 89 bp, Homo sapiens
cggcttcctagtgagtcggcggctgatttagaaggaggttcaggctacggtgagccgaagacccctgaatggttggacagtgattcctg

SEQ ID NO: 65731 - DNA, 74 bp, Homo sapiens
caagccgtggaataggtgtatcaagtaatggtgcaaagcctgaatctgtggattctagccttgggggtctttca

SEQ ID NO: 65732 - DNA, 82 bp, Homo sapiens
gaggagcagggcctgactgcgcaggtgtcgtgaaaactacccctaaaagccaaaatgggaaaggaaaagactcatatcaaca

SEQ ID NO: 65733 - DNA, 75 bp, Homo sapiens
gaattgttttggcctaggatcatccagatgatggtgtgagcatccccggggagtacacttcctttctggctccca

SEQ ID NO: 65734 - DNA, 94 bp, Homo sapiens
ccctgaccaaccatgaccgagagccggacaatggcaaggaggagcaggaacggattttttatcaagcagaaatgcatcgaacaacgagaatcaa

SEQ ID NO: 65735 - DNA, 75 bp, Homo sapiens
tgcccgtgagcctgttgtcggggccagtctgcgctcctcagaccaccggcaggtgaacagcctgatgcagaccga

SEQ ID NO: 65736 - DNA, 100 bp, Homo sapiens
caccagagagccagctgccgagatagaagccttgctggggatggatctggtcagccaaggccacctttgatgccatttctaagacctacagctacctgac

SEQ ID NO: 65737 - DNA, 83 bp, Homo sapiens
cgaagtggagagtgacatgcagttggatggcggtgactgcgtgattgtgcttcaagaagaccatagggaagaacgcattttca

SEQ ID NO: 65738 - DNA, 101 bp, Homo sapiens
gccagctcttcatcaaggagctgcggagccggacctttcccagactcttccaagcttacagctggagctcctggaagctatttcatactctcgtgcaaggg

SEQ ID NO: 65739 - DNA, 83 bp, Homo sapiens
gctgtgcgagagcctcctcacttggattgacaagtatctctatgccatgcggctctccgatgaaactctcatagatatcatga

SEQ ID NO: 65740 - DNA, 90 bp, Homo sapiens
ggtgacctgtcctttcagcttctttctcacacgcagatgaacactggacttcagaaatgtactctctgcccttgacatactccaacctcc

SEQ ID NO: 65741 - DNA, 75 bp, Homo sapiens
gcttcggaacaagagaccctgtgatgatcatgtgaagtttttctgctttcaagtactggaacatcaagttaaata

SEQ ID NO: 65742 - DNA, 112 bp, Homo sapiens
tctgttttgcctgaatacatgatttaaacaagagatttccacagaagaagggagagaaggtacccaaagggaaaaagggaaaagctgatgctggcaaggaggggaataaccc

SEQ ID NO: 65743 - DNA, 50 bp, Homo sapiens
cgccgtcagagccgccctatcagacacccatcatactgactccaagcccc

SEQ ID NO: 65744 - DNA, 90 bp, Homo sapiens
cgttagtcccttaatacaaaggttacgttatgatgatgaagtgaagcgggtggtggcagagccggtggagttggcccaagagttccgcaa

SEQ ID NO: 65745 - DNA, 74 bp, Homo sapiens
tgggaaatcagggcatcggagagtgccacattaatggtaaaagatgatgaatgcgagtcagatgcagaaaatga

SEQ ID NO: 65746 - DNA, 78 bp, Homo sapiens
acggtcagagtccaaggtccgggtatcttaccagatgccacttcaaatgaacaacaagagcttttctgtcagaagttg

SEQ ID NO: 65747 - DNA, 75 bp, Homo sapiens
ggaagaatttgaagacaaagagtggacatttgtcatagaaaatgcagcagaagatgtcgttttcattggacctga

SEQ ID NO: 65748 - DNA, 90 bp, Homo sapiens
tgagagagctttgaaatacttcttacaggctacccatgttcagccagggcccctcagcagaaggcagaacagaaccgagttcctttagaa

SEQ ID NO: 65749 - DNA, 100 bp, Homo sapiens
ctgtccccagagcctcagtttgtgcaggacaccgacatggaacagggactcactggggtgccctcggctagcatgacccgcctgatgcggtcccgcacag

SEQ ID NO: 65750 - DNA, 75 bp, Homo sapiens
gattgtcactccaacctcttttcgctgattggtttatcttggaagctaaagggcattgctcatcctgaagatcag

SEQ ID NO: 65751 - DNA, 75 bp, Homo sapiens
tctcatcaaagccaggctgctttattgcaggtgctgatatcaagcttctgggaacttggcagacgcagcttagag

SEQ ID NO: 65752 - DNA, 82 bp, Homo sapiens
tagttgtctacctggatcgggcccaggatcttcctgatgttccagatgaccttgatggtgcccccatcgaggaagagcttga

SEQ ID NO: 65753 - DNA, 100 bp, Homo sapiens
tgaacagactagccactttgcattgactggaaacaatggcatttacagaaagagtcaacagcagtggcaacaggatatcctaaacctgaggaaggaatac

SEQ ID NO: 65754 - DNA, 83 bp, Homo sapiens
tctggaagttctgaggaaaagcagagcatggatcattttgatgacattggtcccagtgttgtaatggcctccccaggcatgat

SEQ ID NO: 65755 - DNA, 100 bp, Homo sapiens
cttgagttggtataaactcctgaagggtgttgtgctgggatgttactttgggcctgctgcactctacatttgggcagtggggatcctggctgcaggacag

SEQ ID NO: 65756 - DNA, 80 bp, Homo sapiens
ccccggacgagctgacggtcaagaccaaggatggcgtggtggagatcaccggacaaatccttcagaaagatcaggaaatc

SEQ ID NO: 65757 - DNA, 100 bp, Homo sapiens
ggcccaccaaaaccattgccaaaggatggatatgacttagtgcaggatgctgaaaacgccattcaacagatgggtggccagtggcttggtggaagacaaa

SEQ ID NO: 65758 - DNA, 76 bp, Homo sapiens
ttgtcatttggaagaagcgaagagatgggcttccccaaggatttattgacattgctacttgagtgtgaacagttac

SEQ ID NO: 65759 - DNA, 75 bp, Homo sapiens
tcgcgactccccacacagcgagaggtgtttcccattaaacactaccaggacaaaatcaggccttacatccagctg

SEQ ID NO: 65760 - DNA, 50 bp, Homo sapiens
gttatccaggagccacaaagtgaggttttagctgaaaaggttcatatgag

SEQ ID NO: 65761 - DNA, 75 bp, Homo sapiens
ggccacgcgggtggaggtgtccgtgtcctgcagacaggggcaagtgtccgagtggtgaatcagctacttacagag

SEQ ID NO: 65762 - DNA, 82 bp, Homo sapiens
cgaggtccgtgtggccaacgagctcaacgccaggcgccgctcctttacaggagggtgtgaagacagagaatgaccacatcaa

SEQ ID NO: 65763 - DNA, 100 bp, Homo sapiens
ggtttctgcttcaacaccaagagaaaccgactgcgggaaaaactgactcttttgcattatgatccagttgctgcacatcattgactcctgggcccaactg

SEQ ID NO: 65764 - DNA, 51 bp, Homo sapiens
attttctactgtccctgcgcgagaccagaatccgtagaagctagccctgtg

SEQ ID NO: 65765 - DNA, 89 bp, Homo sapiens
ggcgagttctcggtcaccatgtggtcctcagcggctggactctattacctggcagaactgatagaagaatacacagtggccaccagcag

SEQ ID NO: 65766 - DNA, 83 bp, Homo sapiens
ttgagattgacgcggtgaactctgtccagttttcaaaccacacagatgccatggacaatattaccaggcagaaccaattctac

SEQ ID NO: 65767 - DNA, 88 bp, Homo sapiens
tcccacggacgcgcgagacaatgaggaggtaggatccatgccaaaagagcttctgggggaaagctcatcttctatgatcttcgaggag

SEQ ID NO: 65768 - DNA, 98 bp, Homo sapiens
gaaagcaagggattgctggctacagcttcagaagaccgaagcgttcgtatctggaaggtctcctctgagcctccggcctccataagacccaaaacaga

SEQ ID NO: 65769 - DNA, 75 bp, Homo sapiens
tttgtatggacaggcttgtccatctgtaacttcattaaggcagtacttaattttcctaaatattgtgaacccgtg

SEQ ID NO: 65770 - DNA, 50 bp, Homo sapiens
gcggtgaaggaagactgcaaagtctctaagcgaaagacatgaggcctcag

SEQ ID NO: 65771 - DNA, 97 bp, Homo sapiens
gagctgtcagagcccggggacggcgaggccctcatgtaccacacggaaacaagcctccaggtctgcttccccgcaaaggactatacatggcaaatga

SEQ ID NO: 65772 - DNA, 100 bp, Homo sapiens
tggacatcaagattaaaagagcgaataaagtttatcacgccggggtgacttaagagattaaaattaatttggttgctgttggttctgaacaaataatgag

SEQ ID NO: 65773 - DNA, 100 bp, Homo sapiens
gctgtgggacttcgaaggagggctctcctgtctgccaccatcctgggttgacaattctacacaaggaggccgaatacatcaagcaatggtaacatcttta

SEQ ID NO: 65774 - DNA, 95 bp, Homo sapiens
aaagatgacggatgaaaagaatgaacactgtccttcaaaacgagtattacatcaaataccaataacggatctatggtggtccacagtagttacga

SEQ ID NO: 65775 - DNA, 88 bp, Homo sapiens
aaatcgcttggttaaaacctgacacttttaacagcactggccccctcaccttttcctttccagctgtttggggctcagctaagtgacc

SEQ ID NO: 65776 - DNA, 90 bp, Homo sapiens
gccagctcaaccgcttcgtgcaactctccgggcggccgcacctgccaggtgtggccgacgacgatgccctcgctgaggagcgcatgcgga

SEQ ID NO: 65777 - DNA, 83 bp, Homo sapiens
acaggccctcgttgcccagatttccagggtctccctccactgctgtagtaacccgggtccggggcctcggtggtgctcctgat

SEQ ID NO: 65778 - DNA, 87 bp, Homo sapiens
ctgccccagccagtaccagcgccgtgccctctggaccccgaggttggaccctactgtgacacacctaccatgcggacactcttcaac

SEQ ID NO: 65779 - DNA, 82 bp, Homo sapiens
ctggaccagcagaaacctagagtggtcactggagttctggatgattgcttgtgtgatattgacagcatcgataacttcaata

SEQ ID NO: 65780 - DNA, 51 bp, Homo sapiens
gcgtgagtgatcactctcaatcccgggaagcaattttggaggtggtggaag

SEQ ID NO: 65781 - DNA, 75 bp, Homo sapiens
caatctcagggctacaaccagtggcagcagggtataatcttacagggacttaaacatttaaacagagctgttcac

SEQ ID NO: 65782 - DNA, 100 bp, Homo sapiens
gggaggacatctttatggagaccctgaaagacatcgtggagtattacaacgacagtaacggtacaggtttgcagattccgccagcagcacagcaagctct

SEQ ID NO: 65783 - DNA, 96 bp, Homo sapiens
tcaaatatgaccacactacagcctgtacacaacaagacagtttatcttgtccatggggaaagatgaatgggagggctgattttcgagagccgaatg

SEQ ID NO: 65784 - DNA, 100 bp, Homo sapiens
ggcaagccctggtcctgggcaggggacccctgacccaggttacggaccggaagtgctccagaactcaagggccagccaagtctcgggatggtgaacgtac

SEQ ID NO: 65785 - DNA, 100 bp, Homo sapiens
tcagcagactctacagaattcccagtttcttttaacaagatatgtcttgtcgttcaagacttgcaacactaaacgagaaattgacagcccttgaacggag

SEQ ID NO: 65786 - DNA, 51 bp, Homo sapiens
gacgaatcttctggatgtccctggattgaatttctcagctacctcagtgcc

SEQ ID NO: 65787 - DNA, 100 bp, Homo sapiens
atccagcaaggtcggcagagcaaggggcttacgcagaaggacctggccacgtggagacctttggcgacttggcctttggcgacatcttcctccacctgct

SEQ ID NO: 65788 - DNA, 90 bp, Homo sapiens
cccttcccacagactcctccaccttcgacacagcctctgctgcgagaagttctggagaagcagccagtgctaagccagaccgaggcccgc

SEQ ID NO: 65789 - DNA, 100 bp, Homo sapiens
gcagagttagctaaagaactccctcaagtttcatttgtgaaggccaaatttgagtttcatcatggtgactatgaaaaacagtttctgcatgtactgagcc

SEQ ID NO: 65790 - DNA, 78 bp, Homo sapiens
ctggaggctcgcaagaaagccaagaacaagcagctgggccatgaggaagagctcttccccgcagctctgggagacgtg

SEQ ID NO: 65791 - DNA, 80 bp, Homo sapiens
tgaagcttcttctgggagccagctgtgaccagaggaatagctccagccatccggggctgccaggcgcccagctgtgccca

SEQ ID NO: 65792 - DNA, 100 bp, Homo sapiens
gagctgtgaagaagctgtaactcttttaaagtatatgtatgacttttaaaagagagagcttgtgaaactgagggaatagccatgaaccagagaatcagtc

SEQ ID NO: 65793 - DNA, 97 bp, Homo sapiens
gaaatcaccttcagctgtttcctgagttgctgtttcttgggactgcgaagctatacaggctgatttgacgggatctgaactatacacccaggcggcc

SEQ ID NO: 65794 - DNA, 78 bp, Homo sapiens
ttcgcagtggtcgcttcttctccttggtttgacaactattcagccaatgtgatggtggacagcaagccagtgaacctg

SEQ ID NO: 65795 - DNA, 96 bp, Homo sapiens
aaaaactgatgaccaagagaatgtgtcagccgatgcaccgagtccagcccaggaaaatggagagagaggaacgaagggcatcctacgactataacc

SEQ ID NO: 65796 - DNA, 75 bp, Homo sapiens
tgaatggggccagagggctcccgggctgggcagggcacaagagactatagtccccggcagatggcagttcgcgag

SEQ ID NO: 65797 - DNA, 100 bp, Homo sapiens
gagttgtcctgactcctctgaaggtaaacggggcccacgtggaatctgcatcaggcaaacctgtatgtgggactggtggtcatgtgtggcttcgtccttt

SEQ ID NO: 65798 - DNA, 89 bp, Homo sapiens
gcgacgaccctagtgctcgtcgccgtggcgccatgggtgttgtccgcagccgcagatcagtcgcatcgaatacattcattcaaagaact

SEQ ID NO: 65799 - DNA, 75 bp, Homo sapiens
ggcaggaatcccaatttgcctccacttagtgagcggaagaatgagtgaagtcaccctgctgagaaatgaagtggc

SEQ ID NO: 65800 - DNA, 100 bp, Homo sapiens
gaaagtgcagctatcaaccagattcttggcagaagggtagtgggcagcagtcagtgacaggtgtaacctctgtggatgacagcaacagttactggaggat

SEQ ID NO: 65801 - DNA, 74 bp, Homo sapiens
gagaatcgcacctaccaggcttccagcccggatgagagcggttctggtgaggttggaaggatgcagccacccgg

SEQ ID NO: 65802 - DNA, 100 bp, Homo sapiens
gccgacatcgtgtgccgctgccagatgcttcaggactgccccaaggcccgcagggaggtggagctgcactggcgggcctcccagtgcccgcacatcgtac

SEQ ID NO: 65803 - DNA, 75 bp, Homo sapiens
aactggattgtagctgcatatgcccattttgctgtgtgttacagggagtacctgacaggcttccacaagcggaag

SEQ ID NO: 65804 - DNA, 73 bp, Homo sapiens
cctgtgtggccaagaagctggtgtgcggagatgaagatgggtccgctgtgtgcagaggctccatgggatgtgt

SEQ ID NO: 65805 - DNA, 101 bp, Homo sapiens
tgattttcaagcacttgctctggagggaagagcgatgggagagcctcccctggtgaagacacaaactgtcaccatctcagataatgccaatgctgtgaaaa

SEQ ID NO: 65806 - DNA, 144 bp, Homo sapiens
cagaactggacaggaatctggctgaagatgcttcaagcacagaggcagcaggaggttacaaagttgtgagaaaaggcccgaatggaagtggatgcagatggaaatggtgctaagatatttgcctatgcctttgacaagaaccga

SEQ ID NO: 65807 - DNA, 82 bp, Homo sapiens
tcgcctccaggccaagagggatccttcacccgtgtctgaaaaagcttgtggtgaaggggggcaaaaaaaagaagcaagttct

SEQ ID NO: 65808 - DNA, 93 bp, Homo sapiens
acgcgggtctgtcatcatgtcgcgttacgggcggtacggaggaggggacggcaaaacagaacagaaaggcggagataaaaagaggggtgttaa

SEQ ID NO: 65809 - DNA, 100 bp, Homo sapiens
gaaggatttcagcaaatttggagcaggagaatggatcttggagaatgtctgaaagtccatgacctggctttaagagcggattatgaaattgcatccaaag

SEQ ID NO: 65810 - DNA, 100 bp, Homo sapiens
ggcgaggatgcaccttcccctgccttggaaaggtgccagtcacgaattgcccgaacattacctgctgatcagaagccagaatgtcggccatactgggaaa

SEQ ID NO: 65811 - DNA, 100 bp, Homo sapiens
tggcatactcgctggtttgtgctcaagggggatcagctctattatttcaaagatgaagatgaaaccaagcccttgaactgcaaggtgtggaatatttctg

SEQ ID NO: 65812 - DNA, 100 bp, Homo sapiens
ctatgatgtaaaaaggggagtgctgctaaatgcgttgaagctactaaacataaggttgaagctccattcataccaaagtttagaggctctggagatacca

SEQ ID NO: 65813 - DNA, 100 bp, Homo sapiens
caaaaaggatgcacctgtggaccatctggggactgagcactgctatgactccagtgcccccccaaagaagtttccaagggtcacttgtgtctcgtccgtg

SEQ ID NO: 65814 - DNA, 83 bp, Homo sapiens
gcaaagtgcgtgaggagtttaaggagctgaaagcgcggatacgcctttgagtaccttattgaaacattaaatgacagttcaca

SEQ ID NO: 65815 - DNA, 82 bp, Homo sapiens
gaggtgggccggacctgggagtggcaggaaaaggagctctatctcctcgatgaccctctggccgctgtggatgcagatgtgg

SEQ ID NO: 65816 - DNA, 80 bp, Homo sapiens
aacataaaccagtaaagatcggacgtgatggacaggacttctccaggcctcggccgccccagaaggcactcccggcaaac

SEQ ID NO: 65817 - DNA, 100 bp, Homo sapiens
cagaagttgactgagatcagaggccctgtgatgatcgtgtcagcaccggaagcagtactcagaacaagtcatacctaatgctgcaggaaacatttccaaa

SEQ ID NO: 65818 - DNA, 75 bp, Homo sapiens
attaagagcttggaggcggcccgcggccactatcgaaaacgatcggcatcccggggtcgctctggaagtcggtct

SEQ ID NO: 65819 - DNA, 123 bp, Homo sapiens
tcggcgtaaagcacccgggcgcagccggagccggtgccgcagctgcgatggccgtggccgtggggagaccgtctaatgtttctccatcccagagagatgaagtaattcaatggctggccaaac

SEQ ID NO: 65820 - DNA, 76 bp, Homo sapiens
gtcgccgccgccaccatgcccaagagaaaggtgacccatgggctgagggcatacgatggcttgtctctgcctgagg

SEQ ID NO: 65821 - DNA, 74 bp, Homo sapiens
cgaaaagccacttgaagaaaagggtgaaggaggcgaattttcagttgatagacagcgtttgtttgaaaatttgc

SEQ ID NO: 65822 - DNA, 98 bp, Homo sapiens
gccaggggtgaaggccaacatgctgaggacgttcagcagcattcccgtctcacggatatgcaagattctggcatccacgtgagcccagtgatcccaat

SEQ ID NO: 65823 - DNA, 50 bp, Homo sapiens
ggtgctcacggccaaggccacggtgagaagccctaccactgcaactggga

SEQ ID NO: 65824 - DNA, 50 bp, Homo sapiens
ggcggcgatcgagaaagtgcgcaaatgactccgtgggaaggaggcttgtt

SEQ ID NO: 65825 - DNA, 100 bp, Homo sapiens
aaaatacttgctggatggtggactcagagaccaataaaaataaactgcttgaacatcctttgactggttagccagcctctactcaatagtccccccagct

SEQ ID NO: 65826 - DNA, 75 bp, Homo sapiens
aaactacacatctgtgtatgataaaaacaatcttttgacaaataaggtcatggaaaatggaagatttgcaaaata

SEQ ID NO: 65827 - DNA, 83 bp, Homo sapiens
cccagacgggccggcccagagctcccgggtcgtctttcgtgtggccgcgaggtattagaaaactactcggatgctccaatgac

SEQ ID NO: 65828 - DNA, 82 bp, Homo sapiens
cttcaacaagaggacccaggagaaattcgccctcaaacatcccagccatcactcttccacctgctccttagagaagggaaga

SEQ ID NO: 65829 - DNA, 78 bp, Homo sapiens
gagccgctgggagctgccgccaggagctgtcaccatgacggttaggaattttagacccagttctgctactgactttct

SEQ ID NO: 65830 - DNA, 100 bp, Homo sapiens
attgatttgctcttacgtatttgtgtgacttgactcttcaaacacaaagattcccgacagttaagcaatggggagacatttggctttgctcctgcttctg

SEQ ID NO: 65831 - DNA, 98 bp, Homo sapiens
agcttcggagtgtttggcgatggggcagcgcgagatgtggaggctcatgtcgagatatttacagaaagccttctgtgctctagtcgccttgaaaacat

SEQ ID NO: 65832 - DNA, 98 bp, Homo sapiens
acacggtctacaccgacttcgacggttaatttggagtggcccctggagtcagtttcctacaccatccgaggccccacccagcacgagctacagcctcc

SEQ ID NO: 65833 - DNA, 74 bp, Homo sapiens
tcatatccttttcagactacattttcctcacaactgttctttccagtctcagccaatttcttctccagtcatcc

SEQ ID NO: 65834 - DNA, 100 bp, Homo sapiens
gaagggaaggcgcgagtgaggaaaggaggtactgtaggaagttttattcagtgtatgggtctggtcaaagagcttttgatctattcaatccaaacttcaa

SEQ ID NO: 65835 - DNA, 83 bp, Homo sapiens
cagcgtgtcagaccagttctatcgctacaagatgccccgtctgattgccaaggccagaggcattgatgtgcagcaggtttctt

SEQ ID NO: 65836 - DNA, 50 bp, Homo sapiens
ggcggcgaccggcggcgtccgaggagtgagaaggcaaccaaagtgcagga

SEQ ID NO: 65837 - DNA, 82 bp, Homo sapiens
cggccgcgaggccgcagctcccgccgcaggtggctgcgatgggacggaagccatgaatggtgccggccctggccccgccgca

SEQ ID NO: 65838 - DNA, 100 bp, Homo sapiens
acgagaaatgttagagaagaaagacagctttgtggaagaggcatttgggcagtccttctccatccaccggaaggttgctgaagatggagagactcgggag

SEQ ID NO: 65839 - DNA, 74 bp, Homo sapiens
cttcgttaacaagaataaaatgttaggaactagttccaaaggcgtttcatcaaacgggtatatgtgtctttacc

SEQ ID NO: 65840 - DNA, 98 bp, Homo sapiens
atctcttagtccagcaagtcctcatagccagggcccatgaagcttcccatcaccaacagcaggcagcacagaacagcttgctgcccctcctgagctct

SEQ ID NO: 65841 - DNA, 100 bp, Homo sapiens
gacagaatcccactgagacgcttcggagagtgttgccaaaagtcagagccttttatcgaagtacatggatcacaatgagctcaggaggatgggtactgac

SEQ ID NO: 65842 - DNA, 50 bp, Homo sapiens
atgatgtggaggttaacagctatctttctatgccagaccagtttgaccag

SEQ ID NO: 65843 - DNA, 90 bp, Homo sapiens
gtggtattgtggaaattcccagaggactttggagaccagctttaccgatttgttacaactcaagcaagggccagcagaaattctcttttg

SEQ ID NO: 65844 - DNA, 101 bp, Homo sapiens
tggttggtgacgggacagagcggtcggtgacagcctcaagggcttcagcaccgcgcccatggcagagccagacctggctgtgtggagtggtgtgaatgtgg

SEQ ID NO: 65845 - DNA, 144 bp, Homo sapiens
aaccatttctggatgggagaatggcgtgtggaaaatggaatctatattcagaaaagttgaaacagactggcacatgggtcaacatatttcactggcacctattcacaagcttgaagaagctctgtatgaataccagccactgca

SEQ ID NO: 65846 - DNA, 100 bp, Homo sapiens
gccatggcttctggagccgagcaatgccaccgtagataagttggaggacttcatcaacaacattaacagtgtcttggagtccttgtatattgagataaag

SEQ ID NO: 65847 - DNA, 98 bp, Homo sapiens
ccgggcgcccgaagtcatcctgggtatgggctacaaagagaacggtagacgttacatccaagaggaaataatccaggcaaggaagcacaagctgatca

SEQ ID NO: 65848 - DNA, 101 bp, Homo sapiens
ggtgccgcagctgcgatggccgtggccgtggggagaccgtctgtatggcatgaattgccttattcagtttgaagattttgccaatgtgaatgcatttcgtc

SEQ ID NO: 65849 - DNA, 100 bp, Homo sapiens
gaaccggcacggcctcgtgcccttcgccttcgtgcgcttcgaggacccccgatcccgactgggcctcctacactctgggcgtcttcatctgcctgagctg

SEQ ID NO: 65850 - DNA, 75 bp, Homo sapiens
ccagtggtggccagtagaggaggaggtgaacaaggaggaggcattggttcctgtcaccattgaagtagaggtgcc

SEQ ID NO: 65851 - DNA, 81 bp, Homo sapiens
gggagagccagaaagaggacatggctgctgggcagcgggaagcgaggccccaggctggagggcagtggcatgatctcggct

SEQ ID NO: 65852 - DNA, 74 bp, Homo sapiens
tggtggccaacctcttgtatgagaaacgcagcagccgctcttctaaaacattcaaaccaaagaagaatatccct

SEQ ID NO: 65853 - DNA, 82 bp, Homo sapiens
attccacagtgtcctctggaaaatggagcaatttacagcaatgagggatttatacatgaaaaatggacaaggatttgcatta

SEQ ID NO: 65854 - DNA, 100 bp, Homo sapiens
tttgttctctggcatggaaggggtcctcagagttactggggctactgatgcccgaagggcttttccttgctgggatgagcctgctatcaaagcaactttt

SEQ ID NO: 65855 - DNA, 80 bp, Homo sapiens
tgcctcttcatgcagttctccatcgtgccactactctgacctacgacactctccggtttgctgagtttgaagattttcct

SEQ ID NO: 65856 - DNA, 75 bp, Homo sapiens
cgactcccatgcatcggctaatagcccggagacaagcaatatcctccgaatcctaaatctagagctccaaggatg

SEQ ID NO: 65857 - DNA, 83 bp, Homo sapiens
ctggcgggtgccctggctaccatggaccatcctgctggtcagcactgcggctggtggttgtgggaagagaagtttgcagaact

SEQ ID NO: 65858 - DNA, 72 bp, Homo sapiens
ttggaagctgcccgtgccaacaatatgcaagaagtcagcaggtgaagcaaaaaatttattgccatatcttgg

SEQ ID NO: 65859 - DNA, 90 bp, Homo sapiens
gcgggagccggggcggcccttggccgcattcccgcccgtcccgcagcggcgcgcggagccagtctcttgttttcagcagccactgtaaag

SEQ ID NO: 65860 - DNA, 74 bp, Homo sapiens
caacagggacatcgtggagacggtgctcaacctgatacaggtagacctttcgtagagatgtacagtgaaatccc

SEQ ID NO: 65861 - DNA, 100 bp, Homo sapiens
gaaaaagaaacgaggaccaaagccttcagtgtgccaaagaggcggcacataaggattttaaaaaggcagttggtgccttttctgtaacttatgatccaga

SEQ ID NO: 65862 - DNA, 51 bp, Homo sapiens
ttgacctttttgaagcctttgcaaaagtgcctcctatactccttgataagc

SEQ ID NO: 65863 - DNA, 74 bp, Homo sapiens
atttccattcttcttatagtctatggtagtttcaggatttctctgcctcttccaaacttttcctccctgaacct

SEQ ID NO: 65864 - DNA, 97 bp, Homo sapiens
ctctggaagagcccgatttcctcaggaggtgtccctggccagtgtccttccacctgtccacaagcatggggaacatcttcgccaacctcttcaaggg

SEQ ID NO: 65865 - DNA, 74 bp, Homo sapiens
gagaagggcagtggctgtagctgccctttccgtttccagggttccgaccagctggccctgaaggaccctgttca

SEQ ID NO: 65866 - DNA, 100 bp, Homo sapiens
atctcagtggcacggttctacagcagggcaccagagttgggacggcagccctcagtgcctgccatggactgttgaatccttggcctgaatatatttacac

SEQ ID NO: 65867 - DNA, 74 bp, Homo sapiens
ctgtggcgacatgtcgacctgacgctctacacggatgagagggccttaccaaaaggagatttcttccctcctga

SEQ ID NO: 65868 - DNA, 83 bp, Homo sapiens
aaaatagtgatagctttgataaaggtccagttccggccgtaccgcacagacgacttcatcacgcgcctgtactatgagacgcc

SEQ ID NO: 65869 - DNA, 90 bp, Homo sapiens
tggaaggaacgaagttaagtaatttccaagggattgtcaatgaggcagatcagattccgatttgacgggcaaccaatcaatgaaacagac

SEQ ID NO: 65870 - DNA, 100 bp, Homo sapiens
agattacagagaaaaaaccaacaccttcctgtgcagtcctgttggaatttggaatatggagccattgatgatgtagatattgatctgcatatcgatgtta

SEQ ID NO: 65871 - DNA, 83 bp, Homo sapiens
ccgatttaaagctgagctgcgaggaaaatggcggcgggagcaaaatgatgcttcaacacccaggccaggtctctgcctcggaa

SEQ ID NO: 65872 - DNA, 75 bp, Homo sapiens
gacgccggagagaacgaagcctcggctgggagcggcattatccaattggtttgctatttgatcttcttgcatcaa

SEQ ID NO: 65873 - DNA, 74 bp, Homo sapiens
tttaagagaagaaatggacatgattgcctaaatcagccaaacacagggttaatgttcgtgaagaaattgaagag

SEQ ID NO: 65874 - DNA, 100 bp, Homo sapiens
cattcgaacctgcagcaatccctttgagtttccaagtcaggatatgtgcctttcagctttaaagagaattgaaggggttggagtgcttagcggacagctg

SEQ ID NO: 65875 - DNA, 100 bp, Homo sapiens
tggataaggaccagtacctgcccaggaaactgataatctcaggagacactgaagaagggaggctctgtggacagaggagcagtaacaatccccactctcc

SEQ ID NO: 65876 - DNA, 74 bp, Homo sapiens
gcaaaccaaggatctggggatcttcgcactatcccaaggacctaaagtgatccagacttctgcggctaattttt

SEQ ID NO: 65877 - DNA, 98 bp, Homo sapiens
gaaaatcgtgccgatgcctggcatactgcataaatggaagcagggtaccgccacaaccagtgtctctgaagaagatgtctcaagtagatattctcgaa

SEQ ID NO: 65878 - DNA, 146 bp, Homo sapiens
gagaggtttgctgagctggttggccctgtgatccctcaagactggtccacggagtgtatgaccacaaacagccatcaagaaatctcctgcaaagaagctgagccatgcaattagtaaatctttggggtgtgtacccacgagagaac

SEQ ID NO: 65879 - DNA, 91 bp, Homo sapiens
cacgtcttcgcggtggagagcatcgagaagaagcggatccgcaagacaatgcagatcttcgtgaagactctgactggtaagaccatcaccc

SEQ ID NO: 65880 - DNA, 98 bp, Homo sapiens
cctcttgccactcagctgacatatgaaggactcattgatgaaatttatggcattcagaacagcaaatgttctgaaaaagactctgcatgggaatggcc

SEQ ID NO: 65881 - DNA, 100 bp, Homo sapiens
atttatgaagctccgttgactaccgtggagagatcataatttggggttcaagattccagtgcctatgatcagaagccacaagtgggaatgaggccctcca

SEQ ID NO: 65882 - DNA, 90 bp, Homo sapiens
tcgtgttcttcctagcttccctgtatgtgatgatgaccgtcaccaactggttcaaattcttattgccaagtcccctctggctcccttcac

SEQ ID NO: 65883 - DNA, 100 bp, Homo sapiens
agaaatataacagtgaaagtccagtttatgtatggagaggatccaagcaatgccatgccggctaaatgtgaacaataatgtcttggaagagaaattattt

SEQ ID NO: 65884 - DNA, 50 bp, Homo sapiens
catgatcaagggtgttacactgttcttcctgtccaagatccggtcccacg

SEQ ID NO: 65885 - DNA, 51 bp, Homo sapiens
cagctggattcaacagtggaagaggtaaaagatgatgaatgcgagtcagat

SEQ ID NO: 65886 - DNA, 75 bp, Homo sapiens
agaaatgaatgtttccatctcttcagagatgaaccagaggcctgagggagctcaatcctggtagcaacacccctg

SEQ ID NO: 65887 - DNA, 100 bp, Homo sapiens
gctgctgcagcccgcgcacagctgctcccttcgccttcgccctttccacctcgcggcagttcggtgctggaaacatgcatgaagagctgcggcaagcggt

SEQ ID NO: 65888 - DNA, 50 bp, Homo sapiens
cacctacccagtgaccatgatagcttagaccatgctcagcctccaagcag

SEQ ID NO: 65889 - DNA, 98 bp, Homo sapiens
agaatttccaattacagacgacaaagtagcactggatacaatgtctctttgctatatgaccttgaaaatcttccggcatccaaggattccattgtgca

SEQ ID NO: 65890 - DNA, 100 bp, Homo sapiens
gaggctgatatgcaatgtcacttacaacattaatcagatactgcatttaagattgcaaaagttgagaagctcaaaccattagaggtagagctgcgacgcc

SEQ ID NO: 65891 - DNA, 90 bp, Homo sapiens
gatttatgtaatgtcaactttactgagaattttccacctcctgacacaacaccactcagcagtccgttgccactgggcagtatagatatg

SEQ ID NO: 65892 - DNA, 100 bp, Homo sapiens
gctgggcacacagacactgtcactggagtggccttcaacccatcagcgccccagtggacagcggactgcagcgaaccgctggacagcagctgttccttct

SEQ ID NO: 65893 - DNA, 75 bp, Homo sapiens
gctcggatgctgatggggctggacctgctggtgttcgcccacgaccatgaatgtctggagaatgccagagtgccg

SEQ ID NO: 65894 - DNA, 50 bp, Homo sapiens
ggaagttttcagacccctcaagcctgctatttgttcccgacaaggagttt

SEQ ID NO: 65895 - DNA, 100 bp, Homo sapiens
atggcagcgcccagcaacaagacagagctggcctggagtccgcggctggccgcgtgagtaggtgctggagaatctggtaaaagcaccattgtgaagcaga

SEQ ID NO: 65896 - DNA, 100 bp, Homo sapiens
ggacatcaatgagcaagatgtttgtgaagactctggaagctgtgaaaaggaagcagtttgagaagtaccatgccgcttctgcagaggaacaggcaaccat

SEQ ID NO: 65897 - DNA, 82 bp, Homo sapiens
cagaaaatggcttggtagcatacaaagatgggaaactcttgtgtagacagccaaggaagccaaggagaaggcaaaggagacg

SEQ ID NO: 65898 - DNA, 51 bp, Homo sapiens
catgccgctcaccgtagacgagggacatctctacaccgttcccatccggga

SEQ ID NO: 65899 - DNA, 75 bp, Homo sapiens
gctgggccgcaggggcgcgcagcgcggggagctgccaggatcacagaagaactgcagcttcctggggagcagttt

SEQ ID NO: 65900 - DNA, 100 bp, Homo sapiens
ttcaacctgtcaaagccttcttaattatgtctgagaaaaggttcgacccttaaacaatgaaggatcattaaatcttttagggttggagaccattagatta

SEQ ID NO: 65901 - DNA, 76 bp, Homo sapiens
gaaggctgctattgaaagagagtatgcacagatgccttcaattaagttgcagagttctgatggagagatatttgaa

SEQ ID NO: 65902 - DNA, 50 bp, Homo sapiens
gctaaagcagcgtgcgttcagccctgggactctatcaagaagaatatcta

SEQ ID NO: 65903 - DNA, 80 bp, Homo sapiens
gcgggcagcaggcccctcctgcgcacagagacacctatggctgccgatgaaggctcagcagagaaacaggcaggagaggc

SEQ ID NO: 65904 - DNA, 80 bp, Homo sapiens
ccctggagcctcagttggaagcagccgatccagcctgcggagcctgtggggcagattttctctgacactgattgattctt

SEQ ID NO: 65905 - DNA, 100 bp, Homo sapiens
gcaatgggaacatagccctttgggagagttgtgtccaccaggatggcaatgattcagatgaattcatgtaaaaggagaaaaggagaaaaggacctttgaa

SEQ ID NO: 65906 - DNA, 88 bp, Homo sapiens
aacgaacagctcggtggcagggcctgactgctgcggaggcctcggcaatattgattttagacagatgcttcccagaagaaaggaaaga

SEQ ID NO: 65907 - DNA, 100 bp, Homo sapiens
acaaagcatggagaccctccctccaggtgaccttatatccagctgtgaaaagtctgctgcaggagggcatttacctcatcctggacctctgcatcgagcc

SEQ ID NO: 65908 - DNA, 98 bp, Homo sapiens
gcttaagctggtggagaaactcgcaattttacctgctcaagaatggaaacctcctcttccagcttatgattttctaagtatgatagatgccgcaacat

SEQ ID NO: 65909 - DNA, 74 bp, Homo sapiens
aatatgaatttttatttggcagatctgaagggaaagctccagatactagactgagagtggctttcacaatggaa

SEQ ID NO: 65910 - DNA, 82 bp, Homo sapiens
gcgcccgccagctgctccggagatacgttttagttactatccagcagaaaacttgatagagtacaaatggccacctgatgaa

SEQ ID NO: 65911 - DNA, 107 bp, Homo sapiens
gggagtcggggatagtgtcatcggttcggtaaagtttctgttctctggtgctggagaatctggtaaaagcaccattgtgaagcagatgaggatcctgcatgttaatg

SEQ ID NO: 65912 - DNA, 75 bp, Homo sapiens
ctgatgaagaagttattcaagatggttggcagtggaatccctctgaccggccctcctttgctgaaatccaccaag

SEQ ID NO: 65913 - DNA, 101 bp, Homo sapiens
gggctgactgagagcgtctgcttggaaagaccacagcaagattctttcattcgtctcctcctagcctgggggaccaggctcgaactgaccctggacatcaa

SEQ ID NO: 65914 - DNA, 48 bp, Homo sapiens
gcatagctatgcagactctaaattgctttccgtatctatgacatggat

SEQ ID NO: 65915 - DNA, 98 bp, Homo sapiens
gtgctcttgctaaagaggtagcaagaaagaaaattagagtgaatgtagttgcaccaggaactcattatacaatgacaaatggaggcagcattaacagt

SEQ ID NO: 65916 - DNA, 75 bp, Homo sapiens
gttggaatgaatggaaataatgcagcagcagggaaaagcgtagtgacctcttccatcccagtatttgacctccag

SEQ ID NO: 65917 - DNA, 50 bp, Homo sapiens
ggccttccagctgtttgaccgaacaggaatgtatcctgtcaggtataatg

SEQ ID NO: 65918 - DNA, 99 bp, Homo sapiens
gttccaacatggcggagctgacggtggaggttcgcggctctaacggggctttctacaagatgaagttggagcccttgtttttgacattggatcctatac

SEQ ID NO: 65919 - DNA, 100 bp, Homo sapiens
cctcgacttagaagctaccgagttaccctaagaaaggtttgaccccaggactcccctacccacaccagactccccagggcctgatgccctatggtcagcc

SEQ ID NO: 65920 - DNA, 75 bp, Homo sapiens
ggaacacctcgccaaagcagagaaatagccacagacctccaccagcacgaagtggacatcgttgtgtggcagata

SEQ ID NO: 65921 - DNA, 50 bp, Homo sapiens
ctggaccccaaaattaccgagcctccgaccagggagaccttccatcctcc

SEQ ID NO: 65922 - DNA, 97 bp, Homo sapiens
tcctaggccaaccagagattcatctttcatgcagtgacatgttgataaaaaatgatggaggaagaggatggcagggccacgccccagcccatgggcc

SEQ ID NO: 65923 - DNA, 100 bp, Homo sapiens
acatgcagcagaaaatccagggaaatataacattcttggcacaaatactattatggataagatgatgcgccagccagcctttgacacctttgatgggtcc

SEQ ID NO: 65924 - DNA, 100 bp, Homo sapiens
cgggaccatcgccggagcctgaggacacttctctgtcgtcacagttaggtcatagcaaatgacagaagtcccttggtgggcaaaattcactgggagaaaa

SEQ ID NO: 65925 - DNA, 88 bp, Homo sapiens
atgtggtacaggcgttgctgaaccagaagagtggagactgctgcacggactctggaaccatgaacatatttgatcgaaagatcaactt

SEQ ID NO: 65926 - DNA, 100 bp, Homo sapiens
cctaagagactatattcccctgaacagcattctatcatggaaggaggagatgaagggcaagggccaaaatgatgattggtggaacgagaatgcctacacg

SEQ ID NO: 65927 - DNA, 90 bp, Homo sapiens
cagaacccaaggaggtgcaaatggacagagccatactgcgttatagcggccgtgaaggttctgtctgaacaccctccagcacgagtggtt

SEQ ID NO: 65928 - DNA, 100 bp, Homo sapiens
tgcaacatgctcagcaggagcttcatcaacgatatatgtcagatctaaagtctaaagaaggtgcatttattgtcagagattcaagacatttaggatccta

SEQ ID NO: 65929 - DNA, 100 bp, Homo sapiens
ttctgctttcatggagttcacagaagagtcgaggagtgtgaagcctcagtttaggtcatctggtggttcagaacactcaacagagggctctgtatccttg

SEQ ID NO: 65930 - DNA, 51 bp, Homo sapiens
ggcagcgcggacccgcccggagatgagctgagctgactgctgcccactttg

SEQ ID NO: 65931 - DNA, 100 bp, Homo sapiens
ccaggccctgaggtgggccggacctgggagtggcagactccgtgggaaggaggcttgtttaaactacggatgcttttcaaagatgattatccatcttcgc

SEQ ID NO: 65932 - DNA, 50 bp, Homo sapiens
gaaaattctggataatggtgaatggtgtgaaaaaaaaggtgcagtttgat

SEQ ID NO: 65933 - DNA, 75 bp, Homo sapiens
atcaggcagttttgtgtccatgtgaacaactgttaaacccatccagagtaatggctgcggccttacccaggaccc

SEQ ID NO: 65934 - DNA, 75 bp, Homo sapiens
cttcatagcattcgcctactccgtgaagtgccctctggtggtcagaagatgctgtgctgtctcgttaggatgaat

SEQ ID NO: 65935 - DNA, 101 bp, Homo sapiens
gccatcccaagctctactcggaaggggaccccggggagaagctggagctggtggcaggccctggcgtgacgcacgtgatagtgcgggaggatccctgctac

SEQ ID NO: 65936 - DNA, 100 bp, Homo sapiens
gaatgatgaaaacaaaggcctggatgtactggtggattacctgtcctttgcccagtgttctgtcatagttcaaggaggccttccagctgtttgaccgaac

SEQ ID NO: 65937 - DNA, 75 bp, Homo sapiens
tatacacctctgcatgaagctgctattaaagggaagatcgatgtgtgcattgggatgctcctgaaactgaagaca

SEQ ID NO: 65938 - DNA, 75 bp, Homo sapiens
gaccttttaagtttggttctaatgtcaactttgttgttggcaacaatggaagaaggaaaatcacctcggcagtgt

SEQ ID NO: 65939 - DNA, 100 bp, Homo sapiens
tctccaggccccaaggagccacacctggaccagaccccaggaaagatgttttctggcaaaggccttcctgcatttatgaattctctctcaagaagcaaga

SEQ ID NO: 65940 - DNA, 90 bp, Homo sapiens
atgggccctggcggtggacgagcaggaagctgcggctgagtcggaagggaaaaggccgaggcatcagcgtgtgaagaccgcaaagacgat

SEQ ID NO: 65941 - DNA, 98 bp, Homo sapiens
ggagctaggagctggcggcgacggccacaggggcggcgacggcgcagtgcgaagcgaaacagccaagttctatagaaattttagagtattcatcagat

SEQ ID NO: 65942 - DNA, 100 bp, Homo sapiens
gttaaggattccaagtaactcttatttgctgagcaccctgacaccactccacatcgctgccgcccttcctggggaggagggggtacagattgtggagctg

SEQ ID NO: 65943 - DNA, 120 bp, Homo sapiens
gctcctgcaagactctggagccagtcttgaggtcctacatctccgaaagcaagctcttctagaagttggatttaagtgccctgtatgctcaaaatttgtatcctcagatgaaatggattt

SEQ ID NO: 65944 - DNA, 98 bp, Homo sapiens
atatcaatgttctgccatgttgagcctgaacaagatgtagtaactggagttagtcccctgctcttcaggaaactcagtaatcctgacatattttcatc

SEQ ID NO: 65945 - DNA, 75 bp, Homo sapiens
cgaactcggcctatcgctaccctccgaagtccggtcagccatgtcatctgagcctcccccaccaccacagccccc

SEQ ID NO: 65946 - DNA, 75 bp, Homo sapiens
ttcaaaggcacttcgtggggtcacaggggtaaaagcatgtctacgaagaaaagtatgtgaacaggaagaaaagta

SEQ ID NO: 65947 - DNA, 100 bp, Homo sapiens
acaacctcagaggacaacgaagtgttcggggctcacaacgaagtaagacagtagatgacaattctgcaaagcagactgcgcacaataaagaaaaacgaag

SEQ ID NO: 65948 - DNA, 138 bp, Homo sapiens
ggagtcgaagcgagggtctgaagttcacgactactagaaggggaggggagtggaaaggctctcagtgaaaaagccgattacacctcaacaagaaggcaactgacaaacagccttatagcaagctcccaggtgtctctc

SEQ ID NO: 65949 - DNA, 100 bp, Homo sapiens
tcaacttaaaagatgccacctctaagggttatgagagaatttacaatgaaattccggacattaatctggatgtcccacattcatactctgtgctggagcg

SEQ ID NO: 65950 - DNA, 101 bp, Homo sapiens
atccaccatttagaagtctggcaggcaaagaggacaagcctcccagtgcaacgtcagcttaaagaagcagaggagccgcagcatccttagctccttcttct

SEQ ID NO: 65951 - DNA, 75 bp, Homo sapiens
aatcgcttggttaaaacctgacacttttaacaggaccactatgagacctcagtccttctatgatggaagtcattc

SEQ ID NO: 65952 - DNA, 88 bp, Homo sapiens
atggggcgagaaaggtcccactgcagccctccaagcagagctcccagctcctccagcagccgacaggaggcccgtcaagatgcaggca

SEQ ID NO: 65953 - DNA, 100 bp, Homo sapiens
tttctgaacatgcgagatcagtttttcaccaccagctcctgcgctggccgcatcctactccttgaccggacccagttatacatgcatctgacaaactact

SEQ ID NO: 65954 - DNA, 74 bp, Homo sapiens
acaagtccgaggtgatagttacagtgaaggttgtctgggtcaaacaggactcagaattcatgattgaagaaatg

SEQ ID NO: 65955 - DNA, 82 bp, Homo sapiens
cggccacggcagagcctggtgcctgaagaggagtcggagatgtgtatatctcatgattgatatggagaaactagtcatgggc

SEQ ID NO: 65956 - DNA, 83 bp, Homo sapiens
ccgacgcctgcagctgctccccggtgcacccgcaacaggcgttttgcaatgcagatgtagcctgtcccaagccagatgattta

SEQ ID NO: 65957 - DNA, 100 bp, Homo sapiens
gcctgcagcggagcccacgagaggcagcgccatggcggagcagacctactcgtgaaaaacacaccttgactttagtcagatacatcactgtctgttaaag

SEQ ID NO: 65958 - DNA, 50 bp, Homo sapiens
cctcctgagtagcttggattacagttccaatttgagccgctgtgaaaaag

SEQ ID NO: 65959 - DNA, 97 bp, Homo sapiens
ctggagctgctgttgcagcacttgttccccaaacaagtgctcctacattctggaatcccgttctgcttccagaagtggaagtgctcacggatcgggg

SEQ ID NO: 65960 - DNA, 97 bp, Homo sapiens
agaaactatatgccaccatggagaagcataaagaggaacaggagtacagctgtgtagtaaagatgccttctggtgaatttgcacgtatatgccgaga

SEQ ID NO: 65961 - DNA, 76 bp, Homo sapiens
ggcggaggtcgataagctggaactgatggctttctgtgaagaattggaatcaatgatacaggagcaatttaagaag

SEQ ID NO: 65962 - DNA, 52 bp, Homo sapiens
gtcgccacttcgggccaactttgcggaatcctcagagagcaccaacaccacc

SEQ ID NO: 65963 - DNA, 100 bp, Homo sapiens
cagggagccgctcccggccactttaagaattactggttacaaaaggcgccaagcccatctttgtgtgcttgcatccaactgtgatgagcctatgtatgtc

SEQ ID NO: 65964 - DNA, 96 bp, Homo sapiens
accaacctcactccacagcagttaatagatctccggcataagctcaatcttcggatggaggagatgtataagaaagctcatgctgctatacgagag

SEQ ID NO: 65965 - DNA, 80 bp, Homo sapiens
taaacttgatccaaagacaatgaagttgcttctgcaggaagcctttttggtggcatggtcctcaagaagttcctaaaagg

SEQ ID NO: 65966 - DNA, 100 bp, Homo sapiens
gaaagttaaagtacaaaaagtacagtctgtcaggttggactagatttctcccccagatttgctggcactggtgaacagaaggaagagcaaagacaagtcc

SEQ ID NO: 65967 - DNA, 95 bp, Homo sapiens
atccgtaaccacaaggaggacgagatgaaggatttgggggcagagcacttggcaggtcatgaaggggtccaacttctcgggttgttgaacgtcta

SEQ ID NO: 65968 - DNA, 98 bp, Homo sapiens
ggcgacctcaagaagcagctccacgaaaggcagccgcggatcgccgcgctcagcgacaaacaagaatactcccccagttgcaagaggcgcaggaccgt

SEQ ID NO: 65969 - DNA, 101 bp, Homo sapiens
aggattatgaagtattaattcttccactgatatctcaaaaggtgatctggacaaaggaacaggtatctcagaactgataaatttcaaacggaagagagtgg

SEQ ID NO: 65970 - DNA, 83 bp, Homo sapiens
gtcctcctggcctcagcaacctgacaattctgtcgtgtcccggtcagcccaaggccaaccccactgtcactctgttcccgccc

SEQ ID NO: 65971 - DNA, 102 bp, Homo sapiens
gcagagagagagcgcgagagatggagatgggcagacggattcatttagagctgcggaacaggacgccctctgatcatcctggtggggaagaagttttaaggg

SEQ ID NO: 65972 - DNA, 50 bp, Homo sapiens
atttctttggagacaaaactatgccacacctgtggaatcctctcaagagg

SEQ ID NO: 65973 - DNA, 75 bp, Homo sapiens
cgattcatgctggaatccaacaagggcaaatcaatgttggagttccagatcttcagatccctacctgttggctat

SEQ ID NO: 65974 - DNA, 50 bp, Homo sapiens
gctgttagtcgggtaggcatagagtttgccagatccggcccggtgcctgg

SEQ ID NO: 65975 - DNA, 101 bp, Homo sapiens
cggggcagccgctcgcccctcttttccatgtatccgtccagggaaatcctcattgacgattcaatttgttgaaggccaatttgtggactcctacgatccaa

SEQ ID NO: 65976 - DNA, 75 bp, Homo sapiens
agatgaagctccccaaggagctgcagctatcagttgagggatttgcagttgataaaatggctggagaggttaagg

SEQ ID NO: 65977 - DNA, 76 bp, Homo sapiens
agcgccggcaagagctcggtgctggagaacttcgtgggccgctccacggagaagaactgctgcgtgcggcagctgt

SEQ ID NO: 65978 - DNA, 74 bp, Homo sapiens
ccaggaggccaggggtgtcgccatgttccaagatgagatgggattctccaacatggaagatgatggcccagaag

SEQ ID NO: 65979 - DNA, 82 bp, Homo sapiens
gacgctgccagcatcgccgccgccaggacatggatttgattgacatactttggaggcaagatatagatcttggagtaagtcg

SEQ ID NO: 65980 - DNA, 50 bp, Homo sapiens
ctttgaactactgccggagcttctgccagtgtggacgaatgtggaacctc

SEQ ID NO: 65981 - DNA, 48 bp, Homo sapiens
gagagttctgcatgttgattcaagaaaaagtcagcactttttgaagtg

SEQ ID NO: 65982 - DNA, 98 bp, Homo sapiens
gtgcgctactcctcacctgccaacctctacgtgcgaggtgctggccacagggctcagtgccctgtactcatcactgcctcgaaagattgaggttccag

SEQ ID NO: 65983 - DNA, 90 bp, Homo sapiens
aaagaagaaaactgatggctaagtttgcatgaaaactgcactttattgcaagtagtgggcagcagtcagtgacaggtgtaacctctgtgg

SEQ ID NO: 65984 - DNA, 100 bp, Homo sapiens
caaaattgaaaaaatggttgacctcacccagctgaaacagaaccgcatgagggaaagaggaaagtggaatctctgtggcccatcttcaggatccaccacc

SEQ ID NO: 65985 - DNA, 95 bp, Homo sapiens
tcccctcactaccaatctgatcatggtggacttgctttgtgaagagacagttcatgaacaagagtctttcaggacctggacagtgaagggagccc

SEQ ID NO: 65986 - DNA, 110 bp, Homo sapiens
cccctggcacctggcgcccagcgcgcccgtggccgctgccgcctccgccccaggtgttgacagctcttctaccacaagcagtgcttctccaatgcccaacagttatgatg

SEQ ID NO: 65987 - DNA, 75 bp, Homo sapiens
gggatgatgaagaagacctgctggatgttggagaaggaggagcagatacacagtgtggacattgggaatgatggc

SEQ ID NO: 65988 - DNA, 75 bp, Homo sapiens
ctgaaatctggagtgaagaacgccgccatccagccaccattccaaggctgttcggctcttgaatcccagcgatga

SEQ ID NO: 65989 - DNA, 76 bp, Homo sapiens
aatcagtatgaatggaagctaaaggccactaaggatttccatttaaacagggttaatttggaagaatcttcaggag

SEQ ID NO: 65990 - DNA, 96 bp, Homo sapiens
gaaggaacttgcagaaatcacattggaccctcctcccaactgtagaattcagaaggagctggcggacatcactttagaccctccacctaattgcag

SEQ ID NO: 65991 - DNA, 98 bp, Homo sapiens
cggccgtcagcagcatgcaggatgttcctcctgctgatcaagagaagctttttatccagaagttacgtcagtgttgcgtcctctttgactttgtttct

SEQ ID NO: 65992 - DNA, 75 bp, Homo sapiens
actaccctaataagacctcagcttccctcgggaggggtgttggagcgggccggagagaagtagagtgggctgcga

SEQ ID NO: 65993 - DNA, 82 bp, Homo sapiens
ggatcgacgcggacagcgggctggagcctgacgagctggcggaaattttactgcaggataaaactccaggataaaactgtca

SEQ ID NO: 65994 - DNA, 74 bp, Homo sapiens
ggcaggggcagcgggagccggccgggcgccatgtcagaaccggctggggatgtccgtcagaacccatgcggcag

SEQ ID NO: 65995 - DNA, 83 bp, Homo sapiens
cgacgtcttgcctgtgtcccacttgttcgcggcctatagactctgctaacaccagatagtggaaagaaaccatgtgctgaaat

SEQ ID NO: 65996 - DNA, 104 bp, Homo sapiens
ggaaatgcctagaccctgcccaacagaatttatatagagatgtgatgttggagaactacagaaacctcgtctccctggcaacatctgaatgaattgatgacgaa

SEQ ID NO: 65997 - DNA, 96 bp, Homo sapiens
accattcaatacaacatgactaggacacgaggatgaaggtggctggagaagaggaccagctgaggaatcttcaagctggagagactcaagtcgccg

SEQ ID NO: 65998 - DNA, 74 bp, Homo sapiens
gaccataactctgccaaatatagaagacaatcatctatctctccttggtgtatgtgcttggccatgtgatcaag

SEQ ID NO: 65999 - DNA, 75 bp, Homo sapiens
ggagagtaaaccaagaagaaatccacagatttagttctaatgattacggacctgaagccaaagaacaagatgcgc

SEQ ID NO: 66000 - DNA, 128 bp, Homo sapiens
cacagattgtcaacagtggttgatgcagatgaaatcattgtcttggatcagacatatctgaagagatggattaagaatgctttggattaaggattgtggagcacatttcaatcattttaggattgtca

SEQ ID NO: 66001 - DNA, 101 bp, Homo sapiens
atctaccccggtcaatgtacccatcagtcagaaatttactgaatatatcactgatgtccattcgaatgacctgtctacaccacagatccttccatcaaatg

SEQ ID NO: 66002 - DNA, 101 bp, Homo sapiens
ggtaccggccgtggaagcggccaccgactactgtcagcagctgtgccagagttcattgtcgaaatgctggacctgtagctgtagctgagaagagcattacc

SEQ ID NO: 66003 - DNA, 99 bp, Homo sapiens
gcattttggaagaggaaccacaagaaaatcaaaagaaacttttgcccttatcagtaacacctgagttcgatcctttggtacagaagacagaccgacaga

SEQ ID NO: 66004 - DNA, 98 bp, Homo sapiens
cccaggacgagctcaaccccatccactgccgcggccgtgggcccgaccgcggggacccgttgaagctccattcataccaaagtttagaggctctggag

SEQ ID NO: 66005 - DNA, 100 bp, Homo sapiens
ctgccgcacaatcccgggttgtccgggtcctgtcaatgtcacgttcactactgtgatagacaaagtggcaaagagtgtgtgacctgtctgacattagccc

SEQ ID NO: 66006 - DNA, 82 bp, Homo sapiens
agaccctggagcctcagttggaagcagccgatccagcctgcggagcctgtggggcagcatgtagagcgcatgaagtacagga

SEQ ID NO: 66007 - DNA, 100 bp, Homo sapiens
gtatgcatggtgtggggttggtgtgattagcttcgcagtctggaaagctttaggagttcacagttgctgtgctgtggctttcattgagaagctagacgcc

SEQ ID NO: 66008 - DNA, 95 bp, Homo sapiens
ttccattttatggtaaaccaatgcctaagagtggtgacgccgctgcagctgctgatgcttctcctagtctcaatcgagaagaagtgatgaaactc

SEQ ID NO: 66009 - DNA, 50 bp, Homo sapiens
ggcaacccactggaggatagagttcatttacccccaaaatgcaaggcaga

SEQ ID NO: 66010 - DNA, 100 bp, Homo sapiens
cccagacagaggggagcacagagaaagagaatgatgaagagaaaggcccggagactgtgaagtattacagacacttagcacctgatcacttgctgcaaat

SEQ ID NO: 66011 - DNA, 71 bp, Homo sapiens
gtgaccacgctgcaggacagcatccgcaaagtgtctgtagatggacggcagatccgagtagaccaggcagg

SEQ ID NO: 66012 - DNA, 117 bp, Homo sapiens
gtttcccacttgattacccgttaagtcccccaaagatgagatttacctgtgagatgtttcatcccaacagtggtgtgtaagaagtaccggggattcaccatccccgaggccttccgg

SEQ ID NO: 66013 - DNA, 82 bp, Homo sapiens
atcatattccttcatctaccatggctcagccgggaactctgaacctcaataacgagctgaagttcctgtctttgccagacac

SEQ ID NO: 66014 - DNA, 82 bp, Homo sapiens
cagaccctggagcctcagttggaagcagccgatccagcctgcggagcctgtggggcaggagagaaatatgagttggagggaa

SEQ ID NO: 66015 - DNA, 100 bp, Homo sapiens
gagcttggtttcgggatctcggtgctgcagacggcgagacctcctgcacagcttgactgctgtggctccagcacactgactgctttgaccacctcagtgc

SEQ ID NO: 66016 - DNA, 50 bp, Homo sapiens
ctttcagtgtctttatggtagaaagatgcgtctgttactagagtggagag

SEQ ID NO: 66017 - DNA, 85 bp, Homo sapiens
gaaacccaagagcaaaacagcccagcagttgtgcggtctgaaagtagaagtggatatggagaaaattgcagctgagattgcacag

SEQ ID NO: 66018 - DNA, 138 bp, Homo sapiens
ctgtttttaatcagtgactcaaagctgtgatcaccctgatgtcaccgaatggccacagcttgtaaaaggtgtcagttgtacccgaggcgttctcagcagcagcaagtacctgtggtggatttccaggctgaactgagg

SEQ ID NO: 66019 - DNA, 98 bp, Homo sapiens
aaccctgaccggatcccataaacactgtcgatgcacaaagcagggtcatcagaagcctctcgattcaaaagatgataataccgaaaaacactgcccag

SEQ ID NO: 66020 - DNA, 98 bp, Homo sapiens
gaggatgacgatgatgatgatgctctgtccgactggaatttgaaaaccagcctggacaccaagtctgtgtcagaaggccacctcaagaggaacatcgt

SEQ ID NO: 66021 - DNA, 108 bp, Homo sapiens
tctccgagtttgcgactcgcggaccggcgtccccggcgcgaagaggctggactcggattcgttgcctgaggaatagccaggccagaagaaggaaggcctgtggtgagt

SEQ ID NO: 66022 - DNA, 100 bp, Homo sapiens
caccacacattgcgcagtcgggaccatcgccggagcctgaggacacttctctgtcgtcacagttaggtgtggatgaggtcaccattgtcaacattttgac

SEQ ID NO: 66023 - DNA, 98 bp, Homo sapiens
cagtgaggaaactcatcagactatacaaactataaccttctgttcggtgatgaaattatcactaatggttttcattcctgtgaaagtgatgaggagga

SEQ ID NO: 66024 - DNA, 83 bp, Homo sapiens
gtgggtcccgcagtcgcccgcaaccggggcgaatcatggcggccgccaaggatattagaaatggctactccccagtcaatttt

SEQ ID NO: 66025 - DNA, 83 bp, Homo sapiens
gaggcctcccgggctccgggaaaactacactggccagcagaaaggacccaggagcgataacagtaaatcaaataagatatttg

SEQ ID NO: 66026 - DNA, 95 bp, Homo sapiens
agaagcaggtgcagatcaagaccctggagggcgagttctcggtcaccatgtggtcctcagtgaaaatgcctcgtgtaaaagcagctcaagctgga

SEQ ID NO: 66027 - DNA, 118 bp, Homo sapiens
aaagaagtccaagaagcaaaaaagggactgctaagaagataccaccaggtttttcgttggaatatacgttgcacatttatggcgattctgagtgtgagggcagacttctgccaggctc

SEQ ID NO: 66028 - DNA, 98 bp, Homo sapiens
caatcctaccatgtcagccttcccagtagctggaactacagactctgtccctacctgtggttgtcatcgtccacggcagccaggaccacaatgccacg

SEQ ID NO: 66029 - DNA, 75 bp, Homo sapiens
atgcttgcttctattaaaagtggtgatgaacttcaggatgaggcggagtacgtccagcttgttactgaacttcga

SEQ ID NO: 66030 - DNA, 83 bp, Homo sapiens
aatgggggcctctccagggagtgctctgttcacggctccatcgctgttagaactgtggctgcaccatctgtcttcatcttccc

SEQ ID NO: 66031 - DNA, 101 bp, Homo sapiens
gcagcatcctcctgggctccatctcagagctctcaaagtctgtggaaccgcctgtctgtgttgctgaatctgttgcctgctgctggtgaactccaggagtc

SEQ ID NO: 66032 - DNA, 51 bp, Homo sapiens
gtcctttatatagaagggagagtagtttacgttgttaaagggaagctggac

SEQ ID NO: 66033 - DNA, 100 bp, Homo sapiens
cggcccatcaccggcagaacacagcagggcggaggaaagtgcaggttcgtgagccacacatctccccacaccaagctcctccatacaagacctcggactg

SEQ ID NO: 66034 - DNA, 75 bp, Homo sapiens
ctgaaattcagagaggggaagtgatttgcctcagcttgtacttgtactaatggtcacttgatgtgcgctggctgt

SEQ ID NO: 66035 - DNA, 100 bp, Homo sapiens
tgtggcttaaactcttggcatttggctttgcctttctggacacagaagtatttgtgacagacttaattcagtgcacaaatgagatgaatgtgaacatccc

SEQ ID NO: 66036 - DNA, 82 bp, Homo sapiens
cgggacaacgcctcctcacttgctcctctacgggtgaggtggctttgaccccgggttgcccggccagcacgaccgaggaggt

SEQ ID NO: 66037 - DNA, 96 bp, Homo sapiens
gagggtctggaggagccttctcaagaacagagatttttcggacgccgcccgatactacattccctgagcccacctgcctgtcagcatcacccccaa

SEQ ID NO: 66038 - DNA, 90 bp, Homo sapiens
gcgcgcccgtggccgctgccgcctccgccccagattgtgactgctttaggtaaacaagaagcagaaaggaagtttgaaactttgttaaag

SEQ ID NO: 66039 - DNA, 100 bp, Homo sapiens
ctcaagttgagtcaacaaaggaaggaaatccaagtaccactgcctgtgactctcaagataatcttgctgctgagaaaacatacaataacctagatatcac

SEQ ID NO: 66040 - DNA, 100 bp, Homo sapiens
ttccttgaggcccctgcgtcgggatcctctgaccctctagactttcagcatcacaattacaaggccatgaggaaggtggacacaatcctgtttgcagagt

SEQ ID NO: 66041 - DNA, 92 bp, Homo sapiens
cggcgggggcggcgtgcggcctagcgtctcagacaatgcagatcttcgtgaagactctgactggtaagaccatcaccctcgaggttgagccc

SEQ ID NO: 66042 - DNA, 75 bp, Homo sapiens
gattgatcatccactgatgattctaaaagcaatcttattagagatgacttcctgaagccacagatcatcacccag

SEQ ID NO: 66043 - DNA, 96 bp, Homo sapiens
aggatctgccccagagaaagtcctcgctcgtcaccagcaagcttgcgggatgaagatcgactttctagaagaaaaagcattgtggacaccgtatcc

SEQ ID NO: 66044 - DNA, 100 bp, Homo sapiens
ctctgattctccagcgacaggacccggcgccgggcactgagcaccgccaccatggggaaggggttttcggctttgtgagaaaccttaccatcaaacacga

SEQ ID NO: 66045 - DNA, 75 bp, Homo sapiens
ttgacagtttcaactgaaaaaatgcagcgcctctctcgatttttagcaattctgtggtgttcttggtcacacatt

SEQ ID NO: 66046 - DNA, 100 bp, Homo sapiens
acgcgacctccaaggatgcccgtgagcctgttgtcggggccaggggccttcctgctgtgctggacgcccttcttcgtggtgcacatcacgcaggcgctgt

SEQ ID NO: 66047 - DNA, 100 bp, Homo sapiens
ccgcaggttccctacacggtctcctgggtcaaggtgtctcaatgcttgtacctactgcaaaactaaacacgccagaggaaatttggccagttatccaatt

SEQ ID NO: 66048 - DNA, 100 bp, Homo sapiens
ggagccccaaacaagtggtggactggactagagatttgggaatggatgatgaaggagatgatgacccagttcctctaccaaatgtgaatgcagcaatatt

SEQ ID NO: 66049 - DNA, 75 bp, Homo sapiens
cgctgccagtttgcacagcagcaggatgaagcctgctgggagcgtgaatgacatggccctggatgccttcgactt

SEQ ID NO: 66050 - DNA, 118 bp, Homo sapiens
ttcgaagaatgacagcaagccctactgagcgtgctcccctctgagactggagtgagagggtcttctgatcatgaagagtgaagtgttgagagtcacccatgagctccaagccatgaag

SEQ ID NO: 66051 - DNA, 83 bp, Homo sapiens
cgcctccttcaccgccgcagaccccttcaagttctagtcatgacaatgcagatcttcgtgaagactctgactggtaagaccat

SEQ ID NO: 66052 - DNA, 100 bp, Homo sapiens
cctggaacgacatccaccacaagaccagctgcacagggggaccccagcttctaattccaagctaaagttggtgcgtagcctggcagtgtgtgaggagtcc

SEQ ID NO: 66053 - DNA, 100 bp, Homo sapiens
cgaagtggtccgctttgccaagaagatggacaagatggtgcagaagaagaacgcgaattgcgatggaaacctacatccgccagaggcagctcatcatgtc

SEQ ID NO: 66054 - DNA, 75 bp, Homo sapiens
agcagccttggtgctcaggtgccagatgcaaagggattaatgaaaatcaagttccatcctcagacaagaggtaaa

SEQ ID NO: 66055 - DNA, 83 bp, Homo sapiens
gctgcagtgctgacaccactcagggcaagggtgtccgacggctggagcggaagctcttcgtgggcggtcttgactggagcacg

SEQ ID NO: 66056 - DNA, 98 bp, Homo sapiens
gccggtctctgttccgcaggatgacattctaagtgagactgtccacatcatctaggaaaatggtggccctgtccttaaagatttgtgtgcgccactgc

SEQ ID NO: 66057 - DNA, 82 bp, Homo sapiens
aaagaccaagcatctcagagaagaggaggaagaaggcgagaagcacagaatttaattccttttcgaccttcaatccagttcc

SEQ ID NO: 66058 - DNA, 100 bp, Homo sapiens
agcagccctggtgtcacctatcagtaaaagtgctggagtggcagaagacttttgaggagaagctcacgccgttgctgagtgtgcgggagtcactctcaga

SEQ ID NO: 66059 - DNA, 100 bp, Homo sapiens
caaggactcacagtggctgcaagcatggcacattacacttctgtggatttaaagtccttgcccctcagatcagctttgctcctgaaattgcatccgaaga

SEQ ID NO: 66060 - DNA, 95 bp, Homo sapiens
tagactccatctatccatatgaggaagttttaaatgacacaatttcctaccctgatggcacattcatggattgggagtttaagatctctgtcttg

SEQ ID NO: 66061 - DNA, 88 bp, Homo sapiens
gcccgggcgacggcggggtccgcgcggccagcagcgtcaccctttacaccagaaagctggcgggcactatggggaaaaaacaaaacaa

SEQ ID NO: 66062 - DNA, 83 bp, Homo sapiens
gtatattactgagttttttagtgagggctggaaagccatatgatttacagctggagaatgctggaggagaccttaaggatggc

SEQ ID NO: 66063 - DNA, 100 bp, Homo sapiens
gggttttagaaaaacaagaattacagcagccaacctatgttgccctgagttacataaatagatctctttcccagggccatggcgaacccgaagctgctgg

SEQ ID NO: 66064 - DNA, 73 bp, Homo sapiens
gagaaggccgccgggcccgggcatggtggtctggggcaacgcggaagcatgatgcagaagttgaacacttaac

SEQ ID NO: 66065 - DNA, 98 bp, Homo sapiens
gtcggacctttcccgctggcgcgcagcctcagctagctcaagactgcagtgcagatgacgacaacttccttgtgcccatagcggtgggagctgccttg

SEQ ID NO: 66066 - DNA, 83 bp, Homo sapiens
cagaaaggtggaggccgggaggacgaagttggaatcgaagcctcttaaaatggcagatgacttggacttcgagacaggagatg

SEQ ID NO: 66067 - DNA, 76 bp, Homo sapiens
actctttggatgattctgccaaaaaggtctcggcgcggaagatggccggcggcgtggacggccccatcgggatccc

SEQ ID NO: 66068 - DNA, 76 bp, Homo sapiens
ttacatccctcgctcatccaatgattatacctcacaaatgtattctgcaaaagaacctagctggtaagccagccct

SEQ ID NO: 66069 - DNA, 100 bp, Homo sapiens
gacgatgtccaaaacaaaaaatggcatcacctgtcaaaaatggagttccacttctccccgcagacctagcgtctgagagaagaaatggaagaaatcacac

SEQ ID NO: 66070 - DNA, 75 bp, Homo sapiens
ctgagcagtcctcggggagagcgcgccaagaccgctgcagccgctggctgaactattgggaagaagttacctgca

SEQ ID NO: 66071 - DNA, 100 bp, Homo sapiens
cagaaagcaggcgaacccgcggcgcaataacgatctaatgaggcgtcaagaagaactcagacgcttggaagaactcagaaaccaagagttgcaaaaacgg

SEQ ID NO: 66072 - DNA, 50 bp, Homo sapiens
agctgctcatgaaccacttggcaaaatgcaggacaagtactccaaaagtg

SEQ ID NO: 66073 - DNA, 90 bp, Homo sapiens
ggccgacccttcctgtcgctgacggcgactgcgggaggccaggaatcccagtcagaagttccagcctgccactgttctctgatgccatgc

SEQ ID NO: 66074 - DNA, 97 bp, Homo sapiens
atatttaatggaaaatcgcttggttaaaacctgacacttttaacagtatggtttgaagtggtgaacatggatttttctcggcttcacatgtacagtc

SEQ ID NO: 66075 - DNA, 51 bp, Homo sapiens
aaacctggatctgcgatctgtttgtggccaggaatagttgctgaacacccc

SEQ ID NO: 66076 - DNA, 50 bp, Homo sapiens
acacagtacggtagtcaaacccccaggaggtgggccccctccacccccag

SEQ ID NO: 66077 - DNA, 90 bp, Homo sapiens
gacatggaggatgatttcatgtgcgatgatgaggaggactacgacctggtttgaattttgggaagattttgaagaagaccatgggaaggg

SEQ ID NO: 66078 - DNA, 71 bp, Homo sapiens
gagtggacatcagccccaaacaggacgaaggcgtgctgaagagctcaggccccggggcctccagcggcacc

SEQ ID NO: 66079 - DNA, 87 bp, Homo sapiens
ccggatctgtgagcaggccgactccactcccacgccgcagcgcaccttttgacaagacagccaacatcaccttctccctcaatgctg

SEQ ID NO: 66080 - DNA, 75 bp, Homo sapiens
cattcaccattgacaattcaacttactctctcttcccacagatgaggctgtggacccaggctagacagatgggat

SEQ ID NO: 66081 - DNA, 101 bp, Homo sapiens
gaatttccttgtgcctccattcccgggaggggggagcggcgttggaggccaccgtttccaggtgcggccgggtgtgtggcaacattacttcatgatgcagc

SEQ ID NO: 66082 - DNA, 71 bp, Homo sapiens
ccgtcattgacatcaatgccttcccagggagcggcagcctcagccccaggacctgcgacagcacattcagg

SEQ ID NO: 66083 - DNA, 101 bp, Homo sapiens
agatggagaaattgtatacactggaacagaatcaacccagaacggatagctccctcctggaaaagtgccggtggtggtgtgcacattgagccccggtatag

SEQ ID NO: 66084 - DNA, 100 bp, Homo sapiens
aaggatgttcgtcgtggcaacgttgctggtgacagcaaaaatgacccaccaatggaagcagctggcttcactgctcaggccaggacagctgatggttgtg

SEQ ID NO: 66085 - DNA, 83 bp, Homo sapiens
gctgcagacactgaacgaggagccagtgcagtacttctggaatagaaattctaaacattagcctgccgaacaactggattgca

SEQ ID NO: 66086 - DNA, 82 bp, Homo sapiens
ggcggcgggtgggaaatggcggagtatctggcctccatcttcggcaccgagaaagacaaggaaatcctcattgacgattcaa

SEQ ID NO: 66087 - DNA, 103 bp, Homo sapiens
gggtcggtgcctggggatcctgtccgcatccactgcaacatcacgctttaatgaagcaccagttgagattcccagtccttctgaaaccccagctaaaccttct

SEQ ID NO: 66088 - DNA, 51 bp, Homo sapiens
caatctacgaagaccgaggaaaagctgcggattctgaaggaagatttccat

SEQ ID NO: 66089 - DNA, 75 bp, Homo sapiens
aggaacttaagagtcttaggagtcagttggatgtgacacataaggaggaatctttgtctgaagtggaagaaaaat

SEQ ID NO: 66090 - DNA, 50 bp, Homo sapiens
tgaccatccctatcctctatgtcaagtatgaatgacccatattaaatcgc

SEQ ID NO: 66091 - DNA, 89 bp, Homo sapiens
tcggcagtccacccaccgccgccgcctcccagcagaaaggacccaggagcgataacagtaaatcaaataagatatttgtcggtggaatt

SEQ ID NO: 66092 - DNA, 90 bp, Homo sapiens
cagttacaatgatgaaatgctcagctatctgcccggaggcaccacaggactgcagctccccagcacgtagagacggagtttcaccgtgtt

SEQ ID NO: 66093 - DNA, 100 bp, Homo sapiens
gaggaccccacatggaccgcagcagcgcccgaggccaggtgtgcctaccgcatgttgccgctgctgtttctgctgggacgtctgactccagttccttctc

SEQ ID NO: 66094 - DNA, 112 bp, Homo sapiens
gccagaaggaagatggcggatctggaggagcagttgtctgatgaagagaaggtacagagtgaagacagtgtcctcctgtttgttattgcatggacgatcacggaaatcatcc

SEQ ID NO: 66095 - DNA, 107 bp, Homo sapiens
cggagggctgcagcgcccaccctgcgccagagaccagataaaatcagtacaatggaacatgaattttcaataaaggaacgtggatttgaagttcaattgagagagat

SEQ ID NO: 66096 - DNA, 75 bp, Homo sapiens
acagaggctttttgtgtgttttatcatctaaaatccaatccctcgggtggttctcttcccaaagtggaagccaaa

SEQ ID NO: 66097 - DNA, 102 bp, Homo sapiens
aaggcgcaagtcgagaggaaactgttgtgcctcttcatattggcgatcctgttgtgacttgatgacacgtaccttcgctgcattgagctgcacagccacacc

SEQ ID NO: 66098 - DNA, 74 bp, Homo sapiens
gaaagaagcagtagcagtgaatctacagggacgccatcgaatccgttcctctgtgacgagggtgcaggtatctc

SEQ ID NO: 66099 - DNA, 100 bp, Homo sapiens
cctgcgaccgtcgcggaccatgggcgacaaagggacccgcatttgacattgtgcagcaaagaaatggttatggagaagcccagtccgctgcttgtagggc

SEQ ID NO: 66100 - DNA, 51 bp, Homo sapiens
gaggctgaatttgataagaccactcatgttggcagataaattgaacatgac

SEQ ID NO: 66101 - DNA, 74 bp, Homo sapiens
ccgcctgctgcactttgggttcaaggcgacagcaaggtgcccggcgacgactgcccgctggtgtggggccagtg

SEQ ID NO: 66102 - DNA, 100 bp, Homo sapiens
tgagcaagcagtaataaagtctcccttaaaatgcaccctccttccacctggccaggaatcagatccagaagcagcaaggtctagcaattccaaaatcacc

SEQ ID NO: 66103 - DNA, 75 bp, Homo sapiens
cactacaacaggaaaatcatattatagatggagtaaaggctcctcacggtcctgttgcaacagtcgaacatcagc

SEQ ID NO: 66104 - DNA, 88 bp, Homo sapiens
agtggcccaggcggtgaaaggacaagggaccatctgctgggtggactgtgggtctccatcatcaccagttccagtagtgaaaaacaga

SEQ ID NO: 66105 - DNA, 100 bp, Homo sapiens
ctgtgaagttcctttacactgggtgtgtaagaagggccgttgctccagggagaactgcaaatatcttcatccacccccacatttaaaaacgcagttggag

SEQ ID NO: 66106 - DNA, 75 bp, Homo sapiens
atgtcctgtgtgtgacaagaaggctccctatgaatctcttatcattgatgggaccctgatgctcccataagacag

SEQ ID NO: 66107 - DNA, 75 bp, Homo sapiens
attccaagtaactcttatttgggcactctttaatgaagaaacaccagagctgttaaacacattgagacacagaag

SEQ ID NO: 66108 - DNA, 151 bp, Homo sapiens
tgaattcctgcagctcagcagccgccgccagagcaggacgaaccgccaatcgcaaggcacctctgagaacttcaggagctgggcctggcccccgatatgttcttctgcctgcgcctcctggaggagaccggcatctgcgtggtgccaggga

SEQ ID NO: 66109 - DNA, 100 bp, Homo sapiens
ccaacgatcagcacttcagtcggaaagttggaacctctgacaagaccaagtactaccttcaagggatagctgggagtatggccaccctgctccacgatgc

SEQ ID NO: 66110 - DNA, 99 bp, Homo sapiens
gcctagtccacggagctcaatggcggcagtcgcgctgagggactcggctcagatatccttggaacagaagatcttattgtggaagtgacttccaatgat

SEQ ID NO: 66111 - DNA, 100 bp, Homo sapiens
gagatggtttctctcaaggactactgcaccagaatgaaggagaaccagaaacatatctattatatcacagagagaaaaggaacagttccgtaagctcttt

SEQ ID NO: 66112 - DNA, 75 bp, Homo sapiens
gggtcataggtggaaaagacatggtgttttcacagtcctgtgtttggtatggagagtgtggaattgcatatgggg

SEQ ID NO: 66113 - DNA, 100 bp, Homo sapiens
cgcctcgatgcaggaggacgaacaggctttccttaaagtttcccatgtctcaatggactcctgaatataacgagctctacaccttaaaagtggatatgaa

SEQ ID NO: 66114 - DNA, 75 bp, Homo sapiens
gctttaatcctgaaagccatgcagcgggaatggcggcgctagatagtaaggcatcagggaagatgggaatgcgag

SEQ ID NO: 66115 - DNA, 88 bp, Homo sapiens
tggtcgactacaagaagagggcggagcggagacgggagtattatgaaaagatcgagtctactcttcatcttgtgttgagacttcgtgg

SEQ ID NO: 66116 - DNA, 82 bp, Homo sapiens
ggtcgcggagcagtggaaccgagactgccccgcggagccgccgcgtcgtctcggagatgcagccaagaaagccatcagtaaa

SEQ ID NO: 66117 - DNA, 107 bp, Homo sapiens
gtttgcgcctctgggcatgtagtctacacaggacctgagaatctgagaaactgcagatgtgtcttgctgaatcagggctctcttatccctgccatcgacttacagtg

SEQ ID NO: 66118 - DNA, 75 bp, Homo sapiens
gaactatagagtttgtggacagatttatattggcgttactacaaggagacctctggcctgatgctggacgttggt

SEQ ID NO: 66119 - DNA, 74 bp, Homo sapiens
gagcccatgagtagggaggagaaacagaagcttggggaaaactgaggctgccatcaaaaacttcagtccctact

SEQ ID NO: 66120 - DNA, 98 bp, Homo sapiens
cagggactacgacggcaaggtcttctacattgaccacaacaccaggaggaccagctggatcgacccccgggacagcagcagcgtgcagggtcaaagac

SEQ ID NO: 66121 - DNA, 100 bp, Homo sapiens
gcgtcaaggactccccgcgcttcagactgtccaggacggccggcagtttctaaagtatgttgaccccaagctgggagtcccactgccagagagagactac

SEQ ID NO: 66122 - DNA, 98 bp, Homo sapiens
gaaggtggtggtgtgcgacaacggcaccggggacatggatttgattgacatactttggaggcaagatatagatcttggagtaagtcgagaagtatttg

SEQ ID NO: 66123 - DNA, 101 bp, Homo sapiens
ccatgatggcggcggcgctggggcccccagaagtgatcgctcagctggagaacgcggctaaagttctgatgggcttttttccagacttcaagctcccattc

SEQ ID NO: 66124 - DNA, 82 bp, Homo sapiens
agatcctgacctctctgatgagatggatcgaggctgggaggcggcagaatgcagccagaggagggcacaggctggctgctgg

SEQ ID NO: 66125 - DNA, 80 bp, Homo sapiens
gggagccctggctgcctgccgaagccctgcgcaccctcagctttgacagtgagaaggctggggaccgggaggtgcagagg

SEQ ID NO: 66126 - DNA, 83 bp, Homo sapiens
ataaattcccggaaccgcgattcggcgtgtcaggtttgatctgtggatgaaatgaatcatgattttcaagctcttgcattaga

SEQ ID NO: 66127 - DNA, 83 bp, Homo sapiens
gggagacgcagctgtgcaccacaaggagaagacagactgctgctttggacctgttggtaatgatggcctgagctaaacatcta

SEQ ID NO: 66128 - DNA, 80 bp, Homo sapiens
ggctgcccagaaagcagttaacagtgccaccggtgttccaactgtttaaagaggcaagtggtcaacagcaggtggctgtc

SEQ ID NO: 66129 - DNA, 98 bp, Homo sapiens
aggtccctgaagtcagtatctactcagtcatcttcaagtgtctggagcccgacggtctctacaaaaaactgcatcagcagtttgaaatgtataaagag

SEQ ID NO: 66130 - DNA, 100 bp, Homo sapiens
ggcggtgagcgcgagggaggctactgagaagcccggcgacggaggaacgcaggtctgctgccagacctaccagggctcagatactgacatctttgcattt

SEQ ID NO: 66131 - DNA, 82 bp, Homo sapiens
gcctgaggtccttgttggctgcttgctggagagagataagatttcagtttccacagctgactggagtgcttacccttgcttt

SEQ ID NO: 66132 - DNA, 75 bp, Homo sapiens
ccgcctcctcaggccgctccgcccacagccagcaaggtaagaatgattgatgttggctgatattggagtgctcat

SEQ ID NO: 66133 - DNA, 83 bp, Homo sapiens
aaaagttaaagatggagcaaaaccactttccctgaaatccgacactactgattctagtcaagcattcgttcagtcagagagca

SEQ ID NO: 66134 - DNA, 90 bp, Homo sapiens
caagtggccatggggagcctcagcggtctgcgcctggcagcaggtttctccatgtctgaatgtgctttcctggttgctgtttgtcagtga

SEQ ID NO: 66135 - DNA, 141 bp, Homo sapiens
gaagaattggaaaacaccacttttaagtatcttacaggagaacagactgaaaaaatgtggcagcgcctgaaaggaataactctaagaaggagctgatgtggaggagcagctgagacagttcaagatgacgaccacagtagc

SEQ ID NO: 66136 - DNA, 75 bp, Homo sapiens
cgcacttggaatagtagcaggcggcggcggcggaacgccaggcagagcatgaataatctttcatttagtgagcta

SEQ ID NO: 66137 - DNA, 100 bp, Homo sapiens
gaagacattttcttagacaagagaaatcggtcattcaaggttgaagaagaggatgaacttgaatctggagaccaagaggatgaggatgatgaaagtgaag

SEQ ID NO: 66138 - DNA, 100 bp, Homo sapiens
aaacccaccaactcctacagttgagacgatttgctcatggaacagcaggtctggtgttccttacggccctctcaggtgtgttcatcctcgaggtggtgtg

SEQ ID NO: 66139 - DNA, 75 bp, Homo sapiens
aaaggagcaagagcaagatcaccgtgacatccgaggtgcctttctccaaaaggcaagtgaaccggagcaaacgac

SEQ ID NO: 66140 - DNA, 100 bp, Homo sapiens
tggaagaggtgcttttggtgaagtgcagttgggcggcgactggcggcgcgatggacctgaccgggctcctgctggacgaagaaggcaccttctccctcgc

SEQ ID NO: 66141 - DNA, 80 bp, Homo sapiens
ggcagggtctttatcccaccattagagagagacaatgcagatcttcgtgaagactctgactggtaagaccatcaccctcg

SEQ ID NO: 66142 - DNA, 50 bp, Homo sapiens
aaaatgtcaacaaattgatggagagcgaaatgtcatcagtgcagtcacaa

SEQ ID NO: 66143 - DNA, 82 bp, Homo sapiens
cgaacatcagggccctccagactcaggcgccccaacagccttcaataatctggagaatcttgtctttggcaaaggattccaa

SEQ ID NO: 66144 - DNA, 90 bp, Homo sapiens
ttaaccagcatggctacttcatattttggaaagcagtttttaagacaacgcatggatttaggagaatgtaccaaaatccacgacttggcc

SEQ ID NO: 66145 - DNA, 98 bp, Homo sapiens
cgactattcttggacttgggaccccctcaggggaacagcgagcagatcaaaggaattacatgaacgacagccttcgcaccgacgtcttcgtgcggttc

SEQ ID NO: 66146 - DNA, 100 bp, Homo sapiens
caggatccctcagatctgtggagcagatccgatggagaggctgagctgctccaggacttgggatgtcatttgtcagagtgaaccgctgtggtccccgagt

SEQ ID NO: 66147 - DNA, 107 bp, Homo sapiens
gagatggaggcgtcgggcgtgagcggaaatgaggaggagatggtggaggaggctgaaggatgatcggctgaatgtaacagaggaactaacgtccaacgacaagacga

SEQ ID NO: 66148 - DNA, 100 bp, Homo sapiens
ttgaaggattctgtgtgctgtcggacccagagggtgacggcgccgctaggatgaagctcgtgagactctaaaatagagctcaagcttgagaagagagaac

SEQ ID NO: 66149 - DNA, 89 bp, Homo sapiens
gaagatgacaacatctatcaacagaagatcaaggtctcagacttgatccgcagtggaaaacccatcaagcctgtcaaggatttgctaaa

SEQ ID NO: 66150 - DNA, 88 bp, Homo sapiens
gccacggggggttcctggagtcttttaagcacaaccagtgtctctgaagaagatgtctcaagtagatattctcgaacagatagaagtg

SEQ ID NO: 66151 - DNA, 82 bp, Homo sapiens
ctcccgcagcctgcctttccttccccctcggaaaatggttcccactgccgggcgagatgcagtgcaagctgtttgtctttga

SEQ ID NO: 66152 - DNA, 73 bp, Homo sapiens
gtctggagcagtggagcccaaagacccctggagacatggcctcacactccccgacttgcccgagcagttctcc

SEQ ID NO: 66153 - DNA, 100 bp, Homo sapiens
ctggtacgtgcttttcctcctgcagcccaccgtctacttgatgaataatacggcagctagtccaatgtctactgcaacttcaagtagtggaaggagtaca

SEQ ID NO: 66154 - DNA, 100 bp, Homo sapiens
tgccccaggatcagggaggactgcctcctgacaaggtgatccgggcgggccccgcaggaattttatcccctcaccggcctcacactagtatcgcatgtcc

SEQ ID NO: 66155 - DNA, 100 bp, Homo sapiens
cttttggtaccttataaccttgctaaatctgcatacagagaattggttcaggtaaagcctcttggtgttatatggggaaagttttcggagttttacagca

SEQ ID NO: 66156 - DNA, 74 bp, Homo sapiens
ggagagaggtacctctccttttccctctccctttccctaaggatgccttccgcgccttccaccctgacctggaa

SEQ ID NO: 66157 - DNA, 74 bp, Homo sapiens
tcggagctgagaggagctgctgctcggaccagcgcggtatcagcagatgttgcacacaaacttggtataccttg

SEQ ID NO: 66158 - DNA, 100 bp, Homo sapiens
cagtgactgggaaatccaggaagacagtaggccatgaaccagagaatcagtcagagtgctccagtgaaacagccaccacccctggctccccagagcccac

SEQ ID NO: 66159 - DNA, 131 bp, Homo sapiens
cgcgcccgggaggaaggaacgaggcaaggagctaaagcagcgtgcgttcagccctggggatattagaaatggctactccccagtcaattttcatctttgcaatctgcattttaatgataacagaattaatt

SEQ ID NO: 66160 - DNA, 75 bp, Homo sapiens
ttgaagacaatcgtcacttatacagttcagcaatcagcaaacattgggaggctgaactggctaccctcaaaggaa

SEQ ID NO: 66161 - DNA, 75 bp, Homo sapiens
tcagcagccggcagcagcagcgggtactccaaagattcaggtttactcacgtcatccagcagagaatggaaagtc

SEQ ID NO: 66162 - DNA, 101 bp, Homo sapiens
ccgcgcggaggctcgcgagatccgcatgaaggagctggagcggcagcagaaggaggagcgatctctctttgagtcggcatggaagaaggagaaggacatcg

SEQ ID NO: 66163 - DNA, 128 bp, Homo sapiens
aagacatgttctctcggtttgggcggatcatcaactcgcgggtcctcgtggatcagactacagcaagcggtctcctgaggctggctgtgctgcctgaggaccggctgcagatgaagtggagagagtcg

SEQ ID NO: 66164 - DNA, 98 bp, Homo sapiens
aggctgtctgcctcggtacctgttactgctgctacttcctcgtttgacaccttcctgggactttccaggacctgtccaaacaagtggaaatgtcttat

SEQ ID NO: 66165 - DNA, 82 bp, Homo sapiens
aactggattcgtggcgccacaagctcattcactgtgtagggcgtctctggccgagcctctttttgtggaaaacgacagcagc

SEQ ID NO: 66166 - DNA, 100 bp, Homo sapiens
caagacccaggaagccgcgggcaaactcagactcgaagaatgagccggcaggtggtccgctccagcaagttccgccacgtgtttggacagccggccaagg

SEQ ID NO: 66167 - DNA, 50 bp, Homo sapiens
gccgcgaggccgcagctcccggtggatgaagactacatccaggacaaatt

SEQ ID NO: 66168 - DNA, 101 bp, Homo sapiens
gcctcccgggctccggctccggcttctgctgttgctcttctccgccgcggcactgatccccacagaacatcatcaagaaggtgatcgggcagaagtttgtg

SEQ ID NO: 66169 - DNA, 82 bp, Homo sapiens
gcgttacaagctttgtctccttcgacttggagtctttgtccaggacggaaggttgtgcaggaccagcgttccctgtgcaggc

SEQ ID NO: 66170 - DNA, 75 bp, Homo sapiens
cattttcaaaaccttgttctataatactttgtgctgggcaagagggatctaagccctcgagcatgttccaaactc

SEQ ID NO: 66171 - DNA, 87 bp, Homo sapiens
ggagtacctggaggctcaacggcagaagcttcaccacaaaagcgaaatgggcacaccacagatgccagcttggagagtcacgtgaga

SEQ ID NO: 66172 - DNA, 75 bp, Homo sapiens
gcttgcccagaagtaccatgacaacgcccaattaatcacgcctcgatgctcccaggaatcttcgacgtgtttccc

SEQ ID NO: 66173 - DNA, 74 bp, Homo sapiens
ggtgaggtcacattcggttatctctaacgttggaaaacgaataatccagaatggctactctgatctatgttgat

SEQ ID NO: 66174 - DNA, 74 bp, Homo sapiens
cgggaggtttggagcagatggataccgtatcgacgtggggcctccgggtgtcaaattgagaaccaggtagatcc

SEQ ID NO: 66175 - DNA, 83 bp, Homo sapiens
agatgacaaaacttcaagccaaacatcaagcagaatgtgatttgcttgaagatatgaggtaaagtaccttttattcatgtggg

SEQ ID NO: 66176 - DNA, 100 bp, Homo sapiens
tcacactacgacagtgagaaaggaggtatctcgggggagctttgtgccttgatggatcaagttcatcatatgcagcactcaaaatggcagcatccttcgg

SEQ ID NO: 66177 - DNA, 100 bp, Homo sapiens
cggcagtcggatagacaataccacaacaacacattttgcagaggtgggagacctacctgatgcagatattaaacctccagaaaatgtactgtttgtgtgt

SEQ ID NO: 66178 - DNA, 98 bp, Homo sapiens
gaaaactgattagaaggcagagggcagctggtggaatttttgaagaaaatggaatctcgaggccccctttcgtgcgacacggttctgaagatcttcta

SEQ ID NO: 66179 - DNA, 82 bp, Homo sapiens
tgaatggtgccgaccgcggccatcgcagttggaggctattttttggggggggtgagaagccctaccactgcaactgggacgg

SEQ ID NO: 66180 - DNA, 101 bp, Homo sapiens
aggcttcaacaagaacgatgcccccctccacgagatcaacggtccctccagctacaaggtgggcaccatggcggagaagtttgactgccactactgcaggg

SEQ ID NO: 66181 - DNA, 88 bp, Homo sapiens
tttgagaaaaacctgaaagatgtctcagttggtgatttggatatcagctatattaatatagagggaatcactgccactaccagccctg

SEQ ID NO: 66182 - DNA, 100 bp, Homo sapiens
ttcgcagtggtcgcttcttctccttgatcacgagctgctcaggcaagagctgaacacgcggtttctggtgcagagcgccgagcggcctggcgcctccctg

SEQ ID NO: 66183 - DNA, 100 bp, Homo sapiens
cctcttctcgactttaagaagcgatgagagaggcgtccgacctccgatcatgaacgggcccctgcacccgcggcccctggtggcattgctggatggccgg

SEQ ID NO: 66184 - DNA, 100 bp, Homo sapiens
cccagttctggcagattctggaaactgtacattgaagcagaggaacaggagtacagctgtgtagtaaagatgccttctggtgaatttgcacgtatatgcc

SEQ ID NO: 66185 - DNA, 75 bp, Homo sapiens
aaaagaagctcccgcaaaggaacaagaacctgtgtctaagcctttggagactcgacttatttcagagaccacatc

SEQ ID NO: 66186 - DNA, 50 bp, Homo sapiens
gtgcggcggcggggtctgggccgcgcgagacaaatttacatgtattggag

SEQ ID NO: 66187 - DNA, 97 bp, Homo sapiens
aagctctttgctgatgccgtacaagagctgctgcctcagtacaaggagagggaaaatacagatatggtccagaaatcagtcagcaaaaccttgccct

SEQ ID NO: 66188 - DNA, 98 bp, Homo sapiens
cttgattacccgttaagtcccccaaagatgagatttacctgtgagatgtttcatcccaacaccaagtacatcgtgcaagtggatggtaagatagggct

SEQ ID NO: 66189 - DNA, 74 bp, Homo sapiens
ttgaccctgggtctgatctggaccattattttgcatttccagatgctgcagttggagaagaaacttgaacgtga

SEQ ID NO: 66190 - DNA, 100 bp, Homo sapiens
tgggtgtgggacaccgtgggctgcgtgtgggacgggtttagcggcagcctcttcggtaacattcagatatcctggattgatgacacatcagcatttgttt

SEQ ID NO: 66191 - DNA, 83 bp, Homo sapiens
tttttagggagtccaaggtacagtcgccgcgtgcggagcttgttactggttacttgaagctggcagggcggagatgctggacc

SEQ ID NO: 66192 - DNA, 60 bp, Homo sapiens
gttcccgtccagttccattccttgcacaggaccaaaaccttgtgtgactgagctgaagag

SEQ ID NO: 66193 - DNA, 100 bp, Homo sapiens
cgcgcgacgattcgaggtgctctgtggccgcgagtgcatcttccacggactatgtcaccggtggggcttgccccagcaaggccaccatccctgggaagac

SEQ ID NO: 66194 - DNA, 90 bp, Homo sapiens
agcgcctcgctgtacctgctcatgcgacagaacttcgagatcggccacgcggcttacagggagaacacagttggcctccaccgtttctgc

SEQ ID NO: 66195 - DNA, 100 bp, Homo sapiens
aaggaactggctaccgttcggactatttgtagtcatgtacagaacatgatcaagggtgttacactgagcaatgatggagaagagcgattagctgttgttc

SEQ ID NO: 66196 - DNA, 100 bp, Homo sapiens
agcccaggaggcaaatgtttgtacactgatctttttcatgaggatgggtccaagggcctgtaatcccgtccaacagaatacggctacagcacggtggctg

SEQ ID NO: 66197 - DNA, 100 bp, Homo sapiens
ccgattcctcctccttggtcgccgcgtccttggctggcgtattttgcaagaacgaggctcaaggatgtgagggacacagtattgacagctgaagaaatga

SEQ ID NO: 66198 - DNA, 80 bp, Homo sapiens
atgacaaaaagtcatagtggtgtgacaattccagtgtctcgccccatcctcaccctcagggttcccagggcccaggctgt

SEQ ID NO: 66199 - DNA, 110 bp, Homo sapiens
aggcgcaggccgagcggctgctccgagaattagcggacaacaggaaaaatctggtccttcatcagaactaggaaagcactgatttaaacatttggtcagacattttaaat

SEQ ID NO: 66200 - DNA, 98 bp, Homo sapiens
ctgggagagtgtccgttgcttcccgtccgtgtcgcggccctgcggttggcggcctcctcgtggagcggagcaaggggcttttaccaagatggcctcag

SEQ ID NO: 66201 - DNA, 100 bp, Homo sapiens
cgcaagagcgagccgcctgccccggtgcgcagacagagctattccagcaccagcagaggacaaaagatccttcatcaccgaagtgacgttttagaaacag

SEQ ID NO: 66202 - DNA, 98 bp, Homo sapiens
tttgaaacgagtgagttctcttgctggatttactgactgtcacagaacttccattcctgttcattcaaaacaaggtttcacgtgccacgatcatggtg

SEQ ID NO: 66203 - DNA, 75 bp, Homo sapiens
acccatttctcctcctttgacagggacatcagtggagccttctcagacccacagatcggtgttgctggaagtcgg

SEQ ID NO: 66204 - DNA, 100 bp, Homo sapiens
ggactcttggtgccaacagagttactctacaagttggatggcttgaggactggtactaaaaggaaacgtgactgggaggccattgccagcagaatggagg

SEQ ID NO: 66205 - DNA, 50 bp, Homo sapiens
gtgtaactgtgaatctttcaaaggtcgcaatggaagaagagatcgccgcg

SEQ ID NO: 66206 - DNA, 75 bp, Homo sapiens
gggtgtccggccgtgtcccgaggaagtgcaagacccggtgtccctggccagtgtccttccacctgtccacaagca

SEQ ID NO: 66207 - DNA, 82 bp, Homo sapiens
gatactttgaagtagaagaagctgatgcccaagaagatgaaaggattgttcttgttgacaacaaatgtaagtgtgcccggat

SEQ ID NO: 66208 - DNA, 83 bp, Homo sapiens
cggagaggagagcggtgcggaggactgagggcgaccattgacgaggtggagacggacgtggtggagattgaggccaaactgga

SEQ ID NO: 66209 - DNA, 100 bp, Homo sapiens
gcaagcacctcgggatcccattccttcacagggaccctagccaggtcctacaacgtgactttaaaaagacagcagaaagcaaaaatgtcccattggaacg

SEQ ID NO: 66210 - DNA, 90 bp, Homo sapiens
caagcacaccctaccgaattacaagatcaggttaaatgggccagggaaaactatcaccataacattggctcaccatattgcttacggtta

SEQ ID NO: 66211 - DNA, 88 bp, Homo sapiens
agcgtggaggtcacatacctcaagaagcagggtacagccaaagaccggagctttggagagatgaagtttaaacagtgtcctacagaga

SEQ ID NO: 66212 - DNA, 83 bp, Homo sapiens
gggctccaccgaggaggctggaggcaggtggggaagcactacctgcagttggccggcgacacggatgaagaactcaacagctg

SEQ ID NO: 66213 - DNA, 82 bp, Homo sapiens
gtcctctcgggagaagcagcgcctgttcccggggcagatccaggttcaggtcgaagaattccatccactgacgccaacctgc

SEQ ID NO: 66214 - DNA, 83 bp, Homo sapiens
gtggccttagctgtgctcgcgctactctctctttctggcctggaggctatccagcgaatgggccttgacgaaggagaagtcgg

SEQ ID NO: 66215 - DNA, 100 bp, Homo sapiens
cctgactcggagacggacgaggatgaggaggagggggacgagcagcagcggctcctcaacacccctcgaagatctccaagacgacatagatccacatctc

SEQ ID NO: 66216 - DNA, 83 bp, Homo sapiens
aaataccagtccccagtgagggtgtacaaatacccctttgaattaattatggctcaaaatgatgcttcaacacccaggccagg

SEQ ID NO: 66217 - DNA, 81 bp, Homo sapiens
tggtctactctgatgtcaatcttgagggctaggtacaggtttgcagattccgccagcagcacagcaagctctacagatgag

SEQ ID NO: 66218 - DNA, 96 bp, Homo sapiens
gttttttccaagcttccagatgctggattaccagcatcaacaacagcaacttgtgattggcggtgaccggatattcagttgcacatccccacatca

SEQ ID NO: 66219 - DNA, 75 bp, Homo sapiens
gggaagcacagatgtggaaagtgaatgtgcggaaaatgccttcaaatcaggtggccaaggtggaatacgtcagga

SEQ ID NO: 66220 - DNA, 100 bp, Homo sapiens
ctcagaatcgaatctcttctccctccccttcttggtaaatcttacaaaccattgtggttttatgggaggactacaaaaaaacaaaagcactggattgacc

SEQ ID NO: 66221 - DNA, 83 bp, Homo sapiens
aaatcgacacacaaagaatagagttgagcctgtgggacacttcgggtctcctctgagcctccggcctccataagacccaaaac

SEQ ID NO: 66222 - DNA, 98 bp, Homo sapiens
gccaaggtcaccagcaccccagatgggtgagagatgtgatcactggtttcgtggcctgaccaaggacctccaagggctattcacgaaaagcagcagct

SEQ ID NO: 66223 - DNA, 75 bp, Homo sapiens
ctggaattgtgggagttgtgtctgccactcggctgccggaggccgaagacaactcgagagatgatcgctcgttct

SEQ ID NO: 66224 - DNA, 76 bp, Homo sapiens
catcctgtcacaggccatgctctggcaaaaacacctgcaaatccaagagacacatctttggaagataagagagctt

SEQ ID NO: 66225 - DNA, 152 bp, Homo sapiens
ggaattcttcctgaacactgtattatagacatcacgtcagaaggccaggttatgctgactcctcagaagaacaccagtggctccacccacaaggttaagatataatgtaatatctcatgacagtatacagatttcatggaaggctccaagag

SEQ ID NO: 66226 - DNA, 101 bp, Homo sapiens
gaaagtggagtccgagctgagatccatctgcaccacggtgctgctattgtacacatgtgacaacctatgaagaatcaaattattctctgagttatcagttt

SEQ ID NO: 66227 - DNA, 100 bp, Homo sapiens
caaactcgaagaacagctgtggaaagaagttgcaaaacactggggtctccgtctctccaccgggggcttcatccttccagggaggagaagagggactcca

SEQ ID NO: 66228 - DNA, 80 bp, Homo sapiens
ccccggcgcgaagaggctggactcggattcgttgcctgagcttaaagcttttcaagccaggccaagaagctgtgaagtac

SEQ ID NO: 66229 - DNA, 98 bp, Homo sapiens
tcactggtcgcactgagggtgaagtggcaggaggaggaggaggggctccggctggtctgtggtgagacattcactactttcactgcctaagaatcctg

SEQ ID NO: 66230 - DNA, 75 bp, Homo sapiens
ctaaagacggaaccgccacagcactcaagtttggtgcacctcgatttggaggaagtagggcagggcccttatctg

SEQ ID NO: 66231 - DNA, 100 bp, Homo sapiens
gatccgatacagcaccaaacaggaggcggccaaggcccaaactgcactgcacatcttgccagagtgatctctcggcttgccgactttgctaaggaacgag

SEQ ID NO: 66232 - DNA, 87 bp, Homo sapiens
gagaccttacctgtcaccttggctctcccacccaatggagatggctctaatgataccatgctgtgaagtccaggccacatggaggtg

SEQ ID NO: 66233 - DNA, 100 bp, Homo sapiens
gcttggttaacttgggagaaagtttcatctgtggatggagtattggtctccatcacatttttgcccagaggtaggggggattatgcccagttttgggatg

SEQ ID NO: 66234 - DNA, 107 bp, Homo sapiens
atcagcagttatgaggcagagcctaagagaactatggcaacatcaggtgactgtcccagaagtgaatcgcaggagttggcgatttcagcgtgtgggagttctctgga

SEQ ID NO: 66235 - DNA, 99 bp, Homo sapiens
gctgttcccgcgaagcgagtcgccgtctcgtaatgtttctttctcagcaaaatagaggagaagcttacccctcttccagaagataatagtatgaatgtg

SEQ ID NO: 66236 - DNA, 90 bp, Homo sapiens
tttcctgctggctttggagcctgagctcgaggcccggctggcgcacctgggcgtgcagcccccggtccctgagaagcggccccctgaaat

SEQ ID NO: 66237 - DNA, 98 bp, Homo sapiens
atagaggtcgatggtggagtaggtcctgacactgtccataaatgtgcagaggcctcattgctacgatttcagagtaccctggtaatagctgagcatgc

SEQ ID NO: 66238 - DNA, 75 bp, Homo sapiens
acctttcccgccctcttctgaaggatgtacgaagtaggtccaaagttgttgaccgtatttacagtctctacaaac

SEQ ID NO: 66239 - DNA, 100 bp, Homo sapiens
gggtctggagacgccgtggcagcctgaacggagtgtgcgacggattgggaggcccgcgatgctcccagcccggtgagacctgcctgaatggcgggaagtg

SEQ ID NO: 66240 - DNA, 75 bp, Homo sapiens
cgaggccacagacacttctgatagtgaagctctcgtggcattatccttcagtggggctattggactgacttttct

SEQ ID NO: 66241 - DNA, 75 bp, Homo sapiens
tcagttatcaagctttagagcctggctactcacagttgaagcctgattgcagttaatccgacatcattacaatct

SEQ ID NO: 66242 - DNA, 75 bp, Homo sapiens
gtccgccgctcaccccgcggccgcaccttcccgccttctcagaagtccattggaatattaagcccaggagttgct

SEQ ID NO: 66243 - DNA, 51 bp, Homo sapiens
cctgagcccgacattattcctgagttctctcagctactggaagagaaaaac

SEQ ID NO: 66244 - DNA, 102 bp, Homo sapiens
gtgcaccgtatcctgtcacttctggatgtgaggaaaggaaacagattcattgtctgtctgaggatgagttaagttcttctacaagttcaactgataagtcag

SEQ ID NO: 66245 - DNA, 90 bp, Homo sapiens
ggcgccgcagcctcccggggccctacggccgcccgccaccagggcatgagccagaaggagagctctaagtctgccatgatgtatattcag

SEQ ID NO: 66246 - DNA, 50 bp, Homo sapiens
agccaggccagcgccgacctggagagtgtgacatgttggcgagccaagtt

SEQ ID NO: 66247 - DNA, 75 bp, Homo sapiens
tcaattcttcttctcaggacttcgtggttgttctgctctgcaagaatggtatctatgccagcagctcatgcaaca

SEQ ID NO: 66248 - DNA, 75 bp, Homo sapiens
gattctttcacttacgaggactacaggcattaattcatggactaaacagacattattactccattactattaact

SEQ ID NO: 66249 - DNA, 83 bp, Homo sapiens
caactcgggcgccgacgagatcggccgcttacaaacacgcagatggcaagaagattgatggcaggagggtccttgtggacgtg

SEQ ID NO: 66250 - DNA, 100 bp, Homo sapiens
cctgaggagcgggatctaacccaggagcagacagagaagctgctgcagtttcagggctctctttacctatgaaggcaacagcaatgacatccgcgtggct

SEQ ID NO: 66251 - DNA, 90 bp, Homo sapiens
aacaaaggctacagaatcttgtagagaaaatatcagaaacagctcagcagaagaacttttcttacaaggaatatgttctgtctcacacgg

SEQ ID NO: 66252 - DNA, 98 bp, Homo sapiens
gaaaatttacagaaacactcaacaccccatgctgcattccagccaaattcccaggaggaataaacatggtgtgtctcgaaagaagattgctcagatgt

SEQ ID NO: 66253 - DNA, 75 bp, Homo sapiens
tggcagcctgcagctaggactttaatatcaagaatgctgcagccaatgtccttcgggaaacatggttaatctata

SEQ ID NO: 66254 - DNA, 75 bp, Homo sapiens
cagcgggggggcaggcgatcgaagaggttggcgatttgaaggagctgcagacactagacatttctaccaatcgtt

SEQ ID NO: 66255 - DNA, 75 bp, Homo sapiens
ttcccattgctgtttccatgttctcaggatgcctggtggcagtagagaagagcatcacagaagttgctcaggagc

SEQ ID NO: 66256 - DNA, 51 bp, Homo sapiens
ccctacacggtctcctgggtcaagatgggcttaggtcacgagcaaggattt

SEQ ID NO: 66257 - DNA, 100 bp, Homo sapiens
gggaccctcaggctcagatcagtggccgaggccccagagatgtctggcgataaagggatttctgccttccctgaatcagacaaccttttcaaatgggtag

SEQ ID NO: 66258 - DNA, 74 bp, Homo sapiens
tttatataggaatgtgatgttagagaactacagaaacctggccttcctgggctcctgggtagaactgcacttca

SEQ ID NO: 66259 - DNA, 73 bp, Homo sapiens
aaaacctcagacaccatagccccctggttccatgcatttttgaaacgttggggttgttggagtggttggattt

SEQ ID NO: 66260 - DNA, 76 bp, Homo sapiens
gagctgaggagaacgactgggttcgcctgcccagcaaatgcgaaggctccagtgtggaagtgaaggaggacaagtg

SEQ ID NO: 66261 - DNA, 101 bp, Homo sapiens
ggcatagaaaaaggggaaagccacccaggagagaagatattgaggatcgaacagaggctgcaaatagaataatatgtactatcagaagtaggagacctcag

SEQ ID NO: 66262 - DNA, 100 bp, Homo sapiens
ccaagcccgctgagcaggatgaggtgagggagataaatctgcaggacatcaaggaagatttagaattggatccagaggaaaacagcaccctgtttatggg

SEQ ID NO: 66263 - DNA, 75 bp, Homo sapiens
caagtccttgcagcctcgctgtacaatggtggaagcctttgacaggtggtccaaaccagccctcgtcactcccca

SEQ ID NO: 66264 - DNA, 82 bp, Homo sapiens
gccgtgcagcacatgcaccggcagaagccgcccatcatccacagggacctcaaggcgtcacaatgtagcagggaccccaggc

SEQ ID NO: 66265 - DNA, 78 bp, Homo sapiens
cctacgccgtggacttccagcgcagagtttcgctgttgttgcccaggctggagtgctggagtgcaatggcatgatctc

SEQ ID NO: 66266 - DNA, 75 bp, Homo sapiens
accactgaccaggacctaatcaagctgtgccaaccctataatgatccagccttttatgaagaatgcaaaatggaa

SEQ ID NO: 66267 - DNA, 96 bp, Homo sapiens
cattcctgacctcaccgcgcccgtggccgccgtgcaggcggccgtcagcaacctcgtccggtggatgattcaacagccacacaaagcagcaacatt

SEQ ID NO: 66268 - DNA, 83 bp, Homo sapiens
accaccaccatcctgctggacggccggcgcgtgaagctggagctctgctgtgagaaacgaccgaaacaagaagaagaaggagg

SEQ ID NO: 66269 - DNA, 83 bp, Homo sapiens
caaggaggagtacaaggacatcctgcgcaaggccgtgcagaaggtgcaactgacatgggtgaaccccagggatccatgcggat

SEQ ID NO: 66270 - DNA, 101 bp, Homo sapiens
ctcatcctgccttgtgctcacagcttttgtcagaagtgtattgataaatgccagagactgctgctactttgaaacgtacgatagaggccctgatggacaga

SEQ ID NO: 66271 - DNA, 78 bp, Homo sapiens
acgtgctgttcgaggatgtgtacgagctgtgcgaggtgatcggaaaacttcatcgcctgattcttccaatgaaaattc

SEQ ID NO: 66272 - DNA, 90 bp, Homo sapiens
cggagtcacagttcccgcaggcggcgacagcagagcgcccactgcctccagcaggtcaggaaaactgccattgcctctgtgagcaccctg

SEQ ID NO: 66273 - DNA, 75 bp, Homo sapiens
gctgactgggagggatggtagcctggccagcaacccttattctgtctctgctggatgaaccgaatcctaacagtc

SEQ ID NO: 66274 - DNA, 97 bp, Homo sapiens
gagacggcgagacgcgcagcgccggcgcccgggagacccaggaggagcccgcaggtctcctctgagcctccggcctccataagacccaaaacagatg

SEQ ID NO: 66275 - DNA, 100 bp, Homo sapiens
tttgtcgagatgggaaaacaattagtctttgtgcagaaagcacagatgattgcttgcataatcaccagcaacacccgggacaataatacgggggccacct

SEQ ID NO: 66276 - DNA, 82 bp, Homo sapiens
caaatccgtgtcggagtccttacagtagttcggtgtagcactgtttgcggcgaggagaaaggaaggagaggagaaaactgca

SEQ ID NO: 66277 - DNA, 50 bp, Homo sapiens
atctttacaagcttgtaaaatctcaggaagagagagaaaatccttcaaaa

SEQ ID NO: 66278 - DNA, 83 bp, Homo sapiens
accgacagccgacgcgcagatagcagagccatccttggggtgtcgattgactgcccgtggtccatctactccacagtcatcgc

SEQ ID NO: 66279 - DNA, 75 bp, Homo sapiens
tgacattctcaaagactggtgctatgaagctgaggagaaagaaggcgatgccaccaaggattccctggatgacct

SEQ ID NO: 66280 - DNA, 105 bp, Homo sapiens
gggacctggatcatggctgccgcgccgccgctacgggaccgcctgagctttctacaccggttaccggtattgtaagaacaagccgtacccaaagtctcgcttctg

SEQ ID NO: 66281 - DNA, 102 bp, Homo sapiens
tgaagagctatggtgaaacaccactgaagcattgccaagctgagtcagtgctgattctctcaaatagagcttgaaggataaatcttcatttttgtttcaaca

SEQ ID NO: 66282 - DNA, 98 bp, Homo sapiens
cctgaggaggcgagctagccgggagttacaccgccaccgccagtactttaggatggagctgatgcatgctgaaaaactgaggaaggagaaggaagaat

SEQ ID NO: 66283 - DNA, 50 bp, Homo sapiens
ctctctaacatgtttaaccctcaaacctggaaacattgcccaaagaagac

SEQ ID NO: 66284 - DNA, 80 bp, Homo sapiens
gctgcgttcacggcaggattcggttagcaaacggggattcagcgtccgatcctttggaacagggactcacgtgaagcttc

SEQ ID NO: 66285 - DNA, 100 bp, Homo sapiens
tcgactcagacgtggataaagataatcccggtttacccaaggtccagcctagcccctaggcaccatgtcggacagtgatctaggtgaggacgaaggcctc

SEQ ID NO: 66286 - DNA, 100 bp, Homo sapiens
aagtataataaagaaatattggtcctcatggaagaagagcaagatttaccagagcaaccagaactgcaagcacatgttgaccagataactgaaatggcag

SEQ ID NO: 66287 - DNA, 100 bp, Homo sapiens
cattcttgaggtggcaggtggtcagctgcgaatcaaaccggttttgcacactagggaccaagaagccctcggggacactgctgagaaaagactgccgaag

SEQ ID NO: 66288 - DNA, 80 bp, Homo sapiens
ggcaagctgtgcgacgtgaccctcaaggagtccaaaactacttacctggaagaccttccaccaccccctgagtatgaatt

SEQ ID NO: 66289 - DNA, 75 bp, Homo sapiens
agcgcaccgacatctgcctgctcaaaggtggtccgtactgagaagaacagtttgaacaaccgattcttaccctgg

SEQ ID NO: 66290 - DNA, 100 bp, Homo sapiens
tccctggaactcccacctccacagacccgtccgggtgctgaaagtccacggatgctatccctggtcaaatcagaggttttgggatttgagattgacgcgg

SEQ ID NO: 66291 - DNA, 100 bp, Homo sapiens
gaccacgtggtactgcagcttcaaagactgctgccctagaggggattgcagaatctccaacaactttacaggtggatagatacttctcaagacatcacac

SEQ ID NO: 66292 - DNA, 90 bp, Homo sapiens
gcagatggcactttccaaagtggatgcctccggggagggtcttgctacgtacgttgcccaggttggaatgcagtggcgtgatcatggctc

SEQ ID NO: 66293 - DNA, 128 bp, Homo sapiens
caagagtttctgtcctgcacccctacccccggccacagatggctccattagcgcccctccaagtgtctgcagacagtgtttaagaatgaaagcctcaacgcagaatcaaaatctggctgcaaacttca

SEQ ID NO: 66294 - DNA, 100 bp, Homo sapiens
caaacatccatatcataagtggaattttggagatattcaaagctgatggtgagaccattctaaaaggcctccagtccattttccaggagcaggggatggc

SEQ ID NO: 66295 - DNA, 98 bp, Homo sapiens
agcgcgttccggaggcccggccacctctgagaagggagacgacgctgctgggtccgctgagcggggcgacccgagggaaacagaagtacctgtgcgcc

SEQ ID NO: 66296 - DNA, 75 bp, Homo sapiens
tccccgggcgattcctgtctaagaaaaggaggatttagtgatgacagacctaatgctctattaagttcacctgca

SEQ ID NO: 66297 - DNA, 100 bp, Homo sapiens
ctcctggtgaagaaagcaaacagcaactcgagatgtggtgctgagccgggtgccggagcaggaggaggaccggacagtgagcttgcagaatgccgcagcc

SEQ ID NO: 66298 - DNA, 100 bp, Homo sapiens
ggaagacgccctggtgctcaccaagcaaggtcattgaatctttgggaattattatttataaagcactggactatggtttgaaggagaatgaagaaaggga

SEQ ID NO: 66299 - DNA, 75 bp, Homo sapiens
cggagatccctcagccctggctggagacgatcctccctggccggcgggattcatgacccttcgcgcagttgcccc

SEQ ID NO: 66300 - DNA, 100 bp, Homo sapiens
gaaacaaacgcgagcttcagtggtgattccagtgactggggatagtgaaggtgctacggtgcaggatactggtatcgggatgacacaggaagagctggtg

SEQ ID NO: 66301 - DNA, 95 bp, Homo sapiens
aataagcaaagtttatgacgcgccgtggtttttgattctggcggaagccttcccgagtcgagagaacgtgcagagttcttggagtctctgcggag

SEQ ID NO: 66302 - DNA, 75 bp, Homo sapiens
cagcaatctgtcaatcaccttgttaaagaggctggactctgtgaagctgagcaggagcagatgcggaagatcctc

SEQ ID NO: 66303 - DNA, 75 bp, Homo sapiens
ccagaatccaccgtcaggcataaattgattattcctcgcccacatctgtgccagagaccgtgattaccacctgaa

SEQ ID NO: 66304 - DNA, 74 bp, Homo sapiens
gggaggtgccgccggggtcgcagcatgttggcagataaattgaacatgactccagaagaagctgaaaggtggat

SEQ ID NO: 66305 - DNA, 75 bp, Homo sapiens
cagcccgcactccttgaggatcggtatcatgaactgatcactaaatatgggaagttggagcctttggcagaagtg

SEQ ID NO: 66306 - DNA, 97 bp, Homo sapiens
gaaatagcagaagtgcaagtcgatcgaggtcaagaacacgatcacgttctagatcacatactccaagaagacagtcaccatcagaaaagctaagttt

SEQ ID NO: 66307 - DNA, 75 bp, Homo sapiens
tcagggagagcgggcagccttccaggtggacaggtagacatagctgacattgagaatgaagagaaccgctactgt

SEQ ID NO: 66308 - DNA, 90 bp, Homo sapiens
aaccacgtctcgtccacgacctccctaggcatctggccatctgaagaggttttggcttactactgcctcaagcacaataatatattcagg

SEQ ID NO: 66309 - DNA, 75 bp, Homo sapiens
aaagctggctttgcaggagaccagattcccaaatactgtttcccaaactactgggagaacagctgaagcagctgg

SEQ ID NO: 66310 - DNA, 74 bp, Homo sapiens
ttgtcagagcagggaaaatcacctttgcagaaaagaaatttctgaataaattggcagaagaacgcagacagaag

SEQ ID NO: 66311 - DNA, 99 bp, Homo sapiens
tggccctgcccccagggctggctgtttctgtgcttaaagccatcttccaggaagtgcatgtacagcaactggccatgccacagcacataaagattacag

SEQ ID NO: 66312 - DNA, 50 bp, Homo sapiens
tccaatgctgggattggctgcttttcgggactcagaagaagatccttgac

SEQ ID NO: 66313 - DNA, 100 bp, Homo sapiens
ctcagctcctggggatcatggtggtggccagcgtgtgttggctgccccttctgatgcaggccctgacttcctgtgagtgcaccatctgtcctgactgctt

SEQ ID NO: 66314 - DNA, 82 bp, Homo sapiens
caggattgttcctgagggagccaaaaaagacctatgaggaccagcacagcagtgaggaggaggaggaagaggaagaggaaga

SEQ ID NO: 66315 - DNA, 98 bp, Homo sapiens
ctgaggtccggggcccagttttccggagttgcggatctgaacgtctatgacactctttcgagctgacacagtgaagaacatagaaggagaactcaccc

SEQ ID NO: 66316 - DNA, 100 bp, Homo sapiens
gatcccgccccgcccggagccccggcccccacagaacaatcccagacggccttactactgagtgttctggaaatacatactttctgaatgaccaaccgtc

SEQ ID NO: 66317 - DNA, 75 bp, Homo sapiens
ttctactagtcacacctggccattcagtgcagttgctgaattaatagacacgttggtcgtcattgcctccgagcc

SEQ ID NO: 66318 - DNA, 83 bp, Homo sapiens
cgccgccgccaccatgcccaagagaaagcttgctatggcatcgttcaggtgccaacgggaccctggttctgccggaaatgtga

SEQ ID NO: 66319 - DNA, 136 bp, Homo sapiens
ggggagcccatggcgtacagtcaaggaggcggcaaaaaaaaagtctgctactactacgacggtgaactggcacaaaggttaatctcaagatgccgctagtgaaaagaaacatcgatcctaggcacttgtgccacac

SEQ ID NO: 66320 - DNA, 101 bp, Homo sapiens
atgacacagtcattttggacccaccactggtagccctggataaagatgcaccggttccttttgcagaacaactggaacgcattgaggaagggatggaccaa

SEQ ID NO: 66321 - DNA, 50 bp, Homo sapiens
ggagcagaagaacttggctgccattcaatgtgggccaaactgaaattgca

SEQ ID NO: 66322 - DNA, 75 bp, Homo sapiens
gggatatacatgcatgcaccaaaacgaggacagtcttgctggtggatgccctccttactccccaatatatacgtc

SEQ ID NO: 66323 - DNA, 75 bp, Homo sapiens
agccgcggatctcaccgccgctcaggactgctggccagacccccaagctagcccgccaggcctccatagagctgc

SEQ ID NO: 66324 - DNA, 150 bp, Homo sapiens
tcccagagtttattcctcgttccttcttcagtcctgctcgtcggaggacccggttgccatggtgaaggaaaaaggtcctggatgcctcatcccttagtttcaacaccagattgaaatggtttgccatctgcttcgtatgtggcgttttct

SEQ ID NO: 66325 - DNA, 134 bp, Homo sapiens
ctgaaagcaaccacctaattcatcttagtaacactaataatgtaaaactcctatctgagatagagttccttgtggtgaaagtcaatataataggagaagtggttgaccagggaagtaccaatttgaaaattgac

SEQ ID NO: 66326 - DNA, 98 bp, Homo sapiens
aactacaatcaccatcttgttggtgcttcctcatgtattgaagaattccaatcccagttcatttttgtgtttgtggccagtcctcacaaaacacagcc

SEQ ID NO: 66327 - DNA, 100 bp, Homo sapiens
gtgacagactatgctgagggagagctctttcagatcctagaagatgacggaaaacttcctgaagaccaggtcatgatgatgggcagcgcccgagtggcgg

SEQ ID NO: 66328 - DNA, 100 bp, Homo sapiens
ccggagcatggcggacccccagagctgatgatatcatcaagttgaatcgaaaggaagggaagaagcagaattttccaagactaaatagaagactcctcca

SEQ ID NO: 66329 - DNA, 90 bp, Homo sapiens
gggaaatcgtgcacatccaggctggtcagtgtggcaaccagatcggtgccaagactgtaaattcacctgtcacccagaatgccgcagcct

SEQ ID NO: 66330 - DNA, 75 bp, Homo sapiens
catgtggctgccttgggctctgttgcttctctgggtcccaggcccggtacaagcagagccttgacccaactgtgg

SEQ ID NO: 66331 - DNA, 82 bp, Homo sapiens
cacttcgtcatgttcttcgcgccctgccggctcagttcggggaagctgcaggagttcggcgtgggtgatggcagcaagctga

SEQ ID NO: 66332 - DNA, 82 bp, Homo sapiens
ccggtgcgattgcatgaggatgctgaggctgtcctgtcctcgtccgtctcatcaaaggtgaggcggaaccaaccctcctggc

SEQ ID NO: 66333 - DNA, 50 bp, Homo sapiens
cggacgctaagcggggtaggggaagccacagacccctttgcttctgtttt

SEQ ID NO: 66334 - DNA, 90 bp, Homo sapiens
cgtggagaagtggatcgacgggcgcctggaggagctgtaccgcggcatgggtgaagttgaacaaattgctatgatgaaaccaaaaggcca

SEQ ID NO: 66335 - DNA, 51 bp, Homo sapiens
ccagtcccgggcgggccgtcgcgggagagagacagggtcttgctgtgttgc

SEQ ID NO: 66336 - DNA, 50 bp, Homo sapiens
ctcggatccctgaatttgatccaggtaagaacaagagagttggaaagcag

SEQ ID NO: 66337 - DNA, 80 bp, Homo sapiens
cctgctaacagaactggaccttttcgagatcctgaactttcaactgtttgccggaagtctggtacattaatattatatcc

SEQ ID NO: 66338 - DNA, 101 bp, Homo sapiens
atcgggcaggagacagtgcaggacatcgtgtaccgcaccatggagatcttccagctcctgaggaacatgcaggggtgtttggtgagctggatcttcatgga

SEQ ID NO: 66339 - DNA, 50 bp, Homo sapiens
ttcagcagtcctgtcaagtataaatgcaaaatggcaatacctgtgctttg

SEQ ID NO: 66340 - DNA, 101 bp, Homo sapiens
ccagtacccaaactactgttccttcaaaagccagcagtgtctgatgagaaaccgcaatcggaaggatgtatcaggacaaactggcttctctcaagaggcag

SEQ ID NO: 66341 - DNA, 82 bp, Homo sapiens
ggccttagctgtgctcgcgctactctctctttctggcctggaggctatccagcggctcattgtcatccccaagccaggccag

SEQ ID NO: 66342 - DNA, 74 bp, Homo sapiens
tgtttatcgacattatacaagaaacagcaagcaaatcatttggttttggcaggatgaagcctgctgggagcgtg

SEQ ID NO: 66343 - DNA, 100 bp, Homo sapiens
taaggacaagcaggagctgggagccccagggtggcccagttgaaatccttcccttcctctaccttggaagtgcctaccatgcatccaagtgcgagttcct

SEQ ID NO: 66344 - DNA, 100 bp, Homo sapiens
ctgcagaccacgtgtgctgtgcacagcggctccagtgggggacccctcttctccaaccactcaggaaacctccttgcaagtgaagtcttctgttggggac

SEQ ID NO: 66345 - DNA, 90 bp, Homo sapiens
tcccaaaattattgaaaacactcgaaggatgaccttgaatgatgccatgaggaacaaggcaaggctgtcaattacaggaagtactggaga

SEQ ID NO: 66346 - DNA, 80 bp, Homo sapiens
caagatctggaactaacgccagtagctgtcggaaaaggtaacagaagatggaactcgaaatcccaatgaaaaacctaccc

SEQ ID NO: 66347 - DNA, 83 bp, Homo sapiens
cttcagcttcccagcctaccactggaccctctgctgcctctccaggatgctttcattggatttggaggaaatgtgatcaggca

SEQ ID NO: 66348 - DNA, 75 bp, Homo sapiens
aaatgttgaaactatttaaagaggttgctagcttacagatttagtccatattatcgaaccaaggaaaaacttccc

SEQ ID NO: 66349 - DNA, 100 bp, Homo sapiens
gggcgaggaagctagccaaaagctcaccagctggattccctcctgggggcttcattcccaaaacggccaccacgcccaaaggcagcagctcctggcagac

SEQ ID NO: 66350 - DNA, 81 bp, Homo sapiens
tcagaacatgctgcagttttatattccggaggtagaaggcgtagaacaggtgtgggatttgatggaggcaatgataaagat

SEQ ID NO: 66351 - DNA, 82 bp, Homo sapiens
ataacaagttccgatcagaggtgaaaccaacagccagtgatatgctatacatggctgagggtaaaaagctgggattggtagg

SEQ ID NO: 66352 - DNA, 100 bp, Homo sapiens
caagatcaggactcgtggttcaaattacagctaatggcagcattagccgctgttgggcctcctaatcctcgggcagatccagagtgctgcagtattctgc

SEQ ID NO: 66353 - DNA, 82 bp, Homo sapiens
gacggctcacctgtgcgggatggaacaaaagagaccttgtacacagacagacggctagtgcagtggtacagcacatgtcact

SEQ ID NO: 66354 - DNA, 153 bp, Homo sapiens
gacaaagttcctgctgatataaggttaacttccatcaaatctaccacactaagagttgaccagtcaattctcacagatggcttccggaaagtggtccacatcgagcagggcggcctggtcaagccagagagagacgacacggagttccagcac

SEQ ID NO: 66355 - DNA, 75 bp, Homo sapiens
gcgacagtggcggcggcgccatggcagggcttgcagccctgggcgctgcctatggcacagccaagagcggtaccg

SEQ ID NO: 66356 - DNA, 100 bp, Homo sapiens
gtatgagatatctctgcacatagtgaaaaacaatacccggggccctggcctgaagagggtgaccaccacactggccataaaatgcagtaaaaacaaatcc

SEQ ID NO: 66357 - DNA, 100 bp, Homo sapiens
gcggcagacggcgacagtggcggcggcgccatggcagggcttgcagagctgagaatgaagcggagagcatcagacagaggagctggggaaacgtcggcca

SEQ ID NO: 66358 - DNA, 83 bp, Homo sapiens
ctcttctggtgtcaaagcttttggacattcctgggcaaaatgatgcttcaacacccaggccaggtctctgcctcggaagtgag

SEQ ID NO: 66359 - DNA, 101 bp, Homo sapiens
aagacagtgaaaatgatgaaacatgtgctcccttaactgaggatgaaatgagagaattccaagttattagtgaacagatgacttcctgctgtacctggacc

SEQ ID NO: 66360 - DNA, 98 bp, Homo sapiens
gcaggatggcgacggcggcctacgagcagctgaagctatgaggagcttttctctggaatgtatatagatttcatggggacagatgctgctatttttcg

SEQ ID NO: 66361 - DNA, 75 bp, Homo sapiens
ggacactgatctgtttccccatttagttcagagaagccgaactgggattaccatgcagaaatacaagcttttgga

SEQ ID NO: 66362 - DNA, 100 bp, Homo sapiens
agcgggagcacgagcagttccaactggccatcgagaattggcagagggggtcgatttgggaggaaaggtgtggctataaactttgttactgaagaagaca

SEQ ID NO: 66363 - DNA, 100 bp, Homo sapiens
caggttctgaaaaaaggtgttgtggatgaacaagcaaattctgcagctttaaaggaaatctactttcttcaatgtgttaaccaatagtcaggcttcagca

SEQ ID NO: 66364 - DNA, 83 bp, Homo sapiens
agctggacggcgagcgcgagcggcgcgagaaagttgccagtcctgctccatccctcatgtcctggaagagagagagagacgag

SEQ ID NO: 66365 - DNA, 100 bp, Homo sapiens
ctggacttcgcgcagtgcctggggtactacggctacagcaaggcagcttcggtcacctctctgtccaacctggcatgcatgcacatggtccgctgggctg

SEQ ID NO: 66366 - DNA, 100 bp, Homo sapiens
agagctgacaacaaagaaagaacaagtctctgaagctattaaaacatcacagatcttcttggccaagcatggtcataaggagggcaatgagccaggggag

SEQ ID NO: 66367 - DNA, 105 bp, Homo sapiens
agaaaggagaagaaccatggctgatggagagagatatttcaggagttccaagttcagattctggagttctggagacaagtgcttctggatccctcttcccttccc

SEQ ID NO: 66368 - DNA, 88 bp, Homo sapiens
ctggatagtagttgttcttcagggaatgggtactgttcaaaaaggaatgccccacaagtgttaccatggcaaaactggaagagtctac

SEQ ID NO: 66369 - DNA, 75 bp, Homo sapiens
cacaggggccactcagagtcgcccgagaaattgaaggattctcattaagcaaactagggaatttcaaccttcaag

SEQ ID NO: 66370 - DNA, 75 bp, Homo sapiens
tattcctccatctctgaagcaacaggatctgaggttggatggcaagcatgtggtgtttggcaaagtgaaagaagg

SEQ ID NO: 66371 - DNA, 75 bp, Homo sapiens
tcaacatcctcgacagcatgcgctgcttccagcaggctcgaccgtgtgtgagaagatcatggagttgctgggaca

SEQ ID NO: 66372 - DNA, 74 bp, Homo sapiens
ttaattttagggtcctttatatagaagggagagtagtaaaacgatgtttgcagaaatggaaatcattggtcagt

SEQ ID NO: 66373 - DNA, 82 bp, Homo sapiens
acttttggggggaaactaggtcgatggtcggcggcgcccggatgggcagctgagggaatgacagaggaagaggaagacaaac

SEQ ID NO: 66374 - DNA, 50 bp, Homo sapiens
ggctatattgtcgatgattcagtcagagaccttgccaccatggaagaaag

SEQ ID NO: 66375 - DNA, 100 bp, Homo sapiens
ctcacctttgccaggaactggggggccgactatatcctgaaaccccgagactcttcagttgaagttcgtagtgattgggaagtgaaagaggaaatggatt

SEQ ID NO: 66376 - DNA, 98 bp, Homo sapiens
gtggcggcgtgcgcggggacctgcgctgactaggtccggggaaggcaacaactaccaaggccatggcaactttgacttcccccacgggaaccctggag

SEQ ID NO: 66377 - DNA, 99 bp, Homo sapiens
gctccggggagacgccgacaatgacatggtcaagattgagaacctgaccaaggtcccagagaactacttctatgtgccagacctgggccaggtgcctga

SEQ ID NO: 66378 - DNA, 90 bp, Homo sapiens
gctcaaggaaacctttccaacacagatgtccaagctgccaacgcatggatttaggagaatgtaccaaaatccacgacttggccctccgag

SEQ ID NO: 66379 - DNA, 100 bp, Homo sapiens
ctgatggcctgtcgagagatagagaatgggcgggaagacggaagaaagtgccgggaagaaagaaaaccccgtccggaccatccgcaaaaagtaagagctc

SEQ ID NO: 66380 - DNA, 100 bp, Homo sapiens
ggactcactgacaagccgcagagagagacacactgagagggagatgattattagttgcgttgagtcatcaggcaaatgtttcaggagccgtagagccaga

SEQ ID NO: 66381 - DNA, 100 bp, Homo sapiens
gagtcgaaatgcgtctctggaagtggcatttaataacgacatgatagtcactgacaacaacggtgcagtcaagtttccacaactgtgtaaattttgtgat

SEQ ID NO: 66382 - DNA, 88 bp, Homo sapiens
agaactgttccaatctttgtcttgtaaggagcacctgactacggtactcgataagctagcttttgcacagcatcaggctgaagtcgcc

SEQ ID NO: 66383 - DNA, 75 bp, Homo sapiens
caacggttagcggtggcaggggctgactgagagcgtctgcttggcttctccagggaaagtgaccgaggcagtgaa

SEQ ID NO: 66384 - DNA, 90 bp, Homo sapiens
tagcaatcagagaacaagaggagagttgaagagagcaatggacatcttttcagcagactgcctgaagttacatttagagactgaaatcac

SEQ ID NO: 66385 - DNA, 101 bp, Homo sapiens
gctgccgccactcctgagtaccaccgacatcctgtggctgtcctgcttttgctaccctctgctcaggcccgtcacggaccatctggacgagcaggcagtgc

SEQ ID NO: 66386 - DNA, 76 bp, Homo sapiens
gagacactgccaagcagccttagccctagtgtagagttaacagccaggtccttgcctgctgtgcagtctgatgaaa

SEQ ID NO: 66387 - DNA, 75 bp, Homo sapiens
ccgccgccgccgttggctggagatatcagttttagagaatgtggcgtggagaaattctcaaggaaagagtaaaat

SEQ ID NO: 66388 - DNA, 83 bp, Homo sapiens
cgccaccatgcccaagagaaaggatcccatgacagattctgttgtcacgtctccttacagagtttgagcggtgctgaactgtc

SEQ ID NO: 66389 - DNA, 74 bp, Homo sapiens
ctggatcaccgacagcacagacagaatccctgctaccaatggcgttcaggaagtggcttatattcactcaaacc

SEQ ID NO: 66390 - DNA, 74 bp, Homo sapiens
gatttgatttgtcgagctcatcagggagaggtggaagagattgagcagcacaacaaggagctttgcaaagaaaa

SEQ ID NO: 66391 - DNA, 75 bp, Homo sapiens
cctcgacgtcttgcctgtgtcccacttgttcgcggcctatagctcattgctatggacagtgctatcaccctgtgg

SEQ ID NO: 66392 - DNA, 91 bp, Homo sapiens
cagccacctgctttgtggacgctggcaacgcattcaagaaagccgacccccaaggtttggtgcacctcgatttggaggaagtagggcaggg

SEQ ID NO: 66393 - DNA, 75 bp, Homo sapiens
atcttctgcactgtttacaggcacagtcctcctgcatatgcccaagaggattgggagtggaatggacaccagcag

SEQ ID NO: 66394 - DNA, 98 bp, Homo sapiens
ttccgaaaccccaccatcggctactgccagatgctggactgcagccttatctggatcagatcaatgtcattgaagagcaggtagcagctcttgagcag

SEQ ID NO: 66395 - DNA, 51 bp, Homo sapiens
gcaccgcggccggagctgtgggctggactgaagcttcaagatggctgacca

SEQ ID NO: 66396 - DNA, 100 bp, Homo sapiens
gttcaaacaagcagctttttgaattactttgttatgcagaaagtatgtaaacagtgttctagtttgagatccatacaaaatctaaattccctggttgata

SEQ ID NO: 66397 - DNA, 100 bp, Homo sapiens
actcgacatttacaagaagctgagcaaaccaaaaacagtggcactgagcactggaaggtgtcttgctgcaggtaactaatgaagaagtggtcaaccacag

SEQ ID NO: 66398 - DNA, 100 bp, Homo sapiens
agaaatacaggatgcctctcagctgccacctgcctttgacctttttgaagcctttgcaaaagtgtatgcaacagcgttattgcaacaggctaacgaaaac

SEQ ID NO: 66399 - DNA, 82 bp, Homo sapiens
tcgggcagaggcgacctccccgcgttccatgcgcacagggacagggcgtgagtgcatctccatccacgttggccaggctggt

SEQ ID NO: 66400 - DNA, 101 bp, Homo sapiens
gtgggctggggactcacggccgggacactcagggcaggtgaccccagggtttgaagaaaaggagggggagctgctggtgaggggaccctccgtgtttcgag

SEQ ID NO: 66401 - DNA, 75 bp, Homo sapiens
tggcggctgcgctggcgcggcttttggcggcctttctgctcctcgcggcccaggagctctttgttcaatgcctag

SEQ ID NO: 66402 - DNA, 98 bp, Homo sapiens
gctgcacctgcaaaccgggctacgtggggaacgggaccatctgcagagatagaaaatgctgctgaagaacctagagtcttatgtattatacaagatac

SEQ ID NO: 66403 - DNA, 100 bp, Homo sapiens
gctggagcccccggagccgcccgaagcgcccgcgagccgccggccgggagggatccgggtcctgaagctccagcccttctctgagacggggaccagggga

SEQ ID NO: 66404 - DNA, 100 bp, Homo sapiens
ccccactgttacatcgtgcgccgtggaccaggagaaccaagatccaagggagcccaagaagaggccgaaaccgagaccatgccagggaagctgaaggtga

SEQ ID NO: 66405 - DNA, 100 bp, Homo sapiens
gtgcacccagatgagttcttccagtcccctgaggtgatggcagaaaccagcctggacaccaagtctgtgtcagaaggccacctcaagaggaacatcgtgg

SEQ ID NO: 66406 - DNA, 101 bp, Homo sapiens
aggagggagaagacgaggatgatgcggaaattaaccccaagctaactgccttctatgaaagcagtcattattcaaggtgatcgtattcttccagtgaaaac

SEQ ID NO: 66407 - DNA, 50 bp, Homo sapiens
attggatttccctctgtgggtaagcttcgagagctgtgcccaggagtgaa

SEQ ID NO: 66408 - DNA, 105 bp, Homo sapiens
agaccctggagcctcagttggaagcagccgatccagcctgcggagcctgtggggcaggtatgttcagttcctcagtgggctcctgtccggatcggtgaaaatgaa

SEQ ID NO: 66409 - DNA, 98 bp, Homo sapiens
ccttggagctgtggtcactggagctgtggtcgctgctgtgatgtggaggaagaagagctcaggtcccatacccgcgctgctcatcactgagatcttcc

SEQ ID NO: 66410 - DNA, 82 bp, Homo sapiens
ctggatgctgcagacactgaacgaggagccagtgctgacaatggcaccatgcatctttgggactggagaactggctacaatt

SEQ ID NO: 66411 - DNA, 90 bp, Homo sapiens
gtacacctcatccctgtacgggtgcctggcctcgcttctgtcccaccaaacccatccaccagcatgaagaccgctgcttgaggttgaagg

SEQ ID NO: 66412 - DNA, 100 bp, Homo sapiens
ctggctgaagtagcagatctggacctctttgtttttagacatgaattggccataatgagactagcagcctttatgggcattactatgttagttggaataa

SEQ ID NO: 66413 - DNA, 83 bp, Homo sapiens
gagacgacaacccgggcctccgaggaccaagaatcgccttcagccctgtctggtgcatccttggcagaaagtgaggaggaaaa

SEQ ID NO: 66414 - DNA, 104 bp, Homo sapiens
aggactatgacgaggaggaggaagagtccagtgaaggcaggaaactgcatatcttctggtttacatgaagatggagtgctaatggaaatgcccaaaaccttcag

SEQ ID NO: 66415 - DNA, 100 bp, Homo sapiens
agacactgtgaagcacctgtgtggcgactggttccccatcgaaatttacatagtacatgacgaagttaaggataaagcttttgaactagaactcagctgg

SEQ ID NO: 66416 - DNA, 75 bp, Homo sapiens
tgagcccaggccacagtaccctattcacgctctgtgcttgtgccaaggggtagtaaaaagaatcattcctgcagt

SEQ ID NO: 66417 - DNA, 130 bp, Homo sapiens
ccggagcgacagaaaacttggaactaagctggaggacaccgagtactcttatgcagtccccatgactggatgttgaatttgttctctcagcacctatttctgaatggaatggcaaacagggacatatttc

SEQ ID NO: 66418 - DNA, 75 bp, Homo sapiens
agctgcggcggccggaggaccggcctgccggcccccagaacaagattgtaaaccatggctgtgtggatacaagct

SEQ ID NO: 66419 - DNA, 74 bp, Homo sapiens
cggagaacaccttgcccactcccatggtcctgcagagcatcatggcagaacaggatgtggaaaacgatcttttg

SEQ ID NO: 66420 - DNA, 100 bp, Homo sapiens
cagagaaagagaatgatgaagagaaaggcccggagactgaggcaagtgaggcctatctggttggcctttttgaagacaccaacctgtgtgctatccatgc

SEQ ID NO: 66421 - DNA, 100 bp, Homo sapiens
cagaaatggaagcaggaagtcctggaagtttgcagatcaggtacaagttaaataaatatcaagagcctgatgttgttaactttgattttaaaaacatggc

SEQ ID NO: 66422 - DNA, 100 bp, Homo sapiens
ctcatgcagtggtacaaggaccagaagaaactgcaccggaaatgtgcctaccagtggtcctttggcgtgctcctctgggagctgatgacaagaggagccc

SEQ ID NO: 66423 - DNA, 83 bp, Homo sapiens
ccggagtttgacgaagaggtggtttttgaggacactcacatgggagtcaagaaggtggagcaaacacaacctctggtcctata

SEQ ID NO: 66424 - DNA, 83 bp, Homo sapiens
cgaggatgcgtgttcgcgggtgtgtgctgcgttcacaggtgtttctgcggcagggtttgccttcccggattgggcctacaagc

SEQ ID NO: 66425 - DNA, 72 bp, Homo sapiens
agcctgagttgggagaagagctccagagacttgtttacaaggtcaagtcaaatcatatattggagaaactgg

SEQ ID NO: 66426 - DNA, 89 bp, Homo sapiens
cgagtgaccgagaccgcggccgggaccgagggcttgggcactgtttaaaggaaagttccgagaaggcatcgacaagccggaccctccca

SEQ ID NO: 66427 - DNA, 87 bp, Homo sapiens
acctgcagatattgggagatccacagctaagacgccgggactccctggaaacctagaaatgggcaaaatggaatatgtttttgaatt

SEQ ID NO: 66428 - DNA, 80 bp, Homo sapiens
gccatccagattctcctgcagttataccagtgggggtgaagatggagctggaaaaacaagcttaataagaaaaattcagg

SEQ ID NO: 66429 - DNA, 75 bp, Homo sapiens
aggccaagaagctctgtgcgaagggctccggatttaagtgccctgtatgctcaaaatttgtatcctcagatgaaa

SEQ ID NO: 66430 - DNA, 97 bp, Homo sapiens
ggtcccgatcccgaccccaaaagagtattcttggatcttgcacaggaaggaattaaagggtccccttctgcttgttatagccccagtagtcctgtcc

SEQ ID NO: 66431 - DNA, 82 bp, Homo sapiens
gacgagaagcctgaaaagtcgcagcgagctggagccgccggagggaaggcagcctctggagtgttctggtggctggggattg

SEQ ID NO: 66432 - DNA, 100 bp, Homo sapiens
gatcttcttaatccatcatctgatgtttctgagagactacagatgtttgatgatccccgtaacaagaaaattgtacaagctggagataaggaccttgatg

SEQ ID NO: 66433 - DNA, 83 bp, Homo sapiens
ggccgtggtcgtggtgggcgctttggttccagaggaggcccaggaggagggttcaaattcagctgttagcatggaactttcag

SEQ ID NO: 66434 - DNA, 99 bp, Homo sapiens
caaggacctgtggaatatgagtgatgacaaaccctttctatgtactgcgcctggatgtggccagctgcagaaccttggcctgaaaatgctacattatat

SEQ ID NO: 66435 - DNA, 75 bp, Homo sapiens
aatccagggaaatataacattcttggcacaaatactattatggataagatgatgaaaccccgagactcttcagtt

SEQ ID NO: 66436 - DNA, 50 bp, Homo sapiens
gcaaccggacagttccatgtataccaagaaaatgccccaggccttcctgt

SEQ ID NO: 66437 - DNA, 90 bp, Homo sapiens
atgaatagcaatcacagagactcggagagcatcactggacctagaagaatcccttaggatgaagctgagtcttaccaaggtagttaatgg

SEQ ID NO: 66438 - DNA, 90 bp, Homo sapiens
ccacccccggttacgcctgtcacataaagtggctgtaaacctagctgaagacacagctcatcccaaactcgtcttctcccaggaagggag

SEQ ID NO: 66439 - DNA, 82 bp, Homo sapiens
ttggagaatgatatcaaaccagctgaactcacgggaatcaaatggcgtaggtacaattttggagggcatggggactgtggac

SEQ ID NO: 66440 - DNA, 100 bp, Homo sapiens
ccttgagtttcctgagttgaagggaattattttcatgcagacagcttgtcaagctgtgcagcatcaaagaggcaggagggatatgatgatacatacgcag

SEQ ID NO: 66441 - DNA, 75 bp, Homo sapiens
aagcaagcagttcagaagagccaaggaataaacatgcaatgaacccaaaagggatgcacaggaacaaacgaggga

SEQ ID NO: 66442 - DNA, 50 bp, Homo sapiens
ggagagtccggccgcgacaggacggtaagaagagttcctgggtcaagtgg

SEQ ID NO: 66443 - DNA, 100 bp, Homo sapiens
acattagattcgctggctgttatgatcagcacaaccttgttgcatgccagataaatgatcaggaagatgttaccgagtacttcagtgaattccttagtgc

SEQ ID NO: 66444 - DNA, 83 bp, Homo sapiens
ggccgacccttcctgtcgctgacggcgactgcgggaggccaggagctgaaggtggtggatcatcgtctggaaatgtgtctggg

SEQ ID NO: 66445 - DNA, 75 bp, Homo sapiens
gcggctcggagccctggaagcagcagctcaccgaggacggggactcgcctccccaggacataagcctggaagaat

SEQ ID NO: 66446 - DNA, 75 bp, Homo sapiens
gacaaagtggcccatcatgaaggattaattcgactgatagaaccaggaatcagtgtctgtccctgaagggtcatt

SEQ ID NO: 66447 - DNA, 75 bp, Homo sapiens
ggctttaatcctgaaagccatgcagcggggcaaagtgcacctggagctgcggctgagcgaggtcatcacagacac

SEQ ID NO: 66448 - DNA, 74 bp, Homo sapiens
tgaaaaatatatccgcagggttcggatgagaccaggttcccagtctaagtgggtgactttccaagatagaggca

SEQ ID NO: 66449 - DNA, 75 bp, Homo sapiens
ggcaaaggtgtcgtggtggtcattaagcggagatccgggcctgcggcctcaccatggacccagaatgcgcccagc

SEQ ID NO: 66450 - DNA, 98 bp, Homo sapiens
aaagactgttgagtatgctccatgtagatcacgcattgtgtccagatctggcaccctgacttatgaagcagttcaccaaacaacgcaagttggattgg

SEQ ID NO: 66451 - DNA, 98 bp, Homo sapiens
gaggcacaggtggcccccaccacccggaggagcagctcctgcccctgtccgggggatgactgattctcctccgccagttgtcgccgtgatcctgaagg

SEQ ID NO: 66452 - DNA, 75 bp, Homo sapiens
ggcggaggcagaggtggaggcgctttgaaaggtggaatacatgttggtatcttttgatcatgaaaataaaaaagt

SEQ ID NO: 66453 - DNA, 75 bp, Homo sapiens
tgagccgtcgcggagccgcgcagccctcggagcacggtgctggagaatctggtaaaagcaccattgtgaagcaga

SEQ ID NO: 66454 - DNA, 88 bp, Homo sapiens
cggggctccgggccctaagggggtgcacttgatctatctgatgtacattctccaccaaagtcaccagagggaaaaacaagtgcacaga

SEQ ID NO: 66455 - DNA, 100 bp, Homo sapiens
ggagattctccggggacccttccgtatctgcctaggcattttgctgtctcctcctaatacgactggtgacatggcttccagatatgcccgacgatgtcct

SEQ ID NO: 66456 - DNA, 100 bp, Homo sapiens
aacaactctgagtccaactctagggcgctgctgcacagcgacgagcaccagctcctgaccaaccccaaggggagactggaattggaaaatcgacactgat

SEQ ID NO: 66457 - DNA, 82 bp, Homo sapiens
aagaaggcaacgacgttccatctgtggaaggacctaccaaccagcttgctgatgaccgtatggcactggtgtcaggcatcag

SEQ ID NO: 66458 - DNA, 100 bp, Homo sapiens
atgagcagttaaccagagccatccttcgggagaggatatgtagcgaggaggaacgcgctaaggcaaagcacctgtacttgattctaaagctcgaaaggcc

SEQ ID NO: 66459 - DNA, 50 bp, Homo sapiens
ccttctcccagtgaacgcccgttcaactttagttggcttaccaagagtga

SEQ ID NO: 66460 - DNA, 74 bp, Homo sapiens
ctaagtgccttaagagaggatcgcccaatccacatgcttttccaggcactacctggcagcaccatctaaacctg

SEQ ID NO: 66461 - DNA, 101 bp, Homo sapiens
ttcagcttcaaagaagacactttgctgttgatagctgagtggaaggaagctgaaggaaaagagttccgtttgagatcagcaaagaaagcttctgctctttc

SEQ ID NO: 66462 - DNA, 50 bp, Homo sapiens
gggccttcgagagctaccgcgccagacagcccacagcccccatcccgtag

SEQ ID NO: 66463 - DNA, 100 bp, Homo sapiens
gagtctctcaccaccagggagatcagacggcaggagaaatttctgaataaattggcagaagaacgcagacagaagaaggaaacttaagatgtgcaaggag

SEQ ID NO: 66464 - DNA, 75 bp, Homo sapiens
cgacaagccgctggcagccgcggatctcaccgccgctcaggccagctgaggtgggtgtcctggttggcaaagacc

SEQ ID NO: 66465 - DNA, 100 bp, Homo sapiens
cacacccacacgtgttcaatacacctcccacctgtcctcaggcatatcaaagcgcaaatctgtccaaggctgcctggggagcattggagaagaatggcac

SEQ ID NO: 66466 - DNA, 100 bp, Homo sapiens
taaaactactcatgtcagctgttctgcaggatcccatgagaagcatctactgccgaggatgttccaagccgctgtgctgctcgtgcgcgctccttgacag

SEQ ID NO: 66467 - DNA, 74 bp, Homo sapiens
caccattgactaccacaaaaccttggcgcaaaccaggacagtggtgaagtgcagcaggtactgtgaagagttga

SEQ ID NO: 66468 - DNA, 100 bp, Homo sapiens
taggaggaagatgcaagcggtttgggaccttgaacaaggcaaatatggttttggtggtgacagcaggagcaatcatccctttccccttggctccaggcca

SEQ ID NO: 66469 - DNA, 75 bp, Homo sapiens
cccgttcttcggatgctcagggttctggggatgctacagttcatcaggggtgctacatccattgtgtacagatgc

SEQ ID NO: 66470 - DNA, 100 bp, Homo sapiens
ccggtgttcaacgaagccatgatcttctcggtgccagccattgtgctccagaccctgcggatcaacgtgtgttactggcgagagatggttcctgggagct

SEQ ID NO: 66471 - DNA, 75 bp, Homo sapiens
gagtgcacggccatggggctgcgcagcggcaacctgcgggacaggtcaaggtcagcatctcctcgacgatcaaga

SEQ ID NO: 66472 - DNA, 75 bp, Homo sapiens
ggctgcaccaagtggcgaaggagccggctccaaggctgtgagaagacatttatcacagtgagtgccctgttttcc

SEQ ID NO: 66473 - DNA, 75 bp, Homo sapiens
ccagggcagctagggcctgggccgcggttcggccgcgccggccggaaattccacttacttggatgaccatggacc

SEQ ID NO: 66474 - DNA, 75 bp, Homo sapiens
catttcctgaagaactgtctcctggaattacattgaatatacaggctggcctgccactcctcctgctatgatgcc

SEQ ID NO: 66475 - DNA, 74 bp, Homo sapiens
ctctgctcttcagtacaatcctcaaaagtactttgactcaggagactacaacatggccaaagccaagatgaaga

SEQ ID NO: 66476 - DNA, 100 bp, Homo sapiens
tcacatttgtttcattgaagaaatagttaagatgagcaatgtgaagagactacggccacggctcagtgctattctctttaagcttcagtttgaagagcag

SEQ ID NO: 66477 - DNA, 48 bp, Homo sapiens
ccaatgcattcagaagccaaaatgaaacagatatgcagtatgcagcaa

SEQ ID NO: 66478 - DNA, 100 bp, Homo sapiens
agtgctcgtcagctccatgctgagcgcctactatgtggcctttgtgcctgtctggttcgtgaagagaccatggcgagcccagggaaagacaattatcgaa

SEQ ID NO: 66479 - DNA, 100 bp, Homo sapiens
ggacctctatctcgcttttcccctggccttctgtatcttcatggtgcggctcatcttcgagaggaaggatgccaattctgcgcttctcagtaactacgag

SEQ ID NO: 66480 - DNA, 50 bp, Homo sapiens
gcggagagcaacagcgcgccggtgaattatgtaacctcattacgctggat

SEQ ID NO: 66481 - DNA, 75 bp, Homo sapiens
tctaaacgaccatctgaagcatctgcttacaagcacatgtagactgccaaagtgtatgggatgctttcaagggtg

SEQ ID NO: 66482 - DNA, 75 bp, Homo sapiens
tttgcttgctgtggggttgacccagaacaaagcattgccagaaaacgttaaggcgtgtgctcgcccactgatatc

SEQ ID NO: 66483 - DNA, 75 bp, Homo sapiens
ctacaaaaaggtgcatataccactggtccaatgaagcgtcaagtggcagtaaaatcaacccgaggctttgctctt

SEQ ID NO: 66484 - DNA, 90 bp, Homo sapiens
gtggagaggttccttcaggaggatcagccctgaccctctattctgcaccctgtgagccaccgagactgaaccaaacccaggaagcggcgc

SEQ ID NO: 66485 - DNA, 83 bp, Homo sapiens
cctgttgactgcgtcgcgatgtgtggcgactgtgtggagaaggaatatcccaaccggatccagaagcagcaaggtctagcaat

SEQ ID NO: 66486 - DNA, 74 bp, Homo sapiens
ggtgatgtgagctgtgtggatgaaatcctaaaaatggaagatggtaccccaaagcatatcatccagatgacagg

SEQ ID NO: 66487 - DNA, 100 bp, Homo sapiens
agatggcaaccccaagttgaccctgggtctgatctggaccattattttgcatttccagaaactcaagccagtggattatgagtaccgagaagaagtccac

SEQ ID NO: 66488 - DNA, 75 bp, Homo sapiens
gcggagtcggggctcctgacggcctctggctgtacctggcagggagcagcctgccctgtctcacgctgattggct

SEQ ID NO: 66489 - DNA, 78 bp, Homo sapiens
caaaatgaggaaattctgtatgttcttcgccattatattcaggcagacatctggtccctgggcataacagctattgaa

SEQ ID NO: 66490 - DNA, 90 bp, Homo sapiens
agaagaatgaaggctgcaatcacatgcagtgtgctaaggattaagttgtcatcattctgggaagaaaaaaaaaacattaatgaagaggcc

SEQ ID NO: 66491 - DNA, 100 bp, Homo sapiens
cccaggtgggagcctggagggcaaagcgtggtgcgagcagccaggtgcccaggacagaagccccagccccagcctcatctacaccccaggagccctggcc

SEQ ID NO: 66492 - DNA, 100 bp, Homo sapiens
tttgaggccaataccaccgtcggccgcatccgtttccacgactttctgggagactcgttggtcaaagaaaaagtgatgtatgaaaaagaggcaaaacaac

SEQ ID NO: 66493 - DNA, 75 bp, Homo sapiens
agtccggtcctgacccttaccaaagtggaagtggaaatacaatgagttttaccatgttaaaacttcatgcagcca

SEQ ID NO: 66494 - DNA, 101 bp, Homo sapiens
tctcaacttacagatgggacttcacctatagatcatgagtttcaattactgaaaattacttggaaatagaaggaatggctaattgtctcccattctatgga

SEQ ID NO: 66495 - DNA, 100 bp, Homo sapiens
cctggattctctacttttgctccatggacagagccccagtcagccaagtttcagacagaccgtgagcaacaccaatgggaatcccaatggggaagtcgat

SEQ ID NO: 66496 - DNA, 81 bp, Homo sapiens
ttaagtgaaagaagtggaaacacccctaactctcccagtgagaaagatcagtctaaagaaaaggagaagaaagtgaaaaaa

SEQ ID NO: 66497 - DNA, 98 bp, Homo sapiens
tctatccatctctcgaagacttgaaggaagcgcctcttggacgcgtgtgaccgatgcccagattgcacgaccacttctggagctgctcctgtgcgcac

SEQ ID NO: 66498 - DNA, 96 bp, Homo sapiens
agagggaagtcgcctctgtgctcattcgaaatcagagcaaagcctctgggtctgggctctgtgagggagatgaagtggtttccatcaatggcaacc

SEQ ID NO: 66499 - DNA, 83 bp, Homo sapiens
aggtcggcagagcaaggggcttacgcagaaggacctggccacggactggagactgatgcatgagggggctacggaggcgcagg

SEQ ID NO: 66500 - DNA, 75 bp, Homo sapiens
ggaggccggaggaacgggcccgtcaagctgcgcctgacagctatctcccctggttcgaggtattttataagctgc

SEQ ID NO: 66501 - DNA, 83 bp, Homo sapiens
ggtcgcagttcttgtttgtggatcgctgtgatcgtcacttgatcttagcaaagcaatgtctcaagatggtgcttctcagttcc

SEQ ID NO: 66502 - DNA, 99 bp, Homo sapiens
gcgggaggcagccgtggccgagagtcctccctgctgctgtgtggacgacacgtgggcacaggcagaagtgggccctgtgaccagctgcactggtttcgt

SEQ ID NO: 66503 - DNA, 75 bp, Homo sapiens
ggttcctgcgcgcccgggatttcgatctggacctggcctggcgggttctgaagaaagtctccaaatacattcaag

SEQ ID NO: 66504 - DNA, 101 bp, Homo sapiens
caacattgctacacatgctaaaagatgacagacttggacaacatgtcccaacattacatcccaattcatgccagaactgaaagctaaattactgcaggaag

SEQ ID NO: 66505 - DNA, 74 bp, Homo sapiens
accactctctgtttctactcaactgcttttcactccgacattttcctgtggacactacctcactgtcaacaaac

SEQ ID NO: 66506 - DNA, 82 bp, Homo sapiens
tggggactttggagagaccatacacaatgtgagaacccagagaagaatgaggcctttctgatcctggtggctttgagacacc

SEQ ID NO: 66507 - DNA, 100 bp, Homo sapiens
ggagactgttgttcccggagatgcggcgcgcaggatcaaaatggtttcaatcccagaatactatgaaggcaagaacgtcctcctcacaggagctaccggt

SEQ ID NO: 66508 - DNA, 76 bp, Homo sapiens
cactgctggatgacagcaaggagttgcagcgctcgggttcatgacgctctcgatattcctgtgcagaaacctggac

SEQ ID NO: 66509 - DNA, 73 bp, Homo sapiens
gaaaacctggctggcctcaagtacagggtcatcaagggcaatatttgtcaggatacgaatcaggttctcttca

SEQ ID NO: 66510 - DNA, 101 bp, Homo sapiens
ctcgcagatgctggagcagcgactggcccgggagatccgtgccctggagagaagcaaggagcagctgctctcggagaagttgcatgctgagaatttgaaaa

SEQ ID NO: 66511 - DNA, 75 bp, Homo sapiens
gcacggcacagcacgctcgacttcatgctcggcgccaaagaatggacagcaaattatggatgaacctatgggaga

SEQ ID NO: 66512 - DNA, 100 bp, Homo sapiens
cgaaaaaaaacgggctatgctgctgttgcgtaattttgaacagaaaatgctgaaaaaaggagggtcatggattcaagaaataaatgttgctgaaaaaaat

SEQ ID NO: 66513 - DNA, 90 bp, Homo sapiens
acaaggaatgtgaaagaaaccacagagtacttaaaaacatcatggatcaatctcaaacaaaggccatccggctgtccttagagcaagccc

SEQ ID NO: 66514 - DNA, 101 bp, Homo sapiens
gaagacagccttacagaagctttggagcaaattaagataattagctcatcttcaatggactagaggcttttaccagatttcttaaaactgaattcagtgaa

SEQ ID NO: 66515 - DNA, 98 bp, Homo sapiens
ctcaggagaccaggaaaatggccacagggctcctgagagccaaaaaagagaagttgattcaagtcagttgagacgccagttgtgtggaggaagtcagg

SEQ ID NO: 66516 - DNA, 100 bp, Homo sapiens
gccctcggacttcatctcattgctcagcgcggacctagacctggaatcgcccaagtccctctactcgcgagaccattgtgatgaatgactgtattatccg

SEQ ID NO: 66517 - DNA, 88 bp, Homo sapiens
tatgtgcctttcagctttaaagagaattgaagcatttaaatcaaacggtattgagatggattgggttatgaaacataatggtccaaat

SEQ ID NO: 66518 - DNA, 75 bp, Homo sapiens
cagcttgtgagcaccctggagaagaagcagcgcaagtttgaccaggttgtctttctactcgggacactcttcctt

SEQ ID NO: 66519 - DNA, 75 bp, Homo sapiens
gtgagccccatgggctgtgttacatagagacagcagaacttgatggtaggtgacctcacagtgactcaagctacc

SEQ ID NO: 66520 - DNA, 101 bp, Homo sapiens
tgttgcgggccccgggacctgggctgggaacccgcggtggagcgggacacgaacgtgcagttggaattgatcacaccttttcagttgtacttcaatcctga

SEQ ID NO: 66521 - DNA, 101 bp, Homo sapiens
gaaccactggaaagtgaggaattttgaagtacaccgtggtgacattgtatcattggtctgctactgtttgaacggtcttggatgaacagatggaagtctgc

SEQ ID NO: 66522 - DNA, 75 bp, Homo sapiens
gcgggggcaccgagggctaccacgttctgcggagcttctcgaaacaagtctgagaagaagcgtcgggaccagttc

SEQ ID NO: 66523 - DNA, 100 bp, Homo sapiens
atacaggactgctgctcttatcagagactctttttgatcagaacaatgctgcaaaaaaagaagagtcagaaactgccaacaaaaatgattcttcaaagaa

SEQ ID NO: 66524 - DNA, 74 bp, Homo sapiens
tcgtgaagaacctgaaggacacactagctgcagaaccttggcctgaaaatgctacattatatcagcaattgaaa

SEQ ID NO: 66525 - DNA, 76 bp, Homo sapiens
gaacaatcttgaatcatgaagctactaaccagagccggctctttctcgctgatgcttttttcaaagccgctataag

SEQ ID NO: 66526 - DNA, 83 bp, Homo sapiens
aaagcgaaaaactatgctgaccagagtcaaaatgcagatcttcgtgaaaacccttaccggcaagaccatcacccttgaggtgg

SEQ ID NO: 66527 - DNA, 83 bp, Homo sapiens
gatgcctgcagagctgtggcttaccagcccatcatcttcgtttcggacagagcaaacagcaacaaggagctgggtgtggacca

SEQ ID NO: 66528 - DNA, 82 bp, Homo sapiens
ccaagactctgaggctgatatgcaatgtcacttacaacattaatcagatactgcatttaagttgatattcactgatggactc

SEQ ID NO: 66529 - DNA, 104 bp, Homo sapiens
caagagatgcctgggcgtcaccatgccacagctacccacttgttgccaccagaagaggaatctcttgttggcatttgaagcggctgaaagtgtaggcatcaaac

SEQ ID NO: 66530 - DNA, 100 bp, Homo sapiens
gagagagaagagggcagagccgtgcatggggctgctccccaggacctgagcaggaacctggagttttcaggtttccgccagctgtggatgcctttgacat

SEQ ID NO: 66531 - DNA, 96 bp, Homo sapiens
gcgccgcggggcagccgccgctcctccggggttggcgggacgaagactggcgtggtgcggtacgtgggggagacagactttgccaagggcgagtgg

SEQ ID NO: 66532 - DNA, 96 bp, Homo sapiens
cgtcagcactgactttcagctatggaatcgctcctgtactcgtcggtggagaacatccagcgcgtggctgccggggtgctgtgtgagctggcccag

SEQ ID NO: 66533 - DNA, 98 bp, Homo sapiens
cagcccatggcttacgctgcacttccatcccacggtcagtcactgtgtgcccagtattctgcagacaaacgagaagatgagaagatgtgtgatcattt

SEQ ID NO: 66534 - DNA, 75 bp, Homo sapiens
agcccctccaaagatttactttcccatccgtgactcctggaatgcagtctattatcctcccagtccacaacgctg

SEQ ID NO: 66535 - DNA, 100 bp, Homo sapiens
gatgtgtgaagaaaaaagaagtaaaagaagctattattacaagaataaaggcaggaatcaatccattcaatgcttcagaggatgattccgaagaagacgg

SEQ ID NO: 66536 - DNA, 90 bp, Homo sapiens
ggtcccggaaggtccttagggaggaccccagacaccggagactgggaaatggtggttgtgggaagagaagtttgcagaactgaaatggag

SEQ ID NO: 66537 - DNA, 82 bp, Homo sapiens
aaccaaacctcaagtatacaattaaatgtctacaaataagaaacctcgaaaatctccaggtgagaagagcagaattgaagct

SEQ ID NO: 66538 - DNA, 82 bp, Homo sapiens
tgaatatacccgaggcagccagaggatcatccgcaatgccttacctatcggcagaatggtgaggttctggagaattgatgag

SEQ ID NO: 66539 - DNA, 83 bp, Homo sapiens
gcctgcaccccagggggacaccacccacggcacaggagcctcctggaggcagcagactaatagggatgccaaaggaaaaatat

SEQ ID NO: 66540 - DNA, 83 bp, Homo sapiens
ctttcttccagcttctgctgtccttctttgtggagagcaagctgcctgtggaggaaccgattgtgtccacagatgaggtcatc

SEQ ID NO: 66541 - DNA, 97 bp, Homo sapiens
tggtgtttagaccagctagagaccatacagacctaccggtctgtcagtgagatggcttctaacaagatcaaatggggagcctgcggccttgtgttgg

SEQ ID NO: 66542 - DNA, 74 bp, Homo sapiens
caggaagtggctgtgcgctagatgctgtcaccagagtttattaaccttgcaagaactcttcaggcacatatgga

SEQ ID NO: 66543 - DNA, 74 bp, Homo sapiens
ggtcacttggagaagaccctagaaaggaaaagagcactggttgccattggtacccatgatttggacactttgtc

SEQ ID NO: 66544 - DNA, 83 bp, Homo sapiens
acagtcctcgtcagcactgactttcagctatggaatcgagcttacaattgagactgctaacccctacctttgaagggatcaac

SEQ ID NO: 66545 - DNA, 100 bp, Homo sapiens
gtcaccaggaaggggacgggacggacggtgatggtggtcgccgcggcggcgtgtgcgcccctcaggtactccaaagattcaggtttactcacgtcatcca

SEQ ID NO: 66546 - DNA, 50 bp, Homo sapiens
tgggcaccaggccctgactaccagaccaaacctggaccacccaaaaagcc

SEQ ID NO: 66547 - DNA, 90 bp, Homo sapiens
ggcgaggaaggcgtctcccggttggaaaatggatataccttatttgattatgatgttggactgaatgatataattcagctgctagttcgc

SEQ ID NO: 66548 - DNA, 90 bp, Homo sapiens
tttctgtggaatctgaagaagcccacgcagattttaattcccactctagattctgtttcaggtatgtcccaaaagtctgtgtgtgtctac

SEQ ID NO: 66549 - DNA, 80 bp, Homo sapiens
ccggtgcccgaggaggcagccaagctcgtggcctgcctctgcgtgctgcctccggagccagcgtggtggccatagacaac

SEQ ID NO: 66550 - DNA, 83 bp, Homo sapiens
ggccggctgaggagcgccgctgcctcgcctcggtgtcgtgaaaactacccctaaaagccaaaatgggaaaggaaaagactcat

SEQ ID NO: 66551 - DNA, 85 bp, Homo sapiens
caactccaaccacgacggggccgacgagacctcagaccctgtattcagtggatcagctggcaccacccaaatagataaattggcc

SEQ ID NO: 66552 - DNA, 100 bp, Homo sapiens
caacaatgagatcgtggacaagatcatgggcaaaggacagatccaggtcataaataaagttcatcttaaggcaaatcatgtggtcaagagagatgttgat

SEQ ID NO: 66553 - DNA, 100 bp, Homo sapiens
taaagccctgcgggctggaggagttcctgcagaaagttcccgattttgaaatgctgggctcactcagaagtggcagccccttgtgctttggagaatgagg

SEQ ID NO: 66554 - DNA, 75 bp, Homo sapiens
gtttgagccatcggatctaagatccaaaagaaaggtgcaaaattccttagtgatgctgagatcatccagttagtc

SEQ ID NO: 66555 - DNA, 90 bp, Homo sapiens
ggaatttgtgcaatgtttagccaacccaaattaccttaattcggacaaggcaaaatctcagcaagttcggacctctagtacaataaggcg

SEQ ID NO: 66556 - DNA, 100 bp, Homo sapiens
gctagccaggaacatggactgaagtatccagcgctcattgggaatttagttaaggctttccttaaagtttcccatgtctcaatggactcctgaatataac

SEQ ID NO: 66557 - DNA, 100 bp, Homo sapiens
tttaaacaagagatttccacagaagcccagctgcagctccagcaggtggcgctgcagcagcagcagcaacagcagcagttccagcagcagcagcaggcgg

SEQ ID NO: 66558 - DNA, 90 bp, Homo sapiens
tgttggagatttcatgaatcgaagaggtgactatgatgacccaaaggattcggacggagagcgcgaggactcggcggctgagcgcgcccg

SEQ ID NO: 66559 - DNA, 75 bp, Homo sapiens
tgcatgtaccgaccttctgaacaaggccaacacctatgcagctgcagaaccttggcctgaaaatgctacattata

SEQ ID NO: 66560 - DNA, 112 bp, Homo sapiens
cacggagcaaccccaagtcaccacaaaaacctatcgttagagtcttcctgcccaacaaacagaggacagtgactggcatagtgagtatggtatacacacaatcggagattct

SEQ ID NO: 66561 - DNA, 96 bp, Homo sapiens
gtgggctgcaaatccaagaaggggctgtcctcgtcctccagctgttatctggaagaagccaaatcttatcctgaatgtagatggtctcatcggagt

SEQ ID NO: 66562 - DNA, 100 bp, Homo sapiens
accaggccggcaggctgagaaaagcgagaccgcgtgcgaggaccggtccggcctctttggcctacccccgttggctccgctgccccaggtcgatgagtcc

SEQ ID NO: 66563 - DNA, 100 bp, Homo sapiens
tgcgggggcttcgcgtgttccaagaactgcctgtgcgccctcaacctgctttacaccagtcctgtgaagataaatcagattagcttggatgaaagtggag

SEQ ID NO: 66564 - DNA, 83 bp, Homo sapiens
gcctgtcttcagatcttcacagcacagttcctgggaaggtggagccaccagcctctccctggaactgtggctgcaccatctgt

SEQ ID NO: 66565 - DNA, 80 bp, Homo sapiens
caatggatgcagtcattccagcaccaacaggatccaaaacgtggaatcttgtagaaggaagatcagcattcataaaaaat

SEQ ID NO: 66566 - DNA, 75 bp, Homo sapiens
cgcggccgtgggcagcggctgccgcgcctgtctgcccgagggagctgaactttgacctggaccggggcgtgtttc

SEQ ID NO: 66567 - DNA, 97 bp, Homo sapiens
gatgtggtgctgcccgagaaggtggacgtgctggtgtctgagtggatggggacctgcctgctgaccaccgctcttgataaggagaggcaggttttcc

SEQ ID NO: 66568 - DNA, 78 bp, Homo sapiens
tagcccaggtggttagagagtccaatgcaatgctcaggaggccatgctctaccacaaccagaccgccgagctgcggga

SEQ ID NO: 66569 - DNA, 51 bp, Homo sapiens
ggtggagccaccagcctctccttgtgggtaattccagaattgattggccat

SEQ ID NO: 66570 - DNA, 80 bp, Homo sapiens
cagcgacggcggcagcggccggagccgggccgggcagctagcagggcgcttcgggttgctgcagcaactggtcacacagt

SEQ ID NO: 66571 - DNA, 74 bp, Homo sapiens
gcagcccccgggcacgacctctcggacacggtgcaggcaggaccctaataggagtattcataccagcagcagca

SEQ ID NO: 66572 - DNA, 83 bp, Homo sapiens
agccgatccagcctgcggagcctgtggggcaggtatcgagaaccttccctgcgaacttcagaggaacttccagctgatgcgag

SEQ ID NO: 66573 - DNA, 96 bp, Homo sapiens
ggagccactgagatgaggaggcgtcgcgcgcgcctgtagctcgcgggcctcgcagcaaacggggattcagcgtccgatcctttggaacagggactc

SEQ ID NO: 66574 - DNA, 100 bp, Homo sapiens
cgtccttcgccacaggccaggatgggtggaagtgaaggagagctatgaagacatgattggtgaggaggtgccatcggatcaatactactgggctcctttg

SEQ ID NO: 66575 - DNA, 97 bp, Homo sapiens
tggtgctgttctttatcctgctggggctgcgacagaagaagcccaccatctccgtgaaggaagctacgcccatgcgctggatggcctgtaccgcgta

SEQ ID NO: 66576 - DNA, 74 bp, Homo sapiens
ggagttcgaagagttggatactcagcgtcgctggcagccgctgtacttgatcaatgtccgagttaccaccatgg

SEQ ID NO: 66577 - DNA, 100 bp, Homo sapiens
ctatcagggcatgtcagaccaacagaggggcaaatcagagtgaagaggaagccagaagatgggagagacatttttgaagctggagtgcagtggcgagatc

SEQ ID NO: 66578 - DNA, 96 bp, Homo sapiens
ccaaaaccagtcatgaccactagacccacagctgttaaagcaacagactggtattgctcgagttccacttgctggagctgccgggggcccagggat

SEQ ID NO: 66579 - DNA, 75 bp, Homo sapiens
caaacatttccacatcaagtgtttcacctgcaaagaatttcttgaggttggcaaaaagcagcctgctctggatgt

SEQ ID NO: 66580 - DNA, 90 bp, Homo sapiens
cgcgaaatgatgggatagcgttgcaaatccttaaaagagtcttaacgactatatcatcatgtacatagaaaaatccaaaggattctgcaa

SEQ ID NO: 66581 - DNA, 82 bp, Homo sapiens
tcaagcgcctccgctcggtgcccactaacaagattgtgtctgcagttcaatactgccatcagaaacggatcgtacatcgaga

SEQ ID NO: 66582 - DNA, 50 bp, Homo sapiens
tttctaccatatcagagatgacaggaagaggagttgtacgcatgtcagag

SEQ ID NO: 66583 - DNA, 90 bp, Homo sapiens
gaggcccataggaaacaagtgacttgctgagtccagataacactgactgtcagaacatgatcccagagaacgctctagaggagatcacca

SEQ ID NO: 66584 - DNA, 117 bp, Homo sapiens
ctgcgcctcacgactgatgagagggaaggcatcggtttctaagttctcaaaacttacagcaattctgtggtgttcttggtcacacatttatggagtttctgaagggcagtggagatt

SEQ ID NO: 66585 - DNA, 96 bp, Homo sapiens
gacgaggtgcgccggctgatcggtcacaaggcacttaaagcattgttgaggtcattggtaggtcttcaggaagagttgcttttccagtacccagac

SEQ ID NO: 66586 - DNA, 76 bp, Homo sapiens
accaaaaaggcctcgcacattcagttggacagcctggtctgccacctcagaacttttcaatgtctgtcacagttcc

SEQ ID NO: 66587 - DNA, 100 bp, Homo sapiens
ccccgaagatgcagagttcattgttgccaagaatagctgaaacctttggacttcaagaaaattatatcaaaattgtcataaataagaagcaactacaact

SEQ ID NO: 66588 - DNA, 75 bp, Homo sapiens
ggagagcgcgccgctgctcccggaccgggccgcgcacgccgcctcaggagccttcacgtaaatgggtccagtcat

SEQ ID NO: 66589 - DNA, 74 bp, Homo sapiens
gaatgtggaaaggagattgacagtcacaattttgtaataaggtcgttgaggacttccacatggagattggcaca

SEQ ID NO: 66590 - DNA, 82 bp, Homo sapiens
ccgcggatctcaccgccgctcaggttaccggtattgtaagaacaagccgtacccaaagtctcgcttctgccgaggtgtccct

SEQ ID NO: 66591 - DNA, 100 bp, Homo sapiens
ccgggccctgtatgactatgaggggcaggagcatgatgagctgagcttcaaggctgggctgcccttgagatggagttgctgcctctttggctctgcctgg

SEQ ID NO: 66592 - DNA, 74 bp, Homo sapiens
aagaaaatcaaaagaaacttttgcccttatcagtaacacctgagttgcagcatgagaaagccgaactagaacag

SEQ ID NO: 66593 - DNA, 90 bp, Homo sapiens
ctgtgaacgaagaaggcgtcccggcatcggtcagaaaaagtggacagggcagtgctgaaggaactgagtgaaaaactggaactggcagag

SEQ ID NO: 66594 - DNA, 96 bp, Homo sapiens
catctgtctgaggagcggtcagtgacgcgatggagcgggcaaggttaatgactgaagggctctggaaaggggataagaggccggcttccttcccca

SEQ ID NO: 66595 - DNA, 83 bp, Homo sapiens
ggccccccagcatgaagaccccggcggacacaggcttcccaggtggcttcccctcttcccctgggggctgatttccactgagc

SEQ ID NO: 66596 - DNA, 90 bp, Homo sapiens
tccagcagctgattgtaatgaatttgcccaatgttttgatgattggcagagacccactgtctggcctgggctacgcctccatggtgatcg

SEQ ID NO: 66597 - DNA, 111 bp, Homo sapiens
gtgaaattgtccatattcagattggccagtgtggcaaccagatcggagccaagtttgcagtgttgatgtgggtatttacctatgttggtgccttgtttaatggtctgacac

SEQ ID NO: 66598 - DNA, 101 bp, Homo sapiens
gttctgatttagattcatcagcaactcctataaacacagtggacgtcaataatgaaagctcttcagagatttccatgaggacaacttacaaggacctgtat

SEQ ID NO: 66599 - DNA, 83 bp, Homo sapiens
cgccagatagaaaacggcgagagtgggcgagaacgtccactgcgggccggcgaaagctggtttctacgataaagacagttcag

SEQ ID NO: 66600 - DNA, 96 bp, Homo sapiens
accaccagagggaaagctggggcgattctgaggttgggaccaagaaggaactatctattttaaaccaaaaattttccgaagaagtaaaaaccccag

SEQ ID NO: 66601 - DNA, 100 bp, Homo sapiens
caacgtgctggagagaccccgcggctgggcgttcatctaccacgctttcgtgtttgatctgtggatgaaatgaatcatgattttcaagctcttgcattag

SEQ ID NO: 66602 - DNA, 90 bp, Homo sapiens
cgaaagagaaacccggagggcgccgggcatcaagatggtgctcatgtggaccagtggtgacgccttcaagacggcctacttcctgctgaa

SEQ ID NO: 66603 - DNA, 50 bp, Homo sapiens
cagcctttgatatgtcccatgcactagctgacgcgtctatgggcgcaacg

SEQ ID NO: 66604 - DNA, 95 bp, Homo sapiens
ctattacaatcgcttgtacaaaggagagtttaaacagccaaaacagttcattcatattcagccccacatatgacagtggacatagaggacaacgc

SEQ ID NO: 66605 - DNA, 76 bp, Homo sapiens
cccgcatggcggcgcacaggaagcacgctgttgcagctaattgcaaaatcccagttaacttcattgagtggcgtgg

SEQ ID NO: 66606 - DNA, 74 bp, Homo sapiens
gaggctgaggatgatggtagattgccagtaagactttgaccccgacgcaggcttcagtgattgccgcggatcag

SEQ ID NO: 66607 - DNA, 75 bp, Homo sapiens
gctctatctgtactgccggcacctcaaccagatgaggaagtacaactttgagtgtctttctcgagaagcaggtgg

SEQ ID NO: 66608 - DNA, 83 bp, Homo sapiens
ggggcctgtcgcggttgccaagcgctcggcgcttggcgctggcgctggccaaggcggatttttagactctgaggagcagttgg

SEQ ID NO: 66609 - DNA, 99 bp, Homo sapiens
agtggaagatgaggacagcatggatgggctggagacaacagaaacagaaacgattgtggaaacaggcgcatattaaatttcctattgactacccctatt

SEQ ID NO: 66610 - DNA, 50 bp, Homo sapiens
ccgtggtcagccgcttcgacgagcaggacatggtccggcgaggagagatc

SEQ ID NO: 66611 - DNA, 85 bp, Homo sapiens
tagggaaaatagaacctacgctgaaattttgggggcaggttctcttgctaggactatctgctgccaaactcttgactgaatatgg

SEQ ID NO: 66612 - DNA, 88 bp, Homo sapiens
cctgagggccttcgagagctaccgcgccagacaggcaattaagttggaatatgcaaggttggttaagttggcccaagaagacacccca

SEQ ID NO: 66613 - DNA, 100 bp, Homo sapiens
accgtggcccggcccctcttcctggagacagtcattttgtttactcattcagccctgttgcaggtcccaataaactcttcataaggttgacagaagcacc

SEQ ID NO: 66614 - DNA, 80 bp, Homo sapiens
agctggagtcgtgagcgcgcgcccgccccgctctgggaggaccgcgagggaaaccccaaagccacggagaaaatcaggga

SEQ ID NO: 66615 - DNA, 83 bp, Homo sapiens
aaaacttcttgccaaccaaattatacatgggaagctgttgataccaaaaataatgtactttataaaatcaacatctgtggaag

SEQ ID NO: 66616 - DNA, 100 bp, Homo sapiens
aaagctctgggcaccgtatcaagccaagaacagcccaatctcctttctgggcaaacgttccaaggcctgggaattttcataaattttccaaaattttccc

SEQ ID NO: 66617 - DNA, 100 bp, Homo sapiens
ttttccatcatgtacacaggagcaccagttagagatgtttatgattacttccgagctgtcctgcagcgtgatgaaagaagtgaacgagcttttaagctaa

SEQ ID NO: 66618 - DNA, 51 bp, Homo sapiens
tgacagaactaaagtctcctgcaactcccaaaatggcgatgacaccggcac

SEQ ID NO: 66619 - DNA, 90 bp, Homo sapiens
ccacaactgcctggtccgcgagatggcttcccagttacgactcttcgatccccagctgaaagagaagccagaagaggagtccttggccgc

SEQ ID NO: 66620 - DNA, 75 bp, Homo sapiens
cctgcactcaagggcaaaaagggaaaggaagagaagtcaaaagggaaggctaagtagagacggggtttcaccgtg

SEQ ID NO: 66621 - DNA, 83 bp, Homo sapiens
cgacagcaacagctctgccggctggaagatggtcagtaggacagaaggtaacattgatgactcgctcattggtggaaatgcct

SEQ ID NO: 66622 - DNA, 76 bp, Homo sapiens
gaggggccccagcagcccccgaaggccctatcaggacatggagtatgaaagacgctacaccaaaattgcattgagc

SEQ ID NO: 66623 - DNA, 100 bp, Homo sapiens
acatcaatgctgagcagcttcctgggagggaacatcttaatgaacctgtttcggagcaacatcccctgtcacctggttgatatctcttgcggattaccct

SEQ ID NO: 66624 - DNA, 83 bp, Homo sapiens
gtattacacactgctgaaccaggccccagacatgctgcatagggtgatcagcccatgacctaaacctccagacaaaataaaac

SEQ ID NO: 66625 - DNA, 83 bp, Homo sapiens
cctcggcagccttgcgctgctctaatggtccggacttccgtgtgtatcgagaaccttccctgcgaacttcagaggaacttcca

SEQ ID NO: 66626 - DNA, 75 bp, Homo sapiens
agcgcctcgacctcggtctgaggtaatgagaggccctaagatcccagaggatgccataagaggaaaagtcagggg

SEQ ID NO: 66627 - DNA, 50 bp, Homo sapiens
ggcagctgtgaaaaaagccatttccgaagctatgaagacggccaagtggg

SEQ ID NO: 66628 - DNA, 145 bp, Homo sapiens
ccttatttgactttctcctcattgaagctatgcagtatttctttggcatcactgcagctagtaatttgccttctggatttgtgttctaggtcagtggcttcaaagactccagttggattcattggactgggcaacatggggaatc

SEQ ID NO: 66629 - DNA, 100 bp, Homo sapiens
gggaaatataacattcttggcacaaatactattatggataagatgatgagacgagttgtactgctgtcacaggaaatggacgctggattacaagcatggc

SEQ ID NO: 66630 - DNA, 87 bp, Homo sapiens
tggggaaggaggcgtcttggcccgggcagcagtggcggcagcgcccgagagagtattctaccttgtaaatactgttatttgtatata

SEQ ID NO: 66631 - DNA, 101 bp, Homo sapiens
ggagagcacaaccatcgcagttggaagcccatggggcagggattcgggttcgtaactttcgagaatagtgctgatgcagacagggccagggagaaattaca

SEQ ID NO: 66632 - DNA, 100 bp, Homo sapiens
acctgggaggtggaccggagctcgtccagctgcgtgcctagactagacgcttgaagcaaagctgccatcccagaagacgacatgctctcagcaacccccc

SEQ ID NO: 66633 - DNA, 51 bp, Homo sapiens
aggagcagtagatgatgatgtagcagaaggagcacatggatgaagtatgct

SEQ ID NO: 66634 - DNA, 50 bp, Homo sapiens
tgaacacggtgtctgttatgatcaattcttctgcacagtcagtatcctcg

SEQ ID NO: 66635 - DNA, 100 bp, Homo sapiens
gacttcagcacctgccatcaccactgtaacggtgccaactccaatttaccaaactagcagtggacagtatactaaaaagctgtcccgtcttacatattca

SEQ ID NO: 66636 - DNA, 90 bp, Homo sapiens
aaatgttggataaatatatctatggagcacagttggcctttaccagagtttgatccaagccagattcgactgattgtatatcaagactgt

SEQ ID NO: 66637 - DNA, 83 bp, Homo sapiens
ctcatcgtgttccgcttcctgcgtatcatccccagcatgaagggggatatgagactttctactcggaatatcctgagtgttgc

SEQ ID NO: 66638 - DNA, 82 bp, Homo sapiens
aatatgttcaggtccagttcagactcttgatcccacagccacttcttgagtgaggcgtgaattacccttcactaagtcggct

SEQ ID NO: 66639 - DNA, 100 bp, Homo sapiens
ctgccgcctcccgggagtgccgtgcgccgcagcccgggcccaggccccggcagcgcctgggacaagggttatgataattcagagagcagtgttcggaaag

SEQ ID NO: 66640 - DNA, 82 bp, Homo sapiens
cttcttggtgctgtggctgatgcatttcatggctatcatctacacccatcccagctcagtagcttttcctgggataactgtg

SEQ ID NO: 66641 - DNA, 100 bp, Homo sapiens
cgcgagcgaggcgccctagacatcttctccctcccttgcctcaggtttgatctgtggatgaaatgaatcatgattttcaagctcttgcattagaatctcg

SEQ ID NO: 66642 - DNA, 130 bp, Homo sapiens
aactgttttccgtgagaagcctcttcgatgcccgagtccatctgggacacaaagctggctgtcggcacaggataagtggccggtgccaggaggtgaaggccgtcctggagaaaactgacgagccgggaaa

SEQ ID NO: 66643 - DNA, 90 bp, Homo sapiens
ggtgttcactgtgctgtgtgagcagtaccagccatccctccggcgggaccccatgtacaacgagagtattgggaaagggtcgttgtggtg

SEQ ID NO: 66644 - DNA, 80 bp, Homo sapiens
aagttttgggtgatggggacaacaagccaaagagaagggaatttgggatggacactccacagctgaccttgactgaactc

SEQ ID NO: 66645 - DNA, 98 bp, Homo sapiens
cctctcccccggctccatcgacctcaaggacatcaacttccggccgcagatgtcccaggtacaactccaaaaggagacattggagaagaaccaagctg

SEQ ID NO: 66646 - DNA, 104 bp, Homo sapiens
agcacggctatgaggcgggttccgtggccctgcacgtggagaagctgcccaatgagtacatccagacactgaaggaccacaggccccggatggtgtgggacagc

SEQ ID NO: 66647 - DNA, 100 bp, Homo sapiens
gcccgggctgtgatttacctgggtgagacagcttgagccccatcgtggattccaagacatccctgctgagagagccaagcctacttctgcttcctcctgg

SEQ ID NO: 66648 - DNA, 99 bp, Homo sapiens
ggacgaggtcctgtacagcatcgccgagaagaatgcccaggaaaaccatgggctggctgtgcccaccccctcggttccagatgattttgcagacaaaga

SEQ ID NO: 66649 - DNA, 75 bp, Homo sapiens
aagaccagtccatttggggaaatccttcggatggtgaactcattagaagaagccctcaatctagaagagtagagg

SEQ ID NO: 66650 - DNA, 80 bp, Homo sapiens
tatatcaagcattcaaattgctcacagctgatcctaagggactttgaatccaaagcaaaccatcttggtgattctggtgg

SEQ ID NO: 66651 - DNA, 83 bp, Homo sapiens
agcagcgccagcggccgagcgggcggcttcctggcctgggcgctccggtggcggcggaggacagagcgggatgccaccagctt

SEQ ID NO: 66652 - DNA, 101 bp, Homo sapiens
gaatgtgtccgtggcgctcgagttcctggaccgtgagagcatcaagctcgtgtccatcgagatgcaaacacaatttttagaggaaattccctggctacccg

SEQ ID NO: 66653 - DNA, 96 bp, Homo sapiens
tgactttgtgttcctggaggcgatgtacaaccagggattcatccgaaagcagtatggactttctggccgagaccagccagtggagctgctgaatcc

SEQ ID NO: 66654 - DNA, 75 bp, Homo sapiens
gggagctcaaagtgtgccttctcgggcccatccttccggaaatcacgaatgtcccgtgcccagagcttccctgac

SEQ ID NO: 66655 - DNA, 83 bp, Homo sapiens
caccacggacgagatgatcaaacgcctgaaggttactgaagctaaaggagatgtttaactccaagtttggatctattcccaag

SEQ ID NO: 66656 - DNA, 88 bp, Homo sapiens
gagcctgaaacttcaggagctccgcaaagtgtgtctccaggaggcgtttaacccagaactggtgctggtctcagctggctttgatgct

SEQ ID NO: 66657 - DNA, 50 bp, Homo sapiens
cgagcctttgatgtccccaagaggtagctacagcaagctgggtagcaggc

SEQ ID NO: 66658 - DNA, 98 bp, Homo sapiens
ctttccccgtcagcatcccagccgtgctcacgtgatgtcttggcattgcccattttcaagcaggaagattccagccttccattggatggtgaaacaga

SEQ ID NO: 66659 - DNA, 74 bp, Homo sapiens
ttgttaaggattccaagtaactcttatttgtgtgaagtggaatctctgaaactcaggtgtggcatcaacaaagt

SEQ ID NO: 66660 - DNA, 87 bp, Homo sapiens
agcagctgctgaagacagcactcaaaggtcaagtcatcagcccacaaagtagcagtagtggcacggatctgacgggtgacaaagcag

SEQ ID NO: 66661 - DNA, 83 bp, Homo sapiens
caagccagcgacccaccatggagacccgctacaacctgaagagtccggggctaattgactataattttcattgcttccggaag

SEQ ID NO: 66662 - DNA, 76 bp, Homo sapiens
cggctacagcgcttcttccagcagtgtccccatgaactcccttgtccccagttgaccaacctggcctgtagcttct

SEQ ID NO: 66663 - DNA, 51 bp, Homo sapiens
cttcaagaagcctgctgagttcaccacagttatgcaaagggtgacctggac

SEQ ID NO: 66664 - DNA, 108 bp, Homo sapiens
acatggccaacatcgcggtgcagcgaatcaagcgggagttcaaggaggtgctgaagagcgaggagacagttttgccacggtgccgagcgcaggacgatgacccggccc

SEQ ID NO: 66665 - DNA, 90 bp, Homo sapiens
ccggcagcagcccgacgcaaaccaaggatctggggatcttcgcactatcccaaggctgtggaaaatctctgttctcacaaagtctcccca

SEQ ID NO: 66666 - DNA, 100 bp, Homo sapiens
cactacggccagtggtcaggcggccggcatgagtataccaacaagctacggcaggagttgcagagcctgaaagtagacacacagagcctggacctgctga

SEQ ID NO: 66667 - DNA, 100 bp, Homo sapiens
attgcattctgtgtattcattctactacatcctgttttgctccaagggtgcctgataggaacgtgaagatgagtcttcctctatgtttgacgaatatttt

SEQ ID NO: 66668 - DNA, 82 bp, Homo sapiens
gtctcagccgccaaagaccccgtccggtaggttcgagaacttgtcttggacaattgcaaatcaaatgatggaaaaattgagg

SEQ ID NO: 66669 - DNA, 76 bp, Homo sapiens
gaagtcaactgggttttgcagtatgaccctcccagcaatgcaagatttcagaagaaagtggtagcttcctttccaa

SEQ ID NO: 66670 - DNA, 75 bp, Homo sapiens
cgctggcagccgcggatctcaccgccgctcagggtcgcaatggaagaagagatcgccgcgctggtcattgacaat

SEQ ID NO: 66671 - DNA, 101 bp, Homo sapiens
tctgtggaaaggaagctgcacaggaagccgtgaaactgattggcccccgccgcatccacacagtccgtgtgcggggaggtaacaagaaataccgtgccctg

SEQ ID NO: 66672 - DNA, 100 bp, Homo sapiens
aatctcagactgtgcttcttgtgcaagtaatcagtctttgacaagtgatgagaagctgtcggagcttcccaaggactatacaggctccaacccaagttcc

SEQ ID NO: 66673 - DNA, 100 bp, Homo sapiens
agaattcagaaggaacttgcagaaatcacattggaccctcctcccaactgtagggacaagcagatcttttgaaatatgctaagaatgagacattggagaa

SEQ ID NO: 66674 - DNA, 98 bp, Homo sapiens
tgctgacgaagtggaatctcagttgaaaaatattagaaaatctcctggatccagatgcacgtgtggacactggagactgctacagcaacaaagaaggc

SEQ ID NO: 66675 - DNA, 98 bp, Homo sapiens
ggatgctcttcagttcgtgtgtggagacaggggcttttatttcagttttaaaatcaaagatgggaaaatcggagaaaattgcccttccccatggccag

SEQ ID NO: 66676 - DNA, 88 bp, Homo sapiens
gcagaagtcgcgtgtctaggtgagtcgcggtgggtcctcgcttgcagttcagcgaccacggccactcttcacctccaccatgagcctg

SEQ ID NO: 66677 - DNA, 90 bp, Homo sapiens
cttggcttcagcttgtgagagtgagagtagaaatgccgccaagaggatgcgtctggagagacagcagtcggctcctccctgaagaagagg

SEQ ID NO: 66678 - DNA, 82 bp, Homo sapiens
tcatcattaaggacggaggcacggacaatgaaaagcgaaccccattgcacgccgcagcttaccttggagatgcagaaatcat

SEQ ID NO: 66679 - DNA, 90 bp, Homo sapiens
gttcagcagaaataatcaagagttgacatcataccagtagcataatggcagaacctgtttctccactgaagcactttgtgctggctaaga

SEQ ID NO: 66680 - DNA, 75 bp, Homo sapiens
gcgactcttctgacctccgcgcgacgtacccgccgccgccgttggctggaggtactccaaagattcaggtttact

SEQ ID NO: 66681 - DNA, 100 bp, Homo sapiens
ccctgcgcctcctcaaccgcgaagcacccagcggctggcgcctggagcgtcttttgactcactgccacaacgacattgtcaaccttctcctggactgtgg

SEQ ID NO: 66682 - DNA, 83 bp, Homo sapiens
cggaccggcgtccccggcgcgaagaggctggactcggattcgttgcctgaggttatcaatactctggctgaccatcatcatcg

SEQ ID NO: 66683 - DNA, 80 bp, Homo sapiens
tccgggtgtccggccgtgtcccgaggaagtgcaagacccgaaactatgttccaacttcctgtcaacaatcttggcagttt

SEQ ID NO: 66684 - DNA, 51 bp, Homo sapiens
aatctcaggaatctggtctcattggtgttcctgatgacgtgcaaacccccc

SEQ ID NO: 66685 - DNA, 127 bp, Homo sapiens
agcgggcaccgaccacagccctcaccctgcgctccaagtccatgacctcggagctggaggagctcggactgcctccgggcctgccaggagcagatcgaagccctgctggagtcaagcctgcgccagg

SEQ ID NO: 66686 - DNA, 100 bp, Homo sapiens
catttctgtcttccttcctgggtcagtgattcccggaccctggaagagaagagggtggctaatgattaaggtcagggatgttggaagctggagtagacag

SEQ ID NO: 66687 - DNA, 74 bp, Homo sapiens
cctggtcttgctcggccgatgaagtgcagaggtttttttctgctgtccaggcagccatcttgtctggagacaag

SEQ ID NO: 66688 - DNA, 83 bp, Homo sapiens
agcgggcggcttcctggcctgggcgctccggtggcggcggagggtcccctggaagtgacgctgactcagccagtgaggagcgg

SEQ ID NO: 66689 - DNA, 100 bp, Homo sapiens
gaagaaaattttccttgacctttaggtgcttttatattcatctcaaaaacaaaattctgaactcaggacttggcaagctatggagttactagtagagaaa

SEQ ID NO: 66690 - DNA, 100 bp, Homo sapiens
aggtgtagttctgctgaatcctattcctaagctggaggagagcaggagtgttcagaagcaaatgaagatcctgcagaagaagcaagcccagattgtgaaa

SEQ ID NO: 66691 - DNA, 82 bp, Homo sapiens
taagtcccggcagcgggaacacagagagcgaagccaggtctctcggctgctgggggcattccacaacccaaaacaggtgacc

SEQ ID NO: 66692 - DNA, 100 bp, Homo sapiens
cgcgcccggagcgccccgccgcgcacactggagaatgctggaggagaccttaaggatggccaccaccactatgaaggagctgttgtcattctggatgctg

SEQ ID NO: 66693 - DNA, 74 bp, Homo sapiens
atttttctacaccaccgccacactcatcatagccttcacctctgcagttcacacaaaagatgttggacaatttc

SEQ ID NO: 66694 - DNA, 82 bp, Homo sapiens
cccggaccccgccccctgcggcccagcgcccccagcggacaaggcaaaatctcagcaagttcggacctctagtacaataagg

SEQ ID NO: 66695 - DNA, 75 bp, Homo sapiens
ccctcgctccctctgctcttcctcccttcgctcgcaccatgatgaaggatttgggggcagagcacttggcaggtc

SEQ ID NO: 66696 - DNA, 83 bp, Homo sapiens
ccaagtagcacattttcagtgttctcccagcagagatgtgggtccttccctgggtctgaagaagtcaagctcgttggagagtc

SEQ ID NO: 66697 - DNA, 49 bp, Homo sapiens
gtacatcaacagctcttccaccaaggttaaagatcgaggtccggaagcc

SEQ ID NO: 66698 - DNA, 100 bp, Homo sapiens
gtctttctcaacctcatcttctggattggcggcagtaagcacacaatgaatgatcacctgcatgtcggcagccacgctcacggacagatccaggttcaac

SEQ ID NO: 66699 - DNA, 76 bp, Homo sapiens
acttcattggccacctacagaaacaaaatgtcaacaaattgatgggtcatacagcagatggaacaaaaaaaattac

SEQ ID NO: 66700 - DNA, 75 bp, Homo sapiens
cgggaggctgagccccactacatggtgctggaatatgtggatctggtgctggaaacgtgcgtagcaacagtaggc

SEQ ID NO: 66701 - DNA, 100 bp, Homo sapiens
gagctctgccggctcaacacgatggacttactgctggaatctccgtatgttatgatgaagaaaaatcatgaaatgcttgaaggcaatgagcgctatgagg

SEQ ID NO: 66702 - DNA, 75 bp, Homo sapiens
tttagcttttcaggactattgtcctggctaaaggaataccagggtgtccgcaatgttgccagtgtctgtctgcag

SEQ ID NO: 66703 - DNA, 75 bp, Homo sapiens
ccaagatctgtgctgaccacaggaattggatctactagtgcaggctatggaactcagtcaactccccagggatat

SEQ ID NO: 66704 - DNA, 76 bp, Homo sapiens
aatatccccacataccttctcaaggtcatggaaaatggaagatttgcaaaatacaaatattttacccatgtcatga

SEQ ID NO: 66705 - DNA, 74 bp, Homo sapiens
aggctgctctgggattctcttcagccaatcttcattgctcaagtttgccagaacccaataaagatgccatcttc

SEQ ID NO: 66706 - DNA, 100 bp, Homo sapiens
ggaggaggggctccggctggtctgtggtgagaatatgtttcgacagcaacaaaagattcttcaacaatctagaattgttcagagccagagattgaaaaca

SEQ ID NO: 66707 - DNA, 98 bp, Homo sapiens
gtacattagattcgctggctgttatgatcagcacaaccttgttgcatgccagataaatgatcagtccaatatcagatggaaatgatgcggagccttcg

SEQ ID NO: 66708 - DNA, 50 bp, Homo sapiens
taaggtggaaattgagaaaattcgggtgttgacttcaaaatcaaaactgt

SEQ ID NO: 66709 - DNA, 74 bp, Homo sapiens
cttggatgcagaattcttaaaggtaccattgttggatactggtgacatcatcattgacggaggaaattctgaat

SEQ ID NO: 66710 - DNA, 74 bp, Homo sapiens
cgccgagtcgcgcggaggcggaggcttgggtgcaattgggtatctcgaagagcagatcaagggcctaaaactat

SEQ ID NO: 66711 - DNA, 51 bp, Homo sapiens
tctaaagtggactgcattttgaatccagcaactatcacaagaatactcctt

SEQ ID NO: 66712 - DNA, 83 bp, Homo sapiens
cggcggagggaccaaggtggagatcaaacatttgccactgtagaagagccaaggaagagaaacttcagcaggcgatagcaatg

SEQ ID NO: 66713 - DNA, 107 bp, Homo sapiens
tggaattcggcaaggcagacttcgtgctgatggacaccgtctccatgcccgagttcatggccaacctcaggctcagtgaaccctgcggcttcgaggcgacctacctg

SEQ ID NO: 66714 - DNA, 100 bp, Homo sapiens
ctgaaagtggtcacagccgcatctttgaaggttactttccgcaccagaatctatcactgcaacatcaacagtcagggagtcatctgtctggacatcctta

SEQ ID NO: 66715 - DNA, 98 bp, Homo sapiens
gatcccaggaccctcttcgcgggcgattcgcgtagcctcaggatgatcggctgaatgtaacagaggaactaacgtccaacgacaagacgaggattctc

SEQ ID NO: 66716 - DNA, 100 bp, Homo sapiens
gagtccttggaactgtggtccatggtaaagttttacaggattaaagcaaggagagccaatcatgactggcaaaacacagaccagcaacgtcaccaataag

SEQ ID NO: 66717 - DNA, 100 bp, Homo sapiens
cggcctgacaacttcatctttggtctggagcccggcactgtggtcataacagagcaggcagtggatacctgcttcaaggcagagtttgagcagattgtcc

SEQ ID NO: 66718 - DNA, 100 bp, Homo sapiens
cgccgctccttgggctacgcgtatgtgaacttccagcagccggcggacgttgatattcactgatggactccaaagaatcattaactcctggtagagaaga

SEQ ID NO: 66719 - DNA, 100 bp, Homo sapiens
ctccttggagcaaaagcccactgacgctccaccgaaagccaagaagtatgatgcgtttttggcctcagagtctctgatcaagcagattccacgaatcctc

SEQ ID NO: 66720 - DNA, 75 bp, Homo sapiens
ccccacctaccccagcggccagatcggcttcatgctgtgcagcaagaacccgattacaggctgtgccagccctgg

SEQ ID NO: 66721 - DNA, 74 bp, Homo sapiens
atgcagtgacatgttgataaaaaatgatgtgcaagatgtctctgaacgggcagcgtggggagtgctggtgtgtg

SEQ ID NO: 66722 - DNA, 89 bp, Homo sapiens
ctggtcttctcgtcggattgcccatgcacttgttgcagaaacagccaagaattctgcttggtcagaatcgtgatggcattgtgttcagc

SEQ ID NO: 66723 - DNA, 75 bp, Homo sapiens
ggatttcaacatgcctctgacaatctctagtctccttgctcggattgaacgtatggaaaggcggatgcagctggt

SEQ ID NO: 66724 - DNA, 99 bp, Homo sapiens
ctcgctggttctatcggtggacagtgggacattctgaagggaggcaaggaggcggactgagcgctcccaattggggtgttggagcgggccggagagaag

SEQ ID NO: 66725 - DNA, 74 bp, Homo sapiens
gtcaaaaatggtgcagaatttacggtcactctacatgacatgatcctgaaaaatatcgagaagatcaaacggcc

SEQ ID NO: 66726 - DNA, 98 bp, Homo sapiens
aagtcatcaagctagtggacatcacggacatccagaaggaagaacctctctatccagggcctccgctggtggctacagtggctgggcatcaacttcac

SEQ ID NO: 66727 - DNA, 80 bp, Homo sapiens
cctacaaagggcctctctctgccaaaggtgtggtggacacaggcctattcatcaacatggctgagagagtctactttggg

SEQ ID NO: 66728 - DNA, 101 bp, Homo sapiens
gccgtacctctgcgtgggggctgcctccccggctcccggtgcagacaccatggaaacttggatttaactggccagaagcaggtattcaaagcagagaacaa

SEQ ID NO: 66729 - DNA, 138 bp, Homo sapiens
gcacgagcacttaaacaaattctcagtaagatcccagatgagatcaatgacagagtgaggtttctgcagacaatcaattacttacaatgcatctttagacgctatcatttccagtacaaccagcaatacaaatagtgt

SEQ ID NO: 66730 - DNA, 100 bp, Homo sapiens
atttccttactggagcaagggaaagagtcctgcatggtttcaagggacgtaccaggaggatggtgcccagattgtgcttcttggtcagaccccgcatcaa

SEQ ID NO: 66731 - DNA, 51 bp, Homo sapiens
aagaaacatctcaccaatttcaaatccggaggaagcagcagtgtaccattg

SEQ ID NO: 66732 - DNA, 90 bp, Homo sapiens
ccattggccagtatgaagtggtgaaggagtgtgtgcagcgggtactttttgacatcacacaagaagatgttttgtttctggcttcacctc

SEQ ID NO: 66733 - DNA, 83 bp, Homo sapiens
gccggtgatctacaccatggagaacaagcccatcgtcacctaactggtcatgctgctggagtggtggtcctgcacggagtgta

SEQ ID NO: 66734 - DNA, 75 bp, Homo sapiens
acctgagcaagtggtcgatcctatccagactgatgctgagctttttataccaccaaagatcaacagaagaaccca

SEQ ID NO: 66735 - DNA, 100 bp, Homo sapiens
tgatgattcttcagataacttctgtgaagctgatgcttcagcgcctgctcctggtcatcactaaccagatttacttggagtacatgtgaaagaaaacgtc

SEQ ID NO: 66736 - DNA, 100 bp, Homo sapiens
aattattagagacctgcgttgtaaatattgctttaccaaacagttgctctatatgcaatcagtgctgtctactttgctggagtgatggtgcgactgatgt

SEQ ID NO: 66737 - DNA, 74 bp, Homo sapiens
ctccatcggcctccagaccttcaaccacaggttggtgactttggagatgcaatcaattggcccacacctggaga

SEQ ID NO: 66738 - DNA, 90 bp, Homo sapiens
tccccgccatgctgtctctagactttttggacgatgtgcggcggatgaacaagcggcagagctcccagctcctccagcagccgacaggag

SEQ ID NO: 66739 - DNA, 78 bp, Homo sapiens
tcacaccatcagcttcagagaatggcagccatttatttgtcccgtgctggtaatgaatcttgccctcagcctcagaca

SEQ ID NO: 66740 - DNA, 123 bp, Homo sapiens
gcggctgatttgccttaaactccctaaaatctccgcagctctggttcctgttgcggccgcagttgggattacgattagggatgtggtactggaaagatgaaaccagaactcttgaattcagaa

SEQ ID NO: 66741 - DNA, 75 bp, Homo sapiens
tcccaggtcctcaactttgaagagatcgactacaaggagatcgaggtggaagagagtttgactctttgcttcgac

SEQ ID NO: 66742 - DNA, 75 bp, Homo sapiens
tccggactcgacctctcggacgcggagcccgacgcgggcgaggccacggctgctgcactgaataatgattccagc

SEQ ID NO: 66743 - DNA, 100 bp, Homo sapiens
ggcgattcgtgttcgtgagggccttttctggcaacagctgaagctaataatcttgctgcagtagcaggagcaagagatacctattgtaaaagtatggaac

SEQ ID NO: 66744 - DNA, 74 bp, Homo sapiens
gcccgtagtgtggaagcagcttcagatcaccacgcttattaatcataaagataataccaaaaagtctgataaaa

SEQ ID NO: 66745 - DNA, 90 bp, Homo sapiens
gcgggccgggaaaagtggcactgaggctctggaacttctgcccagctctccttggcttccgaagatcttctcaaggaacactacgttgac

SEQ ID NO: 66746 - DNA, 80 bp, Homo sapiens
ggtggagccaccagcctctccttgtgtactaatggtcacttgatgtgcgctggctgttttatccacctactagcagatgc

SEQ ID NO: 66747 - DNA, 100 bp, Homo sapiens
gggatgcaaggtccaaatctcagcaacccctgtgcttctccccaggtccagccaatgcattcagaagccaaaatgggtagtggtggtgcacgaagatccg

SEQ ID NO: 66748 - DNA, 87 bp, Homo sapiens
cttccaagccctgggccgcacctacaatggtggatgcttccaaaagcatcgaagctgtccatgaggacatccgcgtgctctctgagg

SEQ ID NO: 66749 - DNA, 97 bp, Homo sapiens
aaacaagagagacatttctggctctgaaggcgaacgcttcgctggccatttaggagctctgctcaaagccagacgaaaaagcttgtggtgaaggggg

SEQ ID NO: 66750 - DNA, 100 bp, Homo sapiens
cgggggagcggggccttccacaccccctccgtgggtgtgtggggtagaaatatttctgtcatggctcattcaaagactaggaccaatgatggaaaaatta

SEQ ID NO: 66751 - DNA, 75 bp, Homo sapiens
gtgcctggccatgggcatgaagcgggaagcacaggaagtcctggagaacctgaaggaccgctggtaccaggcgga

SEQ ID NO: 66752 - DNA, 75 bp, Homo sapiens
aaattctcttcattctcttggactgaacttaaatactgataggtcagcttatttcggatcaagtggcagaaatcg

SEQ ID NO: 66753 - DNA, 75 bp, Homo sapiens
gggctccagggccgccccgcccgcaggtgctatgctgtgggccccgctcaggaatcatattgacaggtcatgaaa

SEQ ID NO: 66754 - DNA, 75 bp, Homo sapiens
gcgggaggtgttcgagaacgaccccgagacgggcattttgtcagtgatgctgatctttgccttcttccaggaact

SEQ ID NO: 66755 - DNA, 89 bp, Homo sapiens
tggagagtcgaagcagcagctctcgctccagaagcttcactttgattgcattcacaggaactacttttattggctatgtaggattatgg

SEQ ID NO: 66756 - DNA, 100 bp, Homo sapiens
tctgtttggggagacgtccgccaagcaaaagactgttgaagtagagagcattttgcccagctcactcggattctttgctggcatgccttcagtttcagtt

SEQ ID NO: 66757 - DNA, 75 bp, Homo sapiens
tgggtttcattttggatctctctcgattcagtccctgcaagaacctgcattgatacccaggtgttctctctgatg

SEQ ID NO: 66758 - DNA, 90 bp, Homo sapiens
ctttgtgtccctcgactgtgaccagggcagcatggtgacccagcatggcaagcccatgttcacccaggaggaggtgcgccagtctgtaac

SEQ ID NO: 66759 - DNA, 75 bp, Homo sapiens
gctgtggcaaccgaaatgagactccctcagatccagtgataattgacagctctcaggtgtccggcatccatgaga

SEQ ID NO: 66760 - DNA, 83 bp, Homo sapiens
cgaaaggaacggctgaaggccctacgggagaaaaccgggcgcaagggggatatgagactttctactcggaatatcctgagtgt

SEQ ID NO: 66761 - DNA, 103 bp, Homo sapiens
ctcctctcaagaaatctcaagatattaaagttactgctgttaaaaagccaacagaatcctggatttgagtctgtcctttgaaagcatctctgctagagttccc

SEQ ID NO: 66762 - DNA, 75 bp, Homo sapiens
acgcaggcagcatggaccacggttgctgggcggatggggagcgtctatggtcagaattgtattcctattgaagag

SEQ ID NO: 66763 - DNA, 82 bp, Homo sapiens
tgcagggctccaccccgtcgcctcgacaggttgttcctcaaagtcattcaagctgtactcgccgaaggagcccccgaacggc

SEQ ID NO: 66764 - DNA, 75 bp, Homo sapiens
ggaggccagtggctggtctcaggtgtttgtaaaatgtatgaagaacatctgaaaagaatgaatcccaacagtccc

SEQ ID NO: 66765 - DNA, 80 bp, Homo sapiens
agccgatccagcctgcggagcctgtggggcaggtaaaataccatgaagattttgaaaaaacaaaggggagaggctttact

SEQ ID NO: 66766 - DNA, 75 bp, Homo sapiens
tccgagccgcccggccacccttcgtcatctgcgtgaagctggcaccatgactcctgtgaggatgcagcactccct

SEQ ID NO: 66767 - DNA, 121 bp, Homo sapiens
cccgtggccgccaaagcccgggccggaggcggccccaccctccaatgcccaccccccagcaggatcctaaggcctttgtagtccttcagccactgtgggccctgcctctgcctgttcttct

SEQ ID NO: 66768 - DNA, 81 bp, Homo sapiens
acgtagtgttgccaatccagcatttttgaactggaggagctgatagacatggctgtgctggaggaaattcaacaggagctg

SEQ ID NO: 66769 - DNA, 98 bp, Homo sapiens
gcaggccagctaccgggagcacgtgaaggaggtgcagcagctgcagggcaagaaataaactatcaatcttgcccagactggagaaaggactgcagcaa

SEQ ID NO: 66770 - DNA, 83 bp, Homo sapiens
ccccacaccaccgcactgtcgctgcccgcctgccctgaggagtccccgctgcttggtacaatgactcttcttgcttttcacct

SEQ ID NO: 66771 - DNA, 93 bp, Homo sapiens
agactacataccgaataggagtccttccaaaaatgttacagcaatgcagcataaccaagcttggctgtagatatctctcagaggcgctccaag

SEQ ID NO: 66772 - DNA, 82 bp, Homo sapiens
gaaaacagcctcaagaaaccagtaacagattgtgttatttcattggaggtgggcatcgccaagcacatccagaaactggtgg

SEQ ID NO: 66773 - DNA, 98 bp, Homo sapiens
gctccatcaacctcacgctgcacctgggtgcaaagttccccatcaagtggacggcccccgaggcagccctgtacgggaggttcacaatcaagtctgac

SEQ ID NO: 66774 - DNA, 99 bp, Homo sapiens
cactagtaccttccagtttgaaatatgggaaaatttggtccagcagtttaagcaggatccacgcccaacaacatgtcttcactctgttttcaatgtgca

SEQ ID NO: 66775 - DNA, 75 bp, Homo sapiens
cttaatcaaggaattttacaacagtttgaacactggcctcatatttgcacggaaactaaatatattttgccaact

SEQ ID NO: 66776 - DNA, 74 bp, Homo sapiens
gacatttaattttagggtcctttatatagaagggagagtagctcagaaatatgtgcccagggccgccctggtgg

SEQ ID NO: 66777 - DNA, 97 bp, Homo sapiens
accacccaaggcccaaaagcgtcaaactcaccaaaaacaacatctttccagaaagaggtgttttcgccatcagggtgtattggaggctgacacttaa

SEQ ID NO: 66778 - DNA, 100 bp, Homo sapiens
caaagatgaagatgaaaccaagcccttgaagtccaaggcttgcgagaaggtcatttccgtgggtcaaacggtcatcacgaagcatcggaacacccggtat

SEQ ID NO: 66779 - DNA, 74 bp, Homo sapiens
cagggtcttctacagtggctgttgaagaggctgaagggtcaacatatttcactggcacctattcacaagcttga

SEQ ID NO: 66780 - DNA, 98 bp, Homo sapiens
gcggatgtcggcgaagagttcaaccaggtctgaatttcctgctgctgttcacaaagatgctttttatctttaactttttgttttccccacttccgacc

SEQ ID NO: 66781 - DNA, 75 bp, Homo sapiens
cggagacccccgggtgaagccaccgtcatcatgtctgaccagagctctccaaatcccagaatgatatgacttctg

SEQ ID NO: 66782 - DNA, 100 bp, Homo sapiens
ctgctcttgaggttcacagatgatacctttgatccagaacttgcagcaacaatagggtttgtgtttagtgaatcagagggatctgcattagaacagtttg

SEQ ID NO: 66783 - DNA, 90 bp, Homo sapiens
tgcggaagtgcagctgcctcagttcttagcgcagggtccttctcccacacctgaggatgtctccatgaaggaagagaatctctgccaagc

SEQ ID NO: 66784 - DNA, 98 bp, Homo sapiens
aattgcttactggtaaacgcgttcaactggcggaagacctcagaatacttgctggctggggcagatatcattgaaacaaatacttttagcagcactag

SEQ ID NO: 66785 - DNA, 100 bp, Homo sapiens
gccggttgcgccacccgaggacaagcctaatcacacggatgctacagagagatcccaagagaagggcttctttagaagagattgaaaatcatccttggct

SEQ ID NO: 66786 - DNA, 82 bp, Homo sapiens
ccggtgcccgaggaggcagccaagctcgtagcctgccactccgtgcttactccacaggatccgctgaacataggatgttgcc

SEQ ID NO: 66787 - DNA, 100 bp, Homo sapiens
acagatgtggaaaatcatcagattaatccatgtgtgaaaaaagaatatagagatgacccttttcatcaggtggtcgttctcgttaccggaccacttcttc

SEQ ID NO: 66788 - DNA, 75 bp, Homo sapiens
tgtgacagtaacagtacttgggatcccccagttccaaagtgtcttaaagatcctctggaccttctccatctacct

SEQ ID NO: 66789 - DNA, 100 bp, Homo sapiens
agatgacacactctgaaattaatttgattttgagatttgagaacttggacatacatacttcctatggaagaattaaacaaccaccatgtcgagcaaaaag

SEQ ID NO: 66790 - DNA, 82 bp, Homo sapiens
ctgcattcgcggggcatgttcccgaggctgtcaccagctgctgtcggggccgtgtttggcctcaccacctgcatcagcgccc

SEQ ID NO: 66791 - DNA, 98 bp, Homo sapiens
cgagaatggcattccagcagtagtgtggaatatagtggaatatttgacgcagcatgagatgtggtcttgctatgttgcccaagctgatcttcaactcc

SEQ ID NO: 66792 - DNA, 80 bp, Homo sapiens
aactattcgcggagctggaatgactggcaacccaggacatgatgaccctagcagcacatcctctttcctgtgtcaagaag

SEQ ID NO: 66793 - DNA, 82 bp, Homo sapiens
cagactcgctgggaccccctagacttggcatggaggctgggtgagaagccctaccactgcaactgggacggctgcggctgga

SEQ ID NO: 66794 - DNA, 88 bp, Homo sapiens
attcggaaagacacctggccagcggtccagagctgatgcagaaatgaccatggttgacacagagatgccattctggcccaccaacttt

SEQ ID NO: 66795 - DNA, 75 bp, Homo sapiens
ggacacgcaggatgagccccgcgaccactggcacattcttgctgacaggtatggtgacatggtgccaaaaaccat

SEQ ID NO: 66796 - DNA, 83 bp, Homo sapiens
gaggagactctccctggaaaacttcccttccctttcggtaccccaagaagctagtgcagacttattcagtgtttccctaccag

SEQ ID NO: 66797 - DNA, 82 bp, Homo sapiens
caatgaaacgggcagccatggccctccacagcccgcaggatgaccgagtgggagacagcagcaccagcggtggcagagaccc

SEQ ID NO: 66798 - DNA, 75 bp, Homo sapiens
gggcgccggtgctgttgccttcaggtgaccacggattcgccatcatactctggatgaatattttgaatatgatgc

SEQ ID NO: 66799 - DNA, 101 bp, Homo sapiens
cgttgaagatgtcggccttctgagccgactgcggtggtcaagaggtgctggagaatctggtaaaagcaccattgtgaagcagatgaggatcctgcatgtta

SEQ ID NO: 66800 - DNA, 50 bp, Homo sapiens
aggcgctgcgcaagcacgctgaggagtctcttctcgaagacaaaggtctg

SEQ ID NO: 66801 - DNA, 96 bp, Homo sapiens
aaaatcattaaattggagcctggatggacaaccggaaattttctacacattttggaattcagttactcaggcactttcttctcaatttcatatggc

SEQ ID NO: 66802 - DNA, 90 bp, Homo sapiens
gacctaatgaacgggcaggcaagcagtgtcaatattgcagctactgcttctgaggtggagctggtctcttgggcagcctgacatctggtc

SEQ ID NO: 66803 - DNA, 75 bp, Homo sapiens
tgcaaataatcacagattagctgcgcccgctccggccggcaccatggacagcgaggcattccagagcgcgcggga

SEQ ID NO: 66804 - DNA, 82 bp, Homo sapiens
gacagcgcagtgggcaaatccaagaatccccatctctaatgtaagcttggagatccgggcccccgggggacaggtgactgaa

SEQ ID NO: 66805 - DNA, 82 bp, Homo sapiens
ccgcgccccacttgctcgtgcactttacacacatgaggtatggcgtgagtcccgagaacattatcctctatggtcagagcat

SEQ ID NO: 66806 - DNA, 100 bp, Homo sapiens
tcagatcatccaagtggaggttcctacagagattcatatgagagttatgagccatccaaaactctgtttgtcaaaggcctgtctgaggataccactgaag

SEQ ID NO: 66807 - DNA, 82 bp, Homo sapiens
gcctcttggtttgcgtcctgcactgaaaggaaatgacggattttgctgggagtcctccgtcagcatcagctccggctccggt

SEQ ID NO: 66808 - DNA, 74 bp, Homo sapiens
ttcaatgtccgcatcgcaaccaccgccctggccatctaccatgtggatcccaaaatggctgggcgaaaacttgc

SEQ ID NO: 66809 - DNA, 75 bp, Homo sapiens
gcggcggcctcggctgaagaaagaaggtgggagcggagagcgcaggcgtgtttctccacagtcgaactcctctag

SEQ ID NO: 66810 - DNA, 100 bp, Homo sapiens
ctcagcccacaactcttgtcctaccacctcaggttggccaacggtccagatgtgctggagacagacggcctccaggaagtgcctctctgcagctgccgga

SEQ ID NO: 66811 - DNA, 95 bp, Homo sapiens
agagaggagaacgaacatcttctggacctttgtccaggtaatgagaggccctaagatcccagaggatgccataagaggaaaagtcaggggagtgt

SEQ ID NO: 66812 - DNA, 100 bp, Homo sapiens
ccaagatgtctgacatggaggatgatttcatgtgcgatgatgaggaggactacgacctggttcatctctaacaagtatttagtgaaacgacagagcagag

SEQ ID NO: 66813 - DNA, 86 bp, Homo sapiens
gggaccgaggtttgggggttgtggagcctattccacgccctccctggaaagatatggagagagatttgaaggctgactcaaacatg

SEQ ID NO: 66814 - DNA, 100 bp, Homo sapiens
tgggcgaagcacgctactacctggtgcagggcctgattgaggactgccagctggcgctgcagattgatgatcttacagcagaactggagactgcaggttc

SEQ ID NO: 66815 - DNA, 100 bp, Homo sapiens
ctggaccccgacacgctgcctgctgttgccacactcctcatggatgtcatgtcctacttcaatggtagagacgggtttcaccatgtttggctgggctggt

SEQ ID NO: 66816 - DNA, 75 bp, Homo sapiens
tatcaagccaagaacagcccaatctcctttctgggcaaacgttccaaggaacttgtaatagctggcatcgttgag

SEQ ID NO: 66817 - DNA, 75 bp, Homo sapiens
gcggcggaaaccgaaggggagccatggcggctgacagtcgggaggagaaaggtttttggattcaaagcataaaaa

SEQ ID NO: 66818 - DNA, 83 bp, Homo sapiens
ctatacccatctggtcaaatctctgcaggaatcagacagctgaccctctggtgggcagcatcgccacacagtacatgaccaac

SEQ ID NO: 66819 - DNA, 75 bp, Homo sapiens
gcctaggcattttgctgtctcctcctaatacggaaacagaatccaattcactggaagctagctaatgtagagaat

SEQ ID NO: 66820 - DNA, 75 bp, Homo sapiens
gcgactttggggcccgtcaccctcaggccataaaattttgagtagaaaaatccagaaatttgaaaatcagtatcg

SEQ ID NO: 66821 - DNA, 82 bp, Homo sapiens
gttgacatcaaggatctaccagtcgttccccatcaggaagtcctcgcagaagtgcaagtcctgaaagaatggactgaagctc

SEQ ID NO: 66822 - DNA, 100 bp, Homo sapiens
taatgaccgaacagaaacccctcctcccctagcttcactcaatgttagtaagtgaagttattcgaagtcattgaaactgaaaaaacactctacctaatca

SEQ ID NO: 66823 - DNA, 48 bp, Homo sapiens
cttttccatgcactggaggagaggtacttgttttggctccaacaaggg

SEQ ID NO: 66824 - DNA, 75 bp, Homo sapiens
ggggagcgtccggagctagctggatcctctaggcaggtttaccttatgggtgggaggaagcttacacagcagatg

SEQ ID NO: 66825 - DNA, 74 bp, Homo sapiens
caagaaagacaaagacccagtgaacaaatccgggggcaaggccaaaaagaagccgatcaaagtccagatctcca

SEQ ID NO: 66826 - DNA, 51 bp, Homo sapiens
ccgcgcggcctccgcggagccaggtgtggcagtgtggcggcagcatggagg

SEQ ID NO: 66827 - DNA, 100 bp, Homo sapiens
ggggcatctgctgacttgaagggcggtggctgcagtgctgactctaccctttgacgtggtaaagacccaacgccaggtcgctctgggagcgatggaggct

SEQ ID NO: 66828 - DNA, 100 bp, Homo sapiens
ctgctggggccggacaagaacctgaccgagagggagtgttcctttctgccgaaattctccattcatatagaaaccaagtatgaggacaacaaaggaagca

SEQ ID NO: 66829 - DNA, 75 bp, Homo sapiens
ccctcatcctggttctggaatcctcagttcaaggccaagaagaagttctttgacacggaattagagaacctggag

SEQ ID NO: 66830 - DNA, 75 bp, Homo sapiens
gaactgagaagctgtcaccacaggtaaatgagctggatggtatcccgttgatcctggacaactgcaacatcagtg

SEQ ID NO: 66831 - DNA, 75 bp, Homo sapiens
ccctgaaatctggagtgaagaacgccgccatccagccaccattccaaggtcttaacccatatttaactttgaaca

SEQ ID NO: 66832 - DNA, 90 bp, Homo sapiens
caagtccaaggatgaatcccagtccctgttacggccctggtacctgacagtgtaaagaaggagctcctacaaagaataagaacattcctt

SEQ ID NO: 66833 - DNA, 83 bp, Homo sapiens
gtagttataaaagcaaacacaggattcaccacagtacttcacatcgtcgttcacatgggctggactacttactactgatccac

SEQ ID NO: 66834 - DNA, 50 bp, Homo sapiens
tgatgctgaactggatgctaaacttgagggagcccaagcaatctttaatg

SEQ ID NO: 66835 - DNA, 75 bp, Homo sapiens
gactccttgctgaatctgagcagtaatgaatttgggcatcctgaatggttagacttcccaagaaaaggaaataat

SEQ ID NO: 66836 - DNA, 83 bp, Homo sapiens
ctacgaactcgtccagagggtcggcagcggcacctacggggacgtctataagacggaagtgaaaatgtgacaggattggacct

SEQ ID NO: 66837 - DNA, 83 bp, Homo sapiens
tctttacgattccaggacaagcttttgtccccaaaccagagctccagtcagcccggtcaagcatgacagcaactcaaactcgg

SEQ ID NO: 66838 - DNA, 51 bp, Homo sapiens
tcttcgcatctgggacctgaataaacacgacacatcatctcagagttggag

SEQ ID NO: 66839 - DNA, 95 bp, Homo sapiens
tttgtatcccaccagcaatgaatgagcgttccagcttctcccattgtttgtgctccccaaacctaaagtgatctcctgtctagagcaaggggaag

SEQ ID NO: 66840 - DNA, 49 bp, Homo sapiens
gaagattgtgaagcaatagcctaaggagaactgcgacacatcaccaagc

SEQ ID NO: 66841 - DNA, 98 bp, Homo sapiens
agaaagagtaattcacgcagagccggctttgcagcctttttcacatagctcttggctgtaggattgccccactccaaaaaccagtgtgtggaggtcca

SEQ ID NO: 66842 - DNA, 100 bp, Homo sapiens
gctgggacggactctggccgcctcagcgtccgccctcaggcccgtggccgctgtccaggagctctgctctcccctccagctgtttttggaaggaagaaag

SEQ ID NO: 66843 - DNA, 100 bp, Homo sapiens
gtgacagtaactgaacattggtctaaagtctttccaaaaggtcaaggttcacaaggccgacggtcgcaaggtcctacggtcaagcatccgggagtttcta

SEQ ID NO: 66844 - DNA, 75 bp, Homo sapiens
tcctggagactacaccaagggtgtagagataacagaatgattacggacctgaagccaaagaacaagatgcgctag

SEQ ID NO: 66845 - DNA, 100 bp, Homo sapiens
ccagtcttgctctgccctccggagatgacaagtgagaaagaagtgtccggccgggccatccccttcagcacccagtcagcttgaagagtttcaaatggac

SEQ ID NO: 66846 - DNA, 106 bp, Homo sapiens
ctgctacctgcagcgccgtgtggcacgacacaaaaatcagtctctggcatctctatcccctatgaggcaccacgtaagacctcctgcccttagctctcttgctcac

SEQ ID NO: 66847 - DNA, 75 bp, Homo sapiens
tcatcttggccatcactatacacaacgttccagaatgtccagtgctaggagactcataagttggagagaaacggc

SEQ ID NO: 66848 - DNA, 98 bp, Homo sapiens
agttgttcaccaattccacgaccactgtttttgctcacaaatgcttttttacatctgcaagaaattaactagtcatcaaatgcttagtagcacagaaa

SEQ ID NO: 66849 - DNA, 100 bp, Homo sapiens
cgctgatcctgcagcccagtggatggagtccagaatctacagacctgccaggaaaccactgattgcttgtgtggagaaacagctattaggagaacattta

SEQ ID NO: 66850 - DNA, 100 bp, Homo sapiens
gttgaagaagccaccaacattctgacagcaacaagaaaatgtttccgacacatagccctcgattatgtgcttcagggtggctgtgccagtgtcattgtgt

SEQ ID NO: 66851 - DNA, 74 bp, Homo sapiens
gctcccatcattgatgtggtgcgatcgggaataccttggcaagcagctccagtccgagcagccccagaccgctg

SEQ ID NO: 66852 - DNA, 90 bp, Homo sapiens
gtggtggcaggctgggcacgaggaccatgctgggccggagcctccgagaaattacttctctaacaggatcaccagtttgctccacaaagc

SEQ ID NO: 66853 - DNA, 87 bp, Homo sapiens
cgctccgcgctctggcgctacggtctggccgtcggctgcggcgccatcggtatcgtgatttccgatacccacctggacacccccagg

SEQ ID NO: 66854 - DNA, 75 bp, Homo sapiens
gcagattcaaagccaggcaccattcgtggggacttctgcattcaggttggcagtgaaggaactgaaatgaaccag

SEQ ID NO: 66855 - DNA, 114 bp, Homo sapiens
actcccagagtttattcctcgttccttcttcagtcctgctcgtcggaggacccggttgccatggtgaaggaaaaagtggatgaggatcgcagtacggaacctgaccgattgcag

SEQ ID NO: 66856 - DNA, 74 bp, Homo sapiens
cctccttccatgaatcacaaatgttcttaatggcatctagaatgagtgaagatagtccaagtcctaagagacag

SEQ ID NO: 66857 - DNA, 50 bp, Homo sapiens
ggctgcaatcacatgcagtgtgctaagctttggacatcagacagtgcagg

SEQ ID NO: 66858 - DNA, 75 bp, Homo sapiens
gagatcttgcgggaaaaggagagctcggctgttccagccaggagacgagttgtactgctgtcacaggaaatggac

SEQ ID NO: 66859 - DNA, 75 bp, Homo sapiens
aaacttcggacatagaggccaaccaacctttggaggctgaactccagtgcacccagttagacttggagcggaaac

SEQ ID NO: 66860 - DNA, 90 bp, Homo sapiens
tcagtcagagagccttgggccagagttccaggggctctgggagtggctgccaggggtgcccagaggatgcgacatcctcatcgtctacag

SEQ ID NO: 66861 - DNA, 75 bp, Homo sapiens
caaggaataaacatgcaatgaacccaaaaggggcgacaagtcagcagtgagtgccagggggagatgctggattac

SEQ ID NO: 66862 - DNA, 100 bp, Homo sapiens
ctgacattgcagagctgtgggctgtgttccacaagttcaaaggtgtgtagctgggacggtgctggtctgagctggaccttgtctgatggcttcctccaac

SEQ ID NO: 66863 - DNA, 80 bp, Homo sapiens
agttcctgggaaggtggagccaccagcctctccctgaatacagattctgttcatcttgctctgaaattaaataattctga

SEQ ID NO: 66864 - DNA, 90 bp, Homo sapiens
taaagcaggaggaatgaaggatgtacaaacatccaaagcagtgcaccaattccagctggacatcactgtgaaaatgggacgggataaagt

SEQ ID NO: 66865 - DNA, 83 bp, Homo sapiens
atccctttccgagtcaactggcccggcaccgagttctctctgttgggcactgccaccctctcgtggtccaagcagcacatgag

SEQ ID NO: 66866 - DNA, 90 bp, Homo sapiens
ctgccctgtccacagtgggctctgccatcagcaggaagcttggagacatgagacaactgatcaatactgggttccatgtttacatgatga

SEQ ID NO: 66867 - DNA, 83 bp, Homo sapiens
tccacacagctcagaacagttggatcttgctcagtctctgtcagaggaagatcccttggtatcctgaccaaaccagatctaat

SEQ ID NO: 66868 - DNA, 98 bp, Homo sapiens
ttgagctcaaagttattttacatttggtattcatgggtagtttgaaatatccagatgagaatggatttgatgccttcctgaagaagcatgggggtagt

SEQ ID NO: 66869 - DNA, 100 bp, Homo sapiens
gcacagaggagcatttgaattggcttatactggttttgtgaaactcactgaagtactaaacaggtgagaattatgaagatgatgacctagtaaattctga

SEQ ID NO: 66870 - DNA, 85 bp, Homo sapiens
taatgaaccaaagagagcaattctaccataagggtatcactaccattaaagttaacattcgtaatgccaattccctgggaggagg

SEQ ID NO: 66871 - DNA, 100 bp, Homo sapiens
gaccgcggggcgctcatctggctctgctacgacgcgctggtgcacttcgcgctggacccagatgatgtggtaccagttggccaaagaagagcctggtgtt

SEQ ID NO: 66872 - DNA, 75 bp, Homo sapiens
tgaaacttcagaatacttcaagaatagcagaggagcagaattatagaccaatccagcaatgtggagatagcatct

SEQ ID NO: 66873 - DNA, 51 bp, Homo sapiens
aaacgaagaagctagactcagatcaggccaaccccttcaaggagcgaatct

SEQ ID NO: 66874 - DNA, 75 bp, Homo sapiens
gacgtggacaatggcaacatgtacaagagcatcctggtggaagttaaacgagctgagcctcgggacagcaagagc

SEQ ID NO: 66875 - DNA, 108 bp, Homo sapiens
cggacgaggaggagggccctgaccgggtgcagtgcatgccatcttgaggcctcatacctagacccgaaaaatcctgtctgcctgtgagaagaatcccacagatgccta

SEQ ID NO: 66876 - DNA, 82 bp, Homo sapiens
ttcgcccggctttgcagcggggacttcggcggcggcgcctcaggcacctcggcccggagcatccaggatgtgaggagtgatg

SEQ ID NO: 66877 - DNA, 82 bp, Homo sapiens
ctgcaatgcgatacctgagctacatgtcaccaagccaggtctgcgaggaacagaagtgcgaggaggaggtcttcccgctggc

SEQ ID NO: 66878 - DNA, 100 bp, Homo sapiens
cttcaatgatgggaaggtggatcccgccgggaggtactttgctgatccaaggattaatgtcgtgcttgctggtggccacgttgtgccccgagatgagatc

SEQ ID NO: 66879 - DNA, 100 bp, Homo sapiens
catgaaagcacatgtttcagtgccactcacataagaagtgcccggtggagccgccaccaaaatgcagattttcgtgaaaacccttacggggaagaccatc

SEQ ID NO: 66880 - DNA, 74 bp, Homo sapiens
tgaacgtagtctggaagacttgcttcgagaaaggaaacctgtgagagagcctccttttcacctgaccagaagag

SEQ ID NO: 66881 - DNA, 75 bp, Homo sapiens
ggggaccaccaaggaaatatttatgtttttgacttacatggaaacagttgctgatgattcctctgatcatgtcag

SEQ ID NO: 66882 - DNA, 98 bp, Homo sapiens
ggcgtgtctcctcctagtgcttcccgtctcagaggcaaacttgttggctctggaattaagggatggggagaaggttctggatctctgtgctgctcctg

SEQ ID NO: 66883 - DNA, 100 bp, Homo sapiens
gactgacttttcttatgctgggatgtgccttagaggattatggagactaggagttttgcatgtgggacaaaagcttgaagaacaagatgaatttgagaag

SEQ ID NO: 66884 - DNA, 75 bp, Homo sapiens
caacagttagtggccagcatcctcctgctgcaggaagtactcccactaccccaacctcctctcaagccccacaga

SEQ ID NO: 66885 - DNA, 75 bp, Homo sapiens
gaaaaagccatcttacactactcaaaggttatgtgaaatcctagctaaagaaaaggacactataagaaaggaata

SEQ ID NO: 66886 - DNA, 100 bp, Homo sapiens
agaggacaacgcagatatagaacatttcttttatcacacgtttgctgccaattgatggggcaaatgatctcttttttcagccacctccactgactcctac

SEQ ID NO: 66887 - DNA, 83 bp, Homo sapiens
tctccccgatctacggggctgacatcagcggctctttgtatgatgacgtgctccggtgggaatgcttggtgaggaccccccag

SEQ ID NO: 66888 - DNA, 99 bp, Homo sapiens
gaggccaggctttatgggagcatgggttaccagcgacgcaccctgtaactgtgcataatcccgaaaatcaaagctacttgatagcatataaagattccc

SEQ ID NO: 66889 - DNA, 50 bp, Homo sapiens
ctgtggcctcgctcctcggaggcaaagatgtcaaggaagttaagcttacc

SEQ ID NO: 66890 - DNA, 100 bp, Homo sapiens
gagccccggggcatctatgccagtgagaggcccaagtccctaggcaaccacgagacagacaacatgaaccagatctacggtttcgagggtgaggtgaagg

SEQ ID NO: 66891 - DNA, 100 bp, Homo sapiens
ctgctggaggaggcctgcgaccagtgcgcgtcccagctggaaaaggcactaggaagcttttattttcttcatgagtccttaaaaaacatctaccagtttg

SEQ ID NO: 66892 - DNA, 88 bp, Homo sapiens
ctccgcaatttttctcaggggaggcaggaactacaactcccagggacgcccggcggcagcagtactatactggcaattgctggagaag

SEQ ID NO: 66893 - DNA, 103 bp, Homo sapiens
tgaccaagaacgtgagcaagcccaggcacagccgacgccgcggggtgtcgtgaaaactacccctaaaagccaaaatgggaaaggaaaagactcatatcaacat

SEQ ID NO: 66894 - DNA, 75 bp, Homo sapiens
cattcccgggaggggggagcggcgttggaggccaccgtttccagcaacgggaggaactcacaaaaagacgagaga

SEQ ID NO: 66895 - DNA, 51 bp, Homo sapiens
tatgagaccatgtttgctcctgagttggcagatgtgaatggagtcattgag

SEQ ID NO: 66896 - DNA, 50 bp, Homo sapiens
accttcacagcagccctgcgagagcttgtggacaaatgtataggatcaag

SEQ ID NO: 66897 - DNA, 98 bp, Homo sapiens
cggtgttccaactgtttaaataacaaatgtggcaattattttggatctatcacctgtcatcataactggcttctgcttgtcatccacacaacaccagg

SEQ ID NO: 66898 - DNA, 75 bp, Homo sapiens
gcaaaagatttgcctggtgttagagagctgtttgaaaaagaacgaggagttggaaactctggagagcaacctctt

SEQ ID NO: 66899 - DNA, 51 bp, Homo sapiens
caaaaacagaccagaagattaccaaggcacccaataactatagaagtccca

SEQ ID NO: 66900 - DNA, 100 bp, Homo sapiens
gtgctgaagaagtctgcctacctgtcagccgtgggcaccttcacctgggtctgcacgccctttctggaccgtataatagacgctggccccaaaggaaact

SEQ ID NO: 66901 - DNA, 100 bp, Homo sapiens
acaaagttctctcgatcagggcatacatctttcttcgacaaagggttttgcactgattgcaaaaataaagtcctccgagcatacaatatccttattggtg

SEQ ID NO: 66902 - DNA, 75 bp, Homo sapiens
gcggggaccgctgtgctctcgtcaaggcggataagaaggcggcacaagaaaagatgatccagcaggagcatgagc

SEQ ID NO: 66903 - DNA, 50 bp, Homo sapiens
tatagatcagaatctcagtccaacaaaagcagaaagatgaaggtcttaga

SEQ ID NO: 66904 - DNA, 99 bp, Homo sapiens
cgtcctccacccctggaatccctgtctgggtgcggactcggagaagccctcgagcatccccacagattgcaagactggaggaagataaagaagaactac

SEQ ID NO: 66905 - DNA, 74 bp, Homo sapiens
aaagactatctcaagagatttgctgatgaaggcacggttctgtacagagtaatgagatgtgtgacggctgcaaa

SEQ ID NO: 66906 - DNA, 50 bp, Homo sapiens
ctcactgcaacctctgcctcccgggctgaggcaggagaatggcgtgaacc

SEQ ID NO: 66907 - DNA, 83 bp, Homo sapiens
aatgggaggccccgggaggccgaggttcggtctattatcctcccagtccacaacgctgaaccgtggctggacgaatgtttgag

SEQ ID NO: 66908 - DNA, 117 bp, Homo sapiens
tttggctacacacttatagatcttctgcactgtttacaggcacaggaagttccaggttaaaggcagcctcagctcacggggcagttgatggtggtagagaacagccctgggaagggg

SEQ ID NO: 66909 - DNA, 100 bp, Homo sapiens
gacatttcagtacatctggtagaggtgggcaccatgtccttgaagcttcaggcaagcaatgtaaccaacaagaatgaccccaagtccatcaactctcgag

SEQ ID NO: 66910 - DNA, 100 bp, Homo sapiens
agtgttttgagtttctgactggcgtgccggaaagatcatgttagcacacccagaaacttcacacgatgcagaccccagtccctctctgaaaagtattcca

SEQ ID NO: 66911 - DNA, 98 bp, Homo sapiens
actccagtttctgtaagcaatgacttgtggggagacttcagcactgcctccaggatttcatcttccagaatctgcaagaagaatctgcttattttgtg

SEQ ID NO: 66912 - DNA, 50 bp, Homo sapiens
attagagacatactaatgtacatgcagtgtttggccagcgcttggatgag

SEQ ID NO: 66913 - DNA, 75 bp, Homo sapiens
gacatctgcctgagagatctccaagaattacaggctcaaactgtccaggttgctgaagttgaaccacagtcacag

SEQ ID NO: 66914 - DNA, 100 bp, Homo sapiens
ccggaatcccgcgcgctgcccacgattcgcttctgaggccaagtcatcaaggcatgggacattggggtggctaccatgaagaaaggagagatatgccatt

SEQ ID NO: 66915 - DNA, 100 bp, Homo sapiens
tctcgaaggggacctcatgtccctgtgggacacaatgcccccaaggtatcttggagatggccgcttccatctggagtctgtcatgattgccaaccccaat

SEQ ID NO: 66916 - DNA, 75 bp, Homo sapiens
caagaaccatttccaaacaaggacatggagggaaggcttcctaagaatccagactccaaaatgatgcaaatcaac

SEQ ID NO: 66917 - DNA, 89 bp, Homo sapiens
tgtcctaggccaaccagagattcatctttcatgcagtgacatgttgataaaaaatgatgctggaatagtcaaatgatttcagttcgtga

SEQ ID NO: 66918 - DNA, 75 bp, Homo sapiens
taaagggaagtcatttctactggacttcatgcttagatacatgtataacaagagatcctctttgtgctgtcgatg

SEQ ID NO: 66919 - DNA, 100 bp, Homo sapiens
gtattcagatcttcatgtgtctcttctaagctgaataaagctgttttggaactgtcaggtacctcaaagctaagagttccctatttcattgatttgaaaa

SEQ ID NO: 66920 - DNA, 49 bp, Homo sapiens
cttggctcctgctctccataagtttaaggaagaaatctctaaacgtttt

SEQ ID NO: 66921 - DNA, 86 bp, Homo sapiens
cgctactctctctttctggcctggaggctatccagcggtttccaggcctgaggtgcccgccctggccccaggagaatgaaccagcc

SEQ ID NO: 66922 - DNA, 74 bp, Homo sapiens
ccgagcaattgtgatgagatattctgctgagtggaaggatggatagaatgacagaagatgctcttcgcttgaat

SEQ ID NO: 66923 - DNA, 75 bp, Homo sapiens
ccagagcatggtgctcttcttcttcgagaattacaccggggtccaggtactccaaagattcaggtttactcacgt

SEQ ID NO: 66924 - DNA, 100 bp, Homo sapiens
cagctttggttggaagacctattatcagatcaaccaccaaagtgggaaacattgaaatcaaggatcctgatggtgaacatgccaggagagcaatgcaaaa

SEQ ID NO: 66925 - DNA, 101 bp, Homo sapiens
ggaccctagagataaggcgcttcaggactaccgcaagaagttgcttgaacacaaggagatcgacggccgtcttaaggagttggatatcaaagtattgcaga

SEQ ID NO: 66926 - DNA, 90 bp, Homo sapiens
aaacaaggtgatctggggaaccaaagactctgggactcttggtgccaacagagttactctatgctggcatcaccatctacatcaggtcag

SEQ ID NO: 66927 - DNA, 82 bp, Homo sapiens
tttgttcagctgcagcatggagagatagataaacggccgctacatctgttacttttgttggtgttatgggaatgagatccta

SEQ ID NO: 66928 - DNA, 88 bp, Homo sapiens
attatcagtggaccacaacagacccagaaggtttttcttttcattagaaaccgcacactgaagaaatcaggggagaaacccctgcttg

SEQ ID NO: 66929 - DNA, 75 bp, Homo sapiens
acttcttgccatggctgccgtaagaatattaaaaggagcccaagccccatctcatcctagcacaccctcctccac

SEQ ID NO: 66930 - DNA, 75 bp, Homo sapiens
atgagatgattgccaaacccccaggtaggtagccatccaagcttcctgaaggaggttcgagatcacatgcaggac

SEQ ID NO: 66931 - DNA, 95 bp, Homo sapiens
aatgccctggaagtgcaaggcagggagaccagactggttttggaggtggcccagcatttggtttaagctatgaagaaggacatccctcacactct

SEQ ID NO: 66932 - DNA, 49 bp, Homo sapiens
ttggaggatgcggctttgatgggcttccagctggtctttttaccctttg

SEQ ID NO: 66933 - DNA, 100 bp, Homo sapiens
aagcagaatgagaaagaaaaaccacaggctaatgttccttcagctctgccatcactccctgccgggtcagggtccaggttcacactagaaggccaaaact

SEQ ID NO: 66934 - DNA, 48 bp, Homo sapiens
ggcggacagtgcggaactaaagggcgtctctggccgagcctctttttg

SEQ ID NO: 66935 - DNA, 100 bp, Homo sapiens
ctcaaaacaagcaggagactccagcagccatcgccagcagggcatcacaggtatcggtgttcctattatgttagcttatgtctatggcgtagttccaatt

SEQ ID NO: 66936 - DNA, 75 bp, Homo sapiens
cctggatacggtcactttctacaaggtggcgttcaagatgtacttgggcatcactccaagcattactaattggag

SEQ ID NO: 66937 - DNA, 100 bp, Homo sapiens
ctgctgctgcccctgctctcagctctggtcgcggcggctatcgacgctgcaagctttcttcctggtggcagatgacatcatggattcatcccttacccgc

SEQ ID NO: 66938 - DNA, 100 bp, Homo sapiens
cggttccgccgcgcagcgcccaggcccagctcgtccagagtctgcggacagcgcacgtccaggtcgagaagactcggttctgagctacgagacagtgacg

SEQ ID NO: 66939 - DNA, 100 bp, Homo sapiens
ctgtactgtgacctgctgctggctcggtttggccttatccagtctatgaacttcttggacacttaatgattgttggcaagaaatgtgctgctgatctggg

SEQ ID NO: 66940 - DNA, 51 bp, Homo sapiens
cagaaggagcaggattaccaaaggctgggagtgtccactcgccttccacca

SEQ ID NO: 66941 - DNA, 75 bp, Homo sapiens
ctcaagcagaacactgctgggagtcctaaaacctgcgacaggaaggcattagatggcttcattatcgcagtgaca

SEQ ID NO: 66942 - DNA, 74 bp, Homo sapiens
aatgttgagcctttttggcctggcttgtttgcaaagggattaatgaaaatcaagttccatcctcagacaagagg

SEQ ID NO: 66943 - DNA, 74 bp, Homo sapiens
tggcagtggacggagcaagcaggcttgccaagagcggagtactatactggcaattgctggagaagattttgcaa

SEQ ID NO: 66944 - DNA, 129 bp, Homo sapiens
aaccggaacagctccagtctgcagctcccagcgtgatcgacgcagaagacaggtgatttctgcatttccgactgaggttagccatcatccacccatttctgcctgtcactgtgaatcaaagaattttgt

SEQ ID NO: 66945 - DNA, 75 bp, Homo sapiens
gcgctcagaagaacgcttcgcccgttggtgctatcagcagccgctcttctaaaacattcaaaccaaagaagaata

SEQ ID NO: 66946 - DNA, 90 bp, Homo sapiens
ttgcccttatcagtaacacctgaggcttgaagatgcagtggacgccagagcatgcccagtggccagaacagcactttgacatcacctcaa

SEQ ID NO: 66947 - DNA, 78 bp, Homo sapiens
agcaagatctacgtggatgatgggcttatttctctccaggtgaagcagaaaggtgatgcttgccgacaggaagggcac

SEQ ID NO: 66948 - DNA, 101 bp, Homo sapiens
ctgggaggccggccggtgccagcacctttcggcttctgagacggcggcagcagcggcattcaggctgacaaacgggctcatcataatgcactggaacgaaa

SEQ ID NO: 66949 - DNA, 100 bp, Homo sapiens
gatggcagcgatgaggaggagtgcaggcaattgaaggaacagactaaaaatcgtgtcctggaaggaaactacaggtactaccagggattttcagtctgaa

SEQ ID NO: 66950 - DNA, 98 bp, Homo sapiens
ccaggctcaagcagtcctaccatgtcagccttcccagtagctgggaccacagggaatgctggcagactttgtgtcccagacttctccaatgatcccct

SEQ ID NO: 66951 - DNA, 75 bp, Homo sapiens
atggaaacctgctctccattgtgaccagtggaggtacaacagaatagctcgggaatggactcagaagtatgcgat

SEQ ID NO: 66952 - DNA, 100 bp, Homo sapiens
agtcctcaatccaacagcccagtgcttctgtctcgactgcactttgagaagaaaaaatgtgagcgctattggcctttgtatggagaagaccccataacgt

SEQ ID NO: 66953 - DNA, 98 bp, Homo sapiens
tttactgtgcagctcctgaaaggagagacacttgtgaacattcaagtgaagcaaaagcctttcatgattatagacagggcagggcattgttcatgcac

SEQ ID NO: 66954 - DNA, 73 bp, Homo sapiens
ttttcctgctagagctgcttaccaagttgctgctttacccaaaatggtttcacccaaatatcactggtgtgga

SEQ ID NO: 66955 - DNA, 51 bp, Homo sapiens
tactaactttgaaatggaataagataagtcccctgcggccccagagaccga

SEQ ID NO: 66956 - DNA, 80 bp, Homo sapiens
gctacggaccttaaaatacccgcaacagccccttcgtcccaagtcctgggaactccaacaagggagcaaatcagagaaat

SEQ ID NO: 66957 - DNA, 74 bp, Homo sapiens
gacagtctccaaattcgcctccatctgtaccatgcctcttcgagcactactgctactcccggggcggcatgcgc

SEQ ID NO: 66958 - DNA, 127 bp, Homo sapiens
cagggaaggcagtggcaagatggcgtccctggatcgggtgaaggtactggtgttgggagactcagggaactgcatgagtgagttcatgggactcatccgaggtcactatgaggcaaagcaaggtggg

SEQ ID NO: 66959 - DNA, 87 bp, Homo sapiens
tagctgtgctcgcgctactctctctttctggcctggaggctatccagcgtggagccatcgaagcccccacccacaggctgacagagg

SEQ ID NO: 66960 - DNA, 74 bp, Homo sapiens
tcaacagggccctcagatggagcagcgtggaggtactggtgtggcatactcggacagagaagcccaagatgaag

SEQ ID NO: 66961 - DNA, 51 bp, Homo sapiens
ctcaggcttccatgcagcctgccttaccgacggagtcttgctctgtcaccc

SEQ ID NO: 66962 - DNA, 97 bp, Homo sapiens
gagaggccacagaaaacagcatccaactgttacataacaggatggggtgacacaggaccacagaatactggccatggtgcaacttctggttttggca

SEQ ID NO: 66963 - DNA, 74 bp, Homo sapiens
tttgaggaactgctcaaggtcttctgggagaatcacgacccgacccaaggcctcctacacctacctctctctgg

SEQ ID NO: 66964 - DNA, 100 bp, Homo sapiens
gttatgcagcaaacagtcctagaagaattcttcgaaacattggtacaatgaatacatttaaggacccaacatgagtgaagtttcctgcaagaaacgggac

SEQ ID NO: 66965 - DNA, 83 bp, Homo sapiens
accttgtatgcctcaatttgctggatttaagcactgctgcactttatgaggtatgatctcgtgaaaccttgagagaaactgaa

SEQ ID NO: 66966 - DNA, 130 bp, Homo sapiens
aggacctgtaaacttcatggttcggctttttgtggtgattgtgatgtttgcctggtctatagttgatcctaaatgcccaggagatgttgattttcataatagtgactgggacattaagacaatcaccagc

SEQ ID NO: 66967 - DNA, 89 bp, Homo sapiens
cccgcgtccgccgattcctcctccttggtcgccgcgtccttggctggcgtatatggccgcgtggaaagtgtcaaaattcttcccaagag

SEQ ID NO: 66968 - DNA, 112 bp, Homo sapiens
tgagaggggagtatgatgcgctgctgccgtggcccttccggaacaagtgtcaggggaagctgatggagaatcgagctctggatccagggactcgggactcctatggtgccac

SEQ ID NO: 66969 - DNA, 82 bp, Homo sapiens
cagcctgcttgactttgaaaatgatttaattgaatcaagctgcaaagtaactagatgatgataattccgaagaaggcttcca

SEQ ID NO: 66970 - DNA, 90 bp, Homo sapiens
gacggcgtggaccacatagacatttacgcggatgtcggcgaagagttcaaccaggttatgaagacagtatggagtttccagaccatagta

SEQ ID NO: 66971 - DNA, 90 bp, Homo sapiens
gtctgcatggccaatggccgtcctgaacctgttatcacctggagacaccttacaccaactggtaggagatcaaatcattgaaatcaatgg

SEQ ID NO: 66972 - DNA, 83 bp, Homo sapiens
cgccagcagcagcaacaacagcagcaatcatcctcttccagtggtagcgtgtttgggtctggaaacactggaagagggggagg

SEQ ID NO: 66973 - DNA, 114 bp, Homo sapiens
cgtgcatgttcttggtgaagtcggccagcctgagcaagcggaggacctacgccggcctgggatttttagactctgaggagcagttggagctaatccacattatggaaatggaaa

SEQ ID NO: 66974 - DNA, 100 bp, Homo sapiens
ccttgatgggacatcctggagggtgggaactttgaggctcagagacagagcagaagacagaacctggtcttctgattccctgtgttctgcttttttcatt

SEQ ID NO: 66975 - DNA, 90 bp, Homo sapiens
ctcccaagtagctgggattgcagaatgcccaggaaaaccatgggctggctgtgcccaccccctcggttccagatgattttgcagacaaag

SEQ ID NO: 66976 - DNA, 100 bp, Homo sapiens
gggacctgatgaagcgaagatcaaggcatttgcaagtaaaatcactggcatgttgttggaattatccccagctcagctgcttctccttctagcaagtgag

SEQ ID NO: 66977 - DNA, 97 bp, Homo sapiens
ttacatttagagactgaaatcactgcaccttaaaaacaaaagattgagctgcactgtattcctgctgaccggttccctgatgtgttacctgcttctg

SEQ ID NO: 66978 - DNA, 109 bp, Homo sapiens
ggcacagcatgcggaaaatactacagagtgtgcacactggctatcattgatccaggtggaaccgtcccaaaatgtcccttgctcagaagaaggatcgggtagctcaaaa

SEQ ID NO: 66979 - DNA, 59 bp, Homo sapiens
gtgactcttctcaaatgccttctcatccccacataggaccattgcaatttagagatgtg

SEQ ID NO: 66980 - DNA, 50 bp, Homo sapiens
ttctgggacagctctactgacggacagagcgggatgccaccagcttgtcc

SEQ ID NO: 66981 - DNA, 100 bp, Homo sapiens
taaccaatgactgtggaataatatggaagaagatggaaaaaacttgtttaatgggtccaagaatgcctcaggatggatcagatgacgaggacgaggagtg

SEQ ID NO: 66982 - DNA, 100 bp, Homo sapiens
attctgtggcactccagaatatctggcaccagagtctgagggaaaaggccataccaatgctggagatgcaatatatgaggtggtgagtctacagcgagag

SEQ ID NO: 66983 - DNA, 83 bp, Homo sapiens
ctggcatctccactggacactggtcagaatttgttcctagagacagagaacccaatacaaaagtgagaacatgtatgcataat

SEQ ID NO: 66984 - DNA, 98 bp, Homo sapiens
tcctggtgcctatcttaaaggcaagaagtacaggcccctgtttgactatttcctgaaggctcttaaagactctgaccaagtagcacagagtgatgggg

SEQ ID NO: 66985 - DNA, 50 bp, Homo sapiens
gtttacagtctgactactggaagattaatcctaccatatgaaagatttat

SEQ ID NO: 66986 - DNA, 100 bp, Homo sapiens
cagcagatatgcctgctaacatggataagcatgccctgaaaaagtatcgtcgagaagcctatcatcgtacccgaataggcttcgccccctcgtcctggat

SEQ ID NO: 66987 - DNA, 90 bp, Homo sapiens
gtgggatattccagagaaacagcctttcaaagacctgggggtgttgtgtcctacaggatgtcagttgcaagaggctttgctacaacagga

SEQ ID NO: 66988 - DNA, 100 bp, Homo sapiens
aatccaatcttccgtaacccctgcacagagcagattctgaaacttcttgacaatttgcttgcgcttataaggaggcaacgcacgggccacaggcatgttc

SEQ ID NO: 66989 - DNA, 100 bp, Homo sapiens
gcaatgtttagccaacccaaattaccttaattgatttaagtgccctgtatgctcaaaatttgtatcctcagatgaaatggatttgcatcttgtaatgtgt

SEQ ID NO: 66990 - DNA, 105 bp, Homo sapiens
gacgccggtggacagtcctgatgacacagccctcagcgagagtgccaaccaggccttcctggctcttgtcaggatggtgaagctgttcatcggaaacctgccccg

SEQ ID NO: 66991 - DNA, 74 bp, Homo sapiens
ctcctgcaaaagtggaagcgaagccgaaaaaggcagcagcgaaggtcagtatgggaatcctttaaataaatata

SEQ ID NO: 66992 - DNA, 97 bp, Homo sapiens
cactggtcgcactgagggtgaagtggcaggaggaggaggaggggctccggctggtctgtggtgagatacactctggaaatgattaaactagtaccac

SEQ ID NO: 66993 - DNA, 100 bp, Homo sapiens
ttgtaccagtgatgacacaaaatcccagatctacctgacgggcctgcgagggttgaagattgtgaagcaatagcctaagatgatgtcggagcaattccaa

SEQ ID NO: 66994 - DNA, 100 bp, Homo sapiens
acccgacacttacatgccatggccttctacgttgtgaaaatggagatcatgcacgccctgaagatgacctggcacgtgcactgctttacctgtgctgcct

SEQ ID NO: 66995 - DNA, 100 bp, Homo sapiens
gagaccagcctggacaacaaagagaactatggatttgataaaattgaggtgcgagataacggggagggtatcaaggctgttgatgcacctgtaatggcaa

SEQ ID NO: 66996 - DNA, 51 bp, Homo sapiens
gttaccagcaatgacactacggaggaaaacaatgtggttcataaccagaaa

SEQ ID NO: 66997 - DNA, 82 bp, Homo sapiens
ctacaatgcaggactgctctcctactacacggtcaaaatgcagatcttcgtgaaaacccttaccggcaagaccatcaccctt

SEQ ID NO: 66998 - DNA, 75 bp, Homo sapiens
ggagtatgcccaagttttccgtgaacatgccaacaaattgattgaggagtggagtcaacatatcaatggagcaag

SEQ ID NO: 66999 - DNA, 100 bp, Homo sapiens
tgggacttaggagggcaggaagagctgcagtctttgtgggacaagctccatctggctcctgctgaagaaccccacgttcatcctgctctgcctggccggg

SEQ ID NO: 67000 - DNA, 110 bp, Homo sapiens
tcaccactcggcagaccctgtgccgggacccgaaatccttcctgtaccgcttatgccaggccgatcccgacctggactcagacaagagttgcatgctgagaatttgaaaa

SEQ ID NO: 67001 - DNA, 100 bp, Homo sapiens
gcgcggttggggccactgcgaggccgttttagggcagctgtgctgagaatacagcaaagaagctgaatattgcacgaaatgaacaggacgcttatgctat

SEQ ID NO: 67002 - DNA, 90 bp, Homo sapiens
gatcctgctgctgctccatatagtactcagaaatcatctgttctacctctttatgaaacaaatttacatgtattggagaccagaccagaa

SEQ ID NO: 67003 - DNA, 74 bp, Homo sapiens
gggcacgaagtccagagcgagcggacaatgcagatcttcgtgaagactctgactggtaagaccatcaccctcga

SEQ ID NO: 67004 - DNA, 100 bp, Homo sapiens
tgctttctaagaggtgtcccttcaaagatgtgagagagaaaagtgagtttattctgaagagcatccaggtacttctcccagcagctggtctcttacagtt

SEQ ID NO: 67005 - DNA, 82 bp, Homo sapiens
cggtttgctatcgggactcggcgaggacgacaatgcagatcttcgtgaagactctgactggtaagaccatcaccctcgaggt

SEQ ID NO: 67006 - DNA, 100 bp, Homo sapiens
caacaacaacgtcaaggcctaccgggacgacattgacctccagaacctcattgactttgctcaggaatacaccgacttcgagaaggacgtggatctggcc

SEQ ID NO: 67007 - DNA, 82 bp, Homo sapiens
ccggagctgggcgcggattcgccgaggcaccgaggcactcagaggagtgtaaatgagcaaagatggatcaggaaggtggggg

SEQ ID NO: 67008 - DNA, 100 bp, Homo sapiens
gaaaaagatgaagctcccagagcatcctgagggcggagaaccagaagacgatgaggctcctgcaaaaggagttggtggtgaccccgcccagttggcccag

SEQ ID NO: 67009 - DNA, 100 bp, Homo sapiens
tgtcgcttcctctccaaggatcagatgataaaccactacgcccgggctggctcctttaccacaaaggttatcaatactctggctgaccatcatcatcgtg

SEQ ID NO: 67010 - DNA, 90 bp, Homo sapiens
caggatcggaaagaatcccggccagacgtgcgaacagctccagctggatgcagacagacatgctgaactatctggaagtccactgaaaag

SEQ ID NO: 67011 - DNA, 90 bp, Homo sapiens
ttggactccaggcctgagcggcatctaccccctgacccactgcaccctgcagatcttacagactctttcagcacctacgaaaaatttaga

SEQ ID NO: 67012 - DNA, 95 bp, Homo sapiens
tgcagtgctcgctgccatggatgccaccaagctgcatacagtgaagttgttctctgaagttcctcatctgccttaagtctggacccaccaaagaa

SEQ ID NO: 67013 - DNA, 50 bp, Homo sapiens
tggaacaacactcatggctaaggagcatttcctccctctgctatttatac

SEQ ID NO: 67014 - DNA, 97 bp, Homo sapiens
tgaccttgagtgcagctccccctataagcctcggcctccacagaaatttaaaagcctgttgattcaagaactttctaaagtatttccggaagacatg

SEQ ID NO: 67015 - DNA, 50 bp, Homo sapiens
gcatttttggagaggaataacagagagccatgtttgaccgtgagaacaag

SEQ ID NO: 67016 - DNA, 101 bp, Homo sapiens
agacccgactgcaactgctggattgctgcaaggctgagggacgagaacgaggtccgtggcactcaggtagttggttctgacatgactgtgacagttgagtt

SEQ ID NO: 67017 - DNA, 75 bp, Homo sapiens
tagtggaagcggcaagcagagaaaacctgccaatcaagatgagtatgggctaaatttattgtgaagaaatcagaa

SEQ ID NO: 67018 - DNA, 100 bp, Homo sapiens
ataggttcctgtcttccatgtcagtgctgagaggaaaacttcagcttgtgggcactgctgctatgctgttagcctctgagaaagatcagtctaaagaaaa

SEQ ID NO: 67019 - DNA, 102 bp, Homo sapiens
ctcacatcaacttccagtgagagtgacacaggtcaggaagcagaatattccttatatgggttgaaaaataccggccacagaccctgaatgatctcatttctc

SEQ ID NO: 67020 - DNA, 74 bp, Homo sapiens
aacagagagagaggtggacagatctgagagatactgaggaatgggtaccacagaccatgtcatcgtcctggcgt

SEQ ID NO: 67021 - DNA, 100 bp, Homo sapiens
tataagtcataccggctgcgagcccagctatataaaaaggtccctttctagagataggagaagagagagatcgctgtctcgggagagaaatcacaagccg

SEQ ID NO: 67022 - DNA, 100 bp, Homo sapiens
tcatggggaaaatctccccggtgactttcagctatttgcatgcaaagaacatcatccatagagacatgaaatccaacagtatcctttggttgttgagttc

SEQ ID NO: 67023 - DNA, 75 bp, Homo sapiens
agcttttacagtgctcattcctaacagtggatttacttaaatcgagctatagcagattatcttcgttcaaatggc

SEQ ID NO: 67024 - DNA, 100 bp, Homo sapiens
agttcaagaagatcattatggagcagagatcaggccaagtttggaatcactgggacctgacatgaaacgcagatctagtggcagagaggaagatgatgag

SEQ ID NO: 67025 - DNA, 75 bp, Homo sapiens
tgcatgtgaagttatcaaaaacagatgccttcaattaagttgcagagttctgatggagagatatttgaagttgat

SEQ ID NO: 67026 - DNA, 100 bp, Homo sapiens
tgccgctgccctacggcttctccgccatgcaaggctggcgcgtctccatggaggaatgggctatgtgaatgaaaaaaggtatccgttatgaaacttccag

SEQ ID NO: 67027 - DNA, 50 bp, Homo sapiens
atgataaaggaatcatctatagtgaatcagacgtcccaatagatgtggag

SEQ ID NO: 67028 - DNA, 100 bp, Homo sapiens
cggtgagccggaggagtcagtcagaggggcgagcaggagcgattccgtcgccaaacaggttatcctgaatacatgtctaacaattttccttgcaacgtta

SEQ ID NO: 67029 - DNA, 74 bp, Homo sapiens
ttccacctgccttgacatgtgtgggagattttgataagatctggcgagaacactgtgaggatgaagaaactctt

SEQ ID NO: 67030 - DNA, 99 bp, Homo sapiens
cattcaggaagtcctggaagagcagagtgaggacgaggacagagaagccaagaggaagaaggaggaggaagctatccagtcagttcgctgctattccca

SEQ ID NO: 67031 - DNA, 97 bp, Homo sapiens
atataccatcattttcacctatatttttattgtctacctctgaaaccatgtacagtgaactgcctgaagaggttttagctaaagaagatactgaggc

SEQ ID NO: 67032 - DNA, 75 bp, Homo sapiens
ggagaggaacagaccctcactctctctgtcagaaaaatgttttgcatgcagaaatgtgtcagtctggtgcctggc

SEQ ID NO: 67033 - DNA, 96 bp, Homo sapiens
acctgccgtccaggctgtgtatcaaaaggtgcaagccctggaacagcgcaaccagctgctggagacacgctggagcttcctgcagggccaggactc

SEQ ID NO: 67034 - DNA, 82 bp, Homo sapiens
caccacgagcctcagcttcacctccatgggcatcaacatgttcaaatctgaacatcaatgatgtactagggaactactcatt

SEQ ID NO: 67035 - DNA, 98 bp, Homo sapiens
ggctcgggtcgttgtggtgcgctgtcttcccgcttgcgtcagggacctgcccgactcagtggctcagacgtgcagcttctggaatacgaggcgtcagc

SEQ ID NO: 67036 - DNA, 100 bp, Homo sapiens
agccaaagaaacaagccgtggaataggtgtatcaagtaatggtgcaaagcctgaagttatacattggctcttcaaagacgttcacctcatcagagaaatc

SEQ ID NO: 67037 - DNA, 75 bp, Homo sapiens
cgactgtgtacgccgccagctggtaagactttgaccccgacgcaggcttcagtgattgccgcggatcagaagcct

SEQ ID NO: 67038 - DNA, 75 bp, Homo sapiens
gtttcttttggctcacaattatcctagagtgaggacttttcctgaatgttccaatgtttcgaaatgtctctctga

SEQ ID NO: 67039 - DNA, 87 bp, Homo sapiens
ttggaaagacccaggagaagccgcccaaagaactgcatgcatatgcgctagaacttctatttgatcagttgcatgaaggagctaaag

SEQ ID NO: 67040 - DNA, 80 bp, Homo sapiens
tgctcaagcatttcaacgtgcgtgtcacccacgcagacatcttcagccgctgccaggctaccggctctctgaccagttcc

SEQ ID NO: 67041 - DNA, 100 bp, Homo sapiens
tgaaaaccagccaacacttcaatgacactgtggatattcataaggagaaagtggcacgaagagagattggtattttgacaacaaataagaatacatcaag

SEQ ID NO: 67042 - DNA, 75 bp, Homo sapiens
cgacatggcccggaggcagcagaaggcatcacgttgggtggtttccatttagaccgaggccggttcagaacttcc

SEQ ID NO: 67043 - DNA, 100 bp, Homo sapiens
ttccagacactcgatgccaagaggactcagactgtggaacttccgtgccccccaccctcaccaaggaagcgcgccctcaggaagatgcagaaaggatggc

SEQ ID NO: 67044 - DNA, 75 bp, Homo sapiens
ggatctgcatcgtcatcgagccggcccagcttctgaagggagatgtcatggtgacttaagagattaaaattaatt

SEQ ID NO: 67045 - DNA, 75 bp, Homo sapiens
agcatcctgcctcgtcatccagttgagcggcactgcagaggtggagctgaagaagggagccactctcaaaatcac

SEQ ID NO: 67046 - DNA, 101 bp, Homo sapiens
gcaaaattactgtatatgcacatgctgggctaccctgctcactttggacagaatgtccagaggaggtttatgaccctcgatctctatatgaaaggctacag

SEQ ID NO: 67047 - DNA, 76 bp, Homo sapiens
gagacattgcagaaggctctcaaagatgtgagaagggtgttatgtctctagtgaatgtcaggaactgtattcgctt

SEQ ID NO: 67048 - DNA, 100 bp, Homo sapiens
gagtctgtcccattccagaggctgctgaagcacagcagagcacgctcacctgaccagctcataaagcagggttacacatcattttggaatgactgtatat

SEQ ID NO: 67049 - DNA, 74 bp, Homo sapiens
aagaggaggacagttcgctacacagcaatgcatcgaggtaatcagtggagttttattaacaataatctacacac

SEQ ID NO: 67050 - DNA, 100 bp, Homo sapiens
ggcggcggctgcggcccaatatagttccagggtcacccccgagaggacaacaggcatctggaagtgctctctcgccactctgggtgctttactgtctctg

SEQ ID NO: 67051 - DNA, 100 bp, Homo sapiens
taggcaatttcagccttgcaaatctaaccctcttagcaaatatccggctgtgatcaatgatatttcattctggttgccctctgagaattacgcagaaaat

SEQ ID NO: 67052 - DNA, 82 bp, Homo sapiens
aatatctgtcttcggtggactccttcggcagtccacccaccgccgccgcctcccaggacatggaggagtgaatcagcttggg

SEQ ID NO: 67053 - DNA, 78 bp, Homo sapiens
gactgccgagtcactgtcctggtacaaggatgaggaggacgcagtggcctttgaggatgtggctgtgaacttcaccca

SEQ ID NO: 67054 - DNA, 75 bp, Homo sapiens
actgaagaagggaggcctcactttgaactgatgcctggaaagatgtggtcttgctatgttgcccaagctgatctt

SEQ ID NO: 67055 - DNA, 90 bp, Homo sapiens
gcctcgacctcttctgcctcttcatgggctctcaaaattagagagatgtgtaattgtccaccactgtctaatccagaccctcgattacta

SEQ ID NO: 67056 - DNA, 101 bp, Homo sapiens
gattttggaagagggagtcaccactggacctccaaggaagccacgtgcagacatctacaaccttcgatctcctgacgagcatggattccgtgaaggaacaa

SEQ ID NO: 67057 - DNA, 100 bp, Homo sapiens
aggagaaaaaccatcgaagaatgaaaccggcttgttgtcttcaattaaaaaatttattaaaggaagcacacctaagccgggaagatttccagaggattcc

SEQ ID NO: 67058 - DNA, 74 bp, Homo sapiens
ccatgtccgggaggcgcttccacctctccaccaccgaccgcgtcatcaaagaggcggatgccccaaaccttccg

SEQ ID NO: 67059 - DNA, 82 bp, Homo sapiens
cgcggctcctgtgtgctttgaaggcagatcgggagcggtgccgagaaaaatttccttactagatgacatttcatcgcaatgt

SEQ ID NO: 67060 - DNA, 98 bp, Homo sapiens
ccaagtggagtacgcgcaggaggccgtcaagaagggctcgaccgcgcatggaggagcaggacttggagcgaaggttcgagctgctgagccgcgagctg

SEQ ID NO: 67061 - DNA, 75 bp, Homo sapiens
cggatggaaatcctaatgacagtctccaaattcgcctccatctgtaccatgttaatgaaggagttcccccttctg

SEQ ID NO: 67062 - DNA, 75 bp, Homo sapiens
cgcgatgtcaccattgttcagctgggtggccaaggaagagaagttaaacttctagagaaacctaacagacaatat

SEQ ID NO: 67063 - DNA, 100 bp, Homo sapiens
ggcgggaggagcctgttcccctgaggccaagtcctgtatctgccatgtctgtggcgtccacctcaacaggctgcattcctgcctctactgtgtcttcttc

SEQ ID NO: 67064 - DNA, 101 bp, Homo sapiens
ccacctccatcactggcgtcaccatgggggctgtgctgggtgtcttctccctcgccagctgggtattgggagagttgctgctacatctttaggaaatttga

SEQ ID NO: 67065 - DNA, 100 bp, Homo sapiens
tggcctaagtaacttgggaaatacgtgtttcatgaactcagctattcagtatcagcaaacctggtatcatgaaggaccaaatagcttgaaggtggcaaga

SEQ ID NO: 67066 - DNA, 99 bp, Homo sapiens
cgcaaagctggcgtagctaagaacagggaactgcttgccaaatttttccaaagtggtggacttgctttgtgaagagacagttcatgaacaagagtcttt

SEQ ID NO: 67067 - DNA, 96 bp, Homo sapiens
cacccaggcccctgtcaagaaggtgccggtggtgcgagtcttcggagcgaccccggcagatacactgcctctaggactgggacagatagccactga

SEQ ID NO: 67068 - DNA, 80 bp, Homo sapiens
aaaacagcaggcacccaagcgggcggcaggtgatgcaggttctgaatgctgatgccattgttgtgaagctgaactcaggc

SEQ ID NO: 67069 - DNA, 90 bp, Homo sapiens
ccaagttcaagtttcctggccgccagaagatccaggcaaagaaggagcaggtggctgaggccagggcagagctgaggagggcgagggctg

SEQ ID NO: 67070 - DNA, 100 bp, Homo sapiens
catcacctgcctcagaacagactgtcacagtggaggaaggaattccgtggttgctctcgatcttgcaatttccaaggagacggatgctttccaaccccac

SEQ ID NO: 67071 - DNA, 75 bp, Homo sapiens
gtgggagtctccgcgtcccgctcgctgggagagagatgatcaagcggtgctgattcacgagagtggaagcctcca

SEQ ID NO: 67072 - DNA, 83 bp, Homo sapiens
aggaagctgagctggactctctgccacatcgttcggttcccacaacagcctgagtgcttgtgcacagagctcgaaaactagct

SEQ ID NO: 67073 - DNA, 83 bp, Homo sapiens
gatggcgatacgggagctcaaagtgtgccttctcggggattttttatcaagcagaaatgcatcgaacaacgagaatcaagatc

SEQ ID NO: 67074 - DNA, 98 bp, Homo sapiens
gatacgtgacatcaattgctgcaactgaacttgaagatgaaactatggtccaggaggcagtggaggaagtgggggttatggtgggaggagccgatact

SEQ ID NO: 67075 - DNA, 100 bp, Homo sapiens
attcagctttttgtgctgccagcaagaaatgatcagtagcaccagtgtttatgctgcagaaccttggcctgaaaatgctacattatatcagcaattgaaa

SEQ ID NO: 67076 - DNA, 101 bp, Homo sapiens
cggcgagctacgtgcagttgctggaggcaaaacccatttatggcggttggctgctcctggctccagatgggaccgactttgacaacccagtgcaccggtct

SEQ ID NO: 67077 - DNA, 101 bp, Homo sapiens
tgaaccatgtttggattgaagccgcctctgtattacttaccagcttcctgcctgacacagctcacttcaagaagtgcacaatgtcagaacgtggaattaag

SEQ ID NO: 67078 - DNA, 75 bp, Homo sapiens
cagcaagagattcatggcagaagaaagtagaagatctcttaaaccaggttatcaatactctggctgaccatcatc

SEQ ID NO: 67079 - DNA, 90 bp, Homo sapiens
gacggaaagacttacgttattaaacgtgttaaatataataacgatcaagctgcagtttcagctcaggccacatcaaatgtcaacccaacc

SEQ ID NO: 67080 - DNA, 100 bp, Homo sapiens
caggtttttctcccgctccagaaaaagtactccaaagattcaggtttactcacgtcatccagcagagaatggaaagtcaaatttcctgaattgctatgtg

SEQ ID NO: 67081 - DNA, 51 bp, Homo sapiens
agcctcctgagtatctgggactacagatggaatttcactcttgttgcccag

SEQ ID NO: 67082 - DNA, 99 bp, Homo sapiens
ttatgcagagggagatgtccatggataatgccgaactggggaggaggcaagaaatgtggggtgtgtcagaagacggtttactttgccgaagaggttcag

SEQ ID NO: 67083 - DNA, 51 bp, Homo sapiens
tggcagccagtcagtggtggaggacatcacacccctgcaggtggttctgcc

SEQ ID NO: 67084 - DNA, 51 bp, Homo sapiens
gaatagactccatctatccatatgagataactgtgtccagaggacccccag

SEQ ID NO: 67085 - DNA, 99 bp, Homo sapiens
tgatattacttggcaaagtacaacagctaccaaaatatacatctcaaattgtgggtagattcattaagaatgagagggagaaacttcaaataaagatag

SEQ ID NO: 67086 - DNA, 74 bp, Homo sapiens
taaggattccaagtaactcttatttgtgggagagtcccaatgtcttatgtctcgtctatgatgtgaccaatgaa

SEQ ID NO: 67087 - DNA, 101 bp, Homo sapiens
gcatggcaaagactggcaaaagcacaaggattctcgctgtgacagagacaacaccgagtatgagaagatggcaatgattcagatgaattcatgtaaaagga

SEQ ID NO: 67088 - DNA, 74 bp, Homo sapiens
ttgaatatagccagttccattgagctctaagcgaaagacatgaggcctcagcctgaaatgaggttgttttgagg

SEQ ID NO: 67089 - DNA, 100 bp, Homo sapiens
ctggttgagctcaaagttattttacattgaagagagaagggcacagttacctaagtatcaacgtaatcttcctcggccaggacaggcccccatcggtaat

SEQ ID NO: 67090 - DNA, 82 bp, Homo sapiens
cgtgaggagtgtgagctcatgctacagtaatctcaggggcgatataatcaatgaggtggtcctaaagttgctcaaggctgga

SEQ ID NO: 67091 - DNA, 100 bp, Homo sapiens
gtatctgaagaagaggctcagggaataaatgggaacaggccagcaaaacactcagctgcaagtccaaagccacaaggcttcagggatgacttcttagggg

SEQ ID NO: 67092 - DNA, 83 bp, Homo sapiens
cgtcatgttcttcgcgccctggaaccacgtgaatgttgagggggcgacacacaagcaggtggtggacctgattcgagcaggcg

SEQ ID NO: 67093 - DNA, 98 bp, Homo sapiens
gcaggtccacacggtgctggtggagcgctccacgctcaaaggtgaccttggagaaggtgctgggaattacagtgtctggaggcagaggacttgcctgt

SEQ ID NO: 67094 - DNA, 96 bp, Homo sapiens
cgatgaggaggaagatgattctgtatttataacagcaatgatgtagcagtatcgtttccaaatgtagtatctggctcgggatctagtactcctgtc

SEQ ID NO: 67095 - DNA, 75 bp, Homo sapiens
ttttgatgtggatgatgccaaagttttattagaaggacagaataacgggctcccagattcacaagccccaccaag

SEQ ID NO: 67096 - DNA, 100 bp, Homo sapiens
tgggtattgtgtgccaactgcggctagacagatcctatagcaatggaactcagcgatgcaaatctgcaaacactaacagaatatttaaagaaaacacttg

SEQ ID NO: 67097 - DNA, 74 bp, Homo sapiens
ttggggtgagaccctcacttcatccgtacgaattggagcaatgttggcttatacacctctggatgagaagagcc

SEQ ID NO: 67098 - DNA, 100 bp, Homo sapiens
cactgcagaggtgctggagctggcagagcattgcttttcaactagagccatgcattggaatcgcctgtgatttcacaagaacctgataacgttgattgcc

SEQ ID NO: 67099 - DNA, 90 bp, Homo sapiens
accactattaaggtgtcaaaagatggacagtacattttagcaactgttccaagatgagatgggattctccaacatggaagatgatggccc

SEQ ID NO: 67100 - DNA, 48 bp, Homo sapiens
ggctgcgagggactaagagcagacaaagtgtgggatgctgtctcagga

SEQ ID NO: 67101 - DNA, 101 bp, Homo sapiens
acgcccaacacctgtccaaacatggccagtgttcgggctgtggaaaaaccatagagtctattcagctgagtccagaagaatatgaatgtcttaagggaaaa

SEQ ID NO: 67102 - DNA, 100 bp, Homo sapiens
tggtgctcttcttcttcgagaattacaccggggtccagatatgtcacagatctaagcagcagggatttaattactgtacatcagccatttcctctccatt

SEQ ID NO: 67103 - DNA, 100 bp, Homo sapiens
gcggctcttccctgggcggacgatggacagccagggcaggaaggtggtggtgtgcgacaacggcaccgggtaccaaaccctgctgcagctgcaattcctc

SEQ ID NO: 67104 - DNA, 100 bp, Homo sapiens
ggatggggcaggatggctgcgttgacacgtcttatttaatccacatcatagatatgtggctctgacatctttgttgaagactgtacagacagatcataat

SEQ ID NO: 67105 - DNA, 83 bp, Homo sapiens
ctgtccagccacctacaggcctccaggaatggctaaaaatgtttcaggttatttggaaatagcggtgcttgcagcgcttgcgg

SEQ ID NO: 67106 - DNA, 83 bp, Homo sapiens
tcaacagaagagtgagagatggaacccgaagaagaaaggattcgttacagccagagattggccccttcccagctgcctgcctg

SEQ ID NO: 67107 - DNA, 90 bp, Homo sapiens
ccgggctcggcggcggcggccaggtccctgctgaatcacacgccgccatccgggaggcccagggaaggttattgcagctgactgcaaaag

SEQ ID NO: 67108 - DNA, 118 bp, Homo sapiens
caggcagcactggagggcccctctgcgttcctgtcatatgcagactggttcaaggagaggcgggagatttttgagcagcacctgaagagcctgaagctgacccagtccagcacctttt

SEQ ID NO: 67109 - DNA, 74 bp, Homo sapiens
ttggaccccggcttctgggacgcgtcaggatggcactggatctttaaaacgcagtggttcctttagcaaactcc

SEQ ID NO: 67110 - DNA, 86 bp, Homo sapiens
atgtgatcgtcatcacagtcaactatcgacttggagtactcggtgtcatggagaaactccagctgggcccagagattctgcagcgg

SEQ ID NO: 67111 - DNA, 98 bp, Homo sapiens
tttgcccttttagaatcagctgcaaacaaagaccccatccttggtggtccccttggaagaccgtgtggtatctgtgggagaaacagtggccctccaat

SEQ ID NO: 67112 - DNA, 75 bp, Homo sapiens
gccgctccatccagggccaccatgtctgcctcctggtgaaaaaggctttcgggtcacctccagcagctcccagtt

SEQ ID NO: 67113 - DNA, 100 bp, Homo sapiens
ccacacgtgttcaatacacctcccacctgtcctcaggcatatcaaagcaactccgatccaatatccgagaaattgagaaactttgtttgaaagtccgaaa

SEQ ID NO: 67114 - DNA, 75 bp, Homo sapiens
ctccctcagcttccgccccaaaagggatctgaaacttgcccacccttcgggatattgcaggacgctgcatcatga

SEQ ID NO: 67115 - DNA, 82 bp, Homo sapiens
ctgagcagcaacaccagccacaagtcctaccggcctctcaccgtcctgactttcagatacagtttatgtaacttgatggaag

SEQ ID NO: 67116 - DNA, 76 bp, Homo sapiens
tcatcctggcgatctacttcctctggcagactggcacagcctccaggttggcgggctcatctgcgctggggttctg

SEQ ID NO: 67117 - DNA, 100 bp, Homo sapiens
cttcaccagtgctcactaacagcagatgacgtgatgtcactgaggacaagcagatcttttgaaatatgctaagaatgagacattggagaacctgaaacaa

SEQ ID NO: 67118 - DNA, 100 bp, Homo sapiens
cttggactgcccagatgggtatgacgaaggagtacattgtcagggtgttggtggaaataacccagatgaagaaaagaatagcacagccaattctggggtc

SEQ ID NO: 67119 - DNA, 75 bp, Homo sapiens
cagccgatccagcctgcggagcctgtggggcagccaagaaatatttttcttcatggccctgatcagcaagtaaaa

SEQ ID NO: 67120 - DNA, 104 bp, Homo sapiens
tcgcgtgtctaggtgagtcgcggtgggtcctcgcttgcagttcagcgaccacggattttttatcaagcagaaatgcatcgaacaacgagaatcaagatcactga

SEQ ID NO: 67121 - DNA, 98 bp, Homo sapiens
ataatctgcaataaattcgaccatctgcaagctttcttcctggtggcagatgacatcatggattcatcccttacccgccggggacagatctgctggta

SEQ ID NO: 67122 - DNA, 82 bp, Homo sapiens
caccatgactacgctgactgccatgccggctcagttcggggaagctgcaggagttcggcgtgggtgatggcagcaagctgac

SEQ ID NO: 67123 - DNA, 100 bp, Homo sapiens
gcccggccctccttcagtttagttgaggataccacattagagccagaagactgtatgaaaacaagggagaggctgacttcgtggaatctttgctgcagct

SEQ ID NO: 67124 - DNA, 74 bp, Homo sapiens
ggaagaccagagcattgaagatcagtacaaaaattcttcaagaaatctaaggctatggagttactagtagagaa

SEQ ID NO: 67125 - DNA, 83 bp, Homo sapiens
acaaaaatcacaagattctctgccacaaaaaaatataataaggctgagtgcggagccaaggttagctccattcagaaccaaat

SEQ ID NO: 67126 - DNA, 98 bp, Homo sapiens
gcacgacaggacctgccctctagcctcgtgggtctgttccccagggcccagggccctgcagcctccagccagagtgatggagtttcgctcttgtcacc

SEQ ID NO: 67127 - DNA, 98 bp, Homo sapiens
tgcaaatgttgtggtcaagtgcctcacccctttctacaaggagggcaagtttgcttccaaggtcatctttctgtccaagggcaaggatgccatgcagt

SEQ ID NO: 67128 - DNA, 50 bp, Homo sapiens
gcagggaaacagccatcatgagctgcgcaaaccatgcaggatgatttact

SEQ ID NO: 67129 - DNA, 90 bp, Homo sapiens
cacggcttttgctatgaccaagctgggtgcctgtaatgacaccctccagcaactgatggagggtgctgacaaccagggtgcaggagaaca

SEQ ID NO: 67130 - DNA, 88 bp, Homo sapiens
ttagtgaacgtggacaaagctgttgtctcagggagcacagaagttgctgaaaagccaggagtcaaaatgactgagcgctttgactgcc

SEQ ID NO: 67131 - DNA, 100 bp, Homo sapiens
gggatccggttccttggtgtcatccagccttagcaaaccagagcttcagctttagctgcagctgcctctgttcagccacttgcaacacaatgtttccaac

SEQ ID NO: 67132 - DNA, 75 bp, Homo sapiens
tacatagctggaaaggatcttacaggtatgcccaagaggacagagaacgaatgcacagaaatattgtcagccttg

SEQ ID NO: 67133 - DNA, 97 bp, Homo sapiens
aattaaaacatttttcagggacgtagccatccagagatgtaaaaaaagattggtctgaccatgctctctggtgggaaaagaagagaacttggcttct

SEQ ID NO: 67134 - DNA, 50 bp, Homo sapiens
ggagatctcagacctcccagatggcctaaaggggagtggccccagtggcg

SEQ ID NO: 67135 - DNA, 75 bp, Homo sapiens
cttggactcagatggctttctcactgaaaactctaaaatagagctcaagcttgagaagagagaaccactaaaggg

SEQ ID NO: 67136 - DNA, 100 bp, Homo sapiens
gtggctggaagacatggccactccagtcggtgttgagcacggcgagcagtctcaggcctttagtgatgatggcaacgtgttggaccttccggagcttctc

SEQ ID NO: 67137 - DNA, 105 bp, Homo sapiens
cgacatgttcacgcacgggatccagagcgccgcgcacttcgtcatgttcttcgcgccctgccgaggtgctcggtggagtcatggcagtgccctttgtggaagact

SEQ ID NO: 67138 - DNA, 101 bp, Homo sapiens
cagctccccgctgccctgagctcggcgggctggcattcggcccggggaaaagcggagcaggtctgcgaggaacagaagtgcgaggaggaggtcttcccgct

SEQ ID NO: 67139 - DNA, 83 bp, Homo sapiens
acattgagagcaaaatctacaagatgatgcagggaggagggggatatgagactttctactcggaatatcctgagtgttgcgtg

SEQ ID NO: 67140 - DNA, 75 bp, Homo sapiens
tactctctctttctggcctggaggctatccagcgtactggctgtgatcgaacttctcaaccctcagagacttaga

SEQ ID NO: 67141 - DNA, 51 bp, Homo sapiens
cttgtacattcgcaccaatgcttcaggaaccaaccggtgagccctctccta

SEQ ID NO: 67142 - DNA, 97 bp, Homo sapiens
ttcgtccactcccttgacctcaggaccctacccagggttctagaaatccaggcaggcatctatcttgaagaaaacagaatcttggcattgtcttcct

SEQ ID NO: 67143 - DNA, 100 bp, Homo sapiens
aatgactccgattcgtgaccctcagcgccggtgcatgtcgatgttgttattgatgccttcagattgatcaatgctaatatgatggtcttaggacatgaac

SEQ ID NO: 67144 - DNA, 74 bp, Homo sapiens
ccgcacctgtgaacctcggcagtgcgtccccgggactctgttctgtgagcaccttgcagagtgaagtcaagccc

SEQ ID NO: 67145 - DNA, 100 bp, Homo sapiens
agtatttaaaagtagatgcccaatttggaggcattgatcagagaaagattttcacctttgcagagaagcgccctcacaaagccaatgctgaggagatgac

SEQ ID NO: 67146 - DNA, 75 bp, Homo sapiens
tccttctgcagtccctcgtccagccacccccaggttccacaaatcaacaagacttttcttcagggaaaagtgaag

SEQ ID NO: 67147 - DNA, 75 bp, Homo sapiens
ccgcccaggagacccctctgctgcaccacttcatgttacaccaactgcagtgtgaatggaagacccggaacctgt

SEQ ID NO: 67148 - DNA, 75 bp, Homo sapiens
tccggccgctctcctatccacagacgattctggtacaggtcaaagaggtcctctccaagctgagcacgctcgtgg

SEQ ID NO: 67149 - DNA, 82 bp, Homo sapiens
cttcgcattcagaatttgaccatcttggtgagaaacattaagacctactaccagggctaccctgagaggaatctacatgcag

SEQ ID NO: 67150 - DNA, 140 bp, Homo sapiens
aacaacagctccgggagcgtcagcgcggagaacggtatcgcgcccgccgtccccagcatcccggcggagggttcaggataagtttgaggtgctgaattacacaagcattcctatctttctcccggaagtcaccattggag

SEQ ID NO: 67151 - DNA, 95 bp, Homo sapiens
gatttttagaactccacatttgagatgacctcttggtacttcatctctctgacctcattcgcatggcattcatggctgcaactgatcatagcaac

SEQ ID NO: 67152 - DNA, 101 bp, Homo sapiens
gcgccgcgccctcggcctgcacgggtactaggttttgacaagcttgcatcatgcgtgagtataagctagtcgttcttggctcaggaggcgttggaaagtct

SEQ ID NO: 67153 - DNA, 74 bp, Homo sapiens
gctgatggactgccgtagacgaatgggtaccacagaccatgtcatcgtcctggcgtccacgaaccgagctgaca

SEQ ID NO: 67154 - DNA, 74 bp, Homo sapiens
ccatcagtgacagcaagtccattcagaaggccctttgcctaacacatgcggtcacttttgggagatggtgtggg

SEQ ID NO: 67155 - DNA, 100 bp, Homo sapiens
ggtgcacccccagtgggtgctcacagctgcccattgcctaaagaactacatcatggagaaagcagatcttgtcatagttggtgctgaaggagttgttgaa

SEQ ID NO: 67156 - DNA, 84 bp, Homo sapiens
tctgggagcttctcagccattttccacagatcagccgcggcgagtcctttgcacatgttggcaacacacgcatccgcatcggcc

SEQ ID NO: 67157 - DNA, 75 bp, Homo sapiens
ggtcgcagttcttgtttgtggatcgctgtgatcgtcacttggagttcatccgtgagggctgccttcacaagctca

SEQ ID NO: 67158 - DNA, 97 bp, Homo sapiens
acggcggcagcagcggcattcagggttcccttctggagaagagtcaccgggtttggttctgtttcccctttctgctcgacacttctgggaagcttgg

SEQ ID NO: 67159 - DNA, 100 bp, Homo sapiens
gtcaaaagagcttctctccagagtagaaaggaaagaaggtggaaagtttggttttgcagagtctatagcaaatcaaaggatcacagcatttaaaatggaa

SEQ ID NO: 67160 - DNA, 75 bp, Homo sapiens
agtcatgagcgacagcggcgagcagaactacggcgagcgggttggtttgttggaccttgaactcaatcggctgac

SEQ ID NO: 67161 - DNA, 82 bp, Homo sapiens
ccgtggaataggtgtatcaagtaatggtgcaaagcctgaacaagcgatccccctccaagaccatcccaggcctccccagaca

SEQ ID NO: 67162 - DNA, 83 bp, Homo sapiens
ggaaagataaccttctcaacgcctggaggacgccttatggagccagcatattccaggctgaaggtgatgtggccgccctcaac

SEQ ID NO: 67163 - DNA, 100 bp, Homo sapiens
tcccagggccttgaaagtccatctctgacccaaaacaatccaaatgttcttggcagctctgtcactcagctttattgctaagacactaggtgcaattatt

SEQ ID NO: 67164 - DNA, 75 bp, Homo sapiens
tgaaagtgcgattgtggaagctgctcggcttaattggcttagtgtcgacttcaataattggaaagactgggaaga

SEQ ID NO: 67165 - DNA, 88 bp, Homo sapiens
tccagaaggagtcgaccctgcacctggtcctgcgtctgagaggtggaacgtgtgatcaccattatgcagaatccacgccagtacaaga

SEQ ID NO: 67166 - DNA, 82 bp, Homo sapiens
ccagctggaagaggcggtggcggcgggtcggggcgaggcttctgggaacttggcagacgcagcttagagagactcaccagcg

SEQ ID NO: 67167 - DNA, 90 bp, Homo sapiens
cagaactcgtcagattcttgcctgcaggtcagaatggcggcagcggagcatcgtcattcttcaggattgccctgctggccctacctcaca

SEQ ID NO: 67168 - DNA, 101 bp, Homo sapiens
aagctttccagagaatgtttcagagaaagttacgtggagcgtgggcgtttcgcagactcctaaggtagttattactagtaaaagcggagagatcttgtatc

SEQ ID NO: 67169 - DNA, 73 bp, Homo sapiens
ggaactaagaaaagaagaggcctgtggacagaacaatcatgatgttgacgatgagtatgaggacgaggaccag

SEQ ID NO: 67170 - DNA, 75 bp, Homo sapiens
ctgccagttccagaccaagttccctgcggagctggagaaccgggtggaatgcaagctttaggacttcacctgaca

SEQ ID NO: 67171 - DNA, 75 bp, Homo sapiens
tcaaagatgattatccatcttcgccaccaaaatgtaaagaagcagctttgaatctgagcttcatatcgaaagaag

SEQ ID NO: 67172 - DNA, 75 bp, Homo sapiens
ggaactgctgacgcttgatgagaaggacccacggcgtctgttcgaagatttctctatgaatcatcatcaagaact

SEQ ID NO: 67173 - DNA, 75 bp, Homo sapiens
caaagattccaccgtccaagtctttgaggccacgataagtggccttgttcccagtgtaccagatgacctggatgg

SEQ ID NO: 67174 - DNA, 75 bp, Homo sapiens
cgtgtacaacccgacgaggaacgaatgggacaagatcccgtccatgaatcaggaggatacgaagcgttttcggct

SEQ ID NO: 67175 - DNA, 90 bp, Homo sapiens
ctgttggaacatgctttcttcaagatggaacaaagactgttgagtatgctccatgtagatcacatcttaaaccttactcaggcattgaga

SEQ ID NO: 67176 - DNA, 100 bp, Homo sapiens
gcacttgagccacgtgcatgaaccaaacccacttcgttcaagacaggtgtttaagcatatctccacaggaccttcttggttaaatcagggactacttctg

SEQ ID NO: 67177 - DNA, 74 bp, Homo sapiens
tggaactgacttggcaggagatcatgtccatcaccgagctgcagacttaattcagtgcacaaatgagatgaatg

SEQ ID NO: 67178 - DNA, 82 bp, Homo sapiens
ggccagggaaccctggtcaccgtctcctcagtcttctcaagtcttaggattgcagcaacacgctcggctgcccaaacccaag

SEQ ID NO: 67179 - DNA, 98 bp, Homo sapiens
tctggggcaactcagaagaacgctccctgcagctcgatctcaaccgcatgcccaagccagccaagacagccaagaagtgctccttggaccagctggat

SEQ ID NO: 67180 - DNA, 87 bp, Homo sapiens
aaaagtgatggtcagtatttctttgaaattctacaaggaacttcaggcacatggtgctgatgagatagccgcaatggctgaaaatgg

SEQ ID NO: 67181 - DNA, 100 bp, Homo sapiens
tacatcatacttggacatatcaagcattggtgcacgatgtactggcaatggacctcatcatgaccgttgctgtacttacaatgaaaacaacttggtggat

SEQ ID NO: 67182 - DNA, 98 bp, Homo sapiens
agagatccaagtgcgcgccctggcgggtccggaccaagttggtgcttcccgtgctgctgttgatgctggctttgttcccaatgacatgcaagttggac

SEQ ID NO: 67183 - DNA, 74 bp, Homo sapiens
ctggcagcatcacccccggacagcaagggcaagttaaagtcttcagagccctgtatacgtttgaacccagaact

SEQ ID NO: 67184 - DNA, 120 bp, Homo sapiens
cgagcccagaaccactgcctacaaaccaccctctcctgaccctgaagaactgtgtccagttctccaacgggaagctacagagtccaggcaacatgcgctttaccttgtatgagaacaaag

SEQ ID NO: 67185 - DNA, 102 bp, Homo sapiens
tgctgctgctcaaagctgctgccgccccttgggctaaaagagcactgcagcctgtggtgttgaggctcacagcgatgccatccagccctgccacatcagaga

SEQ ID NO: 67186 - DNA, 100 bp, Homo sapiens
caagaaactgctgtcgccatgcatgttgctgccaactctatccaaaacagctgtccctacctggctcgcaagctgacccttgccatccccatcatcgctg

SEQ ID NO: 67187 - DNA, 100 bp, Homo sapiens
cccaagaggacccctgatatgatccagcagcctcgggccccgctgactccccacctggtgaacctgaacgaagaccctctgatgtctgagtgtctgctct

SEQ ID NO: 67188 - DNA, 114 bp, Homo sapiens
caccatcgagcgggagttcgaagagttggatactcagcgtcgctggcagccgctgtacttgctttaccgatttgttacaactcaagcaagggccagcagaaattctcttttgac

SEQ ID NO: 67189 - DNA, 75 bp, Homo sapiens
ctcttcagcacagtgacaccatgtcagcaaaacttcttttggggatgataatgaagataattcaaatgatgggac

SEQ ID NO: 67190 - DNA, 83 bp, Homo sapiens
ctttgacctcttcgatgtgcgagactttggaaaggtcttgaggaccggcccagctcaggctcctggggcagcggcgaccagag

SEQ ID NO: 67191 - DNA, 90 bp, Homo sapiens
gggtggaggttcgagcgctgttctcgctccggagccgctgcacatttcgtattgtgcttctgctaagccaaaaacaggcacttgaagaac

SEQ ID NO: 67192 - DNA, 111 bp, Homo sapiens
ccgcgcgcagggcctgcagcgggagctggacggcgagcgcgagcggcgcgagaaagccaccagcttgggctccccacggagggcagcaagtgggacttggggaacccggct

SEQ ID NO: 67193 - DNA, 90 bp, Homo sapiens
ggagctgcgggaggagatccacaagcagaacatccgctcggagcagcgtcctcggatccaggagctgggggacctgtacacgcccgcccc

SEQ ID NO: 67194 - DNA, 95 bp, Homo sapiens
caaccgtggcatttgctctctgcattccagttagcaaatggggagatatctgaagagattataggatcacccatcccagaacctaggcaacgctc

SEQ ID NO: 67195 - DNA, 83 bp, Homo sapiens
gacaattaggatccagaactcccaggtcatagagctgcccaacatccagaaggtcgaagtgtacccagtagaactgctgcttg

SEQ ID NO: 67196 - DNA, 136 bp, Homo sapiens
ctcctccctcacgggcggcggcggggccgagcgcggccctgcaggcgatgtcgccgaaaccgggctgcaggcgggatgtcacatgtacttcagtttgaggataaaagcagaaaagtgaaagatgcaagcatgcaag

SEQ ID NO: 67197 - DNA, 100 bp, Homo sapiens
ccgtgtccgtgtaaagggtggtggtcacgtggcccagatttatggggttgtagaaggtgatttagctgccatagaagcatacaagtcatcaggaggagac

SEQ ID NO: 67198 - DNA, 75 bp, Homo sapiens
ggacttctagcctccagaactgtggatctcgagccagaggggaaagtatttgtggtaataacccttaccgggagt

SEQ ID NO: 67199 - DNA, 73 bp, Homo sapiens
ggagctgaaacacgacgtgaaggcaagaaactatattcagtctttgactcagatgccgaagatgaactttgcg

SEQ ID NO: 67200 - DNA, 51 bp, Homo sapiens
tccccagcagtagcctctgcgaccaggaaggatgccatcctgttaactgat

SEQ ID NO: 67201 - DNA, 100 bp, Homo sapiens
cgatgagctaagacgctgtttcagagcgtttgggtcctctgaggccccttgaccagcctagatattatcctactgaagatgtgcctcgaaagctgttgag

SEQ ID NO: 67202 - DNA, 100 bp, Homo sapiens
agtccacgctgcggatgttactcaggccatgcactgttacttaaaggaacctaagatcagtgcagtgcgtttaccacgtgaacccagcaatccagagagg

SEQ ID NO: 67203 - DNA, 100 bp, Homo sapiens
gctatccaaatgcgattagttgatgtggcctgcaagaaacctccacagctgttgagaaaaaggagaaacctcttccaagacttaatatccattctggatt

SEQ ID NO: 67204 - DNA, 100 bp, Homo sapiens
ggcacagagatgaagaaagtggctcgtcagcttgggatggctgctgctgagtcagacaaggactctggcttttcaggtctgtagttactgtggaatcaat

SEQ ID NO: 67205 - DNA, 75 bp, Homo sapiens
ctcacccctttctacaaggagggcaagtttgcttccaaggaacagagtcatccagccaatggggatgagtccccg

SEQ ID NO: 67206 - DNA, 100 bp, Homo sapiens
gttttgctagctgctaaaaccacctttgtcaccagaatgaatgaagtgcttcagatttaaataggaatggatttgtaaactcaagagcttctccaaattt

SEQ ID NO: 67207 - DNA, 100 bp, Homo sapiens
cgaggcccctatggcagatttgaaaattcacccttgtagagtcattcctgcctttgagcggactcccttttaaggtgcagcttcaagcttaggaccaccc

SEQ ID NO: 67208 - DNA, 75 bp, Homo sapiens
gtgtcttctccctcgccagctggaattcccgtactgattagtcaacagtggaaaatctgaagagatgcaagcagg

SEQ ID NO: 67209 - DNA, 100 bp, Homo sapiens
ggcgccggcgccgcggcctcttcggctgcggaccctgccattccggaggagattgggctaatggatactacagacaacagagaaaacttgttgaagagat

SEQ ID NO: 67210 - DNA, 75 bp, Homo sapiens
gaagattctggacaagtgtaatgaaattatcaactggcttgataagaatcagggaacacatgcccactttggagg

SEQ ID NO: 67211 - DNA, 95 bp, Homo sapiens
gcccatgctgcctctggcggacaccgagaagctgatccgcgagaaagacgaagagattcatgatgttgctatcaaaagttgagaaattgtcagaa

SEQ ID NO: 67212 - DNA, 98 bp, Homo sapiens
ctcggtctctgcagcctttgttacttgccccaacgagaaggtcgccaaggagatcgccaggttctacaagctgcacgagcggaggtgtgagcccattg

SEQ ID NO: 67213 - DNA, 100 bp, Homo sapiens
cctggatgtcatttggaaaaacactagagacagacggctggcaggccagagatcctcagcaggagcctatggaagagatagaaaatttgaagaaacaaca

SEQ ID NO: 67214 - DNA, 98 bp, Homo sapiens
attgaagaggttagaagccatgctaaaagagagggagagtgatctttctagcaaaacacagctgttacagggtatacagggagctaccctgtgtttct

SEQ ID NO: 67215 - DNA, 101 bp, Homo sapiens
tctttggcatcactgcagctagtaatttgccttctggattggatacagcaggccaggagcgatttcacaccatcacaacctcctactacagaggcgcaatg

SEQ ID NO: 67216 - DNA, 88 bp, Homo sapiens
gtgaaggcgccggggcctagcgctatgcctgcggcggagactgcatcaggctctcgctggagaagaagcaggcgctccctccattcca

SEQ ID NO: 67217 - DNA, 100 bp, Homo sapiens
ggagcagaggggacagaggcaccaaggacctccaagacagtgaaatacgagcggattaagttcctggtcatcgccctcaagagctccgtggaggtgtatg

SEQ ID NO: 67218 - DNA, 96 bp, Homo sapiens
cagaatcacaagcaatgttctaagtgccttgtctttgaagatgctcccaatggggtggaggcggccctggcagctgggatgcaggtggtcatggtt

SEQ ID NO: 67219 - DNA, 74 bp, Homo sapiens
ttcaagtcccaggagtcctgaccagagagcaggatcttttgccagaaatgagggcatactggcctgacgtaatt

SEQ ID NO: 67220 - DNA, 76 bp, Homo sapiens
gaaagctgcaggccttgaggataaaattgaattacttaaaatctctgttatagtgcacttgccggcggtcccaacc

SEQ ID NO: 67221 - DNA, 100 bp, Homo sapiens
actggggatggcaaagacgacatccggtgcgccgaggctgctcacaaaaaataactgaagtgaagtgatggactccgatttggagagtagtaagacgtga

SEQ ID NO: 67222 - DNA, 80 bp, Homo sapiens
ggattcgccgaggcaccgaggcactcagaggaggaagccatcttcgacaagagcacagggaaggttgttttgaagacgtt

SEQ ID NO: 67223 - DNA, 101 bp, Homo sapiens
caacctgaagactctcttgtctgtcggaggatggaactttgggtctcaaagatctctcgtggaagaggaagaccaacacatgaaattgtcccttggaggca

SEQ ID NO: 67224 - DNA, 83 bp, Homo sapiens
ctcaacgacgcggacatggtcatgagctttgtgaacctggcactccttgctcaagacccctccccagtacctacccttccagg

SEQ ID NO: 67225 - DNA, 100 bp, Homo sapiens
gccagactcgggaggaggcagtggcgctcggcgtgggtctgtgcaacaatggcttcatgcaccacgatgagggaattggggcttggagtgcaagcattgg

SEQ ID NO: 67226 - DNA, 100 bp, Homo sapiens
atgggatcaatatttcacctgatgataaccttacacctgaaatagtcagtacaccttcctctccagaagaggaggataaatcaatacttaatgcagttgt

SEQ ID NO: 67227 - DNA, 100 bp, Homo sapiens
cgcctcggtgcagggctccaccccgtcgcctcgacagatctgcgagtgaagagggacgagggaaaagaaacaaagccacagacgcaacttgagactcccg

SEQ ID NO: 67228 - DNA, 100 bp, Homo sapiens
cttgcgtcaaaatcaggactgaaatacattaatgtgggtgatttagctcgagaaggaaagaccacagcaagattctttcattcgtctcctcctagcctgg

SEQ ID NO: 67229 - DNA, 51 bp, Homo sapiens
cttggattcagacgccgattcgcccagatacagatgaatatagacctcctg

SEQ ID NO: 67230 - DNA, 130 bp, Homo sapiens
tccgtggccttagctgtgctcgcgctactctctctttctggcctggaggctatccagcaacccttaggagaaatcttgagagtggacagcaattgtgaagatcgccagagagttctgtgtttcatcaccg

SEQ ID NO: 67231 - DNA, 90 bp, Homo sapiens
gccagtgaaagaaggacagccgagtccagcagatgagaagggaacccacaatacattatatgcaccagaaatgctagccaaaatggcaga

SEQ ID NO: 67232 - DNA, 98 bp, Homo sapiens
aaggcattgaggaactcaatcaaaccagtattcttttcacacagacaatgcagatcttcgtgaagactctgactggtaagaccatcaccctcgaggtt

SEQ ID NO: 67233 - DNA, 100 bp, Homo sapiens
gggaaattggggtgccaccagacggagacagcttggactaccaggtctaccctgaactgcagatcaccaatgtggtagaagccaaccaaccagtgaccat

SEQ ID NO: 67234 - DNA, 50 bp, Homo sapiens
gtagatattaataccttacaagaggctacaaactctggcacctgcaaaaa

SEQ ID NO: 67235 - DNA, 98 bp, Homo sapiens
ttctgaaaaggcgatcttcctgtttgtggataagacagtcccacagtccaggatttaggttgagtccccaggctgtgaattcaattgcaaaacgatac

SEQ ID NO: 67236 - DNA, 82 bp, Homo sapiens
cttggtttcgggatctcggtgctgcagacggcgagacctcctgcacagggctgggttacgacccctacaaccctgagctgcc

SEQ ID NO: 67237 - DNA, 75 bp, Homo sapiens
tggagcctcagttggaagcagccgatccagcctgcggagcctgtggggcaggccgaggagtcttgtaaatgtaat

SEQ ID NO: 67238 - DNA, 100 bp, Homo sapiens
cacccggatcctggatgaggaggtgtttgaggtagttgatgtcacttggcgatattcctgcaaacatgaagaggtgattgccagaagaactaaggttaaa

SEQ ID NO: 67239 - DNA, 100 bp, Homo sapiens
gaggagaagcgcagcgacggcgtcgggagagcgcgcctagccggctcgcgaacagcgtggaagatgaactggagatggccaccgtcaggcatcggcctga

SEQ ID NO: 67240 - DNA, 98 bp, Homo sapiens
gacggggacagcgacgacgcggaggcagagaagggaacgcccggcccagccccctcggtcaaggagtgtgatgactggcgagcagatggctgccttcc

SEQ ID NO: 67241 - DNA, 100 bp, Homo sapiens
ctccgagacagggagagaaggctgaagtccctggaggaggagctggagaggaaggcgaggttgaatgacatgtggacaattggcctccaggaccgagagc

SEQ ID NO: 67242 - DNA, 100 bp, Homo sapiens
tgctgtccaagggctctgacatcaacatccgagacaacagtttatgtggccgaggcagacaagtggaattaggccttgctgcaggggacttcatttcctt

SEQ ID NO: 67243 - DNA, 83 bp, Homo sapiens
cagaagttctcgaatcattctttgtacagaaattgaaaggcttcaaagctagcaggaattgaatgatctggcacgggaccctc

SEQ ID NO: 67244 - DNA, 100 bp, Homo sapiens
tacacctttgcccaacctgggattcaaatgaaagtgaaaatgttagaagaactcgtgagccggattgatggaaaaccaattctgtgtcctcggaggacca

SEQ ID NO: 67245 - DNA, 74 bp, Homo sapiens
catggatgtaatgcctggaaagtatacaatgaaggtatgaaggttattgaaaaccgggccttaaaagatgaaga

SEQ ID NO: 67246 - DNA, 75 bp, Homo sapiens
cgagctgcacgtcctcgaacgcgaggccaacagccccggaagatgagagactgcttaggcgccaccactagtacc

SEQ ID NO: 67247 - DNA, 100 bp, Homo sapiens
catatcactggcagctctagagctcctctctggccttgcaaaggatgtggagccacccaaaatttcaagcacaaaaaacatttccattaagcaagagccc

SEQ ID NO: 67248 - DNA, 100 bp, Homo sapiens
gctattcagttgtgccttgaatgtcaaaaagctgccagcacttttaaacattacagttgtataaggtggacactcactgacctgtcacaaggttgcccca

SEQ ID NO: 67249 - DNA, 100 bp, Homo sapiens
gcctaagatgcccgacttcaactgctccctggggaagggaatgcagggttgctggggctgggcccagaagcagcagcaccagggaagaggattcgaaaac

SEQ ID NO: 67250 - DNA, 131 bp, Homo sapiens
gtgcactggaaattggcactgttttgggtagtggttctgagaggaactgtttaaccaggtgtcttcccggaccagcggtgcagtcccgccaaaggaagaggagctccgggcggcggtggaggttctgaggg

SEQ ID NO: 67251 - DNA, 100 bp, Homo sapiens
cctctgtcacctccatttcattgagatgatatattgagcccatgcgtagccttttatttgagctgggaagttatcaattccaaaccagatgaaagaccca

SEQ ID NO: 67252 - DNA, 100 bp, Homo sapiens
caggactaggccgaaaactccccaggtttcagactgaaattcaaacagtgaataaacagttcccatgtgagccattcaaatttttggagccaactctaag

SEQ ID NO: 67253 - DNA, 97 bp, Homo sapiens
gagttcaagcagtttgcacagttgtttggcaaaaatggaagcttcctcccaaacatccagacatggcagggaggtttaatagacatggataagaagt

SEQ ID NO: 67254 - DNA, 74 bp, Homo sapiens
ctttacctcgctgaccctatgaagaatagcctaacatggcagaccagagacagcgctcactgtctacctctggg

SEQ ID NO: 67255 - DNA, 74 bp, Homo sapiens
taaaatcttttgtgaaagtgtataactacaatcacctaatgcccacaagagggaaccccttacctggaatctgg

SEQ ID NO: 67256 - DNA, 74 bp, Homo sapiens
ggcggcggtaggaagccggagacagcagggtgacagtccttcagagcttacatcatgtggccgagtttatatac

SEQ ID NO: 67257 - DNA, 100 bp, Homo sapiens
gttacttcatcgtctccatcctctacctcaagtatgagccagcctcgctcaaggagcacccccggggcaccctcctgtccgatggcagcccggccctgtc

SEQ ID NO: 67258 - DNA, 100 bp, Homo sapiens
gagaaggattttatttttgtaccccttaatgaagcactccatcagcagctatgaagcccagatcaccgccctgaagcaggagcgacagcagcagcagcag

SEQ ID NO: 67259 - DNA, 90 bp, Homo sapiens
ggagaatcctcccctgccccttggctcaaaggtgtatcggatctgtcgttctggaaagaagacccttctatttagagtagaaacaaacga

SEQ ID NO: 67260 - DNA, 75 bp, Homo sapiens
cttgtcatcaacttccgatgatgaggaagaggaggaggaggatgaggaagcagctattgacctgaaaagtggttc

SEQ ID NO: 67261 - DNA, 82 bp, Homo sapiens
tctggcctccatcttcggcaccgagaaagacaagttatgggaagctggctggaagcagcggtactacaagaacaaatttgat

SEQ ID NO: 67262 - DNA, 90 bp, Homo sapiens
aaaaacatactccagaattcctaatagaacataaatctgtaggtgtgtctaaccggcagaataagaaagtagaagaagaagaaaagttgc

SEQ ID NO: 67263 - DNA, 100 bp, Homo sapiens
cttggacctaatgaggcgcctgcctccccagcaaatcgagaaaaacctcagcgacctgatcgacctgtgtcttgggacaaggtgcgcattcctggtgtgc

SEQ ID NO: 67264 - DNA, 100 bp, Homo sapiens
ggaggacatgaagcggctccacgaggaggaccagaaggagatcggtgacctccgtgcccagcagcagcaggcccatctgctaaacatcccgagctggaat

SEQ ID NO: 67265 - DNA, 100 bp, Homo sapiens
accaggcatctacatgggcagaccaactcagcattgaacctggccacatcccaggtaccgtgaacatccccttcacagacttcctgagccaggaggggct

SEQ ID NO: 67266 - DNA, 100 bp, Homo sapiens
gtgtcagctgcagtagactacaggagttatggaacagataaagtgctttaccaagttttggagggagagaataagaaaaaagaattgtttctaactcatg

SEQ ID NO: 67267 - DNA, 100 bp, Homo sapiens
ggacctgatggcctgagccgaggcagacctgtctaactacaagccagacttgggttttctcctgtagtttgaagacacactgactcctgacaaaatgcag

SEQ ID NO: 67268 - DNA, 51 bp, Homo sapiens
aaggagaatgcgctcttcaagcggatcttgcagcccatgacccatcgagaa

SEQ ID NO: 67269 - DNA, 75 bp, Homo sapiens
cagcactggactcatggaggctgagcatttattcagttattaaagagggtgtacgggagtttcttggtaaatcca

SEQ ID NO: 67270 - DNA, 80 bp, Homo sapiens
tcacacgcccactaaagcccagaagaatgtggctaccagcgaaggtctcggtgattcagaatacacctacttttgcaatg

SEQ ID NO: 67271 - DNA, 82 bp, Homo sapiens
tgcatcatccacggggtgctgcagatcctgttccagcaggaaggagcgccccacctccctgaacgtgttccccctggctgac

SEQ ID NO: 67272 - DNA, 83 bp, Homo sapiens
cagggaaccctggtcaccgtctcctcagccctcccaggcccaatacttcaaagcatcctacctctgctcaatatatattactt

SEQ ID NO: 67273 - DNA, 100 bp, Homo sapiens
ctttgatgctagcctgtccgggatcggccaggaactgggtgctggtgcctatagcatgagggtcaactgctatgatgtgtttggagcccagtcacccttt

SEQ ID NO: 67274 - DNA, 100 bp, Homo sapiens
gtttgggatcccgctgtggtacttctcgcagtccccgcgcgtggtcatccaggaatgtatcctgtcaggtataatgtcagtgaatggcaagaaagttctt

SEQ ID NO: 67275 - DNA, 90 bp, Homo sapiens
gccagcccatcctcatcgctgtggtgctgcagctgtcccagcagctgtctggcatcaacgctgccacctcaccgatcagcacctggccga

SEQ ID NO: 67276 - DNA, 98 bp, Homo sapiens
gcctgttctcgggctgtttggcgggtgggtggagccgctgactgccgagggcagagcctcgcttcggtgcccagcagcctcccgccccacgcccggat

SEQ ID NO: 67277 - DNA, 100 bp, Homo sapiens
gtggaggacatcgacatccaggcgaactcggcctatcgctaccctccgaagtccggtgatcatggagctcagcttggtctccatggggctggtggtgatg

SEQ ID NO: 67278 - DNA, 83 bp, Homo sapiens
caaagacgctaaacgtgccctactctgccccgggggagagcccgtggaccgggagcccgtggaccgggagccggtggtgtgcc

SEQ ID NO: 67279 - DNA, 75 bp, Homo sapiens
atttctttgtggtttatctaaaaaccaaagtgtatcgcattaagttcaaggagagctttgctgagatgaacaggg

SEQ ID NO: 67280 - DNA, 98 bp, Homo sapiens
cggtggatggtaataaggaagagccccaaatatgcgttattgagctggaggagagcaggagtgttcagaagcaaatgaagatcctgcagaagaagcaa

SEQ ID NO: 67281 - DNA, 75 bp, Homo sapiens
ggaggcaaggtggttttggaccagacaggcgtgtctaagatgtttcgtctgaactcactttctgctttggcagaa

SEQ ID NO: 67282 - DNA, 100 bp, Homo sapiens
agagatttgaaacctgaaaatgtcctgcttgatgcacacatgaatgcaaagatagctgattttggtaatctgtaagtcagatgctccaacaggggatgtt

SEQ ID NO: 67283 - DNA, 90 bp, Homo sapiens
ctcacgcagagtgcagtcatgggccaccgcagatgaagatctccttcaacgacaaaagcctgcagaccacatttgagtacccttccgaga

SEQ ID NO: 67284 - DNA, 75 bp, Homo sapiens
gctgcccgggccgcgaggacgaggcggcgccgccgggctgtggagacctcctgccccccgaggtctgcagtctcc

SEQ ID NO: 67285 - DNA, 75 bp, Homo sapiens
ggtctctggagacatcttcagcagttcacatggatgcagtggagccaaccacaccagcatcacaagcccccaaat

SEQ ID NO: 67286 - DNA, 100 bp, Homo sapiens
caattttgtacaaatccgaacaaccctgttacagtaatacgtggccttgctggagctcttaagttagactactacatgctcagtacggtgaattaatcca

SEQ ID NO: 67287 - DNA, 75 bp, Homo sapiens
ttatctatattttttgactgctctgctcctctatgctggacatcaaatttccagctcctggtggacccatgtgga

SEQ ID NO: 67288 - DNA, 75 bp, Homo sapiens
cttcatggtgcggctcatcttcgagaggcgaggattaaatccaccacacagggtgaaatctatctccatgacaac

SEQ ID NO: 67289 - DNA, 100 bp, Homo sapiens
cccgcaagaaagatgattccttcttggggaaactcggagggaccctggcccggaggaagaaagccaaggaggcccgctcccaaaagacttcaggcattgg

SEQ ID NO: 67290 - DNA, 98 bp, Homo sapiens
caattaatcataaatacactctgggccgagatggacgaaaaaatgtggttccttgtgttctctctgtaaatggggacctagaccgaggcatgctggcc

SEQ ID NO: 67291 - DNA, 82 bp, Homo sapiens
ttctttgtggtcttcatttgtgaatacatagggagaagcatgacactggccaacactgcgtccagcatttgggtggccctca

SEQ ID NO: 67292 - DNA, 75 bp, Homo sapiens
atggcggtgactgcctaccaccagtactcaaaaggggaggaagttgccttgtactgtgccaaatatcttcctgat

SEQ ID NO: 67293 - DNA, 98 bp, Homo sapiens
cgcgccgccctctcgtcccactttccaggtgtccctggccagtgtccttccacctgtccacaagcatggggaacatcttcgccaacctcttcaagggc

SEQ ID NO: 67294 - DNA, 100 bp, Homo sapiens
tgacgatgaagatagcggacatagctccagaaggaggggaagcatttctagtggcgtttcttacgaagagtttcaagtcttagcagtgtctgcaaaaacg

SEQ ID NO: 67295 - DNA, 51 bp, Homo sapiens
taatctggaatcagaaagcactacgctaatttgctaatccagactttacac

SEQ ID NO: 67296 - DNA, 100 bp, Homo sapiens
ctcgggcaaagaagccctgcagaacatcaacgaccaggaagctgaatatggtgggcatgatcagatagatttgtatgacgatgtcatatctccatctgca

SEQ ID NO: 67297 - DNA, 75 bp, Homo sapiens
cttctgtcaaaaacacagggatgagtatttagcatttacgtgtggcttaatcagaggtggcttatcaaacttggg

SEQ ID NO: 67298 - DNA, 88 bp, Homo sapiens
gttacattgtattcacctataggccttgtgggttcaatgtatctatgcctgcctacctcaatctgcaagggagtgtcagaaaggcccc

SEQ ID NO: 67299 - DNA, 102 bp, Homo sapiens
gaatattagaagaaattaaagcagaaagaaagctgcggcctgtatcaccagaggagattagacgtagcagattaggtccaagaatgcctcaggatggatcag

SEQ ID NO: 67300 - DNA, 75 bp, Homo sapiens
ttcccatcagtgagcattacaggcaggtcaagtgaacccaacaataaaattatatgttgtaaacctgtatggacc

SEQ ID NO: 67301 - DNA, 75 bp, Homo sapiens
ttcaagccccgcgagtcgcatctgctcaacgacgaggacctgacgcagcccaagaaaggtggtggcatctccttt

SEQ ID NO: 67302 - DNA, 100 bp, Homo sapiens
attggagaaaagcgaaggattgtggtcccgcctcacctggggtatggagaggaaggaagagggagatataatggatactttgcttggatccaagtcaaac

SEQ ID NO: 67303 - DNA, 75 bp, Homo sapiens
ctttgggtgctgctataggctcagccctcagtggatttggttcatcagattggtggaacgagaatgcctacacgc

SEQ ID NO: 67304 - DNA, 74 bp, Homo sapiens
agaatactgtgaattatgcaagcacagatttgcttttacaccaagaaaatatgcccaggttaccaacaatcctg

SEQ ID NO: 67305 - DNA, 101 bp, Homo sapiens
aggctggagaagaagtcactgaacttaggagaaagtatacagaattacagctggaatttagaaaccagtcccataactgatactgatcttgcaaagagaac

SEQ ID NO: 67306 - DNA, 50 bp, Homo sapiens
cctccctctccactcccatcttcaggttgttgacctcctgtactggagag

SEQ ID NO: 67307 - DNA, 90 bp, Homo sapiens
ccttgaacaaggcaaatatggttttggaaattgacaatggcccttcagctatgctaggtctataatgggaagtgtcacagttcggtattt

SEQ ID NO: 67308 - DNA, 80 bp, Homo sapiens
cgccgtctcttcgagttcttcgtgctgctcaagccattgagacccagagcagcagttctgaagagatagtgcccagccct

SEQ ID NO: 67309 - DNA, 90 bp, Homo sapiens
ggcagcgccggctgcccaagctcaagcacgtgaaaaagcttgtggtgaaggggggcaaaaaaaagaagcaagttctgaagttcactcttg

SEQ ID NO: 67310 - DNA, 58 bp, Homo sapiens
cacgcagaacatcgatgggcttgagagagatactcatttcaaagaacttccaactctt

SEQ ID NO: 67311 - DNA, 88 bp, Homo sapiens
cagctcccctttctcgcccagcgcccccaggccgctcccggggctcacggtatgatgccgccaccacctatgggcatgatgccgccgc

SEQ ID NO: 67312 - DNA, 96 bp, Homo sapiens
gacgccttcccagaggaatacgtgcccactgtgtttgaccactatgcagacaagttggatggcttgaggactggtactaaaaggaaacgtgactgg

SEQ ID NO: 67313 - DNA, 100 bp, Homo sapiens
ctgtgctcaccatgaccacccagagctccggctctcgagcatctctgcccaagggttcccagcaccatgagggcctggatcttctttctcctttgcctgg

SEQ ID NO: 67314 - DNA, 82 bp, Homo sapiens
agcggaagcggcgcggcggtcggagaagtggcctaaaacttcggcgttggatcagacctattgtgaccgcctggtgcaggac

SEQ ID NO: 67315 - DNA, 90 bp, Homo sapiens
accgtcccagccgaccttgaggctgccgccgcgagtctgccatcgtccaaggaggtggcagaattactgggagatgtactcaaagatcgg

SEQ ID NO: 67316 - DNA, 76 bp, Homo sapiens
actacagttcatcaacatcaactacgtccctctgaagatttgatgcagtttgatgataaaggaaacaagaccaata

SEQ ID NO: 67317 - DNA, 83 bp, Homo sapiens
gtccatccgcccactcagctatctgtttatcaaggtgctggagaatctggtaaaagcaccattgtgaagcagatgaggatcct

SEQ ID NO: 67318 - DNA, 90 bp, Homo sapiens
gagggatcctgaaccgcgcggccgaaccctccggtgagaagccctaccactgcaactgggacggctgcggctggaagtttgcgcgctcag

SEQ ID NO: 67319 - DNA, 76 bp, Homo sapiens
caaaggagtatctccagcctttcaaggacaaactagaggagttcttccaaaaagctctactgagatgaagaaagaa

SEQ ID NO: 67320 - DNA, 90 bp, Homo sapiens
cggacccaaccgctgtgcttgtgtttatgggttcactggtccacagtgtgaaagagagcagcccgacggccatggaggctgaagagacga

SEQ ID NO: 67321 - DNA, 75 bp, Homo sapiens
gcaggggagagtgatacagattcatttgaagaagatcctgaaatttccttagctacccaacatgagtgaagtttc

SEQ ID NO: 67322 - DNA, 100 bp, Homo sapiens
gcagacatctacaaccttcgatctcctgacgagtgattaaaaattctggccatctcccaagagacagaatagctgaggatttcgtttgggctcagtggga

SEQ ID NO: 67323 - DNA, 100 bp, Homo sapiens
accaccttcgtctgcacagtcaccaatgccgtgggcatgggccgcgctgagcaggtcatctttgtccgaggaatcctcgtagcccactacctccagagca

SEQ ID NO: 67324 - DNA, 74 bp, Homo sapiens
ttccagatgaagattgatgatgaagccttggacaagattcgctatgagagcctgacagacccttcgaagttgga

SEQ ID NO: 67325 - DNA, 75 bp, Homo sapiens
agatcgggagcgcaaggtcgccctcaaggccatgatcaaaacatcaagaaggctgagatggataggaagacgctg

SEQ ID NO: 67326 - DNA, 83 bp, Homo sapiens
cacgcgagattataagaagcttgggttcattgcagaagtcaattcatctggaaagactatctctgagtcagacttaaaccact

SEQ ID NO: 67327 - DNA, 75 bp, Homo sapiens
tgtgacccccgatcaggtttagttgcttacccagcaggctgcgcatggagtacctctccctgatgcatgctatag

SEQ ID NO: 67328 - DNA, 100 bp, Homo sapiens
tgcagaccaggaacaagagagaaagagtggatttcagcctgcacggatggtcttgaaacacaaatggtttttggatcaccccttctgtgtcattctctga

SEQ ID NO: 67329 - DNA, 75 bp, Homo sapiens
cagagatgtcatgttggagaactacagcaacttggtctcactggaggaatttgcccagagtgccatacgctatgg

SEQ ID NO: 67330 - DNA, 100 bp, Homo sapiens
tcagttttatggtgcactcttcagagagaaacctgtttggaggttatggatgataaacccaatcctgaagccctaagtgacagttcagagcgtcttttct

SEQ ID NO: 67331 - DNA, 100 bp, Homo sapiens
cggaggatgcggcgcggggctgcgctcgctacgtccgctgctgctgcccggctcgggcctgagcgccgagcagacatatgtagagtgtgtcggtcagaag

SEQ ID NO: 67332 - DNA, 98 bp, Homo sapiens
gaaggaagtacctttttcattttggcaaaaggaaaggggaacgcccttttgcttgtgactggcagggctgcgacaagaagttcgcccgctccgacgag

SEQ ID NO: 67333 - DNA, 75 bp, Homo sapiens
aacttatgctgtagacatttctttgtggtttatctaaaaaccaaaggtactattctgccctaaaaactatggaac

SEQ ID NO: 67334 - DNA, 97 bp, Homo sapiens
ggagcagcgctggggtttcggcctggaggagttgtacggcctggcactgcgcttcttcaaaggaccttttccagtggtgagtttaatggtgggatct

SEQ ID NO: 67335 - DNA, 83 bp, Homo sapiens
atggtcccggctgccggtcgacgaccgccccgcgtcatgcggctcctcggctggtggtgtcagctgtgatgcatgtttaaaag

SEQ ID NO: 67336 - DNA, 83 bp, Homo sapiens
cttttgctctccggaatttaagcacgggggcagcacattcagaaggaggaatgcaggctcaggttggaatgccaggaagtgga

SEQ ID NO: 67337 - DNA, 96 bp, Homo sapiens
gtggtgggggcttcctcggtggcgggcatggaggcttcgcgctgccggctcagtcccagcggcgacaggcagacctcaacaccaacatcgaggatg

SEQ ID NO: 67338 - DNA, 50 bp, Homo sapiens
catgactgagtcctccatgaagagtgtcttcctgcccccgtccccagcag

SEQ ID NO: 67339 - DNA, 75 bp, Homo sapiens
cgttcgtttccagcctcaggaatttatggtcgcctttttgaatgagaacctaaaggcagacccagaagagctttt

SEQ ID NO: 67340 - DNA, 82 bp, Homo sapiens
cgttgaattccgggaagtgggagcttcaggctcgctccgtgcggggaaatcgtggaacacatggtccagcactttaaaacac

SEQ ID NO: 67341 - DNA, 90 bp, Homo sapiens
gctctggcttcctccaccaaaggacaaactaagagaaacttggcgaaaggcaaagacttaattcagtgcacaaatgagatgaatgtgaac

SEQ ID NO: 67342 - DNA, 90 bp, Homo sapiens
tggtggtcaagatagaattaggcctctctggaagcattacttccagaatacccaggatatgatggatgatatctgtcaggagcaatttct

SEQ ID NO: 67343 - DNA, 90 bp, Homo sapiens
aatgtttgacgacactgatggtttgattctcagcgctgattttgagatgatgggcttgggaaacgggcgtcgcagcatgaagtcgccgcc

SEQ ID NO: 67344 - DNA, 101 bp, Homo sapiens
cctgcaggtattgggagatccacagctaagacgccaggacccactggaagcctagaaatggctgcagcgctggtggaggaggaaactcgcagataccgacc

SEQ ID NO: 67345 - DNA, 100 bp, Homo sapiens
ctggaggtgggcaaggtgatccagcaaggtcggcagagcaaggggcttacgcagaaggacctggccacggatgccggctccaggagcagcagtggaggtc

SEQ ID NO: 67346 - DNA, 101 bp, Homo sapiens
gttgccgaacgtggtggagctgtggcaggcagaagaaggggaactcctgctgcccactcagacactcttgcactcctgtaatgagcctggcactgtgatga

SEQ ID NO: 67347 - DNA, 97 bp, Homo sapiens
gctatattaaactgaggacggggaagactcggacgagaaaacagattcttgagtatcagaacaccaccttctttggtggaacctgtatatccatgat

SEQ ID NO: 67348 - DNA, 75 bp, Homo sapiens
ccaagggcctgtaatcccgtccaacaggtgaacctgggcccaaacaaaatggtggttgacctgacagatcccaac

SEQ ID NO: 67349 - DNA, 98 bp, Homo sapiens
ctcggaccccggcgccgcggcgacctcggaggaaccggctccttgcgtcccgcctccctgggagctccgcacgggttctaaatggcttctaagaagtt

SEQ ID NO: 67350 - DNA, 80 bp, Homo sapiens
tgtcttcggtggactccttcggcagtccacccaccgccgccgcctcccaggtgaaatgacaatggatgctctgttggctc

SEQ ID NO: 67351 - DNA, 100 bp, Homo sapiens
tggtggccatcaagaaaatgtcttatagtggaaagcagtctactgaggtgcaggtgatggtcctaccagtgtgtctgttgaggtcacccgtcctaaagtg

SEQ ID NO: 67352 - DNA, 74 bp, Homo sapiens
ctcaggagcatgacaagcgagaccctgtggtggcttattactatcatggagctttgtggtgcaacaagacttgg

SEQ ID NO: 67353 - DNA, 98 bp, Homo sapiens
tgggatttattattttgaagtaaaaattgtcagtaagggaagagatggaaataaacggtgactggcaaagagctgatgcagtctggaataaaatccaa

SEQ ID NO: 67354 - DNA, 99 bp, Homo sapiens
atcgggcagaaagataatcacggcaacctgtgaaaagctgaacaggtccaattctgaacttgaggatgaaatactctgtctagaaaaagagttaaaaga

SEQ ID NO: 67355 - DNA, 100 bp, Homo sapiens
gggaggccggccggtgccagcacctttcggcttctgagacggcggcagcagcggcattcagatgcatcatcccattcagatgaaacctgcagatagtgaa

SEQ ID NO: 67356 - DNA, 50 bp, Homo sapiens
gtctgcaaagtgtccccggcaagaagatccctgtttattgggaaggatat

SEQ ID NO: 67357 - DNA, 100 bp, Homo sapiens
tttgaccctgacaccaacatcgtctacctctgtggcaagggtgctttcttctgcgacctggtactcatctacctcatcaaaaagagagagttttaccgtg

SEQ ID NO: 67358 - DNA, 96 bp, Homo sapiens
gttggtggcgacggccgagtcaggtcgtccttggtggaaggaaccatgaactggcatctccccctcttcctcttggcctctgtgacgctgccttcc

SEQ ID NO: 67359 - DNA, 76 bp, Homo sapiens
ggttaatgacatagtatctttaaactacacaaaagtggaacagctttgttcagatggagatggacacatggatcat

SEQ ID NO: 67360 - DNA, 80 bp, Homo sapiens
accagttcctcggggtgcagcaggtgcgagaagatgtactaaattcattgaataacaactttcttcaaacgctaaatcaa

SEQ ID NO: 67361 - DNA, 100 bp, Homo sapiens
aagcagcagctctcgctccagaagcttcactttgttctgtggctcctgatggatctgagaagatggacgtggaggatgaaaatctgtctgattattttga

SEQ ID NO: 67362 - DNA, 127 bp, Homo sapiens
cctgcgtggaagcttccctgaggaagagctgataacaccttaaacctcctctggattcaagttaaaggtcttgggcgtctttggtactggcttttttaggggtctgcctggggattacccttgctgt

SEQ ID NO: 67363 - DNA, 98 bp, Homo sapiens
caggatttggtttcagcatgtccttctctgaatgatgaatacttttactactgtgacaacattaacgagggtctcgctgttggagttggatttggggc

SEQ ID NO: 67364 - DNA, 89 bp, Homo sapiens
tcagaacctcaagcttttcaggcatcctcatataattaaactcctggcatgggagggcaggattgtggtggtgggatttgctggaggaa

SEQ ID NO: 67365 - DNA, 82 bp, Homo sapiens
aaatccaagaagaagcaagcaggccggcctaaaggatcaaaagctgcggttggatttctcacgatgtccagtgttatctcca

SEQ ID NO: 67366 - DNA, 75 bp, Homo sapiens
agcacctggaattccagggatgaatgggcaaaaggggctatctgatgggttagagtgcctttgagaagaaatcag

SEQ ID NO: 67367 - DNA, 100 bp, Homo sapiens
tgctcctgaacttcctgcgctcgcactggtgtttgaggcagagcagtttggatgcccacagcgtgctcagaggatgaacacagccttcacgccattccta

SEQ ID NO: 67368 - DNA, 75 bp, Homo sapiens
ctctcgccacagcggcctcggcctccccttggattcagacgccgattcgcccagatggaatcgccacttatatat

SEQ ID NO: 67369 - DNA, 83 bp, Homo sapiens
cctcgcttgcagttcagcgaccacgttaagggaagaaagtcggaggctggctttggctgcgaaaagagaaaaaagaaaagaga

SEQ ID NO: 67370 - DNA, 50 bp, Homo sapiens
catacaaaggactcaagatcagactgaatttatcatggcatccagcattg

SEQ ID NO: 67371 - DNA, 75 bp, Homo sapiens
agcgggtggtcactgtgattgctcatgagctggcccaccaggtaatagcctgcagctggtgttttgagaagccct

SEQ ID NO: 67372 - DNA, 112 bp, Homo sapiens
tgatacaatcttgcgtgtcctgggctctaatgtcagagaatttctacagatgcacaccggctgcaccatgtcagcagcctggcctggctggacgagcacacgctggtcacga

SEQ ID NO: 67373 - DNA, 147 bp, Homo sapiens
cggcattacctgtacccattcaccggcggctaccggcggcggcgcgcagcgtgtcaggcggagagacccgccgccagccaagaccgaggataggtgtggccattggcgaccagatcctggacctcagcatcatcaagcacctcttta

SEQ ID NO: 67374 - DNA, 75 bp, Homo sapiens
atgcagaaacgtaaagaaatgcaattgaggtatctagaagagcagaagacagagaatggaaaagataaggaacag

SEQ ID NO: 67375 - DNA, 75 bp, Homo sapiens
aagtgatccacccaccgtggcctcccaaagtgctgagattaaagcaacctttcccctggatctcacaaaaactcg

SEQ ID NO: 67376 - DNA, 100 bp, Homo sapiens
ggcagggagcctggtggggtggcggagggggagactgtgccgtggagggcctcgccatgtcctgctgcccgatgccttcaattaagttgcagagttctga

SEQ ID NO: 67377 - DNA, 83 bp, Homo sapiens
cttggcccttgttcccccaaatgtctgactctgactctcggactgagaaacgcaaggtccagggtggcgcgtggctgctgagc

SEQ ID NO: 67378 - DNA, 98 bp, Homo sapiens
ctagctattgccttattttttctcatggatgttcttcttcgagtatttgtagaagggtatatggagctgccattcagttttatgaaccttactctcgg

SEQ ID NO: 67379 - DNA, 75 bp, Homo sapiens
gccagctaggagcgctctgtggtgcctggggctgaacgcggctttctggttttatgctgggggctcagagagaag

SEQ ID NO: 67380 - DNA, 80 bp, Homo sapiens
gaccatgaagaacaaagacacaggtcactcaaataggcaggaaaatcaggaaaatgtttccaacctggtgattgaggaca

SEQ ID NO: 67381 - DNA, 82 bp, Homo sapiens
ggacgacgccggcaggccccagactgcctacctgcagtgcaagagcccaaatcttgtgacaaaactcacacatgcccaccgt

SEQ ID NO: 67382 - DNA, 100 bp, Homo sapiens
aaagactggatggtatgggctgtctggagtttgatgaggagcgagcccaggaaattgcagcttatttaataacatttgagaaacacgaagaatggctaac

SEQ ID NO: 67383 - DNA, 100 bp, Homo sapiens
cagcaaaaaagaaaaagaaactaaaaaatggcagctctcagaatgggaagaatgagagaagtcatatgcccggcacaggcaattcatgatgttaaagcca

SEQ ID NO: 67384 - DNA, 74 bp, Homo sapiens
tgaaaaataccacgacaaaaccaccctagggaaagtgcagtgttgcccttctgaatgagacagaatcagtattg

SEQ ID NO: 67385 - DNA, 100 bp, Homo sapiens
gttgggtttcttttactggcaaatagtacttcaagagcacagtcttatgtaaggccattgaacacccagttcgaaccaatcagattccacgtcagattcc

SEQ ID NO: 67386 - DNA, 98 bp, Homo sapiens
acatggctttcaccggcggcctggacccccccatgggagacgctgagtacttggcggccttcagagtttatgtggccgaggcagacaagtggaattag

SEQ ID NO: 67387 - DNA, 106 bp, Homo sapiens
cagctgattgtaatgaatttgcccaatgttttgatgattggcagagacccactgtctggagccttcacgtaaatgggtccagtcatgcctcccagtaagaagccag

SEQ ID NO: 67388 - DNA, 100 bp, Homo sapiens
gatgaccaagtatcaggctaacgcatgtgagcagcagtgacagagtgggcaagccttaccgtggcgtaaagcctgttttcagcattggggatgaagaaga

SEQ ID NO: 67389 - DNA, 100 bp, Homo sapiens
ttcgtcgtggcaacgttgctggtgacagcaaaaatgacccaccaatggaagcagctggcttcactgctcaggtgggccgtaccttgtctaaggtccaaca

SEQ ID NO: 67390 - DNA, 98 bp, Homo sapiens
actgggcacctgctacgtgaccagcattgccgtagaccctgggaagcagcagtgaacagtgcacaaggaccactatgagaacctctactgcgtggtct

SEQ ID NO: 67391 - DNA, 90 bp, Homo sapiens
tggtggtttgcagatcactgagggacttgcacttaggaatctgttacagtgagcacagaagcagacctgtgggctcatagtcttcacccc

SEQ ID NO: 67392 - DNA, 50 bp, Homo sapiens
cggctctccagcaagaaggtggcaaggcacttgaaaataactatgaagtt

SEQ ID NO: 67393 - DNA, 100 bp, Homo sapiens
ggagagctgcaagccggtgcagcagccttcagcttttggcagcatgaaagttagcagtggtcctgccatcatggctgtcctctgcaaaggtctcctcgct

SEQ ID NO: 67394 - DNA, 75 bp, Homo sapiens
ccgatttaaagctgagctgcgaggaaaatggcggcgggaggttaaataggattgcgaatcaggtggccattcagc

SEQ ID NO: 67395 - DNA, 157 bp, Homo sapiens
ggcgcagcgcctgtgtcgcctctccgtgtggatctggcagtcggtcatccacctgctgcagatggggcaggtgtggagggcgatgccagtccctccactccagaggagaacgaaaccacgacaaccagcgccttcaccatccaggagtactttgcca

SEQ ID NO: 67396 - DNA, 80 bp, Homo sapiens
atttagaggccgctacagaagtccttagtctcgatctagaagacggtcacgaagtaggagtcgcaggagcagccgcagta

SEQ ID NO: 67397 - DNA, 74 bp, Homo sapiens
ctggggccagggaaccctggtcaccgtctcctcagctgctgtattaaagtatgaaaataatgtgatgaatattc

SEQ ID NO: 67398 - DNA, 83 bp, Homo sapiens
aagcagaaccaactcggatattgttgagaatatcctccgaatcctaaatctagagctccaaggatgctggtcattaagaaagg

SEQ ID NO: 67399 - DNA, 98 bp, Homo sapiens
ttcgatctccgccctggggtcattgtcaggcagaaatccacaatggaggggaactctgtgactttatggaaaatggagaaatcttcagtgaacactca

SEQ ID NO: 67400 - DNA, 75 bp, Homo sapiens
gaagaggtggatccccggatccagacctgcctagagctggaacgttacctccagagcgagccctgctatgtttca

SEQ ID NO: 67401 - DNA, 75 bp, Homo sapiens
ggagcttctcagaagacagagggttttcttttgaggtgattcctgtctctctgtcttccaaatacctggaaaggc

SEQ ID NO: 67402 - DNA, 57 bp, Homo sapiens
ccgcagacagaagtggggagaagcggaggttcttcgtatggtgcgctccgctggatc

SEQ ID NO: 67403 - DNA, 100 bp, Homo sapiens
gccatggcagcggcgcccctgaaagtgtgcatcgtgggctcggggaactggtacctcaataataatgagttgacagcggtaccatccctgggcgctgctt

SEQ ID NO: 67404 - DNA, 80 bp, Homo sapiens
ttcccgagaccgtcctggcgcgatgcgtcaagtacactgaaattcatcctgagatgagtgaggagctggtttcacctgag

SEQ ID NO: 67405 - DNA, 101 bp, Homo sapiens
tccaaaagttctgtatgaaatctctgtatttggcattcaagagcccgaaagtgaggctgttgcttaccgtcagatgtctctgttgctccgccgaccccctg

SEQ ID NO: 67406 - DNA, 75 bp, Homo sapiens
gaagatccggcgcggggcacaggatccggagctggagcccccaggtgctggagaatctggtaaaagcaccattgt

SEQ ID NO: 67407 - DNA, 75 bp, Homo sapiens
agagcctgggaacttggtttaatgaacacacacattccagagaactgtgtgactgtcatgtggcatgggtctctg

SEQ ID NO: 67408 - DNA, 93 bp, Homo sapiens
tccgagtcaactggcccggcaccgagttctctctggaactgtggctgcaccatctgtcttcatcttcccgccatctgatgagcagttgaaatc

SEQ ID NO: 67409 - DNA, 100 bp, Homo sapiens
aaactggagccaccatcaagctgtctaagtccaaagatttttacccaggaagggaaaaggccgaggcatcagcgtgtgaagaccgcaaagacgatcccga

SEQ ID NO: 67410 - DNA, 99 bp, Homo sapiens
ccccaccatgtcagacgcagccgtagacaccagctccgaaatcaccaccaagggcgaccattgacgaggtggagacggacgtggtggagattgaggcca

SEQ ID NO: 67411 - DNA, 83 bp, Homo sapiens
gcctgacgcatctgtctgaggagcggtcagtgacgcgatggagcgggcaaggtttggtgcacctcgatttggaggaagtaggg

SEQ ID NO: 67412 - DNA, 100 bp, Homo sapiens
cggcggttcctctgcggtgtggtggaagaacttgatggagagtttggattcattgctttgtgcagaaggttctgaaagtctgaagagtttatgtctgaaa

SEQ ID NO: 67413 - DNA, 110 bp, Homo sapiens
ctgagagcttgattccagggcctgccctgctcctggtggcacccagtggcctgtactactgccccttggatctcccttcgtggagacgacaccggggtcctcctgcccac

SEQ ID NO: 67414 - DNA, 51 bp, Homo sapiens
ccacagagctgctgcggcagttagcgaactaacctaccccaactctgccct

SEQ ID NO: 67415 - DNA, 98 bp, Homo sapiens
cgataacgcgcttttgctcctcctgaagtgtctttggtccaacgttgttccagagactttagaagacagctttccatcgacactaggccctttagacc

SEQ ID NO: 67416 - DNA, 75 bp, Homo sapiens
ctcagcccgccacatcaccctgacctgcttacgcccagattcatgatgttgctatcaaaagttgagaaattgtca

SEQ ID NO: 67417 - DNA, 100 bp, Homo sapiens
ccagctacgcctcggggccaagttatctgaaaaactgcaagacacagagaatgaagccatgtccaagattgtggaactggaaaagcaactcatgcagagg

SEQ ID NO: 67418 - DNA, 100 bp, Homo sapiens
tgagagctgggaagaggcggcagacagcgggcaaatccagtttgctgatgacatgcaggagttcaccaaattccccaccaaaactggccgaagatctttg

SEQ ID NO: 67419 - DNA, 80 bp, Homo sapiens
cgccgaggcaccgaggcactcagaggagacgagccaaactcaggctgtaccttgagcagctcaagcaactggtgcccctg

SEQ ID NO: 67420 - DNA, 88 bp, Homo sapiens
gtgggacattcattgcggaataacatcggaggagaagagccagagcccagaggtggagcagttagggagggttgtggaactggacagt

SEQ ID NO: 67421 - DNA, 83 bp, Homo sapiens
ctgagattgagctttttgtaaaggtgctttggagcttgctgatgtgtctaatgaactgccagggctgaagtggatgcctggaa

SEQ ID NO: 67422 - DNA, 100 bp, Homo sapiens
gtgacttcagagacactgccaagcagccttagccctagtgtagagatgcctctggatattttaaggaatgagttgtccaatagtatcctgtcgttacaac

SEQ ID NO: 67423 - DNA, 100 bp, Homo sapiens
aagaatattattagcacaagagcaccatactttgaggggcaggcacatcatggacaagtttcatacatttctccgccaattcaccttgactctgagctag

SEQ ID NO: 67424 - DNA, 75 bp, Homo sapiens
aaatcagccctggacctggcagatccttcagcaaaagctgtccttacaggtgctggagaatctggtaaaagcacc

SEQ ID NO: 67425 - DNA, 90 bp, Homo sapiens
gaggaaactgacggagacgcagatgtggacttgaaagaagctgcagcggaggaaggcgagatttcctcctctgatgctcctcttcagcct

SEQ ID NO: 67426 - DNA, 98 bp, Homo sapiens
cgccgctgcgcccgacgctccctgtctgggaccttctccctgcctggacccctactattgcaacaaggtcagaactgtggaggcttagtccagggtcc

SEQ ID NO: 67427 - DNA, 75 bp, Homo sapiens
cagatctctgcagttacaggaacatcgtctgcttcatggaactgtggctgcaccatctgtcttcatcttcccgcc

SEQ ID NO: 67428 - DNA, 100 bp, Homo sapiens
acacctggatccaggataacggaggctgggctgacttcaaaatttctgaggagtgcatcgcacagtggaagcaaaccaacttcatgaccaagctgggctc

SEQ ID NO: 67429 - DNA, 83 bp, Homo sapiens
ctgacttcaagaatgaagccgtggaccctcacgcatttgagacggagttggcttatctctcaggaaatagacttacagtggat

SEQ ID NO: 67430 - DNA, 80 bp, Homo sapiens
gagtacccccgggggaagaggaagaagggctccaccatggagcgctggtctcggcgcggaagatggccggcggcgtggac

SEQ ID NO: 67431 - DNA, 82 bp, Homo sapiens
accgacctcgacgtcttgcctgtgtcccacttgttcgcggcctatagctggagcagatccgcagggacatccgagacttccg

SEQ ID NO: 67432 - DNA, 98 bp, Homo sapiens
tggaggtctcctacctattaaaaggaccatacgagtcctagatgtcaataaccagtccttcagagaacaagagtgcacgatctgattttctggagaga

SEQ ID NO: 67433 - DNA, 89 bp, Homo sapiens
tccacagatgtacctgaaaagtcgtcactctttcaccaagctctttcgacgtgtagcagcagctttgccgggaatggaaagcacacagg

SEQ ID NO: 67434 - DNA, 83 bp, Homo sapiens
gagctctggacaagctggaatgcatccaagagaatccctcaacatgctgactcagacgatgccctgctgaagatgaccatcag

SEQ ID NO: 67435 - DNA, 82 bp, Homo sapiens
ggagtgcgtgggggaccggctgttggcgggtgtccctggccagtgtccttccacctgtccacaagcatggggaacatcttcg

SEQ ID NO: 67436 - DNA, 144 bp, Homo sapiens
ggcccgagctgccagatcttgctcctgagccccgctacgcacacatcccggtcaggatcaaggagcaagtagtggggtacaaaggacctccagaccagagccagccagcagcaaaaagagcatggagctgaggagtacagcagc

SEQ ID NO: 67437 - DNA, 51 bp, Homo sapiens
gaagaaattgttcagttcttctcaggctgcgctgaacatcttaaagttgct

SEQ ID NO: 67438 - DNA, 100 bp, Homo sapiens
tgtggccgctgcggcctcagctccgactgggtcaggttgcggagactccaggccgcttccagggcggtgttggagcgggccggagagaagtagagtgggc

SEQ ID NO: 67439 - DNA, 100 bp, Homo sapiens
ctgtgcttatattcgatccttggcacccagcctcctggacagaaataaaactgggaggttgctcaaagaagtacagtctttaaaacaaccatacctgaag

SEQ ID NO: 67440 - DNA, 98 bp, Homo sapiens
tttggatgattctgccaaaaagaatgttcgggacccaacaggagcctccattgccctctttactgccaggttgcatcatccccacaagtcagtccaac

SEQ ID NO: 67441 - DNA, 100 bp, Homo sapiens
accgaagggaagacttccagtagctccaaggaggttaaggtattgcagttggacacatatattttttcttggaagatgtatttcccaatcaacctggtgg

SEQ ID NO: 67442 - DNA, 82 bp, Homo sapiens
attctcatgcattgattcatagccgtttccctggggagatggtaaccatactctattccataaccctcatgtgaatccactt

SEQ ID NO: 67443 - DNA, 90 bp, Homo sapiens
ggcaagacaagggtccatatcgcggcatccggctcccgcccgtcttcaggttcagccgtctgtatatctccccagatacctgaaactgac

SEQ ID NO: 67444 - DNA, 106 bp, Homo sapiens
cggcgtgctactgtgcgctcgatccagcaccatggggaagcgggacaatcgggtgacaatgcagatcttcgtgaagactctgactggtaagaccatcaccctcgag

SEQ ID NO: 67445 - DNA, 100 bp, Homo sapiens
gtcccttgtgggaaacaatccctcgcctccggaggcggcgaggagcggcggcgtcagcctcgagtttgaccagcagcaggggtcggtgtgtccctctgaa

SEQ ID NO: 67446 - DNA, 100 bp, Homo sapiens
ggccatcgtgggctacaaggactcgccctccgtctgggccgccgtccccgggaaaacgttcgtcaacatcacggtcagcccaaggccaaccccactgtca

SEQ ID NO: 67447 - DNA, 88 bp, Homo sapiens
gcaggggctgctgcgagctcgccgggcgccctttagacaaacagccatggagtgattttgctgttctgaatgggggaaagattaatag

SEQ ID NO: 67448 - DNA, 74 bp, Homo sapiens
ctggcttcccagtgcatggcgctcaagtctgtgcgccgacagtcattttgtttactcattcagccctgttgcag

SEQ ID NO: 67449 - DNA, 82 bp, Homo sapiens
gttgcacatccccacatcaatgcactgccaatgatcttggcatatacagaagggctgcatggaaaatggctgttcacagaga

SEQ ID NO: 67450 - DNA, 107 bp, Homo sapiens
caggtccgacccgcgaacccctctgggatccccgccgctctgtctacaacccgaggtttggtgcacctcgatttggaggaagtagggcagggcccttatctggaaag

SEQ ID NO: 67451 - DNA, 83 bp, Homo sapiens
tgaaggagttccaccaggccgggaagcccatcgggccctgtttgtgctcttcgtcctggcctacatccacatcgtcttctccc

SEQ ID NO: 67452 - DNA, 83 bp, Homo sapiens
gggtgacacgtccctgaggatatttaagtgggttcctgtgacagacagcaaggagtttggaaattttagcattcaggtgccag

SEQ ID NO: 67453 - DNA, 100 bp, Homo sapiens
gctgggcgcgggcaacggcggggtggtcaccaaagtccagcacagaccctcgggcctcatcatggccaggaaggaactcgctttgaacgcttgcttatga

SEQ ID NO: 67454 - DNA, 100 bp, Homo sapiens
gacaccttcacccagatgacccatgccctgcaggagctggctgctgcccagggtctcggtccagctcgacttccagctcaggctccagcaccagcactgg

SEQ ID NO: 67455 - DNA, 100 bp, Homo sapiens
aggctgtattcctgaaaatcatggtgaggacatgaggaaaatgtccttccagcgctgcgcccggacagacaagaaacgcctagctcaatctgtccgaaac

SEQ ID NO: 67456 - DNA, 83 bp, Homo sapiens
cccacactggccgtcccggccatctcgctgcccgacgatgtccgcaggcgacaatgcagatcttcgtgaagactctgactggt

SEQ ID NO: 67457 - DNA, 82 bp, Homo sapiens
gcgggccctgctggaccagctcatgggcacggctcgggacgcacagacgcagtcttcagcaaggaagtgctgggaacgccct

SEQ ID NO: 67458 - DNA, 90 bp, Homo sapiens
agtcaaagagcagagcatcctggaactgggatctctcctggcaaagactggacaagctgcagaaatgcactcggtgatggaaagagagcc

SEQ ID NO: 67459 - DNA, 99 bp, Homo sapiens
ctgcagaggggtccatacggcgttgttctgggaaaggcggtctggggagagagcggcgagctggtgtgtactaagccgatcccttgccagcccacacac

SEQ ID NO: 67460 - DNA, 50 bp, Homo sapiens
gtctgcgagccaggattcccgatgggcaccaacaaatgcgccagccagtc

SEQ ID NO: 67461 - DNA, 90 bp, Homo sapiens
tggcctctgccggccagggcaaggaggaggcggtgaagcagcttcgcaagatgcaggctgctggcaaaggggacgtcccaacgaagagac

SEQ ID NO: 67462 - DNA, 95 bp, Homo sapiens
ctgcacattgtttcatatcgagccccatcacaggtatatggaggagtgacctactataaccccgcccagcagcaggtgcagccaaagccctcccc

SEQ ID NO: 67463 - DNA, 90 bp, Homo sapiens
ttccagaaagatggcatcatttttgccctcaaaagaaatggcaggataacttcaaactaatgtgtactaatgccatgatttacaataaac

SEQ ID NO: 67464 - DNA, 51 bp, Homo sapiens
agattgaccacattgatcacagtcccagcacacctggaaagttctgcaagg

SEQ ID NO: 67465 - DNA, 100 bp, Homo sapiens
gccttcattcccgaatggatctggtaggagtggcatcgcctgagcccgggacggcagcggcctggggacccagcaagaataactgaagtgaagtgatgga

SEQ ID NO: 67466 - DNA, 100 bp, Homo sapiens
cccgctgccttgtggaggagttgagaaaaaccaaggattgtagaaggcatgaaacaaaaaatgtggagtattgaaaatattgccttcggttctggtggag

SEQ ID NO: 67467 - DNA, 106 bp, Homo sapiens
tgatggtcaacagaaaagattttgctgtcaaagttgtgtcagtgaatacaaacaggcccgatgagagaaagggaaagttaaggatgctggagcagaacaatggatt

SEQ ID NO: 67468 - DNA, 75 bp, Homo sapiens
ctcagcctctacactggcctggcaggcggaggatatatgattggatgcctgaacaaccaaatatattccaagtgg

SEQ ID NO: 67469 - DNA, 82 bp, Homo sapiens
atattacggaatgtgtccagcttgatagctacaaatgaggaccacagctgccagctccaaaactagctcaggcgatgcctcc

SEQ ID NO: 67470 - DNA, 78 bp, Homo sapiens
gactttactgaagtttatcttattaaatttatgaacttacaaagtgcaaggaatcagagatcattgatttcttcctgg

SEQ ID NO: 67471 - DNA, 83 bp, Homo sapiens
cggagacgggagtattatgaaaagatcacttcctgctatatcctgatcatcactattgcaaatattgcaaatttggccagtac

SEQ ID NO: 67472 - DNA, 97 bp, Homo sapiens
gctgcagttccgggagcaggaggtacggaaccagggccaggcgaggaccaactccacctccgccctgggattggctgaagacagagccaggtcctgc

SEQ ID NO: 67473 - DNA, 74 bp, Homo sapiens
tggtgctgtcccagagacaacgagatgaactggagaacagatcccattccaatcgttgtcaagtatgatgtcat

SEQ ID NO: 67474 - DNA, 100 bp, Homo sapiens
gagcgcgagagatggagatgggcagacggattcatttagagctgcggaacaggacgccctctgatatgaagatgaagatggtgatcgaattacagtgaga

SEQ ID NO: 67475 - DNA, 100 bp, Homo sapiens
gataccttctcacttggaaattaatactaactttcttcaaagctgcatcatcacagtctctagtgatccctgaaaagttccagcatattttgcgagtact

SEQ ID NO: 67476 - DNA, 100 bp, Homo sapiens
aggagatgtactcagcccacatgcccgctcacctgcgctgtgatgcctgcagagctgtggcttaccagcatccctccagacactctgctgtttcctgcct

SEQ ID NO: 67477 - DNA, 75 bp, Homo sapiens
aatgacatgatgagcagcatgtcagaccagaccgtccgggtgaagtgtggtttattgacaatcatttacaatgcc

SEQ ID NO: 67478 - DNA, 100 bp, Homo sapiens
ggcaacctcattatccgctatgatgtggaccgggccatctccgggggctccattcagctgcaccaccaccgcctgtgctgatgcaccatggagagtcctc

SEQ ID NO: 67479 - DNA, 80 bp, Homo sapiens
tatcaaagcaggaactgttattaaacttatagagaggcttacgtaccatatgtacgcagcattgcagtgtcgagatggct

SEQ ID NO: 67480 - DNA, 83 bp, Homo sapiens
cgtctgtagaggatcctttccccattgggatcatcgtcttgctcttcttttatctcagtttgtgggtagccagtcagtccggg

SEQ ID NO: 67481 - DNA, 100 bp, Homo sapiens
ttacaacaaaatggttttccactccattgttgttagaagccagtaggccaaccttgtctatccagcatcctccatctgcagcaatcagtattcagcgtcc

SEQ ID NO: 67482 - DNA, 75 bp, Homo sapiens
ggcaagactccacctcctggtgaagaaagcaaacagtatgggcactaggaaaagacttcttccatcaagcttaat

SEQ ID NO: 67483 - DNA, 98 bp, Homo sapiens
ctgcccagagtccgcggccggggcgcgggagctcttccaggtttcccatgtccccccgaccagattcagtgcatagcacaacttcaagcagtgactca

SEQ ID NO: 67484 - DNA, 75 bp, Homo sapiens
gaccgcgcccgccgggcacacaagaatggtcactggcggaccccggaggcctgagcggcacctgcccccagcccc

SEQ ID NO: 67485 - DNA, 82 bp, Homo sapiens
gcatacttggaatgaatccttctagagacgtccacgatggtcagtaggacagaaggtaacattgatgactcgctcattggtg

SEQ ID NO: 67486 - DNA, 50 bp, Homo sapiens
tttctgttccatcagcgtttgtttgaacactgatatttgcatttaatggg

SEQ ID NO: 67487 - DNA, 100 bp, Homo sapiens
cctctgccacatcttcctgacccgcttcaagaagcctgctgagttcaccacagctctagaggacaaaatcccagtccttggcacaaactcaggaaatgga

SEQ ID NO: 67488 - DNA, 97 bp, Homo sapiens
atgcctctgacaatctctagtccacataaagaagatccctaatagtcatttctcaacaattatatagtcaactgatgtaacaatggtactaatattg

SEQ ID NO: 67489 - DNA, 110 bp, Homo sapiens
aacgtttgcagtcagcatcctagtagaaagagcaatgcacttgagcttgaaagtccaatggatgggaccccaatgaaatgttcaagttcaatgaggagaactacggtgtg

SEQ ID NO: 67490 - DNA, 100 bp, Homo sapiens
ccaactattcgcggagctggaatgactggcaacccaggaatttagataatgggctgtgtgcaatgtaaggataaagaagcaacaaaactgacggaggaga

SEQ ID NO: 67491 - DNA, 96 bp, Homo sapiens
agcgggagctcttccgagacgcactgggggccggatgtcttcaggagacatatgaagcaaaaaggaatgaattcctgggagaactgcagaagaaag

SEQ ID NO: 67492 - DNA, 75 bp, Homo sapiens
gacgcttattctactggaccggctgctgtaccttcaggaacagggtaacctggatgaggacatcattgcagaaga

SEQ ID NO: 67493 - DNA, 73 bp, Homo sapiens
gcaccgggacgatcatcctggggacctggtacatgatggcagaaacggtggacacaagcgaaatggtcaacgg

SEQ ID NO: 67494 - DNA, 75 bp, Homo sapiens
cacctcggggacattattgcgcgtggaacggctgcttttggaagataatgttaattcaagactctcgaagagaag

SEQ ID NO: 67495 - DNA, 100 bp, Homo sapiens
aagctggttgatgaacgggaatgcttattggaacagatccggactcttcaggagcagctggagaatggccccaacacgcagctggcccgcctgcagcagg

SEQ ID NO: 67496 - DNA, 75 bp, Homo sapiens
atctggaggagcagttgtctgatgaagagaagatggctctgagagattcctctgcgaatctgtttttagctatca

SEQ ID NO: 67497 - DNA, 90 bp, Homo sapiens
ccccgtgggcatcttccagaaacgcaagaagtacaacgtgccggtccagagcattagtttggatgaattcaagtcattttgccattttac

SEQ ID NO: 67498 - DNA, 100 bp, Homo sapiens
cagcaagacccgcgccgccgggacccccaggacgacgtgtacctggacatcaccgtacttggggtgcattgaagttctgcgctcaatgaggtctcttgac

SEQ ID NO: 67499 - DNA, 132 bp, Homo sapiens
tcctcccgcgccagccaccgaagaacgctgcggacccagctcgctcctggtagcaagacccgaactttacacaacagccaatgcggagtctgacaatgagcgggactctgacaaagaaagtgaggacgggga

SEQ ID NO: 67500 - DNA, 98 bp, Homo sapiens
ttcaccttaaaatcaaagccacaagacactgctgataaggatggtgctggagaatctggtaaaagcaccattgtgaagcagatgaggatcctgcatgt

SEQ ID NO: 67501 - DNA, 100 bp, Homo sapiens
acaacccgttcttgcctcaggccagtcgcctccaggccaagagggatccttcacccgtgtctgaaccgcatgcacgagtctctcatgctcttcgactcca

SEQ ID NO: 67502 - DNA, 75 bp, Homo sapiens
cacaggagctgtagagaggaccccggtacatctgaaagccgggaaatggagaagggagcactggctttgctttca

SEQ ID NO: 67503 - DNA, 140 bp, Homo sapiens
catgaaggagctcatgcagtggtacaaggaccagaagaaactgcaccggaaatgtgcctaccagaaatttaaaagcctgttgattcaagaactttctaaagtatttccggaagacatggctaagtatcgaagcatccggg

SEQ ID NO: 67504 - DNA, 99 bp, Homo sapiens
ggagcggagacgggagtattatgaaaagatctcccttaagctcctaggatttttagatgttgaaaatactccctgcgcccggcattcaatattgtatgg

SEQ ID NO: 67505 - DNA, 100 bp, Homo sapiens
cctgctctgtgcgcgcctccatctgggccatggatgggtctgccatcatggatgttctcgcagaagcaaatggcacctttgccttaaaccttttgaaaac

SEQ ID NO: 67506 - DNA, 74 bp, Homo sapiens
atctcaaaaacaaaattctgaactcaggacttggcaagaactgtggctgcaccatctgtcttcatcttcccgcc

SEQ ID NO: 67507 - DNA, 100 bp, Homo sapiens
gggaggtccatagtgtccgggaatttgtcgagaaatcattcttgcacattggaaaaaccattgtgtgagacatggaatccattaaaattgcattatcagt

SEQ ID NO: 67508 - DNA, 74 bp, Homo sapiens
aatttctcctgctctgcagcttctgttcagttagaacctggcccattagatgaaacccagatcgctactatatt

SEQ ID NO: 67509 - DNA, 101 bp, Homo sapiens
gcggatccctgtgcagctgatgacaagggccgcacagctctacactttgcctcatgcaatggcaatgaccagattgaccgttccccagcacaccccacccc

SEQ ID NO: 67510 - DNA, 100 bp, Homo sapiens
aacagagcagtcagcagagcagccacgatgatgattctagcaggttcctgagtcctcgagcgcgggaagaaagcatcaacaaagagagcattgtggatgt

SEQ ID NO: 67511 - DNA, 98 bp, Homo sapiens
cgaggccaggccgctctggaccgtctcaaggtgtgtggggagcagcaccgctttgaaaagctgatggaatatttccggaatgaggacagcaacatcga

SEQ ID NO: 67512 - DNA, 75 bp, Homo sapiens
ggagcgcggtgctgccggtggagcttcagatgatagtatttctgctgcaagtacttctgatgttcaagatcgcct

SEQ ID NO: 67513 - DNA, 75 bp, Homo sapiens
actttcgccagcccgtgccgcgagcgcggcctgcaggagatgagcgggatcgtgtgcagaagaaaaccttcacca

SEQ ID NO: 67514 - DNA, 90 bp, Homo sapiens
cggctggcgcttcctgcgcatcgtctgcaagaccgcgaggcgagacctcttgtagagatgacgacacaacagacagctgatgtatacggg

SEQ ID NO: 67515 - DNA, 75 bp, Homo sapiens
aaatccttaaaagagtcttaacggtatcctggtcagatataggaggactggaaagtatcaaactgaagttggaac

SEQ ID NO: 67516 - DNA, 78 bp, Homo sapiens
tcaacatattgactgtatttgggctgcagcacaggtgcaggccctagcaggtgcaggtggagtagacaatctccatgt

SEQ ID NO: 67517 - DNA, 100 bp, Homo sapiens
cgaagattgacgccagtaagaacgaggaggatgaaggatccttgccagctcctaaaacctatggtagcatgaaagatgacagttggaaagatggctgtta

SEQ ID NO: 67518 - DNA, 102 bp, Homo sapiens
gcactgctttccactcggctcctgtcgtccgttctctcaggctcccgttcagaccatggtgaatccgggcagcagctcgcagccgcccccggtgacggccgg

SEQ ID NO: 67519 - DNA, 75 bp, Homo sapiens
ggaggcgaattttcagttgatagggaccgtttggagggagccattcacctacaggagcaggacatggagaactca

SEQ ID NO: 67520 - DNA, 90 bp, Homo sapiens
cacatactatccgtttgttcaggaaccaccagtgacagacctccaccaggcggtgtgaagatgcctaatgtacccaatacacaaccagca

SEQ ID NO: 67521 - DNA, 83 bp, Homo sapiens
cgtctacatagatgagacacggaattgaatgatctggcacgggaccctccagcacagtgttcagcaggtcctgttggagatga

SEQ ID NO: 67522 - DNA, 74 bp, Homo sapiens
acgcacgggatccagagcgccgcgcacttcgtcatgttcttcgcgccctggtcatcatcagatttgaaatattt

SEQ ID NO: 67523 - DNA, 96 bp, Homo sapiens
cgggcggcatggccgctggcgtggactgcggggacggggttggcgcccggcagcacgtgttcctggtttcagtggaagtagtggaggaagtggaag

SEQ ID NO: 67524 - DNA, 101 bp, Homo sapiens
agcagaatctctgattgagcaaaccacagctctcaacaagcgagtagaagccatgaaacagatatgattctataacagactcttccagaaatgatatgaag

SEQ ID NO: 67525 - DNA, 90 bp, Homo sapiens
ttttggatggtctcatctacttgctattggcattatactttgacaaaattttaccctgcaaagcagagagcagaggttcttcagtccacg

SEQ ID NO: 67526 - DNA, 76 bp, Homo sapiens
cggccatcgagaaagtgcggaaatgcatgaccgacggagcccagcaagccttgaggagaaccatggaaatctactc

SEQ ID NO: 67527 - DNA, 96 bp, Homo sapiens
ttcgagcactaatatttaagaaagaagatgttaactttcagatatctccggagcatttggataatgtgacagttggaatgcagtgatgtcgactct

SEQ ID NO: 67528 - DNA, 96 bp, Homo sapiens
gagcctcagttggaagcagccgatccagcctgcggagcctgtggggcagccgcggcgagtcctttgcacatgttggcaacacacgcatccgcatcg

SEQ ID NO: 67529 - DNA, 75 bp, Homo sapiens
ctaggcttggcccgcctaaggcactgggtgtacctgctttgcttctctgcaggagttcgcagtccctgattatcg

SEQ ID NO: 67530 - DNA, 75 bp, Homo sapiens
gaagacatttctaagacatacaggccctgaagaggaagccacaggtggccttggataagggctgctcccaattcc

SEQ ID NO: 67531 - DNA, 98 bp, Homo sapiens
acttgttggaaatggaacatacgggcaagtttataaggaagccagttgagggaagttctccatgaatgtacgtcacaatgatgatgaccgaccaaatc

SEQ ID NO: 67532 - DNA, 88 bp, Homo sapiens
actggagggtcagcctggaagaccacagcagccaagcgagaattagaactgcagcgtcagcgtgacttgcataagatcaagcagcttc

SEQ ID NO: 67533 - DNA, 98 bp, Homo sapiens
gaaccaccggatcgaagacagtcaagtgtagactctcgccaaagccgctctgggcaagtgatgatgttgctggagaacaaggccagcatttctggagg

SEQ ID NO: 67534 - DNA, 50 bp, Homo sapiens
cacctttcacagctatcagggaaggtgaatgaactggtgcaggtagaaac

SEQ ID NO: 67535 - DNA, 78 bp, Homo sapiens
ctgaggaggcggcggcggagatctggagcgccagtggaacatgtggatcccaggatttggctctgaagaaatccgacc

SEQ ID NO: 67536 - DNA, 100 bp, Homo sapiens
ctgctggacgcccgggggccaagaaggagccaaaaacctgtatatcatctccgtgaaggggatcaagggacggctgaacagacttcccgctgctggtgtg

SEQ ID NO: 67537 - DNA, 75 bp, Homo sapiens
gtgggattactggattatatggaacctctttcaggagctataaaagaaagggaggaatcatgtccacaattgcag

SEQ ID NO: 67538 - DNA, 75 bp, Homo sapiens
cggaataacatcggaggagaagttgctaacacaggttagtctggcctattgaaccatcttttactgctgtgacct

SEQ ID NO: 67539 - DNA, 101 bp, Homo sapiens
atcgtgaccgggatgccgaccaggagagcaacatcagtggccctttagcaggcagggccggccaaagcaagatcagagagcctacgactagatttgcatct

SEQ ID NO: 67540 - DNA, 82 bp, Homo sapiens
acgacgggccgagcctgccactgtgagatttgtggatttaaaattcacgggcagaatgtcccctttgatgcagtggtagtgg

SEQ ID NO: 67541 - DNA, 73 bp, Homo sapiens
tgccgtcaactcctgttctcctcagagcctgattacaggctgtgccagccctggaaaaacagttacaattgtt

SEQ ID NO: 67542 - DNA, 100 bp, Homo sapiens
tgggaagggcagctttggcaagatggactcaccctgtcacccaggttggactgcactggcctcaacctcctgagttcaagtgatcgtcccacctcagcct

SEQ ID NO: 67543 - DNA, 100 bp, Homo sapiens
aatgggagaagaggaatgttccctgacaatttcgttaagacatatgtagagtgtgtcggtcagaaggaacacctgagaaaccgctttatcatccttgtgt

SEQ ID NO: 67544 - DNA, 100 bp, Homo sapiens
tccagaggacgaatcagatgtatagttacttcatgttcacccgcgggggaccctactggcaggaggtcaaggagtgggaatagctttgcgaaaaatgggc

SEQ ID NO: 67545 - DNA, 101 bp, Homo sapiens
gggcggaagaaaatacaaatcacacgcataatggatgaaaggaaccgacaggaggtgctaatgatgctggataactatgtaagagatttcaaagcattgat

SEQ ID NO: 67546 - DNA, 100 bp, Homo sapiens
atgaggttgatgccaactccttcttcccacgctgctactgcctgggggctgaggatgacaaaaaagccttcatagcctgggctcttggtgggggttcccg

SEQ ID NO: 67547 - DNA, 106 bp, Homo sapiens
cgccctctactcagcatggatatccaggtgctgagccaggagcagcagcctttctgtgagaagccctaccactgcaactgggacggctgcggctggaagtttgcgc

SEQ ID NO: 67548 - DNA, 50 bp, Homo sapiens
agctgtcgtctctgggactgtgaaacaggatctgtgccagttcagaagca

SEQ ID NO: 67549 - DNA, 98 bp, Homo sapiens
cggccgcctggctccccatactagtcgccggttctttagaagattgggatatagctgttcagaaaactgaaacccgattagctcgtgtcaatgagcag

SEQ ID NO: 67550 - DNA, 100 bp, Homo sapiens
cactgagaccagagttagtggaatccacatatctcctctaccaggtcaggatggctaactggttggctccccacatggtgccctacgtctatatcacacc

SEQ ID NO: 67551 - DNA, 75 bp, Homo sapiens
acagcaaaaatgacccaccaatggaagcagctggcttcactgctcagatgatggtgaatgtgccgctcttcgcgg

SEQ ID NO: 67552 - DNA, 100 bp, Homo sapiens
gagttggggcttgatgaaggcgtggatagcctgaaggcagccattcagtattgacttgaagctgaaagaaaagccttagttggccatgctggaagaagag

SEQ ID NO: 67553 - DNA, 83 bp, Homo sapiens
caagcttggaatgatcatcaaacagctatggtgatgattagagacatactaatgtacatggagtctactcttcatcttgtgtt

SEQ ID NO: 67554 - DNA, 74 bp, Homo sapiens
acagcttgtgccaccgccgtgctgggcaatcaggctgatttgaacaccagcttttctggggtggatgaacatgc

SEQ ID NO: 67555 - DNA, 114 bp, Homo sapiens
aggaggaagaaacctcagacagatcgccggggaggcagcgcgggatcccagcctcaggcgtgcgcggacggtgtgcggcctcattgatgctactcacagagacgtggatgtgct

SEQ ID NO: 67556 - DNA, 100 bp, Homo sapiens
cagaaactggaggagtcccgctcgaagctagatagttttgaggcagctgtgccatcaaatagccacattgtttcggaacctggaaagaatgtcacactca

SEQ ID NO: 67557 - DNA, 74 bp, Homo sapiens
aaggagtttggaattgaccctcaaaacatgttcgagttctgggataccctgaaggaagattgggaatctgaaaa

SEQ ID NO: 67558 - DNA, 90 bp, Homo sapiens
ggcagatgctaataacggagcccaggctgagtttattgatgacattgagttaatgttttcgaactgctttgaatacaaccctcgtaacac

SEQ ID NO: 67559 - DNA, 96 bp, Homo sapiens
cactgaaggagtttgtgcagtttgtgtgctcggatggctcgggccaggccaccggacaggacacagaatttccaggtgttgtggtgcgaccaattg

SEQ ID NO: 67560 - DNA, 90 bp, Homo sapiens
aggccagatgcagatctgaagacctattttactgataagaaaacacatctttacacactaaacctgttaccctccaaatcttctgtgacc

SEQ ID NO: 67561 - DNA, 75 bp, Homo sapiens
aatttccagagcttggcgaaacagtcagcgtgatacctctgatattaagcttcctgcagatttcacaaaactgca

SEQ ID NO: 67562 - DNA, 101 bp, Homo sapiens
ggaagcagcgtgagcagccggaggatcgcggagtcccaatgaaacgggcagccatggccctccacagcccgcaggctgctgagaactagccctagacctct

SEQ ID NO: 67563 - DNA, 113 bp, Homo sapiens
caggactcagaggccgccatcaaccgccagatcaacctggagctctacgcctcctacgtttacctgtccatgggattccagcagaagttcaccttccacagcaaggagattgt

SEQ ID NO: 67564 - DNA, 75 bp, Homo sapiens
gtgaatggagatgcagctcagcaggatccacctcagaaaaagatggaatgcaccatactgtcaccaagcacagag

SEQ ID NO: 67565 - DNA, 100 bp, Homo sapiens
tggttctacctcctcatgaacatcatcactcacttcctgtccacttccaacgaagcggtctataagatctttgatgacagcccctgcccatttactgcga

SEQ ID NO: 67566 - DNA, 75 bp, Homo sapiens
ccaaggcccaaaagcgtcaaactcaccaaaaacaacatctttccagaaagagatccaaatcagaagatagtgctg

SEQ ID NO: 67567 - DNA, 75 bp, Homo sapiens
acctttggttcacaacatcatcaaatggtcttccccagggaggtcctgaactacacagctgagaacatctgtaag

SEQ ID NO: 67568 - DNA, 75 bp, Homo sapiens
cgagcagatcctggtcctcgatccgcccacagacctcaaattcaaagttaattggccttggtcctcacagctcca

SEQ ID NO: 67569 - DNA, 155 bp, Homo sapiens
cttttctacggggctgagcctggagcccagaacgcctcggggaacacggctctgcacatctgcgccctctacaacaagttgatggctgacctgatgtttagaaaacagaaacatgaagcggccatcaatctttaccaccaagtcttggagaaagc

SEQ ID NO: 67570 - DNA, 100 bp, Homo sapiens
ttctcaccagccactattgaaaacgaacttataaagttctgccgggaagcaagaggcaaagagaatcggttgttttttgctccactcaagcctgttagaa

SEQ ID NO: 67571 - DNA, 100 bp, Homo sapiens
aaaatgggctttgtcctgcatgtagaaaggtccagtggcattgcagagcacggatggttgcaggagccaacttttacattgttggacgagaccctgctgg

SEQ ID NO: 67572 - DNA, 100 bp, Homo sapiens
gccgagccgcaggagagacacgctgggccgaccccagagcggcgctggacagtattaaaggtggaagaaggtccatatctttttctgtgggtgcttcaag

SEQ ID NO: 67573 - DNA, 75 bp, Homo sapiens
tgacatcgctccaggacccgctgcagcagggctgtgtgagctcaggtaataaagacatcacatgggtaatgttag

SEQ ID NO: 67574 - DNA, 100 bp, Homo sapiens
ggtttttgaaacagcagcagcttcaatggattctgagcttcatcccttggacttggcagatgaacttgctcttgttgatgtcatcgaagacaaattgaag

SEQ ID NO: 67575 - DNA, 76 bp, Homo sapiens
tccggagccagccaacgagcggtccctggtgctgaaccgcctgcgtccagttgccagcgggggtgggaaagcccaa

SEQ ID NO: 67576 - DNA, 90 bp, Homo sapiens
gatcttcatgacccaccacaagatgttgtttgcattgacttggatacgaacatgttatatgtacgagatgatgcctattggccagaagga

SEQ ID NO: 67577 - DNA, 75 bp, Homo sapiens
tgccttcgctcgtggatcgatacttcactcgctggtacaaaccggaatgattacggacctgaagccaaagaacaa

SEQ ID NO: 67578 - DNA, 75 bp, Homo sapiens
cggagatggtgcagaagatggaggagtgtaaacaggaacatcgataagtagtgtaaaaacttgcacaatgaaatc

SEQ ID NO: 67579 - DNA, 100 bp, Homo sapiens
aaagcctgtacccaagaccattgacaaccagcgagtgtatgatgaaaccacagtagaccctaatgatgaagaggtggcacatttagaacgaacagggcat

SEQ ID NO: 67580 - DNA, 80 bp, Homo sapiens
cttggactgagtcctgcaggacacaggtatctcgggggagctttgtgccttgatggatcaagttcatcatatgcagcact

SEQ ID NO: 67581 - DNA, 74 bp, Homo sapiens
gcagatctgaagacctattttactgataagaaaacacatctttacacactaacggttcctggctcagagtttga

SEQ ID NO: 67582 - DNA, 83 bp, Homo sapiens
attatgggcactatggggatccgtcgcacacagcatctccaacagatgcttgggatttgctttacattctaagtggatttgga

SEQ ID NO: 67583 - DNA, 80 bp, Homo sapiens
aagaatattttggagcctttggagagaatgatggaaacttggtggaagccactggtcaaccctcagctccccatgagaaa

SEQ ID NO: 67584 - DNA, 87 bp, Homo sapiens
ctgggagacggcacaggacactaaaccagtttgtcccatgaggagcacccccatagccatcctctctatggacatggtgtatgcaag

SEQ ID NO: 67585 - DNA, 99 bp, Homo sapiens
cgggagcaggagctgggcctaggtctgcgccctggctaaactgctcttttcagatggagaaaaagtaatacccagattgacccatgagcttccaggaat

SEQ ID NO: 67586 - DNA, 51 bp, Homo sapiens
ggatgtgaaacttaaatttgaagaggagtctactcttcatcttgtgttgag

SEQ ID NO: 67587 - DNA, 100 bp, Homo sapiens
aacaaataatttttcatggcggcaaaatgcattgatcactacaccaaacaatgtgtggaaaatgcagatttgcctgaaggagaaaaaaaaccaattgacc

SEQ ID NO: 67588 - DNA, 73 bp, Homo sapiens
caagtcgacaggggatgggaccctagagcttactcacatagcatattggtatatcaaaatgaaatgcaaggaa

SEQ ID NO: 67589 - DNA, 100 bp, Homo sapiens
gatatggtctcctccttttatcaattcacaaataagtagacagatggcatacggttgtaaaattattcagctgttctttggcatggacacaagttcagtg

SEQ ID NO: 67590 - DNA, 100 bp, Homo sapiens
gccagctggacctagctcagcggaccctgtaccaggaggtgatgctggaaaactgtgggctcctggtatctctgggtatcactatgtatgctgttggggt

SEQ ID NO: 67591 - DNA, 126 bp, Homo sapiens
ctgctgagtcacacacaacgcttgttatgttttcatcacttctctccagaagcttttaatctagacaacgagcaaccagattatgatatggattcagaagatgagactttattaaatagacttaac

SEQ ID NO: 67592 - DNA, 100 bp, Homo sapiens
gtgtgtagtgagtctctacttttatggaatcctgcaaagtgatgcctcaggtccatctgaactgtttactgtttgttcatcgattagcagaagagtccag

SEQ ID NO: 67593 - DNA, 75 bp, Homo sapiens
gagtccttgaccgcagagagcctatgcaggaagattctctggcaacagatgatttccttgtagactactttaatg

SEQ ID NO: 67594 - DNA, 97 bp, Homo sapiens
ggggacgctcttctccaccacaccgggaggccaagcagatagaacttcagttcactattggcgaagccattaccagtgctgcaataggaactagttc

SEQ ID NO: 67595 - DNA, 74 bp, Homo sapiens
tcgggtggagtgtaggtcatatcgccgcgatagcctgggctggaagctcttctacgtcacaggctgcctgtttg

SEQ ID NO: 67596 - DNA, 95 bp, Homo sapiens
ccggccggggcttcctccccggccggcagggtggacggtgggctcatgccatggacaatattaccaggcagaaccaattctacgatacccaagtc

SEQ ID NO: 67597 - DNA, 82 bp, Homo sapiens
ccgtgatgtgacgctggagaacctggcacttatgtcctccctggatgcttgctctgtcaaggcacagcctattgtctccttt

SEQ ID NO: 67598 - DNA, 82 bp, Homo sapiens
atttaagaaagaagatgttaactttcagttatgcaatgccaaccaaaaccatagaagtgttgcagttgcaggaccaaggcag

SEQ ID NO: 67599 - DNA, 76 bp, Homo sapiens
aacagtgtgtggagatatccatggacagagtgcttgtgatttcacgtatttttgctgaactcgtaaaagagacact

SEQ ID NO: 67600 - DNA, 119 bp, Homo sapiens
gctcgatgcagctggccccccaggagctggcccgctggcgggaccaggaggagaaaaggggcaagggacataggatgaccccagcctgtcccctcttactgtctgtgattctgtccctg

SEQ ID NO: 67601 - DNA, 99 bp, Homo sapiens
cacagaagttgctgctgacgctctgggtgaagaatggaaggactcatcaggtctcgctccatttaaaaccaaagaaccatccactcggatcgggaagat

SEQ ID NO: 67602 - DNA, 100 bp, Homo sapiens
gtcagtgattcccggaccctggaagagaagagggtggctaatgattaaggaatgtatcctgtcaggtataatgtcagtgaatggcaagaaagttcttcat

SEQ ID NO: 67603 - DNA, 96 bp, Homo sapiens
tattggactgtggctgggatgagcacttttctatggatattattgattccctgaggaagcacagaaagctgaaggtgctggagatgccaagtgaag

SEQ ID NO: 67604 - DNA, 80 bp, Homo sapiens
aaggggaagaagatcaaaacccaccatgccccagtgtgttaacagggcacaaccattatgtgatgtgtgctcagttccac

SEQ ID NO: 67605 - DNA, 100 bp, Homo sapiens
cagacccagtgccatgagggaaatagcaattgatgtcccaaatgtctccgaattcaatcctttgacgttcaccagcgtgatcgaatgcgagaagccaaac

SEQ ID NO: 67606 - DNA, 100 bp, Homo sapiens
ccgaagttggaagtgtctcttagcagcgcgcggagaagaacggggagccaggagccgggtgtgggctgagccctgcctgattgatgctgccaaggaggag

SEQ ID NO: 67607 - DNA, 50 bp, Homo sapiens
cgaatacaggagacgtgtggagaggaagaagcccctccagatggtgctgt

SEQ ID NO: 67608 - DNA, 75 bp, Homo sapiens
gaagaggttctggtgggcacatttttcgaatggatcctgagcttgaaaaaaaactgaaagagaataaaatatctt

SEQ ID NO: 67609 - DNA, 100 bp, Homo sapiens
cgagggccaccacctgcagcacatcagcgaccgcgagatgcccgaagatatctccacaggaccttcttggttaaatcagggactacttctgaactctacc

SEQ ID NO: 67610 - DNA, 73 bp, Homo sapiens
tgatgtggcagaattggaactaaaacttgataagccaaaccctctgcccccgtggtatcgggccctgcggcga

SEQ ID NO: 67611 - DNA, 82 bp, Homo sapiens
caaaaactgacaagcaggaagcttatgtactcaggttgctgttgaagaaatctggttgcagaacaccacggattgaattgga

SEQ ID NO: 67612 - DNA, 90 bp, Homo sapiens
ggtcctaggatcctgcagaccccacccttgccttaaggaaagaccacagcaagattctttcattcgtctcctcctagcctgggggaccag

SEQ ID NO: 67613 - DNA, 89 bp, Homo sapiens
ggatggatgtgatgcctgctagccaaaaggggtaaaccagacttgaatacaacattgccaattagacaaacagcatcaattttcaaaca

SEQ ID NO: 67614 - DNA, 100 bp, Homo sapiens
tgttttgccagcgggagcacttcatcaggacctgatgacatttgaagatgtggctgtggaattcagccagtgggagtgggggcagctgaaccctgctcag

SEQ ID NO: 67615 - DNA, 85 bp, Homo sapiens
cgccaaggaggtcacccgcgtgctaatggtggaaacccacaacggtgaccagaagtcagcagcttcccagaagccccgaagccgg

SEQ ID NO: 67616 - DNA, 100 bp, Homo sapiens
ggtacaaacgtcatcaaaattgctcctgagacagctgttaaattctgggcatatgaacaggtctaacataagaccagactatgcagactccaatttccac

SEQ ID NO: 67617 - DNA, 100 bp, Homo sapiens
gccccacctgacctctacttccaggactcggggctctcacgctttctgctcaagtcctgtcctcttctgaccaaagaacctgagcatgcagaattccgag

SEQ ID NO: 67618 - DNA, 75 bp, Homo sapiens
tgaatgggccaaggaaaaatcgagcagaaagaatgtctttcagttcgatcctttggtacagaagacagaccgaca

SEQ ID NO: 67619 - DNA, 80 bp, Homo sapiens
cgaagaacagctgtggaaagaagttgcaaaacactgggttctgggccggagaaggggcgacgttcgggcaccccccgaat

SEQ ID NO: 67620 - DNA, 100 bp, Homo sapiens
aatcagcgagactccgtgggcgtaggaccctccgagccaggtagcagaaggtcaagaaatttgtgtgattgaagccatgaaaatgcagaatagtatgaca

SEQ ID NO: 67621 - DNA, 74 bp, Homo sapiens
ttttttttctttttcttttttcttaccagcctccccccaatgagcatcagccactatgtgattgtcatgtccat

SEQ ID NO: 67622 - DNA, 83 bp, Homo sapiens
gggaggaaggaacgaggcaaggagctaaagcagcgtgcgttcagccctgggcacctgtggaatcctctcaagaggaacagtca

SEQ ID NO: 67623 - DNA, 98 bp, Homo sapiens
aggcacggacaacatcaccgtgaggcagggggacacagccatcctcaggacaaccttaaacttccaccacaagaggaatataaagaggtccctcctgc

SEQ ID NO: 67624 - DNA, 100 bp, Homo sapiens
cccttgctaccagttccgagccagccgagacctgccgtgggaccccagagattcccagttatcaccaatctagtgaaaatgttgaagtccagagacacga

SEQ ID NO: 67625 - DNA, 83 bp, Homo sapiens
ccttatcctggaaccccaatcactcagcgcttctcgcacaatttggagcaagaggtggtggtggccttcccccgaagaaattt

SEQ ID NO: 67626 - DNA, 98 bp, Homo sapiens
gagggcaagtgcgcttacatccgagtgtgccccctaccaccggagccagagaatggtggctacatctgccacccccggccctgcagagaccccctgac

SEQ ID NO: 67627 - DNA, 83 bp, Homo sapiens
ctgccggttgcgccttcttcctggacatgaccaactggagagttgtggactggggcaacctttgccagtgatgagaagtgatg

SEQ ID NO: 67628 - DNA, 75 bp, Homo sapiens
ttagataaggaactttcagaatcctatgcatttctgatggttgatcgataccagtgcccttccagctgtcactga

SEQ ID NO: 67629 - DNA, 74 bp, Homo sapiens
aagatacctctttgtacgtcagaagaaactgaggcagctctattaccaggttttaaacttcgccatgatcgtgt

SEQ ID NO: 67630 - DNA, 98 bp, Homo sapiens
agcctagagaacatctcaagcctgaaaggacacacagggaaggggccctcctcgccaaagacagcctagagaggacggcaatgaagaagataaagaaa

SEQ ID NO: 67631 - DNA, 100 bp, Homo sapiens
ctctggggctcgccttgtatctcaacaccctgagtgcggatttctgctatgatgacagatgatgaataaggtatttggaggtactgtgcacaaaaaaagt

SEQ ID NO: 67632 - DNA, 75 bp, Homo sapiens
ctcggccgccatggtcttcagcggattttttatcaagcagaaatgcatcgaacaacgagaatcaagatcactgag

SEQ ID NO: 67633 - DNA, 100 bp, Homo sapiens
cagatgtttatgaaactagcgacctacctgaggatgatcaagcggagttcgatgcgggttggggtctgctaggtccccggaatgagttgtttgacgcagc

SEQ ID NO: 67634 - DNA, 119 bp, Homo sapiens
caaagcagcagaagacagcccatattgggtttctccagcatattccaaaaccttctgataacttaagagagattctccaaaatgtggccagattgcagggagtatcaaatatgagaaag

SEQ ID NO: 67635 - DNA, 100 bp, Homo sapiens
gaatcagtcactgtcagcgacagacccctcggggtgtccatcacaaaagccgaggtcgttcagattctaggagataagtttccatgcactttggtggcac

SEQ ID NO: 67636 - DNA, 90 bp, Homo sapiens
catagatccggccaagcatcagttccagaaagctgagtctgatctggattacattcaatacaggctggaatatgaaatcaagactaatca

SEQ ID NO: 67637 - DNA, 89 bp, Homo sapiens
gggagaggctgctgccaaattgaaaagggtgcgaatcataaacatgtacaaggaaattgatcaaacaccctacaaacaagagatcaatg

SEQ ID NO: 67638 - DNA, 76 bp, Homo sapiens
atggatgtagagaaatggcgtgtgaagaggtacacggtcctcttctcgcacggcaatgccgtggacctgggccaga

SEQ ID NO: 67639 - DNA, 99 bp, Homo sapiens
atcggctatctgcactcccacaggcacctctaccccgagggcattggtgcccgtcagcagcaggcatccgtgtacaagatttgcagagaaatgtatgac

SEQ ID NO: 67640 - DNA, 100 bp, Homo sapiens
atgggaaaaatgccatgtctattttcagttctgctactaaaacaggatgagagggccttaccaaaaggagatttcttccctcctgagcgtccacaacaac

SEQ ID NO: 67641 - DNA, 100 bp, Homo sapiens
agaagacggggcagctggacgagctggagaaggccatcaccacgcagaacgtcaacaccaagtgcatcaccatccccagatgaatgatttcggaatcaag

SEQ ID NO: 67642 - DNA, 98 bp, Homo sapiens
atttattaaatttaaatagattagtaactggcatagacaactatgggcaggaagtgcattttcagctgagcacctcaaacttcaactccagaaggaat

SEQ ID NO: 67643 - DNA, 99 bp, Homo sapiens
cacgtgataaggcactagcagatgtggttggaatccttgctgtgctgaatcctggctgtgtgaccccaaatgcccccaagtttatatcaaaccaaacaa

SEQ ID NO: 67644 - DNA, 75 bp, Homo sapiens
cctccactcacccggcagatatccgtgaaggctctagaatataggcccaaagcagcatcctgaagacccaattgg

SEQ ID NO: 67645 - DNA, 100 bp, Homo sapiens
ctcagagaagaacttatcagagattgagaatgtccatggatttgtttctcattctcatatttcaccaataaagatacacattccagttttcctgatggtg

SEQ ID NO: 67646 - DNA, 75 bp, Homo sapiens
cgaagagcggcggcggcagcggcgaatcagcatgattcttcagaggctcttcaggttctcctctgtcattcggtc

SEQ ID NO: 67647 - DNA, 89 bp, Homo sapiens
cccttctctgccgtccctgggaggtgttcaggcgcttcgtggaggttggccgggtggcctatgtctcctttggacctcatgccggaaaa

SEQ ID NO: 67648 - DNA, 100 bp, Homo sapiens
aggaccagcgccagatgttctttgtggtggtttgtgatgaaaatggttccaagggctatggatttgtacactttgagacgcaggaagcagctgaaagagc

SEQ ID NO: 67649 - DNA, 74 bp, Homo sapiens
tattggtgtggacgttgtctaaatttcggtagccatggcacaagaatataccaggattgctacagttgtgattg

SEQ ID NO: 67650 - DNA, 98 bp, Homo sapiens
gcaccggagggcagcatgtcgcggcggcggcacagcgacgagaacgacggttcgagaacttgtcttggacaattgcaaatcaaatgatggaaaaattg

SEQ ID NO: 67651 - DNA, 82 bp, Homo sapiens
ttcgattggaggaaggacctccacacactaaaaactggaggtcaccatcagaaaagctaagtttgctgtatagtgaggatca

SEQ ID NO: 67652 - DNA, 85 bp, Homo sapiens
cagcacttcagtcggaaagttggaacctctgacaagaccaagtactaccttcaagaccctgtattcagtggatcagctggcacca

SEQ ID NO: 67653 - DNA, 100 bp, Homo sapiens
tggagagccaccaccgcggagtggccttgctggcaagtggacatatcaggccatggtccacgaactactaggcataaacaacaatcggattgatctttcc

SEQ ID NO: 67654 - DNA, 75 bp, Homo sapiens
gatcgagaccatcctggccaacacggtgagtgtggtccaagattcagtaaacatatcaggacatactaatacaaa

SEQ ID NO: 67655 - DNA, 83 bp, Homo sapiens
tgaagagaaagttcgagaagaatatgaagaaatattgaacacaaaacttgcaggtgtttcccattaaacactaccaggacaaa

SEQ ID NO: 67656 - DNA, 80 bp, Homo sapiens
gcatccgaccaccgaggctggagggggagaacacccagaacctaaaggcagacccagaagagctttttacaaaactagag

SEQ ID NO: 67657 - DNA, 100 bp, Homo sapiens
tggccagtcgcctcacctctcctatcgtctccacccacctggacactcgtaatgtggcctttgagagtttaattggttggggtcagataagaagaggagt

SEQ ID NO: 67658 - DNA, 98 bp, Homo sapiens
gacaccagctgcggaatttgcggctttggcaggtgtatgtgctcaagaggccttatgtggatgagttcctgagacgcatgggggaactctttgaatgt

SEQ ID NO: 67659 - DNA, 96 bp, Homo sapiens
cggcgacgacgggggaatgtggcgctggatccggcagcagctggttctgaaatttcctcaacagaccctccactgagtgttacagaatctaccctt

SEQ ID NO: 67660 - DNA, 100 bp, Homo sapiens
tctacaaggagaagaacgccaacaacattgtcgtgattcttctcttggtggcgttacttggttaacctcaccctacagatgaagataatagagcaagaaa

SEQ ID NO: 67661 - DNA, 100 bp, Homo sapiens
agtcactgcctgcgcagctccggccgcctggctccccatactagtcgccggctgacttatccttgtataatgaattccgattgtggaaggatgagcccac

SEQ ID NO: 67662 - DNA, 83 bp, Homo sapiens
ctgtgatgctaatgtttttattgctctttatcagtctattttgggagaaaaggtaccaggcgcagatcaggcctctataaccg

SEQ ID NO: 67663 - DNA, 104 bp, Homo sapiens
ctccgttgcctgctcccggagggagacgcgctgccgaggagaacccagcggctttggtgtcatccccagcactcctctggccatccatacaccactgatgccaa

SEQ ID NO: 67664 - DNA, 75 bp, Homo sapiens
agaaatctgagcctcagcaagagaaattaaccctatacctctgacccagaacatccatgatagcagtcttctgta

SEQ ID NO: 67665 - DNA, 100 bp, Homo sapiens
aaggccatagcgagaaggaggttgccgacgccatcaggctcaacgaggaactcaaagtggatgaggaaactacctgaccgacgttgaccgcatcgccacc

SEQ ID NO: 67666 - DNA, 98 bp, Homo sapiens
ccatgtatttgtggcttaaactcttggcatttggctttgcctttctggacacagaagtatttgtgacaggaagcagtcaattatagatttcttcaaac

SEQ ID NO: 67667 - DNA, 75 bp, Homo sapiens
ttttcttcaatgataagagctgtcagttttctgtggatgaaggtgctggagaatctggtaaaagcaccattgtga

SEQ ID NO: 67668 - DNA, 75 bp, Homo sapiens
tttaatgagaagatctccattcctgaggaggaggtggatagatacttctcaagacatcacacagcgtgagtcaat

SEQ ID NO: 67669 - DNA, 75 bp, Homo sapiens
taaagcgtttcctcgcttgcattcagctcctctgtgtttgccgcctgggttgttgcttagaatatgctaccatgt

SEQ ID NO: 67670 - DNA, 98 bp, Homo sapiens
tctggctcctttctctacacaggaggtggtgatgatgtccagcaactctgtgaagcaggagaagaggagtttttggaaatcatggcactcgtgggcat

SEQ ID NO: 67671 - DNA, 100 bp, Homo sapiens
ctctaagagatgcctgcagcctgccatgggacgtggggtccaccggtacagggctgaagaagatgcagagcagcctgaagctggtggactgtatcatcga

SEQ ID NO: 67672 - DNA, 100 bp, Homo sapiens
ccacccattcctttaaatccggagggggaaaaaatcccaaggtctgcaaaggcacacattctggcagttccgccatgagaacccccagacccgggttggg

SEQ ID NO: 67673 - DNA, 74 bp, Homo sapiens
tgatgacaaattacgaaagtgctcccccatccccacagtataaaaaggtattacaggaataacggaagccgtta

SEQ ID NO: 67674 - DNA, 98 bp, Homo sapiens
cggactccagaactttccaagcgggggaaacttggcggcgggtgctggagaatctggtaaaagcaccattgtgaagcagatgaggatcctgcatgtta

SEQ ID NO: 67675 - DNA, 75 bp, Homo sapiens
aggaggaggtgaacaaggaggaggtggtgaaactgaaacagatcgaacacaccctgaatgaaaagcgcatcctgc

SEQ ID NO: 67676 - DNA, 87 bp, Homo sapiens
caccagagggaaaccaggaaattagcagggacaacattctatgcaagattacatatgtagctaatgtcccttcagtctgaatatgtt

SEQ ID NO: 67677 - DNA, 101 bp, Homo sapiens
gaaaaagattcagatccagcgaatcaccgacgagcggaaccgacagggggtggcttccaccactgctccagcgaccgtggcgggggcttctgtgcctatgc

SEQ ID NO: 67678 - DNA, 74 bp, Homo sapiens
gccgccgcagccgccgctactgggagtctgcctgttgcaggacgcactgctggagtgcagtggcaccatctcgg

SEQ ID NO: 67679 - DNA, 101 bp, Homo sapiens
ctgaaagacaaacctgggtgcagccagagaggtccagatagatgagcttgtggcatccattccccaagttcagatattgatgatgttaagaagttcaaacc

SEQ ID NO: 67680 - DNA, 100 bp, Homo sapiens
tctgaagagtgttactgtgaacattcatgcacaaatttttatgtggaggtctgcctcagccacctccctgacgctgtcccactgtgtggatgtggtgaag

SEQ ID NO: 67681 - DNA, 75 bp, Homo sapiens
tgttcccgctggcggcgggcatcttcttcgtgaggctgctcttcgagcggtatgatctcgtgaaaccttgagaga

SEQ ID NO: 67682 - DNA, 111 bp, Homo sapiens
tccgaggagtccgcccggaaacaaacattccccagggcaatgtcacgacttggtcttcccgaggagccagtcagtggattaaacttcattgacttgatggtgcgacaaggg

SEQ ID NO: 67683 - DNA, 100 bp, Homo sapiens
cgtcatccgcatcaacaagatgttgtcctgtgctggggctgacagtgccccgactcggcttgcaagcaggacctgctggcctacctgcaacgcatcgccc

SEQ ID NO: 67684 - DNA, 100 bp, Homo sapiens
aattggtcaaaagatgcaaatgatccaaggattaatgtcgtgcttgctggtggccacgttgtgccccgagatgagatccggaagctgatggaaagccaag

SEQ ID NO: 67685 - DNA, 100 bp, Homo sapiens
gaagaagaagaagatgagaacagtagacagtcgcgcccgggagctcttcgccgcccgctcgcggtcgcagaagctgccccagcgctcgcatggccccaag

SEQ ID NO: 67686 - DNA, 74 bp, Homo sapiens
cccctggagtggagctacaccctccccatcacctgccagctgtcactttactggggcttccggatgcagatgac

SEQ ID NO: 67687 - DNA, 90 bp, Homo sapiens
ttcatttctgtcctgctgatgaagtctacgttcattcagggcctgctgtggaagaccagccccaaaggtactccaaagattcaggtttac

SEQ ID NO: 67688 - DNA, 74 bp, Homo sapiens
agagcagagcggagggagccccagacacgtgtctgcactgcttggggaggaagatgaagaggcactgcattatt

SEQ ID NO: 67689 - DNA, 96 bp, Homo sapiens
tggatgtcccgcagcgcggcggccagcgacctgaaggagaagaaggagaaggtggaggagaaggcaagccggaaagagcgaaagaaagaagtggtg

SEQ ID NO: 67690 - DNA, 100 bp, Homo sapiens
gtcagctgtgctgatgacatcagataagtgacgacagtatgggctatcaatatccattcactctacgagttgtgcagaaagatgggaactcctgtgcttg

SEQ ID NO: 67691 - DNA, 90 bp, Homo sapiens
agaatcctgaggctcctctcaatgtgtcccgtgtggcccagttgtgcagggtggaaccgtcccaaaatgtcccttgctcagaagaaggat

SEQ ID NO: 67692 - DNA, 100 bp, Homo sapiens
agagagtcccaagtacgtccacggtcagccttgcgctgggctcaaaatgcagagaactcaaagatattcatttcggccagtgttacaagatctcagatga

SEQ ID NO: 67693 - DNA, 82 bp, Homo sapiens
taacattggctggagtagcaaggatcttcaacactagaagatatttgctgcagcctttagtttatcgatggtcgactggcaa

SEQ ID NO: 67694 - DNA, 80 bp, Homo sapiens
ggcgattcgtgttcgtgagggccttttctggtgatgtgctctatgaactccttcagcatattctgaagcagaggaaacct

SEQ ID NO: 67695 - DNA, 83 bp, Homo sapiens
actgatgaagtgttagacatcgagatcaatgaacctttagatgaatttacaatgagcagaactacattctccgagatgctgag

SEQ ID NO: 67696 - DNA, 75 bp, Homo sapiens
aacgagggatgctctactaccagacagagaagtacggaatgagccctggaacatttctatttcagcagaatatat

SEQ ID NO: 67697 - DNA, 98 bp, Homo sapiens
ggcaggagacttatttcagaatggagaatttgcaactcatcatagtcctggacagtcattttgtttactcattcagccctgttgcaggtcccaataaa

SEQ ID NO: 67698 - DNA, 100 bp, Homo sapiens
cggcttctcccctacgcgctacacaagtggagctccttttcctccacctaccttcccgagtataagcagtttagccaaattttgaagaacattggagaaa

SEQ ID NO: 67699 - DNA, 80 bp, Homo sapiens
aaaatccagaagtacaagcagtctgaaaggaaggaggagacctgaacagtacatccggagaatccagcaaagcatactac

SEQ ID NO: 67700 - DNA, 133 bp, Homo sapiens
tcgtaagttggtgatcattgaaggagacttggaacgcacagaggaacgagctgagctggcagagtcctgtttgacctgctcaacaagaaggccaagctgcgcgtgctggaggacggcaagcaacaggtgcaag

SEQ ID NO: 67701 - DNA, 98 bp, Homo sapiens
atggaggaggggcggcgctgcggccacccggcagaggaatgtttgctgggggattgaaggagatggaacaggaagaggtcctgatccacggtgtgtcc

SEQ ID NO: 67702 - DNA, 100 bp, Homo sapiens
gggagcactggaagtacgggcagttgcagtgttggagctaaagcaatccacctcgaagatccaagtctgcacctcctcgtgatttaggcaatttggataa

SEQ ID NO: 67703 - DNA, 50 bp, Homo sapiens
ccgggctgccccgcaggatcatcaaggagaaactggctcttcgacagcag

SEQ ID NO: 67704 - DNA, 75 bp, Homo sapiens
tacgttgaggaggctgagaaagtgcgggaatcacgtgcccccaggtctttcccgcggtgacttcccttgggctga

SEQ ID NO: 67705 - DNA, 83 bp, Homo sapiens
gggaatggccgcggtgtggcagcaagtcttagcagtggacgcgaggtgctggagaatctggtaaaagcaccattgtgaagcag

SEQ ID NO: 67706 - DNA, 87 bp, Homo sapiens
caccatgtggtttggggagtctgaggccaatgtcagagaaatctttgacaaggaattacatgaatgacagtcttcgaaccaatgtgt

SEQ ID NO: 67707 - DNA, 75 bp, Homo sapiens
cagcgagtgccaggaactcttctggggagaccccgacgtggagtgccgagtggttccccctggaagtcctgggcc

SEQ ID NO: 67708 - DNA, 100 bp, Homo sapiens
aaaatgcccaggaggaagcaggagcagcccaagcgccttccctcacgaaagtccatcagcttgataatggaggagaacaatgactccacggagaaccccc

SEQ ID NO: 67709 - DNA, 100 bp, Homo sapiens
ctccgccggggggctatgggcccatcgactacaaacggaacttgccgcgtcgaggactgtcggggacaggtgacattcagggatgtggctatagaattct

SEQ ID NO: 67710 - DNA, 82 bp, Homo sapiens
cagtgccctgagggccttcgagagctaccgcgccagacagacttcccaagtaagaagcggaagaggagccgctggaaccaag

SEQ ID NO: 67711 - DNA, 96 bp, Homo sapiens
ttctggtgatacccaagaaacatatatcccagatttctgtggcagaagatgatgatgaaagtgtgcataaggcaaatccaatacgcaagtaccagg

SEQ ID NO: 67712 - DNA, 74 bp, Homo sapiens
agataacttcctaatgggtattgggcgtcactgtaataagacacttccctctgtgaccatgaaactctgggtgt

SEQ ID NO: 67713 - DNA, 100 bp, Homo sapiens
atttaaagatttttgtttgaatgaaattaatgaagctgtacctcaggtgaagttttatgaagagatatcatggaaatcaggacagtggcagttggaattg

SEQ ID NO: 67714 - DNA, 82 bp, Homo sapiens
gcggatggccccaggtgtaagcgcagaaagcaggcgaacccgcggcgcaataacggatgggagtcccagcttctggagacgg

SEQ ID NO: 67715 - DNA, 82 bp, Homo sapiens
cccgaactccaggacagcatccaggcctcattggacagcattcgagaaggaagaggcccagcagaagggactcgctgagcca

SEQ ID NO: 67716 - DNA, 100 bp, Homo sapiens
ttagccatgtggatacctacggagcacgagaaatacggcgtgggagcccagtttcctccaattgcagcacaagaccttccttttgttctaaaggctggct

SEQ ID NO: 67717 - DNA, 99 bp, Homo sapiens
ctggaccaagatcgagcccagcgtcaacttcctcaagtcgcccaaagcaaattgtggctactaatttgccccctgaagatcaagatggctctggggatg

SEQ ID NO: 67718 - DNA, 100 bp, Homo sapiens
cctaactttagagttggaaaaaaaattggatgtggcaattttggagaattacgattaggaacgaatgcaggaatttgggaactgagctgtgcaagtgctg

SEQ ID NO: 67719 - DNA, 75 bp, Homo sapiens
atggagcaactgctttcacaggggcaccagggtcgtcatgtcaaaacgggccagcttgcagccatcaaggttatg

SEQ ID NO: 67720 - DNA, 100 bp, Homo sapiens
agaccgaaaagaagatgatacaaatgaatttgttagtgctgtgtgctggagggcactaccagatgggttccatggaaaatgggagaccacctgatcctgc

SEQ ID NO: 67721 - DNA, 98 bp, Homo sapiens
cttgaacccattgtcacccctccggcagaggtggaggagacactgaagcgactgcagagccagaagggagtgcagggaatcatcgtcgtgaacacaga

SEQ ID NO: 67722 - DNA, 98 bp, Homo sapiens
accgggatggtggactttgctctggaatctggtggtcatcgtggggagcgtctttgaagtggtctgggcggccatcaagccgggaagctcctttggga

SEQ ID NO: 67723 - DNA, 50 bp, Homo sapiens
gcgaacacgccgcggtcctcgtcgtggtgcagtggctcacccctgtaatc

SEQ ID NO: 67724 - DNA, 97 bp, Homo sapiens
ggcttgtgttggagacccattttacaaaattacatctgaagcacttcttgttactcaacagcttgtcaaagtgaccaaggaagaaaggcacattgtt

SEQ ID NO: 67725 - DNA, 98 bp, Homo sapiens
gttttttcagactccttggaaattaaggaatgcaattctgccaccatgatggaagaaacagatgattatgctgagattatagatgaagaagatactta

SEQ ID NO: 67726 - DNA, 100 bp, Homo sapiens
cgtgagtcagctgtcctataacgccggtgctctgacctggctgtcctgcgggagcctgtgcctgctgggtggagaacatgcagctgaccctgaacctgca

SEQ ID NO: 67727 - DNA, 50 bp, Homo sapiens
ctcattttatctgccacgacccagaagtatttagccttgcaggacctgat

SEQ ID NO: 67728 - DNA, 100 bp, Homo sapiens
cgtgctcatcttcatcgccctggctctgaatggctttggtgggatgtgtatgaccttcacctcattaacagagagaagtttgctgaggaatgccttcaag

SEQ ID NO: 67729 - DNA, 50 bp, Homo sapiens
gcactgagcccagcctcccggatgggggcagtacccaaaggaaacgctac

SEQ ID NO: 67730 - DNA, 75 bp, Homo sapiens
ctgctgcctgcaccgccgggccaaaaggaggcctcctatgacccaggagaccagtatgatgtctgtgccatttgc

SEQ ID NO: 67731 - DNA, 100 bp, Homo sapiens
cgtttctcgagggaaaggctgctgcctcctgctctgtcctcatccccggcttaggttaaacccatccagagtaatggctgcggccttacccaggaccctg

SEQ ID NO: 67732 - DNA, 74 bp, Homo sapiens
cggttcttcctacaagaccctcaaagccaggagctcgatgtgcaaaattatatccagatcgagagacagaagat

SEQ ID NO: 67733 - DNA, 90 bp, Homo sapiens
ctaccaccagcttctccagggagagagaaaccccaggctggaggacgccatcaggacagacatcctgcagtactacctggcctgctcgcc

SEQ ID NO: 67734 - DNA, 100 bp, Homo sapiens
ggccaagcggagagactcgccggccgagggtggccctaggggcagcgagcaagacagcaagcaggtggtgagccggctgggcctggactccctgtgcccc

SEQ ID NO: 67735 - DNA, 73 bp, Homo sapiens
tggatccattcctcccattcatgtgcctccaggttatatctcacaggggaatcccggaggcaagacacttgag

SEQ ID NO: 67736 - DNA, 75 bp, Homo sapiens
ccggccgcctcagccatggacgcgtccctggagaagatgccatggacaatattaccaggcagaaccaattctacg

SEQ ID NO: 67737 - DNA, 98 bp, Homo sapiens
actctagtaacccgcgaaatgatgggatagcgttgcaaatccttaaaagagtcttaacgaaaagtcctccatacattttctccccaattccattcctt

SEQ ID NO: 67738 - DNA, 75 bp, Homo sapiens
gagaggcatgaagggattggtctatgaaacatcagttcttgatcctgatgagcttgccgaactaaagcaagaatg

SEQ ID NO: 67739 - DNA, 100 bp, Homo sapiens
ggagacacagtatagcttctgacagtggagacactggcattggaacttcctgttctgatagcgtggaagcgtcatcacgtagacataaccaagaaacttc

SEQ ID NO: 67740 - DNA, 98 bp, Homo sapiens
ctcttctgcaacagttaataatccattccttccatctgaagatcaggtatccaaaacaagacaaatttacatgtattggagaccagaccagaagccct

SEQ ID NO: 67741 - DNA, 75 bp, Homo sapiens
attaggattgcaactggacagatagctggcgtggataaagatggaaggatttggacttccagattctagacgcca

SEQ ID NO: 67742 - DNA, 100 bp, Homo sapiens
gggctcccagccctagaccagctcttagagtaagagggaccatctcctcatgaacgtcaaatggtactaccgtcaatctgaggttccagattctgtgtat

SEQ ID NO: 67743 - DNA, 100 bp, Homo sapiens
tctctccctctgcccccccttccccacgcaaccccagatccatttacactttacagttacttttcacatagaaccatatagcaatcgagatgatcaaaac

SEQ ID NO: 67744 - DNA, 89 bp, Homo sapiens
tgaaaggcatgaagatgcacagaaaggcattgagcaagtgcagcaaagtagaggcctgcaagaaatagaagagtcactcaggagtcacg

SEQ ID NO: 67745 - DNA, 98 bp, Homo sapiens
agacaatggttagagaagaattttccaaatgaatttgcaaaacttactgtagggaaatgtttcaacgtgcgcaagcgttgcggcggcgggcagaggac

SEQ ID NO: 67746 - DNA, 90 bp, Homo sapiens
ccttagaggagccatttttccagaaccattccccttgcaatatgtatatccatggccattgtcaccattggctatgtgctgacaaatgtg

SEQ ID NO: 67747 - DNA, 74 bp, Homo sapiens
ccagacccagcagctgctccacccggcacagggtgtgatgaatgcagactctgctaccattttggctgtttgga

SEQ ID NO: 67748 - DNA, 75 bp, Homo sapiens
ggcctccccagccacgtgaaactgaataggatgagtgataatccacccagaatggaagtgtgtccttactgtaag

SEQ ID NO: 67749 - DNA, 100 bp, Homo sapiens
gtgaaggagaaattcgactatggcaacaagtacaagcggcgggtgccccgggtactccaaagattcaggtttactcacgtcatccagcagagaatggaaa

SEQ ID NO: 67750 - DNA, 75 bp, Homo sapiens
agactacggagcataggaggaaaattcatcatctgacttgaaactgcatctgcagagcactgattatggtaactt

SEQ ID NO: 67751 - DNA, 75 bp, Homo sapiens
tgatcccagctttaaaggagatgcaggagaaaatacggcattgctaggtggtcttggaggcattgggatgggact

SEQ ID NO: 67752 - DNA, 75 bp, Homo sapiens
aggcattgctcatgagaacctcattcctctggaaaccctaggtgtccctggctgggcagtgtatgcagaacgccc

SEQ ID NO: 67753 - DNA, 100 bp, Homo sapiens
cagagctcacgtgcctcaacgaagcctcggtgctgcacaacctcaaggagcgttactactcagggctcatctacggatgaattgtaaaagcaacatcagc

SEQ ID NO: 67754 - DNA, 101 bp, Homo sapiens
gcaaaaacgttatagcaacagcctctgattacgacatggctgagatcaccaatatccgacctagctttgcaataccaagaaggagggtgacctgatagctg

SEQ ID NO: 67755 - DNA, 82 bp, Homo sapiens
aagatcctggagtatcagagccaggcaaataagtaccacaactcctgcctcataggtgaccaagaatatggcccaggtgacc

SEQ ID NO: 67756 - DNA, 50 bp, Homo sapiens
taaagcagcgtgcgttcagccctggggatgggagtcccagcttctggaga

SEQ ID NO: 67757 - DNA, 100 bp, Homo sapiens
cagaactacaggggctctggccatcttcgtgtaagactttgaccccgacgcaggcttcagtgattgccgcggatcagaagcctgagcactttggctcgag

SEQ ID NO: 67758 - DNA, 100 bp, Homo sapiens
ggttggtcatgaaagagattccttgcagagacagctcaacacggcacttccacagctttgcccgaagtttttacatacaaattctactagtcacacctgg

SEQ ID NO: 67759 - DNA, 85 bp, Homo sapiens
cacaggccctcgttgcccagatgtaagtaaggaggtctctgtaccatggctcgtacaaagcagactgcccgcaaatcgaccggtg

SEQ ID NO: 67760 - DNA, 75 bp, Homo sapiens
ctgcgaaggaaacttacccaaagggaagtctgtgtcattccacacatccacaaatctctgattgggaagaaagga

SEQ ID NO: 67761 - DNA, 87 bp, Homo sapiens
ggggtcagttgtccagttcatccctgagccttgagctcccagtcgcagtggtggcacaaaggctgaggaagctagaatttcctgtga

SEQ ID NO: 67762 - DNA, 76 bp, Homo sapiens
tgacagaactggttcagcggagaataacatatcttcaggcacagttggtggatctgaaatctgaactgacagaaac

SEQ ID NO: 67763 - DNA, 51 bp, Homo sapiens
ccgaccccagagaggcgctggacagcttcccttgtcactgctgaagacggc

SEQ ID NO: 67764 - DNA, 75 bp, Homo sapiens
gtcacgctgggtaatgaggatttgactgtgaaggccatcgaagacggcaatttggaggaaatggaagaggaagta

SEQ ID NO: 67765 - DNA, 83 bp, Homo sapiens
acaccacagaagccctccgagcccagttcaaaagaatgctgaaccgggagctgacacacctctcagagatgagccgatcaggg

SEQ ID NO: 67766 - DNA, 90 bp, Homo sapiens
cactgcaccctccgccaggctccgcgggatgcaccgtggtagccgagggcggaggcgacactctcaggtttacaggtacatacattacac

SEQ ID NO: 67767 - DNA, 80 bp, Homo sapiens
gtttctgtttagatgaccagtctcctgacctagaggatcaagacataatgggagcatttttagacaagccaaagatggaa

SEQ ID NO: 67768 - DNA, 101 bp, Homo sapiens
atcaagagacctatcaagacctgtatccaggaaaagtgccaggccgggcacctggtgtgtaaccaatgccgccagaagttgagctgctgcccgacgtgcag

SEQ ID NO: 67769 - DNA, 100 bp, Homo sapiens
accaatatctcagagcacaccagtcttccctcctgggtcacttcctatcccatcccagcctcagttttctcatgacatcaatgcaagcttgaataagaaa

SEQ ID NO: 67770 - DNA, 98 bp, Homo sapiens
atcggtgtgataaatatgacatcatgcaccttcgtcccatgggtgacctgggccagcttctgtttctgggcaccatgggccggcactgccacgttttc

SEQ ID NO: 67771 - DNA, 100 bp, Homo sapiens
ggctcattgtagcctcaaactcccaggctcaagcagtcctaccatgtcagccttcccagtagctgggaccacagtgaagatagtgatccggggagacagg

SEQ ID NO: 67772 - DNA, 82 bp, Homo sapiens
gagacgccgccggccgccgctggcgcatggcgggctcctggtaacgtttttatccatggatgacttgcttgggtaaggacat

SEQ ID NO: 67773 - DNA, 50 bp, Homo sapiens
gaagaactcgcctctgttgagtgaggagatgttaaagtaacccatcttgc

SEQ ID NO: 67774 - DNA, 73 bp, Homo sapiens
gactattggacctgctttgaggtcaacgagagggaggaggcagagctcaggccccggggcctccagcggcacc

SEQ ID NO: 67775 - DNA, 82 bp, Homo sapiens
aaagaacttgcagttgaaggagtataacacagaggtcctgctgtactagccaccaaagcagctgctggtactaagaaatatg

SEQ ID NO: 67776 - DNA, 100 bp, Homo sapiens
ctcatccacaccaagaatcagccacagacggaacaagcatgcagaagcctaaagaaactgttccaactcttgctccaaaaactctttcagtagcagcagc

SEQ ID NO: 67777 - DNA, 74 bp, Homo sapiens
cttcgagtgacccgggtgccgaggagcgggaagagttgctgggccctctggaccccgaggttggaccctactgt

SEQ ID NO: 67778 - DNA, 75 bp, Homo sapiens
gcaggagctggggtccgcggtctggggccggacggggaggtttactgcatcgacgcgcggttctacgggaacgtc

SEQ ID NO: 67779 - DNA, 75 bp, Homo sapiens
agcagacaagtgtggtgcagacacccacttcggctgatggttgcccccaagtttcctggcagtgtgtgatactga

SEQ ID NO: 67780 - DNA, 75 bp, Homo sapiens
ctggccggggtgcagtaccccagctccatcaacctcacgctgcacctggatcaaattttctccggtggctaaaaa

SEQ ID NO: 67781 - DNA, 100 bp, Homo sapiens
ggctgttgacatctgtctgtctcagctgccgacgatcatcgaggaaggcactgcgtttcggtcatccgtccttggctcaggatttggagagcttgcacca

SEQ ID NO: 67782 - DNA, 75 bp, Homo sapiens
cactttagaccctccacctaattgcaggtccactggctattctgaggtgatagttgtcgttggaggatgtgagcg

SEQ ID NO: 67783 - DNA, 75 bp, Homo sapiens
gggagatcgtgggcgagctgggcgacggcgccttcggcaaggtttacaagatctttaatctcatgaagtacgaca

SEQ ID NO: 67784 - DNA, 51 bp, Homo sapiens
ttaggatacactcagactctaaagccaggggatgtttaccttctatcatca

SEQ ID NO: 67785 - DNA, 83 bp, Homo sapiens
ctttgggcagacagcccatggcacaggtgacttaagagattaaaattaatttggttgctgttggttctgaacaaataatgagt

SEQ ID NO: 67786 - DNA, 123 bp, Homo sapiens
tggaccccaagaagaccattcagatgggatctttccggatcaatccagatggcagccagtcagtggtggagaccccaccaacaactgaacgctttggtcaggctgctacaatggaaggaattg

SEQ ID NO: 67787 - DNA, 90 bp, Homo sapiens
ctgccagatagctcttattttgaggtgtgttttataggcagaagcaatgttggaaaatcatctctaatcaaggctttattttcactggcc

SEQ ID NO: 67788 - DNA, 74 bp, Homo sapiens
aggattccaagtaactcttatttggatttaggttgagtccccaggctgtgaattcaattgcaaaacgatacagc

SEQ ID NO: 67789 - DNA, 75 bp, Homo sapiens
agcagccactgttcgtctctggaggagatgactataagattaaggctaaagtaaataatgccagcctgattggac

SEQ ID NO: 67790 - DNA, 100 bp, Homo sapiens
cctcttgggaacaaaatacaaatcatggagccgctggggtcccttttgcctcagatactattttgaagctgccactgcagagccccgccatggaagacac

SEQ ID NO: 67791 - DNA, 111 bp, Homo sapiens
tatggctttgtccccacccagcactgatgatattataaaaaagagctgggaacctttgctcaaagctccatcgcccttcaccatcagtacaaccccaagtttcagaccctg

SEQ ID NO: 67792 - DNA, 90 bp, Homo sapiens
cgacttcctcaaaggctactgccccctgggtgcaaaggttgcacactgggccacagaggatccagcaaggatgaagaaatggagcagcac

SEQ ID NO: 67793 - DNA, 100 bp, Homo sapiens
cgctgctgccgccaccactgcgtcgggctggtgcagccccgggccaggccgcggccggggcaggagcgcagcttgtactcccagagtacctcatccacgc

SEQ ID NO: 67794 - DNA, 101 bp, Homo sapiens
cgcggaaggagctggagacggtcgtagctgcggtcgcgccgagaaaggaagtgtttggattgtgagctatttcagaactgttctcaggactcattatttta

SEQ ID NO: 67795 - DNA, 110 bp, Homo sapiens
atacaacacgattcttctaatggatgggaacatgggcataagcagtactataatggatgtagacagcacaatttccagtgggcgttcaactccagcaatgatgaatggac

SEQ ID NO: 67796 - DNA, 50 bp, Homo sapiens
gggagaagctgatatcctggccgcgctgtatgatgggggatgatgaagat

SEQ ID NO: 67797 - DNA, 96 bp, Homo sapiens
agttttcctgctgtaatagactatacaccatatttgaagtatatccaaaggtccggcgggcggtggcctccgtggtgggcggctggctgctgtgtc

SEQ ID NO: 67798 - DNA, 88 bp, Homo sapiens
cagctgtgtgtccagaacgtgccatggagacgcttaacgggcattttggaagtgtcaaaggccagggacatccctgttgtcatcgacg

SEQ ID NO: 67799 - DNA, 75 bp, Homo sapiens
tttcaagttaaggtccaaaaaaactccagctgtgaaagcaacataaatggacatggatttgattgacatactttg

SEQ ID NO: 67800 - DNA, 129 bp, Homo sapiens
ggccactccgaaccagaccgcctgtaatgcagagtcaccagtggccctggaggaggccaagaaggtgacaaagtacaatttgaagaatttgcaaaagtagtaaggaatatgcgtgatgctgccaggtta

SEQ ID NO: 67801 - DNA, 100 bp, Homo sapiens
aacccggactggatcaacaccggggagtctgcggtactatactggcaattgctggagaagattttgcaattgttgcttctgatactcgattgagtgaagg

SEQ ID NO: 67802 - DNA, 100 bp, Homo sapiens
ctgctttggtggaagatcccggctcccacatcaggacgagaaggagccctcgagttaccgtgggagctgtgggagctgccctgtgactcttaggaagatg

SEQ ID NO: 67803 - DNA, 125 bp, Homo sapiens
cgggaaccgaggagtacgagctcaacggcggcctgcctccgggcacacccggctccccggacgcctcggtgccctacgagacgctgaacaaacgctttcgcgccgctcagaagaacattgaccgg

SEQ ID NO: 67804 - DNA, 87 bp, Homo sapiens
agtcaccagcaggagcagccaaccagcagcagccatcatggagggcaaaggaggagcccaacatcctgggttggagtttggatgcag

SEQ ID NO: 67805 - DNA, 87 bp, Homo sapiens
ggactgcagctcagaaaggaacatactctcaaaatatttacttatatcaattcctggacacagagccaagtatcttcaagaccttct

SEQ ID NO: 67806 - DNA, 71 bp, Homo sapiens
tgtatctgtttttctcagaagagaattccacaaggtgcaaagttccccatcaagtggacggcccccgaggc

SEQ ID NO: 67807 - DNA, 97 bp, Homo sapiens
cgccttcgctcctcaccatgtgtaaggcggcggggagccccgcctgaggtgccctaaacacactatgaccgtaagactttgaccccgacgcaggctt

SEQ ID NO: 67808 - DNA, 83 bp, Homo sapiens
ccgagagcaacaaagcaggcgactacagccacgtgaaggagctctttgttcaatgcctagccacctattcctacagacacggc

SEQ ID NO: 67809 - DNA, 101 bp, Homo sapiens
aaacctcccgatgaggaacacaggctcgaggatgctgaaacagacttgggaggctgcattctgataattctcaggaggaagaatgtataggagagaccagg

SEQ ID NO: 67810 - DNA, 74 bp, Homo sapiens
gacagaagcatggtcttggacagcagcaagacagctaccaagtcaggattgttacccccaccacctgcgctccc

SEQ ID NO: 67811 - DNA, 100 bp, Homo sapiens
taattgatttccgggagtccgcaccaggggccctcagggaagagaccctgcaaagatcctgggagaccaagtggccaacagtgttgcaaacaggaacccg

SEQ ID NO: 67812 - DNA, 100 bp, Homo sapiens
tcgggaaatccgaatgctcaaggctctgtgtgctccgggatggagcaggtgtgcagagggtgagaacccagctctgggaccaagtcacttgcttccttac

SEQ ID NO: 67813 - DNA, 90 bp, Homo sapiens
gagagggcaataagagcctggtggtggcccacgcgcaggaggaggaagccaagaatctggtgagcgaagccatcgcagctggcatcttca

SEQ ID NO: 67814 - DNA, 97 bp, Homo sapiens
gcacaaggattctcgctgtgacagagacaacaccgagtatgagaaaaactccacttggagatgttggcagaccagccacgaacaactaaataccaca

SEQ ID NO: 67815 - DNA, 75 bp, Homo sapiens
agtctccagcgggcctggactgtgggctggtgtgtggaactggttcctgattatgtcactgtaataaagcaacca

SEQ ID NO: 67816 - DNA, 98 bp, Homo sapiens
taccactcgccgctgtttactggaaggctatgataccaaaaatacaagacaggataattccattcttaaagaaaagtgtaatgttggttggagctcga

SEQ ID NO: 67817 - DNA, 82 bp, Homo sapiens
gatctggtgtaccaggcgaagctggccgagcaggctgagcgatacgacgggaacggcaggagcagctgatgggatatcggaa

SEQ ID NO: 67818 - DNA, 73 bp, Homo sapiens
tttacctgcttcccaatcccactgatgaggatcagcccatgcctgcctagggtagttaaaagacgagtgaatg

SEQ ID NO: 67819 - DNA, 101 bp, Homo sapiens
ggggggcggaggaggggggggtaccacacaacaccccagcaaacctccgggcccccaggcatggctagctcgtctcaaaccatgaattatgtgggacagct

SEQ ID NO: 67820 - DNA, 83 bp, Homo sapiens
tggccaccatccttgggaccgcctgcctggccattgcgagcggcatctacctactggatctcgaggacctggaagaagcagag

SEQ ID NO: 67821 - DNA, 90 bp, Homo sapiens
agcagatgaagatgatattaaacttgttaatattcctgtgactactccagagaacttatacttaatggctctaaagccaccatcctcacg

SEQ ID NO: 67822 - DNA, 100 bp, Homo sapiens
cgactacaagaagagggcggagcggagacgggagtattatgaaaagatcgagaccagccactaactggggcgtacacagtgaccctggatggacgagggc

SEQ ID NO: 67823 - DNA, 74 bp, Homo sapiens
ctcactgctcacagctgcccagctgaaagccaaggtggtggtctggaagcggtacagcgacttccgcaagctgc

SEQ ID NO: 67824 - DNA, 100 bp, Homo sapiens
tacttttagacctcagacaaaaatttccacccaaatttgtgcagtttttcagaagaagtgaagtcaagatgaagaaccatttgcttttctggggagtcct

SEQ ID NO: 67825 - DNA, 99 bp, Homo sapiens
gagagccggacaaactcagacatcgtggaggatgacatggaagcttaccggacccagaactgcttcctcaactccgagatccaccaggtcacaaagatc

SEQ ID NO: 67826 - DNA, 75 bp, Homo sapiens
agctctgcgcggctttttgagcggtcccgcatcaaggctctggcagctgcagaaccttggcctgaaaatgctaca

SEQ ID NO: 67827 - DNA, 98 bp, Homo sapiens
tcatggtcacacctgaagaccttaaagccaatgcagctgccactgcagagccccgccatggaagacacgccgttggtgatatcgaagcagaagacgga

SEQ ID NO: 67828 - DNA, 100 bp, Homo sapiens
ttccctttgtaaattgagctctgcacgctggggagtttgttgggagtgatagattcgtgtggcctttcaaatgattgtgaagtggtggaaatggatccaa

SEQ ID NO: 67829 - DNA, 98 bp, Homo sapiens
gagcgcgtccaggcctgacagctctgcggctcgggccctgagcataagctgtggccatgactactgaagtaggctctgtgtctgaagtgaagaaggac

SEQ ID NO: 67830 - DNA, 83 bp, Homo sapiens
gtcctcacctcgctactcgcttgcctacccgccggcccgcgggtctacttcctcaaagcgccgtgccgtccctgcagtgacac

SEQ ID NO: 67831 - DNA, 80 bp, Homo sapiens
ccaagatggtgaagcagatcgagagcaaggggacggcaaaacagaacagaaaggcggagataaaaagaggggtgttaaaa

SEQ ID NO: 67832 - DNA, 95 bp, Homo sapiens
tcacagctgcccattgcctaaagaagttgcccccaagtttcctggcagtgtgtgatactgaggaggtgagcttgtttctggagctgtgctttaag

SEQ ID NO: 67833 - DNA, 82 bp, Homo sapiens
ttcctgtggtctctgcacctcctttctggttaatcatctcattttagtggagccttggggtttccctgaacgaccagacctt

SEQ ID NO: 67834 - DNA, 75 bp, Homo sapiens
gggcatacatctttcttcgacaaaggggctctctttacctatgaaggcaacagcaatgacatccgcgtggctggc

SEQ ID NO: 67835 - DNA, 98 bp, Homo sapiens
gcggtgctgcggccacacaccggcaacgcggtcacggcccagcgcgttcggaattttggagagtaaaaggctgaaccttgttaaagagaaaaccatta

SEQ ID NO: 67836 - DNA, 100 bp, Homo sapiens
cctggatccatcttttgtgcatgcgtcgcgccttttggcagaagaccagcatctcagacatgtcgaaaaagatgttttgatccctaaaataatgagagaa

SEQ ID NO: 67837 - DNA, 96 bp, Homo sapiens
cgtagccagacatgggactggaggacgagcaaaagatgcttaccgaatccggagatcctgaggaggctgatcccaaagaactaatcaagatggtca

SEQ ID NO: 67838 - DNA, 104 bp, Homo sapiens
cagaggcaagtcagagcccccagtttgctggccaaaagcattttagaaggaagaagatgaagtaccggacgatgagactctgaaccaaatgattgctcgacgag

SEQ ID NO: 67839 - DNA, 90 bp, Homo sapiens
cacctttcggcttctgagacggcggcagcagcggcattcagattcacattgacattccaaggacgaatcctctcattccgttgttccagc

SEQ ID NO: 67840 - DNA, 100 bp, Homo sapiens
tatgctgtgtgcagactgcgccattggtgggcaatagcggtgcgtatagcagcaaaattcatcattcatgcccctcctggagaatttaatgaggttttca

SEQ ID NO: 67841 - DNA, 75 bp, Homo sapiens
cagagtcctttgtttccccagaggctgttgcagaacctcctcagccaacggcagcaatggctgccatccggaaga

SEQ ID NO: 67842 - DNA, 75 bp, Homo sapiens
gaagatgttcctgctccttctacatctgcagataaagtggagaggagcccatgatgctgcccaaacctgggacct

SEQ ID NO: 67843 - DNA, 83 bp, Homo sapiens
gagatgacaacgttagagaaagtcatcaatgagacctgggctgtaccagtgcaggtcctcactttaatcctctatccagaaaa

SEQ ID NO: 67844 - DNA, 100 bp, Homo sapiens
tgttagcccgaagaaagaagctgctgaaaacagaagttcacctgcacatcttgttttccctaacatcaagaatgaacttcggatcaagagacaaaactcc

SEQ ID NO: 67845 - DNA, 101 bp, Homo sapiens
ctcgccagcagccgtccggagccagccaacgagcgggaggttcccctgaaggatgctaaggaatacgctgaatccataggtgccatcgtggttgagacaag

SEQ ID NO: 67846 - DNA, 50 bp, Homo sapiens
cccatgctctgctgagcacggtgaaactggcagacctttcacttcgtatc

SEQ ID NO: 67847 - DNA, 96 bp, Homo sapiens
gtgtcctcggagcgcggtccctgtattggtctcctgctcctagaggaattgaatgatctggcacgggaccctccagcacagtgttcagcaggtcct

SEQ ID NO: 67848 - DNA, 74 bp, Homo sapiens
ccgctcctaagcctgcacagccgcggcggcagcagcagtgagagctccagctaggatgatcgaggttgtttgca

SEQ ID NO: 67849 - DNA, 74 bp, Homo sapiens
cggttcgtgcggaaccgccatggccgagccggcttcgggacaaactctgcctgggcgagtccttttcctgcgtt

SEQ ID NO: 67850 - DNA, 75 bp, Homo sapiens
agatcttcttttggagcagcagagactgagatcctacagtaaggaattgtttgaagaagttatttcaaagatgcg

SEQ ID NO: 67851 - DNA, 75 bp, Homo sapiens
tgaagaacccccctatcaacaccaagagtcaggcagtgaagagctggaagtcgagtgtgctactcaactcaggag

SEQ ID NO: 67852 - DNA, 75 bp, Homo sapiens
atctggagtgaagttttcactgtggagaagccaggtgggaagaagctggctgtcttcatgtggctgatgacctat

SEQ ID NO: 67853 - DNA, 75 bp, Homo sapiens
tgaatcagcagccaaatacaaacagtccacaggaagaggttgaactaaagaagttgaaacatttggagaagtctg

SEQ ID NO: 67854 - DNA, 101 bp, Homo sapiens
gtccctggcattttaggtgtcggttgggtaggtaccagatcatcagtcaattaagttaagtaatctaggtgagaataaacactatgaggttgcaaagaaat

SEQ ID NO: 67855 - DNA, 75 bp, Homo sapiens
ctgaagttatttcagagttcttaattaatggcgaagaatcaaaagtgaggcatttcatccttcatgaagccattc

SEQ ID NO: 67856 - DNA, 80 bp, Homo sapiens
ctcgccgtcactgttgtataaatgagggaaaacccctgatcctaaaatgaatgctaggacttacatggatgtaatgcgag

SEQ ID NO: 67857 - DNA, 90 bp, Homo sapiens
gccagccccgccgccctcgcaacctggcagccgccgccgtggaagcccatcatcttcgtttcggacagagcaaacagcaacaaggagctg

SEQ ID NO: 67858 - DNA, 75 bp, Homo sapiens
gctctcttccatccccatcttacagatgtattaagaagcctcaggtgtgaacccacatccctgcccccagggcca

SEQ ID NO: 67859 - DNA, 90 bp, Homo sapiens
ggtgaaccacagcaagttcatggtcacggagaaggcagcctacataggtactccaaagattcaggtttactcacgtcatccagcagagaa

SEQ ID NO: 67860 - DNA, 100 bp, Homo sapiens
cactttcgcaacatcaagggagttttccggggccctctcagcaagaacgggaacaaaactctgatgcctgaggaagtgcaccatggagaggaggaggtgg

SEQ ID NO: 67861 - DNA, 100 bp, Homo sapiens
agagcagcagccagaaggatgagatccttcagacggtcaaggaggagctttggttcggagacaggcaaaggagccatgtgtggagagcctggtttctcag

SEQ ID NO: 67862 - DNA, 100 bp, Homo sapiens
cctccatcctgggcaaacctgcggacggtgaagttgaacaaattgctatgatgaaaccaaaaggccagactgaacacgatgagggtatgcttgaatattt

SEQ ID NO: 67863 - DNA, 85 bp, Homo sapiens
ccggacgagagctccgtgcgggtggctgtcagttggcccgccacaataaactgttgcagcagatgctcaaaccaggatcggatcc

SEQ ID NO: 67864 - DNA, 49 bp, Homo sapiens
cctgcccttcaccctctacatgacaagttggatggcttgaggactggta

SEQ ID NO: 67865 - DNA, 83 bp, Homo sapiens
ggcagcgccacctccaactggaagaagacgcccctcagcacagggcttgtcaatgaggcagatcagattcaggttcgacgggc

SEQ ID NO: 67866 - DNA, 100 bp, Homo sapiens
ctttgccatcactgccattaagggcctcctcccaaggagaacatgagaccacttcatatctggaactctagaaacactggctgcagcaatcaacctcctg

SEQ ID NO: 67867 - DNA, 74 bp, Homo sapiens
cgaggacaaggacaaagaaggcaaacccctgctgaaggctggcttattagctgtaatggcccagatgggttgtt

SEQ ID NO: 67868 - DNA, 74 bp, Homo sapiens
gcagcgacgccagcggcggagaaccgacgaaaggtggggtggaagacaacccgtgagtattacaccttcatgtg

SEQ ID NO: 67869 - DNA, 90 bp, Homo sapiens
gagaatagaccctctgtccaggcagcattaaaacttaagcagctttttatgcagattgaagctctctttccacaaaaatttggaagatgg

SEQ ID NO: 67870 - DNA, 50 bp, Homo sapiens
aggtcttctttatactgcagtgatattgatggagtcttactctgttgccc

SEQ ID NO: 67871 - DNA, 82 bp, Homo sapiens
tgcagccaccctcgctccctctgctcttcctcccttcgctcgcaccatgcccgagcgggaagaagttccgcagcaagccgca

SEQ ID NO: 67872 - DNA, 100 bp, Homo sapiens
tacgagagcaaaatgattgaatacgatcctgaaagaagattaggtgctggagaatctggtaaaagcaccattgtgaagcagatgaggatcctgcatgtta

SEQ ID NO: 67873 - DNA, 96 bp, Homo sapiens
ctggctgtccagaagaacaagcctatcagcaagaaggaaatgattcagaggtccaaacgccagtgccaatatctgcaatgtggtcctgatgcggta

SEQ ID NO: 67874 - DNA, 97 bp, Homo sapiens
agtggtactaggattatacattgtaagaggtgacaacgtggtgataaaagaaaatgtggctgaagttacccgaagttcagcttgcagtgtaattcag

SEQ ID NO: 67875 - DNA, 50 bp, Homo sapiens
gtcgccgccggcgtcggcgccgccacattgctgtgaggaagcctgggcta

SEQ ID NO: 67876 - DNA, 100 bp, Homo sapiens
cgcgcctgcccagctttgcagcccccgaacgcggcctcgcacaggtttttcgttggaatatacgttgcacatttatggcgattctgagtgtgagggcaga

SEQ ID NO: 67877 - DNA, 103 bp, Homo sapiens
ctgggccgccggctgtttaacttcgcttccgctggcccatagtgatctttgcagtgacccaggaaagggggctgtatacagctttgatccagtagggtcttac

SEQ ID NO: 67878 - DNA, 82 bp, Homo sapiens
gcggcgcagccaccccgcgggatacgcctcagcgcggtgacttaagagattaaaattaatttggttgctgttggttctgaac

SEQ ID NO: 67879 - DNA, 96 bp, Homo sapiens
attcctaaacctggacaagacggggaaattgtgcaggtcagctctgcggacgctcggctcatggtctttgacaagacggaagggacgtggcggctg

SEQ ID NO: 67880 - DNA, 75 bp, Homo sapiens
gcagagagctattattccctgtattaaaggtgaactccagaaagccattgacttattcacagatgccatcaagct

SEQ ID NO: 67881 - DNA, 80 bp, Homo sapiens
cctggggctgtgctccatggcgagctggtgcctacaccaactaatgttacaattgaatcctataacatgaaccctatcgt

SEQ ID NO: 67882 - DNA, 74 bp, Homo sapiens
tcacccaccaacaacaccacaataatccacagccaaggtcgttgaggacttccacatggagattggcacaggac

SEQ ID NO: 67883 - DNA, 75 bp, Homo sapiens
gatattgatgcgccagtcactggtatccgttacagcactgatgtgagtgtagatgaagtaaaagctttggcttct

SEQ ID NO: 67884 - DNA, 82 bp, Homo sapiens
gacaagccgctggcagccgcggatctcaccgccgctcaggcctgttcgacatgggcggtgagtattactgcttcgcttccga

SEQ ID NO: 67885 - DNA, 78 bp, Homo sapiens
gtatgcccaagtcaagaagccgcggaattccaaaccctcacctgtagacagggaccagttactctccacaagaaaatt

SEQ ID NO: 67886 - DNA, 100 bp, Homo sapiens
tggcccaggcagaccttgcagtcaaaaacatgaacgattggatgcccatcgccaaggagtatgatccactcaaagcgggcagcattgatggcaccgatga

SEQ ID NO: 67887 - DNA, 90 bp, Homo sapiens
aacaagccaatcccaggaggaaaaacgttacagcagatgaatggaacagcaaccatacgatagaaatagagataaatcagactctggaaa

SEQ ID NO: 67888 - DNA, 99 bp, Homo sapiens
aacagctgaaaatgtggggaagccaacaatcattgagattccagactccatcatttctcgtggtgttcaggtgctcccacgagacacagcctccctcag

SEQ ID NO: 67889 - DNA, 99 bp, Homo sapiens
gcgagtcccgagcgcacctgggcgccctgctggcaagatacatccagcaggcccggaaaggacagtcattttgtttactcattcagccctgttgcaggt

SEQ ID NO: 67890 - DNA, 75 bp, Homo sapiens
tgcggcgtgtgcgcgcccgccagctgctccggagatacggcgaaagggcgtgtggttgcgcctgaggaagatact

SEQ ID NO: 67891 - DNA, 76 bp, Homo sapiens
gcaaagtgaaaagcttgaacgtattggctgggatccaccaaaacttcaatcaattttcctttcttaaggagataat

SEQ ID NO: 67892 - DNA, 90 bp, Homo sapiens
tctcatgaaggaaggaaccgaagatgcctgaggaagtgcaccatggagaggaggaggtggagacttttgcctttcaggcagaaattgccc

SEQ ID NO: 67893 - DNA, 100 bp, Homo sapiens
ctctactgccatggtggacctcaccaactcacttcgagcatttatggatgtcaatggaggtgaagatcatgacggagaaggaactcctggccgtggcttg

SEQ ID NO: 67894 - DNA, 124 bp, Homo sapiens
gattcgcgtacacctgttgtttgaaagctctcagcgggacaatgctgacccagtctctggctgatgaacttgctcttgtggatgttttggaagataagcttaaaggagaaatgatggatctgca

SEQ ID NO: 67895 - DNA, 97 bp, Homo sapiens
gctgattccccccgcatcgcctcccgtggaagcccaggcccgcttcgcaggccaactacacagacccccagagcaaactgcggttcagcaccattga

SEQ ID NO: 67896 - DNA, 82 bp, Homo sapiens
gctccagaacaactcttcttcatagttacgttatactgcccctgcattgttggtattgaaaatggagtctcgctctgtcgcc

SEQ ID NO: 67897 - DNA, 75 bp, Homo sapiens
cctgaacgccggcaccaatacagatggcttcaaggagcaaggcccagctcatcgcccagtctatcggccaggcct

SEQ ID NO: 67898 - DNA, 82 bp, Homo sapiens
tgaaaactcttttcgaagcctgacttggccaccttcgggttccccatctcatgctgattgtccagaacatcgtgggcacagc

SEQ ID NO: 67899 - DNA, 75 bp, Homo sapiens
cgcagaggctcccgggctggactcaggcttctcaggtgaaaggaaagcaagccaggatggatatttacgacactc

SEQ ID NO: 67900 - DNA, 100 bp, Homo sapiens
ctcagatggccagtttgccctctcaggctcctgggatggaaccctgcgcctctgggatctcacaacgaactggatgcatttcagccataccccattgaaa

SEQ ID NO: 67901 - DNA, 75 bp, Homo sapiens
cccgagaggagccacaatggagacgccgccgctgcctcccgccttgctcctgagaccaaggctgtcattcattgg

SEQ ID NO: 67902 - DNA, 74 bp, Homo sapiens
gtggtggtgactgagcggagcccggtgacaggatggtaatactgcattgcatgattgtgcagaatctggaagtt

SEQ ID NO: 67903 - DNA, 75 bp, Homo sapiens
gggcccggattactatctcaaaaactatgaggatgcatttaaatcaaacggtattgagatggattgggttatgaa

SEQ ID NO: 67904 - DNA, 83 bp, Homo sapiens
gtcagaagaaggctgctattgaaagagagtatgcacaggaaatgggtcctgatgaatatgaagagatggaagaagaggaggag

SEQ ID NO: 67905 - DNA, 100 bp, Homo sapiens
aaaatctcccaagaggaatgacaaacaaccagctcttcaggttgaagccatccttgtcaatatatttggtggtatcgtcaactgtgccatcattgccaat

SEQ ID NO: 67906 - DNA, 100 bp, Homo sapiens
ttcacttatctcgaaagcctatcagcatagttaaggtctgtttctgtcgactgtggaccacttatgtgcgatccgtggaccacttgcgtgcgatctgtcg

SEQ ID NO: 67907 - DNA, 100 bp, Homo sapiens
gaccctgtaacccaaaggaggaaacagctggctaagctcatcattgttactgagcatgtctgttcgatcctggcttccctcctgcggaacctgagagggc

SEQ ID NO: 67908 - DNA, 80 bp, Homo sapiens
ctaaagcagcgtgcgttcagccctgggtgtcctggtgaagacctagttcttgccggagacaattccactgcagaagcact

SEQ ID NO: 67909 - DNA, 74 bp, Homo sapiens
aggaagctcagcaagactggagtccctgatggaattatgcagtttattaagatccccgaccatttccggccacc

SEQ ID NO: 67910 - DNA, 90 bp, Homo sapiens
cagtgaatgttcaaagccagagcagctggttgtaacatttgtagcaggttacatagaactacagtctttggaacagcaattagaagaagc

SEQ ID NO: 67911 - DNA, 100 bp, Homo sapiens
cagactccatgtttgcagtggccagcaaagatgctgggagctatgaagacatgattggtgaggaggtgccatcggatcaatactactgggctcctttggc

SEQ ID NO: 67912 - DNA, 75 bp, Homo sapiens
cgcggacagcgggctggagcctgacgagctggcggattttgatcaggctaagtaaactctgtgtgcagaataaaa

SEQ ID NO: 67913 - DNA, 83 bp, Homo sapiens
cgcgtgtggaggaggctgaagtctcacatcagaggtgtcaagaccatcctcatgtcccccaaattccactgtacagaggagat

SEQ ID NO: 67914 - DNA, 51 bp, Homo sapiens
cggaaaccggtagcgcttgcagcatgaaggaaggggagttcaccctgcacg

SEQ ID NO: 67915 - DNA, 100 bp, Homo sapiens
cccagagtaaactcttagataaaatgacgacgtccttctggaagaggcgaaactgcctctccacaaaggagtgtcgatcagagaagtacttcagctccct

SEQ ID NO: 67916 - DNA, 75 bp, Homo sapiens
cgagagccacactttcaagtaaaccaggcctgatcttcgtggtggacagcaatgacagagagcgtgtgaacgagg

SEQ ID NO: 67917 - DNA, 97 bp, Homo sapiens
cccagccccacagaccagcccagcattcaggattctctcggcaccacgggaaccaccttctctactctcactgaacacccctgggatgtatctgtaa

SEQ ID NO: 67918 - DNA, 50 bp, Homo sapiens
gatagagcaattcaacagttcggagttttgcatcccttgctttggctgag

SEQ ID NO: 67919 - DNA, 100 bp, Homo sapiens
gatgaaaatgaaaactgttcctctctgggatctccaagtgaaccaccacaggtagagatcttttcctagcaagctgttcacaagattgcctgataagaat

SEQ ID NO: 67920 - DNA, 82 bp, Homo sapiens
gtcgtctcagcagtgctcgggcgcaggttgaagaagcctcagcggaggcgatacggcctcctcgccaacactgaggacccca

SEQ ID NO: 67921 - DNA, 102 bp, Homo sapiens
cgccgcccggggcgaggcagggccagcagcaggcgggagggagatacttcaggggattaccggaagattctgctgaagatctgtggtggcaatgactgaaca

SEQ ID NO: 67922 - DNA, 100 bp, Homo sapiens
tcagcagaaagttctaggacttttgattcgggaactggagcctctcctctgtcacagtgacaatccatctcagctcatctggacatcatctcgcagtgca

SEQ ID NO: 67923 - DNA, 102 bp, Homo sapiens
ggaaggcggcgtccgcttttctgacaagggaagagccacttccggctcctgcgtcgctccggaagcctgcgagttccggaagccttggtaatccagattcgg

SEQ ID NO: 67924 - DNA, 100 bp, Homo sapiens
cagagatggcgagcgcccggattggggatgagtatgcggaggacagctctgatgaggagcaagagtgagccatggagctacgtgtggggaacaagtaccg

SEQ ID NO: 67925 - DNA, 100 bp, Homo sapiens
ttatgaatgacaggcttactgaatatcctcttgtaattaatgcagtaaaacgcttccatatttatccagagaacaactctgctcatggtgattacatgca

SEQ ID NO: 67926 - DNA, 90 bp, Homo sapiens
tttacaggccctctattgccaactgttaattttctgagtttaaccagtaatgccattcagttgccaatctcaagcaaagcaaacataagc

SEQ ID NO: 67927 - DNA, 82 bp, Homo sapiens
tttccccagagcgtcttgatccttttgcagatggattcactttggacagatcactagcaatcaaatgcttgtgccagtgata

SEQ ID NO: 67928 - DNA, 98 bp, Homo sapiens
acattgagacagccaacagttttgctgtaacaaacgcctaatgattacggacctgaagccaaagaacaagatgcgctagtggacagattgctgaccag

SEQ ID NO: 67929 - DNA, 90 bp, Homo sapiens
agagaacttcccagcatacctgagaattttccaacatggctagatccatcagaaactgaagccgtggagaacgctctcggggcctttgcc

SEQ ID NO: 67930 - DNA, 83 bp, Homo sapiens
ccagggggtgcgaggataccccacgataatgaagagttgacaattagttgcccagtgcctgcagatgagcagacagaatgcac

SEQ ID NO: 67931 - DNA, 74 bp, Homo sapiens
tcgtgcttcctgtatagctgcagaactcttttctgggagaagaggctacaaggacttagtgcatcagatgtaac

SEQ ID NO: 67932 - DNA, 100 bp, Homo sapiens
cagcagcatctctaggacccttctgattgacatgaagtcaccatcaagtaggcagaactcacaggcaaccagataaactggtggtagtttggaccagaag

SEQ ID NO: 67933 - DNA, 90 bp, Homo sapiens
gccctgtcatcccacctgagaaccatgctcaccgaccctgccatgaccttgcctcctttcctggagttcggtgtcccgtccccagcccac

SEQ ID NO: 67934 - DNA, 100 bp, Homo sapiens
tcaagaatgagagcgagaacacctgtcaagggaatttcactgtcggggtcccctatcgaatcactgtgaccgcagtctctgcttcaggcttggcctctgc

SEQ ID NO: 67935 - DNA, 100 bp, Homo sapiens
cgcaccacgaggtctgccccaagttccccttaacttgtgacggctgcggcaagaagaagatcccccgggagaagtgtactaatggtcacttgatgtgcgc

SEQ ID NO: 67936 - DNA, 100 bp, Homo sapiens
ccatcatgtggttctacctcctcatgaacatcatcactcagtctggcttctgttcccaccgttgtgtacagtctcctctgggagaggtcaccagtgccat

SEQ ID NO: 67937 - DNA, 75 bp, Homo sapiens
gggagcctcatcattggttatgccagcttatgtccctgatgccaaaaatgcacctactctttcctctaactctgg

SEQ ID NO: 67938 - DNA, 50 bp, Homo sapiens
agcattatgtctctttgaagaggcttctcaaccagatgagttgaccattg

SEQ ID NO: 67939 - DNA, 75 bp, Homo sapiens
gaacagagatgacatgccagcccagactttcattgacaacactgcagctgaaggaggagttgctggatggagagg

SEQ ID NO: 67940 - DNA, 83 bp, Homo sapiens
ggcggaggcatccttaccaaggaatctgcttttcaagtatgccaccaacagtgaagaggttctgagatgcagtaaaatcgctg

SEQ ID NO: 67941 - DNA, 100 bp, Homo sapiens
gagctccaggagttcgtctcttacgtctgcggaagtgcagctgcctcagttcttagcgcaggacccagccttgatgcccacttgggaggcagaaagcacc

SEQ ID NO: 67942 - DNA, 99 bp, Homo sapiens
tttccccagaaggactgatgaagaaagacaggagatccggcagcagatcgagatgaagctttccaattactggggcttccggatgcagatgacgatgcg

SEQ ID NO: 67943 - DNA, 100 bp, Homo sapiens
aaggagaagatgctggaggacctgcggcgggaacagcaggccacagagctgcttgcggccaagtacaagacagagattgcgaagagactgaacacaattt

SEQ ID NO: 67944 - DNA, 100 bp, Homo sapiens
caccacgagcgtgagcactacaacctcagcgccgccacctgcagcccaggccagatgtgcggccactacacgcagttactaaaagatgtaactgaactgc

SEQ ID NO: 67945 - DNA, 98 bp, Homo sapiens
ttggcgaagccttgggtttctttcttaaaggactgatttttagaactccacatttgaggtaggtgatgctctgatgctgctgcctcttatgaattgac

SEQ ID NO: 67946 - DNA, 75 bp, Homo sapiens
gtttatatgactgtcaatgactctcagccagaagatgaagatttaaaattggcagagggggtcgatttgggagga

SEQ ID NO: 67947 - DNA, 82 bp, Homo sapiens
gtggaccacatagacatttacgcggatgtcggcgaagagttcaaccaggcatggaaagctcacctgatgggcccagccggct

SEQ ID NO: 67948 - DNA, 50 bp, Homo sapiens
cttggagtccggacatctgaaacttggacaagagaatgattcaacgaaga

SEQ ID NO: 67949 - DNA, 87 bp, Homo sapiens
gcgacatccgagtgcagaacctgcaaggcccctccagccagcgtcaggtgcagaatggcccctctcctgatgagatggacatccaga

SEQ ID NO: 67950 - DNA, 75 bp, Homo sapiens
acttcctcttcagtcatcagtaatgattacggacctgaagccaaagaacaagatgcgctagtggacagattgctg

SEQ ID NO: 67951 - DNA, 83 bp, Homo sapiens
ggccacgcaccgcctgctgctgctggtgccctctggtggtcagaagatgctgtgctgtctcgttaggatgaatggattaaaat

SEQ ID NO: 67952 - DNA, 75 bp, Homo sapiens
gcggcggaggatgagcctgcagagcgcgcagtacctccgttgcattaaaatcctcccctactgaaagaaacggag

SEQ ID NO: 67953 - DNA, 100 bp, Homo sapiens
cagttattagttctctatatcatgaagaaaccatcaggcgaggccttcttgggcagctttgtggccagcgggatggggccctcggcctcgtcccatggga

SEQ ID NO: 67954 - DNA, 90 bp, Homo sapiens
gaaaccagtgggtagatgtcgttctgaaacgcagatatgcacttatttggccattacccagcacatgacgacttctatctcgtagtgtgc

SEQ ID NO: 67955 - DNA, 98 bp, Homo sapiens
ggcgtccgcgtgcagccacagcatcctgagaccttcggggcccggagcaggttgaaatcaaggaagcaggtggtactactacaagtaataatccggaa

SEQ ID NO: 67956 - DNA, 100 bp, Homo sapiens
acagggctgtggcagtgccccttctgtcagcaggacaatttccctgaactaagcgaggacagtcattttgtttactcattcagccctgttgcaggtccca

SEQ ID NO: 67957 - DNA, 75 bp, Homo sapiens
ctttggaggatgcggctttgatgggaatccaagagttttgtaatctccatcagtcaaaagaagagaacctcatca

SEQ ID NO: 67958 - DNA, 50 bp, Homo sapiens
tgtaaaatgaggagcttggagttcaattcccatgaaagtgcagcacatgc

SEQ ID NO: 67959 - DNA, 100 bp, Homo sapiens
ggtggcatctgcggccatggcggcgactactgccaaccccggtactccaaagattcaggtttactcacgtcatccagcagagaatggaaagtcaaatttc

SEQ ID NO: 67960 - DNA, 82 bp, Homo sapiens
agagtgagcgagccttcacctacagcatcgtgggcgccggctcccagtttggtaaaatgtttattggaggcttgagctggga

SEQ ID NO: 67961 - DNA, 83 bp, Homo sapiens
gaaccctgcggaggagaccggcgaggagaagcaggtgaaatgacaatggatgctctgttggctcgattgaaacttctgaatcc

SEQ ID NO: 67962 - DNA, 100 bp, Homo sapiens
cagactgcctcaacagagtgataggtatccgttacagcactgatgtgagtgtagatgaagtaaaagctttggcttctctgatgacatacaagtgtgcagt

SEQ ID NO: 67963 - DNA, 50 bp, Homo sapiens
ctttgacaacctctactccatggcatgttggcagataaattgaacatgac

SEQ ID NO: 67964 - DNA, 74 bp, Homo sapiens
tgttcgacatcctggccgtgctgcagtcgagcaaaagatgtgataataccagcaaagccacctgtcagcttttt

SEQ ID NO: 67965 - DNA, 100 bp, Homo sapiens
aagagcaaagaggcggaaattaagagaatcaacaaggaactggccaacatccgctccaagttcaaaggcccagatgggggaaccccgggctggggccgcc

SEQ ID NO: 67966 - DNA, 90 bp, Homo sapiens
gccgcgaacacctcactattgatggtgtagcgctttaggggaagatgcctgtgaggagccaccaacatttgaagctatggagctcattgg

SEQ ID NO: 67967 - DNA, 100 bp, Homo sapiens
cacttctatggataaaactttcaaggtgcagacccacctcgaaaaccccaccaagtaccacatacagcaagcccaacggcagcaggtaaagcagtacctt

SEQ ID NO: 67968 - DNA, 100 bp, Homo sapiens
ggatgatgacaatgtagaggatgacttctctaatcagttacggtcccaggtgtgtgatggcggctgcaatctgtcttgtgggtattaatgcaatcttcag

SEQ ID NO: 67969 - DNA, 80 bp, Homo sapiens
tatggaattgccaggttcttcactgaatatcccgcagcgtggacaagcagcatgccgtcatcaactacgaccaggacagg

SEQ ID NO: 67970 - DNA, 100 bp, Homo sapiens
acactttgttattggagaaacatgcagattatatcgcatcctatggctcaaagaaagatgattattctccctttatggcaagattgtcatgagttatgga

SEQ ID NO: 67971 - DNA, 100 bp, Homo sapiens
tgaacacacttcttatggagaaacaggagtcccagttcctccttttggatgtaccttctcttctgcttttatcaaaatacaactcaaacctagctactcc

SEQ ID NO: 67972 - DNA, 83 bp, Homo sapiens
tccataggccaacctatgttgcagttgattaaggggtgcagctcccatataaatgctggcagataacagcccgccgtcagtgg

SEQ ID NO: 67973 - DNA, 100 bp, Homo sapiens
cctatctctgcctcctgcgtagcatccggaaacatgtggccctacatcaggaatttcatggcaaggaataatcatgggccagactgggaagaaatctgag

SEQ ID NO: 67974 - DNA, 90 bp, Homo sapiens
atgatccaagtcaccaagaaattactgtctcaagtgatacggtatggatcctggcgggagccagtcaacccctattatgtcaatgccggc

SEQ ID NO: 67975 - DNA, 83 bp, Homo sapiens
tgtcactctcaccatccggctacttatgcatggaaagaattaaacaaccaccatgtcgagcaaaaaggcaaagaccaagacca

SEQ ID NO: 67976 - DNA, 96 bp, Homo sapiens
tttttcaagggagctgataaagaacttcttcccaaaatggatatggatcagaaactttcgaagttggtagaagagctcacaacttcaggagaaccc

SEQ ID NO: 67977 - DNA, 100 bp, Homo sapiens
gagacgtcatttgctactatgggaaccgaggggagcctgatcctatcgttttgacgccaggatgccttccgcgccttccaccctgacctggaattcgtgg

SEQ ID NO: 67978 - DNA, 100 bp, Homo sapiens
cgggctttaggctggaagcgccttagaggagccatttttccaggctccaggaggccagagctctactgaagcggcggcggccccgggggccagggggccg

SEQ ID NO: 67979 - DNA, 90 bp, Homo sapiens
cgtgtgaatcctgtggagtacagcatcgtgatggaatttctcgacactggcagccaactccaaacagccgattcacatggtctacgtccc

SEQ ID NO: 67980 - DNA, 83 bp, Homo sapiens
tatgaagtcagtaatactgaatttgagaagtttgtgaactcaactggctatttgacagagtttagacactctgcaatatcacc

SEQ ID NO: 67981 - DNA, 51 bp, Homo sapiens
ggggtgcagtgtgtctggtcttatgagataccatgtttgtgtggaagtgcc

SEQ ID NO: 67982 - DNA, 83 bp, Homo sapiens
gtgacgttgaagatgtcggccttctgagccgactgcggtggtcaagagctgatgttctaatcatgtcagataaagatgatatt

SEQ ID NO: 67983 - DNA, 100 bp, Homo sapiens
tcgtcgggagtgatcacctaccctacaggttttaagctctgcagcgtcactccctggctctgaactcccctcctccaggcctgagggttcccagggagga

SEQ ID NO: 67984 - DNA, 90 bp, Homo sapiens
aaaagatatgaagaaatccttgatgtctgcaattaaggccttacgtcctggagggatacttgtatactctacatgcacgctttccaaggc

SEQ ID NO: 67985 - DNA, 82 bp, Homo sapiens
aagttgcctgttagttctttaacaatatcacggttgctgctgacacgccgaccgcctgctgcttcagctacacctcccggca

SEQ ID NO: 67986 - DNA, 124 bp, Homo sapiens
ggcagagtggaaaaaagagaggatttgcttttgtaacttttgatgatcatgatacagttgataaaattgttggaaaactcaatgtgagtagtgacactgtccagcatggtgtggaaggattaac

SEQ ID NO: 67987 - DNA, 74 bp, Homo sapiens
gcttccgtcccggacagagcccgtggtcgcgcagaacactctgctccagccaaggtggtgagggcagctgttcc

SEQ ID NO: 67988 - DNA, 82 bp, Homo sapiens
caggccgagtgtcaggccgggcaggctgaccccgcactacatctacccaccagccatcgtgcagcccagcgtggtgatccca

SEQ ID NO: 67989 - DNA, 98 bp, Homo sapiens
aattttgaaaaatccaaacttacattcaggtgggatgtgtgtgggctgaaattccgagctgcggttgtgcatgagaatacacccttcgtggtacccca

SEQ ID NO: 67990 - DNA, 90 bp, Homo sapiens
gcgggaggaggcggcggcggcggtactccaaagattcaggtttactcacgtcatccagcagagaatggaaagtcaaatttcctgaattgc

SEQ ID NO: 67991 - DNA, 74 bp, Homo sapiens
gtggaaaattcttcggggaaaagctccaatactgttggcactagtggcaggagaagctgctggtatcatggaaa

SEQ ID NO: 67992 - DNA, 100 bp, Homo sapiens
ggggaaaggcccgaaaacaccttagtttgcaccgagagaccatttgcagcgggaatatattaaaggaatctgtgaacctgaactagaagaaagagaatgt

SEQ ID NO: 67993 - DNA, 75 bp, Homo sapiens
tttgactactggggccagggaaccctggtcaccgtctcctcagattatgagcctcaaacaatttgtgagcatctc

SEQ ID NO: 67994 - DNA, 82 bp, Homo sapiens
gatgaagagaaaggcccggagacttgctactatatttcatgaactggtatataaacaaaccaaaattatttcttcaaatcaa

SEQ ID NO: 67995 - DNA, 82 bp, Homo sapiens
cagatatagccgttggtacaaaggtccgcgggagagctgtggggcttggtgagtgtttcgtggcctctcgggttggtcagca

SEQ ID NO: 67996 - DNA, 75 bp, Homo sapiens
aagacagtgacgacaaaacaccagatgatgaccctgagcaaggaaaatctgaggccctacctgaacccatccttc

SEQ ID NO: 67997 - DNA, 75 bp, Homo sapiens
cgggcttagcaggaaagggtgcctaagcggagctggagtttgttcagatcatcatcatcgtggtggtgatgatgg

SEQ ID NO: 67998 - DNA, 99 bp, Homo sapiens
attcctggggctagtggtataccaggaaattctgttctactcgtcacaaatctcaatcctgatcaagaatttcgactgggagtgcgactctactcagag

SEQ ID NO: 67999 - DNA, 89 bp, Homo sapiens
ggccaacattttttgaaatttttaagacacgctgcaacaaagcaggatttcaaatatgcgtgcattagagaatgattttttcaattctc

SEQ ID NO: 68000 - DNA, 75 bp, Homo sapiens
cgcccaggaagcccctctgaagcctcctcgccgccgtttctgagaaggagctatgaagacatgattggtgaggag

SEQ ID NO: 68001 - DNA, 100 bp, Homo sapiens
ccacaacagggacacctggttccagctgcagcacgtggacgctgactcggaagtgcagacgaagggaacgtcatcgtttggaaagcgtcgcaataagacg

SEQ ID NO: 68002 - DNA, 90 bp, Homo sapiens
ccagcgccccggtttgcaaagcagatgcaacaaggagacgcgcctttgccctggtctctcaagcgtatacttcaatcatcgccgatgatt

SEQ ID NO: 68003 - DNA, 75 bp, Homo sapiens
accgcatgtgatcactctgggactcgtggggctgcagcaccggaactgtggctgcaccatctgtcttcatcttcc

SEQ ID NO: 68004 - DNA, 75 bp, Homo sapiens
ccaaaatggcgcgggtgctgaaggctgcagccgcgaatgccgtaggaagaaatgttggctatttggcgatgagag

SEQ ID NO: 68005 - DNA, 80 bp, Homo sapiens
ctgagatacattgtccttgtctgggttgcagaatgaagaagagtctggagaacctgaacaggctgcaggtgatgctcctc

SEQ ID NO: 68006 - DNA, 51 bp, Homo sapiens
aaggtgggacgagcctaatgaagtggcatcgttaaagaatctggagtgaag

SEQ ID NO: 68007 - DNA, 100 bp, Homo sapiens
ttaatttcagaaggaaaatgggtcaagcttgaaaaaacaacgtacatggatcctactggtaaaactagacaggggcaagtgtccgagtggtgaatcagct

SEQ ID NO: 68008 - DNA, 75 bp, Homo sapiens
atgctccggggcatctttgagccctttggtaaaggagaagagcctgctgagtgcagtgaggccggtctcctgcag

SEQ ID NO: 68009 - DNA, 83 bp, Homo sapiens
cgccgcagacgaggttgacgggctgggcgtggcccggccgcactatggctagtgaagacatttccacctggacacctgaccat

SEQ ID NO: 68010 - DNA, 87 bp, Homo sapiens
agaccagaagcaaagactatgcccaattcttcaactcctaccagccagatcaacacaattgataagacgagttgtactgctgtcaca

SEQ ID NO: 68011 - DNA, 96 bp, Homo sapiens
ggggcaagacgggttcagttcgtcatggggctgtttggaaagacccaggagaagccgcccaaagaactggtgcgtatagcagcaaaattcatcatt

SEQ ID NO: 68012 - DNA, 100 bp, Homo sapiens
cctgaagtcagttgttgcatcaaatacttcatatttggcttcaatgtcatattttgggtatttatgagcctccatttcttatactactgcagtgaaccaa

SEQ ID NO: 68013 - DNA, 80 bp, Homo sapiens
tcagcagcggaggctggacgcttgcatggcgcttgagtattttaaccacatcagcatcgaggactcgcgggtctacgagc

SEQ ID NO: 68014 - DNA, 75 bp, Homo sapiens
cgtcccgaccctggccgccccgagcggagcctggagccggcacagtcttcactaccgtagaagaccttggctcca

SEQ ID NO: 68015 - DNA, 88 bp, Homo sapiens
cagagatttcaaatcatgaaggttgatagggaagaactagcaagagtggtacaaaactgcaggtcattgggctggccaccaggtattc

SEQ ID NO: 68016 - DNA, 51 bp, Homo sapiens
gtccctgtatgcatactaccttgtactgccaatggtaatgatagtaaaaaa

SEQ ID NO: 68017 - DNA, 100 bp, Homo sapiens
ctcggctccggggagtttactggcgtgaaggagcttgatgacatcagtcaagagattgcccagttacaaaggcaaaccagccttcgggaacgggtggcag

SEQ ID NO: 68018 - DNA, 82 bp, Homo sapiens
ctcggccttccgacgtgggcggtgggccccagccccacagaccagcccagcattcagaaatatacgtctgtcacagttaacg

SEQ ID NO: 68019 - DNA, 80 bp, Homo sapiens
gtggattaaaatctcccaagaggaatgacaaacaaccagctcttcaggaaaacagttcctcctgaggatttcagagaaga

SEQ ID NO: 68020 - DNA, 96 bp, Homo sapiens
agaagcatgctaagaacaacagtcaggccaagccttctgcctgtgatggccccctcttctctcctggaggtcagccggccccttgtggctctcagg

SEQ ID NO: 68021 - DNA, 154 bp, Homo sapiens
ttaaataacaacctgttacgagttctaccttttgagctgggaaaactgtttcagttgcagactttaggcctgaaagtgtaatttcacaagcccctgactctgtgtagacacccagctctccagaaaaatgctttgaagacaaaggatacagcat

SEQ ID NO: 68022 - DNA, 75 bp, Homo sapiens
ggcagcgaggggctcggagaggtgctcggattctcgtagctgtgccgggaatagccaggccagaagaaggaaggc

SEQ ID NO: 68023 - DNA, 90 bp, Homo sapiens
gcctaagtcaataggacccttaacatttgtgttcacaggaactggtaatgtttctaagtcagaaaaagtggacagggcagtgctgaagga

SEQ ID NO: 68024 - DNA, 99 bp, Homo sapiens
gactcaagaaacagtccaaagaattcttctagaaccctataaatacttacttcagttaccagagcaacgacatgccctttgatgagctgcttgcgctct

SEQ ID NO: 68025 - DNA, 80 bp, Homo sapiens
atgaaggcagtccccatccactagtaggaagctgctttgaagacttagcagaggaaccagcacctatgacagaagatctg

SEQ ID NO: 68026 - DNA, 100 bp, Homo sapiens
cagacatggcctctggcaccaccaccaccgccgtgaagttttttgaagggaaggagctaagattgaagcaggaatactttgtggtggctgcaaccttgca

SEQ ID NO: 68027 - DNA, 100 bp, Homo sapiens
cttacattgctccacctgggaattatgatacctctgtgatggcccgctccctctccccacccccggagctggaagaaagggatgtggccgcatactcggc

SEQ ID NO: 68028 - DNA, 82 bp, Homo sapiens
ttgcagctgctaccagaatcttttatttgcaaagagaaactagctatatgttctcctttcagccaagacctttcaccagtgc

SEQ ID NO: 68029 - DNA, 100 bp, Homo sapiens
aattacagggcgacagctggtgttgaagcattgcagttggtagacagagaagccaagccacacatggtcctaggcctacttacaagcctccagtctcaaa

SEQ ID NO: 68030 - DNA, 87 bp, Homo sapiens
attgtcttttcttaacctgggaagtggaaccggatatttaagtacaatggtgggcttaattttagttttctgagtttaaccagtaat

SEQ ID NO: 68031 - DNA, 90 bp, Homo sapiens
caagatgtcgcagacggccatgtccgaaacctacgattattcagagctgggagagcttcccccacgatctcctttagaaccagtttgtga

SEQ ID NO: 68032 - DNA, 98 bp, Homo sapiens
cgagagcgcgaatatcgtcatcgttagaaggcatttgcaagtaaaatcactggcatgttgttggaattatccccagctcagctgcttctccttctagc

SEQ ID NO: 68033 - DNA, 75 bp, Homo sapiens
accccttcctcccgtatatcaggtatttggctcgagtaggggagcttgaagctactgacactgaagacccaaatc

SEQ ID NO: 68034 - DNA, 75 bp, Homo sapiens
cactcgggggtgaagctttgcaggtggacaaagggatatctgtgtttgccttacatggcattgcagcagcatcat

SEQ ID NO: 68035 - DNA, 83 bp, Homo sapiens
tagagaccatacagacctaccggtctgtcagtgagatggcttctaacaagttggtgtaatacggtgcccagtatgccgccaag

SEQ ID NO: 68036 - DNA, 130 bp, Homo sapiens
ccggggatcaaagagcagtgggggttgctgacccagaggagagttctccaaacatgatcgtttactgcaaaacgccttcctgagtcctggatctttcttccttctggaaatctttgactgtgggtagtta

SEQ ID NO: 68037 - DNA, 88 bp, Homo sapiens
acaaaccccttctttatcattgaggaagggggaaaagagctacccgtacagtgaggacgcccgccagggtgagcagtacatgaacacc

SEQ ID NO: 68038 - DNA, 100 bp, Homo sapiens
cggatagtgctgaagaggagggggcgttccccagaccatggcatctacggaagggagtgtgaggaagaggctgtctgtgtcattatgtgtgcgtcggtca

SEQ ID NO: 68039 - DNA, 90 bp, Homo sapiens
ggaatttgaagagagcttgataactgtgttctatgtggatccagcattacaactgataaggctgctgacttgagtaaaccaatagataaa

SEQ ID NO: 68040 - DNA, 74 bp, Homo sapiens
aataatgctggcaaagtggaaaaatgtgcgctacttttccaggtatgtgggagagaacaataacaataggaagt

SEQ ID NO: 68041 - DNA, 101 bp, Homo sapiens
tcaaactcttacatacgaagtcacttgacatagagattccaaaacatattcccgaaaggctttgatgacagtagggaaagaaccatttcctaccatttacg

SEQ ID NO: 68042 - DNA, 98 bp, Homo sapiens
cgggccgggccatggggtggcgggcggcgggcgcgctgctgctggcgctgctgctgcacgggcggctgctggcggttatgaagacagtatggagtttc

SEQ ID NO: 68043 - DNA, 75 bp, Homo sapiens
tgggatcccggccaccagcaattgtccgagagctggcggtcaccatggcaatgcgggagctggtggaggccgaat

SEQ ID NO: 68044 - DNA, 82 bp, Homo sapiens
gcacctcgtcaccaaggccaagctgtgagaaacgaccgaaacaagaagaagaaggaggtgcccaagcccgagtgctctgaga

SEQ ID NO: 68045 - DNA, 90 bp, Homo sapiens
ctgagctgtgctacagccatcgccaagctctgctggccgtccgctctgactaccactgtgccgtgtggaagtttggtaaacagtggcagc

SEQ ID NO: 68046 - DNA, 100 bp, Homo sapiens
gaaacctggatctttgctagaaagagaggaaatgaaggccgaatttataaaggaagcccagccagggaaaaagcagctcctgctcagcgcagcactgtct

SEQ ID NO: 68047 - DNA, 75 bp, Homo sapiens
ccaactgcgggacaggaagtggccgtagcggcttgttggataagatgacgggtctaagccgacacccacgatgga

SEQ ID NO: 68048 - DNA, 75 bp, Homo sapiens
ccctgcagactgtccgcctggagcgttacaaggccttctacattaccggtttccgagagagcgcttttgcctacg

SEQ ID NO: 68049 - DNA, 51 bp, Homo sapiens
acagtcagtctggtactaacaatgcaggttcagttccggaaggtgtcttag

SEQ ID NO: 68050 - DNA, 98 bp, Homo sapiens
gccgcaagtacccgtccatcatagtcaactgcgtggaagagaagacattagatcagcaacagttcttcacagaggaagaactaaaagaatatgaaaat

SEQ ID NO: 68051 - DNA, 80 bp, Homo sapiens
gggcaccaaggcggtcaccaagtacaccagctcgaacaattctgtggtgttcttggtcacacatttatggagtttctgaa

SEQ ID NO: 68052 - DNA, 124 bp, Homo sapiens
caagtagcccttggaaccatgatgcattgtcagaccctaaaggatcaaccctctgcatacagtaaaatggagtgaggaaacccagcaaggcctgtctgtctagattcttcttggcctctctgag

SEQ ID NO: 68053 - DNA, 98 bp, Homo sapiens
tcagagggacctctatagagatgtgatgctggagaattacgggaatgtgttctcactggtcaagtctctatttatgaggtggacaagcaagattgtcg

SEQ ID NO: 68054 - DNA, 100 bp, Homo sapiens
aacccaagcagtggcgaagggaatcgcaaggctcttccctgaccattttctactgtccctgcgcgagctgcctgccttgtgcttggctgtatgattttcc

SEQ ID NO: 68055 - DNA, 98 bp, Homo sapiens
cagatggaagaaccattgttagtgaacgtggacaaagctgttgtctcagggagcacagaaaacttaaagcagcagtattacacaggatacacagagaa

SEQ ID NO: 68056 - DNA, 97 bp, Homo sapiens
cttttgggaaacagtacaaacaaactataggactggatttctttttgagaaggataacattgccagttcatcagagaagatatgaaatataaagatg

SEQ ID NO: 68057 - DNA, 100 bp, Homo sapiens
ggtggctgcacctcattcatcatcttcatccccgagtaaggactcctcaagaggagagacactttttcaaaaatggcaatggtatcagaattcctcaagc

SEQ ID NO: 68058 - DNA, 100 bp, Homo sapiens
gtgttaacagtgtagggaaaatagagtgtgtatcagcagagaccaccgaagactgcatcgccaagatcatggaaggaatcgtgtctcctagtgacctgga

SEQ ID NO: 68059 - DNA, 50 bp, Homo sapiens
acaaagccggctacgcgctgcgagcccccaggctccgctcttgccagagg

SEQ ID NO: 68060 - DNA, 98 bp, Homo sapiens
gtggccttcgcgtctgcccggccaagaggcaaaggggaggttacgcagcaaaccatccagaagggatacccacccaccatcccagggtctacaacatc

SEQ ID NO: 68061 - DNA, 75 bp, Homo sapiens
tgcattgtctcatgatcagtggatgggggcagtacccaaaggaaacgctacgaaagaatacatggagagcttgca

SEQ ID NO: 68062 - DNA, 100 bp, Homo sapiens
agaaatacagcttggtgaagagttactagctcaaggtaccgggtgtctggtccgagccgtggagatggccgcccagcgccaggccgacatcatcgggaag

SEQ ID NO: 68063 - DNA, 99 bp, Homo sapiens
gtccactgtcagctgaggtggatcttccagagaaaggaccaggcctccgggaggaagtggccaagttcctgtctttctactgcaagagcccagtacccc

SEQ ID NO: 68064 - DNA, 98 bp, Homo sapiens
ctgtgatttacctgggtgagacagcttgagccccatcgtggattccaagacatccctgctgagagagccaagcatatgtaagtggaactcagaaggca

SEQ ID NO: 68065 - DNA, 100 bp, Homo sapiens
gctgagatctcttttgaggaccgcaaggacggctcctgtggtgtggcttatgtggtccaggagccaggaaagaccacagcaagattctttcattcgtctc

SEQ ID NO: 68066 - DNA, 100 bp, Homo sapiens
caggctcagctggcggcggctgtcaaggaggaccgtgcgggcgtggaggccgaggggtccagagatgatgagctagttgtgaaccccaaagtgttccctc

SEQ ID NO: 68067 - DNA, 101 bp, Homo sapiens
ggagatcactgccctggcacccagcacaatgaagatcaagggcacggccgagcagatgaggactgtgtggacgaccgggccagacaccgggaggaacggct

SEQ ID NO: 68068 - DNA, 100 bp, Homo sapiens
agaggccttacaagtgcactgtgtgtggccagtcatttaccaccaatgggaacatgcacagaattggcagagggggtcgatttgggaggaaaggtgtggc

SEQ ID NO: 68069 - DNA, 50 bp, Homo sapiens
cggcgaccggcggcgtccgaggaggtgtgcctacaggggttgtggaagga

SEQ ID NO: 68070 - DNA, 100 bp, Homo sapiens
cgccggcctcgtccagaacgtggtcagcaaggtcaaaatgcagatcttcgtgaaaacccttaccggcaagaccatcacccttgaggtggagcccagtgac

SEQ ID NO: 68071 - DNA, 83 bp, Homo sapiens
tggagaactacagccacctcgtctcagtgggtgaactactgagttcttcattatgtctgatggagattatgattacctcatca

SEQ ID NO: 68072 - DNA, 83 bp, Homo sapiens
gtcgtcaggaatttgactctaagtccattggaatattaagcccaggagttgctttggggatggctggaagtgcaatgtcttcc

SEQ ID NO: 68073 - DNA, 100 bp, Homo sapiens
gtcatctatagtccggaggacagccccagggcagaggcctctgggaggtggggaagacagggctccagctaccacaggacgggctctgggtatagccgtt

SEQ ID NO: 68074 - DNA, 100 bp, Homo sapiens
cttccagccaccccctctccagtctgctcaggtaccctcttaccaattatacttttggtacaaaagagcccctctacgagaaggacagctctgttgcagc

SEQ ID NO: 68075 - DNA, 100 bp, Homo sapiens
gaggggaaagccactgttcggttaaaggagcctcctgtggatatctgtctaagtaaggcttatgatcaacatttaaatatgatcttgggagatgtggaag

SEQ ID NO: 68076 - DNA, 78 bp, Homo sapiens
ggaggttgccgacgccatcaggctcaacgaggaactcaaagtggatgaggaaatgccaggtggagctcaacaggaaag

SEQ ID NO: 68077 - DNA, 87 bp, Homo sapiens
gacatttaaacaggacaaaacttggatcgacgagaacgtgctaggagcccagctggacgttgaggccgcccattcagagatcctcaa

SEQ ID NO: 68078 - DNA, 90 bp, Homo sapiens
cagaatttctgcaagtaattgttctccgggagatgttgcataaccactccttcgtgggctgtgtgaatcctcagtgggccttggcacagc

SEQ ID NO: 68079 - DNA, 96 bp, Homo sapiens
aaccagtgagacaaagatgggcaaggctctgacaatccgggccagtatcccagtcgacatcagtgacagtgatatgatgctgaacatcatcaacag

SEQ ID NO: 68080 - DNA, 74 bp, Homo sapiens
ggttttctctgaagaccgtgaagccactttcactttttgacagtaaggcagcctggcatcctcgctacaacctc

SEQ ID NO: 68081 - DNA, 100 bp, Homo sapiens
tgctccgagtgtgcttagcgatggcctggaaatccggcggcgccagccactcggagctaatccacaatctccgcatgaggtcctttggcactgaagaccg

SEQ ID NO: 68082 - DNA, 90 bp, Homo sapiens
gctgtctgtggcttttcaaaatgcgcctggtagagcatggatggcccatcatgcataggtagcctttccagtaaatatatgactcaggga

SEQ ID NO: 68083 - DNA, 100 bp, Homo sapiens
cgcggctccgtgtttctggaaagtgacagcaggtcttgctatcacagatgaaattttgctgagtaaggcagagtggtccaaactttttgaagctccaaac

SEQ ID NO: 68084 - DNA, 76 bp, Homo sapiens
cggagacttcaccaggggagatggcacaggaggttcggctttccagtttggcagcagcactacaaatttcaacttc

SEQ ID NO: 68085 - DNA, 75 bp, Homo sapiens
aacgagtcttcactacccagaatcatttaatcatccatttcatcaaaaaagtttcaccagtgatcattaaagaat

SEQ ID NO: 68086 - DNA, 75 bp, Homo sapiens
gcgccaagaccagatcaccaatggcatggtgaatgctatttctaccactgaaactgttgaggagcccatggagga

SEQ ID NO: 68087 - DNA, 80 bp, Homo sapiens
caaagatgaactactatgaccatgcggatttccaccacagtgtaaaaagtgcagtggctcatgcctgtaatcccagcact

SEQ ID NO: 68088 - DNA, 83 bp, Homo sapiens
cttggactgagtcctgcaggacacagaacgtcgaaatgctgagcagcatggattctgcatcggttcgcattatcaaacccttt

SEQ ID NO: 68089 - DNA, 90 bp, Homo sapiens
acagactcctatttgaagtatttgacgaaaatagactgggaaggctacaacaatccccccatctcaggtgagaatctgattggcctgagc

SEQ ID NO: 68090 - DNA, 75 bp, Homo sapiens
gcttcttccacctgcccgttaacattcgaaaatgtcaaggtttggtgcacctcgatttggaggaagtagggcagg

SEQ ID NO: 68091 - DNA, 75 bp, Homo sapiens
ataatggatgaaaggaaccgacagggcgacataccttctgttgaataccttttacaaaatggaagtgatccaaat

SEQ ID NO: 68092 - DNA, 90 bp, Homo sapiens
cgaaatggccgcgtccagtcaaggtgctggagaatctggtaaaagcaccattgtgaagcagatgaggatcctgcatgttaatgggtttaa

SEQ ID NO: 68093 - DNA, 50 bp, Homo sapiens
ggaacttctgcccagctctccttgactaaatgtgttaaatgggcttgcca

SEQ ID NO: 68094 - DNA, 51 bp, Homo sapiens
gcagcggcggcggcggcgcggggaccgagatggcggcagctatgccatcca

SEQ ID NO: 68095 - DNA, 100 bp, Homo sapiens
gccggctcccctctcaggacaacccagatgtgcaacaaagtgcgatgatttggtcgtattgggcgcctggtcaccagggctgcttttaactctggtaaag

SEQ ID NO: 68096 - DNA, 116 bp, Homo sapiens
cttccatgtttgaggacccttgtgattacactgtgaaaacccagataagccaggataatctccctatcttattatgaggtatctctcctaaatgtgtgatcaaggaattaccacca

SEQ ID NO: 68097 - DNA, 90 bp, Homo sapiens
agaggtcgtggaggtggccgtggaggcagaggtggcatgggagccatgtccattggagcccgttcccaatcagctcgtacttacttggag

SEQ ID NO: 68098 - DNA, 98 bp, Homo sapiens
gctgctgaaggagtctcgctgagctcgaggaggtggcgcgatggagggactggaaggtctgctgagaacagacccagtccctgaggaaggagaagatg

SEQ ID NO: 68099 - DNA, 100 bp, Homo sapiens
gagacatgagcaagaaaagcctctgggagcagaagggaggctccaagacctcatcaacaattaaggttgcacttcctgcagaagaggattatttaccact

SEQ ID NO: 68100 - DNA, 100 bp, Homo sapiens
accgaggcgggtggatcacgagatctgccttctggagactgcgccgtcctcccgggagagccagaaagaggacatggctgctgggcagcgggaagcgagg

SEQ ID NO: 68101 - DNA, 75 bp, Homo sapiens
gccgaagcagcccgggactgcgcagcgccccgcgtgccgacaatgcagatcttcgtgaagactctgactggtaag

SEQ ID NO: 68102 - DNA, 100 bp, Homo sapiens
ggagtatcaaatatgagaaagctaggccatctgaataactttactaagatctgttacctaaagcaataaaaaatggccagaggatcagtgtccgatgagg

SEQ ID NO: 68103 - DNA, 75 bp, Homo sapiens
ggagcctccgctgccagcgacatgttcaaggcctttgccctttttgtcaaaaccaaagaagttccaacaaaaagg

SEQ ID NO: 68104 - DNA, 100 bp, Homo sapiens
cttcctcagccgggagtcgctgagcggccaggccgtgcgccggcctttggtcgcctccgtgggcctcaatgtaccttctccaggcaaattccgttcccct

SEQ ID NO: 68105 - DNA, 83 bp, Homo sapiens
gccatattgtgtcttccccggccggtccctcgcctcccggccgagctgacgatgtccctggtagatttgggaaagaagctttt

SEQ ID NO: 68106 - DNA, 83 bp, Homo sapiens
gtgtagccggcttggcgtgaccctcgcctgatccaggtgaaatgacaatggatgctctgttggctcgattgaaacttctgaat

SEQ ID NO: 68107 - DNA, 74 bp, Homo sapiens
ctctttcgcttttgtggaactactctacggcatctggagcaactggaatacaaacagaagcttgcacgagtaac

SEQ ID NO: 68108 - DNA, 100 bp, Homo sapiens
aggagctgaatgatgctgtgggattttctagagtcattcacgccattgctaattcggatatgctgcaggctgctagtcattatcgccaaaatagaaactc

SEQ ID NO: 68109 - DNA, 83 bp, Homo sapiens
ctgcgaaacatcttccgggagcaggtgcacctcatccagaacgccatcatcgaaactgtttgcagacaaggtcccaaagacag

SEQ ID NO: 68110 - DNA, 83 bp, Homo sapiens
tccgccgaaaaagagaagacgctttacccgactctttgggccgttatctcacatcaggatcctcatgaccagccaaagagaag

SEQ ID NO: 68111 - DNA, 82 bp, Homo sapiens
cctccatgcgcagtcatgagtcgcttcaagtttatcgctacaccaaaattgcattgagccaaacttgccaccaagagcccaa

SEQ ID NO: 68112 - DNA, 98 bp, Homo sapiens
taatgaagcttaaagggcacacggataatgtgaaggcattgctattaaacagagatggcacgcaattcaaatctgaacatcaatgatgtactagggaa

SEQ ID NO: 68113 - DNA, 75 bp, Homo sapiens
gcctccgccgccaagagtgagcgagcggacccgcgatgggttatcaatactctggctgaccatcatcatcgtggg

SEQ ID NO: 68114 - DNA, 88 bp, Homo sapiens
cagtcagagagactttcgaaagaatatgatcaactcctgaaagaacactctgaacttcagttgatggcagctcatgccagtagagaca

SEQ ID NO: 68115 - DNA, 75 bp, Homo sapiens
gtctttgcagcgtagcccgagtcggtcagcgccggaggctgggtctcttctgcgtcagtcgccccagccaaggca

SEQ ID NO: 68116 - DNA, 100 bp, Homo sapiens
ctggctgtatcagtggacaaatggcagcttccttgtcacagacttggcagggctctctgccttcctgctggtggcctgcctcctggatttccagagggcc

SEQ ID NO: 68117 - DNA, 51 bp, Homo sapiens
actttaccaacgagctgaagcagaatgttctgaaggatctggaaaagagaa

SEQ ID NO: 68118 - DNA, 75 bp, Homo sapiens
tactggaaaacctcaggaacctagaatttctggctggcgctacgtacatctttgggaaaagtggtgggcttatcc

SEQ ID NO: 68119 - DNA, 131 bp, Homo sapiens
gggaatgatattcagtggtgtttttctcaggtgaaaggagcagtagatgatgatgtagcagaagtaataaaagactagtggccttagtgcccatgcccagtgaccctccattcaatacccgaagagcctac

SEQ ID NO: 68120 - DNA, 100 bp, Homo sapiens
gagattccacccaaacttgctggtcactgggagagatgccctgtatccaagcccaatatgggacaccagcaccgagtccgggaccccgtgaccacctggc

SEQ ID NO: 68121 - DNA, 83 bp, Homo sapiens
tgaagagcgacaagccgctggcagccgcggatctcaccgccgctcaggggaccttaaaccggaaaacattttgttaaatgaag

SEQ ID NO: 68122 - DNA, 49 bp, Homo sapiens
ttcctccaggtttgccatcttcaggaaatttacctaaatattctcataa

SEQ ID NO: 68123 - DNA, 74 bp, Homo sapiens
tgggatcttcgatttgcttcctctccacttcgtgtcctggaaaaccatgccagatctttatgtctgaagctggg

SEQ ID NO: 68124 - DNA, 100 bp, Homo sapiens
ctgctcgtcacttgcctcccgggagtcgctgtggcaaaagcttttcaggatgtccagcaaagaatcctgtgggaaaaaagagacatctcagaggaaagac

SEQ ID NO: 68125 - DNA, 88 bp, Homo sapiens
tgccctctttgcaacatttcaggaaaacagagaaagaagtgataggagggctctgtagctgaactttgacctggaccggggcgtgttt

SEQ ID NO: 68126 - DNA, 99 bp, Homo sapiens
agcttggttaacttgggagaaagtttcatctgtggatggagtattggcaaagccaaagctaattgagccactcgactatgaaaatgtcatcgtccagaa

SEQ ID NO: 68127 - DNA, 100 bp, Homo sapiens
tgatgaagtgagtgtttctctcaggctttgggatacttttggtgatcatcacaaagacagacgctttgcatatggcagacaacagaaaccagtggtagga

SEQ ID NO: 68128 - DNA, 75 bp, Homo sapiens
ggaaaatgcccaggaggaagcaggagcagcccaagcgccttccctcactgggagaaactacagatgaccacaagt

SEQ ID NO: 68129 - DNA, 82 bp, Homo sapiens
gacaaatatacgtgtatgttcacttacgcctctcaaggagggaccaatgagcaacattccaacgcatcccagtccctgtgtg

SEQ ID NO: 68130 - DNA, 100 bp, Homo sapiens
gacctgctagtgactggcgcgtacgagatctccgaccagtctgggggcgctggcggcctgcgcagccacctcaagcttatgtccctgatgccaaaaatgc

SEQ ID NO: 68131 - DNA, 82 bp, Homo sapiens
cgctgagggaccgcggggttagccactgctggctgcttccagtgttcgccgagaggaagctcttcgtgggcggtcttgactg

SEQ ID NO: 68132 - DNA, 53 bp, Homo sapiens
cggcggggacgccatgcgagccagatcactcctctgccaaagatcccaacaag

SEQ ID NO: 68133 - DNA, 87 bp, Homo sapiens
cggggctggtgggcatagtggctgccctgctggcttcgatgtttttgaagcaggcatttgaaggagaataccctaaattattacgtc

SEQ ID NO: 68134 - DNA, 111 bp, Homo sapiens
cagcgcccgcgccccgccgctgagccgtcgcggagccgcgcagccctcggagcacggtttacccaaggtccagcctagcccctaggcaccatgtcggacagtgatctaggt

SEQ ID NO: 68135 - DNA, 100 bp, Homo sapiens
cctcttcagaatgagtgagatccaggcgcgcgccaagagggtcagctgggacttcaagacggccgagagccactgcgagcagcatccagttggacttccc

SEQ ID NO: 68136 - DNA, 98 bp, Homo sapiens
catggctcaactggaagcactgtggaagaagatggagggtgtgggaaatgatcttcattggttagcatgtgccttatatgtggcttgcagaaaatctg

SEQ ID NO: 68137 - DNA, 88 bp, Homo sapiens
taaagacgctgcgaattgacgccttttataataaagacacttatcttgcccaagagctggagaggagccatcaaaactcgatcaggat

SEQ ID NO: 68138 - DNA, 82 bp, Homo sapiens
cgtgggtccgcgctgcttccacccaacttcctgttagacactggctctgagaccccgactgcccgacggctctacactgcca

SEQ ID NO: 68139 - DNA, 83 bp, Homo sapiens
ctggcattctgttagacagtgaatgtggaaaggagattgacagtcacaattttgtaataagagatatagatcagctatcagga

SEQ ID NO: 68140 - DNA, 100 bp, Homo sapiens
agacaacagagtcattgatcttagggttgtgttgctttctgccacaatgccaactgatgtgttggaagtgaccaaaaaattcatgagagatccaattcga

SEQ ID NO: 68141 - DNA, 100 bp, Homo sapiens
atctcaagttctgtgaaagtaacattgaaagtttgaatatggaactccagcaactaagagactcagcccgcctgcacccaggtgaaatatacagccttgt

SEQ ID NO: 68142 - DNA, 100 bp, Homo sapiens
ttgtgccagcctacaggaggaaaggccagactcacagaagggtggaataattaatgatagttctgaattaattggtcctgctgaagctcactcagattcc

SEQ ID NO: 68143 - DNA, 75 bp, Homo sapiens
agactctgatatagatggtgattatagagtgataaacctctacttgcaaagggaatttgaaaaagatgagaagcc

SEQ ID NO: 68144 - DNA, 75 bp, Homo sapiens
gtccgccgcccgccgccgctggagctagagatgcacaagtctggcgttctgaggaaggccattgattacatcaaa

SEQ ID NO: 68145 - DNA, 88 bp, Homo sapiens
tcttacttctcctaccaatacatcacagaatactttatctccaagggggattttggcaattgcttggagcatggcagatcctgaattg

SEQ ID NO: 68146 - DNA, 75 bp, Homo sapiens
gagcaacatccgcgagttcctgcgcggctgcggggcttccctgcggctggagtctgcaggcccaggtggggcttc

SEQ ID NO: 68147 - DNA, 100 bp, Homo sapiens
gagtttagccttgcgactggcccagtatccaggtcgaggttctgcagaaggttgtgactttagtatacagagctgactaaggctttggaacagaaaccag

SEQ ID NO: 68148 - DNA, 83 bp, Homo sapiens
agggaaccctggtcaccgtctcctcaggaattaagtagactggctggacagattcgaaggttgtatggttcaaacaaaaaagc

SEQ ID NO: 68149 - DNA, 90 bp, Homo sapiens
gggcgaccgtggggaggtgccgccggggtcgcagagcactgcagcctgtggtgttgaggctcacagcgatgccatccagccctgccacat

SEQ ID NO: 68150 - DNA, 78 bp, Homo sapiens
ccagctgcagctgtggctgcagtttgaggctctgaacaagccctgggcgctgcctatggcacagccaagagcggtacc

SEQ ID NO: 68151 - DNA, 88 bp, Homo sapiens
tgcagccggtcctcttggggaaggctgtgtgggccagcccagccatgaccaggatggagcagagcccagcgccaattccgtgtcagcc

SEQ ID NO: 68152 - DNA, 154 bp, Homo sapiens
aattacccttcatattggagactacaatatggatggctatccagacgctctggtcatactaaagaacacatctggaagaaacattacccttttgcactatctcatcactattgtggaaaataagtaccccagtgttctcaatctaaatgaagaa

SEQ ID NO: 68153 - DNA, 83 bp, Homo sapiens
ctcctccagtagacggtacagcgaaggcagagagttcagactccatcagcagctatgaagcccagatcaccgccctgaagcag

SEQ ID NO: 68154 - DNA, 83 bp, Homo sapiens
tcacaggttccagggtataccccgcgaatgaaggggtctaatgtgatggaagagcaggacctgcgggacatcggcatcagcga

SEQ ID NO: 68155 - DNA, 97 bp, Homo sapiens
ccgggaggagccgcagcgccgggcgaccccgcccgggcctcggggctgaaatctctttaatgatggagggaagcaggcagacgcgagtgtctcggcc

SEQ ID NO: 68156 - DNA, 50 bp, Homo sapiens
ggaggacagctctgatgaggagggaaatcgtggaacacatggtccagcac

SEQ ID NO: 68157 - DNA, 100 bp, Homo sapiens
ggctgccggcggctgggactgaagagggacgggtcccgcggcgagcgagctcctgagattgaaaaggaagatcaggccaaccccaaagaagaagtgacca

SEQ ID NO: 68158 - DNA, 96 bp, Homo sapiens
cctggttcttccaaagtgcccggacccaaaacaggaagtttgcctgcaatgagatttcattctctacatttaaaggacatcctttctgagctgctg

SEQ ID NO: 68159 - DNA, 100 bp, Homo sapiens
tgacgcccatgttttcagccagctgcacgatgaagacttcctcactagtctggtggccatcagcaagcccaggtctatgcaactggaacagatccagaag

SEQ ID NO: 68160 - DNA, 88 bp, Homo sapiens
cttcttcttcgagaattacaccggggtccaggtctggatgtaccgactgcttttggaataaaaagattcccaggatgtgagcaacacg

SEQ ID NO: 68161 - DNA, 139 bp, Homo sapiens
ggagcccctccgcccggcagctgccccgtctgagaagtgaggagcctctccgcccggcagccaccccatctgggaatgttctggacagtcctagccgactggatgaggaacaccgtcttatagctcgctatgctgcccg

SEQ ID NO: 68162 - DNA, 120 bp, Homo sapiens
atgggcaaggaggttggcttcttcatcatccgggccagccagagctccccaggggacttctccatctctgtcaggccatggatcatctgcagtcattcattgcagattgtgatcgtagaa

SEQ ID NO: 68163 - DNA, 96 bp, Homo sapiens
tcttcaaggccatgctgaccatcagctggctcactctgacctgcttccctggggccacatccacagtgaggtctgccagtctttagtgaaacacag

SEQ ID NO: 68164 - DNA, 90 bp, Homo sapiens
cagctctgcggctcgggccctgagcctggagatgcccaaagatgagctgcccaaccataactgcattaagcacctgcgctcagtggtaca

SEQ ID NO: 68165 - DNA, 99 bp, Homo sapiens
ttctggaagttataacgctacacgaagaactaagaatattattagcacaagagcaccatactttgagggaaacagagcaaatgcagcgttacaatcaaa

SEQ ID NO: 68166 - DNA, 83 bp, Homo sapiens
cgcactcctggtcctgctcggggctctgttcccaggttatggaaacaaaggacatgctttacatcgtcactgaatttgctaaa

SEQ ID NO: 68167 - DNA, 51 bp, Homo sapiens
ttcaagatgacggaagcagatttaaggcacgtgtggttctcaaatataggc

SEQ ID NO: 68168 - DNA, 82 bp, Homo sapiens
tgtcagagactgaggacttaaatgaagccactgattagcaatttaaagatcctctccaaggccaaatttgagtttcatcatg

SEQ ID NO: 68169 - DNA, 74 bp, Homo sapiens
agcattggaagaggtttttatctgagcttgaagttttactactttgctgtggttggctgataaatatttgtcga

SEQ ID NO: 68170 - DNA, 82 bp, Homo sapiens
cgaaccacaaatacctggctatattgtcgatgattcagtcagaggaacatcatttacagcgagcaatttcagcacagcaagt

SEQ ID NO: 68171 - DNA, 82 bp, Homo sapiens
cagattgttcctaaaccagaagaggaggttgcccagaagaaaaaggggcaagattcttgccaagagaattaatgtgcgtatt

SEQ ID NO: 68172 - DNA, 100 bp, Homo sapiens
ctttagaagattgggatatagctgttcagaaaactgaaacccgattagctcgtgtcaatgagcagagaatgaagattatgtctaagcatttggacagtcc

SEQ ID NO: 68173 - DNA, 75 bp, Homo sapiens
tcaaccatgctcggtcatctgtggcagtatatcaagtcctcctgcatatgcccaagaggattgggagtggaatgg

SEQ ID NO: 68174 - DNA, 100 bp, Homo sapiens
gccggaggatcgcggagtcccaatgaaacgggcagccatggccctccacagcccgcaggatgatgacctggaagaaggtgaagtgaaggaccccagtgac

SEQ ID NO: 68175 - DNA, 75 bp, Homo sapiens
acccgtaagtgtgactacacattttgtgatccagtcatcatttctactctatcaagaagaatatctaatccgtac

SEQ ID NO: 68176 - DNA, 100 bp, Homo sapiens
cggcagtgtgaggagctgctatggtgctgagtttcctggtagagccggccgagctgaggcggtcgcggccatgaaggtaatcacagacctggaggagcag

SEQ ID NO: 68177 - DNA, 98 bp, Homo sapiens
cagagggggacaatgcttccaggagcctctacccagatgctgaggaccctcagctggggcgtgccgatgctctccgtccagcccaaagggaagcagaa

SEQ ID NO: 68178 - DNA, 74 bp, Homo sapiens
gccgacttcgatgatcgtgtgtcggatgaggagaagttgtgacttctcaccaggagatttggtttgggccaaga

SEQ ID NO: 68179 - DNA, 100 bp, Homo sapiens
gggtgatgaaaccacttctctacatcccatctcaatcagaattactagattttctctcaaactacgaggttatgtttaaaactcctgtgtcaattactga

SEQ ID NO: 68180 - DNA, 90 bp, Homo sapiens
gcaagccgcacctggagaagctgaccctgggcatcacgcgcatcctagtgcaccgtccaggtgaggttagagctggggcatcgcgcccaa

SEQ ID NO: 68181 - DNA, 100 bp, Homo sapiens
cggggctgcagcgagagtgcatgagcccgaggaggcagggtctgatgggatcagtcgcatcgaatacattcattcaaagaacttcatccaccgggatgtg

SEQ ID NO: 68182 - DNA, 74 bp, Homo sapiens
agaaggaagatggcggatctggaggagcagttgtctgatgaagagaagacgcaaacatgcagatctttgtgaag

SEQ ID NO: 68183 - DNA, 100 bp, Homo sapiens
cttctctgaggcggcgagagatggtcaggtctggagctcgaccgggccagccacagcctggcagctctgatcaggaaagtgaggaacagcaacaattccg

SEQ ID NO: 68184 - DNA, 75 bp, Homo sapiens
atattgtgtcttccccggccggtccctcgcctcccggccgagctgacggattttttatcaagcagaaatgcatcg

SEQ ID NO: 68185 - DNA, 75 bp, Homo sapiens
cgggacggacgccgatgcccggggctgcgacggctgcagccatcccaggcctcaggacctgagttctccgacgcc

SEQ ID NO: 68186 - DNA, 75 bp, Homo sapiens
caactatttcttcagatcgttctgattcagagcgagggatagcccacctcatgttcctgtacctgaactctcaac

SEQ ID NO: 68187 - DNA, 82 bp, Homo sapiens
gtgtggctgtgccgttggtcctgtgcggtcacttagccaaggtctgcgaggaacagaagtgcgaggaggaggtcttcccgct

SEQ ID NO: 68188 - DNA, 74 bp, Homo sapiens
ctccctctccctgcagtccaccacagatgccacagcagtactcagctttggacatcagacagtgcaggagaaga

SEQ ID NO: 68189 - DNA, 75 bp, Homo sapiens
cgctgttccggttggcgagtgacaccactgatgacgatgatgcactcgaaacatcttgaggagcagattgctaaa

SEQ ID NO: 68190 - DNA, 97 bp, Homo sapiens
gatatgacttgctcgggcaaaagttgtgcattggcccgatcaagcctgacttctagccaaggtgttaaaatagcatttgctgttactctggagacag

SEQ ID NO: 68191 - DNA, 99 bp, Homo sapiens
ctcagctctcggcgcacggcccagtatgacctgtcagcctctacattctctcctgacggaagagtttttcaagttgaatatgctatgaaggctgtggaa

SEQ ID NO: 68192 - DNA, 90 bp, Homo sapiens
aggttgaagatctctatgagcttttgaaacttgttaaggtattccagcgtcttcaggaaacagtttagactctcttcaagatgacaatcc

SEQ ID NO: 68193 - DNA, 90 bp, Homo sapiens
gcggcggcggcagcgggtcttgggtcctccgagagcagcagcgtatcctagaaggaaaacatcaccatggctacagaaattggttctcct

SEQ ID NO: 68194 - DNA, 96 bp, Homo sapiens
cagaacccagcagcttgccagcatcgttgcagaacattctagtatgccagtagaaaaaaatatcactttagaaaggccttctaatgtaaatctcac

SEQ ID NO: 68195 - DNA, 99 bp, Homo sapiens
tgatgaagatgaggactccacagtattcgacatcaaatacagatacgcaggcttctggagaccctgggtggacgccggaggcaagaaagaagaggagac

SEQ ID NO: 68196 - DNA, 98 bp, Homo sapiens
gcgaaccgcagtatcatgctggccaagaagatcatcattaaggacggaggcacgatatccttggaacagaagatcttattgtggaagtgacttccaat

SEQ ID NO: 68197 - DNA, 98 bp, Homo sapiens
gagacccgagttcatcgcctacccccatctccgcatcaggaccaaggtcgggaaagaggttaaagaagacacgcaagtatgatatcatcaccactcca

SEQ ID NO: 68198 - DNA, 90 bp, Homo sapiens
cagatgacttactatgcacagtgttaccagtatatgttggacctccagaaacaactgggaagactacacttgctgctttgaaggatgaag

SEQ ID NO: 68199 - DNA, 50 bp, Homo sapiens
cagcagacgaatggatgatcaaaacgtgacacgaagatcgattgagaagt

SEQ ID NO: 68200 - DNA, 89 bp, Homo sapiens
cgagcccggaaggtccggcgcccagagctaacgggagtcccaggagtccaaaactacttacctggaagaccttccaccaccccctgagt

SEQ ID NO: 68201 - DNA, 100 bp, Homo sapiens
aaattaccaactgctttcctttccctcagcacacagaggatgatgctgactttgatgaagacaagttggatggcttgaggactggtactaaaaggaaacg

SEQ ID NO: 68202 - DNA, 75 bp, Homo sapiens
agggacaagaccctgaagatctgtgccaaccactacaatgctgagcacctgaagaccctgtccctgtcctacaac

SEQ ID NO: 68203 - DNA, 82 bp, Homo sapiens
gggattcgcgctgctgggcacccacggagcctccggggctgacttcccagactcccggccagccatcgaggacctcaagtac

SEQ ID NO: 68204 - DNA, 50 bp, Homo sapiens
gcgccgggagcagcaccgcggggccaggtggatcatccatgccatggagt

SEQ ID NO: 68205 - DNA, 82 bp, Homo sapiens
aaggatctctgggtcctgcatttggccaccaagacctgggaacaagtcaagattctgtttcactgaggccatctatccgatt

SEQ ID NO: 68206 - DNA, 50 bp, Homo sapiens
caagcccgagactttggccaacattagtgaccagaaggatcccaaggatc

SEQ ID NO: 68207 - DNA, 76 bp, Homo sapiens
cgcggaggagccgcgagcgctgagggagagacagcgtctggagaccatcctcagtctctgtgctgaatacacaaag

SEQ ID NO: 68208 - DNA, 88 bp, Homo sapiens
gtggcgagaggtgcggcgaaggaggcagaggcacttatgcttgtcaggaccgtataatagacgctggccccaaaggaaactactctcg

SEQ ID NO: 68209 - DNA, 75 bp, Homo sapiens
tgcctctagtggaacaaagtcctgaagttcccagtgggaaaagctacagaaagatgacacagatccggggcaact

SEQ ID NO: 68210 - DNA, 98 bp, Homo sapiens
caacttctgcgggatcttcaaccacctcgagcggctgctggacgaagtgacagctggagtatcagccttggaagtatatacgccaaaagaaatcttcg

SEQ ID NO: 68211 - DNA, 88 bp, Homo sapiens
tcttaaaggctgatgaaggcatctcgttcagatgtggatgaggcttccaagaaggagatcaaagacatcctcatccagtatgaccgga

SEQ ID NO: 68212 - DNA, 74 bp, Homo sapiens
aagaaagtcaggctaaagaacaatacgagcagatccttgcatttgtccaaggatttttaaaaagtcgagatcgt

SEQ ID NO: 68213 - DNA, 80 bp, Homo sapiens
cggcgctggactggagcagaaccccaggactgcgcccccgggagcgggcgcccagagtgcctacaccaactaatgttaca

SEQ ID NO: 68214 - DNA, 51 bp, Homo sapiens
gcggcgagcggttccttgtgggctaggaagaagcattgcatgcatttattc

SEQ ID NO: 68215 - DNA, 75 bp, Homo sapiens
ccgcccgagacctcgatgatgccctctcctgcaagccactcgctgacgcggcaacctttggcactgcatccatga

SEQ ID NO: 68216 - DNA, 99 bp, Homo sapiens
cttttaccgatgctttaacatacagccactaggtccactggtctccacataatgaaactattctggcttcaagtggtactgaccgccgcctgaatgtgt

SEQ ID NO: 68217 - DNA, 98 bp, Homo sapiens
cggaggctctggatggaagccatggatggccgggaacctaagctgctgatgggagctccaccctgggagggggtgccggcaccatgggattgagcgcc

SEQ ID NO: 68218 - DNA, 82 bp, Homo sapiens
aaagaactcaagaaaatcttcgaagacttttcagtcttcggataaactcaaccaactgtcaactagaaaatgtttaaattta

SEQ ID NO: 68219 - DNA, 75 bp, Homo sapiens
ggatggccgtaaccccgaaggaaatggtggatctttggcgagcgtctgcacgaccaggagagaggctggttcccc

SEQ ID NO: 68220 - DNA, 100 bp, Homo sapiens
caggccctggcctgccttgggccggggatttaacacagaggcttcaggtacaactggccacagagatagtcctggaagacacgtggcgcctgtggaccgg

SEQ ID NO: 68221 - DNA, 97 bp, Homo sapiens
ggcctcacagtcatggatctggaagctgagggcacgtgtttgcggttcagccctttgatgaccgcagcaggcatttccggagagttcttttgaagtc

SEQ ID NO: 68222 - DNA, 100 bp, Homo sapiens
cagggtcggactcccggggccatggccggaatgcagtaccctcagcagcaggtcctcgatgggcttcctggaatattggtgtgtttatttgcatcagatg

SEQ ID NO: 68223 - DNA, 101 bp, Homo sapiens
gggaacaggctgcgtgattctgaaccgttatggaacacctgaagagctacaagaactggtagacacagctcattccatgggtatcatagtcctcttagatg

SEQ ID NO: 68224 - DNA, 100 bp, Homo sapiens
aggctaactgcctcctctggtatatggacaacccccagagcgatcgtcttctgatcaaaggaggtaaaattgttaatgatgaccagtcgttctatgcaga

SEQ ID NO: 68225 - DNA, 90 bp, Homo sapiens
ggtagatggtgaacggccccggcagctgagggcaggtactttagattgattgccgagcggggcagttttgtgagccttcatctgaagcct

SEQ ID NO: 68226 - DNA, 98 bp, Homo sapiens
tcgccgatcctccaggcatgccccgctacgagctggctttaatcctgaaagccatgcagcggagaaacagcacccaggactatcttccaaagagttct

SEQ ID NO: 68227 - DNA, 108 bp, Homo sapiens
ggccgccttttcagaagcggctgcgcacggactgctggagatggtggagtccgtcaaaagtcctatgagtttgaagatttactgcagtcttcctctgagagcagcagg

SEQ ID NO: 68228 - DNA, 101 bp, Homo sapiens
cagcttcctggtggagcccatcagctgccacgcctggaacaaggaccgcacccgtcaccaaaaacagtggcatcatccctgggccagattccaatgcaaag

SEQ ID NO: 68229 - DNA, 100 bp, Homo sapiens
tcgtggaaaccaagataaagatgcccattttccaccaccaagcaagcaggtgaagtatttgactatttggttgcacatggcaggatgaaggaaaaagaag

SEQ ID NO: 68230 - DNA, 98 bp, Homo sapiens
ttctggctgcgcggcctgcgcgcgcctcccgggcggattccagccccgagcgggacagcgcggcggggagcgacgagcgccatgtcagaaccggctgg

SEQ ID NO: 68231 - DNA, 82 bp, Homo sapiens
ggagaggagcactttgaggacatggcctccgacgaggacataggtggggctggtgtccgagcacttctcgcaggccccgcag

SEQ ID NO: 68232 - DNA, 100 bp, Homo sapiens
gcgaggaggaggaggatgtggcgcgcggaggggaaatggctgccgaaaacaagccggaagcaggtggtccattatggctgacatgcaaaatctggtagaa

SEQ ID NO: 68233 - DNA, 90 bp, Homo sapiens
gaaaactcaacaaagcaactgagagctttgcttggaacattacagtattgaagatctatgcagttagatcagttgttcccaacaaaagca

SEQ ID NO: 68234 - DNA, 83 bp, Homo sapiens
caaaaaaggctaagcaagcatctaaaaagactgcaatggctgctgctaagctccataatgggagaagtaaagaacaaagactt

SEQ ID NO: 68235 - DNA, 101 bp, Homo sapiens
ggtgaacaacccgttcttgcctcaggccagtcgcctccaggccaagagggatccttcacccgtgtctggaagctcttcgtgggcggtcttgactggagcac

SEQ ID NO: 68236 - DNA, 100 bp, Homo sapiens
tccacagaaggactgggatgatacaccttttccacagggaattgagttggttcaaaccttgtactactcagctgatcacaagctgcttgatgggaaccta

SEQ ID NO: 68237 - DNA, 82 bp, Homo sapiens
gtccccgtacgcctacagtaacgctgcatcttcctcccgtgaggctggccgagctccacgctgatctgaagatacaggagag

SEQ ID NO: 68238 - DNA, 75 bp, Homo sapiens
agtggctaaggcaggaaatggaggatgaatgctatcaagtaagacaagtgtttgcccagaaacttcacaaaggcc

SEQ ID NO: 68239 - DNA, 101 bp, Homo sapiens
catccaaacctgtcaacatgttgaagtatttattacagtatcaggagccaataccttgtgagcagttggttacagcgctgtgtgatatcaaacaagcttat

SEQ ID NO: 68240 - DNA, 100 bp, Homo sapiens
gtctcagccttggatcaggagattattgaagtagatcctgacactaaggaaatgctgaagcttttggttttgcagacattgggtacagaaacttaccggc

SEQ ID NO: 68241 - DNA, 132 bp, Homo sapiens
cagagcctggagtctgcgaaggccgggacccggttccccggcccacagtgggggtgtgcaaacccgagagaactggttgtcgagatgtccacagaaggaggatttggtggtactagcagcagtgatgcccag

SEQ ID NO: 68242 - DNA, 50 bp, Homo sapiens
ggaatggctaaaaatgtttcagtattgaaatggctgatggcaagtgcagg

SEQ ID NO: 68243 - DNA, 82 bp, Homo sapiens
catgtcgggttattcgagtgaccgagaccgcggccgggaccgagggaaggaagcagccaccctcgccatggcctccccgccc

SEQ ID NO: 68244 - DNA, 100 bp, Homo sapiens
ttacagtaatttcaacagaagagtgagagatggaacccgaagaagaaaggattcgttacagccagagattgcttttcctccgcaaccatgtctgacaaac

SEQ ID NO: 68245 - DNA, 89 bp, Homo sapiens
aacaagccaatcccaggaggaaaaacggtacaccaggggttggaaaaaccacactaggcaaagaacttgcgtcaaaatcaggactgaaa

SEQ ID NO: 68246 - DNA, 100 bp, Homo sapiens
cgactccggagacagcccaaatatcctcggaagagcgctcccaggagaaacaacttgcattcacaagagatgggctctgtggtctgtggaatgaaatggt

SEQ ID NO: 68247 - DNA, 74 bp, Homo sapiens
cctcagtctccctgggactacaggattaaactgcaaatatctcatgaagctgctgcctgtatcactggtctccg

SEQ ID NO: 68248 - DNA, 83 bp, Homo sapiens
ctcaccgagacggcgatccgggcgctcgagacttaccagagccacaagttcaggacctcaaggggctcggctatgagaagggg

SEQ ID NO: 68249 - DNA, 100 bp, Homo sapiens
atcccgctgtggtacttctcgcagtccccgcgcgtggtcatccagttcatggcctcccacgggaacgacgccgcgagagccaggtttgagtccaaagtac

SEQ ID NO: 68250 - DNA, 75 bp, Homo sapiens
cacgggatccagagcgccgcgcacttcgtcatgttcttcgcgccctgtctctgctttctatccgtcaagatgata

SEQ ID NO: 68251 - DNA, 75 bp, Homo sapiens
tggcagcagcatctcagcccaagagaaggagagctggaggtgtttcagaaagatggggaacgaaaaattcagagt

SEQ ID NO: 68252 - DNA, 83 bp, Homo sapiens
acgacaggagcatcccaggaaggggttcccagaagtcagaatccaagatggcaatgagaagcacgaccttcatgttacctccc

SEQ ID NO: 68253 - DNA, 103 bp, Homo sapiens
caaaggcagacagtacgggctcccttcgccaaactcttcattttctctagcctggagacacaggccccatccttcccaatggggacacttcagggagcggctc

SEQ ID NO: 68254 - DNA, 100 bp, Homo sapiens
ggagaccttcccgacgacccctgctccggcggggaagtgagcaagagtgatgtggagggactgggaagagtcacggcagatggtgggagctctactggaa

SEQ ID NO: 68255 - DNA, 100 bp, Homo sapiens
gccagacacggacctgagccgcgaggacacgggctgcaacctgcagcacatcagcgaccgggagaacatagacggctgaactcacgggaatcaaatggcg

SEQ ID NO: 68256 - DNA, 101 bp, Homo sapiens
gtctttagctgagagacattattataactgtgattttaaaatgtgctacaagcttacttctgtgctgttgaagccaaggaaaaacaagatgaacaagtcgg

SEQ ID NO: 68257 - DNA, 75 bp, Homo sapiens
ggccgcgctgcccgggccgcgaggacgaggcggcgccgccgggctgtggagtaagactttgaccccgacgcaggc

SEQ ID NO: 68258 - DNA, 51 bp, Homo sapiens
gctcgatggatagcattcactggaagcaaatgaagaggattcttccagttc

SEQ ID NO: 68259 - DNA, 75 bp, Homo sapiens
tgctccgagctgaagctaaagcggctctgttgcaggcacggctgacacttcctccatggcccatctatcgccggc

SEQ ID NO: 68260 - DNA, 50 bp, Homo sapiens
gaagagtctttaaattgcagatgcctggatcattatgtagaagttctgga

SEQ ID NO: 68261 - DNA, 80 bp, Homo sapiens
caacaagtcccggctccggaagatgaaggttatgaagacagtatggagtttccagaccatagtagacatttgctacagtg

SEQ ID NO: 68262 - DNA, 50 bp, Homo sapiens
tttctttataatacattccatgggaggagatggagcagcatattgtatgg

SEQ ID NO: 68263 - DNA, 97 bp, Homo sapiens
ctgaattctgactcagccatttactaactgtgtgaccttagttaaacgagaagattcatcaccgctttgatggctgcctcacaaacttcacaaactg

SEQ ID NO: 68264 - DNA, 121 bp, Homo sapiens
gatcgactgaatccaggctgtttctatcgtttacgagtttactgcatcagtgatggaggacagagtgcgtttcagtcattcagtcagtaccgctgtaagactgccaagaagtcagaggagg

SEQ ID NO: 68265 - DNA, 100 bp, Homo sapiens
gctggtcaacaacagctggcttcctcaagcagaacactgctgggagtcctaaaacctgcgacaggaaggccatcaaaccttcttctggaccaaagcaatg

SEQ ID NO: 68266 - DNA, 75 bp, Homo sapiens
ctccgggaccggccgaaaggcgaggaaccgaaccaccgggaggaactgggccattctaacacccgttgctaccat

SEQ ID NO: 68267 - DNA, 100 bp, Homo sapiens
gactctgtgtgagggaaagaaaacaatttctcctgctctgcagcttctgttcagtcgtcctcttgagttctggcgccttgactactgggaagatgacttg

SEQ ID NO: 68268 - DNA, 90 bp, Homo sapiens
ctcatcttcttcaagataacttgccaaaatcagcagaaacgaccgaatccagagctccgccggaacatgaccatcaaaaccgaactcccc

SEQ ID NO: 68269 - DNA, 73 bp, Homo sapiens
gggcgtggacggtgtggggcggtcccggccccgcaggctcttgtcaggatggtgaagctgttcatcggaaacc

SEQ ID NO: 68270 - DNA, 75 bp, Homo sapiens
tgggaacccaggccccgccgaggcggccagggcagctcagttctggcaccaaaccaaatccccaggtctactcga

SEQ ID NO: 68271 - DNA, 74 bp, Homo sapiens
cctgcaggttctaagaagactcttcccggttgatcgtggattatttgagaaaggagaagatgagtatgccaacg

SEQ ID NO: 68272 - DNA, 100 bp, Homo sapiens
aagaactactgagaaaacaccatcactaactagaagaattggctatggagttactagtagagaaagcaatcagcagtgcttctagccctcagagccctgg

SEQ ID NO: 68273 - DNA, 100 bp, Homo sapiens
agctggccttccagaccacttgccacattgtcagtcgtggccctgaagttcatcccaaaattggggcgctcagagaaggagctgaggaatttgcaacgag

SEQ ID NO: 68274 - DNA, 82 bp, Homo sapiens
ctgtacattgaataaaaagattcgaaatgcacagttagcacagtataacttcattttaggctgcacgatgtgctgatggaac

SEQ ID NO: 68275 - DNA, 96 bp, Homo sapiens
ttccacttgatgtcatcacgcagaaggggtgaaagagactcggtgacagatacagaattctgcttggtcagaatcgtgatggcattgtgttcagca

SEQ ID NO: 68276 - DNA, 50 bp, Homo sapiens
agaaggatgattctcactcagcaggtgctgttccagaattcaaagaagag

SEQ ID NO: 68277 - DNA, 102 bp, Homo sapiens
cccaagcccggggcctgttgcctgggggcacacaggtgctggatggtacctcggggttctctcctgcccccaagctggatcttcagatccctacctgttggc

SEQ ID NO: 68278 - DNA, 83 bp, Homo sapiens
gcaagagggagttaaggacattccaggcagaggcaaggaatgatgagaagacagcagctgattacaagattttaggtggttca

SEQ ID NO: 68279 - DNA, 90 bp, Homo sapiens
gtgtgccacacaggtagccctggacggcattcagtgttttgaccccaccaacaactgaacgctttggtcaggctgctacaatggaaggaa

SEQ ID NO: 68280 - DNA, 98 bp, Homo sapiens
gacgagaagcctgaaaagtcgcagcgagctggagccgccggagcgatgaacaaatgcaaggagccaacttggggcggaaagatttctggcgtaagatg

SEQ ID NO: 68281 - DNA, 90 bp, Homo sapiens
taaaaattatttatccaacagctcctcccagaaaaaagcttggccagaccacaagcgggaatgcaaatgccttaaaagctgcaaacccag

SEQ ID NO: 68282 - DNA, 74 bp, Homo sapiens
gtggaaaatctggcgtacatgctggtgtgcatgcagtgggcgggtatttggtttcccagtccactatactgacg

SEQ ID NO: 68283 - DNA, 95 bp, Homo sapiens
ttgcagccagtactctatatgaacaatccgtctggatcacggatgtaggaagtgacttaattcagtgcacaaatgagatgaatgtgaacatccca

SEQ ID NO: 68284 - DNA, 83 bp, Homo sapiens
caaatattgaccaactggcatcccacagcctcctcttccagaatgcctttgcgcagatgaataatacggcagctagtccaatg

SEQ ID NO: 68285 - DNA, 51 bp, Homo sapiens
actcggagttttgggggtgtgctttgtgacttaagagattaaaattaattt

SEQ ID NO: 68286 - DNA, 90 bp, Homo sapiens
gttttctttactctggggtcccggctgccctgtggcctcgctcctcggagggaagatattcctcgtcagcttgtctacattggtctttac

SEQ ID NO: 68287 - DNA, 100 bp, Homo sapiens
cttcagatagagggacagtctaagaagttttgtagttcatcgtgtatcacggcatacaagcaggaaacaaagcttagcaggagaggagagccagagaagt

SEQ ID NO: 68288 - DNA, 75 bp, Homo sapiens
cagccttcagcttttggcagcatgaaagttagcaggattaatcaattcatgacagagacagtgaagaattgtaaa

SEQ ID NO: 68289 - DNA, 100 bp, Homo sapiens
cggcgtctggctgctgcggaccccgccgagtcctagcgcctggcctgcgcgccgctgcccgcgccacagggacccagacatggagctgcgggaagaagcc

SEQ ID NO: 68290 - DNA, 50 bp, Homo sapiens
ttcatacacagtcccccagttggctgaccttggcccagacaagtatttgt

SEQ ID NO: 68291 - DNA, 100 bp, Homo sapiens
tttacagaggaatagtctacaaaggaagacttgtaacctggagaagagggagtgcatccgccccaacccttttccccctcgtctcctgtgagaattcccc

SEQ ID NO: 68292 - DNA, 75 bp, Homo sapiens
aggcaccgacgtcatcatgctgaccaccaatcagatccgtaaggatatagacctgcagctaactggatttgattt

SEQ ID NO: 68293 - DNA, 82 bp, Homo sapiens
ttgttgatccttaacgagctggtccgaatcagcagcatggagggagagaattgccattgccttcagaaagtgttgatattat

SEQ ID NO: 68294 - DNA, 98 bp, Homo sapiens
gtccagggcagcatctctggtgcatgctgatgacgaaaaactctcgctctgtcgtccaggctggagtccaatgctgcgatcttggatcactgcaacct

SEQ ID NO: 68295 - DNA, 83 bp, Homo sapiens
gccgactactacgccaaggaggtcacccgcgtgctaatggtggaaacccacaacgtcttcaggcagtgacagtggtgggagca

SEQ ID NO: 68296 - DNA, 75 bp, Homo sapiens
ccttcagagaagctcgagaagagaaccttctgataacttaagagagattctccaaaatgtggccagattgcaggg

SEQ ID NO: 68297 - DNA, 50 bp, Homo sapiens
tggagatggttcagcaggacaagggcgacactaacaggtgaagatctcgg

SEQ ID NO: 68298 - DNA, 106 bp, Homo sapiens
ttatcagatcaaccaccaaagtgggaaacattgaaatcaaggcttataccagccagtttgtatcccttgtgatgtttgcccttatgatgtgtgatgatcggatctc

SEQ ID NO: 68299 - DNA, 113 bp, Homo sapiens
gccgccacggccctttggggaaatgcgtgcactgcgtccctctagagatgactgcaaacagaaaggtggagcagctacaacaagaatacacggaaatgaaggctctcttggac

SEQ ID NO: 68300 - DNA, 51 bp, Homo sapiens
gaccgagaatcaaggcgttgagcctcaagatacatcgagatatttccaagc

SEQ ID NO: 68301 - DNA, 100 bp, Homo sapiens
gcgggattgatgtgcaacaagtgtctttggttataaattatgatctacctaccaatcgtgaaaactatattcacaggtattgttgcagcatctggcagtg

SEQ ID NO: 68302 - DNA, 101 bp, Homo sapiens
attagaaactcactgcagaatctttcacaggtgaagatctttaagcaagaagttaaagagtgaacatggtggaaaaaatataattattttcatcagactta

SEQ ID NO: 68303 - DNA, 110 bp, Homo sapiens
gcaacttacccgagaacgtgcgggaagagaagatcatcgagcatttcaaacgggggatatgagactttctactcggaatatcctgagtgttgcgtggatgtaaaacccat

SEQ ID NO: 68304 - DNA, 117 bp, Homo sapiens
tgtgctgaaagacattatgacaccgccaaatttaattgcagaggcattcctgcatcgcatccggcagaacgtggccgactcagtggagaagggcctcacggaggagaatgtcaaggt

SEQ ID NO: 68305 - DNA, 96 bp, Homo sapiens
gggactggaaccatctcagaagccatgcccctcaggctggaacttgccctgtctcctcgcagatgaggggttggtgtgtgctggattggctgatat

SEQ ID NO: 68306 - DNA, 96 bp, Homo sapiens
cggaggagtactcggtgaaatcctgtcctgaagactgtaaggtgaccttgggaaaggtgttgaaagtgatcgtcgtcatgcggagcctgttcattg

SEQ ID NO: 68307 - DNA, 50 bp, Homo sapiens
tcatgggactacgaggagacagccaggcatgacccgggacgacctgttca

SEQ ID NO: 68308 - DNA, 74 bp, Homo sapiens
gcgaggtgtgcgctgactgcagcgggccggtgagagggtccaagcctggtaagaatgtccagcttcaggagaat

SEQ ID NO: 68309 - DNA, 75 bp, Homo sapiens
ctagaatatgactatatcagtgattgccaggtgtttttgataaaggatggctacaatagactagttaatattgtg

SEQ ID NO: 68310 - DNA, 100 bp, Homo sapiens
tgaagacaagtggaagcgactgtctcgacagatagctgacatcatcctcccaatgttagccaaacagcagtttgctgatggccgccaaagttggagttcg

SEQ ID NO: 68311 - DNA, 97 bp, Homo sapiens
cagcccccttcgcccgtttccatcacgagtgccgccagcatgtctgacaaactgccctacaaagtcggcctttgaactggccacaggtgactatttg

SEQ ID NO: 68312 - DNA, 82 bp, Homo sapiens
atccttcaggtgctggaaaggaatgaggagttacagagggccgagaaggacaggatcagcacatggattaattgatgtatgt

SEQ ID NO: 68313 - DNA, 75 bp, Homo sapiens
cttttgtccatgtcactgatctttctggcaagagttttgagagcaaaatgacaacacccagaaattcagtaaatg

SEQ ID NO: 68314 - DNA, 74 bp, Homo sapiens
atagtacctacagcagcactccagcatttaaatcaaacggtattgagatggattgggttatgaaacataatggt

SEQ ID NO: 68315 - DNA, 96 bp, Homo sapiens
tgtagaagagcagagtccccataaagaggaggtgcaggaattcttcccagaggctttggagaggagtgtctgtgggccagcggtggcaggatgtcc

SEQ ID NO: 68316 - DNA, 100 bp, Homo sapiens
ggaactgtttccagagctcaataagttctggacttcagtgaccccttcagcactgaagtgaagccgagaatcctgctcatgggcctgaggagaagcggca

SEQ ID NO: 68317 - DNA, 80 bp, Homo sapiens
gcttgtaccccggggagagacgagccccgagcccggctggacgccgctgcctcagcctatgaaagagacaaccagcacca

SEQ ID NO: 68318 - DNA, 78 bp, Homo sapiens
gtggacgagcaggaagctgcggctgagtcggttctaagctggtctatgtccatcaccttcttggagaaggagcctttg

SEQ ID NO: 68319 - DNA, 75 bp, Homo sapiens
cggggccgacccggcccgtagtgtggaagcagcttcagatcgcaagcaggactggtcagaccatgctatttggtg

SEQ ID NO: 68320 - DNA, 51 bp, Homo sapiens
caggcagagtcagcagctgcagtgtggaagtcccaccacggttcgtgaaca

SEQ ID NO: 68321 - DNA, 75 bp, Homo sapiens
ttacaacctatgcaaatggctcctgcagaaagaatacccacctcatgtccaaaaagttgaaattaatcctgtaag

SEQ ID NO: 68322 - DNA, 83 bp, Homo sapiens
gctgtggcatggcggacgaggggaagtcgtacagcggttggtgaagatcttcggcaagatatgttagctttacagatgataaa

SEQ ID NO: 68323 - DNA, 90 bp, Homo sapiens
cttcctgcacacagccacgatttgcaaagtaagctgtgctagaacaaaaatgcaatgaaagaaacactggatgaatgaaaagccctgctt

SEQ ID NO: 68324 - DNA, 82 bp, Homo sapiens
ggttagggcagacgctgtgctcgctggcaccccgaacgggttgcttcccccgctgcgaggttgctccgactgtgtgttccag

SEQ ID NO: 68325 - DNA, 75 bp, Homo sapiens
tggtactaaagcattcatggaggctcttcaggctgccccccggtgtggaccccacccaagtttcctcctccctgt

SEQ ID NO: 68326 - DNA, 89 bp, Homo sapiens
gccagctcagacctcccggctcgacaggcggcgcgggcggcggggtttgttaaagttgttaagaataaggcctactttaagagatacca

SEQ ID NO: 68327 - DNA, 97 bp, Homo sapiens
acataagaagttcttcgatgtatctaaacttggcaccaagtatggcaccatcatgactccaagcggaggagatccgatgaatttaggcctcaaaatt

SEQ ID NO: 68328 - DNA, 75 bp, Homo sapiens
cccggagcccggagcccgggcaagagctgggcttcaacggaccacaccaaaatgccatctcaaatggaacacgcc

SEQ ID NO: 68329 - DNA, 101 bp, Homo sapiens
gttggggaacatgatctgttaaaggaagcgagcagctgcaaagcatctaatagaacgctactaccaccagttaactgagggctgtggaaatgaagcctgca

SEQ ID NO: 68330 - DNA, 51 bp, Homo sapiens
agtatatgcaggaaattttgtggaaatactgtggatggtagggaagaaaag

SEQ ID NO: 68331 - DNA, 100 bp, Homo sapiens
ccaaccaaaagattcacctttggatttcatcgcttaggtagcaattgtggtattaggaaacaaaatcgacctttctgagcagagacaagtggacgctgaa

SEQ ID NO: 68332 - DNA, 99 bp, Homo sapiens
tggattctctggtagacatgccatttgctactgtagatattcaggatgactgtggaaagagaagtccccagaagagacagcacacttagcaattgccct

SEQ ID NO: 68333 - DNA, 83 bp, Homo sapiens
ggccctctgtgagctgggagaaagcggggcccgaggaggccaaggcgccagtgagaggcgcgccggcatcggccgcacaggca

SEQ ID NO: 68334 - DNA, 90 bp, Homo sapiens
gcgggacatgcagcataaggtggactctgagtatcagtgtggcaaaggagcagagaactttgacaagttcttcacacgaggacagcccgt

SEQ ID NO: 68335 - DNA, 100 bp, Homo sapiens
cttttgctgatatgcatgcatgtaccgaccttctgaacaaggccaacacctatgcagattgcattctcacaacacaatacaatcatggaccttgtgcagt

SEQ ID NO: 68336 - DNA, 100 bp, Homo sapiens
cgcgtttcgggtgctggcggctgcagccggagttcaaacctaagcagctggaagggtgaccattgtgaggtagatattttgttctaattttccagatgag

SEQ ID NO: 68337 - DNA, 83 bp, Homo sapiens
tcgcagtggtcgcttcttctccttgctattgacctgaaaagtggttctggaaaagtgtaccaaggccctgcaaaaggtgctgc

SEQ ID NO: 68338 - DNA, 90 bp, Homo sapiens
gtgactcggctgattcatctcttgggtgagaagatcctgggcagcctccagcagggacctgtgacagtactatactggcaattgctggag

SEQ ID NO: 68339 - DNA, 100 bp, Homo sapiens
caccatgttcacgtgacatcaagaggaagcggaaaccagtggccacagcatctttgtctagccccagtgcagcaccaaggatgacattgatcttgatgcc

SEQ ID NO: 68340 - DNA, 49 bp, Homo sapiens
ggaccctggccgcgtttcccgcaggggcggggaccgccttgctcgggaa

SEQ ID NO: 68341 - DNA, 98 bp, Homo sapiens
gctgtgagcgcccccatcccggaggtctccgccggctcccgggagtgtgaggaagaggctgtctgtgtcattatgtgtgcgtcggtcaagtataatat

SEQ ID NO: 68342 - DNA, 75 bp, Homo sapiens
ctcatctgactcgtgatctgcccatcttgttactccctagcagtgtggtaagatgacaagagcacctcaaaggca

SEQ ID NO: 68343 - DNA, 75 bp, Homo sapiens
tggacaacatgctgtactttgccaagcaccaccaagatgcctacatccggttgacgaaggatcagagattggtgt

SEQ ID NO: 68344 - DNA, 101 bp, Homo sapiens
ttcacatccttgtctgtgaagctaaactcaatgctgctgtgtgggaagaagatttgtaaagaaaactcttagatatttggagttcttacaacatggcagac

SEQ ID NO: 68345 - DNA, 100 bp, Homo sapiens
agaacattgtgaaactctcctttgtgatttaataagcctgtcactcaacaggtacgacaaggatcttaattcatatcttgaagataaagtctaccttaca

SEQ ID NO: 68346 - DNA, 82 bp, Homo sapiens
ctgataagaaagtacggaccataataatcaggagtgaagtcccagggatattctgtgctggcagaatccagagaccacattt

SEQ ID NO: 68347 - DNA, 96 bp, Homo sapiens
actgtgtatactctacaatctaagaaggatttcagcaaatttggagcagggatgtgtgctgtgtttggtggaatttattgtcttcgccattcagta

SEQ ID NO: 68348 - DNA, 80 bp, Homo sapiens
cgatgaagaggaggcggggagaccacaatgcagatcttcgtgaagactctgactggtaagaccatcaccctcgaggttga

SEQ ID NO: 68349 - DNA, 90 bp, Homo sapiens
ctcatgttctgggacttaggagggcaggaagagctgcagtctttgtgggacaaggttggtgttcgaggaagagacattgttgttcttggt

SEQ ID NO: 68350 - DNA, 142 bp, Homo sapiens
ggggattgtcatttgtgcattttgggtgtacaggcatcacaagatggcctaccctcctgtacttgttccaactcaaatgtacattgaagatgtcagtttctacatgtgggaagtagacattgaaggctttatggtttacaga

SEQ ID NO: 68351 - DNA, 50 bp, Homo sapiens
ctggcattttaggtgtcggttgggtagataatccaggcacatggcggcac

SEQ ID NO: 68352 - DNA, 100 bp, Homo sapiens
ccacgcacgaggtggagggcgtgttgtcgcaggtggacttcttgcaacaggttaacgtgtatggcgtgtgcgtgccaggcctgccagtgagcttctacca

SEQ ID NO: 68353 - DNA, 75 bp, Homo sapiens
ggagggagataatcgcagcaccaacctgctgccggaagaattaacctcgagtctgcacgcttttaagaacaaggc

SEQ ID NO: 68354 - DNA, 100 bp, Homo sapiens
ctgtccggggccgggctcaggagcagaggagaactacgatgacccgcacaaaacccctgcctccccagttgtccacatcaggggcctgattgacggtgtg

SEQ ID NO: 68355 - DNA, 71 bp, Homo sapiens
tcatatggacagatggacttcaaatgctgtttgtattccagagactagcaatgccctgccctaaggaagac

SEQ ID NO: 68356 - DNA, 82 bp, Homo sapiens
gcggagctgaagctgcgggaggcccccagccccgtgctcttacagcctgttccaagtgtggcttaatccgtctccaccacca

SEQ ID NO: 68357 - DNA, 50 bp, Homo sapiens
cagcctccaaaagtgctggcattacagactcctgccctaagagccatagg

SEQ ID NO: 68358 - DNA, 100 bp, Homo sapiens
tcttcagatcttcacagcacagttcctgggaaggtggagccaccagcctctccctgggcttatttcaaaacctttgtccctcagttccaggaggcagcat

SEQ ID NO: 68359 - DNA, 90 bp, Homo sapiens
acttgtggaatgagagaaccgaggaacgaagaaacagacattcaacatgattgcatttgaaagtcttttatgacatcaagagaaatgatc

SEQ ID NO: 68360 - DNA, 98 bp, Homo sapiens
ctattgagttaacacctctgccgctgctaaaaggggctttgttatgcacctaaagccatattggaagctccagaagaaagagcaccccccggaagtca

SEQ ID NO: 68361 - DNA, 75 bp, Homo sapiens
cgcttcagagcattttcgaagtttaagtggaaaccctgcagatttagaaagaagagaagcagtgtttggaaagaa

SEQ ID NO: 68362 - DNA, 100 bp, Homo sapiens
aacgaggagtacgagacgaggttcctgtgcaactcttcacagcttctttatgaaaaaggcatcagcctcagggcctccttcatcttcatctctgtctgca

SEQ ID NO: 68363 - DNA, 110 bp, Homo sapiens
ggccactacattctgggtgacacgctgggggtcggcaccttcggcaaagtgaaggtttggtgccctggttgtcagatgttggaaagcagtaggacggaacatactcttcg

SEQ ID NO: 68364 - DNA, 50 bp, Homo sapiens
gtcaggaccgcgacggcagcagagcagtgtaggaatgaagctaactgacg

SEQ ID NO: 68365 - DNA, 50 bp, Homo sapiens
ggagtagcggccgagctgcgaaagagattacctaaaacctcgggcagaag

SEQ ID NO: 68366 - DNA, 49 bp, Homo sapiens
ctggactggaacctctgggcccacgtacatgtcccagagcaagcacacg

SEQ ID NO: 68367 - DNA, 49 bp, Homo sapiens
gcctatcagctggggctggatgagtttactaaaccaaggagatttaact

SEQ ID NO: 68368 - DNA, 100 bp, Homo sapiens
gaccctcagcgccggtgcatgtcgatgatgtacagttacccagcacgtgtacctcctcctcctcctattgctcgggctgtagtgccctcgaaacgtcagc

SEQ ID NO: 68369 - DNA, 75 bp, Homo sapiens
ggagaccctcacggagctgggcgacgagctgaccctgggagacatcgacggttaaacccatccagagtaatggct

SEQ ID NO: 68370 - DNA, 98 bp, Homo sapiens
acggccgcatggtgccgagagggacaggcttctccggaaggaacagattttagctgtggccagacagcaccagagcagttcccctccgaagagttccc

SEQ ID NO: 68371 - DNA, 75 bp, Homo sapiens
aaaactggacattataacattaagaaggtgtcttgctgcaggtaactaatgaagaagtggtcaaccacagagtct

SEQ ID NO: 68372 - DNA, 74 bp, Homo sapiens
ctggccgagcaggctgagcgatacgacgggagtgtcacattcaaggcctaacactgaggacatgtcactgtgtc

SEQ ID NO: 68373 - DNA, 80 bp, Homo sapiens
gcgccgacggctgctcaaacatcagggatgaccagtgtcccagtgaaggaacgagtgaaggtgtctcagaactggagact

SEQ ID NO: 68374 - DNA, 75 bp, Homo sapiens
atttgctggatacgtgacatcaattgctgcaactgaacttgaagatccaccttttgtggtgacattggatgaggt

SEQ ID NO: 68375 - DNA, 82 bp, Homo sapiens
cactgcctgcgcagctccggccgcctggctccccatactagtcgccggagtgtggccatctggggccgtgtggtatttgcca

SEQ ID NO: 68376 - DNA, 80 bp, Homo sapiens
cataatagatttcgagacaacagtggccttctgatgaatactttaattgtgtttgcaatgggaagcaaaatatacaataa

SEQ ID NO: 68377 - DNA, 100 bp, Homo sapiens
cgaatactactacaggaagaagtgcgagtccattgtggagccaaagccggttcggggtgagggcactggcgtgctgggctcattatccctgcccctctca

SEQ ID NO: 68378 - DNA, 100 bp, Homo sapiens
ttgttgatgaagtaatacagaactgccccatcgatgtgcggcgcccgctgtataagaatgtcttactaccctatcagttaatcctatacattgctcaagg

SEQ ID NO: 68379 - DNA, 100 bp, Homo sapiens
ccgcggagcgccagctcaatgaaaaccagacgtcctgggtcctctccagcatggcagccctctactggagggtgaaaggccaaggaaagaaggcaatcga

SEQ ID NO: 68380 - DNA, 75 bp, Homo sapiens
ctactttgacagctgcagggccgcggcctgggtgctggagaatctggtaaaagcaccattgtgaagcagatgagg

SEQ ID NO: 68381 - DNA, 89 bp, Homo sapiens
cagagatctgataaaactgttagcaaggagtgtttcatttgaacaggtttgaaacgcctcctaccctcttattttctttggatggattc

SEQ ID NO: 68382 - DNA, 100 bp, Homo sapiens
acagctaagatgccaggacatcctggaagctgggaaaagaatgattacggacctgaagccaaagaacaagatgcgctagtggacagattgctgaccaggg

SEQ ID NO: 68383 - DNA, 75 bp, Homo sapiens
agccaagatctcctcatcacaaagcaagaactcccctggagcaggaaattttcaacctcctccataagaacaagc

SEQ ID NO: 68384 - DNA, 100 bp, Homo sapiens
acgattgctgtgaaagtcaacccggagcgtgaggacagtgagactcgaacaacatatctgaagagatggattaagaatgctttggattaaggattgtgga

SEQ ID NO: 68385 - DNA, 100 bp, Homo sapiens
ggtatgaacctttcctgtttaatttcttatatagagacctattcactgcaatgattattgatgcagattctgcccaagaagcccctgcattgcagaggga

SEQ ID NO: 68386 - DNA, 95 bp, Homo sapiens
atggagtgctgtatgcctctgtgaacccggagtacttcagcgctgctgatgaatttggtgttcacttggcagaactgactgtagatccccagggg

SEQ ID NO: 68387 - DNA, 101 bp, Homo sapiens
gtgaagctcaccgagacggcgatccgggcgctcgagacttaccagagccacaagtgttctggacttggtgcctctttctgttatatgctttcctatttagt

SEQ ID NO: 68388 - DNA, 100 bp, Homo sapiens
gttctcacagttattaaccagactcagaaagaaaacctcaggaaattctacaagcttgaaagaattgctgattccaaggagcaagttttccctgtcaaag

SEQ ID NO: 68389 - DNA, 75 bp, Homo sapiens
gctcgccgcactcctgcagctggcccccgcccaggcccccgacagctgctctcgggagccgcctcccgacacccg

SEQ ID NO: 68390 - DNA, 100 bp, Homo sapiens
gctacgccgccgccatgtcggcgcaggcccagatgcgcgcgatgctggaccagttgatgggcacctcccgggacgagagagtctacagggagattgaaca

SEQ ID NO: 68391 - DNA, 89 bp, Homo sapiens
gctgagccgagcgggggcgccgcccggggtccggtgggcaaaaggctcaaaaatgaccaggctaactactcgctcaacacagatgaccc

SEQ ID NO: 68392 - DNA, 75 bp, Homo sapiens
ccatcttcctgcacacagccacgatttgcaaagggaagtttaattagcattgacagcacctgtacagagatgggc

SEQ ID NO: 68393 - DNA, 100 bp, Homo sapiens
tagtgagaccaaaaacccaccaattctggacacattgggattaaaggtagctacagcaagctgggtagcaggcagatccaaaggatatcatgaagtttcc

SEQ ID NO: 68394 - DNA, 100 bp, Homo sapiens
gtccccgtctccagttcagggcaagaagagtccgcgactcctgtgaggaattttaaattggaacaagagcaagaaaaaaacaaaatcttgtcagaagcac

SEQ ID NO: 68395 - DNA, 48 bp, Homo sapiens
ttgcttctccatgcaaagcttcttaagacaatccatggacacaaggga

SEQ ID NO: 68396 - DNA, 100 bp, Homo sapiens
ctatgcttaccgagatgcggttttcctcgcagaacgcctttatgcagaagcttgaagctcaactagagaaaaaggaccaacaatttaaagaacaagaaaa

SEQ ID NO: 68397 - DNA, 82 bp, Homo sapiens
gaagaggaaagtggcctccggggaagccagagctgactgaagtacaaggcgagtggataattccaacacaagactggcagtc

SEQ ID NO: 68398 - DNA, 100 bp, Homo sapiens
gcgcgacgagcaggtggcggcggctgcagggattttgcttatgtagcaagagataaagatacaagaattttgaaatgtcatgtatttcgatgtgacacac

SEQ ID NO: 68399 - DNA, 74 bp, Homo sapiens
atgaccctggttcaccatgttttaaccgctcttggataagcacaagaatacagagagcatggtggagcttctgg

SEQ ID NO: 68400 - DNA, 80 bp, Homo sapiens
cgccgttgcatcggtgcagggcaagatctctgttgaggagctggcgcggaatctggtcatcaaggtcaacagggatgctg

SEQ ID NO: 68401 - DNA, 82 bp, Homo sapiens
agtcttcatcaaccgggaccgtggcttcggcttcatccgcttgccagaagatcagctgccatgttacttgactcacaccaac

SEQ ID NO: 68402 - DNA, 75 bp, Homo sapiens
agatcacagcagtgttccaagttctaaagaggtgggaagaagagcgctatcctgaaggcatcaagtggaaattcc

SEQ ID NO: 68403 - DNA, 90 bp, Homo sapiens
gagaaataaggacaaaagccaagaggaggacagttcgctacacagcaatgcatcgagtacctcactgtggaccgaaatcgtctatggtat

SEQ ID NO: 68404 - DNA, 101 bp, Homo sapiens
ggaacatgctgagaaactgatgaagctgcagaaccaacgaggtggccgaatcttccttcaggatatcaagattgctagtcatagtggctatgtgcagattg

SEQ ID NO: 68405 - DNA, 75 bp, Homo sapiens
cttggtcctgggcctgcctgccccctggggaacacaggatcccaaaatggctgggcgaaaacttgctctaaaaac

SEQ ID NO: 68406 - DNA, 75 bp, Homo sapiens
tcaaacaggagctggagcagctcaaagaggtggcgacatgtctaagaatgtgagccagtcacagatggcaaaatt

SEQ ID NO: 68407 - DNA, 80 bp, Homo sapiens
aatgtcctggtgtggcacgctctcctcctacccattacatctcgtttagcagatgtgttcaaccaaaggtgtgaggtgaa

SEQ ID NO: 68408 - DNA, 100 bp, Homo sapiens
cgctggaccacgtgctcacccacggctgcttcgacatcttcaccacggaggaggaagtccctgcaggaagcatcacccaggctggcagatcatggtagca

SEQ ID NO: 68409 - DNA, 82 bp, Homo sapiens
gcgagcgccgcagtctgctctccccgcccgcggcccgtgcaggtgagaagccctaccactgcaactgggacggctgcggctg

SEQ ID NO: 68410 - DNA, 88 bp, Homo sapiens
agatggcaccagggactggcagctccactgccgtcaactcctgttctcctcagagcctgattggaaccaaccagatggctgtgtgtgc

SEQ ID NO: 68411 - DNA, 100 bp, Homo sapiens
ctccagccgaaggagaaggggggaagcgttgttgacgaccatggacatcatccacgatggatttggattcatgctggcttttggagacttggtgtgggtt

SEQ ID NO: 68412 - DNA, 100 bp, Homo sapiens
ggggcgccacgggggccatgtaagcaggcaatctgaaagcaaatcctgtttagatgcaggcgaaggttcctggtgacccaggctctcaccttaccgtccc

SEQ ID NO: 68413 - DNA, 80 bp, Homo sapiens
agcagtagcccgatccggggccgcgggccgagctgccgatggagttttaacattgaatgcggagaacactaattatgcct

SEQ ID NO: 68414 - DNA, 75 bp, Homo sapiens
gcgtcggcccctgcgccggcctcggccaccgagatcctgctgacgccggctaggatctctggaaacatggctaca

SEQ ID NO: 68415 - DNA, 100 bp, Homo sapiens
ttggctggacccactaatgccatcttcaaagcctttgctatgatcattgacaaactggaagaggtggtctgagctcggcctatgggggcctcacaagccc

SEQ ID NO: 68416 - DNA, 75 bp, Homo sapiens
cgcggatttccatcaccagggccgagaacgacaggtctcaccaacggctttgggggtgcgaggagcgagcaggag

SEQ ID NO: 68417 - DNA, 100 bp, Homo sapiens
aaaggtggtagttgaggagttgctggccaaaggggcctgtgtacttgctgtagatgaaaatgggaggaagagatagtcgctctggatcacccatggctag

SEQ ID NO: 68418 - DNA, 80 bp, Homo sapiens
atcgtgtctggagcagtggagcccaaagacccctggagacatgcgggagatacagatgacccaccaagaattactcagaa

SEQ ID NO: 68419 - DNA, 90 bp, Homo sapiens
accgagaccgtgaccgagagcgtgaccgagagcgcgaatatcgtcatcgttagaaggtctcagaaatattccagtatatacaataaatcg

SEQ ID NO: 68420 - DNA, 82 bp, Homo sapiens
atgaagctactaaccagagccggctctttctcggccttccagcaggaaatttcactgaaccacaataagattgagcagataa

SEQ ID NO: 68421 - DNA, 100 bp, Homo sapiens
gttgtacttgtggaaagctcttccaaactgttccttccccaacctgcagaggatgagtcaaggtgtacgtgaacggagagtgggtgaccaacatcagcga

SEQ ID NO: 68422 - DNA, 71 bp, Homo sapiens
tccgccactgcgcacattttgcagcctgcaccggccaacgccaccagctgaacaggccaaagccagactac

SEQ ID NO: 68423 - DNA, 90 bp, Homo sapiens
aaaaaacatatccgagggtgtcctgttacttccaagtcatcaccagaaagtttgtgaatagcacaatggaagaagctggactttgtgggt

SEQ ID NO: 68424 - DNA, 100 bp, Homo sapiens
cggctctaacggggctttctacaagaatggagaagctgatgccatgagcttggatggagggtttgtctacatagcgggcaagtgtggtctggtgcctgtc

SEQ ID NO: 68425 - DNA, 75 bp, Homo sapiens
aagaggaggcaattgacaggaactacgtcccggggaagggcgtctctggccgagcctctttttgtggaaaacgac

SEQ ID NO: 68426 - DNA, 99 bp, Homo sapiens
gcagcccgacgcaaaccaaggatctggggatcttcgcactatcccaagaacaagttgaaatcatcgcagaaggataaagttcgtcagtttatgatcttc

SEQ ID NO: 68427 - DNA, 83 bp, Homo sapiens
gaagggtttactgatattgatatagatgacttcaaacctgcttctattgacacttcttctgaaggataccttgaggttggtga

SEQ ID NO: 68428 - DNA, 74 bp, Homo sapiens
cgtggctgtggagagggtcaaggagtactccaagacagagacagaggaacaagatcactcaaggtgaaggataa

SEQ ID NO: 68429 - DNA, 100 bp, Homo sapiens
acattcaagttgagcagatgacaaaacttcaagccaaacatcaagcagaatgtgatttgcttgaagatatgagcagtaaagactcctctcccactctggc

SEQ ID NO: 68430 - DNA, 100 bp, Homo sapiens
gcctgcaccattctcctccggggggctagcaaagagattctctcggttcaaaccttgtactactcagctgatcacaagctgcttgatgggaacctactag

SEQ ID NO: 68431 - DNA, 101 bp, Homo sapiens
gggatataggagggcagacaataggaggcaaaatgttggataaatatatctatggagcacagaactctgtcatcacacctgtgagacactctagccacatg

SEQ ID NO: 68432 - DNA, 96 bp, Homo sapiens
ctctatgaccacgcacatgtaaagccccttctgcaaaaggtgtgatgttagctgttgatgctgtaattgctgaacttaaaaagcagtctaaacctg

SEQ ID NO: 68433 - DNA, 51 bp, Homo sapiens
attgagaccatcccggccaacatggcagcagtacctgtccaaagatcgctt

SEQ ID NO: 68434 - DNA, 83 bp, Homo sapiens
gggtgaagatggcggcagccgaggccgcgaactgcatcatggagatggagaaggaggagacaacccgggagctgctgctgccc

SEQ ID NO: 68435 - DNA, 80 bp, Homo sapiens
ggatagacaataccacaacaacacattttgcagaggaattacatgaatgacagtcttcgaaccaatgtgtttgttcgatt

SEQ ID NO: 68436 - DNA, 120 bp, Homo sapiens
acaaaagatgggaagaggtcagaggtgccctgatgtctgctttcagtcctgaaaagctgaacgagcattatagccttcagaaaggccaacaaagtgggtattttcatcaaagttacacca

SEQ ID NO: 68437 - DNA, 99 bp, Homo sapiens
actcctggacaggatggattgccagggcttcctggcccgaaaggagagcctgccactcctcaggatagtcaggaaggaacctttgggtcagagcattca

SEQ ID NO: 68438 - DNA, 98 bp, Homo sapiens
aaaaggatagcctccggcattccagacaatgaccgtttgccaagtaaaattatctaatggcttactggtacatgggccacagtgccactctgaaaatg

SEQ ID NO: 68439 - DNA, 74 bp, Homo sapiens
ctcagtcctccagtgtttggatattcagttaatgacagttcggactatcacaggaaatatctactatgcaaggt

SEQ ID NO: 68440 - DNA, 100 bp, Homo sapiens
atcctcattgatgttaatgaatggtgctatacttgaattttctaaggtgtcattaggtaggtttaggtcacagtaatgaaaggcagtaatagaaataagg

SEQ ID NO: 68441 - DNA, 100 bp, Homo sapiens
cgaagaggtacgattccggagaatcgcgaggcagagcgggagcgcgcagccagtgtacaagtccccagagtatgagtcccttggttttgagcttactgtg

SEQ ID NO: 68442 - DNA, 75 bp, Homo sapiens
caggccttaaggagaaagtttcagaaattccaacagaatgggtttcctgaaacggatttgcaggaattcctgaag

SEQ ID NO: 68443 - DNA, 98 bp, Homo sapiens
cgccgaagcaggacccgaagcctaaattccaggaggggtttcatcaccttaaatggttttgaaccaatgaaggtgtattcccttaaaaagacggacag

SEQ ID NO: 68444 - DNA, 90 bp, Homo sapiens
gaaaacagtctgtggagagaatctgcctcctttaacttatgaccagcctgactggctcatggagaaagcctacctaagaatgaagccggg

SEQ ID NO: 68445 - DNA, 88 bp, Homo sapiens
tcctccggtagcagggaggcgacagaaggtctcctctgagcctccggcctccataagacccaaaacagatgacacctcttcccagtcc

SEQ ID NO: 68446 - DNA, 88 bp, Homo sapiens
gaagtcaagccgatcttgcagaaattgcagactctgaacaggaagtgcctcctggaaccacagagtcggttcagtctgtggattacta

SEQ ID NO: 68447 - DNA, 80 bp, Homo sapiens
gagtcagaggggtgaccagagagcccaacgcctggtgctcaagactttctccgagacaatgcagatcttcgtgaagactc

SEQ ID NO: 68448 - DNA, 98 bp, Homo sapiens
gcagctgagcctccacccagaccgaaaaccccagagatcttcagtgacttatcagatgccctggtcatcttccagctctatgaaaagatcaaagttcc

SEQ ID NO: 68449 - DNA, 75 bp, Homo sapiens
cgcggctgcacaactgcaggaacaccgtcacgctgctggaggaggtgaagagcgattatatgttagagatagctg

SEQ ID NO: 68450 - DNA, 96 bp, Homo sapiens
tgttcgagaacgaccccgagacgggcaccccggctctgccccagactggcataccaacagaggctttggtgaaggggtccatttcgagaatgccca

SEQ ID NO: 68451 - DNA, 100 bp, Homo sapiens
tggcagtacctgaccactctctcccagggtggtgacttcacacgccataatggcactggtggcaagtccatctatggggagaaatttgaagatgagaact

SEQ ID NO: 68452 - DNA, 75 bp, Homo sapiens
ctcgggagtcggcgtccaggctcggagcgcgacacggagactaggtggcagtaagactttgaccccgacgcaggc

SEQ ID NO: 68453 - DNA, 75 bp, Homo sapiens
ctgggtaaaagtagagaaggatcaaggacggatgatgaagtagtacagagggtatgttagagcccaccaaggaac

SEQ ID NO: 68454 - DNA, 100 bp, Homo sapiens
acaactgcaagggggaagtagagagataacaaaagctgctcagagtctcaatgaacttggtgtggaatatcaaacaaatgattaagttgacacaggaaca

SEQ ID NO: 68455 - DNA, 97 bp, Homo sapiens
cggcgccgccgcccccgggctcgcggcctgcaggccacagcaaacacaggtgtgcaggaaccgtttgtcatggaagccagggagcctgggaggccca

SEQ ID NO: 68456 - DNA, 75 bp, Homo sapiens
cccacgcggcgccagttctccggcgggaaggaaaaccgcgcagagagaacccttaggagaaatcttgagagtgga

SEQ ID NO: 68457 - DNA, 97 bp, Homo sapiens
gataagtgatctttggggcccgcagaggacgtctccccaagacccagtggcaaccgggtgctggagaatctggtaaaagcaccattgtgaagcagat

SEQ ID NO: 68458 - DNA, 123 bp, Homo sapiens
atcctctccatctggttcgaagtctcagcggtattctggtgcttatggtgcctcagtgctttctcctgctcaagacagccacacgaacacggatctccccccagtgtcagagcagatcatgca

SEQ ID NO: 68459 - DNA, 75 bp, Homo sapiens
gttaaatcagctggagaaggagaagtggagaagaaatcagtcagccgcagggaatatggagccattgatgatgta

SEQ ID NO: 68460 - DNA, 100 bp, Homo sapiens
gctccctcgtgaagaacctgaaggacacactagattttggctatggaaaggggaaatgttctaagcagagcccgtcaggagcccacgggacacattttgg

SEQ ID NO: 68461 - DNA, 102 bp, Homo sapiens
cccatacctttatccactctatggccttggagaactgccccaaggatttgcaagatgttcccttcggagaggcagctccttcacattcttaacacctggccc

SEQ ID NO: 68462 - DNA, 73 bp, Homo sapiens
tgggagcttatttcttcagacacctaaaattgtggcagataaaggatttgttaaggattccaagtaactctta

SEQ ID NO: 68463 - DNA, 75 bp, Homo sapiens
tttcctgaggcttccccagccatgcgtaactgtagtgaaaatggacacatccattcaacctctttgcaacacata

SEQ ID NO: 68464 - DNA, 97 bp, Homo sapiens
gctgggaccgtgcgcgtgcgcctgggggcaccgctgccgttccgagtggagacctttggcgacttggcctttggcgacatcttcctccacctgctca

SEQ ID NO: 68465 - DNA, 80 bp, Homo sapiens
ctgaaggtaccgcggacctcgccccgggacagcgaggagctgagggacccttgatcagggccaaagcggtcagtgagaag

SEQ ID NO: 68466 - DNA, 75 bp, Homo sapiens
ctgcacccacgaatctgcccacccctcctgtaacccagcctgtttcacttcttgatagaaaatgctgctgaagaa

SEQ ID NO: 68467 - DNA, 100 bp, Homo sapiens
gagcgtgaccgagagcgcgaatatcgtcatcgttagaagaatgctacagctttccatgtaactgtccaagatgataataacatcgttgtctcattagaag

SEQ ID NO: 68468 - DNA, 75 bp, Homo sapiens
cccaacttcactgctaacaacaggagccatgtgttcacatgtcatgtggaccagtatttaactgtggaaaccgcg

SEQ ID NO: 68469 - DNA, 75 bp, Homo sapiens
gcccaagcccctgtcccctacgtcctacatgaggtttgtgagccgtatctccgtggtgccaactcagcccgggct

SEQ ID NO: 68470 - DNA, 123 bp, Homo sapiens
tctgttctaagtgccttaagagaggatcgcccaatccacatgcttttccaggtgctggagaatctggtaaaagcaccattgtgaagcagatgaggatcctgcatgttaatgggtttaatggag

SEQ ID NO: 68471 - DNA, 100 bp, Homo sapiens
ctggaatgtccagatgaaccggctgatgcatccaattgagcctggaggggttgatagttcttggggaggtacctcccccagagcatacaacagacttatt

SEQ ID NO: 68472 - DNA, 90 bp, Homo sapiens
cgccgagcggtgactccccgccgctcccgggggccgtgacggtggtccccatgcttcccaggctgctgtgtgaggagctgtgcagcctca

SEQ ID NO: 68473 - DNA, 99 bp, Homo sapiens
gcaagcgctgcccgcgagctgagccgccggaggaggagccgcgggcaacgaggcaagctaatgaagaatatcaaatactggcgaactcctggcgctatt

SEQ ID NO: 68474 - DNA, 99 bp, Homo sapiens
accttgaccagaagaaaaaccaagccctaaatattgcatggcaaaagattgagaggatccagaatccagatctctggaatagctaccaggcaaagaaaa

SEQ ID NO: 68475 - DNA, 90 bp, Homo sapiens
ggagctgaaaatagcgtgaacttgaagcttgtattggttggtgatggtggtactggaaaaacgaccttcgtgaaacgtcatttgactggt

SEQ ID NO: 68476 - DNA, 82 bp, Homo sapiens
cgctgccctcagctccgagtccagggcgaggggccaaaccagtgctcctgccacctctctggctgccccctagagcctgccc

SEQ ID NO: 68477 - DNA, 50 bp, Homo sapiens
aaatatggacctattcgtcaaatcagagttgaaacaaagagtcctcttcg

SEQ ID NO: 68478 - DNA, 100 bp, Homo sapiens
ggcggtcgtccggccggggacccggcccgggaccggcggcgcgcggcggccgaggccagggactggttcttgaagggaaacctcctcatcatcatcgtca

SEQ ID NO: 68479 - DNA, 100 bp, Homo sapiens
gatggaaagcattggtgggaatatgtggatcctacagttactctagaattattagatggctgaagggtatgtgattggcagctgtattaaacacattcca

SEQ ID NO: 68480 - DNA, 100 bp, Homo sapiens
tgagaaattccaattggagattttgtcaaacaggaatttactaattaaacaaccaccatgtcgagcaaaaaggcaaagaccaagaccaccaagaagcgcc

SEQ ID NO: 68481 - DNA, 50 bp, Homo sapiens
ggcggagctggagctggagctctcggaggcttaagtgagagctttttcat

SEQ ID NO: 68482 - DNA, 78 bp, Homo sapiens
acaatgaggaacagagtggtgacgagtcttgggcgtctttggtactggcttttttaggggtctgcctggggattaccc

SEQ ID NO: 68483 - DNA, 82 bp, Homo sapiens
agttccaccaggccgggaagcccatcgggttttaaaatcaaagatgggaaaatcggagaaaattgcccttccccatggccag

SEQ ID NO: 68484 - DNA, 100 bp, Homo sapiens
agaggaaggagcgatttgggattgtcacaagttcagctggaactggaaccacagaggatacagagtacctgcagatgaaatggcccctcctcgatgtccc

SEQ ID NO: 68485 - DNA, 82 bp, Homo sapiens
caagaacccaccaattccggacacgaaattccgggtagatatgcctggctcaggcagtgcattcatccccaccatcaacgcc

SEQ ID NO: 68486 - DNA, 87 bp, Homo sapiens
tattccgacccattgaaaacaaggacgatgcatttacagattctctacaggggtttgttaaagttgttaagaataaggcctacttta

SEQ ID NO: 68487 - DNA, 83 bp, Homo sapiens
aggtggctttagtgaagtgtataaggacatggatttgattgacatactttggaggcaagatatagatcttggagtaagtcgag

SEQ ID NO: 68488 - DNA, 82 bp, Homo sapiens
gaagaacctgagtcaggacgtaaatggaaccctgggaaagaaaccttccaaggaaagattgactgcggatccaggaggctcc

SEQ ID NO: 68489 - DNA, 75 bp, Homo sapiens
ctcccccgtgtcttcctatgcagattactctcgtggctttggtggccggtacggggtggagaaggataaatggga

SEQ ID NO: 68490 - DNA, 100 bp, Homo sapiens
ggctattagaatgggagtgcaaaactgatgcagtagaagcccttacggcactgaatcactatcagataagagtgccgacctactcaatgtgaagatgatg

SEQ ID NO: 68491 - DNA, 75 bp, Homo sapiens
gactacgaagcctatgtcaagtgtcaagataaagtgagtcagctgtacatgctgtcacaagatgaaggtagaggc

SEQ ID NO: 68492 - DNA, 89 bp, Homo sapiens
gcggctgaggaggggccccagcagcccccgaaggccctatcaggacatggagtatgaaagacggctgtcacccttgacccaaactttct

SEQ ID NO: 68493 - DNA, 83 bp, Homo sapiens
taaccacccagtaccaaaggcaaatactcctgtaaatttgagtgtggtgatctgcaactctttcaccatctgtaatgcggaga

SEQ ID NO: 68494 - DNA, 83 bp, Homo sapiens
tgggaactcagaccgtaccttgcaacaaggagatcatgaatcagacagataaaaatcaacaagaaatcccatcataccttaat

SEQ ID NO: 68495 - DNA, 100 bp, Homo sapiens
gttggattttcaatggcagttgcaatggccatttatgtggctggcggtgtctctgtttggaaattttagcattcaggtgccaggaatgcagatgggacag

SEQ ID NO: 68496 - DNA, 75 bp, Homo sapiens
cggggacccaggagtttcctgtgtccagcgctgccggagccgcctgaggagtctactcttcatcttgtgttgaga

SEQ ID NO: 68497 - DNA, 75 bp, Homo sapiens
caagaagaactggaaaatgccagcctagtgtttacagctgatgcttttttcaaagccgctataagccttgttccg

SEQ ID NO: 68498 - DNA, 78 bp, Homo sapiens
gaccattgagaagttcgagaaggaggcggctgagatgggaaagggctccttcaagtatgcctgggtcttggataaact

SEQ ID NO: 68499 - DNA, 82 bp, Homo sapiens
gcatcacgtccgcttcccgacgctgagggcagccccgtccaggggaggaggtacaggagaactgtgtgcggtggcgaaagag

SEQ ID NO: 68500 - DNA, 100 bp, Homo sapiens
cggcagtgctttccccgcgtactcgggatggcggcggccgcgctgaggctcccggctcagtttcttcaaggaaagtccatgaagtgcctgccattcacag

SEQ ID NO: 68501 - DNA, 100 bp, Homo sapiens
acctgtataacttcttcttaaaagacaactcacatgtaatacaagagaatgtaactggtcactacatttccccctttcatgatattcctctgaaggtgaa

SEQ ID NO: 68502 - DNA, 83 bp, Homo sapiens
cgagagagcctgcggaacctgcgcggctactacaaccagagcgaggccgacccagcctgggatggagagcgacccctacgaag

SEQ ID NO: 68503 - DNA, 104 bp, Homo sapiens
tgtgaaggagttcaggcagctggccaacagtggcaactccagtggctgttggacaattatgagacagcagaaggagtgagccttcccagaagcactctgtacaa

SEQ ID NO: 68504 - DNA, 80 bp, Homo sapiens
aaatctgttactgcagacagatgggaaaaatatttgatcaagctctaagcgaaagacatgaggcctcagcctgaaatgag

SEQ ID NO: 68505 - DNA, 82 bp, Homo sapiens
agctgagttctgcatcatgttgctttccactgacaggacagaagtcgagcaaatataaatgctaatctgcaagggaaagcca

SEQ ID NO: 68506 - DNA, 87 bp, Homo sapiens
tcttcccgcgtccgccgattcctcctccttggtcgccgcgtccttggctggcgtcaacacagtcactcctggcggcaaaccaaacaa

SEQ ID NO: 68507 - DNA, 97 bp, Homo sapiens
gattggcctggagtaaaagctgatgatcggaatgattacagaccagcagaagtagacactgtggatgcattccagggtcggcagaaggattgtgtta

SEQ ID NO: 68508 - DNA, 98 bp, Homo sapiens
gccatggaagaaatgatgatggaaatgaagtataataccaagaaagccccacttggcatcagggatttggggtactctcagtaatattggcaaaccat

SEQ ID NO: 68509 - DNA, 100 bp, Homo sapiens
aaacagtttctcaagacccttacaggagttcttccagaacgccaaaagttacttggactcaaagttaaagatatttgaatggtggtacttccataagcat

SEQ ID NO: 68510 - DNA, 83 bp, Homo sapiens
tgttgtcgtggccggagcggcccgcgcctgggctgccggcacttcgcggcaggagcccagcagccggggccgccctattacac

SEQ ID NO: 68511 - DNA, 75 bp, Homo sapiens
actctataaacctctcattctccctgtgactcaggttggtgtcaaaggaaatccccaaggcttcaaccagggtct

SEQ ID NO: 68512 - DNA, 101 bp, Homo sapiens
aggtggtagagggcatggatatctctactcgctccaaagatctttaatctcatgaagtacgacagctacagccgcttcttaaagtctgacttgtttttaaa

SEQ ID NO: 68513 - DNA, 100 bp, Homo sapiens
tagcacaccatccccagccaacctacaacaagaaaggggcctcccgaaggaaagaccacctgaaggaccaccagaatgggtccatggctgctgtgaatgg

SEQ ID NO: 68514 - DNA, 74 bp, Homo sapiens
tcgtttttacccggccaaagtcactgctgttaacaaggatgctgatgttctaatcatgtcagataaagatgata

SEQ ID NO: 68515 - DNA, 75 bp, Homo sapiens
cccagttatcataaccttgaatggcgactagatgtacaggcgcttcctcccatcaacacagtcggcggagacaag

SEQ ID NO: 68516 - DNA, 103 bp, Homo sapiens
ccgcgctccctccgccgccgccgccttgctgctgctcaaagctgctgccgccccttgggctaaaagggcgtctctggccgagcctctttttgtggaaaacgac

SEQ ID NO: 68517 - DNA, 100 bp, Homo sapiens
agatctaaagtcacccggcggccaaaggccagtgactaccaacgtttggaccagaagcctccttttagaggactcagaagaagaagaaggtgacttatgt

SEQ ID NO: 68518 - DNA, 100 bp, Homo sapiens
tttcaacacggtcctgtcactggcccgctccctggcggtgcagagaccagcatccttggagaaggaaagaccacagcaagattctttcattcgtctcctc

SEQ ID NO: 68519 - DNA, 100 bp, Homo sapiens
cagccttgttagggcgtggcctgaggcttggataagtggggggaggacgaggaagaaacgaacgtgatagttctcagctacccccagtactgccggtacc

SEQ ID NO: 68520 - DNA, 100 bp, Homo sapiens
tagagctgaaggaagagtgcaaagactttgtggacaattgatgactacagcatggttcgatttttaccttacgatcagtcagatgaagaaagcatgaaca

SEQ ID NO: 68521 - DNA, 75 bp, Homo sapiens
aggttcttaatgagctttatacggatttaggtcctgaatatgaaggtatatttaacacttcattgcagtggatct

SEQ ID NO: 68522 - DNA, 74 bp, Homo sapiens
gggtggagtgtaggtcatatcgccgcggacaagatcgcagaggaaggtgggcggcgggagtgcccagccgtgtg

SEQ ID NO: 68523 - DNA, 99 bp, Homo sapiens
cccgcaccacctcctgctgccttcccgtcgccgctcccgaagcttttccagatgtcaagccctccaacatcctagtcaactcccgtggggagatcaagc

SEQ ID NO: 68524 - DNA, 87 bp, Homo sapiens
gaatgtctgccgaaatgttcaagtttaccaaaagagaggcaccgctggaacactaatgagattgagaggatccagaatccagatctc

SEQ ID NO: 68525 - DNA, 143 bp, Homo sapiens
accttgggggccaagaaatgatggaggtggtgaagagagatgacgaaaccataaaggagcatttatgtaagctccaagaagcccaagaaacatcccaaagtggccgtgaaagccaagccctcgccccggctcaccatctttga

SEQ ID NO: 68526 - DNA, 50 bp, Homo sapiens
ggagttccggcgcgccgggagccggggaattttatattacacggcattct

SEQ ID NO: 68527 - DNA, 100 bp, Homo sapiens
ggcaacatccaacaggccaccggaagggaagtttaattagcattgacagcacctgtacagagatgggcaattttgacaatgctaatgtcactggagaaat

SEQ ID NO: 68528 - DNA, 75 bp, Homo sapiens
ctgaccgctgccgcccagcacgtccagaaagccttgagccgggccatgcttctcacatcttacctgcctcctccc

SEQ ID NO: 68529 - DNA, 100 bp, Homo sapiens
ctggaactggcaaagcagctacacaaagagggtcatctcttctattgtacctgcagttttccaaagaaattagaccattttcttcgtgagaaagaaatcg

SEQ ID NO: 68530 - DNA, 50 bp, Homo sapiens
gaggaacaagtgcagctagttggtgaggcaggcgactaatcagattgtga

SEQ ID NO: 68531 - DNA, 51 bp, Homo sapiens
gcagacaagaaacattcgtttatgagatgaccctccagcccgccctgttgt

SEQ ID NO: 68532 - DNA, 106 bp, Homo sapiens
aagaatgaatgaagagatgcgggaatcagaaggactttatggacagccaggtcatcttccacgatgttgctgtgctgacggataagctcttccccatcgtggaggc

SEQ ID NO: 68533 - DNA, 101 bp, Homo sapiens
gaccgagagcgtgaccgagagcgcgaatatcgtcatcgttagaagtctgcgggccaggcatcgacatccgcaacgactatcagcagctgaagcgcctggag

SEQ ID NO: 68534 - DNA, 82 bp, Homo sapiens
gggcggccccggccgcctccgcgagggcaccatggaggtgaatgcaggttaatttggagtggcccctggagtcagtttccta

SEQ ID NO: 68535 - DNA, 82 bp, Homo sapiens
gggaggaaggaacgaggcaaggagctaaagcagcgtgcgttcagccctgggtttggtaactctcattcgacatccatctgaa

SEQ ID NO: 68536 - DNA, 97 bp, Homo sapiens
ccatcttcccatgcttgtcaaaaatcagaggcaactaacactgcggcttcctgaggatctgagtgatgagacgtgtccccactgaggtgccccacag

SEQ ID NO: 68537 - DNA, 101 bp, Homo sapiens
ggctggagtccgattgccgattcagcccagcagcattagtgccagcagtagttcccaagggctgtctcagccatccacccagacgactcagtatctgagag

SEQ ID NO: 68538 - DNA, 51 bp, Homo sapiens
tccctacacggtctcctgggtcaagggggtttgggaaacaaggcttccagt

SEQ ID NO: 68539 - DNA, 100 bp, Homo sapiens
aaagagatgagaaggtatttctgcttggagaagaagttgcccagtatgatggggcatacaaggcttaccactcttctctcatggatcctgataccaaact

SEQ ID NO: 68540 - DNA, 100 bp, Homo sapiens
ttcaaggcaagaccgaattcagaaggatatcgacgtcgtgatccagaagtccagagctgaggactgcctgtttgcaggacttcatagacctcacgttgtc

SEQ ID NO: 68541 - DNA, 87 bp, Homo sapiens
gaagggacgggtcacaccccggcacatcctgctggctgtggccaatgatgaagagctgaatcagcctggtgtgtccgtttctctggt

SEQ ID NO: 68542 - DNA, 100 bp, Homo sapiens
cttaacattgtcaaagactgaactaggaaagaaagctgcagacatctggtccctgggcataacagctattgaacttgcaagaggggaaccacctcattcc

SEQ ID NO: 68543 - DNA, 100 bp, Homo sapiens
tcattaggaacaatggtgcaaggtgggtttgatctggacatcaaaggctggggcggagaggatgtgcacctttatcgcaagtatctccacagcaacctca

SEQ ID NO: 68544 - DNA, 75 bp, Homo sapiens
agaactacctgtaaattatgtgaaacctccaaatgtgggattcagtggtcccaatttaaaggctattttattttc

SEQ ID NO: 68545 - DNA, 50 bp, Homo sapiens
gagatggtggaggaggcggtggaagctgaataccactagaaacatacctg

SEQ ID NO: 68546 - DNA, 95 bp, Homo sapiens
agcagggctgtggctaccatgttctctcgcgcgggtgtcgctgggctgtcggcctggaccttgcagccgcaatgcgtcagcctcgagtttgacca

SEQ ID NO: 68547 - DNA, 100 bp, Homo sapiens
ccctggcgaccactgcttctccgtgggcagcattggcgaccagcgcttcacgatatgtcttctccgactactatgaagaagcctgaaaagccattgttca

SEQ ID NO: 68548 - DNA, 80 bp, Homo sapiens
cagaagatgatccatatttgggaaggcctgaacaataagtgaaaatggtgatcacctaagcacatggatgagacgtgagc

SEQ ID NO: 68549 - DNA, 100 bp, Homo sapiens
gctgagggtgagtgccgggagctctgagggttctagtaaataccgcttgctgtgttttgatgttggtggctaagctcatccagtgtattgtgtttggccc

SEQ ID NO: 68550 - DNA, 121 bp, Homo sapiens
aattgggcagaagagaagcagtgaaggagtgcagaggcatcacctgaaagcaattcacagaagctgtgagtccttcagtgctacccccttcagctttgccactggacctgcttaataatgc

SEQ ID NO: 68551 - DNA, 97 bp, Homo sapiens
ctgtgcattctctcctgactcttctatgctgtgttcagtcggagccagtaaagcaacctgaaaactaccttctttatggtaaccgagctctttgttt

SEQ ID NO: 68552 - DNA, 83 bp, Homo sapiens
cccgcgctgcccgcactcctggtcctgctcggggctctgttcccagccttatgccagcctggaccatcttggaggcagtgtag

SEQ ID NO: 68553 - DNA, 50 bp, Homo sapiens
gggagaacctgcggcggccggagcggacagaataacgggctcccagattc

SEQ ID NO: 68554 - DNA, 75 bp, Homo sapiens
ctggattctaaggcaacacttccttgaagaaacaagcttacagatattctctaagccgctttcatcatgggagaa

SEQ ID NO: 68555 - DNA, 98 bp, Homo sapiens
agttttgccgaaaggggaattagaagtgcttttagaagctgctattgatcttagtaaaaagggtatgaaaatgaaagtcttcagaatggaaggaagtc

SEQ ID NO: 68556 - DNA, 82 bp, Homo sapiens
gacagaagatggtgcagaagaaaccagccgaacttcagggtttccaccgttcgttcaagggacaacaccttccatccacata

SEQ ID NO: 68557 - DNA, 100 bp, Homo sapiens
ctcatttgaaaccgtccagatcaacgttatccccacctctgatgattcctcagtgccccaggtgctaaagagctgtgcagaatttgtggaggagtatgga

SEQ ID NO: 68558 - DNA, 51 bp, Homo sapiens
gcaagcatgcagcttactgcttgaaaggagaaatacgaatgtgctttaaag

SEQ ID NO: 68559 - DNA, 75 bp, Homo sapiens
tttgcaaatacacacactgctccagccacagtggttcttgtgtcaagacgatgtatctcctaggctacattccta

SEQ ID NO: 68560 - DNA, 90 bp, Homo sapiens
ggacagttagtcacccacctacatgttgagatgcggtggtgctagaatttgttatattttccatgagacttttgggcgaaccttagaatc

SEQ ID NO: 68561 - DNA, 100 bp, Homo sapiens
ctgatcctgctggccctcatgacagtggtcatggccgtgtgctccctgcctctcacggatgatgatgctgaagctatccttgctgcagacttcgaaattg

SEQ ID NO: 68562 - DNA, 73 bp, Homo sapiens
taagaggtggtatcgcctagccaatggcaccagcatgatatcattgatcattcctcccaaagaccagatttca

SEQ ID NO: 68563 - DNA, 87 bp, Homo sapiens
gccaattaagccttaccagcaggggcgacaacagcatcagatcgcttacaaccttggggttggttatatcatcactggctgaccagg

SEQ ID NO: 68564 - DNA, 98 bp, Homo sapiens
cggcccatggccccggttcagtacaacgctcagaggagtcaacagatgccacaggcagcacagcaagcaggtcttgcaagagcaaaatccgtccctag

SEQ ID NO: 68565 - DNA, 76 bp, Homo sapiens
ggttctggacaagatgaagtctttctgccagaaggaagaggcccagcagaagggactcgctgagccaccccccgcc

SEQ ID NO: 68566 - DNA, 50 bp, Homo sapiens
ctacattttgccgcacaaacacatgtagaattggcagagggggtcgattt

SEQ ID NO: 68567 - DNA, 98 bp, Homo sapiens
agcttccctgtatgtgatgatgaccgtcaccaactggttcaagtgaaaagccatacaagtgtacctgggaaggctgcgactggaggttcgcgcgatcg

SEQ ID NO: 68568 - DNA, 83 bp, Homo sapiens
gcgccgcgcacttcgtcatgttcttcgcgccctgggttgtgagtcccggcccagcccctccacccccctgcccccccgatgcg

SEQ ID NO: 68569 - DNA, 101 bp, Homo sapiens
catgaacctgaggggcctcttccaggacttcaacccgaggatgctgatatgctaactggtgatgagcaagtatggaaggaagttcaagaatccctgaaaaa

SEQ ID NO: 68570 - DNA, 75 bp, Homo sapiens
cggcaggggcaggcctagtttgactctgacagtcctcccactaaggatctcaaagatttcatgagacaagctggg

SEQ ID NO: 68571 - DNA, 75 bp, Homo sapiens
ttgggggataaggacaaagtaaccgttaagtgcaatagagtctctttttggagcatcattaactgggattgccta

SEQ ID NO: 68572 - DNA, 75 bp, Homo sapiens
agaatttcgatctccgccctggggtcattgtcaggagacagaggagctggaggaggagaagtcaggcctgcagaa

SEQ ID NO: 68573 - DNA, 90 bp, Homo sapiens
tcgcccctgcccggcgtggagggcgcggggggcgcggagggccagtgtatattcataatcctgaaagatggctgcctgggccatgagaac

SEQ ID NO: 68574 - DNA, 80 bp, Homo sapiens
gcgactacgcggccgcggagacctacctgcggcgtcggcagctgctgctccgagggatagctgggagtatggccaccctg

SEQ ID NO: 68575 - DNA, 75 bp, Homo sapiens
agaagaaatccgcagaagcttattaaagttaagttttctggatatgccgcagaaggatccgtgccagaagcaagc

SEQ ID NO: 68576 - DNA, 100 bp, Homo sapiens
ctcgccagcagccgtccggagccagccaacgagcgctggagaagcgactggaggagtggttggggaggacattgcctggcagtgactggacacccaatgc

SEQ ID NO: 68577 - DNA, 51 bp, Homo sapiens
caaatgtgccgtgatgtatgtgaacagtgagaaagatcagtctaaagaaaa

SEQ ID NO: 68578 - DNA, 135 bp, Homo sapiens
atcctgattggcctcggtctcccctgggctctgcagaccctggctgtggattacggatcctacatggagacgagagatctggacttctgaacatctaccggaaaagataaaatgtgcaagcccttcagaacgctg

SEQ ID NO: 68579 - DNA, 75 bp, Homo sapiens
accacgttgatggctttctaaatccaggatttcagagacaactgtctgaaccctgccaccccttccctcctcagc

SEQ ID NO: 68580 - DNA, 100 bp, Homo sapiens
gaacacttcatgtcagaactatgacatggtcagtgggatctactcatggcagaaaccactaatactagcctcttgcaggtgcaactggaatgcagtttac

SEQ ID NO: 68581 - DNA, 75 bp, Homo sapiens
tgtccatcgtgtgcctgatgatcacgcagctggctggcttcagtggaccagaattgcttggattgctacatggac

SEQ ID NO: 68582 - DNA, 100 bp, Homo sapiens
gatgacctgtcaggagttcattgcaaatctgcaaggggtaaatgagggtgttgatttctccaaggatctgctgaaagtaccaggatttctatgcattcga

SEQ ID NO: 68583 - DNA, 85 bp, Homo sapiens
cgacttgaagccagccaaaagagaaactgtcttaactttcataggtcatcaagactcctgagatagcaaacttggccttgcttgg

SEQ ID NO: 68584 - DNA, 83 bp, Homo sapiens
gagcgctcctggggacttctccctctctgtcaaatataaagatgaagcgcagctgtataaagaagagcacctgaggaatcggc

SEQ ID NO: 68585 - DNA, 100 bp, Homo sapiens
ggtgacctccctcctccgagggaggggggttgtgaccccagtctcagcttttagcaagaagccacggtcagtggaagtggccgcaggcagccctgccgtg

SEQ ID NO: 68586 - DNA, 82 bp, Homo sapiens
aagtatatgcaggaaattttgtggaagtcagaatggcggcagtggagcatcgtcattcttcaggattgccctactggcccta

SEQ ID NO: 68587 - DNA, 100 bp, Homo sapiens
agatcagccacgcagagtcctgccttcctttggtgccggtggtggtgtgcacattgagccccggtatagacagttcccccagctgaccagatcccaggtg

SEQ ID NO: 68588 - DNA, 88 bp, Homo sapiens
caccaccacaccagaaactagcaccagccccaaatttcatctctggcccaacccactgggtgccctggatctcccccgagaccaccgc

SEQ ID NO: 68589 - DNA, 100 bp, Homo sapiens
accccgtacctgctggggccggacaagaacctgaccgagagggaggaaatggagttgttttttccttcaagtggaggttgtgggccggcaaacactgcta

SEQ ID NO: 68590 - DNA, 100 bp, Homo sapiens
gtggaaactctggataagtgtttcgaaaatgtgtgtgaattggatttgatcttccatatggataagacatttgaagacagtgatttgttccatttgattg

SEQ ID NO: 68591 - DNA, 100 bp, Homo sapiens
gaactacagcagcctggtctcactgggtttttcttcccccagtccctcagctgctgctgctgctcaggaggtcagatctgccactgatggtaataccagc

SEQ ID NO: 68592 - DNA, 82 bp, Homo sapiens
cctctgaggaaaccatttctacagttcaagctggaccagctattccttctgttgtggcgtatccgaaaaggagtcagaccag

SEQ ID NO: 68593 - DNA, 75 bp, Homo sapiens
gaccgggaggctcccgggcttgcgtggagacaagaggagcagcagcggcaccgcccctcaccctggagggtcctg

SEQ ID NO: 68594 - DNA, 101 bp, Homo sapiens
gaggctgccggctccagagtgaggagggtccagaccatgcagacaatatgccctttttctccaaacaccatttcaagtgttatgtgccaagaaccttgcaa

SEQ ID NO: 68595 - DNA, 98 bp, Homo sapiens
cccaccatcaacatggagaacaagaccacgtggatcactaaggaggaagagcgagagaagaagttttctagaaggctaaatcacagtcctccccagtc

SEQ ID NO: 68596 - DNA, 100 bp, Homo sapiens
atggctttggtcacggtccagcggtcacctacccccagcaccacctccagcccctgcgcctcgagagaaaaggaacagttccgtaagctctttattggtg

SEQ ID NO: 68597 - DNA, 88 bp, Homo sapiens
ccgacaccatgcgatccaaggcgagggcgaggaagctagccaaaagagttgcagtgttcgcttggaagggcgagtcagaagatgactt

SEQ ID NO: 68598 - DNA, 75 bp, Homo sapiens
ggaagcggccaccgactactgtcagcagctgtgccaggctaatttgcgccagaaagttactcactcagtacaaac

SEQ ID NO: 68599 - DNA, 100 bp, Homo sapiens
ccgacctcatctccaggacagtgggaagagtggctggaggaattcagtttcttgggggcatggattccgtgaaggaacaacacctaaacccaagagggca

SEQ ID NO: 68600 - DNA, 98 bp, Homo sapiens
atgtattccctggggatggcgcatcacacaccaaagggtttggtgacgttcgccgacgtagccatagacttttctcaggaggagtgggcctgtctgaa

SEQ ID NO: 68601 - DNA, 103 bp, Homo sapiens
gaatcacagatctagtgctaaaagactgtccaaagatgatgttcatccatggtgacctggtactgcttgatgtatgtccccttacacttggtattgaaactgt

SEQ ID NO: 68602 - DNA, 74 bp, Homo sapiens
ccacttttgtaagactgaattccagtgatccaagtctcataggccaccgcacaaatggaagagcgactagcaga

SEQ ID NO: 68603 - DNA, 100 bp, Homo sapiens
cagacgccgctgtgtcaggacccgaaatccttcctgtacctcttgagccaggccgaccccgacccggactcggacaaggacaaattgatggccaggagat

SEQ ID NO: 68604 - DNA, 51 bp, Homo sapiens
gaatatttatggaagacactgcgtgaaaatcagaaagtgcagttgacagaa

SEQ ID NO: 68605 - DNA, 100 bp, Homo sapiens
gttgagaaattggatcttacacttgaaatacagactgttggggaacaagaggtgctgaggagaaaatacttggagaatttagagatacttacaatccagc

SEQ ID NO: 68606 - DNA, 98 bp, Homo sapiens
aatctgggcttatgggatacagctggacaagaagattatgacagattacgccccctatcctatccgcaaacaacattccactgcccttctcccaaaaa

SEQ ID NO: 68607 - DNA, 83 bp, Homo sapiens
gcccgccttccgccgtctcttcgagttcttcgtgctgctcaagttacagaatgtctgaaggggacagtgtgggagaatccgtc

SEQ ID NO: 68608 - DNA, 109 bp, Homo sapiens
cttccgcgtcggcaagaagatcggctgcggcaacttcggggagctccgcctagtgtactaatggtcacttgatgtgcgctggctgttttatccacctactagcagatgc

SEQ ID NO: 68609 - DNA, 83 bp, Homo sapiens
ctactacgtggtgcttggaaaggtctgatacgtggcgcctggtgaacccaccagcacggccccaccttgaaaattctctcaga

SEQ ID NO: 68610 - DNA, 75 bp, Homo sapiens
cggcgagcagaactacggcgagcgggctcagatgaaggattaccaacgtgaattagaagaagctcgtgcatccag

SEQ ID NO: 68611 - DNA, 90 bp, Homo sapiens
gtttattctcccatagcatgtgcaacaaaggagagagcgggaagctagaaggcagcaggaacgtgaacagcgaaggagagaacaagaaga

SEQ ID NO: 68612 - DNA, 51 bp, Homo sapiens
gctgcacttccatcccacggtcaggctaaatttggccgaagatggaccaaa

SEQ ID NO: 68613 - DNA, 100 bp, Homo sapiens
cctccatcgccgccatattgtctgtgtgagcagaggggagagcggccgccgccgctgccgcttccaccacaggaatttagataatgggctgtgtgcaatg

SEQ ID NO: 68614 - DNA, 108 bp, Homo sapiens
ggcaatcattccttctcacttggcctatggaaaacggggatttccaccatctgtcccaggagcacgtgaattgcctctgcttacgttcaggccctgtcctaaacccag

SEQ ID NO: 68615 - DNA, 49 bp, Homo sapiens
gtgcccttctgggcccacgcggggagagggctccccgaggactttctga

SEQ ID NO: 68616 - DNA, 90 bp, Homo sapiens
gcacgtgggcacggaccaattcgggaacaaatactactacatcccgcagtacaagaactggagagaggttgacggatatattcagacgtt

SEQ ID NO: 68617 - DNA, 75 bp, Homo sapiens
cagctgcctgcccccggaggtgcccacgcagctgcctggacaatgtgccacatttatgttcacgatctcatttaa

SEQ ID NO: 68618 - DNA, 101 bp, Homo sapiens
aaattgttggcgggtttcatgggcgtcatgaataacatgcggaaacagaagtccaaggcttgcgagaaggtcatttccgtgggtcaaacggtcatcacgaa

SEQ ID NO: 68619 - DNA, 100 bp, Homo sapiens
actgaggccacccggatcctcttcttcaacacacccaaaaagatgacagactacgccaagaaggcctgtagtggtggagacacgcccagtggatgatcct

SEQ ID NO: 68620 - DNA, 74 bp, Homo sapiens
agctgaggaaccggaccccggcagctagtgaagatagtccaagtcctaagagacagcgcctctctcattcagtc

SEQ ID NO: 68621 - DNA, 80 bp, Homo sapiens
agctggcagaccaggtgttgactctgaagactcaggctttagaaaagaactcaggaatttggaagcaggctataaatctc

SEQ ID NO: 68622 - DNA, 75 bp, Homo sapiens
atcagtgtgggaagccaagcagatacaagtttgttggcatccaaagctgttggggttgatggtgctgaaaaaaag

SEQ ID NO: 68623 - DNA, 74 bp, Homo sapiens
ccggtgtaccgcggcgagaagccccagctgcactacgcgctctactgagatgaagaaagaaaaagaatacctgc

SEQ ID NO: 68624 - DNA, 100 bp, Homo sapiens
gtcattgtctggtttggtgcagttaccatcaccctcaactcaaaacttcttggagggaacatagtatttggagctggttatccaagtctgccaactatga

SEQ ID NO: 68625 - DNA, 83 bp, Homo sapiens
tggaaaacagctttttgatcaggaaccctaaggactctgcaatatgaataattccctagagaacaccatctcctttgaagagt

SEQ ID NO: 68626 - DNA, 101 bp, Homo sapiens
tctacattgaacgggtgcagcgggaaaaggctaatggcacaactgtccacgtaggcattcaccccagcaaggactgcaggatcctcctgtctgtcgagccc

SEQ ID NO: 68627 - DNA, 100 bp, Homo sapiens
tgagttgttgctcccgcctgagcccagcccccagaaaggattgtgacatatcgttggacccagaattgagggccatgaagcccccaggaggagaatcgag

SEQ ID NO: 68628 - DNA, 100 bp, Homo sapiens
tgattaagagaatggactctgaagccggatttcatcagtttggattttggcttttcctctttctagcagtttggtttgaagagaaatttataggatctgc

SEQ ID NO: 68629 - DNA, 83 bp, Homo sapiens
cttgacaaccaagggcctccgtctggatttccaaggaagaatttcctctgaagcaccggaggccactgtctgcagctcccgtg

SEQ ID NO: 68630 - DNA, 100 bp, Homo sapiens
cctggagtaaccctcactggagaatccagaggtcagtttaggggctggtgcaaaggatgagttgcacattgttgaagcagaggcaatgaattacgaaggc

SEQ ID NO: 68631 - DNA, 100 bp, Homo sapiens
ccgaagccctggggcgccccagccgaggaagagccgggaaagggcgtcgccgctcatgtagtgtgcaacttgctttggtgtttgctgttttattgccaca

SEQ ID NO: 68632 - DNA, 73 bp, Homo sapiens
ctggtgtcgccatgggccgccgccccgcccgttgacgaagggaacgtcatcgtttggaaagcgtcgcaataag

SEQ ID NO: 68633 - DNA, 90 bp, Homo sapiens
gtattatcaaaaaacagaagtaaatttattcaagatccagattgagaggatccagaatccagatctctggaatagctaccaggcaaagaa

SEQ ID NO: 68634 - DNA, 76 bp, Homo sapiens
catcaaatccgtgtcggagtccttacaggctgttcacggaagaccaggatgtagatgagggacttgtctatgacac

SEQ ID NO: 68635 - DNA, 82 bp, Homo sapiens
cagccgatccagcctgcggagcctgtggggcaggctgaaggtgatgtggccgccctcaaccgacgcatccagctcgttgagg

SEQ ID NO: 68636 - DNA, 75 bp, Homo sapiens
ttgacggcatcccaccgccctacgacaaggaggaggagacggaggctgccattggagcccctcctactgccactg

SEQ ID NO: 68637 - DNA, 75 bp, Homo sapiens
aaaaatgcaaagatgtagatgagagaaatgaggaaatgttggcagtagatgctccaaggagacataaggtatccg

SEQ ID NO: 68638 - DNA, 98 bp, Homo sapiens
agagagacggcgggggaaagggagacggcgagacgcgcagcgccggcgcccgggagacccaggaggagcccgcaggctcttgtcaggatggtgaagct

SEQ ID NO: 68639 - DNA, 97 bp, Homo sapiens
tgattcatctggggccttatttccactttgtaattccagcgagtcgacttcccatcctgagttggccatttcataattctgaatcatgtctgataac

SEQ ID NO: 68640 - DNA, 49 bp, Homo sapiens
gcacattcagaagaatcccgtgctgccttcagtttggaaacctgcagaa

SEQ ID NO: 68641 - DNA, 98 bp, Homo sapiens
ttggcagcgaggtcgcggcaggttcgaggttcgagaacttgtcttggacaattgcaaatcaaatgatggaaaaattgagggcttaacagctgaatttg

SEQ ID NO: 68642 - DNA, 75 bp, Homo sapiens
ggcaagatcatcgtgggcgacgccacagagaaagagttttcggtttggtgtggaaatagcttatgtgggagctac

SEQ ID NO: 68643 - DNA, 100 bp, Homo sapiens
gcccggccccggggaactagggagcgtctccggctgcacagcgctcagatatcagacaccccgaagaactttctctcttaaagaaacccagagatccaac

SEQ ID NO: 68644 - DNA, 50 bp, Homo sapiens
tagtccattgactatgcagcctaatgaatgtactcaagactgatcttcta

SEQ ID NO: 68645 - DNA, 75 bp, Homo sapiens
cgctcattgggaatttagttaagacctttccaaagtgaaactgatgagatttgatgatccactgttggggcctcg

SEQ ID NO: 68646 - DNA, 82 bp, Homo sapiens
ggggctgactgtcgctctgcctttgacaggagaggctgcttcttgtagaggtcaccgacgatgagggcgcacctgctgtcct

SEQ ID NO: 68647 - DNA, 75 bp, Homo sapiens
cgcagaaggattccgggagcacagttccgccgagatagcaaaacctgatctcataaaacctaggtcacaaaggac

SEQ ID NO: 68648 - DNA, 100 bp, Homo sapiens
gacagaccgacttaagttcggattcggcttccaccgcttcttagtggaactctattttaagaacctctcaaaacgaaacaagcaaatcatggagaagaat

SEQ ID NO: 68649 - DNA, 89 bp, Homo sapiens
cacgaatacaaagagccatacgaccttcggcacggatgataccatcggggaccttaagaagctgattgcagcccaaactggtacccgtt

SEQ ID NO: 68650 - DNA, 100 bp, Homo sapiens
cggcccgtcgctgcccagggatgaagggcccccgaccccaagctctgccacgaaggtgccaccgggatgcgctggatgccctgggcctgaagcgctactg

SEQ ID NO: 68651 - DNA, 98 bp, Homo sapiens
ggttgttcaccttgctgctcagacgctccgagaagcttcaggcagcataacacttacagcattcctctgaatattgatttgctgaatagcccagactt

SEQ ID NO: 68652 - DNA, 83 bp, Homo sapiens
cctggcctccctcaccttggacacctcgcttggactggtcgaattgacaaatcttaccctacagtatgtggccacacaggacc

SEQ ID NO: 68653 - DNA, 100 bp, Homo sapiens
ctacctgcccccgctgtgcgaccccaaggacgggcacctactcatggatggcggctacatcaacaatctgccagggcacttcaggcaaccggggcctcca

SEQ ID NO: 68654 - DNA, 100 bp, Homo sapiens
attacctgcacgacacatggaaattggactaaattaccagaatgcaggggtgaaggcatcattttattacagcctggaaaacatgaatttccatttcgct

SEQ ID NO: 68655 - DNA, 97 bp, Homo sapiens
gagaacgtgcgggaagagaagatcatcgagcatttcaaacgatcatggaagggaagtggttgctgtgtatgttactggtgcttggaactgctattgt

SEQ ID NO: 68656 - DNA, 100 bp, Homo sapiens
cgagatcatcaagttgtatagctgtatcattggcaacatgatttcgagtggaaggccgtctctgagactactttcagagaagatccttgggctccaggtc

SEQ ID NO: 68657 - DNA, 96 bp, Homo sapiens
tggagattttgatgtggatgatgccaaagttttattagggtcgaatgtcatcaggaatgagcagctgcccctgcagtacttggccgatgtggacac

SEQ ID NO: 68658 - DNA, 74 bp, Homo sapiens
gggagatggaaccaaggagaaaccatttaaaacaggtctaaaggaccacatggtgacaatgcatgatgtgcttg

SEQ ID NO: 68659 - DNA, 100 bp, Homo sapiens
aagctaaggccgcgttggggtgagaccctcacttcatccggtatacctggcagcaggcactgtgtatggactggagacccagctgactgagctagaagat

SEQ ID NO: 68660 - DNA, 78 bp, Homo sapiens
aggacctcctggtgcgcatcctgctgctggctgcccttgtctcctttgtctgattgatgactacaaaaccctccacgg

SEQ ID NO: 68661 - DNA, 79 bp, Homo sapiens
agcaggctctgcgggaggtggagcacctgaagagatgccagcagccctgagtattccctctttgtgggggacctgaccc

SEQ ID NO: 68662 - DNA, 83 bp, Homo sapiens
agcagcgcggcagagtcatgggggttctccagagagcgggcatccagagaggagtcctgggagagcgggcggagcgagcgagg

SEQ ID NO: 68663 - DNA, 82 bp, Homo sapiens
cctcaacaaacaccagcgctttggacttcccaagtaagaagcggaagaggagccgctggaaccaagacacaatggaacagaa

SEQ ID NO: 68664 - DNA, 74 bp, Homo sapiens
cgcgagtcggcgcgcgggacgaagggaatttgaagtactgccttgtaattcttaatcagcctttggacaactat

SEQ ID NO: 68665 - DNA, 100 bp, Homo sapiens
gcccgcagtgcgctcgggtctcaacgccaccttcatgcctagaatatattgatctgatggaaacaacccagtacatgaatgagggagaactccgtgtcct

SEQ ID NO: 68666 - DNA, 98 bp, Homo sapiens
acatttttgttccagaggatgatgatgatgatgactaacagggaaagatcgaactggaagaaacaattaaagtatggaagcagcggacacatgttatg

SEQ ID NO: 68667 - DNA, 51 bp, Homo sapiens
atcagttgttgcacttccaccatttatctcccaatgataatgaaaacgata

SEQ ID NO: 68668 - DNA, 74 bp, Homo sapiens
ctggcagacaagctgtacaatctgagggacctgaatcgctgcaccccagaggctggcgctgatacaatacaatg

SEQ ID NO: 68669 - DNA, 100 bp, Homo sapiens
aaccgcctcaccgttctgcccccagaactaggttaaatggaagctgatcggcgttcacatggaatcctcctcacgtagctcagatggatggccacaggga

SEQ ID NO: 68670 - DNA, 82 bp, Homo sapiens
caacttacccgagaacgtgcgggaagagaagatcatcgagcatttcaaacggccaccagcttgggctccccacggagggcag

SEQ ID NO: 68671 - DNA, 74 bp, Homo sapiens
gaaaattccttgtctggaagctgccaatccttggacaggtcagcagacagaagcctggaatggtcccccctccg

SEQ ID NO: 68672 - DNA, 100 bp, Homo sapiens
gcttggataaaatgttggtggatgatattggtgtcatttcatgggcaacaacacagtgctggatgttttgcggcgtgaaggctatgaggtagaacacgcc

SEQ ID NO: 68673 - DNA, 82 bp, Homo sapiens
tgaagatgtccttaccagctttgacaatacaggaaatgtttcacggaaaagaggcgcagggagcaagaaaataaatatttag

SEQ ID NO: 68674 - DNA, 75 bp, Homo sapiens
cggaatcagatttgaaaatgaaagtgtttctgatcagaaacccttggggagctggtcagtgaaacaaggtcaaat

SEQ ID NO: 68675 - DNA, 89 bp, Homo sapiens
agactcagaatcgaatctcttctccctccccttcttgcctcttagcaatgcataccacgagttagcacaagtgtattcaaccaacaacc

SEQ ID NO: 68676 - DNA, 83 bp, Homo sapiens
cagatatgctcctcattgctggggttgacttaaacctgagagataagcatctccctggaatcattccatccttgccctggcag

SEQ ID NO: 68677 - DNA, 75 bp, Homo sapiens
gaccgcttctacctggtgtttgagaagatgcggggaggcttccgaggaggcagaggaggaggaggtgaccacaag

SEQ ID NO: 68678 - DNA, 88 bp, Homo sapiens
aggactctttgtttattgctgtgatttttcttccacagctatagaactggtccaggtcattcaagacacagatatgcacttataccca

SEQ ID NO: 68679 - DNA, 100 bp, Homo sapiens
ttctttatgatccccacctgggttctggtggacctctcggctttcctggtcagcagcgacttggacttggatgttgtgggtgatggtatgcagtgtcctc

SEQ ID NO: 68680 - DNA, 51 bp, Homo sapiens
catgcctcacccgaggatattaaaaaggccctgaagcaggacattctaaat

SEQ ID NO: 68681 - DNA, 106 bp, Homo sapiens
ttggagccatcctctacaggacccgctttctaccattaaggaggaggacttcatccaacccagcagccgagaagaggcccagcagctgtgggaggctgaaaaggtc

SEQ ID NO: 68682 - DNA, 90 bp, Homo sapiens
cgcgggacaagtcgccggcggcgcccgacggagcaggtatacataatcaatgtgacctggtctgactccacctcccagactatctaccgg

SEQ ID NO: 68683 - DNA, 83 bp, Homo sapiens
tggtttgtgtatgacgccgagggacctcacatcaacttctaccagctgagcccacaggcggttttgtgagctgcttccccagg

SEQ ID NO: 68684 - DNA, 75 bp, Homo sapiens
atgctgagagaacagtttgaagcaaatgggtatttctttaaaagtcgtgatgagaggagatggattgaaaagcag

SEQ ID NO: 68685 - DNA, 100 bp, Homo sapiens
attggttcagcatcaggagtgggatgggaaggaaagcacaataacaagaaaattgaaagatgggaaattagtggtgattactgatctctcattacccaac

SEQ ID NO: 68686 - DNA, 96 bp, Homo sapiens
gcaatatgatgaggatgatgatgaaatcaccccggatttgtggcaagaagcatgctggattgtaatcagtgtttacgaaaatggggttacagaaga

SEQ ID NO: 68687 - DNA, 100 bp, Homo sapiens
gcctacgtgggcttcaccatggacaagctggtgcagaacattgcgcggcagggtacctgctcttccgagacttctgcctgaaccacctggaggaggccag

SEQ ID NO: 68688 - DNA, 100 bp, Homo sapiens
cacccactgtggtctgttgtaccccactgctggggtggtggttccaatgagacagggcacaccaaactccatctggtccgcgggagagctgtggggcttg

SEQ ID NO: 68689 - DNA, 90 bp, Homo sapiens
gaacaaactcgaagaacagctgtggaaagaagttgcaaaacactgggatgcttggatattaattcatctgtgaaaggggctcgttttgtc

SEQ ID NO: 68690 - DNA, 101 bp, Homo sapiens
gagtgatgtggaggaaaacaacttcgagggcagagagcaagtaatactgcagacacattgtttcaagaagtattaggtcggaaagacaaggcagattccac

SEQ ID NO: 68691 - DNA, 75 bp, Homo sapiens
gacgtgcggctggaccagccccaaaagaggagcctggctcccaccatgagtgctgagcttaacgtgcctatcgac

SEQ ID NO: 68692 - DNA, 89 bp, Homo sapiens
ttttgcccacgcttcgagacttagggagcaggcagagatcctacaagaatccaggatgatgatcccagattgccagcgcaggttggaag

SEQ ID NO: 68693 - DNA, 90 bp, Homo sapiens
gcggatcttgcaggagatcgagagcaccgacaccgcctgtgtggggcccaccctccgaaagtgaagtcactgcttttgctgtcttggatc

SEQ ID NO: 68694 - DNA, 100 bp, Homo sapiens
cctgctaaggccattggacacagaatccgagtggagcttggggagacagcccttcaccttgccgtccgaactgcagatcagacatctctccatttggttg

SEQ ID NO: 68695 - DNA, 98 bp, Homo sapiens
gtaggcgaaggtgaagatggctgcctctgcctttgctggtgcagtgagagcagcttcaggctaaagaattacctccaaagccattgtcaagaccacag

SEQ ID NO: 68696 - DNA, 51 bp, Homo sapiens
ggagctgtgcgagagcctcctcacttgggctggcgcccatgcggctctaca

SEQ ID NO: 68697 - DNA, 98 bp, Homo sapiens
gattcctactcttcactgggtttggctcaatggaggaattggtgctcctattgtacaggtggattctccacagttttcctcgtgcgtactcacggtgg

SEQ ID NO: 68698 - DNA, 83 bp, Homo sapiens
tcagacgccacgcaggctgccgtcacccttccgggtgacataccggccttgggggcgagctgaggatcagtgtcctgcctgcc

SEQ ID NO: 68699 - DNA, 90 bp, Homo sapiens
cccgacgcaaaccaaggatctggggatcttcgcactatcccaagacaatgattgaagctcacgttgatgtcaagactaccgatggttact

SEQ ID NO: 68700 - DNA, 125 bp, Homo sapiens
gttttcagcctcatccagcaggcggtgacccgctaccggaaggccatcgccaaggtgtaccttgaaagacttttaacatacgcagagatagatatctgtccggccaactggaagcggattgtttt

SEQ ID NO: 68701 - DNA, 101 bp, Homo sapiens
aggatattattctagtgctttcgcaagcctgcctagggtagttaaaagacgagtgaatgctctcaaaaacctgcaagttaaatgtgcacagatagaagcca

SEQ ID NO: 68702 - DNA, 137 bp, Homo sapiens
gagcagcgccagcggccgagcgggcggcttcctggcctgggcgctccggtggcggcggagacctgcctagagctggaacgttacctccagagcgagccctgctatgtttcagcctcagaaatcaaatttgacagcca

SEQ ID NO: 68703 - DNA, 75 bp, Homo sapiens
caggacttgagtaacagcaacatggtctggcaccttccacgctctgtagtttcatttcttcttcgtcgggggtct

SEQ ID NO: 68704 - DNA, 74 bp, Homo sapiens
gcatttctttttctggaatgtcattatcagacacaatgctttgccaattttagaagaacagattgctgctgaaa

SEQ ID NO: 68705 - DNA, 73 bp, Homo sapiens
tggcgggagcgcggttcggggccgcagagatcccgcccaatgacccccgcatcaagaaccaagccgactgcat

SEQ ID NO: 68706 - DNA, 88 bp, Homo sapiens
tatcatgagggaattccggtcagggtcaagtcgtgttctgatcactactgacttgttggaactaccaggttgtttttcaaagcagcgg

SEQ ID NO: 68707 - DNA, 90 bp, Homo sapiens
tgaaagaggatggcctggagaagatgtggacgagtgctcactagcagaaaaaacctgtgtgaggaaaaacgaaaactgctacaatactcc

SEQ ID NO: 68708 - DNA, 121 bp, Homo sapiens
gtgaagcagctgagtgatgggcagcccccaccacccgcccaggccagccccagcagcaacagcagcacaggttattttagtgtccgccaacaaattgactcgttatatagaaccatgccaa

SEQ ID NO: 68709 - DNA, 83 bp, Homo sapiens
agctgggcgcggattcgccgaggcaccgaggcactcagaggagatgaatgatttcggaatcaagaatatggaccaggtagccc

SEQ ID NO: 68710 - DNA, 118 bp, Homo sapiens
cctggcgtgcactccgcacctcggggacattattgcgcgtggaacggctgcttttggaaggattttttatcaagcagaaatgcatcgaacaacgagaatcaagatcactgagctaaat

SEQ ID NO: 68711 - DNA, 89 bp, Homo sapiens
tggaagacatttatgaaagcccaaatcacctgtacttggtcatgcagctgttctcaggaatcagatagctcgcagtcggccaagaagga

SEQ ID NO: 68712 - DNA, 82 bp, Homo sapiens
acggcttggacgaagatggggagaaggaagcgagactcatacgcaacctcaatgacctgcctgaccagtgcacgcccaaccc

SEQ ID NO: 68713 - DNA, 75 bp, Homo sapiens
gtcacccggcaactcagaaacatcaggtccaagggttcttttcctatgactccatcaattccagctaatcctccc

SEQ ID NO: 68714 - DNA, 82 bp, Homo sapiens
taccatggctgctgctcttcatcctcttctgcattgggatgaatcatttgctgtttcaaatagagaactgtgcgatgatgag

SEQ ID NO: 68715 - DNA, 96 bp, Homo sapiens
gcgtcatcgacagccccggcatcctttctggggagaagcagcgcatcagccgaggaggagtttggggccagcgcagccctgctgtccaccaaggaa

SEQ ID NO: 68716 - DNA, 75 bp, Homo sapiens
tgaatgtattcgggaggacaagggcttccagtttttttcagaacaggaactgtggctgcaccatctgtcttcatc

SEQ ID NO: 68717 - DNA, 80 bp, Homo sapiens
ctgatgcagcaggcatcatccgctatgcaattgggatattttcctcttctggaccctatctagaagaagtattccttaga

SEQ ID NO: 68718 - DNA, 132 bp, Homo sapiens
tctgcctggcttaaaagaagactcacagattttgaaaattagattactacctggtcgcaatgatgatgtcaaatgcttttgttgtgatggtggcttgaggtgttgggaatctggagatgatccatgggtaga

SEQ ID NO: 68719 - DNA, 75 bp, Homo sapiens
gatggtcaacagaaaagattttgctgtcaaagttgtgtcagtgaatacaaacagaattcaattcgtcataatctg

SEQ ID NO: 68720 - DNA, 90 bp, Homo sapiens
cgtgtgtggtgaggacggccagttcacctactgctggcacgatgacatcatgcaaggtggccgactatctgacctcacagttctatgccc

SEQ ID NO: 68721 - DNA, 50 bp, Homo sapiens
gcgacaagtcgcgtttggccccagaggaggccttggtgccctatagcaag

SEQ ID NO: 68722 - DNA, 100 bp, Homo sapiens
gccggaccgggccgggcgcccgcagattgacgagatgcctgaggctgccgtgaaatcaacagccaacaaataccaagtcttttttttcgggacccacgag

SEQ ID NO: 68723 - DNA, 105 bp, Homo sapiens
caggttcaccagctgctcgccgggagcggcggcgcccggacgccgaggggatatgagactttctactcggaatatcctgagtgttgcgtggatgtaaaacccatt

SEQ ID NO: 68724 - DNA, 105 bp, Homo sapiens
ggggaaacgtgtactgattgcagcccatggcaacagcctccggggcattgtcaagcatctggagggaaccatgcgaggccagcggagcctgctgctgggcccggc

SEQ ID NO: 68725 - DNA, 98 bp, Homo sapiens
tcgagcatgttcaccagggcccaggttgaaatcacaaagattagacacctttttagataggtgttcttcagcaccactgacaacacggttctgacagt

SEQ ID NO: 68726 - DNA, 96 bp, Homo sapiens
gccgcgacctccggatgacccgggcttcggcccccaccagagactcggttttgaaagagggaaggaagatatttctcaaaataaagatgaatcttc

SEQ ID NO: 68727 - DNA, 75 bp, Homo sapiens
tcctgcctcagcctcccaagtagctgggattgcaggtcccacaataggccgtctgcaagctgaggagcatggaga

SEQ ID NO: 68728 - DNA, 75 bp, Homo sapiens
tggctctcagtgcccacataaaaatactagattacagttgctcccaggatggtcgtgtgttcatttggacctgtg

SEQ ID NO: 68729 - DNA, 98 bp, Homo sapiens
agcggtctgacatcgcgacgctgctcaaaacctcgctccggaaaggggacacctgataacaacgaacttgatgcaagtgataggtttgccaaggtcag

SEQ ID NO: 68730 - DNA, 80 bp, Homo sapiens
cagccgcagtcgccactggctgcctgagggagtgcatccgccccaacccttttccccctcgtctcctgtgagaattcccc

SEQ ID NO: 68731 - DNA, 75 bp, Homo sapiens
taaaagagccctggaatgtgaagagacatgagacagtagtcaaatactcagtcaactgcttggaccagcatgttc

SEQ ID NO: 68732 - DNA, 118 bp, Homo sapiens
cggcgaccggggcctgggtccacgccgagggcaggacgaacttcaccagattctgcttctcagaagatgcactattatagatactctaacgccaaggtcagctgctggtacaagtacc

SEQ ID NO: 68733 - DNA, 83 bp, Homo sapiens
aagaagagcatgatcggcatgtccaccaaggcagcacaggaagtcctggagaacctgaaggaccgctggtaccaggcggacag

SEQ ID NO: 68734 - DNA, 83 bp, Homo sapiens
ggagggcgcgcggccgagcggaggcggagtcggcgccgagaacatgacacgggactcaatccgcgcctcggccgtcgggctcc

SEQ ID NO: 68735 - DNA, 95 bp, Homo sapiens
cttctgtggataagctggaacagatctatgaatgcagaaagatgaatgggagggctgattttcgagagccgaatgcagaggttccaagaccaatt

SEQ ID NO: 68736 - DNA, 83 bp, Homo sapiens
gaactaatgactgaaggtgaagaccagtttgatggttttcattcctccccagacttgatggaggcttggctgcccaccctgct

SEQ ID NO: 68737 - DNA, 111 bp, Homo sapiens
actcggcgctctggttttcggtgggtgtgccctgcacctgcctcttcccccattctcagttagagccacagctgaaacaactacaaacaaaatatgatgaacttaaagaga

SEQ ID NO: 68738 - DNA, 100 bp, Homo sapiens
cttcatcctcggcggcggtggccgctagctccaaggaaggtcccgcggcagtgctggtggccatggttcccgtagccagaaggagttgcccacagagccc

SEQ ID NO: 68739 - DNA, 78 bp, Homo sapiens
aggcctaagaattttggcattggagtctactcttcatcttgtgttgagacttcgtggtggtgctaagaaaaggaagaa

SEQ ID NO: 68740 - DNA, 101 bp, Homo sapiens
cgccgtcgccccgccgcgccgcgctccaaccgcctcctcctcctcagtaacgcggaattaccaccagccagccattttgaattcatcggctcttcggcaaa

SEQ ID NO: 68741 - DNA, 100 bp, Homo sapiens
aatgtaattcagttgatcattgatgcatacaatacttgggaagacccagggcacaatgataaacatactggctgttgtggtgacaatgacccaattgatg

SEQ ID NO: 68742 - DNA, 127 bp, Homo sapiens
taaaacatggtggattactatgaagttctaggcgtgcagagacatgcctcacccgaggatattaaaaaggcgccaactgtgatttgagacggcagattgatgaacagcaaaagatgctagagaaata

SEQ ID NO: 68743 - DNA, 100 bp, Homo sapiens
gtagttcctattgattcatcagattttgcattggatattcgcatgcctggggttacacctaaacaggttttggggaaggatcaccccgatgttgccaagc

SEQ ID NO: 68744 - DNA, 50 bp, Homo sapiens
ccggcgtcgagaatttcaactggttgatgctatgaaactgggagtaaagg

SEQ ID NO: 68745 - DNA, 74 bp, Homo sapiens
agtcctccagtgtttggatattcagtcaggtcaattcagtgaagatatgatacccacagtgggcttcaacatga

SEQ ID NO: 68746 - DNA, 74 bp, Homo sapiens
gaagcagctggcttcactgctcagtgttgaattcaactgaaggcgaggaatgttggtgatgaagctgagttcag

SEQ ID NO: 68747 - DNA, 90 bp, Homo sapiens
agatatctgcaatgatgtactgggtcgtctcctaccagatccggtatgaaggaaacgtgacagaggagaccagaatcaagttcatgacgg

SEQ ID NO: 68748 - DNA, 98 bp, Homo sapiens
ccagatattgtggctgaacaaaagaagctggaagccgcagaccttgtgatattccagattccaaatcctttatttgatctggctggaataacgtgtgg

SEQ ID NO: 68749 - DNA, 83 bp, Homo sapiens
gagagtttacagattctgaaattatggtgatgctgggggaaaatggattttgtgaaaatggaaaattatgaggcattggtagg

SEQ ID NO: 68750 - DNA, 101 bp, Homo sapiens
atttgcacccagtcctgcagcgccagcagctggactatggcatctatgttatcaaccagaggtcctatacgttgcttgtggaggcgtgggattccagtaat

SEQ ID NO: 68751 - DNA, 98 bp, Homo sapiens
ctgcctcagcctcccgagaagctgggattacagggcttgaagttcaaagatgtggtcatttacttctctcaaaaggagtgggaatgcttgcactctgc

SEQ ID NO: 68752 - DNA, 98 bp, Homo sapiens
cgggcccgggggtggtgacagcaggtctgagattggtttatcttggaagctaaagggcattgctcatcctgaagatcagctgaccattgacaatcagc

SEQ ID NO: 68753 - DNA, 97 bp, Homo sapiens
atgctagctgcgtggtgaccttcaaaggtcacaaaggagggggacttgatctcatcttcatgccaggccttgggtttgacaaacatggcaaccgact

SEQ ID NO: 68754 - DNA, 75 bp, Homo sapiens
ggcccacagtgggggtgtgcaaacccgagagaactggactagacgcttgaagcaaagctgccatcccagaagacg

SEQ ID NO: 68755 - DNA, 83 bp, Homo sapiens
ctggaagccttgtcactggaggcgagtcagatagcctgggctggaagctcttctacgtcacaggctgcctgtttgtggctgtg

SEQ ID NO: 68756 - DNA, 100 bp, Homo sapiens
aagacgttctgtatttcagcttcctgctatgtgccctctttgttcctaaaggtgtttttccaggtctgaccacctggccctgcacatgaagaggcacctc

SEQ ID NO: 68757 - DNA, 100 bp, Homo sapiens
tgcacgtggatcctgagaacttcaggctcctgcccctcctaaagctgaagccaaagcgaaggctttaaaggccaagaaggcagtgttgaaaggtgtccac

SEQ ID NO: 68758 - DNA, 97 bp, Homo sapiens
gcccggtttccctcggcgtgctactgtgcgctcgatccagcaccatggggaagcgggacaatcgggtgccccatctgctttgatatgattgaagaag

SEQ ID NO: 68759 - DNA, 82 bp, Homo sapiens
cagtatattggggaactgaaagatcagatagcagagctgaatcatgaggagtccaaaactacttacctggaagaccttccac

SEQ ID NO: 68760 - DNA, 83 bp, Homo sapiens
tcgagggaaattgcatcaagaaagtgctcccaaatgtgtcagaagaaacagtgtctcccaccagagcacggaacatgaaggac

SEQ ID NO: 68761 - DNA, 100 bp, Homo sapiens
gtccgcccactccgcggcgttcggggaaatggctgcgagaccctagaggcctgcggcctgcggaggaagctggcccagttgcaggtggcctatcaccagc

SEQ ID NO: 68762 - DNA, 100 bp, Homo sapiens
ctagaagcattgctagaagcagcagctcgatgcattctatttctcatcatttggctcataactggaggaaggcaccacttttggttcttgccaaatctga

SEQ ID NO: 68763 - DNA, 100 bp, Homo sapiens
gccaaagagcaactaactgatgctgacaccaaaggaaatgggtcctgatgaatatgaagagatggaagaagaggaggaggaggaagaggaggaagacgag

SEQ ID NO: 68764 - DNA, 75 bp, Homo sapiens
aagacaacaccctgatctggcatggacatgtctcagcggcggtggcagccgaggtgcaggatgcaagaaggcgcc

SEQ ID NO: 68765 - DNA, 72 bp, Homo sapiens
ccaatcagcatgctgtgtctagctcaagaaatggtggagtcaatgaagaaagtagcagggatggatgtggag

SEQ ID NO: 68766 - DNA, 100 bp, Homo sapiens
ggaaaatgtgatgcatgtctcagtgagacgagttgtactgctgtcacaggaaatggacgctggattacaagcatggcagctcaggcagcagaagttgcag

SEQ ID NO: 68767 - DNA, 80 bp, Homo sapiens
gtgctgtggtgcagagctagttcctctccagctcagccgcgtaggattttttatcaagcagaaatgcatcgaacaacgag

SEQ ID NO: 68768 - DNA, 100 bp, Homo sapiens
agcatctgcgatgtgaggaaaggcacctccaccaggtcaaaatgcagatcttcgtgaaaacccttaccggcaagaccatcacccttgaggtggagcccag

SEQ ID NO: 68769 - DNA, 88 bp, Homo sapiens
acgctgagccaccttgggaacctagctgatgataggggggttccatctcccaacttgtccatgctaaaagagatgctaagagaatgcc

SEQ ID NO: 68770 - DNA, 75 bp, Homo sapiens
taatcctcaatttaagcctgatctaacccctagaaacagaatttgaaagacatattggctgacctgatacctaag

SEQ ID NO: 68771 - DNA, 101 bp, Homo sapiens
ggaatatgaggggtcagaggacaccagaaaaaccatctcgcagctctttgcaaaaagtgaggctgctgtcagaaaggaacttttacacagtttgccttcag

SEQ ID NO: 68772 - DNA, 153 bp, Homo sapiens
ggcgctgaaggtagcgaccgtcgccggcagcgccgcgaaggcggtgctcgggccagcccttctctgccgtccctgggagagctcaggccccggggcctccagcggcaccagcggagaccacggtgagctcgtcgtccggattgccagtctgga

SEQ ID NO: 68773 - DNA, 83 bp, Homo sapiens
tgtgcagccgcgaggaggcgcgggaggtgttcgagaacgaccccgagacgggctgggttacgacccctacaaccctgagctgc

SEQ ID NO: 68774 - DNA, 102 bp, Homo sapiens
atggagccccagctgaaggaaagcggaatcgatctgacaccgagcaggtctctgttctaggatgtcccgacccagtggtgcatgagatcgcctatcagtacg

SEQ ID NO: 68775 - DNA, 83 bp, Homo sapiens
cgccagtacctgcgtatccgcactgtccagcccaagcctgactatggacagaatgctttgacctccaagctgttttaaatcta

SEQ ID NO: 68776 - DNA, 76 bp, Homo sapiens
cacatgaaactcaaggtccagggagtggagggtgaatctgtaaaatatttcctggataacttggataaacttggag

SEQ ID NO: 68777 - DNA, 100 bp, Homo sapiens
agaggcggggatggcgtcccccgggggcccgtactgcacatcgtggtggtcggatttcaccacaagaagggctgccagtggcagccgattaggaggcctg

SEQ ID NO: 68778 - DNA, 80 bp, Homo sapiens
acgagtttgaagagttccctgccgaaggagacatatactgcctggactgcctggctgatgtgagctagtttgtctggttg

SEQ ID NO: 68779 - DNA, 82 bp, Homo sapiens
gtggataataaaggatttcctacctggctgaagctggataagaaggacaaattgatggccaggagatcactgccaccgccgt

SEQ ID NO: 68780 - DNA, 90 bp, Homo sapiens
gagctgctattgaacacggcagattctcttcctggacattctgttgccctctgtttagctgttgcctttaaaagtaaggcaaccaatgat

SEQ ID NO: 68781 - DNA, 82 bp, Homo sapiens
aatacgaaggtttctggctgggtactctttcatctactggacagagttcgagagtcctctaccactgcagacaaagaaaaga

SEQ ID NO: 68782 - DNA, 75 bp, Homo sapiens
gctttgcatcggaaatcagctctacagttcagcatgtaccttccacattgagtattcagaaagaagtgatctgaa

SEQ ID NO: 68783 - DNA, 75 bp, Homo sapiens
tatggtgaactcattgtcttaggattcaaccctatgaaaagataaaggccaggggcttgcctgataatatatctt

SEQ ID NO: 68784 - DNA, 75 bp, Homo sapiens
ataatggcagcacagagctacattcgagtgccggtggtggtgtgcacattgagccccggtatagacagttccccc

SEQ ID NO: 68785 - DNA, 82 bp, Homo sapiens
aagggcggcggggagcacacggagcactgcaggcgccggacttcccaagtaagaagcggaagaggagccgctggaaccaaga

SEQ ID NO: 68786 - DNA, 120 bp, Homo sapiens
cttatatactgcttacaagcataatactcaccctactattgaggtcgctgaaaattttgttccccctctgttggatgcagttctcattgattatcagagaaatgtcccagctgctagaga

SEQ ID NO: 68787 - DNA, 100 bp, Homo sapiens
cgaggaacgagagcgcgaagctaagaggaagctcaccagtgtgggaaggggcttctcatccactgccaggctggggtgtcccgctccgccaccatcgtca

SEQ ID NO: 68788 - DNA, 82 bp, Homo sapiens
gattatgaagtttttcgatgcgaaggtttcctcatgaggacaaatacctgattttgaataaagcagcattcagttgaaataa

SEQ ID NO: 68789 - DNA, 100 bp, Homo sapiens
tgccgctgccgctgccgcacctccgtagctgactcgggcgccctgcgtccggcagaggaggcgagcatcccgctcaggtgatgaggaacccctcgcgcac

SEQ ID NO: 68790 - DNA, 75 bp, Homo sapiens
aggaagaacatgcatatttgggtccaactgtgaagccagatgataagtaagcactatcctttgtactccctcaac

SEQ ID NO: 68791 - DNA, 75 bp, Homo sapiens
tctctgatcgaaggggagtttccacagtgattgatgctgcctcaggctttcatgagaaggacaagaagccatatt

SEQ ID NO: 68792 - DNA, 100 bp, Homo sapiens
gattgcaaggtggcaaggagcagaagcagcccttacaagttgcaaagcaatgtctcaggctgtgcagacaaacggaactcaaccattaagcaaaacatgg

SEQ ID NO: 68793 - DNA, 100 bp, Homo sapiens
gatctgggtatcaaatatgacccaagcattggtatctacggcctggacttctatgtgggtatttgaagtataccatacaactgttttgaaaatccagcgt

SEQ ID NO: 68794 - DNA, 51 bp, Homo sapiens
attttgcatctagaggaattgaaagtgccttggatagcattaccaagtatt

SEQ ID NO: 68795 - DNA, 100 bp, Homo sapiens
gcgaaacccatctgatcgacatgttattgcactgggggccacagtgctgatctcagcagctccattttttgtcctcttccttatccccgtggagtcgaac

SEQ ID NO: 68796 - DNA, 100 bp, Homo sapiens
ccgtgatcctgtggtttcagctggcgctgtgcttcggccctgcacagctcacgggcgttaagtgggcagaccaacatccacctcagcaaaaacttcttcc

SEQ ID NO: 68797 - DNA, 89 bp, Homo sapiens
gcacagagcctcgcctttgccgatccgccgcccgtccacacccgccgccagatcatgcaacagatgagtgaccaccgctacgacaaact

SEQ ID NO: 68798 - DNA, 75 bp, Homo sapiens
cacggtctgggccgccgaatctccggccgaagagcggcggcggcagcggcgacctgcctagagctggaacgttac

SEQ ID NO: 68799 - DNA, 96 bp, Homo sapiens
ccacccgcccaggccagccccagcagcaacagcagcacaggtgttgacttcaaaatcaaaactgtagagctaagaggaaagaaaattagattacag

SEQ ID NO: 68800 - DNA, 83 bp, Homo sapiens
cgcccccagcagtcctgctcctcgccgtaccaaacagaacccagcttagactagaaagtctagaagacacacacataatgaag

SEQ ID NO: 68801 - DNA, 90 bp, Homo sapiens
tgaagcactacaaacaagcagctgagctcacgaggcccagggaatcctctggaccatcagattaccaatgaaagaggagaatcaagctgt

SEQ ID NO: 68802 - DNA, 75 bp, Homo sapiens
aacgaacatcttctggacctttgtccagccattttgcagactctgatcacagtgaaacgttccatgggaacttgg

SEQ ID NO: 68803 - DNA, 74 bp, Homo sapiens
ctttataccaaccgggcagcagcacagtactatctggactgtacaatttgttcaaggaatttttgtagaaaaat

SEQ ID NO: 68804 - DNA, 100 bp, Homo sapiens
tgcccaccaggaccgccatggggacacggcactgcatgctgctgcccgccagggcccagatggttcagccaatactatcttctgttccaacaacggaagt

SEQ ID NO: 68805 - DNA, 51 bp, Homo sapiens
ctgcagctgaagccgctgcccctgctacagcttgtagaaacttcattaaaa

SEQ ID NO: 68806 - DNA, 96 bp, Homo sapiens
ccggagcccagatgagctgccctcggcgggcggcgacggcggcaaatctaagaaatttagttgtctgctggttctcagcttgaagaagattctgca

SEQ ID NO: 68807 - DNA, 98 bp, Homo sapiens
agaaatttcacagtacatcatccaaaagaggagtccatgatggaggcagaggtaaacttggagaggattatatgcgtcaggcaggagaagtgacttat

SEQ ID NO: 68808 - DNA, 75 bp, Homo sapiens
tgtggcttcagtctctgtccagcataccctttttggagacaaattatgcacagttgcaactcttcgtgaaaccta

SEQ ID NO: 68809 - DNA, 100 bp, Homo sapiens
caaggtcacacaatgtcggggatggacctccagatttccttactgggtaagaaggtggatggctctgtaaatgcctatgccataaatgtctctcagaaga

SEQ ID NO: 68810 - DNA, 100 bp, Homo sapiens
ttactaccaagccctgtcagtagctcctcagattgtccccagtcctgacttcagttttcatgctgatgagtacctagaagtctacgtttctgcttctgag

SEQ ID NO: 68811 - DNA, 98 bp, Homo sapiens
ttctgctacatcatcccctccaacctccaggccaaaggcaggacgctgatcccttgctatgaagcttctcacctggggcgggtgggttctgcaccacc

SEQ ID NO: 68812 - DNA, 100 bp, Homo sapiens
aattacgccaatgtggacggactcactgccctgcaccagatgatgtctttctacctaaagatattgacctagacagtgtggatatggatgagacagagag

SEQ ID NO: 68813 - DNA, 89 bp, Homo sapiens
actttcttctgcaaagaaaaaaatttctcatattgctgaacaaagccccagtgcagtttgcagaaaaaacttcagcatgtgccaggaac

SEQ ID NO: 68814 - DNA, 100 bp, Homo sapiens
atgtctgcgtggagttttcactcttggaagatgccatcggatgcatggaggccaaccagtactatggactacaaattttggaaaatgtgataaaaacaag

SEQ ID NO: 68815 - DNA, 83 bp, Homo sapiens
ctgcattgcatattatggggaacgaatgtctattggtcatttgatgggagatccatctgcaatggtgagtttctatccaaata

SEQ ID NO: 68816 - DNA, 96 bp, Homo sapiens
cacctctggctgcggctgcgctccccgccgcccgcctgcgcctccggggccggccctgcagatataattgaccctgcaatcctgcgcccgggccgc

SEQ ID NO: 68817 - DNA, 96 bp, Homo sapiens
gacgatgatgatgagccaatctttgttggcgagatatcaagttcaaaaccagcaatttcaaggtggttctcttcccaaagtggaagccaaattcat

SEQ ID NO: 68818 - DNA, 50 bp, Homo sapiens
gaaaaatccattctcttggtgtcacttagagacggggtttcgccatgttg

SEQ ID NO: 68819 - DNA, 104 bp, Homo sapiens
agaagccgagttcaacatcctcctggccaccgactcctacaaggtgtggacactgccagcggctgcagccgacttggaatgacctgggagacaaatacaacagc

SEQ ID NO: 68820 - DNA, 96 bp, Homo sapiens
gacttggaccctggaaaacctggccctcttcaatttctgacaaaaggacacattcagctaacgtattttagcaggtggagtgaggttgaagattcc

SEQ ID NO: 68821 - DNA, 88 bp, Homo sapiens
ggacctgctgatgaatattacatcatataccgaaatgtttttgataaggaagaagaatttggtgttgatgattcttattctgaacaag

SEQ ID NO: 68822 - DNA, 82 bp, Homo sapiens
gacagtggctcagccttcaggactctcttccagcatggccgaagacacctattcacacaataatcttgtgccgtggaaatca

SEQ ID NO: 68823 - DNA, 100 bp, Homo sapiens
gggattactgcacggggtcgcgccgtggcggagcagctgctgcacaggttctggaacctctggcggtctcagattgagcagaaaaaggaaagagagctgc

SEQ ID NO: 68824 - DNA, 100 bp, Homo sapiens
gctgctgtcccgggcctaccccctggactccctggagaagcagatggaaaagtctcacagaaagttctccgctcccagacatgggtccctcggcttcctg

SEQ ID NO: 68825 - DNA, 100 bp, Homo sapiens
ctgggttacgtggaatgtgtttgttatctgcttctatttggaggctggggacctctcaaaggttaatgactccagagagtaagatcagattcgtccacaa

SEQ ID NO: 68826 - DNA, 100 bp, Homo sapiens
cggcaaccgctccggcaacgccaaccgctccgctgcgcgcaggctgggctgcaggctctcggctgcagcgctggatgaagcgccctcagttcagcaagcc

SEQ ID NO: 68827 - DNA, 50 bp, Homo sapiens
cgtcttcctcttcagccatccagcttagcctgcgacgcttatgattagag

SEQ ID NO: 68828 - DNA, 83 bp, Homo sapiens
gacaagttcaagcagctgcttgccggccccaacacggaccttgatattaataaggcagcggaaagaagaaatatgaatacggc

SEQ ID NO: 68829 - DNA, 83 bp, Homo sapiens
tagcccgggactctttcacaggctggatgaagattgggggggatatgagactttctactcggaatatcctgagtgttgcgtgg

SEQ ID NO: 68830 - DNA, 50 bp, Homo sapiens
cccatccaggtcaagacgcagcagggagacggagtttcgctgtgtctccc

SEQ ID NO: 68831 - DNA, 99 bp, Homo sapiens
ggccgggcagctagcagggcgcttcgggctccatggtccccttctcgatgcgcatcttgcacgcggagcttcagcagtacctggggaacccacaggagt

SEQ ID NO: 68832 - DNA, 75 bp, Homo sapiens
ctcctgcgaggcctcccgggctccgggaaaactacactggccagggatccaggtccggcacgatcaagacccagg

SEQ ID NO: 68833 - DNA, 75 bp, Homo sapiens
gcccctctccagctcgaaatcgctatgtatgtcaaaaaggatgttcctttgtggcaaaaacatggacggaacttc

SEQ ID NO: 68834 - DNA, 100 bp, Homo sapiens
gcttctcaagatgtggagctctccttgcagatcggtgacacagttcacatcctggagatgtacgaggatgcctgtgaggagccaccaacatttgaagcta

SEQ ID NO: 68835 - DNA, 100 bp, Homo sapiens
ggcggcgcccggagccggcgtggcgctcatcgagggacgcccggcccaagtggtgcagcggaactgctgcctgacgctctgcaacttcagcatccccgag

SEQ ID NO: 68836 - DNA, 83 bp, Homo sapiens
tgaagagttgtcccagctcggcccgcgggggagccccgggagccgcacggtctggtgagctgtaccttctttctggcagtgaa

SEQ ID NO: 68837 - DNA, 75 bp, Homo sapiens
cgagacccagggcaccaccgaggcccgagacctgcattgtctcctggtcacggaagccatcttcgacaagagcac

SEQ ID NO: 68838 - DNA, 101 bp, Homo sapiens
cttaatctgggccaaaaggaatgaccctagccagactcagggatcaaagagcaaacagattcagtggcctgcattggtgggaccagggagattggatctgc

SEQ ID NO: 68839 - DNA, 98 bp, Homo sapiens
attgttgtgggaggaaccaattattacattgaatctctgctctggaaagttcttgtcaataccaagggttacacatcattttggaatgactgtatatc

SEQ ID NO: 68840 - DNA, 85 bp, Homo sapiens
actttactcctattttactacagtcaagtctgaagataacatatgagcacgtctgaggcattggtttttcatccttccaaacttt

SEQ ID NO: 68841 - DNA, 101 bp, Homo sapiens
ggtggaagatcagggatttctggattctctacgggatctcatagcagattcaaatccaatgaaatgcactcggtgatggaaagagagccactattctgaag

SEQ ID NO: 68842 - DNA, 75 bp, Homo sapiens
ctgcgagctcctcaagaatctcgtgctcaccggtttctcccacatcgacctggaaaaaagtaatcctcttggaaa

SEQ ID NO: 68843 - DNA, 148 bp, Homo sapiens
gctcacactcttctgaaacgactcgggtagaggctgaggaaggccgtgttgtttgtctacctgggactaggagcccacctacgatgcagaattccagcacttcttgagaggaaatgagattgtcctgagtgctggctccacccccagg

SEQ ID NO: 68844 - DNA, 83 bp, Homo sapiens
aaagcctactacaagtcctcgcacctaaagtcgcacctgcggacgcacacaggtccgcgggagagctgtggggcttggtgagt

SEQ ID NO: 68845 - DNA, 73 bp, Homo sapiens
gccgattacccacttcgagtcctttattgtggaggatgctcacaactgtattcctgagctggacagtgagaca

SEQ ID NO: 68846 - DNA, 101 bp, Homo sapiens
ccgtcgccatgtttggctgcttggtggcggggaggctgaacagtgctcggcatggcagggattccagggctcctcttccttctcttctttctgctctgtgc

SEQ ID NO: 68847 - DNA, 82 bp, Homo sapiens
ggagctggcgtgggagaccgacggccgcaaacactggagctgtgtgcagaagttcgccgctggtctgggccggtccctgcga

SEQ ID NO: 68848 - DNA, 82 bp, Homo sapiens
cagaattctctacatttgtgaaagtcagtttctgaggaatttcatcagatggagaacttaatgttctggatgatattttaac

SEQ ID NO: 68849 - DNA, 98 bp, Homo sapiens
aactccaacagcttcatatggacagatggacttcaaatgctgtttgtattccagagactagcaaagtacccacgtttgttcgaatgctggccccagag

SEQ ID NO: 68850 - DNA, 129 bp, Homo sapiens
gtgatcaccatgaacgaggagtacgagacgaggttcctgtgcaactcttcacagcctctgacctttttgagcctgggaaatgcttaccttgctctgaagaatatcagtggggcacttgaggcctttaga

SEQ ID NO: 68851 - DNA, 100 bp, Homo sapiens
tgataatcaaccaactgttacaatcaaggtctatgaagcagagcactgtccagagcttcctccagtggacaatagcatatttgtcgcaaaggaggtggaa

SEQ ID NO: 68852 - DNA, 88 bp, Homo sapiens
ccttgtcgaccagtgaaaccaaacattattggagaacaggtctcaagattctgccctccaagaaagtcttgccatgattggataggac

SEQ ID NO: 68853 - DNA, 98 bp, Homo sapiens
taaacttaaaattgctgatgaaggacttcacagagaatgcagttgtcttgacttcaggtctgtctgttctgttggcaagtaaatgcagtactgttctg

SEQ ID NO: 68854 - DNA, 87 bp, Homo sapiens
tcattgaccagaaggtgtatgagatccaggacatctatgagaacagcaaactgaaaccgtgtcagttcagtcttcggtattggggaa

SEQ ID NO: 68855 - DNA, 83 bp, Homo sapiens
gaacgcccctccagccttcgagtcgttcttgctcttcgagggcgagaagaagtaagtaaggaggtctctgtaccatggctcgt

SEQ ID NO: 68856 - DNA, 75 bp, Homo sapiens
cgtgcaagagttcatacaagcagagctaaagatgtaggtgcaaaaaactacagacatctctgtgctgtttattac

SEQ ID NO: 68857 - DNA, 100 bp, Homo sapiens
gactgcttcttttctccgcgggcgccgaccaggcctggctcgcgcctctcccaggacccgcctggctgcgagatatgtgaagtattacagacacttagca

SEQ ID NO: 68858 - DNA, 100 bp, Homo sapiens
tttcagtattgtaagaccaagaagacttctctacatggcaatagatggagtgattttatttggagagaagcaagcatctttgcctctttggagtaggaaa

SEQ ID NO: 68859 - DNA, 100 bp, Homo sapiens
ccatggatgcagagctggagtttgccatccagcccaacaccaccgggaagcagctatttgaccagtgatccgtatgtgaaactttcattgtacgtagcgg

SEQ ID NO: 68860 - DNA, 98 bp, Homo sapiens
atagaaggacaaggacagaatcaccagcactggctgaaggttgcaataaattgacagaccagaccctgatctacctacggcgcattgccaacgtcacc

SEQ ID NO: 68861 - DNA, 90 bp, Homo sapiens
gcgcgtctggtggcggcggcgtgatgttctcggcaggagcggagagtttgctccaccaggccagaccttggcacccgccatcaactggtt

SEQ ID NO: 68862 - DNA, 74 bp, Homo sapiens
cggggcgcagcgtgacggctggcatcatcattgttggagatgagatccttaagattcatgatgttgctatcaaa

SEQ ID NO: 68863 - DNA, 106 bp, Homo sapiens
gctgaagctgttcagaagttcttccttgaagaaatacagcttggtgaagagttactagctcaaggcccttgatgagcctccctatttgacagtgggcactgatgtg

SEQ ID NO: 68864 - DNA, 100 bp, Homo sapiens
gggagccctgccctcctggttcggcctccccgcgcactagaacgattagaagcccaggacccaggaaggagacacaggaaatttattcaaagtccccacg

SEQ ID NO: 68865 - DNA, 83 bp, Homo sapiens
ctgttcaaatgtactctgcaatccttctgaaccacctccacccagaagactaaatgagcgtgaggatcatccccggagaggac

SEQ ID NO: 68866 - DNA, 97 bp, Homo sapiens
ttctagacatgaacaagggcctcagcctgcaacacataggccggccccacagcggcattggatgagcacaagcctgggagatggcagtgatggaaat

SEQ ID NO: 68867 - DNA, 75 bp, Homo sapiens
tttggctgttggtcaacagtgtcataaggagatgcgctctgtgctgcggaaggcgggctccccgcgcaaggcccg

SEQ ID NO: 68868 - DNA, 100 bp, Homo sapiens
ctggctgagcgcttctcctccaaaatccgcagctcccgggagcaccagttcaaacagatgtgctggtgctgagctgtgatctgataacagacgttgcctt

SEQ ID NO: 68869 - DNA, 75 bp, Homo sapiens
ggggagagccactgacgccgggaccgggaccgccgccgccgccgccaccatgattgtctaaagccccaggaaaaa

SEQ ID NO: 68870 - DNA, 100 bp, Homo sapiens
taaagataatgaaatcaagaaccttaaagagcaactttctatgaaaagacaatgaccgtttgccaagtaaaattatctaatggcttactggtacatgggc

SEQ ID NO: 68871 - DNA, 100 bp, Homo sapiens
ggggcagctgggctccagagtccctcgggtctcaggtcatggcggtcgcggggcccgcgcccggagctggcgccagggttgtgagtcccggcccagcccc

SEQ ID NO: 68872 - DNA, 98 bp, Homo sapiens
gcggcggagcggccggtccacggaggaggccactgctgaagccaacaacttagcagctgcagcctctgccaaggacatttattataacaacatggaag

SEQ ID NO: 68873 - DNA, 75 bp, Homo sapiens
ccacttgcacgaaagctttcctaggccaaaaagaggtgacttaagagattaaaattaatttggttgctgttggtt

SEQ ID NO: 68874 - DNA, 100 bp, Homo sapiens
gtggcgcttggttcgtccctcgcccgaggagcgcggtggcggcgtgggagggagcctctgacggcgtctgttatacactgaagtgtcaaacacagtcaga

SEQ ID NO: 68875 - DNA, 75 bp, Homo sapiens
ggccagctccgttgtatactcagccaccaaagattacaaggaccacggctatagaaaccaccatcatgggttcgg

SEQ ID NO: 68876 - DNA, 100 bp, Homo sapiens
ttcttcggaaataccaagtggtctctggccgttgctccagggagaactgcaaatatcttcatccacccccacatttaaaaacgcagttggagataaatgg

SEQ ID NO: 68877 - DNA, 74 bp, Homo sapiens
gaaagacgtcgaggggacgattggaatgacaggagccaaggcaaagagggaccactgtgctcatggacccatcg

SEQ ID NO: 68878 - DNA, 98 bp, Homo sapiens
tgataaagagaaagatttgcagaaatttcttaaaaatgtggatgaaatctgagggatttgttcgtgttgaccgagattatgtgctgaagtctgcagag

SEQ ID NO: 68879 - DNA, 100 bp, Homo sapiens
ccacactttgccttgattgccaaagtgagttattctccccacctcagaagtaccagcttttggtgtatcatgcagattctctctttcatgataaggaata

SEQ ID NO: 68880 - DNA, 89 bp, Homo sapiens
tgaagctgcagaaccaacgaggtggccgaatcttccttcaggatatcaagtacggcaagaagaagctgaaatacctgccctacaatcac

SEQ ID NO: 68881 - DNA, 96 bp, Homo sapiens
caccctgagcagagccgccgaggatgataaacacccaggacaggctgaagccgacgtagcttctctgaacagacgcatccagctggttgaggaaga

SEQ ID NO: 68882 - DNA, 82 bp, Homo sapiens
gtggcagtggaaaatgcgctcgggctggaccagcaggaaagggataaagtgatgcctctgattatccaaggttttaaagacg

SEQ ID NO: 68883 - DNA, 95 bp, Homo sapiens
ccgtgacatagcattcatcatggatgacttccaacatgccatgtcagacagtgaaggtcccagctagtccacagggaccagcagtgccatggaag

SEQ ID NO: 68884 - DNA, 74 bp, Homo sapiens
gtccttcggagatatctacctggagtccactgccagctggttcgactctttgcacgaggaattgaagagaatcc

SEQ ID NO: 68885 - DNA, 75 bp, Homo sapiens
tcgactttttcagagactgggacttggagcagcagtgtatgccgagattttgctgtcctggaggaccacaccctg

SEQ ID NO: 68886 - DNA, 50 bp, Homo sapiens
taaacatgcaatgaacccaaaagggagagaagtggatgggccctatacct

SEQ ID NO: 68887 - DNA, 101 bp, Homo sapiens
agttcaacagttaactgcagctcaacagcagcaatatgcattagcagcagctcagcagccacatataggagctggctaaatatgaatacatggaagaacaa

SEQ ID NO: 68888 - DNA, 80 bp, Homo sapiens
aagcacctggatgagacatttgctacagcatcccacattaagtcaacgagtatttgatttctgacactggaggacaacag

SEQ ID NO: 68889 - DNA, 130 bp, Homo sapiens
atgctatcaggatatggtacaaaactaaacctgaagggcgatcggttacatggacctcagaccagagtggcagtgtgtagaatttgacagcagtatcaagagctgaggagaaggagaagatggaaaggag

SEQ ID NO: 68890 - DNA, 99 bp, Homo sapiens
ttctcccactaaagtgaagaaaaatgcacataacgtggatcacgccaggagtgctcagattgctgacctacagcagaagctgctggatgcagaaagtga

SEQ ID NO: 68891 - DNA, 101 bp, Homo sapiens
ctacaccatcgtgcctgctatcgccgagttctacaacacggcaagaaactatattcagtctttgactcagatgccgaagatgaactttgcgaatgtattta

SEQ ID NO: 68892 - DNA, 75 bp, Homo sapiens
cagttggcagccatcaaagttatggatgtcactgagaatatcatactgactggacctggcgagcaggaaaagttg

SEQ ID NO: 68893 - DNA, 100 bp, Homo sapiens
tgtagatcccttcagttcaaaacataatgtgattgaatcaaaggcatgggaggttgatacctgccggggccattacaacaatgtatcttgtgccgtcttc

SEQ ID NO: 68894 - DNA, 101 bp, Homo sapiens
tggaagaggagcgctaagctgccggggagcatctgtgttttgtgtgagcctggaccccaagaccaataccttggcagtgaccgggggtgaagatgacaaag

SEQ ID NO: 68895 - DNA, 100 bp, Homo sapiens
ccaacatgaagcttcttcatgttttcctgttatttctgtgcttccacttaaggttttgcaaggagtgtacctcacagccttctaggatctccagagtgga

SEQ ID NO: 68896 - DNA, 75 bp, Homo sapiens
aagaacagaagatcctccttgaatttttccctagattggtgtaaacagccagacgtgggccttcccaaacccgac

SEQ ID NO: 68897 - DNA, 80 bp, Homo sapiens
ggaagcggccaccgactactgtcagcagctgtgccaggattgccccctgtgggtcactttctcagtcattttgagctcag

SEQ ID NO: 68898 - DNA, 100 bp, Homo sapiens
ctcgggccggcggacagtgagggcgcgactgacttccttttggtagtactgcgtgatgttgttcaggcttatcctgaagttcgcattgttcttatgtctg

SEQ ID NO: 68899 - DNA, 51 bp, Homo sapiens
cgcgcctttgtgcgcgcgccgagatgggtgagtcaagtgaagacatagacc

SEQ ID NO: 68900 - DNA, 75 bp, Homo sapiens
aggcgtcagcgggggaacagctagcggcaagacaatgcagatcttcgtgaagactctgactggtaagaccatcac

SEQ ID NO: 68901 - DNA, 102 bp, Homo sapiens
ggagtgcaagcttagagcgtctggccaagaatcagaggaagtggtatgccgagattttgctgtcctggaggaccacaccctggctcacagcctgcaggaaca

SEQ ID NO: 68902 - DNA, 76 bp, Homo sapiens
tcaacaaagaagaccacacactgggaaacatcattaaatcgtggaagttaaacgagctgagcctcgggacagcaag

SEQ ID NO: 68903 - DNA, 101 bp, Homo sapiens
cgggaagaatgctgccctttacaccgggtccagtgaccataccatccgctgctataatgttaagccattgatgtgacctacttgctggaggaaggatcagg

SEQ ID NO: 68904 - DNA, 87 bp, Homo sapiens
gcaacttagcgaagctgccggtgaagatgtcaagtccatcatctccagaaccagctagtcttcctgcagaagatattagtgcaaact

SEQ ID NO: 68905 - DNA, 100 bp, Homo sapiens
cttggaaattgagcggagagcgacgcggttgttgtagctgccgctgcggccgccgcggaataataagccggggaccctccattttccatatccaggaaaa

SEQ ID NO: 68906 - DNA, 97 bp, Homo sapiens
agagacgggggaagcagcacgggatcccagcctcaggcctgcacggacggtgttggttgggcaaattcaacacccaacagcttccttaatagcaaag

SEQ ID NO: 68907 - DNA, 100 bp, Homo sapiens
tgaattccacgaacatgagcccactgctgcacttctatggccgtaaacatgatggaagtggttcattgcatgatattcaactgtcattgccatccagtcc

SEQ ID NO: 68908 - DNA, 116 bp, Homo sapiens
ctcgtgagcgacccggacaccgacgcgctcatctgctggagcccgcatcctaatgtcctatgatcacgtggaactcacattcaatgacatgaagaacgtgccagaagccttcaaag

SEQ ID NO: 68909 - DNA, 75 bp, Homo sapiens
cagctgcccaggcgcaagtctgtgtggtccagcttcggaaccaaaaagaagcttcccagagccggggccaggagc

SEQ ID NO: 68910 - DNA, 95 bp, Homo sapiens
agcgagtctcggagaagatgtggtggcttccgtttgttggtggaggaggtggcaggcctcggcgacatggcagggaggtttaatagacatggata

SEQ ID NO: 68911 - DNA, 83 bp, Homo sapiens
tcatcgtttgcgacgttccctcagcctctgcccaaagaaagaaggagacaatgcagatcttcgtgaagactctgactggtaag

SEQ ID NO: 68912 - DNA, 100 bp, Homo sapiens
caactccttcgacaaggtgcggagcctgccgctgctgctcagccaagctggtgtgcgcacagggcctggccatgtcccctttcggaagcctgttccctta

SEQ ID NO: 68913 - DNA, 75 bp, Homo sapiens
gtttgtatgcacgacttgaagacacgcacttatcattcagtggacctgcactggttaaacatcataatcatgtgt

SEQ ID NO: 68914 - DNA, 105 bp, Homo sapiens
ccgtcggcagcaagaacagagagagaggtggacagatctgagagatactgagcccactttccttgtggaactgtccagagtgctggcaaatccaggaaacagtca

SEQ ID NO: 68915 - DNA, 100 bp, Homo sapiens
tacttgaagccctacgccgtggacttccagcgcaggtggagccgccaccaaaatgcagattttcgtgaaaacccttacggggaagaccatcaccctcgag

SEQ ID NO: 68916 - DNA, 100 bp, Homo sapiens
ggtggcggagggggagactgtgccgtggagggcctcgccatgtcctgctgcccgcctgtgccatatttcgggaggctgcaaggagggctcacagctcgaa

SEQ ID NO: 68917 - DNA, 98 bp, Homo sapiens
tctcaagctcatattttgaagtgtttacggttgaccagcaagtcaagtccctgtcgtcggtcctgtcgcggtaccagggtttcagtggagaagatgga

SEQ ID NO: 68918 - DNA, 90 bp, Homo sapiens
acacgcagggccagagtccggagccgcggacccgcgagtatttctactacgtggaccaccagggccagattattgccaagcgcctccccc

SEQ ID NO: 68919 - DNA, 75 bp, Homo sapiens
ttgtgaaaaaactactaggatcacgcggcatgtattgagacctgcctagagctggaacgttacctccagagcgag

SEQ ID NO: 68920 - DNA, 97 bp, Homo sapiens
attgctactgcacggtgaacctggaccaggaggaggttttcaggaccaaaattgtggaaaagtcactctgggagttgaccacatttggccatttccc

SEQ ID NO: 68921 - DNA, 98 bp, Homo sapiens
gtttaatgcagaaccctcaagttcaacagctgcattgtgtggctgctcaattaatgtaccaacactggatggaagaaacatacctatgtcagtaaatg

SEQ ID NO: 68922 - DNA, 98 bp, Homo sapiens
cctgggcctcccggtccgcaagcagtgtggggatggtggcagatactctggctgctacgtgagaacagtgtgccgatccctggggtttctcaaggcgt

SEQ ID NO: 68923 - DNA, 114 bp, Homo sapiens
cgtggccttagctgtgctcgcgctactctctctttctggcctggaggctatccagcaacactctgctccagccaaggtggtgagggcagctgttcctaaacagcgcaaaggcag

SEQ ID NO: 68924 - DNA, 60 bp, Homo sapiens
agaaactatatgccaccatggagaagcataaagaggccttttcagatattaatggcaaag

SEQ ID NO: 68925 - DNA, 100 bp, Homo sapiens
gcagctccggccgcctggctccccatactagtcgccgaaaatggtgtgaatggaacattaacttcaaatgtagcagactctccccggaataaaaaagaga

SEQ ID NO: 68926 - DNA, 83 bp, Homo sapiens
aagatcctggttccatgccgcagtaggacagcaggcccaagtctgcacatcccagtttggagaacatttataaagagttgtct

SEQ ID NO: 68927 - DNA, 100 bp, Homo sapiens
tgcagaggtgctggagctggcagggtggctttgcaaaatgttacgagatgacagatttgacaaataacaaagtctacgccgcaaaaattattcctcacag

SEQ ID NO: 68928 - DNA, 76 bp, Homo sapiens
gatggaggtggtgaagagagatgacgaaaccataaaggagcatttatgtaaggggatcatggaagctgataaagat

SEQ ID NO: 68929 - DNA, 99 bp, Homo sapiens
gcagagagagcttgggagactgagacaacaggacggaaccactgcactccaggttccttgctgggtgctgagcgtggcctgagggacaggccctgggtc

SEQ ID NO: 68930 - DNA, 98 bp, Homo sapiens
gagactctgtccttcatccgagacagcctggagaagagcgaccagctcactaagaacatgattggagctggagtgagccttccaggaattttggctgc

SEQ ID NO: 68931 - DNA, 100 bp, Homo sapiens
ctgggagctggagcccgcgcagcgccccgcagggcgatggacggccgaaccccgcgcccgcaggacgccccagccagggtgttaaataccacattatttg

SEQ ID NO: 68932 - DNA, 80 bp, Homo sapiens
actgtttctgaacctggaagttaaggatggcagtgatggctcaaagattctttcttgtggagaagttattcatgtgaaga

SEQ ID NO: 68933 - DNA, 100 bp, Homo sapiens
cagcccccagaaaggattgtgacatatcgttggacccagaattgagatctgagtgggacatacttttgaaggatgtgcaatgttcaatcataagtgtgac

SEQ ID NO: 68934 - DNA, 74 bp, Homo sapiens
gacggcccagtgcagggcatcatcaatttcgagcagaaggcattcagatttgggagaagtagccccagaaataa

SEQ ID NO: 68935 - DNA, 100 bp, Homo sapiens
tggcgtcgtctgcgaccgctgccttctcgggaagcgttgttgacgaccatggacatcatccacgatggatttggattcatgctggcttttggagacttgg

SEQ ID NO: 68936 - DNA, 83 bp, Homo sapiens
agtcagcaaaagggagagggcaattccaagaagagggaaaagcttgtgcacagcaaattgtggctactaatttgccccctgaa

SEQ ID NO: 68937 - DNA, 100 bp, Homo sapiens
agaaaatgcaaaaaaactaatggaattagcctgcaacatgaaggttcgcctaacccctactggtcataacatgaaaattctgcagccgcatgtaatagct

SEQ ID NO: 68938 - DNA, 80 bp, Homo sapiens
gtgggccacaggggccccgaagaactcccacaatgccacaggaggaggcagcagttgcatccttaatgtccagtcaagga

SEQ ID NO: 68939 - DNA, 96 bp, Homo sapiens
cggagcccggctccccacagaagctcatccgcaaggtgtccacgtcgggtcagatccgacagaaggaagaaacatattgccgagtggatgccgccg

SEQ ID NO: 68940 - DNA, 75 bp, Homo sapiens
cttttcttctgcatggtgggtacccccatgctgtggcacggcttcagaaatcaatgtggactgaacataaatcac

SEQ ID NO: 68941 - DNA, 83 bp, Homo sapiens
cgctggcgggcttccctgtcgccgttcgctgcgctgccggtgggtaattccagaattgattggccataccattgtcactgtat

SEQ ID NO: 68942 - DNA, 100 bp, Homo sapiens
gactggtgatgccccctgctggtctgcctcaggtacagaagggcgacctctgtgccatttctttggtggggaacagagatccgtgctcagctcacagagc

SEQ ID NO: 68943 - DNA, 75 bp, Homo sapiens
gctacctgcagtgcagacgaggtggatgaggccgagggcggcgacaagaaccgcaaattgtggctactaatttgc

SEQ ID NO: 68944 - DNA, 95 bp, Homo sapiens
cgttaaagtctctcttcaccctgccgtcatgtctaagtcagagtctcttgcatggcaccaagaatgttaccaattcaagcagtttaagattgcca

SEQ ID NO: 68945 - DNA, 50 bp, Homo sapiens
tagcaattgatgtcccaaatggcattttccctgaaacatatatccatttg

SEQ ID NO: 68946 - DNA, 82 bp, Homo sapiens
ttccatcgtcgggcgccccagacaccaggaactgatttcatctgaaattgaagagacaatcagagaaaaactatagaccact

SEQ ID NO: 68947 - DNA, 100 bp, Homo sapiens
tattcagcagccatcaccacaggcagcacacttctgcttttgttccttcatcaggacgaatttactcttttgggcttggtggtaatgggcagctgggaac

SEQ ID NO: 68948 - DNA, 75 bp, Homo sapiens
ccctgtgaagaaggtctccagtgctgtgattgtctccacgccccaggacatcgcattgatggatgcacacaaggg

SEQ ID NO: 68949 - DNA, 101 bp, Homo sapiens
aaccccaggactgcgcccccgggagcgggcgcccagaggccaagaagcttgagagaagaaaaatttcagaaaaattgtctcaatttgactagaatatcaat

SEQ ID NO: 68950 - DNA, 50 bp, Homo sapiens
cggggctgccggagaccggccgcatgggtcgacaaagatgctgaattagt

SEQ ID NO: 68951 - DNA, 100 bp, Homo sapiens
gaaaaatattagtggaagtgtcaccctaaaaatcttaccaagttatagagataccattactcctcaacaggaaggtgtcttgctgcaggtaactaatgaa

SEQ ID NO: 68952 - DNA, 74 bp, Homo sapiens
cttaagaccttcaacttgatcccggctgttgagacgagttgtactgctgtcacaggaaatggacgctggattac

SEQ ID NO: 68953 - DNA, 129 bp, Homo sapiens
caggcttttgcttcttcctgcaccatttccagcaacggccctgggcagaggagagagaggggccagcagcctcccccgatgggtcgtcagcaacgagggtgcctcaggatgtgacgcagggccctgggg

SEQ ID NO: 68954 - DNA, 83 bp, Homo sapiens
agggagccgtgggcgctcggtgcccgggccgggcagtggccataatataattgtgataatgtaataaaatcaggaaacattac

SEQ ID NO: 68955 - DNA, 75 bp, Homo sapiens
tgacagtggagacactggcattggaacttcctgttctgatagcgtggaagagacgggatctcgctttgttgccca

SEQ ID NO: 68956 - DNA, 100 bp, Homo sapiens
ccatgaccaaggaggagtgggatgcccggcagagcatcatccgcaagtgcatcgtccatgccaaagtgtgcggcccttcctgacatcaccacagtctgag

SEQ ID NO: 68957 - DNA, 99 bp, Homo sapiens
attgaaattctgtaaacaaatactttctaatcccaaatttgcagagcatggagatttgcctgcaatggataacccagtgtttttggaattacttagatt

SEQ ID NO: 68958 - DNA, 100 bp, Homo sapiens
cagattcgcagtggtcgcttcttctccttgaaaaagcttgcggaggctaagcaccagtacagcatcgacgagctgaagcaccaggagaacctgatgcagg

SEQ ID NO: 68959 - DNA, 100 bp, Homo sapiens
ccgagctgaggcggtcgcggccatgaagttcttgcaacgatagcttttgcttttcttctcctcccgatgtgccagtatttaacaagaccctgctcacctc

SEQ ID NO: 68960 - DNA, 51 bp, Homo sapiens
agcacactgtttgaataaagagcgacggaagtgaccgtggtggcttcaata

SEQ ID NO: 68961 - DNA, 96 bp, Homo sapiens
aggttctagatctccacgataatcagctgacagcccttcctgacgatctggggcagctgactgccctccagcttcttgatcctcctgagtgtggca

SEQ ID NO: 68962 - DNA, 101 bp, Homo sapiens
tacttcggcaccgtccgcgactgctatgaggcatcctgaggttagcattacacttctcccagtggagcccatgacttctgatcaggacgctaaggttgtgg

SEQ ID NO: 68963 - DNA, 50 bp, Homo sapiens
ggagtccacttccaattccaaggcctctttgcacctccacgtgccttcag

SEQ ID NO: 68964 - DNA, 132 bp, Homo sapiens
aaggagcgcgcccgcctgcagctggagctgagcaaagtgcgtgaggagtttaaggagctgaaagcgcggaaattacctgatgttccaaaccccctccagatcctgtatatccgcagcatctcccctttccct

SEQ ID NO: 68965 - DNA, 89 bp, Homo sapiens
tctccatggagagagtaactctgtccttattatcggaccccgaggatcaggaaaaactatggtgatgatgaacagtctacacagatggc

SEQ ID NO: 68966 - DNA, 98 bp, Homo sapiens
acgcctgtgtcctcattgctccaaactgtgttgtttcagctgtattagggctatttagcagacatgacccacaagcagaagaagcattagcaaagagg

SEQ ID NO: 68967 - DNA, 76 bp, Homo sapiens
ggaatctcactctgttaaagctggtctgttctaactgagcaattctgtggtgttcttggtcacacatttatggagt

SEQ ID NO: 68968 - DNA, 100 bp, Homo sapiens
tgaccagctgtgatggtgtggatgccaaccagaaaagtgtgctggggcggaatttcaagatggatcggttacagaatgtctgaaggggacagtgtgggag

SEQ ID NO: 68969 - DNA, 90 bp, Homo sapiens
ctgctcccatcattgatgtggtgcgatcgtcagaagaagaagttgtagaaggagagaaggaagtcgaggctttgaagaaaagtgcggact

SEQ ID NO: 68970 - DNA, 71 bp, Homo sapiens
gctgagcactcccagcgagagctggacacagtcaccttggaggcagagaggggcagcaggatgaatgtggg

SEQ ID NO: 68971 - DNA, 90 bp, Homo sapiens
gagcgaccagctcactaagaacatgactggttcaggcagaccctgctgaagaagcccaagaagaggcccaactccccagaaagcacctcc

SEQ ID NO: 68972 - DNA, 132 bp, Homo sapiens
agaattttctgaagaatatccaaataaaccaccaactgttaggtttttatccaaaatgtttcatccaaatggcaatacatggtccataaatcaaaatactataaaaaggtatacagtgaaaagaagtgctcc

SEQ ID NO: 68973 - DNA, 101 bp, Homo sapiens
cgcagtggtcgcttcttctccttggggatggagaagtttatgtttgggatgtgaactcaaggaagtgccttaacagatttgttgatgaaggcagtttatat

SEQ ID NO: 68974 - DNA, 75 bp, Homo sapiens
gggtcgggcccagttgcggcgagcgggagcttactccacgggaacagcctctagataatctgagttgttgaaaat

SEQ ID NO: 68975 - DNA, 101 bp, Homo sapiens
cctaagctggcagtggcgtgatccggcaccaaatcggcccgcggtgcggtgcggagactccatgaggccctgctcctgagactggacagactgcaggacaa

SEQ ID NO: 68976 - DNA, 95 bp, Homo sapiens
ggacatattggggtatattacaggtgttccagggtatactggagcaccacagatgctcgcaagcgctgtgtatatacatgcaagatagtggagtg

SEQ ID NO: 68977 - DNA, 100 bp, Homo sapiens
cccacctttccaagcaaggccaggaggcgatagatgatgaggaagatcgcttccatggtgtgcgcctgcagacttcgcccccaatggaacccctgaactt

SEQ ID NO: 68978 - DNA, 100 bp, Homo sapiens
ctgttctaatgaggtcctatctattactgctatgttgtcaggctttgaagacaagattcccaaaaggagattctctgagatgcaaaatgaaagacgagaa

SEQ ID NO: 68979 - DNA, 74 bp, Homo sapiens
gtataggttgtcaaaattcacaaggcaaggtgactttgaaaggaaagttcaaccgtctgaacttgtagggagtg

SEQ ID NO: 68980 - DNA, 88 bp, Homo sapiens
aggaagtcttgaagaatagagccataaagaaagcaaagcgcagaaatgttggatttgaaggagccatccagggtcctgaagagtttgt

SEQ ID NO: 68981 - DNA, 75 bp, Homo sapiens
aatctcaaacaagacaacttgagctgaaagcgaaaaactatgctgaccagagatatgtgatggcgtccagtttgg

SEQ ID NO: 68982 - DNA, 75 bp, Homo sapiens
gggtgaccattaaacaggagcagaacttggaccagacctacttggatgatgtcagtgaaaggggatggagggatc

SEQ ID NO: 68983 - DNA, 100 bp, Homo sapiens
ttcgaccctgcccagcacgaccagctcatgcagcttgtctttaaccgaactgtcacactgaaggaagacccaggaaaggtgtgagctggaagcactgaac

SEQ ID NO: 68984 - DNA, 75 bp, Homo sapiens
tgggcatggcagacaaatctgtaggtaccaccctcgggtgctctacattgacattgacatccaccatggtgacgg

SEQ ID NO: 68985 - DNA, 100 bp, Homo sapiens
cacagctggcttatcaatattgctgtttgatgcgatcctgaccagtgcaaccacgggatggtactctctgaagatggcagaagctcaccaagctgtggcc

SEQ ID NO: 68986 - DNA, 100 bp, Homo sapiens
tctgccttgtacagttcccatcacatgaccctgatgatctgcaatgtaagcggggagaacatgttgcgctggctaactggcagaaccacgcatccctacg

SEQ ID NO: 68987 - DNA, 75 bp, Homo sapiens
cttttgaacagtccattgaagctgtgcaagctatatctgtgctcaagtacatgggcgactacccgtccaagagga

SEQ ID NO: 68988 - DNA, 74 bp, Homo sapiens
gcatccacgtcatgtggtcagaaatcagctggtgccgaggtgaaagggtctccaactgaattccttgaagagaa

SEQ ID NO: 68989 - DNA, 90 bp, Homo sapiens
cctgcaagtactggatcctcgacctagctgtctgtggaagcccgtaaagagatgactagaaaggctattaagacagtcaaacattttatt

SEQ ID NO: 68990 - DNA, 75 bp, Homo sapiens
ccagcaccagcttccagttagtggatatagcacaccatccccagccagtaaggggcctggataccaagaagtgac

SEQ ID NO: 68991 - DNA, 100 bp, Homo sapiens
caaaaatagtgatagctttgataagagtccacaaattggccttcaacaaattgaatcgtcaatgaggatttccccacagaccggtagcccaggatcgcga

SEQ ID NO: 68992 - DNA, 75 bp, Homo sapiens
ccggccagccgccccgtccgggagtgcgaccaagaccagtgcattcagagcaccaaattcgttttgcaggctgca

SEQ ID NO: 68993 - DNA, 75 bp, Homo sapiens
tggaggaatccgagaagagcagagcggagggagccccagacacgggtatacagggagctaccctgtgtttctgag

SEQ ID NO: 68994 - DNA, 100 bp, Homo sapiens
agaaggtcccggcagacgaagcgagccccctggtggaagccagcagaaccaggccctggagagtgaatttgtttcctgccagcttcaccaatggattgat

SEQ ID NO: 68995 - DNA, 98 bp, Homo sapiens
atttctggggctttggagggaatcgtgagcgggcgggaggaggccggggaccacacagggggggccctcagcctcttggccttgaacgggctgttcat

SEQ ID NO: 68996 - DNA, 99 bp, Homo sapiens
cagatgtcctcatcatcccgtcagagctgaggtacttcgtgaagggtcagccacaacaacaaggtgaatctcatgaccagcgagaacctctccatctgc

SEQ ID NO: 68997 - DNA, 146 bp, Homo sapiens
ggcagtgtgctctccctccagaagttctggcagcaccgcatcaaggactatcacagttacatgctacaggctggccctgcataactcccgtttcctgagtctctgctctgagctggatggtcgagtccggcccctcgtgtacaccc

SEQ ID NO: 68998 - DNA, 75 bp, Homo sapiens
gcggcaacatggcagagaccgcggccggagtgggccgcttcaagaccaagtgtctttcctgaagactatcttccc

SEQ ID NO: 68999 - DNA, 100 bp, Homo sapiens
ccagaacctccagcctcactctctccattgccggcatttttaaggaaagtggagaatgaggacatgaataaagaccagatcttgctggaaaaagaagctg

SEQ ID NO: 69000 - DNA, 100 bp, Homo sapiens
ctcgcgcccctggtcctgctgctcggggtccgcgcggcctccgcggagccagcgtccagcctgcatgccgtgcggactgcacccaccagcaaggtgatca

SEQ ID NO: 69001 - DNA, 97 bp, Homo sapiens
cagaggggagcctgttgtgaacagtgcaaagatggcagtggcagcaccatgatgcaaaccaagaccttctcctcttcctcctcatccaagaagatgg

SEQ ID NO: 69002 - DNA, 75 bp, Homo sapiens
cgcggcgagcgccccagccaggcctgcgccggcatcctccgaggcttgaagtagaaaatgccatgatgagaaaaa

SEQ ID NO: 69003 - DNA, 100 bp, Homo sapiens
catttgataactggggaagactgttcagatttaaaggtacagttgaggaactcagtaaccagatattatctgcacggagttggttgcaacaggaacaaga

SEQ ID NO: 69004 - DNA, 51 bp, Homo sapiens
tatgaagaaattgagggttcttgccatgatccagctctaatctatgataag

SEQ ID NO: 69005 - DNA, 75 bp, Homo sapiens
gacttccatggggaagtcaccagcgacgagctggggctgcagaagaagctacgcacagaggtcattcagctggag

SEQ ID NO: 69006 - DNA, 75 bp, Homo sapiens
gccggatactcatcatttgcagcaaactcagcactcatggactggaggaaacagctgccaaatgcaagggactgg

SEQ ID NO: 69007 - DNA, 116 bp, Homo sapiens
caccatcaacaatgagtacaactaccgctgctggaccacaaaccgctgccagaaaagatgctcgtcagaagttccgctctgttctggttgaagcaacggtgaaactggatgaactg

SEQ ID NO: 69008 - DNA, 90 bp, Homo sapiens
agagggatcttgccctcattctttgggtctgaaacactggcagtcgttggaaacaggactcagtacgcctgcctcacaccttgcgatgcg

SEQ ID NO: 69009 - DNA, 100 bp, Homo sapiens
agaggatccagtgttcaccatcctggccccggaaggttcgtgctggccgtgggcagcgccgtctttgatgccatgttcaacgggggaatggccacaacat

SEQ ID NO: 69010 - DNA, 75 bp, Homo sapiens
cgtgagccacggccacggccgcatagggtctcctatggacagaagtgcgggcaaggagctttgttcctccccgat

SEQ ID NO: 69011 - DNA, 90 bp, Homo sapiens
tggttgtagagttccgtgactcccagaaaaagcttgtggtgaaggggggcaaaaaaaagaagcaagttctgaagttcactcttgattgca

SEQ ID NO: 69012 - DNA, 80 bp, Homo sapiens
ctcagactggagctcgaagataaagaaaattgcctaagaattatgacccaaaagttaccccagatccagaaagatggctg

SEQ ID NO: 69013 - DNA, 100 bp, Homo sapiens
gaacaacataatggtgtggaacgcggtcattttcggcctgcttagacgcctggtgactctcatttcgcagcaggccacgctgctggcctccaatgaagcc

SEQ ID NO: 69014 - DNA, 82 bp, Homo sapiens
cgcggtgcaccgcctgctgggagcgccgctcaaggattttttatcaagcagaaatgcatcgaacaacgagaatcaagatcac

SEQ ID NO: 69015 - DNA, 100 bp, Homo sapiens
gaacggcatgtcatctttgccaggactgatgcagatgcccctcctccaccagaggactgggaggagcatgtcaacaggaaaggccgagggggacggcaag

SEQ ID NO: 69016 - DNA, 80 bp, Homo sapiens
atcagcttcaaagaagttggcaactacgcggctgtggagagtgaagagtgtatttaccttgctgtggattgctgactgga

SEQ ID NO: 69017 - DNA, 75 bp, Homo sapiens
ccacttcctgtctcctggggttgacgacctagctggaagccccatgtgccactcccctgatctgcagcttcggta

SEQ ID NO: 69018 - DNA, 82 bp, Homo sapiens
ctgctttgtaaagattgtggcttccgcctgaactgcttctttcctgcctcaaagggaaaaagacctcgatgaagttctgcag

SEQ ID NO: 69019 - DNA, 91 bp, Homo sapiens
agcctcccaagtatctgggactacagatgctgcaatttcacagcagttccttccttcgcgcctgtaaaacagtggcaacagtaactcttct

SEQ ID NO: 69020 - DNA, 82 bp, Homo sapiens
aaacagaaattctggaacacctatatgtttggtgccctggttgtcagatgttggaaagcagtaggacggaacatactcttcg

SEQ ID NO: 69021 - DNA, 77 bp, Homo sapiens
tctggtgggttcgtggtctcgctggctcaggagtgaagctgcagaccttcatggctggagtgcaatggcgcgatctc

SEQ ID NO: 69022 - DNA, 75 bp, Homo sapiens
ggggacgcgaggagccggcgtggccctgggtgctggagaatctggtaaaagcaccattgtgaagcagatgaggat

SEQ ID NO: 69023 - DNA, 98 bp, Homo sapiens
cgcttttttacctgccaatcaaactgctacaagacaacaccctgatctggcatggacatgcataagggccatgtgttctgaaattattttgaggcaag

SEQ ID NO: 69024 - DNA, 95 bp, Homo sapiens
gggcaggagcttaccaggctggcttgctctgagctgcggttactgtgtccaggccccgggttctcaggtgcggctctatgagtggacaacagaga

SEQ ID NO: 69025 - DNA, 99 bp, Homo sapiens
ctcctccaggcgctgcccagccccttgtcagccagggctgaacccccgcagcgtgacgacagcatgtacgatccctgaatgggcccgtgggcatattta

SEQ ID NO: 69026 - DNA, 100 bp, Homo sapiens
gactggggtctaagcctgtgcggctgagcgtggcaatccctaaagcatggtgttgaaactctggattctggatggctgacatgtcagactgaaataagat

SEQ ID NO: 69027 - DNA, 90 bp, Homo sapiens
actgcaccggaaatgtgcctaccaggcatttgcaagtaaaatcactggcatgttgttggaattatccccagctcagctgcttctccttct

SEQ ID NO: 69028 - DNA, 100 bp, Homo sapiens
tggctgcggcggcccagctctctctgacacaggtctattgaatgatggaactgtgggtatttttaggggcaaccagatgcgcttaaagcgagcctgcatt

SEQ ID NO: 69029 - DNA, 80 bp, Homo sapiens
cccgttaggtgacaataagcagacagaagagccaagcagctatggaggaaaatcagatttgatggtagagtggtggcaaa

SEQ ID NO: 69030 - DNA, 80 bp, Homo sapiens
cagcaggcgatagcaatgcacagccaatttcatgctccactatagagagttaattgttaaatccagtatggccacaggag

SEQ ID NO: 69031 - DNA, 75 bp, Homo sapiens
caacgaatcatccacgcacctgcagctctgctgagagagtgcaagccgtgggctctgcttatgataatgtcaaca

SEQ ID NO: 69032 - DNA, 98 bp, Homo sapiens
gataaggagatcatagcagagtacgatactcaggtcaaagaccctggtgaatctctgcagtcggtctccatgtaaaaacaaaggtacttgcgttcaga

SEQ ID NO: 69033 - DNA, 89 bp, Homo sapiens
gccggattccagactcgtgggggaaaggctggctcttgtcaggatggtgaagctgttcatcggaaacctgccccgggaggctacagagc

SEQ ID NO: 69034 - DNA, 83 bp, Homo sapiens
tcttcatcttcacttgaaataccggatgattttggaggtcagtatgggaatcctttaaataaatatatcagacattatgaagg

SEQ ID NO: 69035 - DNA, 75 bp, Homo sapiens
gtctggatttccaaggaagaatttcctctgaagcaccgttggaatcgaagcctcttaaaatggcagatgacttgg

SEQ ID NO: 69036 - DNA, 98 bp, Homo sapiens
acctcaggtgaagttttatgaagagggattgaggaatgatttgaaagcagccttggataagattgatcagcagtacctcaatgaaatcgtcggcggtc

SEQ ID NO: 69037 - DNA, 88 bp, Homo sapiens
gggttgaagattgtgaagcaatagcctaagagagtgaatctggaagtgaaagtggagaacaaggcgaaagtggggaggaaggagacag

SEQ ID NO: 69038 - DNA, 75 bp, Homo sapiens
ccagtgcagaagcagacccgtgccggccagcgcaccaggttcaaggcatcgacatcctgtactcgggctcccaga

SEQ ID NO: 69039 - DNA, 100 bp, Homo sapiens
gcaagatcttatccacagactccaggcatatcttgaagaacatgttgatggagtttgcactgtagcaaattgcgttggaaaagaactagctccacatgtc

SEQ ID NO: 69040 - DNA, 96 bp, Homo sapiens
cgcgcccggggccgtgcgctctcgggccactcggccgcagggctctggaggccacgggcatgatgcttcgggtcctggtgggggctgtcctccctg

SEQ ID NO: 69041 - DNA, 50 bp, Homo sapiens
cccacaacgatgcgtctcctggatggatggagtcttgctttgttgcccag

SEQ ID NO: 69042 - DNA, 80 bp, Homo sapiens
ggagccaccagcctctccctggattatattccatcacaacaagatattctgcttgccagaagacccaccaaaggcatcca

SEQ ID NO: 69043 - DNA, 83 bp, Homo sapiens
atcagccacgcatctgaccttgttggtgagaagccctaccactgcaactgggacggctgcggctggaagtttgcgcgctcaga

SEQ ID NO: 69044 - DNA, 90 bp, Homo sapiens
ccccaatcggcctggtgctcatcgtgggaggctacttcctcatccgagtgtttgattgcatcgaggtctatgcccctggcttcaaggact

SEQ ID NO: 69045 - DNA, 98 bp, Homo sapiens
ctttttgaattactttgttatgcagaaagtaaagatgtgtcatggcaatgctgagaaggaggatcagggatgagaagaccaacgttaggaagtctgca

SEQ ID NO: 69046 - DNA, 100 bp, Homo sapiens
actccaatgggcctttccagcccgtggtccttctccatattcgagaaggacagaataacgggctcccagattcacaagccccaccaagaggatcacccca

SEQ ID NO: 69047 - DNA, 101 bp, Homo sapiens
agcacctacgtcccgctgccgtcgccgccgccaccatgcccaagagaaaggaatactcccccagttgcaagaggcgcaggaccgtggaagacttcaacaaa

SEQ ID NO: 69048 - DNA, 89 bp, Homo sapiens
gcgtctgttgacgcggccgactacaatcccgagcattccatggactttttgctatttcagtttggcctttgcacttttaagtatgacta

SEQ ID NO: 69049 - DNA, 87 bp, Homo sapiens
tccctggagaagcagatggaaaagattttgtacagcagcaatttcttactctctctgcaagttttcttcccagtcacgagatacttt

SEQ ID NO: 69050 - DNA, 98 bp, Homo sapiens
agacaaagcgtccctcaaggcccccgcgtggttcagacagacgccgcagccaggatggttgaggaccctttgaggatgccctgaagttgcatgagtgc

SEQ ID NO: 69051 - DNA, 75 bp, Homo sapiens
tgcagctgcgccgccgccctggcgcaggccacgcccggtctggttccagaacgcccgagccaagttcaggcgcaa

SEQ ID NO: 69052 - DNA, 75 bp, Homo sapiens
cagatgctgacattgttatttgggacccaaaaggcacaaggatccggagtgttggaacagcagctgttaatatgt

SEQ ID NO: 69053 - DNA, 100 bp, Homo sapiens
tgcccaatcttgcatcagtgggaacaagactacctcctcctttaccccagaacctcctttacacagtatcagaacgattctggactctacttataatatc

SEQ ID NO: 69054 - DNA, 100 bp, Homo sapiens
tggccactgggactttgcagacatgatggtgataaggagcctgaggctggactctgtgaagctgagcaggagcagatgcggaagatcctctaccagaaag

SEQ ID NO: 69055 - DNA, 82 bp, Homo sapiens
tccactccccagctgtgaaaggatgatggatttggacatgcttctatgaagaaatgccacatggtccgagagcaaacatgtc

SEQ ID NO: 69056 - DNA, 83 bp, Homo sapiens
cggagccggagccgcagaggctcccgggctggactcaggcttctcaggcctccaggcccaaggtcagcatcccactgtcagcc

SEQ ID NO: 69057 - DNA, 76 bp, Homo sapiens
ggcgacggcgaccatagctctcatgtgaagttcatttccaatccgccctccatggtggcagcggggagcgtggtgg

SEQ ID NO: 69058 - DNA, 90 bp, Homo sapiens
cctgactcctctgaaggtaaacggggcccacgtggaatctgcatcaggaattacatgaacgacagccttcgcaccgacgtcttcgtgcgg

SEQ ID NO: 69059 - DNA, 50 bp, Homo sapiens
gatgctgaagcgagtccctgagctcccgtctgaaccaatcagagtccttg

SEQ ID NO: 69060 - DNA, 75 bp, Homo sapiens
gacaacatgtcacccgcgctccaagacctgtcgcaacccgaccttcacggcatggtgcaactcccacctgcggaa

SEQ ID NO: 69061 - DNA, 100 bp, Homo sapiens
cagaaacacaagaccttcgtggaaaaatacgagaaacagatcaagcactttggtttttctattgggaaagctactgatcggatggatgctttcaggaaag

SEQ ID NO: 69062 - DNA, 100 bp, Homo sapiens
agttctctcaatacataaagaacagcgtaactccagacatgcaagggggccaggccaaccaccccacagcagccgtggtgacggagaagcagcagatgct

SEQ ID NO: 69063 - DNA, 100 bp, Homo sapiens
ttattattatagacgggcccaccagcttcggcctgaattattggaacaactttggaaagccagagctgaaaaaaagaaactacgcaaaacgttgcgggaa

SEQ ID NO: 69064 - DNA, 100 bp, Homo sapiens
gataccgaattcttatcacaaaggaggcaggtggaagtcatcataaagtttctgtttcacccgtcgtccatgttcgaggactctgtgaatctgtggtgga

SEQ ID NO: 69065 - DNA, 101 bp, Homo sapiens
cggacggaggcatcggaggcggctgcgagagtggcagaggagctggcggagagcggcctgcgggcgatcgggccgagttttccaagagataacttcaccaa

SEQ ID NO: 69066 - DNA, 100 bp, Homo sapiens
cttggcttcaggttctgatgatgcaaaaggtaattaataatgcttgtgctactcaagccatagtgagtgtgttactgaactgtacccaccaggatgtcca

SEQ ID NO: 69067 - DNA, 100 bp, Homo sapiens
gtgcgattcaatccaaacctttataatgatggcaaggttggaagtgtgaatcctgctgaaaacttccgtgttctagtgaaacagaagaaggccagctttg

SEQ ID NO: 69068 - DNA, 98 bp, Homo sapiens
tcctctctgtctgtgccatcgccaccaatggagccgtgcaggggggcggagcctactcttcctgtccacttccaacgaagcggtctataagatctttg

SEQ ID NO: 69069 - DNA, 80 bp, Homo sapiens
ggtcaccttcgacccccgctcggcgaatgacaacagagctgctcaaggcgggaactctgagctaagcagtggaggtttct

SEQ ID NO: 69070 - DNA, 74 bp, Homo sapiens
atgaggaatgtctttcctaccatctaaaatacgaaggtttctggctggggaccattgcaagctgcagaaaatga

SEQ ID NO: 69071 - DNA, 106 bp, Homo sapiens
ggatatcgacgtcgtgatccagaagtccagagctgaggactgcctgtttgcaggcggctatgagaggttttcctccgagtacccagaattctgttctaaaaccaag

SEQ ID NO: 69072 - DNA, 134 bp, Homo sapiens
ccacgcagttcaacaagggcccctcgtacgggctgtcggccgaggtcaagaaccgggtgagaagccctaccactgcaactgggacggctgcggctggaagtttgcgcgctcagacgagctcacgcgccactacc

SEQ ID NO: 69073 - DNA, 100 bp, Homo sapiens
cttggctggaacaagaagagtctaggacagtgcagagaggtgatttccaagcatggtaagtttagcgatggctgttcttgcggaaatctagttttgcgtt

SEQ ID NO: 69074 - DNA, 50 bp, Homo sapiens
aagagggaagacacgcggaaacagcacaacattctgaaattttttggtta

SEQ ID NO: 69075 - DNA, 123 bp, Homo sapiens
gccgaccaggcctggctcgcgcctctcccaggacccgcctggctgcgagatatctcatgatggagcagtccaagaagtcctccctcatggtggcccgcagtattctcaacaacaagctcatca

SEQ ID NO: 69076 - DNA, 75 bp, Homo sapiens
tgtcttctcttcctcctccaccgagtcgtgctctcgccccaacccgcgcgccagatcccagatgcagtgactggt

SEQ ID NO: 69077 - DNA, 83 bp, Homo sapiens
catctggtgctgggagtggtgtctctgcacgcagccgtgagcacagccgaggtaatagcctgcagctggtgttttgagaagcc

SEQ ID NO: 69078 - DNA, 51 bp, Homo sapiens
gtgtactgcctatgtgtgctgtgttacagaacatcctggacactgaaaaag

SEQ ID NO: 69079 - DNA, 75 bp, Homo sapiens
cacggacgatgaccgtcgctggaaggcgggcaaggagcccggcctgtttgatgtggtcatcattaacgacagcct

SEQ ID NO: 69080 - DNA, 74 bp, Homo sapiens
atgtgggaggatgttcagcagcgcggcagagtcatggggaccccccccaagacacatatgacccaccaccccat

SEQ ID NO: 69081 - DNA, 87 bp, Homo sapiens
cttagctgtgctcgcgctactctctctttctggcctggaggctatccagcagtccactgccagctggttcgactctttgcacgagga

SEQ ID NO: 69082 - DNA, 75 bp, Homo sapiens
ccagctggcccaagacggggtccccgagtggttccatggtgcaatctcaagagaatttcaagttattcaggacct

SEQ ID NO: 69083 - DNA, 75 bp, Homo sapiens
gaacctgtctgcagtcatgttgtataaccccgggatgtgtctagtccgaatgaagcaggaaggccggagtgggaa

SEQ ID NO: 69084 - DNA, 102 bp, Homo sapiens
tcaacgatgcagtctccattgttctgaccaaaaactggcgatggaatatgagaggagccctctggaaagaaaaggacagaccctgtgctttcatgaaagtga

SEQ ID NO: 69085 - DNA, 75 bp, Homo sapiens
gtccgtgtaagctcggcgacagccctagcagcgaggccaaaacaggtgcaggtggtaccattataacgaattttg

SEQ ID NO: 69086 - DNA, 98 bp, Homo sapiens
tggtggctgctgtggtatggaagatcaaacaaacttgttgggcttctcgacggagagagtgagaactcaacagaggcaaaagcagtagattctaacaa

SEQ ID NO: 69087 - DNA, 90 bp, Homo sapiens
cattgttttcagctaacagtaaccccagtgatcagggccaaagcggtcagtgagaaggaagtggactctggaaacgacatttatggcaac

SEQ ID NO: 69088 - DNA, 82 bp, Homo sapiens
tgatttaagcgtggagtgaccccttgcactatagacaaaatttcttgaggttggcaaaaagcagcctgctctggatgttctt

SEQ ID NO: 69089 - DNA, 75 bp, Homo sapiens
ccccggcggcggcggcggccttgggccggtggacgtacccagcgctcgatgttttgagagattacagaagaggag

SEQ ID NO: 69090 - DNA, 100 bp, Homo sapiens
tcttcctcccttcgctcgcaccatgccttgccaacattccactaacccccgagactcagcgggaccaggagcggcggattcggcgggagatcgccaacag

SEQ ID NO: 69091 - DNA, 105 bp, Homo sapiens
gcggatgattctggaactgggagaagatggctttaaagaatacacttcaaaactgataaatttcaaacggaagagagtggcagcatttagaaagaatctaattga

SEQ ID NO: 69092 - DNA, 75 bp, Homo sapiens
caaagaagtgctatctggaaagagagaatggcattgtgcccatcgtggagcctgagatcctccctgatggggacc

SEQ ID NO: 69093 - DNA, 75 bp, Homo sapiens
ggccccggcaaactccccatccagctccaggacagtcattttgtttactcattcagccctgttgcaggtcccaat

SEQ ID NO: 69094 - DNA, 50 bp, Homo sapiens
cccaagtagctgggattactggtgaccagcacccatgcagaaactaccta

SEQ ID NO: 69095 - DNA, 100 bp, Homo sapiens
tgaacagccgcgacacggcgggcaggaaatccaccccgctgcacttcgccgcagtttgatttgacagtttgagaggcacctcagagtttccttctttacc

SEQ ID NO: 69096 - DNA, 100 bp, Homo sapiens
gtccagcaactccagcctgtccggctcgtcggtgtcctccgccctggcctcccacgactacatcctgaagattgtgcccacggtttatgaggacaagagt

SEQ ID NO: 69097 - DNA, 75 bp, Homo sapiens
gcctgtgtcccacttgttcgcggcctatagcccaaagcagtgtccacaccagcaccagctacaactcagcagtca

SEQ ID NO: 69098 - DNA, 108 bp, Homo sapiens
taatactaactttcttcaaagctgcatcatcacaggttattcagcttctcaaggctggaaaagcgaaggaagtttcctacaatgcactagcctcacacataatctcag

SEQ ID NO: 69099 - DNA, 100 bp, Homo sapiens
cgagccgcgggcgtttactcttagcagaagctcacctagtttcagattgccaaaagacaaaacgggtaccacaaggattggtgacctcgcaccccaggac

SEQ ID NO: 69100 - DNA, 83 bp, Homo sapiens
cttgaaattaggcagactcttcaaaacgcactcattcagtttgctactagagaccctcctggatgacttccttctcacgtaca

SEQ ID NO: 69101 - DNA, 83 bp, Homo sapiens
gtccctggtctaggcggagaaccgcctgggcgatgagtgagaacctcgacaacgaggctcttgtcaggatggtgaagctgttc

SEQ ID NO: 69102 - DNA, 90 bp, Homo sapiens
ccgcgtgtcctcggagcgcggtccctgtattggtctcctgctcctagaggttttgtcttcagaattgaatatgtatgaagtacagagcaa

SEQ ID NO: 69103 - DNA, 50 bp, Homo sapiens
cgtttctcagttcctgcagagtggctgtggacagaagctggagcccagtc

SEQ ID NO: 69104 - DNA, 100 bp, Homo sapiens
agcggcaacagcagcagcagcggctccggcagcggtagcacgagtgcgggcagcagcagccccggggcccggagaggggagagaccattctaacacaggt

SEQ ID NO: 69105 - DNA, 82 bp, Homo sapiens
cactttcgccagcccgtgccgcgagcgcggcctgcaggagtcactcttgcaggactgatcctttgaaatactccagccatga

SEQ ID NO: 69106 - DNA, 73 bp, Homo sapiens
atagcgtctgagatcataggattactgatgctggaggatatctttgaccagctggccaagtcattggccccaa

SEQ ID NO: 69107 - DNA, 129 bp, Homo sapiens
ccgagatgtctcgctccgtggccttagctgtgctcgcgctactctctctttctggcctggaggctatccagcaactgcaaggtgtggaatatttctggcttctagtccaatgccaagtgtgtgacctgt

SEQ ID NO: 69108 - DNA, 100 bp, Homo sapiens
gaaagaaacaagttcttggcaagagaggcatcctccttgaagtatttggctgaggagttttcaatcccactgtttgcagacaaggtcccaaagacagcag

SEQ ID NO: 69109 - DNA, 83 bp, Homo sapiens
caaggaggtgaagcggccccagcactcccagctgcgcagggcctgccaggtggcgctcgcatgtagagcgcatgaagtacagg

SEQ ID NO: 69110 - DNA, 100 bp, Homo sapiens
caggcagaagagttccaggtgcttccctgcagatcctgcgcccccaaccaggtcaaagtggcagggttcacacctccaggaatggatagatcctctccag

SEQ ID NO: 69111 - DNA, 96 bp, Homo sapiens
tcccttagcacaggaggctctgaagtggagaacgaagtttaattggttggggtcagataagaagaggagtgacaatcaagccaacagtagatgatg

SEQ ID NO: 69112 - DNA, 75 bp, Homo sapiens
caaggactacccctttgccaggttcaataagagacggtgccgagacctcaaggccaagggaattttatttgtggg

SEQ ID NO: 69113 - DNA, 88 bp, Homo sapiens
ctgtacaccaatggaaagtgcgtcatcctaaggaacatcgacggacatcttcatcaccagcgtggacgccgccacgaccttcgaggag

SEQ ID NO: 69114 - DNA, 98 bp, Homo sapiens
gaaaggaattgttttggcctaggatcatccagattgagaggatccagaatccagatctctggaatagctaccaggcaaagaaaaaaactatggatgcc

SEQ ID NO: 69115 - DNA, 98 bp, Homo sapiens
ctatgaagccatcgtggacggagcaggttacgggcaggacttgagtggcttcggacagggcttctcagaccccagccagcagcctccttcctacgggg

SEQ ID NO: 69116 - DNA, 100 bp, Homo sapiens
tttacaatggccctgaccctgtttgatcttcataaacaatgaatggcatgattcagtgagtggcaagaaatttcctgtctttaatcctgcaactgaggag

SEQ ID NO: 69117 - DNA, 50 bp, Homo sapiens
cgcctctcaaggagggaccaatgagatatcagaaaaccaggactctgcag

SEQ ID NO: 69118 - DNA, 100 bp, Homo sapiens
gtaaataacgtttcctgcacgctctcctcttcagctggaaagcgctccctgttgtctgcattcaaaagagcattctattaaagctaccttaatttggcgc

SEQ ID NO: 69119 - DNA, 82 bp, Homo sapiens
gactgcgccgcccggacggcctgcagagcgctgccatcatgaggctcttctcaaccatctgtgagtccaggggaaccgtctc

SEQ ID NO: 69120 - DNA, 82 bp, Homo sapiens
gccctgtgggcctgggagctgcctctgaggaacacgccgcagaccctacataattgtcaagaaacagaagccagcagtcaca

SEQ ID NO: 69121 - DNA, 100 bp, Homo sapiens
gcggcggcggcgggcatcgcagtggcgcaggtacctcatggcagggccaggttccagcagtgaggaggatgaggcctctcacagcggtggcagcggagat

SEQ ID NO: 69122 - DNA, 117 bp, Homo sapiens
atcacttggagtgctgtcccttggaacaggaggagtaagattgagattggtttttcagcagcagatgctgtaacaggactgaaattggtagaagagggagtacccaaagaacattta

SEQ ID NO: 69123 - DNA, 82 bp, Homo sapiens
atttgattccacagctgggctatgtggcaacaagattacttccttaggatagattgccagaagtggagttactgggtcagag

SEQ ID NO: 69124 - DNA, 88 bp, Homo sapiens
tgcatgtgcacagccggctatagcctccggagtggccagcaggcctgcgaggggtgcagacatgaatggattaccaacaaaaggacca

SEQ ID NO: 69125 - DNA, 100 bp, Homo sapiens
ccccttgggcttatggatgacatttatcagttttctaagaacttctctcttcggcttgatgagttggaggagacttgcctcctcatgcggcagcagcacg

SEQ ID NO: 69126 - DNA, 96 bp, Homo sapiens
tgcccacctatcagagaagcagaaggcacagtgcctctgaccagcatcgtctgtaaagcacatttaactggacggtccccttcctttcatctctgg

SEQ ID NO: 69127 - DNA, 100 bp, Homo sapiens
cccggacatccgcgccacacgatcctggtgcacctgagccgtggaggggctgaagtccagatctttgctcctgacgtccctcagatgcacgtgattgacc

SEQ ID NO: 69128 - DNA, 75 bp, Homo sapiens
tcaagatgatttatggtaataaggtgactaataaaggtaccagaagaatatggctgcacaaataccagaatctga

SEQ ID NO: 69129 - DNA, 100 bp, Homo sapiens
cagagatcgagaacatcaagaagcaggagccggtgaaacctgaagaaggcagagatatggcaaacaggattggcgcttttgggtacatggagtgttcagc

SEQ ID NO: 69130 - DNA, 75 bp, Homo sapiens
cttggatccgcgggacaagaaaattcatgcggacatggatttgattgacatactttggaggcaagatatagatct

SEQ ID NO: 69131 - DNA, 76 bp, Homo sapiens
caaaatctttgatgtgcgcaatggagggcagatccttatcgccgacctcaggggaaaaatagtagtctagtcattc

SEQ ID NO: 69132 - DNA, 101 bp, Homo sapiens
accgtggggaaactaaaaacgcatctatctaacgtttaccctagcaaaccagatcgaagtagaatgtatgacagtttgaatatgcactctttggaaaattc

SEQ ID NO: 69133 - DNA, 90 bp, Homo sapiens
acttgtagacacagccgggcaaggaggaaataatgctggccatacagttgttgtggattctgtggaatatgattttcatctcttacccag

SEQ ID NO: 69134 - DNA, 80 bp, Homo sapiens
agatcttcacagcacagttcctgggaaggtggagccaccagcctctccttggtgtggaaacaggaagagaactagaactg

SEQ ID NO: 69135 - DNA, 83 bp, Homo sapiens
ctctaaaccttatagcctgcttatgggggaagtacctggagtagaacagaaaaattattatgtctgtgttcccttgggactca

SEQ ID NO: 69136 - DNA, 75 bp, Homo sapiens
gtccatttggggaaatccttcggatggtgaactcattagaagaattgcttccagaaacaaaattatgtatctgtg

SEQ ID NO: 69137 - DNA, 74 bp, Homo sapiens
aattctctacatttgtgaaagtcagtttctgaggaatttcatcaggaaaaaagtaatcctcttggaaagctgga

SEQ ID NO: 69138 - DNA, 87 bp, Homo sapiens
gtagcaagagtctttgaaataagcccatttgagccctggataacaagggataaagtggagcgggaaataatgaagatgtttcatttt

SEQ ID NO: 69139 - DNA, 82 bp, Homo sapiens
ccctgaaccatccctttgtcaccatgacacacttactcgattttccccacagcacacattcctggtccagaactttacacag

SEQ ID NO: 69140 - DNA, 95 bp, Homo sapiens
cggcgagacgcgcgtgtgtgagcgcgccggaccaagcgggcccagaagcgggcaccacactgtaactcgaggcatcaccaaaggcgtgaaggagg

SEQ ID NO: 69141 - DNA, 82 bp, Homo sapiens
ccgcgcgcccggccggcccggagcaccgagctcgcggcacggtaggagcttcctcatcgtcctggtctgcctcatcttcagc

SEQ ID NO: 69142 - DNA, 90 bp, Homo sapiens
cctagctgctggatattataatggtcagagtttaccagcagggattcacagagctccgacaagcagattctaaacatctatgacctgtgc

SEQ ID NO: 69143 - DNA, 83 bp, Homo sapiens
acttcgtcatgttcttcgcgccctggtggaaatgagttctcaacagtttcctcggttaggagccccttctaccgggctgagcc

SEQ ID NO: 69144 - DNA, 75 bp, Homo sapiens
ctcagcatgtgttcaaagtgtcattagtatcaggaatgaagcccgaaagatgagatcaatacaggaaaccctggg

SEQ ID NO: 69145 - DNA, 80 bp, Homo sapiens
ttgcttgcctgtgcgcgcgtgcgcggacatggcctcaaacgtgcctccggagccagcgtggtggccatagacaacaagat

SEQ ID NO: 69146 - DNA, 76 bp, Homo sapiens
tgaagaccatggatcacaaccggaaccgcaggcaatcccacagagtattgatgaggaaactgaagtttggagcgat

SEQ ID NO: 69147 - DNA, 75 bp, Homo sapiens
ggaatcagaaacctgaagttagaaaggctcaacgagaacaagctatcagatgtttccattcctgaaaaacccaag

SEQ ID NO: 69148 - DNA, 100 bp, Homo sapiens
tgccttctacctgctctccttcttctattacctgtacaggttcactaccttatggttctgtctgccaactgggcctatgtgaaagacgcctgccggatgc

SEQ ID NO: 69149 - DNA, 96 bp, Homo sapiens
tggataggagcaaccctgtaaaaccagccttagactatttttcaaacatgctcatctctcagagatctagaacttgcctaccaagtacatggcctt

SEQ ID NO: 69150 - DNA, 75 bp, Homo sapiens
agttcctgcttctgggacagctctactgacggaggagattgtatttcgttactaccacaaactcaggatgtctgt

SEQ ID NO: 69151 - DNA, 75 bp, Homo sapiens
tgaacatgtatttaaccaagttccaacaaaagaatgctgccgcaggcccagctactccagacttctatgctttgg

SEQ ID NO: 69152 - DNA, 100 bp, Homo sapiens
tctatgcagctttctcgggaggagatccaggctccaccttccgaccccatgactcatttcccaaatctggaaagtcagggcggcgtcggcgggagcggcg

SEQ ID NO: 69153 - DNA, 100 bp, Homo sapiens
ggagaatgtaactgaaagatacatggcttgcaaaaagtaaaccacgatcgttatgctgagtctgtgtgaaaatgtgtgaccctgccaaaggagcagctgg

SEQ ID NO: 69154 - DNA, 75 bp, Homo sapiens
gattcatttagagctgcggaacaggacgccctctgatagtgatcagcagctggactgtgccttggacctaatgag

SEQ ID NO: 69155 - DNA, 100 bp, Homo sapiens
ttaaagcagccggtgtaaatgttgagcctttttggcctggcttgtttgcaaaggtgaacctgccgctgctcaccctgagccagcccctgctgttgggcat

SEQ ID NO: 69156 - DNA, 104 bp, Homo sapiens
tactggagggccagagaaagcaagcttgaaacagagaggaacgggtcactttggtggaggaaattgggtctcggaagggtgctgacctggaccgggagaagaag

SEQ ID NO: 69157 - DNA, 90 bp, Homo sapiens
ctccggggaaagccgtggccccgagggcggatccgagggttacacatcattttggaatgactgtatatcatctggattacgtggctgtat

SEQ ID NO: 69158 - DNA, 100 bp, Homo sapiens
cccttcccgagcaaggagctggctgaagccacaaaaacattgctgcatagtcttgggactctggcccaggagggtgaagatgaagccatgtttgtagaat

SEQ ID NO: 69159 - DNA, 90 bp, Homo sapiens
gggggcctcagggcagcctgcctggaggttttaaatgcacagagagcaggatacaaggcagccatagttcacaatgttgattctgatgac

SEQ ID NO: 69160 - DNA, 51 bp, Homo sapiens
caccagccgcgcttctgtccgcctgcaggcctagtgatgaccactttgtac

SEQ ID NO: 69161 - DNA, 100 bp, Homo sapiens
tagaaagagacattgaacagttcacacaaattgtggctactaatttgccccctgaagatcaagatggctctggggatgactctgacaacttctccggctc

SEQ ID NO: 69162 - DNA, 98 bp, Homo sapiens
ggtcaccgtccagagccaaggtccagggggcaaggtcgtgctgagaaacaatggtccaagttcattcagcaaggcaatgctccatcttcagtggcctt

SEQ ID NO: 69163 - DNA, 100 bp, Homo sapiens
atcatgtattcccatctagtcgactacttcccagaatatgatggggggacacagcgattgccacgcgccattggaatgtccctggccaaggagctcatat

SEQ ID NO: 69164 - DNA, 75 bp, Homo sapiens
catgggtcagtcccacagctcttcagccaaatgcccattcgcaaaatctcaaaagccaaaagtctctgagaacga

SEQ ID NO: 69165 - DNA, 100 bp, Homo sapiens
tttttggctgttctgaagagtgttactgtgaacattcatgcacaaatttttatgtggagaatttcgctaaggagtttgtgatcagtgatcggaaggagct

SEQ ID NO: 69166 - DNA, 90 bp, Homo sapiens
gagactgctccagaagtggagaccagcagaactccaccagtggatatcaaagtattgcagagtgccttagcagccatccgacatgcccgc

SEQ ID NO: 69167 - DNA, 75 bp, Homo sapiens
cgcccccagatcggccagtccgagcgtgccggacacagccagcaggtttggatgcatctgctcagactacttctc

SEQ ID NO: 69168 - DNA, 73 bp, Homo sapiens
tccggcgccgaatcactgactggcacaggtgttgggactcctgaggaagaagagattttaaacaaaaaacgat

SEQ ID NO: 69169 - DNA, 75 bp, Homo sapiens
ttggagagctgctgaaacaggcggatctctacatttctgaagtgaggtcccagcttgaagagaaagaaaacaaga

SEQ ID NO: 69170 - DNA, 100 bp, Homo sapiens
aggaatgggacaagacccatctttatgcaaagccagcgttacagtaatgttccaggtgctggaaagtccctggttggtgtgactgctgcatgcactgtca

SEQ ID NO: 69171 - DNA, 100 bp, Homo sapiens
gcgaccgagggactgggagtcgttagtgaggacagagcgggatgccaccagcttgtccaaagggaagttccaggagctcctggtgggcatcgttgtggag

SEQ ID NO: 69172 - DNA, 97 bp, Homo sapiens
ttctcaagcaactattattttgccattaactggagacaggggaaggggaggagttacagcccggccagttggagttgtagtaccacgagggacgcca

SEQ ID NO: 69173 - DNA, 74 bp, Homo sapiens
gcggccgccactgacgggtagtccggcgcccacagcagacccagccgatgcccaatcctgtggcgtactacctg

SEQ ID NO: 69174 - DNA, 98 bp, Homo sapiens
tcctctacagaaggaagcacaaaaagggacagtcgagtgaagatgaagctggatgtagctcagttgatgaagaaagttacaagactctgaagcagcag

SEQ ID NO: 69175 - DNA, 89 bp, Homo sapiens
ggctaggtgcgcggatggaaatccaggggcccatcctgatggagctgcagacttaccgttaccacggacacagtatgagtgaccctgga

SEQ ID NO: 69176 - DNA, 50 bp, Homo sapiens
attcacagacatgcggaatttgagtctggctcttgctgattgaattcctt

SEQ ID NO: 69177 - DNA, 83 bp, Homo sapiens
cgacaagccgctggcagccgcggatctcaccgccgctcagggtcagcccaaggccaaccccactgtcactctgttcccgccct

SEQ ID NO: 69178 - DNA, 80 bp, Homo sapiens
ctggagtctcagctccaccgcctccgacagctgctggagcaggaacgcaagagagctctagaggcagagcggcaggcccg

SEQ ID NO: 69179 - DNA, 100 bp, Homo sapiens
tcaaatagagcagggcattgagcggcgttttctgaaagctccacttggtgcgttgtagaagacaagaactcaaaggtggcctggttgaaccgttctggca

SEQ ID NO: 69180 - DNA, 100 bp, Homo sapiens
gaggatgatgtttttggtgaaggtcacagatgtgacattgatgtgtccactgaagccatgtatgctgcaaccagacgagaagggtttaatgatgtggtga

SEQ ID NO: 69181 - DNA, 75 bp, Homo sapiens
aaagcgtttcctcgcttgcattcagctcctctgtgtttgccgcctgggtgatattatacccaacttctaatagct

SEQ ID NO: 69182 - DNA, 82 bp, Homo sapiens
gtcactttggaagaagtatatgcaggaaattttgtggaagactaccatgatcacatagctgaaatatcagctaagcttgtag

SEQ ID NO: 69183 - DNA, 82 bp, Homo sapiens
gccacgtgtggtctgtaagtagttgcagagtgggcaggatcttaagacccgataggtgcagaacccatctggacacggagac

SEQ ID NO: 69184 - DNA, 83 bp, Homo sapiens
aagtggaagctatgcaagcagagagctgctatcagctagctagatcattccatgttcagactggtcgaattgacaaatcttac

SEQ ID NO: 69185 - DNA, 98 bp, Homo sapiens
gagtggtgcatggtgtggcaacagacacagctccgaattgattccttctttagattagcacaacaggagaaagaagatgctaaacgtattaagagcca

SEQ ID NO: 69186 - DNA, 100 bp, Homo sapiens
gccagtacccgctgttctgcttcctgctgctctgtctcagcgccgcctccctgcttcttaacaggtgctgttacactaccaaactgtcagtgaacccgcc

SEQ ID NO: 69187 - DNA, 96 bp, Homo sapiens
ttggaaaaacactagagacagacggctggcagcttgaccaagaatgttccaatatttgtttgcactatggcctaccccactgtgccttgccctctc

SEQ ID NO: 69188 - DNA, 100 bp, Homo sapiens
aggaggccaccgaggacacctcggtggagaagctcaaggagcgctgcctcaagcacagtgtgaacatggctacgcctcttcattcccgtccatgccgagc

SEQ ID NO: 69189 - DNA, 75 bp, Homo sapiens
ggaggttccttcactgtgcgtgctgaccatgtgagaaagatcagtctaaagaaaaggagaagaaagtgaaaaaaa

SEQ ID NO: 69190 - DNA, 96 bp, Homo sapiens
tggaaaaacccggtactgtgcactattctttcccaggaaccattggataaggataaaggaggcagttcccatgttatacgcagcagatacttacgg

SEQ ID NO: 69191 - DNA, 95 bp, Homo sapiens
actctgctatgacccagattttggtgtgcggtcagaccccctgcagcagtgggagctggtgcccattgaggtattcgaggcacggcaggtgaagg

SEQ ID NO: 69192 - DNA, 100 bp, Homo sapiens
ggagccctgtccagagcctccagggccctgcgccttgctccttttgtctaccttcttctgatccagacagcacatcaggtccacccatctggccgggcag

SEQ ID NO: 69193 - DNA, 75 bp, Homo sapiens
agacaaagggagagggtgaccgacatcccaactagatgggacgcctatgcctgacagctacccaacaaccccatc

SEQ ID NO: 69194 - DNA, 100 bp, Homo sapiens
ccgacttcgatgatcgtgtgtcggatgaggagaagatgcgtctgttactagagtggagagtctaccttcgtctcacatgtgccacaaaggatggcatggc

SEQ ID NO: 69195 - DNA, 100 bp, Homo sapiens
cggccgccatgtccacgttcaggcaggaggacgtggaggaccattatgagatgggggaggagctgggcagctagaagaaccacacctcttttggaatata

SEQ ID NO: 69196 - DNA, 50 bp, Homo sapiens
ataactcggaggctgcagcaggaacggagacaatgcagatcttcgtgaag

SEQ ID NO: 69197 - DNA, 98 bp, Homo sapiens
gagtacctgaaccggcacctgcacacctggatccaggataacggaggctgggatctatttggaaagtcagacccatacctggaattccacaagcagac

SEQ ID NO: 69198 - DNA, 75 bp, Homo sapiens
gctgcggcgcggggaccgctgtgctctcggacctcagcagccatgtcgaagccccatagtgaagccgggactgcc

SEQ ID NO: 69199 - DNA, 100 bp, Homo sapiens
cggatatttaccaggtgtcctacttctcatttaagctactcaagaaagagtgcccaattccaaatgtacaggaccgccgggagagcctgcccacctcccc

SEQ ID NO: 69200 - DNA, 101 bp, Homo sapiens
ggagagcctggagctggccatccggaaagagatggtggatgcttccaaaagcatcgaagctgtccatgaggacatccgcgtgctctctgaggacgccatcc

SEQ ID NO: 69201 - DNA, 50 bp, Homo sapiens
tatgaagacaacaagcaattttttgacgtgaacgatcaagagagagggac

SEQ ID NO: 69202 - DNA, 88 bp, Homo sapiens
catctgcccctgccatgaccactgtggagaacaaatccaagattagcacaggcgaggattaaatccaccacacagggtgaaatctatc

SEQ ID NO: 69203 - DNA, 100 bp, Homo sapiens
ttttgcacttcagttcacatactatttatggcacgttcacgtccatgttcttcccaggaaggctggagactttcacaggaatgacagcatctatgaggag

SEQ ID NO: 69204 - DNA, 75 bp, Homo sapiens
ttcgccgatggggccttccccgagagatagatgattttccctcttatttccaccagtttggcttttcagggaagg

SEQ ID NO: 69205 - DNA, 100 bp, Homo sapiens
cagattattagcaatattatatagtatcgtggacagcagagttgctccaacagcaaatattttttcccagaaccaagatcattatgcagttcttggactt

SEQ ID NO: 69206 - DNA, 73 bp, Homo sapiens
ttagacttgtgcaaccagggcaactctgaatctctaggactgcgtagtaaagtgctgaggaaaattgaagagc

SEQ ID NO: 69207 - DNA, 75 bp, Homo sapiens
aaggccaaaaatgtgcatactcacagagttagagagagggatggtggttgtcctttgtggagggtcttctcgaat

SEQ ID NO: 69208 - DNA, 75 bp, Homo sapiens
gctttgttcagctgcagcatggagagatagataaacgggatggcccaacagcaggccttgaggttccgaggtccg

SEQ ID NO: 69209 - DNA, 100 bp, Homo sapiens
ggagaaaaaggtttgaggagagaaggctatggagttactagtagagaaagcaatcagcagtgcttctagccctcagagccctggggatgcactgagaaga

SEQ ID NO: 69210 - DNA, 100 bp, Homo sapiens
tctgacccgcggttttgcctcttgttccgtggcctccttggcccgtgaagttcatgaaccagagcttcatctttatgacggttgtgtattttggtcccct

SEQ ID NO: 69211 - DNA, 88 bp, Homo sapiens
tgagcagacgcatgcgatgtatgagtgcctggaagagctgggatgtctggttgagtcctatggcatgaatgtttgccaaccaacccca

SEQ ID NO: 69212 - DNA, 75 bp, Homo sapiens
acggcacctcgggggccacactgcaggcctccgcgctcagtggtcatagcaaatgacagaagtcccttggtgggc

SEQ ID NO: 69213 - DNA, 83 bp, Homo sapiens
ctagatcacagtggggctctaggagcagaattacctgattctaggacaaaggaaattgaagccattcatgcaatcttgagatc

SEQ ID NO: 69214 - DNA, 100 bp, Homo sapiens
ggaaaatggcggacgggaaggcgggagacgagaagcctgaaaagtcgcagcgagctggagccgccggagatgacttcctgaagccacagatcatcaccca

SEQ ID NO: 69215 - DNA, 83 bp, Homo sapiens
cgaggccgggtacctgggctgggatccggagcaagcgggcgagggcagcgccctaagcagatgagaatatccccgagttggcg

SEQ ID NO: 69216 - DNA, 100 bp, Homo sapiens
atttgcaaagcaggattctatcatcctggagtcttaccagtgaacaactttcggagaccacagaatactggccatggtgcaacttctggttttggcagtg

SEQ ID NO: 69217 - DNA, 100 bp, Homo sapiens
cagcaacagaggcgcagcctcaaggaggaggagtgtccagcaggaaccctggagccccactggtcgggactcctgtggacagccatgctcatctctctgg

SEQ ID NO: 69218 - DNA, 50 bp, Homo sapiens
cagcagatgcttcatggtcttcagtatcagcagcgtcgccagcaggagaa

SEQ ID NO: 69219 - DNA, 75 bp, Homo sapiens
gcgctgccgccgctctgaggagttaaagatttgtgggcagattcaagtctcgcaaagagcgggaagctgagcttg

SEQ ID NO: 69220 - DNA, 80 bp, Homo sapiens
cagccttctatgatccaagaagtctggggaataccttggcaagcagctccagtccgagcagccccagaccgctgccgccc

SEQ ID NO: 69221 - DNA, 99 bp, Homo sapiens
gcagttggaggtgacgttggacactacagcttggccagagtggtagaaatgttgttgcatagagatccgtgctcagctcacagagcagatgaaatgcct

SEQ ID NO: 69222 - DNA, 100 bp, Homo sapiens
cgatgagcctcccattctcccagacatggggaacagggtcacagctctcacccaggtgatcgtgcagtccggccgccaccccacagtgctgcagaagctc

SEQ ID NO: 69223 - DNA, 100 bp, Homo sapiens
ggagtcaggtacggggagcggctttgagtggaaccgtgtgaaagagccgggtcccacaggatcacatgttgaatggtgtaaacagcttatagctgctaca

SEQ ID NO: 69224 - DNA, 82 bp, Homo sapiens
gccaggagtcatgagcgacagcggcgagcagaactacggcgagcggccttatgccagcctggaccatcttggaggcagtgta

SEQ ID NO: 69225 - DNA, 98 bp, Homo sapiens
ccggcccccgagcacgccggccccgcgcgcgcctcgaggccgagtcaaggttctgattggaactgattccatcccgaacctgcataagctggagcagg

SEQ ID NO: 69226 - DNA, 98 bp, Homo sapiens
ccggacatggtggtgtcccacctttttgggaagttgggccatatggtgctcttcccagtctggttcctgtacagtctgctcatgaagctgttccagcg

SEQ ID NO: 69227 - DNA, 80 bp, Homo sapiens
tgaaggggtctagatgtaaatgtcagtggaaaggagagctaccatcactaaggcccagagcatgattcccatcaatgagc

SEQ ID NO: 69228 - DNA, 82 bp, Homo sapiens
ctttgccgatccgccgcccgtccacacccgccgccaggtacactgaggaggggacggctccgtcttcacattgtgcacagat

SEQ ID NO: 69229 - DNA, 75 bp, Homo sapiens
gctgctactgcctgggggctgaggatgacaaaaaagccttcatagatcatgcatgccccgcggtccagggacagg

SEQ ID NO: 69230 - DNA, 80 bp, Homo sapiens
actggtttcgtggcctgaccaaggacctccaagacaagagatgggaatgaggtgggaggtggaagaagggagaagaaagg

SEQ ID NO: 69231 - DNA, 101 bp, Homo sapiens
ctagcttcatgttcctggtgtttgacctgtggtcgagatatccagtctgacggagcacttgctgacggaatgtgacaaaaaagacgggtttggaaagtgtt

SEQ ID NO: 69232 - DNA, 90 bp, Homo sapiens
gagatgactgctgagctccgagaggtgaacagagcccctggttggtcaaagaaaaagtgatgtatgaaaaagaggcaaaacaacaagaag

SEQ ID NO: 69233 - DNA, 74 bp, Homo sapiens
ttcaagtagtcctgtgctcaacattgcttatcgatttgaaagaagccaacactaaaccacaaatatacaacaag

SEQ ID NO: 69234 - DNA, 100 bp, Homo sapiens
aaaccacagacacggccagtgtggaaagaccacagcaagattctttcattcgtctcctcctagcctgggggaccaggctcgaactgaccctggacatcaa

SEQ ID NO: 69235 - DNA, 141 bp, Homo sapiens
agaagaggattggaggtgtcagtgttaaaggaacctctacaacgaaggtgaagccacggaagataaggccgaatacatcaagcaatggtaacatctttaaatgaagataatgaaagtgtaactgttgaatggatagaaaat

SEQ ID NO: 69236 - DNA, 88 bp, Homo sapiens
actgagtgagtcacctgttttcacatgacgacagagatgatggtgtggattattgggccaaaagaggaagaggtcgtggtacttttca

SEQ ID NO: 69237 - DNA, 75 bp, Homo sapiens
gttttagaggataccttggtcccagagtcatcatgaaggctatcaatatgacggctgaagaaacagtgaatgtaa

SEQ ID NO: 69238 - DNA, 82 bp, Homo sapiens
cagcggcaggctcaggtgcagccgctggcccagctgagagccagcctggaggttacccagcagcaggccacccaggccgaag

SEQ ID NO: 69239 - DNA, 75 bp, Homo sapiens
caggacgccgggcactgctgatgctgctttcgctgggggtcgggaactacaagcggactgtgaagcggatcgacg

SEQ ID NO: 69240 - DNA, 75 bp, Homo sapiens
aacatgcgcttttgacacattggagtcgtccctcatggaccttgctgacgtcttcacggccccagctcctgcccc

SEQ ID NO: 69241 - DNA, 100 bp, Homo sapiens
gggctctcctgatactaacagttttacgatttaaaacttcgccagaattttggatatcaaagtattgcagagtgccttagcagccatccgacatgcccgc

SEQ ID NO: 69242 - DNA, 100 bp, Homo sapiens
cgccgcggggagcgcgggcgtccggggctggagtcgcgcagggtaattttgggagtgtggagatgtgccggtatgaccctctacaggacaacactgggga

SEQ ID NO: 69243 - DNA, 82 bp, Homo sapiens
gagcggcgccgagaggccgtgcgggacgcgggcgccaggaccggccgaacgcagaggaacttgctactaccagcaccatgcc

SEQ ID NO: 69244 - DNA, 50 bp, Homo sapiens
gcttctgatttggactgttaaatagatggtatacctcaagtttactattt

SEQ ID NO: 69245 - DNA, 100 bp, Homo sapiens
atggcctgtgccatcagtatcttaatgaaggttctctcaagtagtgctgccagtagtaccatcacagcactgtcacctggaggggcacttatgcagggag

SEQ ID NO: 69246 - DNA, 100 bp, Homo sapiens
tgggacagtacgacttcgtggactaccatttggttgcagcaaagaggaaatagttcagttctttcaagaatacctaaaggggcaggacctggatgctatc

SEQ ID NO: 69247 - DNA, 75 bp, Homo sapiens
caagcgggagaccaggagctcctccaccaggccaaagacttcggcaacccctctgccatgaaccagtccatccca

SEQ ID NO: 69248 - DNA, 75 bp, Homo sapiens
tgttgtgttcctggcttccctctggatgctgacagaaacaaggataattcgtgtccagtccccggatggagtgaa

SEQ ID NO: 69249 - DNA, 82 bp, Homo sapiens
aatagaggatgcccgctggttcactagagaacagctaagaaacctttccagcttggacctacgtcatatcactgaactggat

SEQ ID NO: 69250 - DNA, 100 bp, Homo sapiens
ggcggctgggcctggaagcagagctgcagaaggatgccctgcagtggtctcgccatccagctacagtggagggagaggagccagaggacacggctgatgt

SEQ ID NO: 69251 - DNA, 75 bp, Homo sapiens
aacccacccggcccaactcactattttcagctgaactctcatctctcaacactggcaaatattcataagatctac

SEQ ID NO: 69252 - DNA, 82 bp, Homo sapiens
gaagatccggcgcggggcacaggatccggagctggagcccccaggttattcagcttctcaaggctggaaaagcgaaggaagt

SEQ ID NO: 69253 - DNA, 90 bp, Homo sapiens
ccccggggagctcggagcgcgtgcacgcgtggcagacggagaaggccagtgcccaggttgggggccgtcccgctcctaaggcaggaagat

SEQ ID NO: 69254 - DNA, 101 bp, Homo sapiens
accggcgacagcagccaggagtcatgagcgacagcggcgagcagaactacggcgagcgggaagagctgaagagagacctgaaaattaagaaagaaaaagac

SEQ ID NO: 69255 - DNA, 101 bp, Homo sapiens
caggaccgtccaggcgtagcaagtcccctgcctccaccagctcaggattgtcaccagacctgcaatctatggagcagattcggagaattatgagacctact

SEQ ID NO: 69256 - DNA, 100 bp, Homo sapiens
tgtgatttcagtggaataaatggcgtccaaagtcacagatgctatagtctggtatcaaaagaaggtccctccttgtggtccatttctgggcaccatgggc

SEQ ID NO: 69257 - DNA, 75 bp, Homo sapiens
agtgctcgactgtgaggatggagtggctgcaaacaaaaagaataatccagaatggctactctgatctatgttgat

SEQ ID NO: 69258 - DNA, 82 bp, Homo sapiens
tgaagacgtctgcgtgagaatagagaccaccgagattttgcaagaacgaggctcaaggatgtgagggacacagtattgacag

SEQ ID NO: 69259 - DNA, 82 bp, Homo sapiens
cctacacagcctgctgaagaagcagcacgaaagagagaggtccgtctaatgaagaacaggtttggcaaacatcgaaaagatg

SEQ ID NO: 69260 - DNA, 95 bp, Homo sapiens
gcaagttggataaaaggaggacctctcgccaagggccccaatgagtggcacacagtctactatcaccgacaggcaactcgagatgtggtgctgag

SEQ ID NO: 69261 - DNA, 90 bp, Homo sapiens
ctccggggacccttccgtatctgcctaggcattttgctgtctcctcctaatacgattccttctggaaccccaacgccttcgagacggatt

SEQ ID NO: 69262 - DNA, 96 bp, Homo sapiens
aatgcgaagtctgtggtttatcattgtaatcagcttcttaccaaatacagaagtaaaagaagccttgagccctataaaatttaacagatggggtct

SEQ ID NO: 69263 - DNA, 82 bp, Homo sapiens
ggggtcggcgccgagtgggaggatggcggaaggctgaaatctctttaatgatggagggaagcaggcagacgcgagtgtctcg

SEQ ID NO: 69264 - DNA, 83 bp, Homo sapiens
caggcagagtgctgatgtgaaaaataccacgacaaaaccaccctaatttttggagcatatgcaactcatcctttcaagttcag

SEQ ID NO: 69265 - DNA, 100 bp, Homo sapiens
ccgaagcctaaattccaggaggatacactctgtgcagttttagagagagacacactcagtattcgagaaagtcgactttttggagctgttgtacgctggg

SEQ ID NO: 69266 - DNA, 100 bp, Homo sapiens
tcaagtgcaacaagtcccacttccgaaaccacaagtttgccgatgtgaatcacaagcctttgagaacagcctgagccttcagccctcacagatgcccagc

SEQ ID NO: 69267 - DNA, 82 bp, Homo sapiens
caggactcgggccggagcgtggccggacccccacccgccgaggggcccagggaggacgcgccctgggcgctgcctatggcac

SEQ ID NO: 69268 - DNA, 90 bp, Homo sapiens
gagacaccaccccctcctcacgcttcccagactcagtctttgttgttgaatgttgggtcacgaagatctcaacctggccaaagaagagaa

SEQ ID NO: 69269 - DNA, 100 bp, Homo sapiens
tttgttttcaacattttttctgaatttatgctaaggaaagacatgaaggccaaagttccatctcccagggaatggaagttggatacactttgtgacttgt

SEQ ID NO: 69270 - DNA, 82 bp, Homo sapiens
ctccgcggcccgaggtctccgcccgcaccatgcggctgggcaggcgccatgtcagaaccggctggggatgtccgtcagaacc

SEQ ID NO: 69271 - DNA, 97 bp, Homo sapiens
tgaggttgctcctcccggggcccttcccgggcaagtctcagaccagtatccttcaggggttctcttactctgatttgcggaaatttggcatcgtctt

SEQ ID NO: 69272 - DNA, 101 bp, Homo sapiens
cagtggagtcttggaggagccagtacagaattatatccagatcgagagacagaagattctgaaagggttcaatgaaatgagagtcatcttggacaatgagg

SEQ ID NO: 69273 - DNA, 100 bp, Homo sapiens
atcaacccagagctattgccttagatccttcaagtggtcagccataatggcaggtgaagaaattaatgaagactatccagtagaaattcacgagtatttg

SEQ ID NO: 69274 - DNA, 100 bp, Homo sapiens
gcaagatttaaaaactatgcagaattgactgtcatgaaaacattggaagcacataaagatcctcataaggaggtaccggtggcctcgtggtttgacaaca

SEQ ID NO: 69275 - DNA, 100 bp, Homo sapiens
attcaggccactcttcgttttccatgtactgcatgctgtttgtggcagatggaatgggaaacctgaggatcacagaaaaaggtctaaagctagaaggaga

SEQ ID NO: 69276 - DNA, 97 bp, Homo sapiens
attaagattagagtcaagttgtgtgattaagacaggcttcaaccactcccagaagacgtccttcactcccaaaatgaggcttttctgaaacggcgag

SEQ ID NO: 69277 - DNA, 100 bp, Homo sapiens
ggaagaggatgaattcatttcgcttatctggcaaatgtgtaatctgagtaatagaggaacacatgattctgtgcagatttgcagaccagacagctgtcca

SEQ ID NO: 69278 - DNA, 100 bp, Homo sapiens
aattctttgccaaggcacgggctggctctgtgcggctcatcaaggttgtgattgaggacgtttaatggatcgagaagtggcgttgcttgctgaaatggac

SEQ ID NO: 69279 - DNA, 105 bp, Homo sapiens
agacaagaaatgcaggaagttcagagttctaggagtggaagaggaggctattgagggcacctacattgacaagaaatgccccttcactggtaatgtgtccattcg

SEQ ID NO: 69280 - DNA, 98 bp, Homo sapiens
gcgtgctccacaaatatttacagtcggaggagtactcggtgaaatcctgtcctgaagactgtaaggtggtgagagcggctgaggaggctgcgtccaca

SEQ ID NO: 69281 - DNA, 100 bp, Homo sapiens
gcggcggcgattgggtaccgaggaagagagaagggcacagttacctaagtatcaacgtaatcttcctcggccaggacaggcccccatcggtaatccacca

SEQ ID NO: 69282 - DNA, 83 bp, Homo sapiens
ggaacagtgccaagttagatgccgattacccacttcgagtcctttattgtggaggctcagttagctctagaggccattctttt

SEQ ID NO: 69283 - DNA, 51 bp, Homo sapiens
gcttcctttgccgctctgcatcatgttggtggtcttcaagctgacagagaa

SEQ ID NO: 69284 - DNA, 59 bp, Homo sapiens
ttagagagatatatgggccacatgcagtttctctcagggtcgacatgttaaaacgggtc

SEQ ID NO: 69285 - DNA, 75 bp, Homo sapiens
agtgacaggaaggtgaggcctcgtcccacctgccggttcttcatgaaaggtataccgctgggccgaccactcaag

SEQ ID NO: 69286 - DNA, 50 bp, Homo sapiens
tgatgtggatgatgccaaagttttattagattcatgttacatgtaaagct

SEQ ID NO: 69287 - DNA, 75 bp, Homo sapiens
tgacctcctgatgcctcacttgcggttcaagctctacgttcgtgacatcaaacctcctgttgggccatttccgag

SEQ ID NO: 69288 - DNA, 82 bp, Homo sapiens
cccaggagtcatcggacgccagaatctggtgaggatccagagaggcctaatggagaactacgatgacccgcacaaaacccct

SEQ ID NO: 69289 - DNA, 90 bp, Homo sapiens
attacctgcacaacgtggttttcgtccccagaaaaatggctacaaacttcctagcacatgagaagatctggttcgacaagttcaaatatg

SEQ ID NO: 69290 - DNA, 100 bp, Homo sapiens
gagggggcgttccccagaccatggcatctacggaagggtcaacggcagagacttatccagagcaactcatgaccaggctgtggaagctttcaagacagcc

SEQ ID NO: 69291 - DNA, 100 bp, Homo sapiens
ccaccactgtttctcatcatcaccaaacgaattttctcccaaactggttggcttgactggcacgagagaagaggtcgatcaagtggccagagcatacaga

SEQ ID NO: 69292 - DNA, 82 bp, Homo sapiens
ggctggtgtcctggggaccgcatggtgtaaacaggaacatcgataagtagtgtaaaaacttgcacaatgaaatccgaagcca

SEQ ID NO: 69293 - DNA, 96 bp, Homo sapiens
tacaagacaagtgtacaccaaatgtgaaggtgatgaggttgaagatctctatgagcttttgaaacttgttaaggttccagcaacagatagaaatgc

SEQ ID NO: 69294 - DNA, 90 bp, Homo sapiens
taatattggccaatcatcaagacaagccagcagctcgctcagtacaagagcttgcattgaaaggctctagttacagtggacttcttgaac

SEQ ID NO: 69295 - DNA, 98 bp, Homo sapiens
gttaccttgggtagtacctaataatcagggcattgcacaagaggaggcaactttggctttggggattcacgtggtggcggtggaaatttcggaccagg

SEQ ID NO: 69296 - DNA, 100 bp, Homo sapiens
acagaaggcgtctcatggcgttggaataccggctctcagcggctaaatgacctccaccttcaacccccgagaatgtaaactgtccaagcaagaagggcaa

SEQ ID NO: 69297 - DNA, 82 bp, Homo sapiens
ttcgggccggctgtcctggcgcgtgtactaatggtcacttgatgtgcgctggctgttttatccacctactagcagatgcccg

SEQ ID NO: 69298 - DNA, 98 bp, Homo sapiens
aatcagataacttgtactggagagaaatcctacaagtgtgtttgtcagaggaatggctgtgaatggatgcctggaaggaccatcctctaattttctca

SEQ ID NO: 69299 - DNA, 75 bp, Homo sapiens
cgcgtctctctgctgcggcgcggggaccgctgtgctctcgcaacctacagctggagtcgagagtctggggcaatg

SEQ ID NO: 69300 - DNA, 75 bp, Homo sapiens
gaagaaatgaggacatatcagtatcggtcagaacaaaatctgcttcatcccaggcatggtaggacctatattaga

SEQ ID NO: 69301 - DNA, 100 bp, Homo sapiens
tgccactgcgagcctggctggggagggcccgactgctccagcgaccaagatcactccatggatgaaatgacagctgtggtgaaaattgaaaaaggagttg

SEQ ID NO: 69302 - DNA, 75 bp, Homo sapiens
aaaggagctgcttcccaataaggaaacagtatgccttgcaatagctcattattcccagccaacagacctccagct

SEQ ID NO: 69303 - DNA, 100 bp, Homo sapiens
atgtgtgccacctgtgccatccaaactgcacctacggggtctcccttgatctgagaatggctacctctcgatatgagccagtggctgaaattggtgtcgg

SEQ ID NO: 69304 - DNA, 83 bp, Homo sapiens
cgtgctgaagccgctggagtacagccagtatgaagtgcgcggaactgtggctgcaccatctgtcttcatcttcccgccatctg

SEQ ID NO: 69305 - DNA, 101 bp, Homo sapiens
aagatttgtaaagaaaactcttaggtgatgatgaacagtctacacagatggctgcaagttgggaagatgataaagttacagaagcatcttcaaacagtttt

SEQ ID NO: 69306 - DNA, 101 bp, Homo sapiens
agaatatttcacaaagaatttccttaagagctggactgggaaggatatggagtaatagtactaaatcccaatgaaaactatattgaagtagaaaagccgaa

SEQ ID NO: 69307 - DNA, 83 bp, Homo sapiens
gatcgccgcggggcagttcgggccggctgtcctggcgcggtgccagaaccctgtggagcatcatgaactgggaagagtagctg

SEQ ID NO: 69308 - DNA, 52 bp, Homo sapiens
gcgccgacggctgctcaaacatcaggtgtgatttgttcatccaggagggggc

SEQ ID NO: 69309 - DNA, 100 bp, Homo sapiens
agctggtgtcctgcgcagactgtggacgctctggactatctgctgccaaactcttgactgaatatggcgttagtgttttggttttagaagctcgggacag

SEQ ID NO: 69310 - DNA, 118 bp, Homo sapiens
ggaatggagacgccattggatgttttgtccagggcagcatctctggtgcatgctgatgacgaaaaacgagcaatttacagcaatgagggatttatacatgaaaaatggacaaggattt

SEQ ID NO: 69311 - DNA, 100 bp, Homo sapiens
gattcgtggcgccacaagctcattcactgtgtagccatcatcgtctacagactgccgtggacctggaaatgcagcaagctcctgatgaaatccatccatg

SEQ ID NO: 69312 - DNA, 90 bp, Homo sapiens
tctgtccacgatagtgccaggcctatgttggaggcagtataactccaactgtggaactgaatgggcttgctatgaaaaggggagagcctg

SEQ ID NO: 69313 - DNA, 73 bp, Homo sapiens
ttccaccgctctgaaaccgatttctaacagagaggtgtgggcccatcgctggatggatctgtcagaacacggc

SEQ ID NO: 69314 - DNA, 100 bp, Homo sapiens
aaattcgcagaatatggggaaattaaaaacattcatctcaacctcgacaggcgaacaggatatctgaaggggttgatatagaagcagctcgaaaggaaga

SEQ ID NO: 69315 - DNA, 100 bp, Homo sapiens
ctaagatggcgactgtcgaaccgagagaaaaggaacagttccgtaagctctttattggtggcttaagctttgaaaccacagaagaaagtttgaggaacta

SEQ ID NO: 69316 - DNA, 100 bp, Homo sapiens
ctggcatggatggcggcatgagtatctgggatgtgaaggtaatgattgatgaatccctttcatccgatgaccctgattcatatgtgacattgacggttgt

SEQ ID NO: 69317 - DNA, 75 bp, Homo sapiens
ttgactacaattctcaacaacaggtggaggaagctaaacaagaattacaggaagttgttgaattcttgaaaaatc

SEQ ID NO: 69318 - DNA, 100 bp, Homo sapiens
tgggagtgacccgattttccaggtccctgtgcgttttattgcgacctgccggtgggaactttgtctccgagtcggagcagcatggagcggcggagcgaga

SEQ ID NO: 69319 - DNA, 95 bp, Homo sapiens
cctcaccgagtacgaagcgggcgtttgcgaaggctcacaggcagaaggaattttccttgtcttggatgagacttttgacttggacttttgggtta

SEQ ID NO: 69320 - DNA, 82 bp, Homo sapiens
ctggatcatggctgccgcgccgccgctacgggaccgcctgagctttctacaccgggtgcatctgcagacgcagcaggaggtg

SEQ ID NO: 69321 - DNA, 100 bp, Homo sapiens
ccggcagctggagatgtccgagcccaaggcaattgatcccaagttgtcgacgaccgacagggtggtgaaaggatagagggaggaatcagcagcttggaaa

SEQ ID NO: 69322 - DNA, 100 bp, Homo sapiens
ctgccaccctggaggacagggcacaacaaccgtttctgattgggggcaccaacttcgtggcacctccaacagcagcagtaccagccaatcttggagcacc

SEQ ID NO: 69323 - DNA, 96 bp, Homo sapiens
cgctgtcttcagtggcacagtggagcagctctgaagatgcaaagcagggaaaaggggtcgaggccggtcctgacctgttacaatgaagactgactt

SEQ ID NO: 69324 - DNA, 101 bp, Homo sapiens
tggtaacagcacacgagagcggctgctgtctgcgcttgaggacttggaggtcctgtctaggttttgatgatgatggttcagaatttcatgaacatatattt

SEQ ID NO: 69325 - DNA, 100 bp, Homo sapiens
cccaaaggcagcaaaaacaagagtccctctaaagcagctcaaaaggtttggaaggtttgcagttgctgctcttcagtccaaagtagaacagtatgagcgt

SEQ ID NO: 69326 - DNA, 100 bp, Homo sapiens
ggtctccagcctcaatgaggtgaagatttacagcctcagctgcggcaagtcccttcctgaggaaatctactttcttcaatgtgttaaccaatagtcaggc

SEQ ID NO: 69327 - DNA, 74 bp, Homo sapiens
ctacagaaacaaaatgtcaacaaattgatggacatccctttaaaagtagttggaatgttcccaagtagaggtga

SEQ ID NO: 69328 - DNA, 100 bp, Homo sapiens
tgtaggattatggactggccagagcccacacaagtttacagtttctggtgatgaacgagatgaagtctggcaaactgatgacctaatagagagaatccag

SEQ ID NO: 69329 - DNA, 75 bp, Homo sapiens
ttgcgacggaaatgtgtcatcgaaagccaggctaccaagcagtttctcgaagagattaacaagtggacagttcag

SEQ ID NO: 69330 - DNA, 100 bp, Homo sapiens
acctgcgcaggaagtcgcgctccaagagctccagcctgagccggctcgagatcaatgaactgagccatgttcaaatccctgttatgttgatgccagatga

SEQ ID NO: 69331 - DNA, 100 bp, Homo sapiens
gtcgcttcaaaaagtgtctgtctgttggaatgtcaagagatgggtggaagatgtctatggatgtgacattcctggggacgggtgcagcatacccatctcc

SEQ ID NO: 69332 - DNA, 101 bp, Homo sapiens
gtgggagtcgaagcgagggtctgaagttcacgactactagaaggggaggggagtggaaaggctctcagtgaaaaaggttacattgattacccacctagtac

SEQ ID NO: 69333 - DNA, 78 bp, Homo sapiens
caagatcttcttggacccggagaagaggatttttctgtgaccatgaaagagagaaataaagaatgatccatgatttct

SEQ ID NO: 69334 - DNA, 100 bp, Homo sapiens
acagctgctgcttgtgctgccatgtccgcaccggcaccatcctgctcggcgtctggtatctgggaagcgtgacagcaatgacagtgttttttcccctgga

SEQ ID NO: 69335 - DNA, 98 bp, Homo sapiens
cgtgatcttcacagtgctcctgcagtctctctgtgtggctgtaacttacgtgtactttaccaacgagctgaagcaggaagaagagtgacaggaccacc

SEQ ID NO: 69336 - DNA, 83 bp, Homo sapiens
gcgacaagccgctggcagccgcggatctcaccgccgctcagggcaaggcagtttccccggcatgaaccagagtggacttatgg

SEQ ID NO: 69337 - DNA, 100 bp, Homo sapiens
ggagaatggagacagtgtgaccagtcctgagaacatggctccaggaaagggctctgtttgtgaatagcacaatggaagaagctggactttgtgggttaag

SEQ ID NO: 69338 - DNA, 100 bp, Homo sapiens
agtcggcactgctactgcgaagacagctggcagtttttccactactcccaagggcaagtgtaccttgggaattatccaccatttaaagacagaatcagct

SEQ ID NO: 69339 - DNA, 50 bp, Homo sapiens
tcaatggaattgtcaagtacaggcgatgaggagcatgatcaggaaggccg

SEQ ID NO: 69340 - DNA, 75 bp, Homo sapiens
cgcagcgtgtcaggcggagagacccgccgccaggtactccaaagattcaggtttactcacgtcatccagcagaga

SEQ ID NO: 69341 - DNA, 99 bp, Homo sapiens
ccagagcttgtgtagcgtcagatccttgagtgataaaggagtagagggtccatgccttcctagaacagtggggtcttattaactaccaggtggatgctg

SEQ ID NO: 69342 - DNA, 82 bp, Homo sapiens
ggttaattcaacagttcaccaccattaccgatcgccaaactgaggcagcaactacaacgcagtaaacagagtagtcgtcaca

SEQ ID NO: 69343 - DNA, 100 bp, Homo sapiens
gaaaatgcactcggatgccgccgctgtcaagcattggggagtcagcaatgtccgttgtgttaaatcagctgctgcccatgattaagcctgtaacccagag

SEQ ID NO: 69344 - DNA, 75 bp, Homo sapiens
cagccagtaccaagaaagcagaagggaagctgagtaactccaacagcaaagatgagagtgggactccccggcccc

SEQ ID NO: 69345 - DNA, 100 bp, Homo sapiens
gggagccgggacccagggcccgggatcgccgagcccgacctcgggcgccccgccggtcacctccgcgcggacaccagcctgggccgagccagtggccccc

SEQ ID NO: 69346 - DNA, 100 bp, Homo sapiens
caaaggacaccatatagtgatggagtcctatatgggtccccaacagctgaaaatgtggggaagccaacaatcattgagaaaaatatgtcgtaactgcaag

SEQ ID NO: 69347 - DNA, 100 bp, Homo sapiens
tccagtacaaccttcaaaacaactggaatatttagcaaggattcaaggctttcaggcagacagtccagaagacatgcacagctggattaaggagattggc

SEQ ID NO: 69348 - DNA, 96 bp, Homo sapiens
cccaagcccgctgagcaggatgaggcctaaacccaccaagggacgaatgcgcatccactgcttagagaatgtggacaaggcccttcagttcctgaa

SEQ ID NO: 69349 - DNA, 75 bp, Homo sapiens
ggacaatcacagtggtggtggtgggggtagcagatattgaagatttgcccccaacagtccaagaaaaattatttg

SEQ ID NO: 69350 - DNA, 82 bp, Homo sapiens
ctgccgcgccgccgctacgggaccgcctgagctttctacaccggggtgagaactctgtctcagtcgacgggaagtgcagtga

SEQ ID NO: 69351 - DNA, 82 bp, Homo sapiens
gtcttggtagcggaggcacccgaatgctgcccgggtgaggcggtctggaaacaagtcctctccaccttccattgctccactg

SEQ ID NO: 69352 - DNA, 75 bp, Homo sapiens
cggaagcggagagcaacagcgcgccgagagaagaagaaggaggttcctgctgtgccagaaacccttaagaaaaag

SEQ ID NO: 69353 - DNA, 100 bp, Homo sapiens
ctaaacaatttgacatacagctgttgactcacaatgatccaaaagactgttccaccaacaacccctcccaggctaagctgcggcgggagctcgacgaatc

SEQ ID NO: 69354 - DNA, 101 bp, Homo sapiens
ctcggtcggtacagtctctgcacctcgcgccccagcaggtacgccgtcatgaaatacacaaatcgaagaatagagcattagtacactgggaactccaagaa

SEQ ID NO: 69355 - DNA, 98 bp, Homo sapiens
ttccctgctcggacgccgagcaccgccaaagcgcctttgacagtgagaaggctggggaccgggaggtgcagaggacaatgctggagcttctgaaccag

SEQ ID NO: 69356 - DNA, 100 bp, Homo sapiens
caacagcgaggctttcagttctttggaattccattcttttccttattcttctgatgtggatccaggtcagaaagcaacattgaatgcagaagaaatggcg

SEQ ID NO: 69357 - DNA, 96 bp, Homo sapiens
ccaagtgcggggacctccggcgaataaagaacaactctgctcatggtgattacatgcaaaataacgagagcagcttaatagagcaagctccaatac

SEQ ID NO: 69358 - DNA, 90 bp, Homo sapiens
aaggccagagctttctggaagggggcaataagtatgctgtgcgcttcatccctcgggagaatggcgtttacctgattgacgtcaagttca

SEQ ID NO: 69359 - DNA, 51 bp, Homo sapiens
ccctactctggggcttcctgctccagctgtatgaaaacccatggacaatcc

SEQ ID NO: 69360 - DNA, 50 bp, Homo sapiens
gacaagcgggcagaaggctggtgacaagaatcaggaaacccaggcccaac

SEQ ID NO: 69361 - DNA, 75 bp, Homo sapiens
gcggcagcgcacgctgcagtccaatgctgagcacctgaagaccctgtccctgtcctacaacgccctgggagcccc

SEQ ID NO: 69362 - DNA, 74 bp, Homo sapiens
ccagggaaggcactcaaaagtggggggcaggaaagtgaaaaatgtgaggttttacaatattctgcaagggaagc

SEQ ID NO: 69363 - DNA, 74 bp, Homo sapiens
aaacagcccgctatgggacagggctggaggatgagctggcagccatgcagaagaagctgaaagggacagaggat

SEQ ID NO: 69364 - DNA, 100 bp, Homo sapiens
gaatggagaccaaacctgtgataacctgtctcaaaaccctcctcatcatctactccttcgtcttctgggtagaaaacgtgaaattggtggatcgttatgt

SEQ ID NO: 69365 - DNA, 74 bp, Homo sapiens
aaaaagaatgaaccgcttgcttcttatttaggactggagtccagagttgccaccagatgggatattcaaaaata

SEQ ID NO: 69366 - DNA, 75 bp, Homo sapiens
aaaagccaagaggaggacagttcgctacacagcaatgcatcgaggatttaagtgccctgtatgctcaaaatttgt

SEQ ID NO: 69367 - DNA, 83 bp, Homo sapiens
ggaagaccgcgcgcagggcctgcagcgggagctggacggcgagcgcgagcggcgcgagaaaaatatatacagccctgctctgg

SEQ ID NO: 69368 - DNA, 90 bp, Homo sapiens
cttgaatttgatttctggagacgcgagcataatccttttgcagacatctcaacgctggctctccagggaatcttggaatcagaccagacc

SEQ ID NO: 69369 - DNA, 83 bp, Homo sapiens
agtgtttgcctctggttcagctcatacaacagcttcttaggctccgtgtgtttgacagtggcgtcatggtaattgagcttcag

SEQ ID NO: 69370 - DNA, 96 bp, Homo sapiens
cctgtttctgctcaccccagcggctggagctcctgaagaaggaggccttgcggaaccaccagacgccccggacagagcgggatgccaccagcttgt

SEQ ID NO: 69371 - DNA, 75 bp, Homo sapiens
ctcaagtgctgcagcgcgggctgtgccaccttctgctctctgcccaatgcggtcacctttgtcccggtgtccaag

SEQ ID NO: 69372 - DNA, 75 bp, Homo sapiens
cctaagtgtgcagcctgtggccaacccatcctcccctctgaggtaatgtgaggctacaggagatgatggcaacaa

SEQ ID NO: 69373 - DNA, 46 bp, Homo sapiens
tggcgaaggagccggctccaagtcatcttagtctactgtgctgaat

SEQ ID NO: 69374 - DNA, 100 bp, Homo sapiens
aattgggcagaagagaagcagtgaaggagtgcagaggcatcacctgaaagagtatgcccagctttttgcagcactgattgcacgaacagcaaaagacatt

SEQ ID NO: 69375 - DNA, 73 bp, Homo sapiens
ttcacgactactagaaggggaggggagtggaaaggctctcagtgaaaaaggaaggagatggataaagcagatg

SEQ ID NO: 69376 - DNA, 90 bp, Homo sapiens
tttcacagcactctgggcgaaaattggatgtgaaaatgaagccagaccgaggctttccttaaagtttcccatgtctcaatggactcctga

SEQ ID NO: 69377 - DNA, 98 bp, Homo sapiens
agcaatttaaagatcctctccaaggtgaaaggtgtagcagtcactcggcctacacccacagcatcgaccttgtgaacccagcgacctgactgccttgg

SEQ ID NO: 69378 - DNA, 100 bp, Homo sapiens
ccaacctcatgaatctcatcgccaccatctttgtctttgcagtggtcatctatttccagggccttgggaactccaagacagaatggcccgaggcctggac

SEQ ID NO: 69379 - DNA, 75 bp, Homo sapiens
tcaagtataaactggacaaccagtttgagctggtgtttgtgtgtattctggaggtcgaatggtcacatatgaaca

SEQ ID NO: 69380 - DNA, 90 bp, Homo sapiens
caagcggtgagactatcacctatcgccaagtggtattgatgaagatgaccctactgctgatgataccagtgctgctgtaactgaagaaat

SEQ ID NO: 69381 - DNA, 100 bp, Homo sapiens
ccagtggtggtgtccaacaacagctctgctcatggctctcaaagaaccagcggacctgagtcttcaatgaaaggtatatgagctccctgaaagcacaaag

SEQ ID NO: 69382 - DNA, 101 bp, Homo sapiens
caaatctgaggtcttattttgttgagtcgaaagtgaaattttcctttggccaacgtgacaggtatccaagcccaccaatgggatctgtctcagcacccaac

SEQ ID NO: 69383 - DNA, 82 bp, Homo sapiens
tatctctggctacgcgagggagcacggacagtgtgcaggcacatctctgatccaggacatgaaggcatacctggagggagcg

SEQ ID NO: 69384 - DNA, 82 bp, Homo sapiens
ctgacaatggctttggtccccagcgcagtgaagtggtgagcctttttgtcactgccctggtacctgacagtgtaaagaagga

SEQ ID NO: 69385 - DNA, 98 bp, Homo sapiens
aagtggttggttgcagttgtgtagtagttaagtttgctaatccagactttacacaacctatctcagaagttgtagatgaagtaattcagaattgtcct

SEQ ID NO: 69386 - DNA, 100 bp, Homo sapiens
agcggagagtcaggggccttgtgtcctaccatggtatttgctaacgtttagagagtgcttccccttgccgagcactggtggaaagaggcaaaacctgatg

SEQ ID NO: 69387 - DNA, 50 bp, Homo sapiens
gccgagcccgcccgcgcgccgcggaaggagagttttacatggaagtggct

SEQ ID NO: 69388 - DNA, 82 bp, Homo sapiens
cgggcggcctgccccgccggagcagcatcatcaagggtatttgaagtataccatacaactgttttgaaaatccagcgtggac

SEQ ID NO: 69389 - DNA, 75 bp, Homo sapiens
cattcaaaaaaattaattcatagagatcttaaggtgatgtaaaattctcaaacaatgagatagataaaaagtacg

SEQ ID NO: 69390 - DNA, 75 bp, Homo sapiens
taaaatacccgcaacagccccttcgtcccaaatactgtggcctcatgaataggaatgtctgcccatatgtcagga

SEQ ID NO: 69391 - DNA, 128 bp, Homo sapiens
gctgcctcccacaagtagctccagcgccgtaagcgaggcctccttctcctacaagtgagggccccaaggctgttgcagctcctcgacctgatcggttggtcaatcgcttgaagaatatcactctggat

SEQ ID NO: 69392 - DNA, 100 bp, Homo sapiens
aaaaaagacagagaaactatgggacacagatatgttgaagttctttaggtgctgggaatgtagccgatcgtgttttggctcagctcttaacagaaatgga

SEQ ID NO: 69393 - DNA, 83 bp, Homo sapiens
agaaagtattgcaggacaagagatttaagtttcttaaacaattaggtctacatcctaactggcaattcgttgatgtatatgga

SEQ ID NO: 69394 - DNA, 100 bp, Homo sapiens
cccctttggaacctaaggagccctgccgaggagctgaaggccttcagagtccttggggtgattgacaaggttacagcaccatgagcccacaggaggacag

SEQ ID NO: 69395 - DNA, 83 bp, Homo sapiens
cgagcacatcatcaagtacaagggctgctgcgaggaccaagggagaggctgtcgatgctgaggcacgagagaatttgctcctg

SEQ ID NO: 69396 - DNA, 50 bp, Homo sapiens
cccccattggaccagtgtttgcttaggtcttcgatgccaagaacatgatg

SEQ ID NO: 69397 - DNA, 59 bp, Homo sapiens
tgaaaaaggaggaccacgaggcaacaggtcccagatgaggaaactgaggtccagagaag

SEQ ID NO: 69398 - DNA, 76 bp, Homo sapiens
cggccccgagacgcgcctggcgcggaaggtagaagatagcaccatgccgattcgtcgaactgtgaattctacccgg

SEQ ID NO: 69399 - DNA, 100 bp, Homo sapiens
ctttggaaactaaatcaagtctgccaatggtgcatggcaagaaacctattggaattcgagacttaattaatgaagctttgcatcgagaaacgatgggtct

SEQ ID NO: 69400 - DNA, 100 bp, Homo sapiens
cgctcatggacggaagacccctggctctataagctgaattatggcagcccagtcaagatcttggcatatacagaagggctgcatggaaaatggctgttca

SEQ ID NO: 69401 - DNA, 100 bp, Homo sapiens
gatctacgagtggatggtgcgttgcgtgccctacttcaaggataagggcgacagcaacagctctgccggctggaagaaaggcctaaagaatgtatttgac

SEQ ID NO: 69402 - DNA, 100 bp, Homo sapiens
tctataacatcttaactaaaagcactcccacgtctacaatggagtcgagtctagaattcacacagagccacctaggtcttggtcttgatgccaagtttgg

SEQ ID NO: 69403 - DNA, 75 bp, Homo sapiens
tcagccgccaaagaccccgtccggtagatctctggaaacatggctacagaacatgttaatggaaatggtactgaa

SEQ ID NO: 69404 - DNA, 98 bp, Homo sapiens
ctcagcctcctgagcagctgggactacaggttaatccctatatcctgaagaagaacatgatcctcatgacaaatcatttctatgcagcgatcttggga

SEQ ID NO: 69405 - DNA, 128 bp, Homo sapiens
atcatggcggatggcccccggtgcaagaggcgcaaacaagccaatcccaggaggaaaaacgtattaaaggtggaagaaggtccatatctttttctgtgggtgcttcaagtgttgttggaagtggaggc

SEQ ID NO: 69406 - DNA, 97 bp, Homo sapiens
ggcactcacagcggcagcgatcaagcaggcagcgggctttgccagcaaaaccgaaacagattatttgctctcaaataactacgtaaattctatcatc

SEQ ID NO: 69407 - DNA, 82 bp, Homo sapiens
ccttgttggaggttctggggcgcagaaccgctactgctgcttcggtctctccttgggttacagccaagttctacttctgaat

SEQ ID NO: 69408 - DNA, 90 bp, Homo sapiens
ccttcgtgggcacgcgctcctacatggctatcctgaaggacacagccctgcagaaagtgaagcgtggccagagctgcctggagccctgcc

SEQ ID NO: 69409 - DNA, 100 bp, Homo sapiens
ctcagtccggcacaggaaaaacagccaccttcagtatctcagtcctccagtgtttggatattcaggaggcggctttccggaaagtagtacaagcaactat

SEQ ID NO: 69410 - DNA, 50 bp, Homo sapiens
cgccctgcagctgcccaagcagttaacagaaccttctggatatttaacag

SEQ ID NO: 69411 - DNA, 97 bp, Homo sapiens
cttggccaagcaggcggcctcagggcttgtgggccaggagaacgcgcgagagtccatttgacgtggaggacatgaccgcatcctcaggcgctgggaa

SEQ ID NO: 69412 - DNA, 82 bp, Homo sapiens
cctccatggccaggaggacacccctggtggcctgcttggcctccggtgtggctgtctctgatggtgtcatcaaggtgttcaa

SEQ ID NO: 69413 - DNA, 100 bp, Homo sapiens
agcctggaaggtgcgtgtggggctgggtctcggagtgggagacgtggagtgcagcttccaggccctggggtcagaagggcaggaagacctctctgaccgg

SEQ ID NO: 69414 - DNA, 85 bp, Homo sapiens
acatcctggaagctgggaaatgatcaggatcctcatgaccagccaaagagaagaagaattaggaagcataaatcaaagaaaaaat

SEQ ID NO: 69415 - DNA, 83 bp, Homo sapiens
aaggagatgcctggcagccccgctctctgcagttattctcgttcaagttaatccaggtgagactttcacaataagagcagagg

SEQ ID NO: 69416 - DNA, 74 bp, Homo sapiens
caaaactttctctcttgataagccaacaaatggaattttcttgagcatgtttctaatcgttttgccattggaat

SEQ ID NO: 69417 - DNA, 100 bp, Homo sapiens
acctcctctgtatgaagaacgatccccacctttgcctcagaaagacctatttcaggaactatccaagatcacgatgccagttatatttaatgagcctctg

SEQ ID NO: 69418 - DNA, 100 bp, Homo sapiens
ggatccagagacacaggcacgactagaagcattgctagaagcagcagatttgggaatggatgatgaaggagatgatgacccagttcctctaccaaatgtg

SEQ ID NO: 69419 - DNA, 75 bp, Homo sapiens
acaagccgctggcagccgcggatctcaccgccgctcaggggaaatcgtggaacacatggtccagcactttaaaac

SEQ ID NO: 69420 - DNA, 90 bp, Homo sapiens
agttctggggagcgcctcgtcgacatgagtgatgtggaggaaaacaacttcgagggcagaacactggccaaaagaagaccctagacaaga

SEQ ID NO: 69421 - DNA, 100 bp, Homo sapiens
tggcgcagggcacggtgggcgcctacctgatccagacatttaatgtggatgcaccatgccagaccgtggaagatttaacgaatggggttgtgatggccca

SEQ ID NO: 69422 - DNA, 100 bp, Homo sapiens
caattctgaaacttcttgatgttgtccatcctgcagcaaagactttggtagacattgccaaatcccaagatgctgaggtgggggggtcagccccccgccc

SEQ ID NO: 69423 - DNA, 98 bp, Homo sapiens
aacagtactgtgggtttgtctaatacagagatgtggtactggatcttcctctgggctctcttctcttctctgtttgtccatggtgctgcaggagtgtt

SEQ ID NO: 69424 - DNA, 76 bp, Homo sapiens
cacctgctctcacccacgaaaggcatctgtcccaagcaggagaacattgcagaacattctagtatgccagtagaaa

SEQ ID NO: 69425 - DNA, 51 bp, Homo sapiens
aaaggaatgacttctctccaccagactgttgatctcctcatgcaagagtca

SEQ ID NO: 69426 - DNA, 75 bp, Homo sapiens
cgagcagagccgcccagccctgccagctgcgccgggacgcacccaccaaggctccggatgtgttccccatcatat

SEQ ID NO: 69427 - DNA, 83 bp, Homo sapiens
tggagtgcgtgggggaccggctgttggcgggtgtcctgtggccaggcggaaagcagtgagaagcccaacgctgaggacatgac

SEQ ID NO: 69428 - DNA, 100 bp, Homo sapiens
tgcaggacatgatgacccggggaaacctgggcctcctggagcaggccatcgccctgaaggctgaacagatgccagtgagagcaggtgccagcaggggaag

SEQ ID NO: 69429 - DNA, 99 bp, Homo sapiens
agcagtgttccaagttctaaagagttggtgtaatacggtgcccagtatgccgccaagaatgcagacagatagaccttgtggataattattttgtgaaag

SEQ ID NO: 69430 - DNA, 100 bp, Homo sapiens
ctccgcgcgacgtacccgccgccgccgttggctggagtcctctttgatacgcaacctacggctctctgagtccttgaaaaagaaccaactctggaacggg

SEQ ID NO: 69431 - DNA, 75 bp, Homo sapiens
aatgttgagcctttttggcctggcttgtttgcaaagaggaggagtatgatgaagatgctcaggtagtggaagacg

SEQ ID NO: 69432 - DNA, 100 bp, Homo sapiens
cgggaccaccctgggcacagcaggcatcggagctgtgccacgaccgtggctatctggtgacccaggacgagcttgaccagaccctggaggagttcaaagc

SEQ ID NO: 69433 - DNA, 100 bp, Homo sapiens
tcccgggcgcctggcagtgtgacgggctgcctgactgcttcgacaagagtgatgagaaggagtgcccgcgcagggaccatgtcggcggagaccgcgagcg

SEQ ID NO: 69434 - DNA, 100 bp, Homo sapiens
aggccacccagtcccacttcaaacattcgtctcggaaaccccgcctcttacagtcacgagctcagccagacgtccaggatcccaccccttgcaaaagacc

SEQ ID NO: 69435 - DNA, 50 bp, Homo sapiens
gggaagccaacgaccacacgcacagcgtccgtctccaagagagtatgaag

SEQ ID NO: 69436 - DNA, 75 bp, Homo sapiens
ctctacgaaggcggctacttcaagcttcagtatcagacacagcacagcagccatctgaagagcaaagcaagtctc

SEQ ID NO: 69437 - DNA, 58 bp, Homo sapiens
cttgctgcaccaagtggaggcgctagccgcggctcaaactgtccaggttgctgaagtt

SEQ ID NO: 69438 - DNA, 100 bp, Homo sapiens
aggaaattgtggaccaggtcctggagaggcatttcatccttcatgaagccattcaggattttgaattgcatatgagtgcttggctcttccttctgttcta

SEQ ID NO: 69439 - DNA, 75 bp, Homo sapiens
gcggggaggaggatgggggctaaccagttagtggtgctcaacgtgtacgacatgagtcgggtttctccattcaag

SEQ ID NO: 69440 - DNA, 100 bp, Homo sapiens
aaggacccgctcatgtacttcattgagaaggtcagaactgtggaggcttagtccagggtcccaatggcactattgagagcccagggtttcctcacgggta

SEQ ID NO: 69441 - DNA, 74 bp, Homo sapiens
ctgcaagaccgcgaggcgagacctcttgcaacatgagtgagaatgaggaagaggaaatttctcagcaagaaggc

SEQ ID NO: 69442 - DNA, 76 bp, Homo sapiens
gaccggggacttcttgattgaggtctctggctattcgggtgtctggccggagccccccagggggcccagagccgca

SEQ ID NO: 69443 - DNA, 74 bp, Homo sapiens
agctgccatccactgactcgtaaaaaaacctcggatcaattctcagctggtggcacaacaagtggcacaacagt

SEQ ID NO: 69444 - DNA, 50 bp, Homo sapiens
cgaaactttcaccgcgagcgggaattttggagagtaaaaggctgaacctt

SEQ ID NO: 69445 - DNA, 100 bp, Homo sapiens
ttaactgcctccattacactgctgagtcacacacaacgcttgttatgttttcatcacttctctccagaaggatctaagcctttcccacgttatggttata

SEQ ID NO: 69446 - DNA, 100 bp, Homo sapiens
gactggaccgagctcaccaactgcgtgcccggcgtgctggaccgccgcgactccgccgcgctgcgcacgcccaggtggtgttcccactgatgaagagcag

SEQ ID NO: 69447 - DNA, 96 bp, Homo sapiens
aaaaacaaaggatatcgtcaatgggctgaggaagcaggtcctggggaccaaggtggacgcggagcgtgacggcgtgaaggtgcccaccacgctggc

SEQ ID NO: 69448 - DNA, 75 bp, Homo sapiens
gagctctgatgggctatttgggtgatacccagtgcagtgaactgcaggttcagcttgttggtttagatgaggaga

SEQ ID NO: 69449 - DNA, 101 bp, Homo sapiens
ggccgtcgctatgagcgggaccaccctgggcacagcaggcatcggaggacctgaaggagaagaaggagaaggtggaggagaaggcaagccggaaagagcga

SEQ ID NO: 69450 - DNA, 100 bp, Homo sapiens
actcagcgaattgtaatggaaagcatatggacaggtctacgccacatcacttaggcctcaggagtgcaagtagctgatgaagtatgtcgcattttttatg

SEQ ID NO: 69451 - DNA, 75 bp, Homo sapiens
ggccagtctggagacagtcaagatgaggaaactgaggctgggcaagaggaagtcatttgccaaaagtatcgcagg

SEQ ID NO: 69452 - DNA, 111 bp, Homo sapiens
agatgagtatgcctgccgtgtgaaccatgtgactttgtcacagcccaagatagttaagtgggcaccgttccactgggagcagatcagattcttcttcgaggagctcagttg

SEQ ID NO: 69453 - DNA, 90 bp, Homo sapiens
gagaggcccctcttctcctccaacccagaactggacaatctggtactgtttgcctgtgctgaggccctgcatgcgcatggctatagcagt

SEQ ID NO: 69454 - DNA, 82 bp, Homo sapiens
agaagaccgagagtcaccacaaggccaagggcaagtgatttgacagtttcctgctctacgaaacgcactcttttgccttgaa

SEQ ID NO: 69455 - DNA, 75 bp, Homo sapiens
ctccggcctggcgtgaggaccccccaatccgcgtgagggggggccctcagcctcttggccttgaacgggctgttc

SEQ ID NO: 69456 - DNA, 100 bp, Homo sapiens
gagcccgcccgccggcagcgccgctccccagggagggagtccgcagcctgaggccaaccgggacgctgtgctgagcaggatacctgaacacaagagtgac

SEQ ID NO: 69457 - DNA, 75 bp, Homo sapiens
ttctgggcttccacacaactccagtgctaactcaacagcaatggctgccatccggaagaaactggtgattgttgg

SEQ ID NO: 69458 - DNA, 83 bp, Homo sapiens
aatcatacagacaatcttaattcctcacagaggctctggcccctcctcaggccgaatggatcagcttccccagaagaatctcc

SEQ ID NO: 69459 - DNA, 100 bp, Homo sapiens
gctgaatcggccggttttgagaggggaagatggggacaaagccgctccacctcccatgtcggcacagatttggagcctggctgccaaccacttgagcttc

SEQ ID NO: 69460 - DNA, 100 bp, Homo sapiens
agttggaagcagccgatccagcctgcggagcctgtggggcagaaaacaacagttttgttggcatgtgaagctccagtttcctcaaagtcaagctgagtac

SEQ ID NO: 69461 - DNA, 51 bp, Homo sapiens
tgagttaaatgcagccaattatacagtgtgagctttgctcttgttgcccag

SEQ ID NO: 69462 - DNA, 82 bp, Homo sapiens
cggccatggcgtacgcctatctcttcaagtacatcataatcggcgacacaggctttggatctggctgccctctccacagaac

SEQ ID NO: 69463 - DNA, 98 bp, Homo sapiens
caaaatcccagatctacctgacgggcctgcgagggttgaagattgtgaagcaatagcctaagcttcctgcctgacacagctcacttcaagaagtgcac

SEQ ID NO: 69464 - DNA, 75 bp, Homo sapiens
gtcacttccagaaatttggactcttacttaccagcagaattcagctaccccgggctgggcttcaacatcgtcggt

SEQ ID NO: 69465 - DNA, 80 bp, Homo sapiens
ggatatcgacgtcgtgatccagaagtccagagctgaggactgcctgtttgcaggtgatgggcagaatctgtttacgaaag

SEQ ID NO: 69466 - DNA, 98 bp, Homo sapiens
tgaggactaccctgaccctccaataccccacagctattctagtgataggattcacagcttgagctcaaataagaaatctcctgcaaagaagctgagcc

SEQ ID NO: 69467 - DNA, 50 bp, Homo sapiens
gggacggaggacgcgctagtgtattatagctgcaaatgtccttgtattct

SEQ ID NO: 69468 - DNA, 75 bp, Homo sapiens
ccgacgtctacccacaggaccccaagcagaaggagcccagccctggggagcccctgtggaagtggagtccttcct

SEQ ID NO: 69469 - DNA, 100 bp, Homo sapiens
cggctgcggttctctctcgaccccttctgcccggcgcttcggcccgggccgctcaggtgcaggctggtccctgcagacggcttcccatttttatgaccgg

SEQ ID NO: 69470 - DNA, 75 bp, Homo sapiens
tcaaagccggagtcgtcatcggtcctgacggagaacgtgctggccaaagcgctctatgacaatgtggccgagtcc

SEQ ID NO: 69471 - DNA, 88 bp, Homo sapiens
ggctaagaaagtggtgaatcccctgtttgagaaaaggcctaagaattttggcattgagtgtgaacatggctacgcctcttcattcccg

SEQ ID NO: 69472 - DNA, 90 bp, Homo sapiens
ggcgtggttctgggggcggactccagaacaaccactggtgaccaggtatctcccagctccacattctgtaaggtgtacaccataacccca

SEQ ID NO: 69473 - DNA, 95 bp, Homo sapiens
gaagacgaatcgttaaacatctgaaagggtcaggcacaaggaaggacagacccagtctctgtccttatggagctaagggggagacggacattaat

SEQ ID NO: 69474 - DNA, 100 bp, Homo sapiens
cttcgggccagggacacggctcaccgtgctaggtttggtgcacctcgatttggaggaagtagggcagggcccttatctggaaagaagtttggaaaccctg

SEQ ID NO: 69475 - DNA, 100 bp, Homo sapiens
gctgccgagcgtgaggagactcagcagaaggtgcagccctgcctgatgtggctctgggaattcctgcagagaagagcaggggtggccaggagatagtgag

SEQ ID NO: 69476 - DNA, 75 bp, Homo sapiens
atcgaggagctgcggctctaccccccggatgatgatgatgatgattttgatgatgaggaagctgaagaaaaagcg

SEQ ID NO: 69477 - DNA, 87 bp, Homo sapiens
gcttcactggggcagtctctgcatatcatggggagatagacgctgctgcctgtgatcagcttgaaattcagctaaccgagcagctac

SEQ ID NO: 69478 - DNA, 88 bp, Homo sapiens
gagcagattctgaaacttcttgacaatttgcttgcgcttataagggattgcaataaagttcaagaaaaaagaggtgctgtctatgaac

SEQ ID NO: 69479 - DNA, 100 bp, Homo sapiens
agctgcttcatcatatttgaagacagttctaaatcctgggttctctggaaggacattcaaacaggccaaagaggtgctgaaaaaatatttggagtccaag

SEQ ID NO: 69480 - DNA, 97 bp, Homo sapiens
tgtgaaccttttgccctggtgggattattgttcaatacttcttcaagatcttggataattagtggtgtggaaagtaaagaagtcacaggttgggaca

SEQ ID NO: 69481 - DNA, 100 bp, Homo sapiens
aaagaaatcagtccttcctttccgacttagtcctcgggaagaagtttcagactacaagacaacagcagttctgtagagagtttaaatatgaaggaatggc

SEQ ID NO: 69482 - DNA, 75 bp, Homo sapiens
tcttactcgggagctggctgaagatggctactctggagttgaggtgctgaaagatgggcgtttggtaaacaagaa

SEQ ID NO: 69483 - DNA, 100 bp, Homo sapiens
tgccgctatggatgatcgagaggatctggtgtaccaggcgaagctggccgagcaggctgagcgatacgacggagctctttgttcaatgcctagccaccta

SEQ ID NO: 69484 - DNA, 101 bp, Homo sapiens
gccggagctacgacacggatcaaggacgagtgttcgtgaaagtgaaccccaaggcggaggacagtcattttgtttactcattcagccctgttgcaggtccc

SEQ ID NO: 69485 - DNA, 76 bp, Homo sapiens
agtccagtttcttttcaatatagggaatttgtttcctcggagtctgtcactccagaagataatgatggatttaaac

SEQ ID NO: 69486 - DNA, 83 bp, Homo sapiens
ctgatggacaccgtctccatgcccgagttcatggccaacctcaggctcaggagtggagtcaacatatcaatggagcaagtcac

SEQ ID NO: 69487 - DNA, 82 bp, Homo sapiens
gacaagagcttccgcggtgtcattctgacctcggtgagaagccctaccactgcaactgggacggctgcggctggaagtttgc

SEQ ID NO: 69488 - DNA, 100 bp, Homo sapiens
gcacggctgaggcccgcaagcgcaagagtgatcagcagctggactgtgccttggacctaatgaggcgcctgcctccccagcaaatcgagaaaaacctcag

SEQ ID NO: 69489 - DNA, 75 bp, Homo sapiens
taaagagtaaagttgtgctcaacggatgttgagaaagagaaggaaacccacagttacctcagcaaagaggagatc

SEQ ID NO: 69490 - DNA, 75 bp, Homo sapiens
ctgcatggagcaagtctgtcagcaccatctttctaacagtatttaacatgaagtcgctccagattgtgttacctg

SEQ ID NO: 69491 - DNA, 82 bp, Homo sapiens
gccgcggcggcagcagcagtgagaggcctgcattgatgagaacctggaggtggtgcgcttcttggtggagcagggcgccact

SEQ ID NO: 69492 - DNA, 97 bp, Homo sapiens
gtgaggaccaagcacgcctcttcaaagacgagtccactcacggaggaggctgccttgatggatttgactgcagcttcaaacactttcttgggcaaac

SEQ ID NO: 69493 - DNA, 87 bp, Homo sapiens
aacatctcttcccagcggctcaggtagtgggcagcagtcagtgacaggtgtaacctctgtggatgacagcaacagttactggaggat

SEQ ID NO: 69494 - DNA, 104 bp, Homo sapiens
cggagctgggcgacgagctgaccctgggagacatcgacgggtgcttcaaggatgaccgcatcgtcttctggacttggatgttctccacctacttcatggagaaa

SEQ ID NO: 69495 - DNA, 89 bp, Homo sapiens
cgtgaaggggaagaggcccaccctggagtaaccctcactggagaatccagagagtacaggggctcaggtccaggtggcaggggatatgc

SEQ ID NO: 69496 - DNA, 90 bp, Homo sapiens
gggtaaaaggctgagaagcttaagaatgtgtgaatgacaactactggtttgggagggacaaaagctgtgaatattgctttgatgaaccac

SEQ ID NO: 69497 - DNA, 100 bp, Homo sapiens
cgaagacgggatactgctcagcaaggtgttgtgaatttcccatatgatgatgtgaccaagaatatggcccaggtgaccaaagccctggacaaggccctga

SEQ ID NO: 69498 - DNA, 100 bp, Homo sapiens
gaaaagctgccaagttgaaaatggacgagtaatcgcctgctttgattcattgaaattactggggcttccggatgcagatgacgatgcgtttgaagagtac

SEQ ID NO: 69499 - DNA, 100 bp, Homo sapiens
agtggctatcatactggctattatatggataccgaagtgtataaagctacagtaaaagatgacctcaccaagtggcagaatgttctgaaggctcatagct

SEQ ID NO: 69500 - DNA, 50 bp, Homo sapiens
ctcagctctcgccgccagcgggccgcagggctctggaacttcatccattc

SEQ ID NO: 69501 - DNA, 76 bp, Homo sapiens
tcccgcgccgcacggtggacgagggcaacaggtttgtctatgctggctctaactcgggcgtggtccaggccccgct

SEQ ID NO: 69502 - DNA, 100 bp, Homo sapiens
cactggaactaatctgatacctgcaccagctcttgcaactgtgcagtgttcccactgcaaactacggatggggtcttaccctgatgaaattggaccaaag

SEQ ID NO: 69503 - DNA, 100 bp, Homo sapiens
tccagtgcatctaataacttctggtgtttggtttggaacattttattatgcagccttgaagtaccatctacctgttcatgtaattggacaccatgctgtg

SEQ ID NO: 69504 - DNA, 99 bp, Homo sapiens
aatcatcaatatttttgatattgcaactggaaaacttctgcataccctggaaggttggtgacatcgtgaaagtcacaaggatgaatataaatggccagt

SEQ ID NO: 69505 - DNA, 50 bp, Homo sapiens
gaccaaaattgtggaaaagtcactctgactgcatcaacaagtatgggtct

SEQ ID NO: 69506 - DNA, 75 bp, Homo sapiens
gacaccacatgaacctctgtttagaatacctacagcagcccgacggccatggaggctgaagagacgatggaatgc

SEQ ID NO: 69507 - DNA, 76 bp, Homo sapiens
cccaggacacagagctcagtgcaggcactggcaacttctatttggagtcagtggatcggtggggaaaatgctgctt

SEQ ID NO: 69508 - DNA, 75 bp, Homo sapiens
gcaagccccgctccggccaacaagatgaatctggttatagatggacaagagacgatcattctgcaagcaggcaac

SEQ ID NO: 69509 - DNA, 100 bp, Homo sapiens
ggccgggctcgtggggcgcctggagtgagggttctggttcccgccggcgaggcaaaggcagctcgagcatctcatctgacgtgagttcaagtacagatca

SEQ ID NO: 69510 - DNA, 75 bp, Homo sapiens
cgccgacggccgggcggacggacggacggacgccgagcgcagtgccccgcgattctgagaacaataactccacaa

SEQ ID NO: 69511 - DNA, 100 bp, Homo sapiens
caaatgttgccgggacaaagtttgaaattgataagtatgctgtgcgcttcatccctcgggagaatggcgtttacctgattgacgtcaagttcaacggcac

SEQ ID NO: 69512 - DNA, 125 bp, Homo sapiens
caagtttcacatccttgtctgtgaagctaaactcaatgctgctgtgtgggaagaagatttgtaaagaaaactcttaggacccagatgatgtggtaccagttggccaaagaagagcctggtgttgg

SEQ ID NO: 69513 - DNA, 75 bp, Homo sapiens
ggaagggagatgccctgcccgttgccctgtgatgaagaaaatcctgataacttaagtgactctctcttttccggt

SEQ ID NO: 69514 - DNA, 101 bp, Homo sapiens
atcagacatgcccaaagaagtctgcttagggtgaaacaaatacctttgaggtttaaatcaggctttaatccagtgtgaccagttgaggaaggagctggaga

SEQ ID NO: 69515 - DNA, 101 bp, Homo sapiens
tttccactctggttgcctgtgtggtggatgtcgaggtctttaccaatcaggaggttaaggtgatcgagtgtggatcaaagactggaacatagcccctttgt

SEQ ID NO: 69516 - DNA, 100 bp, Homo sapiens
ttggaagacgtgcttgagctggtgtctcgggatgagctgaatgtcaaatctgaggagcaggctgaccggttccctgatgtgttacctgcttctgctactg

SEQ ID NO: 69517 - DNA, 80 bp, Homo sapiens
ggaaaaggaatcgtatcgtatgtccgctatccagaacctccactctttcgataacaacgaacttgatgcaagtgataggt

SEQ ID NO: 69518 - DNA, 101 bp, Homo sapiens
agcgcctcaaagtgcccaaggagcgcctggctcttctccacaaagacacagacagggtctagctatgttgccccggctggtatcaaactcctggactcaaa

SEQ ID NO: 69519 - DNA, 75 bp, Homo sapiens
gtatacagaaaatcggtgaagagaggttttgaattcacgcttatggtagtgggtctcatcacaactacgtcaagg

SEQ ID NO: 69520 - DNA, 101 bp, Homo sapiens
cgcgaccgccgagcctgcagcctgccccgcggccaacatgagcttcttgttgtcctcagaatggttggaatgaccctccagctttgaacagagtacccaaa

SEQ ID NO: 69521 - DNA, 100 bp, Homo sapiens
gtccccatcacctgccttgctcgccacctggtggccacgcgtacctgcacagtcacgccgggctctttgccatcggctcccagctgtctcctgaacaggg

SEQ ID NO: 69522 - DNA, 100 bp, Homo sapiens
cttagctgtgctcgcgctactctctctttctggcctggaggctatccagcgcagcgtctatcccagactaccggggccctaatggagtgtggacactgct

SEQ ID NO: 69523 - DNA, 100 bp, Homo sapiens
gagccttatgttgccctggttcccgaggtgagcccattggcaggggtaccaaagtgatcctccatcttaaagaagatcagacagagtacctagaagagag

SEQ ID NO: 69524 - DNA, 75 bp, Homo sapiens
gtcgccgcgccacagccgctgcggatcatggtgcttgaggaatccaaagccctcgtgcgctgcaacatgaagatg

SEQ ID NO: 69525 - DNA, 75 bp, Homo sapiens
ctgccagggtccctgaagagggaagacacgcggaaacaggacttgattattcttagaaatgcacttgacctgctt

SEQ ID NO: 69526 - DNA, 74 bp, Homo sapiens
ccgtcgttgccttgtatttccagagaacaggcccagtacatcttgatccatcaggctttggtggaatacaatca

SEQ ID NO: 69527 - DNA, 83 bp, Homo sapiens
ccacatcatgaagtcggcggatgtggagaaacaatgcagatcttcgtgaagactctgactggtaagaccatcaccctcgaggt

SEQ ID NO: 69528 - DNA, 95 bp, Homo sapiens
gcatgctgcttttgatgtctgacaacgtggatcgttgttttgaaacactgcaaaattcaaaatggggctcaaggtattcgtttcatctacaccag

SEQ ID NO: 69529 - DNA, 82 bp, Homo sapiens
cacgaagagctgccgtcgctgcagagaccccgctatggctaggagcaggagcggcttcgcttggagcaggagcgagagcagg

SEQ ID NO: 69530 - DNA, 100 bp, Homo sapiens
tcgggggcatcatccacgtggaccagatcgtgcagatggccagtcagctgttcttgcaggaccagaggatggggaggcacgtgagagggatgaaatccgg

SEQ ID NO: 69531 - DNA, 100 bp, Homo sapiens
gaggggcttcagcatcgtcacggacactcctgagctacagagactgaagaggactcaggagcaaatcagtaataactcaagctccatgaggagatgtttc

SEQ ID NO: 69532 - DNA, 90 bp, Homo sapiens
cgctttacccgactctttgggccgttatctcacgattttgcctaccattttacagtatttgtcttctattttggagcctttttattggaa

SEQ ID NO: 69533 - DNA, 83 bp, Homo sapiens
caatggctttggtccccagcgcagtgaagtggtgagcctttttgtcactggtaatttcatctgtgccaaagcctccagaggac

SEQ ID NO: 69534 - DNA, 98 bp, Homo sapiens
ttctatgaggaaagtgtgcattttgacagagatcttccagaatttggaccatggcaaaagttataaccaccgtactgaagttccctgatgatcagact

SEQ ID NO: 69535 - DNA, 100 bp, Homo sapiens
atttaccgaagcctaggcattttacctcctctccgcacggcgcagtacaactccaaatggctcaatggaacggttttccaaagcagacagcagctcagct

SEQ ID NO: 69536 - DNA, 96 bp, Homo sapiens
tgggctgctgcaccggacgctgctcgctcatctgcctctgcgcgctgcagttgggaccatggctaaacctcctggatcattagccagaagcagcag

SEQ ID NO: 69537 - DNA, 75 bp, Homo sapiens
attgcagctgcatgttcaagaagtggccggagagttctgcatgttgattcgaaccaaatggcgagacaccatcat

SEQ ID NO: 69538 - DNA, 76 bp, Homo sapiens
actaaggaggaggtctggtcctttgaagcgggagacctggagaacacagatatgtagaactcttcttgaattctac

SEQ ID NO: 69539 - DNA, 82 bp, Homo sapiens
attggacacagaatccgagtgcggacaaggcaaaatctcagcaagttcggacctctagtacaataaggcgaacctcctcttt

SEQ ID NO: 69540 - DNA, 100 bp, Homo sapiens
gaattaagtaactggtcgaggttgtatcagtaagaagggagcacggaacagattcaagctcagattttaggtgatgggcaagtcagaaagtcagatggat

SEQ ID NO: 69541 - DNA, 90 bp, Homo sapiens
agcatttagagctgtttatgaagcactgagaaatagtttaaagaaacccattatccccaaagagtttgggggcaaagtccccaccgtcat

SEQ ID NO: 69542 - DNA, 119 bp, Homo sapiens
ttttcaagaacttgagagtgagactttgaaatcagaggaattccagaagaggctgcacccttataagcggaaaggtcagccccccgctgcaagttcttagattcctggaggatctgcag

SEQ ID NO: 69543 - DNA, 90 bp, Homo sapiens
tggacagatctgagagatactgagagcgaaccagacggggacagtaaggtttggaggaagggggatcgttggaagtagcaagaagtggag

SEQ ID NO: 69544 - DNA, 90 bp, Homo sapiens
tccagaaagatggcatcatttttgccctcaaaagaaatggcagtgccggtggtggtgtgcacattgagccccggtatagacagttccccc

SEQ ID NO: 69545 - DNA, 100 bp, Homo sapiens
ttgagcagtttgaagacttgctagttaggattttattactggcagcatgtatatcttttgactgtgtgcagctgaatcagtataccctgaaggatgaaat

SEQ ID NO: 69546 - DNA, 100 bp, Homo sapiens
aaagcagcagaagtgactcaaattttcaagtgccaaacggaggaatacctcgtatgcaacctcaggcttcagccagaagtggaaaagcattgtcgctgtg

SEQ ID NO: 69547 - DNA, 71 bp, Homo sapiens
ctttcttaacctcatcaaattcatgaagatttagccgaggcccatgtcagcagataagcagagagccctag

SEQ ID NO: 69548 - DNA, 100 bp, Homo sapiens
cagatctgggccgcttgcctcctgctcctcctcctcctcgccagcctgaccagtggctctgttttcccacaacagttacggcagtcccagtcctactgca

SEQ ID NO: 69549 - DNA, 100 bp, Homo sapiens
agcttgccaagaagtgtggcatcaccgtgtctcagggtaagaaggtggatggctctgtaaatgcctatgccataaatgtctctcagaagaggaagtacag

SEQ ID NO: 69550 - DNA, 101 bp, Homo sapiens
aggcagctgcaaggagggcggcgggactgcactcgagtgtccagacctgctcgatggcctggaaatccacgcggcttcccaaagacggcgcctctgttctg

SEQ ID NO: 69551 - DNA, 75 bp, Homo sapiens
gctcaggccagttcgtcggctgccagcaacaatcaccaggtaccgagcccctgaactgctgttgggaaccaccac

SEQ ID NO: 69552 - DNA, 100 bp, Homo sapiens
ttcctggaaaaagaagttcatcagattcaagtcagagcaccataacatggtgtgggaagtgaagacaaatcagatgcctaatgcagtacagaaactcctg

SEQ ID NO: 69553 - DNA, 83 bp, Homo sapiens
ccagtttgaacctctggacatgaagctcatgaggagtgtctggaccacccaacctgcttgctgtctaggttggttcctttccc

SEQ ID NO: 69554 - DNA, 50 bp, Homo sapiens
atcagatcaacaaggagctggaaggggtctgtttcacccagcccggaaag

SEQ ID NO: 69555 - DNA, 76 bp, Homo sapiens
catgtcagaccagaccgtccgggtgaagcactattcctgatcagagaactccagttgcttcaacacacagtatcag

SEQ ID NO: 69556 - DNA, 83 bp, Homo sapiens
ctcaatcaaaccagtattcttttcacacagctcctggtaacgtttttatccatggatgacttgcttgggtaaggacatgaaga

SEQ ID NO: 69557 - DNA, 74 bp, Homo sapiens
aaataagctatatactttggttacctatgtacctgttaccactttcaaaagggatgtggagacgctggtagcgg

SEQ ID NO: 69558 - DNA, 74 bp, Homo sapiens
tagaagtgtccagcgacagcttctgggagggtgtcaaattgagaaccaggtagatccccaccacctacagtaaa

SEQ ID NO: 69559 - DNA, 98 bp, Homo sapiens
tcttctgctgtgactgggttgcctgaatttgtgggagacccgtgatcccatcccagagtgtgcgggggacggaggtattctgaccttttcagctagca

SEQ ID NO: 69560 - DNA, 75 bp, Homo sapiens
agcacaatgaaggcaagtgggactttgccttctcagcccaaagtcagcgtagtggctctttatgactacacagcg

SEQ ID NO: 69561 - DNA, 82 bp, Homo sapiens
ggagagcttcatcaaaaatagtgatagctttgataagcttgaagtagaaaatgccatgatgagaaaaactattaaaaaacag

SEQ ID NO: 69562 - DNA, 100 bp, Homo sapiens
gactctgtgagccccaggaaatcccgagtggcggctcaaaactcagatgtgatgactgaagcccaccacaaatatgaccactctgaggctacaggatcct

SEQ ID NO: 69563 - DNA, 74 bp, Homo sapiens
ccgagacaacaacggcaccgcggccaagactaaggggctgcagagcggggtggacattggcgtcaagtactcgg

SEQ ID NO: 69564 - DNA, 100 bp, Homo sapiens
ttattttataccactgaaccgtgcacttcaaaatggttaagatggaatactcccccagttgcaagaggcgcaggaccgtggaagacttcaacaaattctg

SEQ ID NO: 69565 - DNA, 98 bp, Homo sapiens
taaaagagacctctacttagctcagcaattcttaccttctttggttgggaatgcctgcgtggtacgtggcagcctgccgagccaacgtgaagagtggt

SEQ ID NO: 69566 - DNA, 90 bp, Homo sapiens
ggccaaccttcaggaggaggagctgtcccctttcctccaacccaacggcttactttcaaggaagtatttgagaatgggaaacctaaagtt

SEQ ID NO: 69567 - DNA, 82 bp, Homo sapiens
agagctgggcaccaggaagcgaaggctgccctgaccctctattctgcaccctgtgagccaccgagactgaaccaaacccagg

SEQ ID NO: 69568 - DNA, 90 bp, Homo sapiens
agaggagctgcactgactctgcagccaggacgaagtccaggaaggccaggtctgtagcatctctgtctgttggagaaggcacaggtgtca

SEQ ID NO: 69569 - DNA, 100 bp, Homo sapiens
catcaggtcaagcaacacctacatcacctattaaaaagatgttctcagtgcagctgagtcttggtgagcagacatgggaatccgaaggcagcagtataaa

SEQ ID NO: 69570 - DNA, 100 bp, Homo sapiens
ggccgacttcgatgatcgtgtgtcggatgaggagaagagtgctgatggcagagattggtgaggatttggataaatctgatgtgtcctcattaattttcct

SEQ ID NO: 69571 - DNA, 73 bp, Homo sapiens
ttcaccaagcgcttcgctacaaggtaaaaggattgagagggaagaagaggaagaagaagaagcccttccttta

SEQ ID NO: 69572 - DNA, 75 bp, Homo sapiens
ctacattggaacagggccgcctctcaagttggactaaatgctcttccttcagaggattatccggggcatctactc

SEQ ID NO: 69573 - DNA, 100 bp, Homo sapiens
cacagcagcagcacctgcttccagactcagagtgtgagaaaaaaataaactcctatttgtttatggcaagactgtcttctgaagattgatgtctatttcc

SEQ ID NO: 69574 - DNA, 51 bp, Homo sapiens
aagattctcattgccgactgcatacagctgcctgtgtcagggaatctgctt

SEQ ID NO: 69575 - DNA, 75 bp, Homo sapiens
ggcggacagtgcggaactaaagggccgcgttcgcaccaaaaccgtgaagaaggcggcccgggtcatcatagaaaa

SEQ ID NO: 69576 - DNA, 89 bp, Homo sapiens
caagatgaaagcagcagttttcatcatctaagtgaaagatgctgagatgaatcgtcacctgtgtgtttggctttttagacatccatctc

SEQ ID NO: 69577 - DNA, 89 bp, Homo sapiens
ttttaccactgcctggttgcagaagtgccgaaagagcactggactccggaagtcctgacacagctctccctgaggagcagccacattcc

SEQ ID NO: 69578 - DNA, 75 bp, Homo sapiens
tgggtagatgtcgttctgaaacgcaggtgaaatgacaatggatgctctgttggctcgattgaaacttctgaatcc

SEQ ID NO: 69579 - DNA, 75 bp, Homo sapiens
gtcctctttggctttctgaccacctggttcctgggtgagtgagacggtttaagcggaagcatcttactgccattg

SEQ ID NO: 69580 - DNA, 75 bp, Homo sapiens
caagtgagcgatttggtgaacagacactcccttctgtaggtgctttactccatgaactgtctaatgacggtgctc

SEQ ID NO: 69581 - DNA, 75 bp, Homo sapiens
ggtgattgccagtaggagcctgccgcgagtgctgacgatgcaagtgctgctggaccaggcgggctgctgtatcgt

SEQ ID NO: 69582 - DNA, 75 bp, Homo sapiens
ctgggctccaattatgaaatgggttttgacaacaattcgttcagggcaccgagcaaacatatttagtgcaaagtt

SEQ ID NO: 69583 - DNA, 83 bp, Homo sapiens
gcaagctctttgacacacagcagttcttgtcaggaggagatgttaaagtaacccatcttgcaggacgacattgaagattggtc

SEQ ID NO: 69584 - DNA, 99 bp, Homo sapiens
cctcggataccacatccaacagctttgtccgccagcctgtctgtcgtcgttttggcgcccccgcctccccgcggtgcggggttgcacaccgatcctggg

SEQ ID NO: 69585 - DNA, 75 bp, Homo sapiens
ggccggatgggtccttgagtaaactcatcactgctatatatgcagattatgcccggagtttgaagaacctcggtt

SEQ ID NO: 69586 - DNA, 93 bp, Homo sapiens
gggtgcgctgctcaaggacacggtctacaccgacttcgacggtgacgcggcgcacggcgcggatggtggccgagtggcagtgtgtgggcttct

SEQ ID NO: 69587 - DNA, 83 bp, Homo sapiens
ggaaaactctacctttgtgtatcaagtcccactatcaaggataagccagtgtgggtcctgtggtagctggagtgttggtggcc

SEQ ID NO: 69588 - DNA, 88 bp, Homo sapiens
accatacgagtcctagatgtcaataaccagtccttcagagaacaagagattctgaaggaagatttccattaggtaatttgtttaatca

SEQ ID NO: 69589 - DNA, 98 bp, Homo sapiens
tccaccccgatggagagaaggtggcgcaacggatccgtggggccacagacctgcccaaggtgcaaactggctcagtctaatggctggggggtgatggt

SEQ ID NO: 69590 - DNA, 100 bp, Homo sapiens
ctcaggctgctgtggttcatgccacagccaaagctccaatcattgcagtctgaactccagtttaaagatgcagagatgaatgaattaaggacaaagctcc

SEQ ID NO: 69591 - DNA, 100 bp, Homo sapiens
ggaagccccacttgaaggaagaagtctaagagtgaagagtctcaggagcaggggctgcggcagaggctgctggacgagcagttcgcagtgttgcggggcg

SEQ ID NO: 69592 - DNA, 100 bp, Homo sapiens
ggaaatagaactcaaaaggctgcaacaagagatggcgttcaggaagtggcttatattcactcaaaccagaatgtaattggatcgagcaaagctgaaaatc

SEQ ID NO: 69593 - DNA, 75 bp, Homo sapiens
cttccctttggatgtagcaaggaagaaattgttcagttcttctcagttgaaaacaatcctcgaacaggaaatctt

SEQ ID NO: 69594 - DNA, 75 bp, Homo sapiens
cacgtcgggtcagatccgacagaagatgatggtggtgctaccccagtacaggatgaacgggattcagggtcagac

SEQ ID NO: 69595 - DNA, 75 bp, Homo sapiens
gagttcaaagagaccctcggaacattctgcttctcagaagatgcactattatagatactctaacgccaaggtcag

SEQ ID NO: 69596 - DNA, 75 bp, Homo sapiens
gaggaggcccacaaggccctctgcatcctgcctggagtgggcaccaaggtcaaaatgcagatcttcgtgaaaacc

SEQ ID NO: 69597 - DNA, 101 bp, Homo sapiens
ccagcctcggtaccatggccgggatcatcaagaaacaaatcttgaagcacctctccagtggcagaaatctgaagctatcatggaacaattgaagtcttttc

SEQ ID NO: 69598 - DNA, 88 bp, Homo sapiens
caagcagaagaattcctcaatgcagtcttttatagaaaagacaaagaggcagctgaacgtctttcaaaaacagtagatgaagcatgtc

SEQ ID NO: 69599 - DNA, 88 bp, Homo sapiens
cacggggtctgtggagtggctggaggaggatgaacactatgattaccaccaggagattgcaaggttatcactgtgaatataagatgcg

SEQ ID NO: 69600 - DNA, 100 bp, Homo sapiens
gccagatcaacctggagctctacgcctcctacgtttacctgtccatgttcctgggcttcccgatggactcgagtttttactatgtgagcatcccggtgcc

SEQ ID NO: 69601 - DNA, 90 bp, Homo sapiens
gttccgtgaactcagtactgatgcccagtggggcattcgtcttggtaaacttggtcccatgcatgatgactatgacttaagacaagaaca

SEQ ID NO: 69602 - DNA, 90 bp, Homo sapiens
ctccttgctgaggtgaccttggccatcctgctctttgtatatgaacagaagccagagactgctgctactttgaaacgtacgatagaggcc

SEQ ID NO: 69603 - DNA, 100 bp, Homo sapiens
ctcccgagcagctgggattacagatgcacaagtctggcgttctgaggaaggccattgattacatcaaatacttgcagcaggtcaatcataaactgcgcca

SEQ ID NO: 69604 - DNA, 100 bp, Homo sapiens
cggaggaacgccgagcagtacaaggaccaggctttaaggagttttaagctgagtgtcactgtagaccccaaataccatcccaagattatcgggagaaagg

SEQ ID NO: 69605 - DNA, 100 bp, Homo sapiens
gaatcctctcaggacattgtgtagcctatgaaactgaaggctcagaagaggatgataaagaaaatgataagaccgaagaaatgccaaatgattcagtcct

SEQ ID NO: 69606 - DNA, 83 bp, Homo sapiens
cccggcgccgtccgtgcccgcgggacctgacagccgggtcagaggttagctttatacgtctacgaatatttactgcacgtagg

SEQ ID NO: 69607 - DNA, 50 bp, Homo sapiens
ctgagggcagagactctcccggccctcgggaccaaggatcacgtcatgac

SEQ ID NO: 69608 - DNA, 83 bp, Homo sapiens
gctcatggcctgccactgcgtgcgaaaatggcagacaatttttcggtaagtgttttatgcctgtttcttccccttgatcagct

SEQ ID NO: 69609 - DNA, 103 bp, Homo sapiens
gcccagaccccgggatcggtggaggaagatgctttgctctgtggacccgtgagcaagcataagctgccaaaccaagaactgataaatttcaaacggaagagag

SEQ ID NO: 69610 - DNA, 74 bp, Homo sapiens
tcccctgccgctcctgccggcagctccaaccatgggaggccgcgtctttctcgcctcaggcccagagccagcac

SEQ ID NO: 69611 - DNA, 100 bp, Homo sapiens
aggaaatttaagaccatttatatgttcaactgatgaaaacactgttccaaagaactactggttcagattttagctcttcccaagttgtgaaaatagtgaa

SEQ ID NO: 69612 - DNA, 108 bp, Homo sapiens
aagtagcaaaggcaagaaggcaacgacgttccatctgtggaaggacctaccaaccaggaccaggaagaaacaggctcctgccagcaccgacagcaacgaaaatgttcc

SEQ ID NO: 69613 - DNA, 83 bp, Homo sapiens
ggtcctgggcaggaccggttctcagggacagtgcacgcagttcatgcgggagatggcaggggctggcacatgacagtggagca

SEQ ID NO: 69614 - DNA, 98 bp, Homo sapiens
aagagttcgtgttcacaggacctgggaagcagcggagtagaaagacagacaattttcccgcagagcccaattacatgggcagcaggcagcagtttgtt

SEQ ID NO: 69615 - DNA, 75 bp, Homo sapiens
agaaagagtccctcagcatgggtctccttccgctaccactgccagctgtactccgagtggagaaagaccaaccag

SEQ ID NO: 69616 - DNA, 50 bp, Homo sapiens
agccaacaaaatattcatggttcttgagaagggagagaaggtacccaaag

SEQ ID NO: 69617 - DNA, 97 bp, Homo sapiens
agcttacccagcttaaagagctccacattcaggggaaccgcctcaccgttctgcccccagaactaggtgggaaggatacgagcaagataaagcagcg

SEQ ID NO: 69618 - DNA, 50 bp, Homo sapiens
cttcgatgtgcgagactttggaaaggctgaccccgcactacatctaccca

SEQ ID NO: 69619 - DNA, 82 bp, Homo sapiens
ggctggagtgtgggccacctcaaggcccacctgagccgcgtctaccccgagcgtccgacaatgcagatcttcgtgaagactc

SEQ ID NO: 69620 - DNA, 97 bp, Homo sapiens
ccacaaccttgtcaatctttgcactaaagaaggtgatgcccagcctacagagtctgagaaggaaatttataatcaggtgaatgtagtattaaaagat

SEQ ID NO: 69621 - DNA, 50 bp, Homo sapiens
ggaggcgaattttcagttgatagacccagaacgctggacaaacattcctt

SEQ ID NO: 69622 - DNA, 100 bp, Homo sapiens
aaaagccaaggaaatgtgatttgactcccttcctggttttgaaagcaagaaagaaacaaaagttcacctctgcgaaggagtctcaggagcaggggctgcg

SEQ ID NO: 69623 - DNA, 82 bp, Homo sapiens
gctgcctgaatcagaagggcaccatcttgggctgctctgttaaaagcgaaaatgaaacaattgcctgcggcaacagttcgac

SEQ ID NO: 69624 - DNA, 77 bp, Homo sapiens
tacaataagatagttgcccggactgcacaactagcaagacttcagggctatggttctgatggtctaaagttgttatc

SEQ ID NO: 69625 - DNA, 82 bp, Homo sapiens
cagcgcgggagagcggactcccctcgccaccgcccgagcccagctgcctgtggaggaaccgattgtgtccacagatgaggtc

SEQ ID NO: 69626 - DNA, 76 bp, Homo sapiens
tggacatccagattttctattgtgccagacctgacgaagagccttttgtgaaggccagtacagtggtagcagttgg

SEQ ID NO: 69627 - DNA, 112 bp, Homo sapiens
ccaggacctggcctgaagacatttcctctcctcccctctggatttctcagaggctacccacctttctgttctgagacccctcaagagacatataagaaggtgatgaactgga

SEQ ID NO: 69628 - DNA, 50 bp, Homo sapiens
caactatctgggggggacattcccaggtatttaacatgaagtcgctccag

SEQ ID NO: 69629 - DNA, 100 bp, Homo sapiens
ggcggactctcccgaggcggaacctccacgccgagcgagaacaccttccaccatgaccacctcagcaagttcccacttaaataaaggcatcaagcaggtg

SEQ ID NO: 69630 - DNA, 75 bp, Homo sapiens
gtttgttatggccgctgctgtcgctatggagacagctccttcgagaactcatagaacggaagaccagctccttgg

SEQ ID NO: 69631 - DNA, 83 bp, Homo sapiens
tttggaagaattcagtaaagtcacaggttgtctgcattcaaaagagcattctattaaagctaccttaatttggcgcttatttt

SEQ ID NO: 69632 - DNA, 50 bp, Homo sapiens
cacaggtgaaaatggcggcgaaggggagagcacacagctgctacaaatgc

SEQ ID NO: 69633 - DNA, 100 bp, Homo sapiens
gcctggtgggggacgcgcttcttcccacactgtgagcctcagcagctccagccagcggacccgacggctgagaggatctgtgccagttcagaagcaggcg

SEQ ID NO: 69634 - DNA, 98 bp, Homo sapiens
gtttgaagatgacacaccctgggccagcacatctccacctcatcaggaaacagctgagacagggaacagtgcagacctccggctggtaaagactttca

SEQ ID NO: 69635 - DNA, 88 bp, Homo sapiens
tgggtcagtccgccgctcaccccgcggccgcaccttcccgccttctcaggttaatgttcgtgaagaaattgaagagttttttccaaga

SEQ ID NO: 69636 - DNA, 97 bp, Homo sapiens
gccgctgcaaggggaggagagaggccgcctcagggtggccattcagggcaactggggccttcgtcagttgccccttcattccgcccagaggatgagc

SEQ ID NO: 69637 - DNA, 73 bp, Homo sapiens
ttcgattcaacggggttccggaccgcgctgcgctatggagcagcggatgtgatgctggtacaacccagagtag

SEQ ID NO: 69638 - DNA, 98 bp, Homo sapiens
gatgggaccacatcagtaattattcttggcatttataagacgctgtttggcatatcgaaaagaagatcgatttgatgtgcaccagctggcaaatgacc

SEQ ID NO: 69639 - DNA, 73 bp, Homo sapiens
tcttgtgccctagcaccccgagaaccgtcagtttgagccagatggtgaccaaaagccagccccactgtgagtt

SEQ ID NO: 69640 - DNA, 100 bp, Homo sapiens
atcatgtcttgagaattcttcccgacccaccagtactatatgggttagcatgctggcaagaggaggacagggcttttttgaagaagaagaaggtaaagag

SEQ ID NO: 69641 - DNA, 75 bp, Homo sapiens
ccttctgccatgattgtgaggcctccccagccacgtgaaactaggagacacaccttgaagaaacaacagagagcc

SEQ ID NO: 69642 - DNA, 75 bp, Homo sapiens
ggtcctgtcagataaggggcgactgctatccgtggtcctgaaccagttatgtgtgttgcatgagaaaacgccagt

SEQ ID NO: 69643 - DNA, 100 bp, Homo sapiens
catcgtgtaccgcaccatggagatcttccagctcctgaggaacatgcaggttctccagcatttggctcaaggccccaagggcacatgtgacaagaaggcg

SEQ ID NO: 69644 - DNA, 101 bp, Homo sapiens
gccgctatggatgatcgagaggatctggtgtaccaggcgaagctggccgagcaggctgagcgatacgacggttatcaatactctggctgaccatcatcatc

SEQ ID NO: 69645 - DNA, 82 bp, Homo sapiens
gcgccggcacacgggtgagaagcccttcgcctgcacctggccaggctgcggctggaggtgtgaacccacatccctgccccca

SEQ ID NO: 69646 - DNA, 100 bp, Homo sapiens
ctgaaggccatgttcagcgggcgcatggaagtgctcaccgacagtgaagttggtagctggcagtgttgtgatggcttttgaagaagtatgcccggacaga

SEQ ID NO: 69647 - DNA, 100 bp, Homo sapiens
gaagaggaggcggaaaaggacgcaaagttctccggcgaggggcaccaccacgaggcgatttgtgggccataccaaggatgtgctgagtgtggccttctcc

SEQ ID NO: 69648 - DNA, 75 bp, Homo sapiens
tgccaaggaaaaactggagagcttcatcaaaaatagtgatagctttgataagacacattcagctaacgtatttta

SEQ ID NO: 69649 - DNA, 74 bp, Homo sapiens
tatggagcgccacatctcctgagattatttggtgggtcatgataactgggtacgtggagttctgttccattctg

SEQ ID NO: 69650 - DNA, 90 bp, Homo sapiens
cggggcagaggcggcggccgcagcggcgcagctgatagcaggaacagataaaataccatgaggagtttgagaagagccgcatgggcccta

SEQ ID NO: 69651 - DNA, 83 bp, Homo sapiens
ctgaagatcctggtgtcgccatgggccgccgccccgcccgttgatctgactgcagccatgagcagcaatgagtgcttcaagtg

SEQ ID NO: 69652 - DNA, 87 bp, Homo sapiens
cggagctggaatgactggcaacccagtctgcatgaagaaatcagtgatttttatgaatacatgtctccaagacctgaggaggagaag

SEQ ID NO: 69653 - DNA, 75 bp, Homo sapiens
ctgaggacttggagtttcgcaaaagcatgtatgaagaggacccagattcaagaacatggcatcattatgtatacc

SEQ ID NO: 69654 - DNA, 100 bp, Homo sapiens
gtgccatcgcagcacatgtgtgtggccgcctcggacaagagacccagtgagaaggacgttgaagagtgggctcggagatgacctggtgcaggcactggga

SEQ ID NO: 69655 - DNA, 82 bp, Homo sapiens
cgccagcagccgtccggagccagccaacgagcggtgaaaacttttggcccgtttggaagcggcagccaggacaacctgacta

SEQ ID NO: 69656 - DNA, 100 bp, Homo sapiens
ccatggaataaagagctgtatttgatcagaattctgcttggtcagaatcgtgatggcattgtgttcagcactgatgactattttcaccatcaagatgggt

SEQ ID NO: 69657 - DNA, 101 bp, Homo sapiens
ctgatcttcgatgagctctcggattccttatgcagagtggccgacttggcatttccggagagttcttttgaagtcacttcagaaggatctacatgaggaaa

SEQ ID NO: 69658 - DNA, 121 bp, Homo sapiens
cacagcaggacaccaggacctggcctgaagacatttcctctcctcccctctggatttctcagaggttttatgctgctgaaatcattcttggtctgcagttccttcattccaaaggaatagt

SEQ ID NO: 69659 - DNA, 100 bp, Homo sapiens
cctgaaccgcgcggccgaaccctccggtgatcctgctatctgggctgggctaatggcagcctgtcacgctgatgataaactggccttagtgaacaacact

SEQ ID NO: 69660 - DNA, 100 bp, Homo sapiens
ggacaggagcattaccacctcagccaccctgaccactatcatcaccatggaaaaagtgacttgagcaggtaccagcaactaaggtttcagagctgaaccc

SEQ ID NO: 69661 - DNA, 100 bp, Homo sapiens
gcgaagccttgggtttctttcttaaaggactgatttttagaactccacatttgaggggccagatcatcaaacaattttatttaaccacggtgcagttcag

SEQ ID NO: 69662 - DNA, 100 bp, Homo sapiens
tccagctgaacactttccagccttgtttttcagcagctttgaggaaaagtataggtgtcatggagaaactccagctgggcccagagattctgcagcggga

SEQ ID NO: 69663 - DNA, 101 bp, Homo sapiens
ccagcccgtgcaggacacgaagctgcatgtgtttgacgcaagttttacacatccataagtagacctttttggagcctcaccagccaattcaatggcgtcct

SEQ ID NO: 69664 - DNA, 100 bp, Homo sapiens
gtttacagctaacttgaaaaaaatgtcatggaataaattcagccttactagaaaaattgtggagtgtcgtttcagaatggcttcggttattgcctttcct

SEQ ID NO: 69665 - DNA, 75 bp, Homo sapiens
atgaaatgcagaaaaaagatcacaagcaactctggatgggattgcaaaatgattgggaaaatgaggtacgttagt

SEQ ID NO: 69666 - DNA, 76 bp, Homo sapiens
ctgatctaacccctagaaacaggttatcctgaatacatgtctaacaattttccttgcaacgttagctgttgttttt

SEQ ID NO: 69667 - DNA, 100 bp, Homo sapiens
gaaggcccagagacattaagctcagcactctctaaaggagcaacagtttacagcccttccagatacagctaccagcaaaagctgatgaagcattgaaagc

SEQ ID NO: 69668 - DNA, 100 bp, Homo sapiens
agaaggaggaggcggcgaatcacttataaatggcgccgaagcaggacccgaagcctaaattccaggaggacaggcaggattgaacccaactaccccaagg

SEQ ID NO: 69669 - DNA, 82 bp, Homo sapiens
aggaatcgtcacccggcggcctctcattctgcagctcatcttctcaaaaacaggcagtgtgtacacaaggaaggaaatggca

SEQ ID NO: 69670 - DNA, 74 bp, Homo sapiens
agccaagagagaccttggagtaattcgtcgacaggtacatctccgttcatggatgcattaacagccaatgggac

SEQ ID NO: 69671 - DNA, 75 bp, Homo sapiens
gtgaggaagaggaagaagaggatgaagatgtggatctggcccagacactgcaggcattggttgcttgcccgccga

SEQ ID NO: 69672 - DNA, 75 bp, Homo sapiens
tgaaaggaattcctagatctaaacaccaggactgagcagggggaggaacatttaagctgatggaagtggaagtgg

SEQ ID NO: 69673 - DNA, 100 bp, Homo sapiens
attgctttgaacacctcactcggctcattcagaacagcaaggattttttatcaagcagaaatgcatcgaacaacgagaatcaagatcactgagctaaatc

SEQ ID NO: 69674 - DNA, 83 bp, Homo sapiens
ccgcaaccgaagcacaaaagttatcaaacccggtggaccatatgtagcattttgaaagcgaagcagaagccgtagaatcagcg

SEQ ID NO: 69675 - DNA, 60 bp, Homo sapiens
cggcggcagatgagagcatccaacgggtgaacttctcacctgagggctgtaaagactcgt

SEQ ID NO: 69676 - DNA, 97 bp, Homo sapiens
aagaagcaagaatggtgttgtaaaagatcagccttcaggtgtggcacttgctgaaggatttcatgcaagattacaggaatttcagaattttgaacaa

SEQ ID NO: 69677 - DNA, 83 bp, Homo sapiens
cgaaggagaggccctagaaccgagattgtaagaacaacgctcttgtaccaggaaccattcaagtaaatggccatggaggacag

SEQ ID NO: 69678 - DNA, 100 bp, Homo sapiens
ccactcagagtcgcccgagaaccctttgaggtggacctttctcacgtgtatcttgcctatactgaggagagtctgcgtcagtctttgatgaaactagaaa

SEQ ID NO: 69679 - DNA, 83 bp, Homo sapiens
cctcgttcggttgcagggtgaacctggcgatttgcttgcagtaaggatggggatgataagaagagacctgtgatcattcatcg

SEQ ID NO: 69680 - DNA, 97 bp, Homo sapiens
ccgccaatcctggtccggttgcccgagttcccggaggtctctcgcgggacctctctcaccgccaccgttggcagatatccctgttacaatctgtaca

SEQ ID NO: 69681 - DNA, 75 bp, Homo sapiens
gtgaagcaggcggccaaggagaagaggaagccagatcgctgagggtccggtctccagtttgcctcctgctatatc

SEQ ID NO: 69682 - DNA, 50 bp, Homo sapiens
ccgcggtgtcattctgacctcggcggaaggtgctctaccagcgtgcaccc

SEQ ID NO: 69683 - DNA, 83 bp, Homo sapiens
ggatcatgtctgcgagccaggattcccggctactatgtgggcatgtgccttgcggcttcagaaaagcggctccacgccctcag

SEQ ID NO: 69684 - DNA, 128 bp, Homo sapiens
caacatgtcaagaaatccgacggaccaaattatcagcactttttattaatttgatcagtgatccttcacgttgggaggatttgacagctaaggatattgaagaaattattgatgagctcaaggctggc

SEQ ID NO: 69685 - DNA, 100 bp, Homo sapiens
acactatgcatccctgcaggagtatgaggggctcaatgcgcattgggaaggattttatcctgttcaccaagaaggaagacaccatgacctgcctcttcct

SEQ ID NO: 69686 - DNA, 80 bp, Homo sapiens
gaaccgtcagtttgagccagatgtcttatgatgtaatcagcgcgatttcacttcctgaatttcgatgaattctaagacat

SEQ ID NO: 69687 - DNA, 100 bp, Homo sapiens
gtgggattgtcgggcggtcagcggacttcgtggtagaatccattggctctgaagtggggtctctggcattcttcaggtcatctgaaccttctgagaaaac

SEQ ID NO: 69688 - DNA, 80 bp, Homo sapiens
caagaacaaaggccgcgacttggagtgttctaagaacggaagcatctgggctggatggaatttagcatcaagcagagtcc

SEQ ID NO: 69689 - DNA, 50 bp, Homo sapiens
tttcagggcaagccaattatggaaatgaatgaggaccatagcacacccaa

SEQ ID NO: 69690 - DNA, 110 bp, Homo sapiens
cccccggaaggaacccctctcctcgctcttgccttgcgccatggactggcagccagacgagcagggcctgcagcaggtcctgcagctgctcaaagactcacagtcgccca

SEQ ID NO: 69691 - DNA, 75 bp, Homo sapiens
ctactatccactctccaaactggtataactacggcttcgtggtggagaagaccgcggctgcccgcctgcccccca

SEQ ID NO: 69692 - DNA, 83 bp, Homo sapiens
ccgaagtcatcctgggtatgggctacaaagagaacggcactcagaatggtccagcgtttgacataccgacgtaggctttccta

SEQ ID NO: 69693 - DNA, 82 bp, Homo sapiens
caccaggagcagcgaggcactcatcctgcacgccggcgagtgccagcgctctggattaatcgaattacagctgctagccagg

SEQ ID NO: 69694 - DNA, 82 bp, Homo sapiens
cggcgcggcagcggagggacggcagtctcgcgcggctcaccagctggattccctcctgggggcttcattcccaaaacggcca

SEQ ID NO: 69695 - DNA, 82 bp, Homo sapiens
gtccgcgaggatgcgtgttcgcgggtgtgtgctgcgttcacaggtgtttctgcggcagggggatatgagactttctactcgg

SEQ ID NO: 69696 - DNA, 100 bp, Homo sapiens
ggaaacgccagagccagttacaaagacagaggacatccacctatttcaacaggtatgttcagttcctcagtgggctcctgtccggatcggtgaaaatgaa

SEQ ID NO: 69697 - DNA, 90 bp, Homo sapiens
agcggagtccaaaacaggcctaccaattgctacaacagtgtgaaactctgaaagtccctcccaaaaagatggaagatttaactaatgtat

SEQ ID NO: 69698 - DNA, 100 bp, Homo sapiens
actcctcattcctgatgatttcaaggttatcaacgaaacttctcagcatcacgatgaccttgaataaaaattgcacacactcagtgcagcaatatattac

SEQ ID NO: 69699 - DNA, 100 bp, Homo sapiens
ggcaacatggtgcggtcggggaataagggtgtgtccgcagccggccaggtggtatccctgaaggtgtggctgattgacgacattctagaaaagatcaaca

SEQ ID NO: 69700 - DNA, 97 bp, Homo sapiens
aaacatcatcgttttgaagagttctgcgttttgccagtcacctctcaactgtgtgccaaaggttgtgatcaattattcaatcgtgaaagggctgaag

SEQ ID NO: 69701 - DNA, 83 bp, Homo sapiens
aaaaagaacattactgtcttgattcgccttttacaagtccacctctcagagaagaaataatggcaaataacttttccttggag

SEQ ID NO: 69702 - DNA, 95 bp, Homo sapiens
gatagaacctttgctgttcttgcatacaggttcagcgtcttccatttctttcaagctcaaatctttcactggatgttttgaggggtaatgatgag

SEQ ID NO: 69703 - DNA, 50 bp, Homo sapiens
agatgttcctgtggaccccagtccaggtgcaggtcttctgaacaaatgcc

SEQ ID NO: 69704 - DNA, 82 bp, Homo sapiens
gaggattatgaagatgacaaggatgatgatattagtgatactttctctgaaccagggcattcttagcagggttacagaatct

SEQ ID NO: 69705 - DNA, 83 bp, Homo sapiens
atatcttgggcgggggatgtgagcgctgagcccttggcagctgctctgttaaaagcgaaaatgaaacaattgcctgcggcaac

SEQ ID NO: 69706 - DNA, 75 bp, Homo sapiens
gggatggaaacctgactgcctggcccgggacggcgcttgcagccaggcagatgttttactgtgcctggctaacta

SEQ ID NO: 69707 - DNA, 75 bp, Homo sapiens
tctgactctgactctcggactgagaaacgcaagttttccaagagataacttcaccaagatgtccagtgataggca

SEQ ID NO: 69708 - DNA, 75 bp, Homo sapiens
tgcggcccgaatgccagcgcctcttctaccggggcaagcagcttcttccagaccagctggtcttgcttctggagc

SEQ ID NO: 69709 - DNA, 100 bp, Homo sapiens
acaagactgatctggagaaggacattatttcggacacatctggtgacttccgcaagctgatggttgccctggcaaagatgtcctgtgaagtcaacgagtg

SEQ ID NO: 69710 - DNA, 75 bp, Homo sapiens
taagggcgacagcaacagctctgccggctggaaggttcaccggaacagcacaatccgccctggctgtgatgtgaa

SEQ ID NO: 69711 - DNA, 100 bp, Homo sapiens
ttatgtccgcgaaaccaagttggacttacagagagagagaagaagaaggaggttcctgctgtgccagaaacccttaagaaaaagcgaaggaatttcgcag

SEQ ID NO: 69712 - DNA, 100 bp, Homo sapiens
ggcccccggaaaacctaaccatgaagacttgaacttaatacagcaagaaagaccatcaagtttaccaaacattgacatcaccaatttcagcagcagctgg

SEQ ID NO: 69713 - DNA, 75 bp, Homo sapiens
ctctctcgtcctcgctgctgtacttcgtctatgtggcgcccggcatagattgccacggcagtgaagtttctacag

SEQ ID NO: 69714 - DNA, 129 bp, Homo sapiens
gaggaaataaaaacagaacaggaggtggtagagggcatggatatctctactcgctccaaaggtactaggttttgacaagcttgcatcatgcgtgagtataagctagtcgttcttggctcaggaggcgtt

SEQ ID NO: 69715 - DNA, 50 bp, Homo sapiens
cttgatgaaggtacacccaatagagaggcctccgatgaagcagaggaaag

SEQ ID NO: 69716 - DNA, 100 bp, Homo sapiens
aagaagaagttgcgaaggatccccaacggggaggccaacgtgaagaagaactagaggctgctatccagccagatactagcctggtgtcagtcatgactgt

SEQ ID NO: 69717 - DNA, 90 bp, Homo sapiens
cttgattggagttgtgccgctggctatggagtttgttcatctggcaaagagactggttagtgatcctgcattagaaaaggaaatcgtagt

SEQ ID NO: 69718 - DNA, 100 bp, Homo sapiens
tcttccaaaatcctcggattctctacttctgctgtcataggttttggatctgttaaaattgcagcattcatagctatggtaggaattctgtctattgtgg

SEQ ID NO: 69719 - DNA, 95 bp, Homo sapiens
gaatatggagagagccctttgcaggatgcagaagaagccaaaaacattctgggccctgcatcatggaaactctttctaatgcaagtggtactttt

SEQ ID NO: 69720 - DNA, 75 bp, Homo sapiens
ggttggtgcttcctgttcgcagctgcggcagtgacaccctggaggagaagaggttctgctggaacaagctggtgt

SEQ ID NO: 69721 - DNA, 100 bp, Homo sapiens
cagaaatagtccagaatgtcacaggtccagggcagaggaccaacatgggcattttgtttatgagcaaggtgggcagacccagcaacatagggcaggccca

SEQ ID NO: 69722 - DNA, 82 bp, Homo sapiens
ctgagctcagacctgccaatttaccagagataattgataacaccctgtaacagctgatttaagctatgaagaaggacatccc

SEQ ID NO: 69723 - DNA, 82 bp, Homo sapiens
tttatttctcgtcggcggcgccctgcaccgcgcctcgcaaatattctaccttgtaaatactgttatttgtatatactgtaaa

SEQ ID NO: 69724 - DNA, 75 bp, Homo sapiens
cgctgttctcgctccggagccgctgcacatttcgttgttgcgaagctctttggtgaataatagaactcaggccaa

SEQ ID NO: 69725 - DNA, 100 bp, Homo sapiens
gccatgcaaaggcaggggaggaagccacctcgagatgccttattggaggaactggaacgctccacccttcaggacagtgatgaatattccaacccagctc

SEQ ID NO: 69726 - DNA, 100 bp, Homo sapiens
agtatggtagccacacccccaggtctacttccccagcaggacagcatcattctcctatatcttctagacatcactcatcttcctcacaatcaggatcatc

SEQ ID NO: 69727 - DNA, 75 bp, Homo sapiens
agaaaatacaaatcacacgcataatggatgaaaggaaccgacagattggagcatatgatcaacaaatatgggaaa

SEQ ID NO: 69728 - DNA, 100 bp, Homo sapiens
ggaagcaaggcctctggaaaaccgcggcccctgagttgcaaacaaatgtcagatcccaggtatctgatggtataattgccccaggatatgaagaagaagc

SEQ ID NO: 69729 - DNA, 90 bp, Homo sapiens
agtccttggggacggagcagcgcgtcgtggggcgagcggcagctacgagttccagggagctctgtcctggtgaccgtgcccgggttatga

SEQ ID NO: 69730 - DNA, 87 bp, Homo sapiens
agcatatttgagtcatttccttcgtacccacagtgcttcatgagagaacccagtgacttgattgtaaaaatttacagagcggaatca

SEQ ID NO: 69731 - DNA, 100 bp, Homo sapiens
gcgtgtgcaccccggagcgtctggtggcgttgttggggcagaatccagagaccacatttgaagtatatgttgaagtggcctatcccaggacaggtggcac

SEQ ID NO: 69732 - DNA, 76 bp, Homo sapiens
gatctctggtgagacatttttcttccttctgtcacatcacacccaatggactggactcgggccatatccgtggtgc

SEQ ID NO: 69733 - DNA, 82 bp, Homo sapiens
gggagagctcctgggccacccctcctttcaggtcaagggactttgaacatgtcggggatcgccctcagcagactcgcccagg

SEQ ID NO: 69734 - DNA, 100 bp, Homo sapiens
caccagagcgggactctgactccgaacctactgatgatagacacatcgttcatgtacatgatcgccggactctgcatgctgaagctctaccagaagcggc

SEQ ID NO: 69735 - DNA, 100 bp, Homo sapiens
caaagactttctggagagcatccgcaaacattcagacaaaattggagagactgccatgaagcaagttcatcctcagcagcaccggcttctttttgaagtg

SEQ ID NO: 69736 - DNA, 98 bp, Homo sapiens
tggtgttattcagaccaaagtgaaacatcgtactccaatggaatgttacgttcataacttactaaggattagtgtatattttccaaccttgaggcatg

SEQ ID NO: 69737 - DNA, 100 bp, Homo sapiens
tcatccaaatccttctctctgaaggcactacagcaccctggaggagaagaggttctgctggaacaagctggtgtagatgcaagtgaaagctttgaagatg

SEQ ID NO: 69738 - DNA, 75 bp, Homo sapiens
agaccccgaggtgctggaagctgtgggggacaggcaggagcatggcttgaacttccagagactcctggacaccag

SEQ ID NO: 69739 - DNA, 87 bp, Homo sapiens
tggcaccttcgcctggcccaccactcccagagatgctgagccagggaggcggcccttccagcagccatgagggaaggacaggagatg

SEQ ID NO: 69740 - DNA, 98 bp, Homo sapiens
ctaagctcatcattgttactggttctgcagctgattcatgagagagataacatctgtaaacagatccacctgccagcccagagtggaagcagccgtgt

SEQ ID NO: 69741 - DNA, 90 bp, Homo sapiens
cgtcacccggcggcctctcattctgcagctcatcttctcaaaaacaggccctggccaacgtcaacattgggagcctcatctgcaatgtag

SEQ ID NO: 69742 - DNA, 50 bp, Homo sapiens
cttgcatgggcatcctatgatcagacagggttgttacaagttgagttgaa

SEQ ID NO: 69743 - DNA, 100 bp, Homo sapiens
acatgatcaagtccttctatactgcaagtcttttgatagatgtcataacagtatttggagaactcactgatgaaagcaaaggcacaacaccacttgctcc

SEQ ID NO: 69744 - DNA, 101 bp, Homo sapiens
ctcgcagtacagcggcaagatcaagcactggaaccgcttccgagacggactttgaacatgtcggggatcgccctcagcagactcgcccaggagaggaaagc

SEQ ID NO: 69745 - DNA, 100 bp, Homo sapiens
cgttccaacatggacatcctgaagccaatcctgaataactgaagtgaagtgatggactccgatttggagagtagtaagacgtgaaaggaatacacttgtg

SEQ ID NO: 69746 - DNA, 75 bp, Homo sapiens
tccggggcgccacgggggccatgtaagcaggactgagcagggggaggaacatttaagctgatggaagtggaagtg

SEQ ID NO: 69747 - DNA, 100 bp, Homo sapiens
gcctgaaccctgcacagagggctttatacagggccgtgatgttggagaactacaggaacctggagtctgtggtgtgtactgtaagcacggtcacctgtgt

SEQ ID NO: 69748 - DNA, 90 bp, Homo sapiens
ctctggggctccgagcccggcgggaccatgttcaccagcaccggctccagtgggctctatggcctctccagaggagaagtgtcaacaagt

SEQ ID NO: 69749 - DNA, 100 bp, Homo sapiens
ctgccccacagacaagaccatggagtttggccgagacttccggatcaagcactatgcaggggacgtcacgtgttaaagaaatcttactccaaggccttca

SEQ ID NO: 69750 - DNA, 98 bp, Homo sapiens
gggtccccgcaccacctcctgctgccttcccgtcgccgctcccgaagcttttccagattttgagatacagagtgaaaatggggagaactgtaatcaag

SEQ ID NO: 69751 - DNA, 104 bp, Homo sapiens
ccgcgcgcagggcctgcagcgggagctggacggcgagcgcgagcggcgcgagaaagtcttgaggaccggcccagctcaggctcctggggcagcggcgaccagag

SEQ ID NO: 69752 - DNA, 100 bp, Homo sapiens
cctctccagcgatgttcttccagcccctctacagtgtacacaatgggaacttccaggaagccatcttcgacaagagcacagggaaggttgttttgaagac

SEQ ID NO: 69753 - DNA, 50 bp, Homo sapiens
ctcgaccacagcaagctcctggggcctccgaccagggagaccttccatcc

SEQ ID NO: 69754 - DNA, 75 bp, Homo sapiens
ccgggagcccggcctcgtgcgccgcgctttgagggaattcacaattgaaactgaagggaaaacatttcagttaac

SEQ ID NO: 69755 - DNA, 100 bp, Homo sapiens
ctgttcgtggcgctacccgcctccggctggctgacgacgggcgcccccgagccgccgccgctgtccggagccccacagatactgggtcgtcaggatggag

SEQ ID NO: 69756 - DNA, 107 bp, Homo sapiens
aaaggagaaggcagagaaaaagaaacgaggaccaaagccttcagcatggaagaggagatggttcgtgttacgcagtggccgtttaactggagatccagatgttttgg

SEQ ID NO: 69757 - DNA, 75 bp, Homo sapiens
tggcggtggacgagcaggaagctgcggctgagtcggagctcagtctgaatattcttggagaaagatgctgagtgg

SEQ ID NO: 69758 - DNA, 82 bp, Homo sapiens
gatggagctgggggagccgggcggtgagaagccctaccactgcaactgggacggctgcggctggaagtttgcgcgctcagac

SEQ ID NO: 69759 - DNA, 75 bp, Homo sapiens
ggccagccgccccgtccgggagaaaatgaaactgaagccgtggtcacgtgacaggacatgtagtatatagcaggc

SEQ ID NO: 69760 - DNA, 75 bp, Homo sapiens
ccagatcaacctggagctctacgcctcctacgtttacctgtccatggtgatgaacagcctccttctaaatcattg

SEQ ID NO: 69761 - DNA, 82 bp, Homo sapiens
aaggagatgcctggcagccccgctctctgcacagaatggggaaatggagagagaacctgaaagagccccaaactcgaggacc

SEQ ID NO: 69762 - DNA, 90 bp, Homo sapiens
tcgatctggagcttttcccctccccggttcacacaaaagatgttggacaatttctacaattttgcttcatcatttgctgtctctcaggcc

SEQ ID NO: 69763 - DNA, 100 bp, Homo sapiens
cgatctcaagccgactctcaccatcatcaagacggaaaaagtcgatctggagcttttcccctccccggtgtgaagattgctcctggagcagttgtatgtg

SEQ ID NO: 69764 - DNA, 74 bp, Homo sapiens
gcaagaaacctcaggacttgagtaacagcaacatgaaatgggcaagttcatgaaacctgggaaggtggtgcttg

SEQ ID NO: 69765 - DNA, 101 bp, Homo sapiens
tctggtgttatcaacttaaaagatgccacctctaagggtgtaccagtgatggcaataagaaacaaaatgatatcagaaggactagacccagatcttcttga

SEQ ID NO: 69766 - DNA, 101 bp, Homo sapiens
gctcctgtcccgctggccctctgtctgcctgtgtccctgaccatggctccctgcagtaccctttaacgcttacgaggaaatatttcagtaaaagcagttaa

SEQ ID NO: 69767 - DNA, 75 bp, Homo sapiens
ggcaccttccaccaaccgccagatcggggagcatttcctgaagacgtagtcatgcagcacgtcagcagctcccag

SEQ ID NO: 69768 - DNA, 75 bp, Homo sapiens
ccgcttcaacgaagaccgagactttcaggcccagctcatcgcccagtctatcggccaggccttcagcgtggccta

SEQ ID NO: 69769 - DNA, 100 bp, Homo sapiens
tcactagatttacctcctcatctggctcttcatttgtggtacttttaatgcaccagtaatggagcagatccctgcttatatcaaaacggaggctgtgaac

SEQ ID NO: 69770 - DNA, 100 bp, Homo sapiens
caggacctgagcaggaacctggagttttcagaccgtgaacgccatcctgatcgtgatcatggtcccgatcttcgatgctgtgctgtaccctctcattgca

SEQ ID NO: 69771 - DNA, 98 bp, Homo sapiens
ttctgcccgtgcctggagtctggaattcagaacgtcagcacctgcaggttcagtgctggagaatctggtaaaagcaccattgtgaagcagatgaggat

SEQ ID NO: 69772 - DNA, 50 bp, Homo sapiens
gtttccaggaagttcagagagaacaggtaagtaaggaggtctctgtacca

SEQ ID NO: 69773 - DNA, 90 bp, Homo sapiens
gtttacagtgcagtcttatcgaaggatgtgcatgaaggacagcctcttctcaatggggctttgttatgcacctaaagccatattggaagc

SEQ ID NO: 69774 - DNA, 89 bp, Homo sapiens
agcttcagagggaagcccgagaaacacaggagagcgagcgcaagcccccaccatacaagcacatcaagcgaggatgaactggaagaggc

SEQ ID NO: 69775 - DNA, 82 bp, Homo sapiens
gtaacttcaccgagtaaagaggagtgttttaaaatcaaagatgggaaaatcggagaaaattgcccttccccatggccagctt

SEQ ID NO: 69776 - DNA, 75 bp, Homo sapiens
ggactccaaggcggagcaggccaaagtgaagaaggctccctggggaagggaatgcagggttgctggggctgggcc

SEQ ID NO: 69777 - DNA, 90 bp, Homo sapiens
tgcgtctcggggtggtgactgggtccagaatggcttcggattcggggaaccaggggaccctctgcacggcacacagaggagtactttctg

SEQ ID NO: 69778 - DNA, 100 bp, Homo sapiens
tggctttgcctttctggacacagaagtatttgtgacaggcctaatgggattgtttgaaaaacgtcgcttcaggaaattcctagtgtatgttgccaacttc

SEQ ID NO: 69779 - DNA, 50 bp, Homo sapiens
ccaggttgagctgcgcgcaggctgggctgcattgtattctcaggctccta

SEQ ID NO: 69780 - DNA, 100 bp, Homo sapiens
gggacttcctgacgcccccgctgctgtccgtgcgcttccggcgctgttctcttaggtttcctgtaccgctactacacatcggaaagcaaatcctcctgag

SEQ ID NO: 69781 - DNA, 75 bp, Homo sapiens
gaccaggaggaggttttcaggaccaaaattgtggaaaagtcactctggctccttcgagagcagtggatccgggcc

SEQ ID NO: 69782 - DNA, 100 bp, Homo sapiens
gatggattgtccctggaggaggcatggagcccgaggaggagccaagtgtggcagcagttcgtgaagtctgtgaggagtctatgcagatggtagtatatgt

SEQ ID NO: 69783 - DNA, 75 bp, Homo sapiens
ggaaaatatataccatgatctacaggaacttggtagtagtcaatcagcagggttcttgggtgtctctggggagtc

SEQ ID NO: 69784 - DNA, 102 bp, Homo sapiens
ttccttggaagttctaatcggatctggctataatacccctgctgacatttggagcacggcatgcatgattgtcaaaagagtggggaatggtgaggaaacgcc

SEQ ID NO: 69785 - DNA, 75 bp, Homo sapiens
ctgacaatctacctaatcaagcttttgcagaaaaaacttcagcatgtgccaggaacacaacctcaccttgatcag

SEQ ID NO: 69786 - DNA, 82 bp, Homo sapiens
ccccctcctcactttctgcacagctggcccgagataacttcttccgctgtggtgtgctgtatgaggactccctgtcctccca

SEQ ID NO: 69787 - DNA, 82 bp, Homo sapiens
cgatccagcctgcggagcctgtggggcaggtcagtcttcactgtttccaatggaagatggattcttggatgatggccgtggg

SEQ ID NO: 69788 - DNA, 100 bp, Homo sapiens
gaagacaaggatgaagacctccatgatgagccatctccacttaatgactgtctcacattggccggcaacttgttccagataggaaccaaggctttagcct

SEQ ID NO: 69789 - DNA, 100 bp, Homo sapiens
ggtggacctgctggcgcaggacgccgacatcgtgtgccgctgccaggaattggcagcaatgaaacagattctcgttaagatgcatagtaaacattctgag

SEQ ID NO: 69790 - DNA, 50 bp, Homo sapiens
cagccaggaaccaagaaaacttggtggtcttggaggcattgggatgggac

SEQ ID NO: 69791 - DNA, 51 bp, Homo sapiens
ctgtgagacacgttaaaatttcagggtcaacggcagagacttatccagagc

SEQ ID NO: 69792 - DNA, 100 bp, Homo sapiens
ccctggagcggtctgtgttcagcgagcggacggaggagtcttctgccgtgcagtacttccaggttcaggaggaaatgggctcagccttcccggttcttcc

SEQ ID NO: 69793 - DNA, 75 bp, Homo sapiens
ggggacatcgtccagccagtcctcaacccagtcctcatcaccgggggcatcgtggccacagctgggcgcttcacc

SEQ ID NO: 69794 - DNA, 107 bp, Homo sapiens
caaagcagtcgtaagaagaggtcccaatcccccactctttccgccctaatggaggtctccagtttcgtttcattcattggctcccatgtactatcgaggctcagctg

SEQ ID NO: 69795 - DNA, 73 bp, Homo sapiens
gagaagagccatggaaacaggaggaagaattcccaagccaaagctttccagagcagtcattatggcgaacctt

SEQ ID NO: 69796 - DNA, 97 bp, Homo sapiens
ttgtttgcgtgcaatgttcaccagtcagtgtttgaaggagaagagagcaaggatacctgcccactatgtctatccgcaggcttttgtgcagccggga

SEQ ID NO: 69797 - DNA, 82 bp, Homo sapiens
ctgtcccctgccggggccgccctactctggggcttcctgctccagctgattccagctaagaaagagtcttgtccaaacactg

SEQ ID NO: 69798 - DNA, 100 bp, Homo sapiens
agcgcccgaacccaaaggggtggacgcggcctccagatggaacccctccaattgatgcccatacaaggaatttgcttcggaaccacataattaaagacca

SEQ ID NO: 69799 - DNA, 82 bp, Homo sapiens
ttcgagctctcctctgatggcaggacctgccaagaactctgacagcgtcccacctggctacgagcccatctcgctgctcgag

SEQ ID NO: 69800 - DNA, 100 bp, Homo sapiens
ccatcccggaggtctccgccggctcccgggtgagactgctgctcctcgggccattttgaccggccatgactatgaggtcacatgtgctgcggtgtgtgcg

SEQ ID NO: 69801 - DNA, 75 bp, Homo sapiens
gctagtggccatttacaggaatcagccacttcagttcaggtgggtcctacgtgtatgaactcagcgcagtcctca

SEQ ID NO: 69802 - DNA, 96 bp, Homo sapiens
gactctccggccctgtgcagttttcaggatctgaagctgagggaattctactgtgagggaaacccactgttcctgcagcagccagtgatttctaca

SEQ ID NO: 69803 - DNA, 90 bp, Homo sapiens
ggccgccgcgcaggagcctcccggagctggttgggttaacggcatggagaacagtcaccccccccaccaccaccaccagcagcccccgcc

SEQ ID NO: 69804 - DNA, 100 bp, Homo sapiens
gtggagatgttgaaggaaagtttgatattttattcaatagagttcaagcaattcagaagaaaagtggaaactttgatgtgaaagaaaagatgttgtcccg

SEQ ID NO: 69805 - DNA, 50 bp, Homo sapiens
cttgcgcttgcctttgcctcttccacgatagaaagagtggtagagcagag

SEQ ID NO: 69806 - DNA, 75 bp, Homo sapiens
gcctacggaggtggcagccatctccttctcggtatgaaaatgaaagtcttcagaatggaaggaagtcaactgaat

SEQ ID NO: 69807 - DNA, 51 bp, Homo sapiens
gctcaaagaaagatgattatgcatttgttgctatcggggactacaatggcc

SEQ ID NO: 69808 - DNA, 98 bp, Homo sapiens
agcagctcagcctggacctgtaccaaggcaccgggtccctcgcccaggtccccttggacaaatgggtcggaacgagctgattgcccgctacatcaagc

SEQ ID NO: 69809 - DNA, 50 bp, Homo sapiens
aagcagatggattcgtccttttaggtgcaaagttccccatcaagtggacg

SEQ ID NO: 69810 - DNA, 97 bp, Homo sapiens
cttaatctggatcataagtctcggatctttcagaacctcaacggggctttaggtaacctggatgaggacatcattgcagaagagaacatcgtttccc

SEQ ID NO: 69811 - DNA, 100 bp, Homo sapiens
actattactacctcaaccaatcggacacctaccaggtggacggcacggacgacagaagcgactttggtgagactctgagctcgtccgcatggtgctgaat

SEQ ID NO: 69812 - DNA, 82 bp, Homo sapiens
gctggagtcagtggaagacggagctggtcggcccgaaggcttgggcactgtttaaaggaaagttccgagaaggcatcgacaa

SEQ ID NO: 69813 - DNA, 99 bp, Homo sapiens
gagaggagttgagaacatctctgttgacattcattgtggtttctaagcatgaattgaggaacagaagaagcagagcagatgatcggagcagcatttgtt

SEQ ID NO: 69814 - DNA, 100 bp, Homo sapiens
ccaaaaatagacgcaccattgaagttaaccggtgtaggagaagaaatccgcagaagcttattaaagttaaggaacttgccacatcagactcagattcccc

SEQ ID NO: 69815 - DNA, 100 bp, Homo sapiens
agatgaacccaacctagtgggtgtaatacatcatgaactgcagggcctaccagacttgaagaaagtggtggtgattccttatgtgtcctccagagagaac

SEQ ID NO: 69816 - DNA, 95 bp, Homo sapiens
gattagagagaactcccctgcagtctctcctaccacaaacagcacagctccatttggcctgaagcctcgatcagcttggtgtaaaaattgccaaa

SEQ ID NO: 69817 - DNA, 98 bp, Homo sapiens
ccaccgtgcacatccgaatgggcactactgcagtcttcagttaagcaacaagtagaagctattgaaaaacagtacatttctgcaattgagaaacaggc

SEQ ID NO: 69818 - DNA, 100 bp, Homo sapiens
aaagattgagcggcgacagcaagaagtggagacagagcttaaaatgtacagggtcttgctgtgttgttgaaattcatcttgatctcctgagctcaagaga

SEQ ID NO: 69819 - DNA, 82 bp, Homo sapiens
ttctacacagaggctttctttcccagaaacccagaccagacaccatccagcacatgagagacagcaagcacatcgtcgtgta

SEQ ID NO: 69820 - DNA, 82 bp, Homo sapiens
gaacgagacttttctcagatgttggatatttgcttggaaaaacgtgtgggtacgaccttggaattgaatgatctggcacggg

SEQ ID NO: 69821 - DNA, 100 bp, Homo sapiens
gtgaagccatgtccttttagaccctaccatagtcctcttctagtttttaagtcctacaggctttcttcaatactaaaaatgtatggaagtcctttgaaaa

SEQ ID NO: 69822 - DNA, 87 bp, Homo sapiens
cccagccggggccccgaagaggacagagcccgcggccgcgccgagcgggtggcctgattccaccaagagaaggcccaggaggaagaa

SEQ ID NO: 69823 - DNA, 100 bp, Homo sapiens
gtcggaccccagtaccaggcggtggtgcccgacttcgaccccgaagctgccagtaactcagattctagccatgaaggtcaagaggaatcttcaaaggaaa

SEQ ID NO: 69824 - DNA, 82 bp, Homo sapiens
cgagaaatggccgcgtcggcaggtttgggccccatggtatccctgtgacagtatttcccaaaagggaatataaggataaacc

SEQ ID NO: 69825 - DNA, 90 bp, Homo sapiens
tggaaacttcacaattcctgataattctcgatattctcaagacatgcactgcctaattagtgtcagctgtgatgcatgtttaaaaggaaa

SEQ ID NO: 69826 - DNA, 53 bp, Homo sapiens
agctgtgaaaaaagccatttccgaaggtgaattatgtaacctcattacgctgg

SEQ ID NO: 69827 - DNA, 100 bp, Homo sapiens
gggagccgcaccacctaacgctggccgacaacagcctggcgtccgccacggtgaaagaacttgtcctggacaacagtcggtcgaatgaaggcaaactcga

SEQ ID NO: 69828 - DNA, 90 bp, Homo sapiens
cgagaccagtccacctacatcaggacttgaactgccatgtcctctgaagaaggaaagctcttcgtgggagggctcaactttaacaccgac

SEQ ID NO: 69829 - DNA, 90 bp, Homo sapiens
gcaaggctgacgtggagcggtacatcgcctcggtgcagggctccaccccgtcgcctcgacaggctgtggaaaatctctgttctcacaaag

SEQ ID NO: 69830 - DNA, 83 bp, Homo sapiens
tgacaatggcgctctctgttctagtaactatagaaatgtgtaacgccctcaacaggaacgatggcactgaatttggaggttct

SEQ ID NO: 69831 - DNA, 83 bp, Homo sapiens
ccccgcccgcgccggaagagccacgccggcccaggctgcaagcacaaaggaagtttgctcagtctcagccgaatagtcccagc

SEQ ID NO: 69832 - DNA, 100 bp, Homo sapiens
ccaatggcagtgatgatggagctcagccctccacctccacaggaaaaagtgttaatcgaagcttacaagaaatgtctcgctgtactgatgcagtgtcatg

SEQ ID NO: 69833 - DNA, 97 bp, Homo sapiens
ccaacacagtgtttggtttggggttttcctctgagcagcagctgacaaagtttgcctatctggggcgcctggctcacgaggttggctggaagtacca

SEQ ID NO: 69834 - DNA, 75 bp, Homo sapiens
aaaaacaaaattctgaactcaggacttggcaagtcctaggcctacttacaagcctccagtctcaaattatccagg

SEQ ID NO: 69835 - DNA, 50 bp, Homo sapiens
cgaagccgaaaaaggcagcagcgaagctccgccgcatgcaagagatgatt

SEQ ID NO: 69836 - DNA, 87 bp, Homo sapiens
ccccctgccacctcagatatttaatggcgaccgatactgtggagctccagacccagttcctggacctgccctggaaaagaagtatcc

SEQ ID NO: 69837 - DNA, 75 bp, Homo sapiens
ccacattctcaacaccacggaattccattgccggtggtggtgtgcacattgagccccggtatagacagttccccc

SEQ ID NO: 69838 - DNA, 82 bp, Homo sapiens
cagcggaggtcagcgggggtcagcagcagcggctccgagggcgcggcggacgcaggatggcggtcgttcccatcgtcatcag

SEQ ID NO: 69839 - DNA, 100 bp, Homo sapiens
catttttattgaaagatgtattgagtacattgaagccacagtctgactgacagtactccacaagcttgcctgccatgggctgtcgggatgtccacgcagc

SEQ ID NO: 69840 - DNA, 90 bp, Homo sapiens
gcggagtcggggctcctgacgggatcatagacggtatttctatgtaaacgaacagtcgggcgagtctcagtgggagtttccagatggtga

SEQ ID NO: 69841 - DNA, 100 bp, Homo sapiens
ataagcttgaagaaactttccctgcctatttacaaggtcctggttactgggtgaagattcatcacttagaatatacagatggaggaatcctggatccaga

SEQ ID NO: 69842 - DNA, 82 bp, Homo sapiens
gcgaggctagggaggacctcacttccccggggtgtaataatgttaactgagatcgccaaactgaggcagcaactacaacgca

SEQ ID NO: 69843 - DNA, 97 bp, Homo sapiens
ggaagcctcctgccgagataaagccaccacgtctgggtattacttatgaccatgtcgaattaaatgtatacttgaatggaaaaaacatgcattgtcc

SEQ ID NO: 69844 - DNA, 100 bp, Homo sapiens
aaggactggcagctgtccagaagtttactattttgatagatgttactttgctgaaaatagaactgttgcacctggacttgatatgaaagtaaccatcaga

SEQ ID NO: 69845 - DNA, 101 bp, Homo sapiens
gacgtccttctatggccgcttcaggcacttcttggatatcatcgaccctcgcacactctttgtcactgagatgtgccgtttgggggtgctaaagctggtgt

SEQ ID NO: 69846 - DNA, 100 bp, Homo sapiens
cgaggtagaagaagatgaacccacagatttgattgtaaaccatggctgtgtggatacaagctcagcagctccaaggagaagcccttcatcagatgcaagc

SEQ ID NO: 69847 - DNA, 89 bp, Homo sapiens
agcctcaggggtctccgccatttttggtgaactgcaagatgacctcaggtggtgttcccactgatgaagagcaggcgactgggttggag

SEQ ID NO: 69848 - DNA, 101 bp, Homo sapiens
aaaggagagctaccatcactaaggtgagccagccatgagagggtatcttgtggccatattcctgagtgctgtcttcctctattatgtactgcattgcatat

SEQ ID NO: 69849 - DNA, 100 bp, Homo sapiens
ggcacaaccaaggactactgcatgctttataacccttattggacagctcttccaagtaccctagaaaatgcaattgttgaacagataaatacgaaactgc

SEQ ID NO: 69850 - DNA, 100 bp, Homo sapiens
tgacatcaatgtcacaaaagcggatgttgaaaagcaggaaaccagtctcagtgtccaactctctaaccttggaactgtgagaactctgaggacaaagcag

SEQ ID NO: 69851 - DNA, 100 bp, Homo sapiens
cgcgcttttgctcctcctgaagtgtctttggtccaacgttgttccaggttcagaagaagaacccagtcctgttttgaaaactttggaaaggagtgccgct

SEQ ID NO: 69852 - DNA, 89 bp, Homo sapiens
gctgcagcacgtggacgctgactcggaagtgcagcccgtggaccgggagcccgtggaccgggagccggtggtgtgccaccccgacctgg

SEQ ID NO: 69853 - DNA, 74 bp, Homo sapiens
agtattacactagccctgggaaatgcacagaaattgccaaaagtgaaactggaacgccaagctgaagaagaacg

SEQ ID NO: 69854 - DNA, 100 bp, Homo sapiens
caacttctctgccctcctctacctgctgatcagctctgccagcatgctaaccctcggggtcattgccatcgaccggctaatggaggttggcaggatgcta

SEQ ID NO: 69855 - DNA, 75 bp, Homo sapiens
gcaacatggacgcgctcagcgagtgggactggatggagttcggtttaagaattgtttaagctgcatcaatggagc

SEQ ID NO: 69856 - DNA, 101 bp, Homo sapiens
ctcagaggccgccatcaaccgccagatcaacctggagctctacgcctcctacgtttacctgtccatggtgctgaaggtcgccatcctggctgagaagtacg

SEQ ID NO: 69857 - DNA, 90 bp, Homo sapiens
cgcgacctggccagctgccgcgactgggaggagcgccggaacgccgaggcccagaaaaacgttgacctcttggcgagaatgcaaagaagg

SEQ ID NO: 69858 - DNA, 74 bp, Homo sapiens
gaattaccagtcagtgaagttgcaagcattctccaaaatcgagagctccagatcatgagaaagctagatcactg

SEQ ID NO: 69859 - DNA, 100 bp, Homo sapiens
gaatgaatgaaccttgccctggggttaacactccagtgggatgaacagacaaaccccacaagcactgcatacggagaactcctggaagccccgtcttcct

SEQ ID NO: 69860 - DNA, 151 bp, Homo sapiens
cgccgccacagctttaggaaacacctctacctcctgcgaggcctcccgggctccgggaaaactacactggccaggtactccaaagattcaggtttactcacgtcatccagcagagaatggaaagtcaaatttcctgaattgctatgtgtct

SEQ ID NO: 69861 - DNA, 90 bp, Homo sapiens
cgatgagcctcccattctcccagacatggggaacagggtcacagctctcacccaggagcatctttccttgaagaagtacattattgacat

SEQ ID NO: 69862 - DNA, 101 bp, Homo sapiens
gcaacagctctgccggctggaaggtacaacaaataacactgtgactccaacctcacaacctgtgcgaaagtctacctttgatgcagccagtttcattggag

SEQ ID NO: 69863 - DNA, 100 bp, Homo sapiens
ggatcacggtgagggaaagatgagcgaggagacggcgacttctgacaacgagagtgtgatcaagttcatatagatgatgtttcctctgatgataatgggc

SEQ ID NO: 69864 - DNA, 100 bp, Homo sapiens
cagggagctctcgcgccttggcccattgtcgggcttggaaaattcttgttaaaagttgatagcaagagccgagactgtctgaagctgggcccacctgctg

SEQ ID NO: 69865 - DNA, 98 bp, Homo sapiens
agccatcaggtaggctgcgttgaggatctttgctcttccatccgcctttgatcgtcttcctcttcagccatccaggtgtatctacatcagcaatcaaa

SEQ ID NO: 69866 - DNA, 101 bp, Homo sapiens
ccagaaggagagattcctctgccatggagtcctacgatgtgatcgccaaccagcctgtcgtgatcgacaacgagaagaatttggattggtttcctcggatg

SEQ ID NO: 69867 - DNA, 75 bp, Homo sapiens
ggctgactgtcttcggagtcggatggatactatgatgctgaatgtgcggaatctgtttgagcagcttgtgcgccg

SEQ ID NO: 69868 - DNA, 83 bp, Homo sapiens
tgcacttccgagccgcccggccacccttcgtcatctgcgtgaagctgatatttggagttcttacaacatggcagacattgaca

SEQ ID NO: 69869 - DNA, 98 bp, Homo sapiens
tgaagaacctgggaatcagaccctgagaccctgagcaaatcgagaacggctactttgtacactactttgcccccgagggcctaaccacaatgcccaag

SEQ ID NO: 69870 - DNA, 100 bp, Homo sapiens
gccagactcagggatcaaagagcaaacagattcagtggcctgcattgatattacagtgacagagagaaacacagaaaactggatgatcacaggagtagag

SEQ ID NO: 69871 - DNA, 101 bp, Homo sapiens
agcataatccctggaagcttagtggagaagcctttgacatcaacaaactcatcagggacaccaattcaatcaaaggcatgagccagaaggagagctctaag

SEQ ID NO: 69872 - DNA, 74 bp, Homo sapiens
gacgagaatgagaacatcaccgtggtgaagggcatccggtgagtgatagttgcttcaggaatcttgcagaagac

SEQ ID NO: 69873 - DNA, 83 bp, Homo sapiens
caggggccgtccccaggacactgtccggatcttccctccctgctaaaagatggcggcaaggcagcccaggcaaatgtaagaat

SEQ ID NO: 69874 - DNA, 83 bp, Homo sapiens
ttgaagtctgtgtcaaacatccatatcataagtggaattttggagatattcaaagatgaagaaactgaggttcagagaggtta

SEQ ID NO: 69875 - DNA, 51 bp, Homo sapiens
agggggccggcgcccgcggttcagggcaactccaacaacattgccaccgtg

SEQ ID NO: 69876 - DNA, 90 bp, Homo sapiens
gaatcctgcggcagaagccgagttcaacatcctcctggccaccgactcctacaaggcacgtgtggttctcaaatataggcattctgatgg

SEQ ID NO: 69877 - DNA, 75 bp, Homo sapiens
gaggaaaaggatatcaggactggaatggctcttacagcaagatcccccctggcgaagcggtgctgcctccagccc

SEQ ID NO: 69878 - DNA, 97 bp, Homo sapiens
tccactggtagcccccacccctctccgtccatggccccagatgacacttcagagatcatcttcagacaccaacgaaagtgaaataaagtcaaatgaa

SEQ ID NO: 69879 - DNA, 50 bp, Homo sapiens
tatactacatggcaaaatgggaaagatcttagcaaagcaatgtctcaaga

SEQ ID NO: 69880 - DNA, 98 bp, Homo sapiens
gcaagcgggaaccaggtggccacccggtgtcggcagaagattttcgcaagctctggaaaactccacctcgagagaaagcaggcttccttcaccacgtc

SEQ ID NO: 69881 - DNA, 75 bp, Homo sapiens
catcatggacacgctactttagctaaggcatgaccagcaatgaacagtagtaagctgggctcaaaatgcagagaa

SEQ ID NO: 69882 - DNA, 102 bp, Homo sapiens
cagtgatgaatggcggcatgaaggaaacgctcagcctcactgtagatgccaagacagagactgcggtcttcaaaagatacagtttatgtaacttgatggaag

SEQ ID NO: 69883 - DNA, 84 bp, Homo sapiens
ccccttttcctggtgcatgtgaagttatcaaaaacagctcagaggatccagaacggctgttcctgtccatgtgcctggtcacgg

SEQ ID NO: 69884 - DNA, 101 bp, Homo sapiens
gaaatcagaaatatttcatttaatgacaaaaaatttgttataaagccaatcgacaaaaaggcacctccctggtacctgacagtgtaaagaaggagctccta

SEQ ID NO: 69885 - DNA, 100 bp, Homo sapiens
tttctttcttaaaggactgatttttagaactccacatttgagcccccaaagcaggttacagccaaggtgcaactcagtatactcaagcccagcaaactcg

SEQ ID NO: 69886 - DNA, 96 bp, Homo sapiens
gatctctgagaaggcgcagcgttgaaagggacaaccttaaacttccaccacaagaggaatataaagaggtccctcctgcaccaagaaagatctgca

SEQ ID NO: 69887 - DNA, 100 bp, Homo sapiens
cccaagtctctttccagaggccaggctttatgggagcatgggttaccagcgacgcaccctagcatcactttgggtcctcaggaatgacattacatgaacg

SEQ ID NO: 69888 - DNA, 100 bp, Homo sapiens
cagctgaaattgatgaagaaccagtcagtaaagcaaaacagagtcggagtgaaaagaaggcacggaagttgaccactgaaaaacacacatactatctgac

SEQ ID NO: 69889 - DNA, 88 bp, Homo sapiens
aactgggttctggactttgggcgtcccattgccatggaattgaatgatctggcacgggaccctccagcacagtgttcagcaggtcctg

SEQ ID NO: 69890 - DNA, 98 bp, Homo sapiens
tgcggtgctctgccatattgtgtcttccccggccggtccctcgcctcccggccgagctgacggcagcagtgaggatgccagagttcatgggtttctag

SEQ ID NO: 69891 - DNA, 83 bp, Homo sapiens
cacaggagtcgctggatagactgcacaaggtgaagactgtctgcagcaagagtcatcttagtgggatttggggaagcaacagg

SEQ ID NO: 69892 - DNA, 96 bp, Homo sapiens
tgaatgcagaggaaagcagcttggcaaattaatttttaaggggccctgagatagctttgcttcgtaagcgcctgcaacaactgaggcttaagaagg

SEQ ID NO: 69893 - DNA, 101 bp, Homo sapiens
ctactcttgatcctctccggctgcttggtctacggcacaggtgctggagaatctggtaaaagcaccattgtgaagcagatgaggatcctgcatgttaatgg

SEQ ID NO: 69894 - DNA, 98 bp, Homo sapiens
gacgcatcttgtgggtccagtgacgatggtccttcagggaggacccagtaagatgacctccttaaaagaagatgtgcggcgcagtgccatgctgtgta

SEQ ID NO: 69895 - DNA, 75 bp, Homo sapiens
agaaaacctgcacaaactgctcgaatactctttccattccttaccccagtttttgaagcattaaatgtctctctg

SEQ ID NO: 69896 - DNA, 117 bp, Homo sapiens
agaagatattttgtgtgctgagtttcctgatgaacctaaatggatgggtggagctgagatgtgtcatccccacaccagcgagcctctgccaagatgaaaccgatagaagaaggagca

SEQ ID NO: 69897 - DNA, 90 bp, Homo sapiens
gtgaccccatatatgattttctttaaggatggtttagaaatggaaaaatgtaaagggtttgatgtgttcaatgcactggatctcatggag

SEQ ID NO: 69898 - DNA, 75 bp, Homo sapiens
gtggtggagaatggactggacccccaggctgccatcccggtggacgacccaccggagcccgtgtacgcgaacata

SEQ ID NO: 69899 - DNA, 100 bp, Homo sapiens
ttaagagaagaaatggacatgattgcctaaatcagccaaacacaggactgaccaaatatggaagtgtgcaagtcttgaacacattagtttatacaatgtg

SEQ ID NO: 69900 - DNA, 100 bp, Homo sapiens
gacgaaacaaaggagagcacttcatgccctgtggtacaaaaaagagcagctctactccctgaaaagcaaaggcctcatctccatggcacaggtgatgaaa

SEQ ID NO: 69901 - DNA, 98 bp, Homo sapiens
tattgcctgatctccatgcattagaacacacatactctgataaaggtgcataaggcaaatccaatacgcaagtaccagggtctggagataaagtcaag

SEQ ID NO: 69902 - DNA, 119 bp, Homo sapiens
ccccgctctgctgtgggcgctgctggcgctctggctgtgctgcgcgacccccgcgcatgatgccatggacaatattaccaggcagaaccaattctacgatacccaagtcatcaaacaag

SEQ ID NO: 69903 - DNA, 100 bp, Homo sapiens
gccgggagttcaagaagaacactccagagttggagtcattcgttgcccagtttgcagccaagaatgtgcagagagacacatcatagataacttttttgtg

SEQ ID NO: 69904 - DNA, 90 bp, Homo sapiens
ctcgtcgaaaggattggattggcatctttagatggatatgtgcaataaacaacatctccagacagatctacctgaccgacaaccctgagg

SEQ ID NO: 69905 - DNA, 100 bp, Homo sapiens
atagttctggaagcagcaaaagcataggcaggctttcaaaaacagaaataccttgtaactgtaatttcctgaggctgcatatccacagggccaactcagg

SEQ ID NO: 69906 - DNA, 100 bp, Homo sapiens
cctgagccccagccaggacgagaggatgcggagcccgcagaacctccacagtcaagaggacggtgatgtgtccaatctagatcccaacttctcatttgaa

SEQ ID NO: 69907 - DNA, 90 bp, Homo sapiens
ttagccggagtgagaagcaagaaggccctggacacagcaatatctctgggctttcacagcgcttctctgaagtagctttggaaagtagag

SEQ ID NO: 69908 - DNA, 100 bp, Homo sapiens
gagatcttgacaggcttctacaggacatggatattaatcggcttagggcagttgttttcagagacatagattcggaaacttcagatacgaaatatcccgc

SEQ ID NO: 69909 - DNA, 82 bp, Homo sapiens
cctgcagcgaaggatcctggttgtgtgtcccggcatggatatccggaacaacctcactaggttgcatgagctggagaattgc

SEQ ID NO: 69910 - DNA, 100 bp, Homo sapiens
atgtggtgctgcccgagaaggtggacgtgctggtgtctgagtggatggggacctgcctgctggaggaggtctgatggccgggaggacaggaagaaggaac

SEQ ID NO: 69911 - DNA, 82 bp, Homo sapiens
cttcatcatgcacatcttcaagcatgctcagaaaatgtggtgacctggaagaagaactcaagaatgttactaacaatctgaa

SEQ ID NO: 69912 - DNA, 75 bp, Homo sapiens
gggtggcacattttacagaataagtcagatgactttctgtctcccatggctattgaagaacaagtggctgttatc

SEQ ID NO: 69913 - DNA, 95 bp, Homo sapiens
gactaccaacgtttggaccagaaggaagctctgatcatggcaagtatggatcatccacacctagtccggttgctgggtgtgtgtctgagcccaac

SEQ ID NO: 69914 - DNA, 90 bp, Homo sapiens
acaatatatatctccatttcatgatattccaatttatgcagataaggttttcaaaattcacttctacagatcgtaattccagagaaaatc

SEQ ID NO: 69915 - DNA, 114 bp, Homo sapiens
caaaaggttactatagccaaaattcccagagcaaagaagaaatatgtgacaagagtatgtggccttgcaacttttggtaaaaggattgagagggaagaagaggaagaagaagaa

SEQ ID NO: 69916 - DNA, 100 bp, Homo sapiens
taaaaagaggcgaaaggaagcaagcagttcagaagagccaaggaataaacatgcaatgaacccaaaaggatgatgattggcaggaagcacatgagcgcct

SEQ ID NO: 69917 - DNA, 89 bp, Homo sapiens
ggacatctgctgccggaaggggtcccgaagccccctgcaggaactctacaacccaatccaggaaggggaacagtttgtgaagaaaatcg

SEQ ID NO: 69918 - DNA, 90 bp, Homo sapiens
aacgcttggtttcatagagactgtttacaggttgaatttcaggcaggatctgaaggccaacttctgcctcagcattatctaaatgatctt

SEQ ID NO: 69919 - DNA, 100 bp, Homo sapiens
ggcgccgcgccaggccgggcgggcggtgtgtagctgggacggtgctggtctgagctggaccttgtctgatggcttcctccaaccctcctccacagcctgc

SEQ ID NO: 69920 - DNA, 100 bp, Homo sapiens
gctgcccctgggccgcaagaagggagccaagctgtttggcttcattaactatgaagtaggagatagcaagaagctctttttccatgtgaaagaagttcag

SEQ ID NO: 69921 - DNA, 100 bp, Homo sapiens
aggagatgaataagtgggttcgttgtatttgtgacatctgtgggtttaatccaacagaagaaggctagtgtgagaaacaccaacagcaggcccatctcag

SEQ ID NO: 69922 - DNA, 75 bp, Homo sapiens
ccaaaaaagcaaggccttctgagactggatctgatgatgtatgtcgagagtaccaacgtggcaattgcaaccgag

SEQ ID NO: 69923 - DNA, 75 bp, Homo sapiens
gtgtcgcaataagcagtgcattcccatcagtagctgcccacaggtgctttacaaggccaagtacggtccaatgtg

SEQ ID NO: 69924 - DNA, 51 bp, Homo sapiens
attcgttacagccagagattgggcagagcggcttgggtaaatccaccttaa

SEQ ID NO: 69925 - DNA, 132 bp, Homo sapiens
gttccagccactaactacaatcaccatcttgttggtgcttcctcatgtattgaagaattccaatcccagttcatttttcatttgacattgtgcagcaaagaaatggttatggagaagcccagtccgctgctt

SEQ ID NO: 69926 - DNA, 51 bp, Homo sapiens
gccctcattcaggcccagccctggaccgtgtttcttcgcctcgcctccctg

SEQ ID NO: 69927 - DNA, 97 bp, Homo sapiens
ggggaagggcagcctggacccagagagcatcttcgagatgatggaggtcctcatcagcatggtgtacctacccgaggccatgccagcctccttccag

SEQ ID NO: 69928 - DNA, 101 bp, Homo sapiens
gcagcagccccggggcccggagagcatagctgtcagtcagatgggaactccatttatttccatggaaatgaaggcagcgagttcaattttgccaccaccag

SEQ ID NO: 69929 - DNA, 75 bp, Homo sapiens
tgcctggagaacctcggagaccagcaaatgctgaccccctgaaggtgtacccgccactgaaggggagcttcccgg

SEQ ID NO: 69930 - DNA, 100 bp, Homo sapiens
agtgctttgtgatcgaaaccctgaccggatcccataaacactgtcggtacaccaggggttggaaaaaccacactaggcaaagaacttgcgtcaaaatcag

SEQ ID NO: 69931 - DNA, 82 bp, Homo sapiens
aagtaaaatggacatacctaatactttccagatcctgataacttaagtgactctctcttttccggtgatgaagaaaatgctg

SEQ ID NO: 69932 - DNA, 90 bp, Homo sapiens
ctttccagcctcagtcggacgggcgcggagacgcttctggaagacaatgcagatcttcgtgaagactctgactggtaagaccatcaccct

SEQ ID NO: 69933 - DNA, 98 bp, Homo sapiens
ccgccatttcacatccagcagaggaggcgggggcagccgctgagacggtttttcacaaggtcctcagccagcagagccacgttccttatgagcaccgt

SEQ ID NO: 69934 - DNA, 75 bp, Homo sapiens
agccgcttctggggcctcctggcggcagcctggtccgacccccagtggcactaacgtgggatcctcagggcgctc

SEQ ID NO: 69935 - DNA, 74 bp, Homo sapiens
gatgccctgcagtacctgcagaaggtctctggagacatcttcagcaggccgctttgaagaggaatttatcaaaa

SEQ ID NO: 69936 - DNA, 97 bp, Homo sapiens
gacttgccctgcaccgccccctgggatccgcaggttccctacacggtctcctgggtcaagggaactctaatgatccaggacaaagaagttaccctgg

SEQ ID NO: 69937 - DNA, 90 bp, Homo sapiens
cctagtttgggatgagaacagctctgacggccggtatgtgaaggagaactgcaaacctctgaaggtgttgacttcaaaatcaaaactgta

SEQ ID NO: 69938 - DNA, 75 bp, Homo sapiens
gctgatcttgtacttggattcagcaaggaaccttccggagggtttctcttcccctcccagttcgctgacctcgcc

SEQ ID NO: 69939 - DNA, 150 bp, Homo sapiens
gatcctctaacatcacctgcttcatccttgtttaatgactttggtgccctcaacatctctcagagacgaaaggcaactatggtcctgagctccgcacacttctggttgggattatttctggttcctactgcctgtttgattgaagatgtg

SEQ ID NO: 69940 - DNA, 73 bp, Homo sapiens
caatattcaacagactacacttttaaggtgttacagggtcttgattatttacataccaagtgccgtatcatcc

SEQ ID NO: 69941 - DNA, 82 bp, Homo sapiens
gcttgtccttgctggtgcatgcgtcgtcggcctctgggcagcagggggatatgagactttctactcggaatatcctgagtgt

SEQ ID NO: 69942 - DNA, 73 bp, Homo sapiens
tggaattttgatatctttctatttgatagactaacaaatgggaaagctttaggcaaatccacagtggtacctg

SEQ ID NO: 69943 - DNA, 100 bp, Homo sapiens
tggttgttgtattgctgttcattgcgttgcaggccttgggagacctccaactcgggcagtttctatccttcctcttcttggacatggtgttccacgtttg

SEQ ID NO: 69944 - DNA, 131 bp, Homo sapiens
cgagactctccttgcttggaattctgcccactctgcggagttagcagtcacgacctccagcacaggtccatccaagctgaatgatcgcgctgactcaagaagaagcctttgggaccaaggaaactttcccc

SEQ ID NO: 69945 - DNA, 100 bp, Homo sapiens
gggaggatgaagttgattgactatggtctctccggctaccagccctgggcgctgcctatggcacagccaagagcggtaccggcattgcggccatgtctgt

SEQ ID NO: 69946 - DNA, 75 bp, Homo sapiens
acacaacaaaacattcatggagggggaagctgtggatctttccattgatgagtccagcttgacaggtgagacaac

SEQ ID NO: 69947 - DNA, 100 bp, Homo sapiens
agagctgcatcatgcggcagtgcatcgcgaaacgttcagtgcctgtagccactgtagaactggaagaaaagaggttcagaactctgcctttagtgccaag

SEQ ID NO: 69948 - DNA, 75 bp, Homo sapiens
gtatgtttctggaacattgcgatttggaatcaaatggttatgagccttagagtttctgaactccaagtactgttg

SEQ ID NO: 69949 - DNA, 50 bp, Homo sapiens
gatatatacagagacagtaggattgtagaaggcatgaaacaaaaaatgtg

SEQ ID NO: 69950 - DNA, 82 bp, Homo sapiens
ccgtccatgcggaagatcgtcgccacctggatgctggaggtcactatcatatgacaaaggctttgccgcagttcatcttcct

SEQ ID NO: 69951 - DNA, 98 bp, Homo sapiens
tcaaagccgggagatcgactgtttgagcccggaagcgcagaagctggccaagaataaggagacgggtgctttggctgcggccaaagtcattgaaacca

SEQ ID NO: 69952 - DNA, 98 bp, Homo sapiens
tggttttgatatggattatacccttgctggaaggaaaatcacctcggcagtgtttgaaggaaggatactgcaactctttgaagtacgcattttttgag

SEQ ID NO: 69953 - DNA, 90 bp, Homo sapiens
caaactacatgtataatcctatcaagacattaaagaccaatacgattgggacattaaacatgttggctagtgtcagcagtgggatacctg

SEQ ID NO: 69954 - DNA, 100 bp, Homo sapiens
ctgcctgctgttcgaggccggcacggtggccacgctggatcaatgtccgagttaccaccatggatgcagagctggagtttgcaatccagccaaatacaac

SEQ ID NO: 69955 - DNA, 100 bp, Homo sapiens
ctatgtgaccggcgggcccggagcagccgccgccgcagcgcgaacatggacgccgtcaacgccttcaaccaggagttggaggtgcagttcatcatcacag

SEQ ID NO: 69956 - DNA, 98 bp, Homo sapiens
ctttgaccgtcgctcacgggtcttaccccatcccaacagaatacagaacttgaaggtgcacattcttgatactgaaagttttgaaactacatttggcc

SEQ ID NO: 69957 - DNA, 50 bp, Homo sapiens
caaatattgaagaatgcagcaaggaagctgaagtcttcagcagaaccctg

SEQ ID NO: 69958 - DNA, 98 bp, Homo sapiens
tgttgccatggctccccaggctgacaatccccttggcagatctgtccttaggaaagatatttaccaaggacttctgaatgatgctttccagaaagggg

SEQ ID NO: 69959 - DNA, 82 bp, Homo sapiens
cgacaaaatgcaaaaaaggaggccaaagactttacaaaacttgccaatggcacttccagtatgattgtgcccaagcaacgga

SEQ ID NO: 69960 - DNA, 90 bp, Homo sapiens
atactgaaaatggagaagtctattttatagagttgaagccatccttgtcaatatatttggtggtatcgtcaactgtgccatcattgccaa

SEQ ID NO: 69961 - DNA, 75 bp, Homo sapiens
aggagccgctggggctgccgccacggccgcccggagactattgggaagaagttacctgcaactacagcaactcca

SEQ ID NO: 69962 - DNA, 96 bp, Homo sapiens
gccaaactggaggagcgacggaagccagaccccaggagctggacaggtagtgaatcaaatgaataagaagctacagacgggttttacagaaccaga

SEQ ID NO: 69963 - DNA, 100 bp, Homo sapiens
cgctgctcacttaaatacagatgaatgaagaccccattcggaaagacacctggccagcggtccagagctgatgcaggtgtcatggagaaactccagctgg

SEQ ID NO: 69964 - DNA, 75 bp, Homo sapiens
ccgcctcggagcggctgtacgagttgtggctgctctactacgcgcagatggcccactgcgtgaccttggttcagc

SEQ ID NO: 69965 - DNA, 50 bp, Homo sapiens
agctcaaagttattttacatttcttctcaagtcttaggattgcagcaaca

SEQ ID NO: 69966 - DNA, 80 bp, Homo sapiens
gagcattcgaagtgacctcagcagggcatccaggaaactaaatatattttgccaactttggaaaaagaattattcttggc

SEQ ID NO: 69967 - DNA, 90 bp, Homo sapiens
ggaaatcctaatgacagtctccaaattcgcctccatctgtaccatggtgtgactgaagaaatatcaaatgtttcctagtaagacagcaac

SEQ ID NO: 69968 - DNA, 83 bp, Homo sapiens
ttttgataaattgttagctggaaagctgagagagactttgaacatgattcttacagaaaacaagtggttatagatggtgaaac

SEQ ID NO: 69969 - DNA, 75 bp, Homo sapiens
tactcttcagtacaatgtcaccctcccagcaacaggcactgatacctttagttcttcaaataaccatgagaaaat

SEQ ID NO: 69970 - DNA, 98 bp, Homo sapiens
cagggacagtggcggatgtgcactgctacaggactctactatggagagccagctctcccaggcgctgaacggactgtcagacagggccaaagaagcca

SEQ ID NO: 69971 - DNA, 75 bp, Homo sapiens
gcagggaacagcggggcaaacacagggaggagagagcgatggcttttttcacccagaaggccagccccagcggct

SEQ ID NO: 69972 - DNA, 90 bp, Homo sapiens
gtttgtactatcctcggtgctgtggtgcagagctagttcctctccagctcagccgcgtaggtggaagatggtatcttgaagttgaggaat

SEQ ID NO: 69973 - DNA, 87 bp, Homo sapiens
gtgaaccttcgcattcagaatttgaccatcttggtgagaaacattaagacctactaccaggttgtggcagcactgcctgaaggtatg

SEQ ID NO: 69974 - DNA, 100 bp, Homo sapiens
ctgatggtgatggagattttgatgtggatgatgccaaagttttattaggtttgggccccatggtatccctgtgacagtatttcccaaaagggaatataag

SEQ ID NO: 69975 - DNA, 75 bp, Homo sapiens
aaatgttgatgtggtacttgaagacacctgtactgttgtcttgccacttgcctagtgaggcttttccgaacctgg

SEQ ID NO: 69976 - DNA, 100 bp, Homo sapiens
cccgggtgccgaggagcgggaagagttgctgggacaagttggatggcttgaggactggtactaaaaggaaacgtgactgggaggccattgccagcagaat

SEQ ID NO: 69977 - DNA, 75 bp, Homo sapiens
ttcaagaatgaagctgcggaccctcgcttcttccctattcattggggaaccttcatttgaaatttttggcattag

SEQ ID NO: 69978 - DNA, 100 bp, Homo sapiens
gtgtccccgagggcatcgaggacccccaggcactcctggagggtgtgaaggtacagacagtgtttgtgtgttcctgttgtggctaactttaagaagcggt

SEQ ID NO: 69979 - DNA, 100 bp, Homo sapiens
ctcatgaaatcatcgagaccatccggcaaaatacatatctcagtgcattgatgagatcaagcaggagctgaagcaggacaacatagcggtgaaggcgaac

SEQ ID NO: 69980 - DNA, 135 bp, Homo sapiens
ggacctaatgaggcgcctgcctccccagcaaatcgagaaaaacctcagcgacctgatcgacctggctctgctgttctcctgcactcaggttagtgaccccagccccagctgcccacccccactccccctcagccc

SEQ ID NO: 69981 - DNA, 75 bp, Homo sapiens
cacttgtgtgcggaactcctcggaaccatggaagctgaatatggtgggcatgatcagatagatttgtatgacgat

SEQ ID NO: 69982 - DNA, 83 bp, Homo sapiens
ctgcagagctgtggcttaccagtacctggagtagaacagaaaaattattatgtctgtgttcccttgggactcattggaaattg

SEQ ID NO: 69983 - DNA, 90 bp, Homo sapiens
cagagaccatgatcgtttctgggtcctagctgctcaccctaaccttaacctctttgcagcaggccacacactctgcatccgacacccacc

SEQ ID NO: 69984 - DNA, 100 bp, Homo sapiens
aagcctgcgggaggggtcatttttgaggttacacgcatggggagatactctggaggaagcatttgagcaatgtgcaatggccatgtttggttacatgaca

SEQ ID NO: 69985 - DNA, 90 bp, Homo sapiens
gtccagttgtacatttaagcgatagcccaagagatgaaggcaaaaaagtggaagatgcgaagattgcaattctcacatgtccatttgaac

SEQ ID NO: 69986 - DNA, 80 bp, Homo sapiens
caagaactacatccgcgtcaagccccatccggatccaggtccggcacgatcaagacccaggctacatgcatcacaagttt

SEQ ID NO: 69987 - DNA, 82 bp, Homo sapiens
ccgagactggcgggggtggacgcccgggccgggctgcgcccgcttcttgcaggaattgactttaaaattaggaccatagagc

SEQ ID NO: 69988 - DNA, 100 bp, Homo sapiens
ttgagaaaaaattcctggaaaacccagagctccgagtgcagcagatggtgtccatgggcattgggaataaacccttcctggacatcaaagcccttgggga

SEQ ID NO: 69989 - DNA, 100 bp, Homo sapiens
tctcacgacctccgcctgcggcctcctcgcaaaacaaggattatagtaaagtccagcatctggccctccatgcattccataatacagaagtggaagctat

SEQ ID NO: 69990 - DNA, 120 bp, Homo sapiens
gggggccataccggacccgcaagcatgcccaccactgccacaaacgccgcaccaggtcttgtagcagcgcctcctcgtgtcgagatggctatgaaccctgtgtaaatgaaggaatgtgtg

SEQ ID NO: 69991 - DNA, 100 bp, Homo sapiens
tctgtcagatcagaaagaggcctccctcgtgagttgggcttggtaccgtgctgcccagaatgcccttcgggagacacctggatttcattagcatcatgac

SEQ ID NO: 69992 - DNA, 100 bp, Homo sapiens
cagcatctccgactcctccatccgggtccagggcaggtggaaggtgcgcaagtcattcttgctgctcctggaactgaagcactcaaatattggccccttc

SEQ ID NO: 69993 - DNA, 100 bp, Homo sapiens
ccatggctgggtagttcgaggggtttttgcgatccagacatttaatgtggatgcaccatgccagaccgtggaagatttaacgaatggggttgtgatggcc

SEQ ID NO: 69994 - DNA, 101 bp, Homo sapiens
ggaagaggagcgggagcaggagcgcggagcggagcgtcccgacccgccatggagaacatcattgcaacagtaagagattccaacctcaagctgacccttgc

SEQ ID NO: 69995 - DNA, 101 bp, Homo sapiens
tatgcaacgttatattttgtcttctgtgtggattcttcagaaagtgaacttggcattttagatctaattcaacactgatagccattgggcgatacagcatg

SEQ ID NO: 69996 - DNA, 76 bp, Homo sapiens
ggcggaggcagaggtggaggcgctttgaaagcacccaccaaggctccggatgtgttccccatcatatcagggtgca

SEQ ID NO: 69997 - DNA, 75 bp, Homo sapiens
aagaaatcgccccgggacatgggagtggagcttggtttcgggatctcggtgctgcagacggcgagacctcctgca

SEQ ID NO: 69998 - DNA, 99 bp, Homo sapiens
tctccgggctcaagcaattctcccacctcagcctggaatcaagaacccagtctcggttgccaacagactcttatgtgaagggcagaagggcaagctctc

SEQ ID NO: 69999 - DNA, 50 bp, Homo sapiens
gatggagggcacggaggaagtggaaggaatgggaagatacagtgcagtcg

SEQ ID NO: 70000 - DNA, 90 bp, Homo sapiens
tgcattacaggagtcctccacttgccactggagtacaggggctcaggtccaggtggcaggggatatgctacccaactcaactgagcgggc

SEQ ID NO: 70001 - DNA, 98 bp, Homo sapiens
acctcgggccgctcatttccgggctcggctttgcaagttgttgacctcctgtactggagagacattaagaagactggagtggtgtttggtgccagcct

SEQ ID NO: 70002 - DNA, 83 bp, Homo sapiens
agctgaagagcgagaaggagcagcgccggcggctggagaagaagctcattcacacagaagacccatttaatgatgaacatcag

SEQ ID NO: 70003 - DNA, 82 bp, Homo sapiens
ggaaccagacgatgagacagagttgcgaccgcgcggcaggaggagctcaagcacttcgaagccaaaatcgagaagcacaacc

SEQ ID NO: 70004 - DNA, 102 bp, Homo sapiens
cctgctgctgcttcaatgtccgcatcgcaaccaccgccctggccatctaccatgtgacaatgcagatcttcgtgaagactctgactggtaagaccatcaccc

SEQ ID NO: 70005 - DNA, 50 bp, Homo sapiens
cgagttcaaagagaccctcggaacctgcggataaccgtctggtccttgtg

SEQ ID NO: 70006 - DNA, 100 bp, Homo sapiens
agcagcaatatgcattagcagcagctcagcagccacatataggtagtaaacctattgatggcaattttgctgactgtggaagtgactcatccaaactcca

SEQ ID NO: 70007 - DNA, 51 bp, Homo sapiens
ggattccaagtaactcttatttgtaataacatagatgccgcaatagaaaac

SEQ ID NO: 70008 - DNA, 100 bp, Homo sapiens
tcctgtacagcctgcagaactattttacatcctgaagtccaaactctagatctacggagctgcgatatatcagatgctgctctcctgcacctgtctaact

SEQ ID NO: 70009 - DNA, 51 bp, Homo sapiens
atatccactgccaaagggaccaggttatgtggtccgaatcagtggtgggaa

SEQ ID NO: 70010 - DNA, 82 bp, Homo sapiens
gcgccctcaatgacaagctgtacgaaaagcggaaggtggcagcgctggagatcgagaagattttggcattagagaagctcgg

SEQ ID NO: 70011 - DNA, 100 bp, Homo sapiens
ccggagtcatattatcgacgtagttaaagcccactagcctaaagccgggcggactgcgactgtgccctgtccacggtgcctcctgcatgtcctgctgccc

SEQ ID NO: 70012 - DNA, 98 bp, Homo sapiens
gcaagaagcaccagttcaagtggccctcagggcatccccgttttcggacttatcaaactggtttcaaagcacagagctcaagtaatttacaccagaaa

SEQ ID NO: 70013 - DNA, 101 bp, Homo sapiens
cacaggctctgaagtcgtgaagccttgggacggagcgggtggtgcttcgaggccatcgaagacggcaatttggaggaaatggaagaggaagtacggcttaa

SEQ ID NO: 70014 - DNA, 98 bp, Homo sapiens
gccataccggacccgcaagcatgcccaccactgccacaaacgccgcaccaggtcttgtagcagcgcctcctcggagtcagtggatcggtggggaaaat

SEQ ID NO: 70015 - DNA, 100 bp, Homo sapiens
ttctggtggttgccactcacctgaggatgaatgatgagaagacagcagctgattacaagattttaggtggttcagtccttcacctggtgttggctctgag

SEQ ID NO: 70016 - DNA, 75 bp, Homo sapiens
caaaagtatctcatatgaccagtggattttataacctgacagcgtgctggaacttctctgctggactcctggact

SEQ ID NO: 70017 - DNA, 115 bp, Homo sapiens
gtttgctgagctggttggccctgtgatccctcaagactggtccacggagtgtatgaccacaaacagccatcaagactctcaaagatgaagacttttgtaaacgtgtatctttggc

SEQ ID NO: 70018 - DNA, 76 bp, Homo sapiens
ctattcggccatctttgctcctccctgcaactaactccattcttaattgaatggacatggtggtggtcgaagtcag

SEQ ID NO: 70019 - DNA, 80 bp, Homo sapiens
catcctggttctggaatcctcagttcaagaggcgagaaagccaagttaagaaaacccagactcagaaggaggtggagcgg

SEQ ID NO: 70020 - DNA, 82 bp, Homo sapiens
ccaccaccctcgtgtctgccaccatcttcgacttgagcgaagttttatgcaagctatccccttttccagggcacagtgaggc

SEQ ID NO: 70021 - DNA, 100 bp, Homo sapiens
ccaggaagtcggagtttgagccccggaggcagagcggctgccatgttacacaacagccaatgcggagtctgacaatgagcgggactctgacaaagaaagt

SEQ ID NO: 70022 - DNA, 76 bp, Homo sapiens
gaaatttcaagaattccctatcctgggaagaaggagaaagggccaacccctgaagaagcaatacagaaactgaagg

SEQ ID NO: 70023 - DNA, 100 bp, Homo sapiens
gcttccgagccgcactcgccgatcctccaggcatgccccgctacgagctggctttaatcctgaaagccatgcagcgggtcttccgaccccgaactccacc

SEQ ID NO: 70024 - DNA, 100 bp, Homo sapiens
gccccgcgtacggcctttcacgagtcttcaagccttcaggttctgaagccagacacaagatgaaaaagctaactccaaaacagaaattttctgaagattt

SEQ ID NO: 70025 - DNA, 100 bp, Homo sapiens
cttgtgattggcggtgaccggatattcagttgcacatccccacatcaatgcactgccaatggaagaccatgtactcagctgcagcttctaaatccagaac

SEQ ID NO: 70026 - DNA, 100 bp, Homo sapiens
tcttacttgaagcatgtctttcagagcccggcaccacccatcttgagtatctgtatgacgccgtgcccatccagtccagcgtggtgttatgttcctgccc

SEQ ID NO: 70027 - DNA, 87 bp, Homo sapiens
ttcccgcctgagcgcaactagcggcgggtcgtgggcacctccaggttgtgaccgagattcccgacgagagagactgaggggaagaga

SEQ ID NO: 70028 - DNA, 100 bp, Homo sapiens
agaagctctgaatcgtgttcctgaatgaaagaagtcagtatcctctacttctactcctccctgagcagattcctcatggtcatgggggccaccgttgtta

SEQ ID NO: 70029 - DNA, 98 bp, Homo sapiens
ccccgagcaccgggccctctgcgacctggggccctgggtgaagtgctccgccgcccttgcctccagggttttggccaaattgggcgagggcacaaaat

SEQ ID NO: 70030 - DNA, 95 bp, Homo sapiens
ggcggcggtagatttgaagcgcttcaaaggaccggacccagagaagaggaaaactctaccggtgcaggaaacatgccctgaactgtcacagaatg

SEQ ID NO: 70031 - DNA, 122 bp, Homo sapiens
gcggctccaccgaggccatttaccggcgctacagcaagttttttgacctccaggtccatggaagaaatctcttgtccattgactatgatcgaaatattcggactgaaaagatctatgatgac

SEQ ID NO: 70032 - DNA, 88 bp, Homo sapiens
tgagagagtccgggagcccgagcttgaggtttacccaaggtccagcctagcccctaggcaccatgtcggacagtgatctaggtgagga

SEQ ID NO: 70033 - DNA, 83 bp, Homo sapiens
cgcgtctccgcgttcccagcccgggtccccgcgttcacagccccagcgcagggtgcatctgagaaagacatcgtgcactctgg

SEQ ID NO: 70034 - DNA, 100 bp, Homo sapiens
tcgcagcctagggcaacgtccaagtctccgaacagagccacacgactcccgctggctcaatgtgagtgagatcattggccgagacctgagtggcttccct

SEQ ID NO: 70035 - DNA, 122 bp, Homo sapiens
gccaacgtgtccattggggccatgttctgcatgtatgggctcacagcaacctttggatacctcaccttctacagagttagtccttgaccactagtttgatgccatctccattttgggtgacc

SEQ ID NO: 70036 - DNA, 90 bp, Homo sapiens
tcgcagtggtcgcttcttctccttgggattcatccaaccatcatttctgagtcattccagaaggccctggaaaagggcattgaaatcttg

SEQ ID NO: 70037 - DNA, 82 bp, Homo sapiens
atcgacgtcgtgatccagaagtccagagctgaggactgcctgtttgcagtgcctgatttgagatggggtcccaggtctcggt

SEQ ID NO: 70038 - DNA, 99 bp, Homo sapiens
tgtctttctcagcaccttggcgaagccttgggtttctttcttaaaggactgatttttagaactccacatttgaggatccccccatggctgtaacccttg

SEQ ID NO: 70039 - DNA, 50 bp, Homo sapiens
gaatcaccagcactggctgaagttaattggccttggtcctcacagctcca

SEQ ID NO: 70040 - DNA, 83 bp, Homo sapiens
cgggccctcacagaccccagagcggccatgagctggtgtgcagccgcccaggagggggagactcatgcatctgtatgccgtgt

SEQ ID NO: 70041 - DNA, 75 bp, Homo sapiens
gcgcagcctgcaagattgtggtgcacacgccctgcatcgagcagctggagaagtctctcctatacaaaaaagtga

SEQ ID NO: 70042 - DNA, 80 bp, Homo sapiens
attacagctactccagcaacatcttgtccataaggctgaaccggcaatgtgtgatccagtcttgggtgacaagtgggacg

SEQ ID NO: 70043 - DNA, 75 bp, Homo sapiens
agagctacagatcacaaatgtgatggaggcaaaccagcggatgcctgaggaagtgcaccatggagaggaggaggt

SEQ ID NO: 70044 - DNA, 90 bp, Homo sapiens
ctgccgtggccgcccggctgccgggagccgacagcttcgcgccggcatgcttttcacttccactgcatctctcgctggctcaaaacacga

SEQ ID NO: 70045 - DNA, 83 bp, Homo sapiens
cggagcgccccttcgcgtcccctgcaccatgagctggggcaccgagctctggattttgcaagaacgaggctcaaggatgtgag

SEQ ID NO: 70046 - DNA, 100 bp, Homo sapiens
tccagatgccgcgcaactgtctgatctcagttcatgaaatacaaacctggtcgatgtgatgatattttgaaatggaagcctcccagtctgaattctgtgg

SEQ ID NO: 70047 - DNA, 96 bp, Homo sapiens
cgaatccctatgtccagtttgaaatccttggcactacctatagtgagacttttggcaaagacatgcgcaaggcctatatgaacccaatagcaatgg

SEQ ID NO: 70048 - DNA, 98 bp, Homo sapiens
ctatccctccccctaaaccagctcacagaaatagcaaccctgtcattgcctgctcaggaagaactcagagaagatccagattttgaaattaaggaagg

SEQ ID NO: 70049 - DNA, 100 bp, Homo sapiens
gctcccgcgggcccgcggacccagctgtcaggcaaggagaatgatccatctgtgagactgaaaattgcatcattgttgggtttattatcaaagacagcag

SEQ ID NO: 70050 - DNA, 100 bp, Homo sapiens
gacgagagatccgtgcaggcacagccttttacattgatcagaattcaattcgtcataatctgtccctacacagcaagttcattcgtgtgcagaatgaagg

SEQ ID NO: 70051 - DNA, 133 bp, Homo sapiens
gtagaaggccagagtcacacacggtcctaagagctgggcaccaggaagcgaaggctggttatgaagacagtatggagtttccagaccatagtagacatttgctacagtgtctgagcgagcagagacaccaggg

SEQ ID NO: 70052 - DNA, 80 bp, Homo sapiens
ggacccaccgctgccctcagctccgagtccagggcgagtgcctccggagccagcgtggtggccatagacaacaagatcga

SEQ ID NO: 70053 - DNA, 75 bp, Homo sapiens
ataatgacagtactaacttggcatgccgcaatggacatctccagtcaggtgttggggatgtcctttgcactgacc

SEQ ID NO: 70054 - DNA, 100 bp, Homo sapiens
ctcaaaaacaaaattctgaactcaggacttggcaagcccaaggaggtgatagcattttgcagagattgaaaagaatagtatttgatgccaaatctactat

SEQ ID NO: 70055 - DNA, 74 bp, Homo sapiens
caaaagctcattgacgatcaagatatcaatcctgataacttaagtgactctctcttttccggtgatgaagaaaa

SEQ ID NO: 70056 - DNA, 96 bp, Homo sapiens
tccaaccccatcacataggggtttctgttaaggaactcgatttatatttggcatactttgtgcatgcagcagcgggcctccccttcctcatcatcg

SEQ ID NO: 70057 - DNA, 80 bp, Homo sapiens
atcggggccctgactcacaagatcactcacctgtccacactgcagggcccgggcgggtgaagggtcagagagacggacac

SEQ ID NO: 70058 - DNA, 83 bp, Homo sapiens
cgtgttcaatacacctcccacctgtcctcaggcatatcaaaggaactcaacagaggcaattattatcccgactgcaaatcgac

SEQ ID NO: 70059 - DNA, 100 bp, Homo sapiens
gcagcgcagcaccgattcctctcgggctcttgggcgctgctctgaggtaatttctcactatcagtgtaaagagcagcgtgatgcccatagatttgagaaa

SEQ ID NO: 70060 - DNA, 96 bp, Homo sapiens
gccgtcctgaggagcctcctggcctgcagcttctgtgtgctcctgagaggttgaaatcacaaagattagacacctttttagataggtgttcttcag

SEQ ID NO: 70061 - DNA, 100 bp, Homo sapiens
cgaaggccgggacccggttccccggcccacagtgggggtgtgcaaacccgagagaactggcgttgacagaaggctacgttggggccctgcacgagaatag

SEQ ID NO: 70062 - DNA, 89 bp, Homo sapiens
gccgcggcgaggagcgagcgctgcgaggtggcggcctgaggagattacctggggcaattgatgttatcggtcagactataactatcagc

SEQ ID NO: 70063 - DNA, 100 bp, Homo sapiens
gtggtcagtggcgacgtaaatggctcgactccccgctggcattcgcttcatcatctcattctccagggatcagtggtctctgaaagaagatgaatttggc

SEQ ID NO: 70064 - DNA, 96 bp, Homo sapiens
ggaattttgcaaaagtaaaattggcaagacatatccttacaggcagagagaagcagagcccctggaaaactcacatatgtgtcaacaatagtcctt

SEQ ID NO: 70065 - DNA, 100 bp, Homo sapiens
agcgcttcgagcagaagggattccgcctcgtggccatgaagttcctccgggcctcttcagaaacgccagggtgcactgatagagggaattccgatgactt

SEQ ID NO: 70066 - DNA, 98 bp, Homo sapiens
cggacctgagccgcgaggacacgggctgcaacctgcagcacatcagcgaccgggagaacatagacgtgttatagttttgccgctggactcttccctcc

SEQ ID NO: 70067 - DNA, 75 bp, Homo sapiens
ctgaggcggaggctgacgaggaggcggatcccccggcgtcagtacggcaagaagaagctgaaatacctgccctac

SEQ ID NO: 70068 - DNA, 82 bp, Homo sapiens
gaccaccgtgaacggacagtcccccccaggctgctctttggcgtaaattgcaatcgattagggatcgtttctcagaatcaag

SEQ ID NO: 70069 - DNA, 82 bp, Homo sapiens
attcgtcttggtaaacttggtttgctgatgtatattcaagatgagtggattaggagaaaacttggatccactggccagtgat

SEQ ID NO: 70070 - DNA, 101 bp, Homo sapiens
ctcaagccgaagccttcagtgggactcccccagcagatacattctcagggcatggtctagtggcccagtcaggacgcggaaacactccctggaggttctga

SEQ ID NO: 70071 - DNA, 100 bp, Homo sapiens
ccttttgctcctggtggaacagttgttgcagcaagcgattcagtatacgccatccgagaagctgccaccaacaacctcatgaaactagttcagaagtttg

SEQ ID NO: 70072 - DNA, 74 bp, Homo sapiens
atggcagatgtatgggtgaagatccaagatgttctacagatttatgtgatcagtttggctgaaccccgtctgcc

SEQ ID NO: 70073 - DNA, 50 bp, Homo sapiens
caagaatgccagtcaagaagacaggatgacgctgtcagtatagaaagtgg

SEQ ID NO: 70074 - DNA, 75 bp, Homo sapiens
ggagatcccaggcggtgacagagtggagccatggctagagggatgcttgagtacgaaccggccaagaggttctcc

SEQ ID NO: 70075 - DNA, 117 bp, Homo sapiens
gttcgccaatgtttgaggagaaggccagcagtccttcagggaagatgggaggcgaggagaagccgacgttatgaagaggacatgtactggaggagaatggaggaagaacaacatcat

SEQ ID NO: 70076 - DNA, 100 bp, Homo sapiens
ctcaggaacctcaggccctgcttgacagtgttccgccatggagtcatagttgcagctgactccagggctacagcgggtgcttacattgcctcccagacgg

SEQ ID NO: 70077 - DNA, 73 bp, Homo sapiens
tctaccaaactctggctggagtcacacattgtttttgatgagaagtactttctggtggaaatggatgacttgc

SEQ ID NO: 70078 - DNA, 100 bp, Homo sapiens
tacgaggtggatgtgacccaaggagagtgctacccggtgtactggaaccatactttggttagtgaccacatcgcagcatgttgagtcaagtttaccgctg

SEQ ID NO: 70079 - DNA, 100 bp, Homo sapiens
attgtactcagtagaggagtatcagttcagtatcgctacttcaaagggtactttttagaaccaaagtgataatatgcagcatgcatactgggaactgaag

SEQ ID NO: 70080 - DNA, 98 bp, Homo sapiens
gcaggacgaggacctgagccaggaatgcaggatggcggcggtgaagaaggaagggggtgctctgagctatatgttctcctttcagccaagacctttca

SEQ ID NO: 70081 - DNA, 100 bp, Homo sapiens
gtttcaggctcatcgagaggtaccaggcaccgcctagaatccttcgatctcgcttcaggaagaaaagtacctcatcctcggccaccgaaaccacgtgagt

SEQ ID NO: 70082 - DNA, 95 bp, Homo sapiens
aggatctctaccaagacgtgctgtgtctcaccctgtttgacagagaccagttttcaccagatgttctagcctcagttttacccaaagttgatttg

SEQ ID NO: 70083 - DNA, 98 bp, Homo sapiens
cttatcactcacatcaatggagaaccagtgcatggacttgtccacacagaagttatagaactcctactgaaggcactggtgaggtggattgatgatga

SEQ ID NO: 70084 - DNA, 100 bp, Homo sapiens
agattgaagctcaagaaaaagccaaacgggaaagagagtggcagaaaaactttgaggaaatctgaaatagagtactatgctatgttggctaaaactggtg

SEQ ID NO: 70085 - DNA, 75 bp, Homo sapiens
gcaccaatgccttcagactgtgctccttgacctgtttatggtttgggattggtctacttacctagctgattatgg

SEQ ID NO: 70086 - DNA, 89 bp, Homo sapiens
ctttcagtgagtcatcgctgacagctgaggaagtctgcatccacattgcacataaagttggacgtggtgggtcctctggtgcgaaattc

SEQ ID NO: 70087 - DNA, 75 bp, Homo sapiens
ggacagctagctgcttatggctataaaattacagggtgcttcaaggatgaccgcatcgtcttctggacttggatg

SEQ ID NO: 70088 - DNA, 100 bp, Homo sapiens
gagctggaatcgccagctcccggcactgctacctctgacccaaagcagccacacacagcaccttgacttgcatgagcagggagttccagtgcgaggacgg

SEQ ID NO: 70089 - DNA, 101 bp, Homo sapiens
gacttttctcaaaactggaaggcgctgcaagagtatgagccgcacagcctacacggtgggagccctgcttctcctcttggggaccctgctgccggctgctg

SEQ ID NO: 70090 - DNA, 82 bp, Homo sapiens
gcgctcgggggccgaactggccctggactacctctgcagggctctctttacctatgaaggcaacagcaatgacatccgcgtg

SEQ ID NO: 70091 - DNA, 105 bp, Homo sapiens
cgcggcgccagcccttccgccacggccgtctctggagagcagcagacaatgcagatcttcgtgaagactctgactggtaagaccatcaccctcgaggttgagccc

SEQ ID NO: 70092 - DNA, 50 bp, Homo sapiens
cgaacatacagaaatccttaccatcagaccaaacattgtctggcttgcac

SEQ ID NO: 70093 - DNA, 100 bp, Homo sapiens
agaaagaccatcaagtttaccaattacttctctaacaggatcaccagtttgctccacaaagcacaatgtctcgatcacgacaacccccccttgtgaccgg

SEQ ID NO: 70094 - DNA, 100 bp, Homo sapiens
acgaggaagcttataaaaatgtgctgacagcagccatggcgagcggcagtggagacagcgtcacccgtcggagcgtggcatcacagtttttcactcaaga

SEQ ID NO: 70095 - DNA, 96 bp, Homo sapiens
cagctcaatgagaaaatctccctgctccgcagcgacatcaccaagctggaggtggacgccatcgtcaacgccggaagaaatgttggctatttggcg

SEQ ID NO: 70096 - DNA, 75 bp, Homo sapiens
cgacgacgaggaagaggaggtttctgaggaactttatattgctgttggaatatctggagccatccaacatttagc

SEQ ID NO: 70097 - DNA, 74 bp, Homo sapiens
gtcagaatttcctgtgttccctttgccgctcctggagttcactgaatctaggtcaacctattaagatacgtttc

SEQ ID NO: 70098 - DNA, 100 bp, Homo sapiens
aataccctcaagaggagcaacctcgtcagcagcgaggaaggaaacagcggttacaaaagcaggttggtcactggaagatgttgacatatttgaaatcaat

SEQ ID NO: 70099 - DNA, 83 bp, Homo sapiens
cgctcaccaaccgcgtgtgggaggacaggccctcgtccgcagagatgccctgtatccaagcccaatatgggacaccagcaccg

SEQ ID NO: 70100 - DNA, 101 bp, Homo sapiens
ctgggagaatgccccgaagtactgtttacagctcacgattcctgggggaactgtcttactgcagatatggaatgtgcagatgtcccactattaactccaag

SEQ ID NO: 70101 - DNA, 51 bp, Homo sapiens
agcctcctggacagaaataaaactggtgacagaaatgttggtaaatgttct

SEQ ID NO: 70102 - DNA, 50 bp, Homo sapiens
atttccctatcgattttacccctatgattgagtcgaatgacatttcagag

SEQ ID NO: 70103 - DNA, 100 bp, Homo sapiens
tatgggaatgaattacagctctcagatgtcccaaggacctattgctatgcagatggtgatggaatttcctgataatgtgttaaatctcgatggacatcag

SEQ ID NO: 70104 - DNA, 74 bp, Homo sapiens
tatcattggatgaagtggctccggagatgcaaaatcctgacagatgactttgcagacaaggagggtctggaaat

SEQ ID NO: 70105 - DNA, 73 bp, Homo sapiens
catgattggctcttacgcctcttctgccattacgttcccaggaatcaaggcctcctcttccagcagcctctat

SEQ ID NO: 70106 - DNA, 83 bp, Homo sapiens
caaggagctaaagcagcgtgcgttcagccctgggctcagtgtggaggctgctggccctgccatctgtaagaagatgtcatacg

SEQ ID NO: 70107 - DNA, 100 bp, Homo sapiens
cttaggaccaaatgtgctacctccaacgacctcacacaaaaagaaatccggaccctggagcaactttcatcctttgaaacgtgtgctgaaaaagaagaat

SEQ ID NO: 70108 - DNA, 117 bp, Homo sapiens
atgcccgttcagtttacagttcattttttgcttggtttggaaaaatttcattagagaaacctctgtagaggagcaggatgcaaccgacaggctgtggccggacagctgctgcccagc

SEQ ID NO: 70109 - DNA, 75 bp, Homo sapiens
ccaaacaggaagtctatgatgagtacaagttaccttttcgacaaaatgattcatctagtcattgccagaagagtg

SEQ ID NO: 70110 - DNA, 83 bp, Homo sapiens
ggaagatctttattgcagagatcttcaaaccagggagaaaagggaatttttaaaaggagaatgaaagtgtccttgtctctaga

SEQ ID NO: 70111 - DNA, 100 bp, Homo sapiens
agcaacggcgaagaaacagaaatgaaacttctcaaatgagccaacctgagtcacaaggaacaacttttcagcctaatagcaactcttatgtaaatcctga

SEQ ID NO: 70112 - DNA, 88 bp, Homo sapiens
cgccttgcacaggcctggtttaacactcatagggagcttttggagagcaactttactttagtgggacaaattgatggccaggagatca

SEQ ID NO: 70113 - DNA, 90 bp, Homo sapiens
cttgcagagcagctgaagcaagctgaggagctcagcaatcaacaaaggtccctcaaaccccactgcacaccagccgggtcctgaaggagg

SEQ ID NO: 70114 - DNA, 82 bp, Homo sapiens
gacgcttttttccttcctaggagaaatcgaggagctgcggctctaccccccggagtaatctgtaagtcagatgctccaacag

SEQ ID NO: 70115 - DNA, 92 bp, Homo sapiens
atgacaagaatgcaacaaagctgaatgaactcattcaggttgggtgtccctacctgcaccggacgacgggggacacagaacgcaagtaccac

SEQ ID NO: 70116 - DNA, 82 bp, Homo sapiens
ttgttaactacaacagaccatctggcttcctgtcacttcgtgtcacatcccactcctgtccttcactccctctcagtctatc

SEQ ID NO: 70117 - DNA, 82 bp, Homo sapiens
cggcggcggccgccgtcccgacgcgcagctacagccaggtcaaaatgcagatcttcgtgaaaacccttaccggcaagaccat

SEQ ID NO: 70118 - DNA, 83 bp, Homo sapiens
tttcgggaattcacagtctgcagcattggtttattcactggatctctgaatacccaggccccctccaccatggccagccgggg

SEQ ID NO: 70119 - DNA, 88 bp, Homo sapiens
ttctctctcagatgttgaaaagccgagaccgacccgcccgcccgcggccccgcagcagctccaagaaggaaccaagagaccgaggcct

SEQ ID NO: 70120 - DNA, 100 bp, Homo sapiens
aggcgccgggaccggctgcagagacaggcgttcgaggagatcatcctgcagtgcagctggctaagagtcttgggcaggctggtgaaattgagcctgaaac

SEQ ID NO: 70121 - DNA, 88 bp, Homo sapiens
tccaggacggcgcccttagcgacaccatggagctgactggcatctatcacaacaactatgatggctccctcaacactgccaatggctt

SEQ ID NO: 70122 - DNA, 133 bp, Homo sapiens
ctgcgggctgagcggcgagtttccgatttaaagctgagctgcgaggaaaatggcggcgggagacaatgcagatcttcgtgaagactctgactggtaagaccatcaccctcgaggttgagcccagtgacaccat

SEQ ID NO: 70123 - DNA, 121 bp, Homo sapiens
ccaaaggatgtgccatacaaagaactcttaaagcagctgacttcccagcagcatgcgattcttattgaccttgggatgcttgaagatggaaagaaatttgattcctcccgggacagaaaca

SEQ ID NO: 70124 - DNA, 82 bp, Homo sapiens
aaggcaaatgattgtggcagtaaagaagtgtatgtgatcgtcagtatttaaacagatcacatcatgcgtgagtacaagctag

SEQ ID NO: 70125 - DNA, 75 bp, Homo sapiens
ctaaaatgttggcaaaagtgaagcaagttcacaaagaagtattaaactgtgctgatgttctaatcatgtcagata

SEQ ID NO: 70126 - DNA, 74 bp, Homo sapiens
tcggaagcccgttcggcctggaggagccgcagtgggtcccggacaaggagcagaaagatgaaggtcttagaatc

SEQ ID NO: 70127 - DNA, 100 bp, Homo sapiens
cgttctgacttctgagtttatagaagtttcagttctgaagtttaagaggagtttcacttcatcccttttcattttgaagtttccctgctcctcctaaaca

SEQ ID NO: 70128 - DNA, 75 bp, Homo sapiens
ttttatacttgcttttgcttcagcgttctgtggttgtcaacaggcgcagacggggaagcggagccaacatgccag

SEQ ID NO: 70129 - DNA, 98 bp, Homo sapiens
gggcggcagcatgtcggtggcggggctgaagaagcagttctacaaggcgagccaggggccaaaccagtgctcctgccacctctctggctgccccctag

SEQ ID NO: 70130 - DNA, 100 bp, Homo sapiens
agtgcctgccacccagactcagaccaccaccagaaccatcacctcggagacccagacaatcacaggataaacggaggaacctgcagcaacatgagcattc

SEQ ID NO: 70131 - DNA, 75 bp, Homo sapiens
tgaaaatcagcagataaggcaattgaaagggaagaagggccgcctgggcagaatgtcacgatggacgagggcggc

SEQ ID NO: 70132 - DNA, 75 bp, Homo sapiens
gccacattgcactttccacatgcttcaaacatcaccttgtacaaggtggagccagctggactggaggaggtgatc

SEQ ID NO: 70133 - DNA, 97 bp, Homo sapiens
gggagccggggccgccgccggagtcgttgtcgccggagcctggagccgtgaacccagccgcgccaggtcttattagtaggtaagaaacagctgctcc

SEQ ID NO: 70134 - DNA, 156 bp, Homo sapiens
cagcacccatcgtcctgggcagcccaagagacctgttatcaactccgatacacaggagaaggccatcaggactggaagatgttcatgagagcgcagtttgactatgatcccaaaaaggacaatctgatcccttgcaaggaggcgggactgaagttt

SEQ ID NO: 70135 - DNA, 100 bp, Homo sapiens
gtcctggatcagtttctttgtcatgtagccaagactggagaaacaatcccatttggaagccctttcctaatcaagacagtgactcggtggtactaagtgg

SEQ ID NO: 70136 - DNA, 100 bp, Homo sapiens
tcgaaggcgaccttccttgctttcagaatttcacccaggttctgacaggtgagaagccatttaaatgtgatcagtgcagttatgtggcctctaatcaaca

SEQ ID NO: 70137 - DNA, 82 bp, Homo sapiens
tgcgtgcattctccactgccgtctactcggccactccggtcccgacacctagcctgcgtgatggcatcagctgagaagggaa

SEQ ID NO: 70138 - DNA, 76 bp, Homo sapiens
tctacatctcagactactgtgtgtggattcagaaagtcaacttgcagaacacagagaagtacggcatacctacagc

SEQ ID NO: 70139 - DNA, 97 bp, Homo sapiens
ctctataagaacatgtttttctaagccctttttgtgccaggtgtcccgttaacgtctctgttagttcagaggtgttgagatctgcatagccactcct

SEQ ID NO: 70140 - DNA, 49 bp, Homo sapiens
acacagaccattgcaatggaaatggtgccatgcctctgcaactcctcct

SEQ ID NO: 70141 - DNA, 75 bp, Homo sapiens
tccgggaggcgcttccacctctccaccaccgaccgcgtcatcaaaggtgagactgctcctggtgccatgaacgga

SEQ ID NO: 70142 - DNA, 98 bp, Homo sapiens
tttccgggaattaagtccagtttcttttcaatatagggtggtgatctttgtgaagtctgtgcagcggtgcattgccttggcccagctactagtggagc

SEQ ID NO: 70143 - DNA, 100 bp, Homo sapiens
gctcaccaacagatgaagacagatgcaccaacgagaactccatccggcacaacctgtcactgcatagtcgattcatgcgggtccagaatgagggaactgg

SEQ ID NO: 70144 - DNA, 90 bp, Homo sapiens
gagctacagagactgaagaggactcaggagcaaatcagtaatgacatgtctcaggaaggctatggaactagatctcaacctcctctggcc

SEQ ID NO: 70145 - DNA, 101 bp, Homo sapiens
cgttaatggaaccgcgactcacagtgaaaatgcctcgtgtaaaagcagctcaagctggaagacagagctctgcaaagagacatcttgcagaacaatttgca

SEQ ID NO: 70146 - DNA, 95 bp, Homo sapiens
ggcgcgggcaggagcctggcgaggatgcaccttcccctgccttggaaagggtgtcagtgtggaggcagttgatccagtgttccaagctaaaatgt

SEQ ID NO: 70147 - DNA, 75 bp, Homo sapiens
cgcccctccgagctggggttggacgctgccagtttgcacagcagcagggccggagccagttcttggaggagactc

SEQ ID NO: 70148 - DNA, 90 bp, Homo sapiens
aaaagccccaatcttagcaagtgcggggaagagctgggtcgactcaagaccttcacggcatggtgcaactcccacctgcggaaggcaggc

SEQ ID NO: 70149 - DNA, 90 bp, Homo sapiens
atcttctatttccaaagtatgttgcacccagaacaagcgggagcctgtgtcaggaaagcatgtcagagcagagctgccagatgtccgaac

SEQ ID NO: 70150 - DNA, 100 bp, Homo sapiens
gggacactgagctttgtggaagcatttggcggcataccaccctgcactgtgagcctcttccttggttgtgccactactgagttctccagttctctttcag

SEQ ID NO: 70151 - DNA, 123 bp, Homo sapiens
tattgtttctataggattttattgcacaaaggcaacggtgactttcaaagtgattcgcaaggggtggctcaccatcagcaacattggcatcatgaaaggcggctcgaagggatactggttcgt

SEQ ID NO: 70152 - DNA, 75 bp, Homo sapiens
tctgctaaaaggctccttcagtgagcaaggcatcaacgagtttctcagggcccagtcatatatgcacagttagac

SEQ ID NO: 70153 - DNA, 50 bp, Homo sapiens
caagtcggaggaaacgctagtgcaacaatgccatccccatcaaatcctgg

SEQ ID NO: 70154 - DNA, 100 bp, Homo sapiens
cctgcacccatgagccccacaagaagacgagccctggaccattatctcacccttcgaaggtagcccagtgtgtctcaccaaagggacctcttgcttgttc

SEQ ID NO: 70155 - DNA, 75 bp, Homo sapiens
tataggaacctggtctccctgggcaacgccctgctgcggcggctggtccgcattggggtgctggatgagggcaag

SEQ ID NO: 70156 - DNA, 100 bp, Homo sapiens
atgttgggcgccccggacgagagctccgtgcgggtggctgtcagataatctcagtgataccttgaagaagctgaagataacagctgttgacaagactgag

SEQ ID NO: 70157 - DNA, 90 bp, Homo sapiens
gcccggcaccccccgccgacaaggaggccgtcctgggccgccggacacccccgctggggccgatgcccaacagtgacatcgacttgagca

SEQ ID NO: 70158 - DNA, 100 bp, Homo sapiens
cctggacgacgcccggcgccagcacatcgcaggtttcactgggccagtttgccagattgatattgatgactgttccagtactccgtgtctgaatggggca

SEQ ID NO: 70159 - DNA, 75 bp, Homo sapiens
gctttcctttccctcagcacacagaggatgatgctgactttgatgaaggtgaaaatggcattacggacatcagga

SEQ ID NO: 70160 - DNA, 90 bp, Homo sapiens
tatgtaaagtacttggagtctgcaggtgcgagagttgtaccagtaaggaggaagagcaagcaggccctgagggactataagaaggttcag

SEQ ID NO: 70161 - DNA, 50 bp, Homo sapiens
tgagatccatctgcaccacggtgctgtggagctgggcaagaagtaggaag

SEQ ID NO: 70162 - DNA, 107 bp, Homo sapiens
gccacttccggcaccgcggggcccggggctccggcgcgcccggtgacggcggagaggcgccccccgcagcaggaagctcttcgtgggcggtcttgactggagcacga

SEQ ID NO: 70163 - DNA, 88 bp, Homo sapiens
cactgctcctgctggccgcctggacggctcgggcgctggaggtgctggagaatctggtaaaagcaccattgtgaagcagatgaggatc

SEQ ID NO: 70164 - DNA, 83 bp, Homo sapiens
ctacccgccggcccgcgggtctacttcctcaaaggtgtgggcaagagcagtttactgttgcgttttgcagacaacactttctc

SEQ ID NO: 70165 - DNA, 88 bp, Homo sapiens
gctaagacgccgggactccctggaaacctagaaatggccagaaatgtacacacaggagagctggctgcagtaaaaatcattaaattgg

SEQ ID NO: 70166 - DNA, 82 bp, Homo sapiens
cgagggcggggaccggcggcgctggaggagcgaggcagctgtactaggactgggaacggctaccaagatgaatgaactaatg

SEQ ID NO: 70167 - DNA, 83 bp, Homo sapiens
tgaagctcaagatgtggggagtggcagagagtatgcattaaaggccgagtgaccaagacaaaggacgggcatgaggttcggac

SEQ ID NO: 70168 - DNA, 80 bp, Homo sapiens
cgctgggtgcgtggggctgcctcgccgcgtctcgccacgccctccagaatacccatcatatagcccctgaggtggcatgg

SEQ ID NO: 70169 - DNA, 75 bp, Homo sapiens
tgataacatctcaactaccagtggtttttcttcaagagcttctgataaaggctcacgaggcccagggaatcctct

SEQ ID NO: 70170 - DNA, 100 bp, Homo sapiens
atggtggaatattgtatacctacgaaagtaggcggtacgaaccctaatggaggcagttttgaggaggtcctcagctccacggcccatgccagtgcccaga

SEQ ID NO: 70171 - DNA, 75 bp, Homo sapiens
gggacggccccagaatggcatggctgttttggagtcagcggaagatcaccaaggccagggagtggttccaccgca

SEQ ID NO: 70172 - DNA, 75 bp, Homo sapiens
caagacctcatcaacaattaaggctgaatcttctccatttgttgagcgacttctgaaaaagggctatgaagttat

SEQ ID NO: 70173 - DNA, 98 bp, Homo sapiens
gagactcctgaccctcagaatggtgattcacatagtttatatgttgccccatctctagttacagatcaacatagatggactgtatatcattccaaagt

SEQ ID NO: 70174 - DNA, 95 bp, Homo sapiens
cccgcgtccgccgattcctcctccttggtcgccgcgtccttggctggcgtgataaggaagcctgtgtgggtaccaacaatcaaagctacatctgt

SEQ ID NO: 70175 - DNA, 100 bp, Homo sapiens
ccaacattgacctcacaaccgagcaaattgaagagacgttaaaatacttcctttgggaagcagcatattgagaacctcttcagtgacctacaggatggga

SEQ ID NO: 70176 - DNA, 78 bp, Homo sapiens
ctgaataaagctgttttggaactgtcaggtacctcaaagcagtaccatcctcgaggactgtccacgagggcctgagga

SEQ ID NO: 70177 - DNA, 83 bp, Homo sapiens
cgcgaacatggacgccgtcaacgccttcaaccaggagactgaaatcgccaagagattgaatacgatttgtgcacaagtcatcc

SEQ ID NO: 70178 - DNA, 75 bp, Homo sapiens
ataaattatgatctacctaccaatcgtgaaaactatattcacagccaagaagtatgatgcgtttttggcctcaga

SEQ ID NO: 70179 - DNA, 104 bp, Homo sapiens
gaagggaatcgcaaggctcttccctgaccattttctactgtccctgcgcgagtactatactggcaattgctggagaagattttgcaattgttgcttctgatact

SEQ ID NO: 70180 - DNA, 98 bp, Homo sapiens
gggtttctccgctcagccttggatgttctttctcagatactagagctggccacactgcaggacattgggaagctgcagatctgggacacggccggcca

SEQ ID NO: 70181 - DNA, 75 bp, Homo sapiens
atttgccgtggccaggctagagatattgcaggagaagaggctgggtccgatccacactcattatgtctgttccac

SEQ ID NO: 70182 - DNA, 99 bp, Homo sapiens
gacagctgaggcccgcggagaccaggggactttccttatcccagttgattgtgcagaatacactgcctgtcgcttgtcttctattcaccatggcttctt

SEQ ID NO: 70183 - DNA, 74 bp, Homo sapiens
tcgactgaaagtgaaggacccagactctagttcagcagtgttgtactgctacttctataaacggacagccgtaa

SEQ ID NO: 70184 - DNA, 90 bp, Homo sapiens
aaattcagagctttcctcttccagatggaaaatacagtcttcccacaaaggggttgttcatgaggacctccgcctgctcttggagaccca

SEQ ID NO: 70185 - DNA, 96 bp, Homo sapiens
ttggctggagtagcaaggatcttcaacactagaagatatttgctgcagcctttaggctcacgaggcccagggaatcctctggaccatcagattacc

SEQ ID NO: 70186 - DNA, 119 bp, Homo sapiens
cgagctgctggagcgcgtggaggagccggtgctgcagaaccagatccgggagcacgtcatcgccatcgaagcgtctcccttctctcctggacagaaggccgtgtcctgggacttctctg

SEQ ID NO: 70187 - DNA, 92 bp, Homo sapiens
gggcgagctgcggctgcgggtgcggcgggtcctggccgaaggacttgaaaatactggaaatctgtccggatccaaattattttgcaagccag

SEQ ID NO: 70188 - DNA, 74 bp, Homo sapiens
ttttttattaatcaagcggtcaggataccggtgatgcagccaacacgaacggttgtcatgtgtaacacaacttt

SEQ ID NO: 70189 - DNA, 97 bp, Homo sapiens
ggagaagatgtgccgccgctgccaacgtcgagcggcgacggctgacaatgcagatcttcgtgaagactctgactggtaagaccatcaccctcgaggt

SEQ ID NO: 70190 - DNA, 100 bp, Homo sapiens
tggaaaaagcagggaggttatgaggcttaataaagaagtgcagtcattggagaaatcgatgaagaaacagattctgcgcttgatttggggaatattcgag

SEQ ID NO: 70191 - DNA, 51 bp, Homo sapiens
ggaaatgtgcccaacatcatcattgcggacaagcactgatcctgaggggat

SEQ ID NO: 70192 - DNA, 73 bp, Homo sapiens
gggatgatacaccttttccacagggaattgagttgtcttcccttggaccagacgcttcctcgccagggtcctg

SEQ ID NO: 70193 - DNA, 100 bp, Homo sapiens
ttctggaaaccgaaaggacttatgtacaagatttaaaaagcatcgtagagtgtactaatggtcacttgatgtgcgctggctgttttatccacctactagc

SEQ ID NO: 70194 - DNA, 75 bp, Homo sapiens
atcactgcatgggacaaagatgctgggaaaagggatgatttcattggcaggtactttgcagcaactcagtttgaa

SEQ ID NO: 70195 - DNA, 99 bp, Homo sapiens
tggagacaagagtcaaccagaaagagattgggtacttaatggttctagcaccccaaggaaacaacctcggaagagccctttggtgccccgaagtttgga

SEQ ID NO: 70196 - DNA, 90 bp, Homo sapiens
gaagagatcatccctaagcaggagagaagctactaaagccccacaccagtgagaagcatcagcaccgtgaacttgtctgagaatagcagt

SEQ ID NO: 70197 - DNA, 75 bp, Homo sapiens
cacagagttagagagagggatggtggttcaagaacatgaagactcgggtgactcagaagtggagaatgaagcaaa

SEQ ID NO: 70198 - DNA, 98 bp, Homo sapiens
aagcctgcccagacggctcacctgtgcgggatggaacaaaagcttctcctcttaagaacaatgatgaaggctcactggacatatacgctgggttggac

SEQ ID NO: 70199 - DNA, 82 bp, Homo sapiens
atcatcaaggatcaggaccgcaagtcccgtcttatgggacttgaggccctcaagggactggtgattgcagctggaagtgccc

SEQ ID NO: 70200 - DNA, 98 bp, Homo sapiens
aggggccctgagaccaacccccggccaggcagtaaatactacccgccggactttgacccatcaaagatccccaaactcaagctccccaaagaccggca

SEQ ID NO: 70201 - DNA, 97 bp, Homo sapiens
gattgaagcacatcgaccggcgacagcagccaggagtcatgagcgacagcggcgagcagaactacggcgagcggcactggcctgtgtttgtggaggt

SEQ ID NO: 70202 - DNA, 75 bp, Homo sapiens
ccaagtgcaagctggccagggacctcaaggaagcttatgacaggttctccagagagcgggcatccagagaggagt

SEQ ID NO: 70203 - DNA, 73 bp, Homo sapiens
agaaaagaggagagttgaaagagaacaggtgatgttctgcaccctgaacacccacaaagtggacatggacaag

SEQ ID NO: 70204 - DNA, 101 bp, Homo sapiens
atatgccaaggaaaaactggagagcttcatcaaaaatagtgatagctttgataaggtttctcctcttcaaaaatctgaagttgttgagatggttaagaaac

SEQ ID NO: 70205 - DNA, 100 bp, Homo sapiens
ccagagcgagcgggtggaggctctcaatgccgctgccctgcgcttctcccagctgcaggaaaccagcctggacaccaagtctgtgtcagaaggccacctc

SEQ ID NO: 70206 - DNA, 75 bp, Homo sapiens
tgtggtcaacttgattgagatttgtcgaaccaaaggttatgatgtgattgctcaagcccaatctgggactgggaa

SEQ ID NO: 70207 - DNA, 100 bp, Homo sapiens
ctttctccccagccaagagcatggctatgggagaaggaaggcaggcagcaggcagggccaattcctgtccccccagcagcatggcatcgtgtgctgaacc

SEQ ID NO: 70208 - DNA, 75 bp, Homo sapiens
ccaaggcggagcaggccaaagtgaagaaggccataggaaaaggatacagagtagagtttcatgaacctgaaactt

SEQ ID NO: 70209 - DNA, 80 bp, Homo sapiens
ggggatggttccatcatggcgtcaatgcagatataaaccacagtacttcaggatcccattatgaaaattcccagcgggga

SEQ ID NO: 70210 - DNA, 83 bp, Homo sapiens
cggccaagcagccaaccatgctcaacttcggtgcctctctccagcagactgcggagcatcagatccatgctgctgctgactcg

SEQ ID NO: 70211 - DNA, 100 bp, Homo sapiens
gttcaaaatggaagactgtttaggctcctagcaaaattgggaacaatcaatgagaggccggagcatggaagaggagatggttcgtgttacgcagtggccg

SEQ ID NO: 70212 - DNA, 75 bp, Homo sapiens
ctcagaggacgaggcctccttcaagtccgaggtcttcgccttgatcgtgttctcctgcatctatggtgagggcta

SEQ ID NO: 70213 - DNA, 90 bp, Homo sapiens
gccgccgccgccgccaccatggaaagaccggcagagaccaatgccaatgtggacaactcggcgtccccctcggtggcccagctggccggg

SEQ ID NO: 70214 - DNA, 90 bp, Homo sapiens
atagattctgctggtatacagctacatccaggagagaatgctgacagtcctgcagatgtggaagatgtgaaatttgtcatcaattatgac

SEQ ID NO: 70215 - DNA, 83 bp, Homo sapiens
cgggcgagctggcaggagcggcagccaggagtcgcctgggtccctgctggagtatgctgggaaacatctttacacagcagcca

SEQ ID NO: 70216 - DNA, 87 bp, Homo sapiens
tgatcggcgtgtttggatgtactttacagaatttggtgttcacttggcagaactgactgtagatccccagggggcactggcaatccg

SEQ ID NO: 70217 - DNA, 75 bp, Homo sapiens
aagcagaggctcagagcttggagacagacgggacatctctacaccgttcccatccgggaacagggcaacatctac

SEQ ID NO: 70218 - DNA, 75 bp, Homo sapiens
caggcctgcttcctcaccgccatcaactacctgctcagcaggcacatggctcatgatggagcagtccaagaagtc

SEQ ID NO: 70219 - DNA, 86 bp, Homo sapiens
accattggtctgcaggacatcactttagatgatggaatcagtgacattcaaagatgtgtctgtggacttcacccaggaagaatggt

SEQ ID NO: 70220 - DNA, 51 bp, Homo sapiens
ccgggattggaccgacgcagccatggttttctgtctcaactggtctctgac

SEQ ID NO: 70221 - DNA, 98 bp, Homo sapiens
gtgatttcccagttagagcaagggacagagccatggatcatggagccaagcattccagtaggtacctgtgcaggatccaaggattctgtagctacaat

SEQ ID NO: 70222 - DNA, 100 bp, Homo sapiens
atatcttgtctaattgtgagctggttaagaagtttttagatccaaacaactattccgcaaactatactggttcttccaggttggaaagagaatatgctgg

SEQ ID NO: 70223 - DNA, 99 bp, Homo sapiens
ccttaaaggatgtagtaacaagagtcccgtggttccagctacacttattagaggctcaactaagtgaaaagatttcacttcaggcaattcagcagttgg

SEQ ID NO: 70224 - DNA, 75 bp, Homo sapiens
cacagtccggcctggtacgcctcctgacttcatcctcaaggcgggcagggctgggcagcggcctgagtctcagcg

SEQ ID NO: 70225 - DNA, 101 bp, Homo sapiens
gaaataagtaatcttcaccaaagaagtagagaagatcctctaatggatcccagtgtgcccatccctcaacctcctcagtgatcaactcatggccaatcttg

SEQ ID NO: 70226 - DNA, 75 bp, Homo sapiens
cattgacatttaattttagggtcctttatatagaagggagagtagacacttgaatccagacacagaactgaaaag

SEQ ID NO: 70227 - DNA, 75 bp, Homo sapiens
ctgaaagcagagaccatggagcttcttgttctaatacccgatttacaattacattgaactacaaggatcccctca

SEQ ID NO: 70228 - DNA, 87 bp, Homo sapiens
agtctactaatggacagttagtcacccacctacatgttgagacctcgaagtagggggaaaactgcagtggaagatgaggacagcatg

SEQ ID NO: 70229 - DNA, 75 bp, Homo sapiens
tgcctgccaaggattctgcctggccctgggaagagaagcctagatatctgtgagaaagatcagtctaaagaaaag

SEQ ID NO: 70230 - DNA, 100 bp, Homo sapiens
acctcttctgcctcttcatggctgacattatctctacggtagaattcaaccacacgggagaattactagcgacaggggacaaggggggtcgggttgtaat

SEQ ID NO: 70231 - DNA, 98 bp, Homo sapiens
ctggaaccgtctgagcggcctaacccgcgcccgggtagagagtttatatcccctgtatctatgtgttaaataagattgaccaaatctccattgaggaa

SEQ ID NO: 70232 - DNA, 75 bp, Homo sapiens
ctgcatccgcctggcgctcatccgcttccacgtcaaggaattgagttcttctcagactttatcacatgatggagg

SEQ ID NO: 70233 - DNA, 75 bp, Homo sapiens
gaagagggaagacacgcggaaacagccattccacagattttgaagtacaccgaaactggcttgctatcactcaca

SEQ ID NO: 70234 - DNA, 100 bp, Homo sapiens
agaaaccccgttgacaaggcactgctttttcatgacgttgtgtgacttcattgagacacattacctgaatgagcaggtgaaagccatcaaagaattgggt

SEQ ID NO: 70235 - DNA, 90 bp, Homo sapiens
tgaacgtggacaaagctgttgtctcagggagcacagaatggccacaagtaatcatcctgagactgactacaagaacaaagactgggtctt

SEQ ID NO: 70236 - DNA, 100 bp, Homo sapiens
agaatattagaagaaattaaagcagaaagaaagctgcggcctgtatcaccagaggagattagacgtagcagattaggccgccagatcccacccttggacc

SEQ ID NO: 70237 - DNA, 90 bp, Homo sapiens
gcggaggcgcgcggaacagtcgccgaggcgattcccgcccagggcttcatcaagatgaagagctaccccagcagcaccaatgtggagacc

SEQ ID NO: 70238 - DNA, 83 bp, Homo sapiens
gtcagaaccctccgcagagtaaaggttacctgtcctgctgccgattcctggatgacaatcagatcgtcaccagctctggagac

SEQ ID NO: 70239 - DNA, 90 bp, Homo sapiens
tcaggaggcaagcagactatcgagacaggtcctcgctgtcagactgtcctgtctccctgcgagtcccagccatgccagcatggaggccag

SEQ ID NO: 70240 - DNA, 74 bp, Homo sapiens
gcagtgggtcccggacaaggaggcccgcgatgctcccagcccggtgagacctgcctgaatggcgggaagtgtga

SEQ ID NO: 70241 - DNA, 100 bp, Homo sapiens
cccccggctccatcgacctcaaggacatcaacttccggccgcagatgtcccaggaaggtgggagtcaatcattttgacaagtctcctgaaaggaacagct

SEQ ID NO: 70242 - DNA, 75 bp, Homo sapiens
cgccggtgctgttgccttcaggtgaccacggattcgccatcgaccgaccagctgggcatgttcacgcacaaggag

SEQ ID NO: 70243 - DNA, 75 bp, Homo sapiens
tctacatcctgcgggtgcctttgaaaatcaacgacaacttgagcacaggcaccacactgtaactcgaggcatcac

SEQ ID NO: 70244 - DNA, 98 bp, Homo sapiens
cagaccccggcgggctgtggcaggagggcggcggcggcggctgcggtcgaagaaggggacgccgacaaggaatggtcctcgtccgaagtgagaatggg

SEQ ID NO: 70245 - DNA, 50 bp, Homo sapiens
aggtgtcaagaagctcagaatgaatgtttcatccatttgtggaccaaaag

SEQ ID NO: 70246 - DNA, 74 bp, Homo sapiens
tagccaacccaaattaccttaattgtggacttagtagttttaagcagaaccatgaaaacctctgtgacaactcc

SEQ ID NO: 70247 - DNA, 76 bp, Homo sapiens
ggatgtgaccattttggcagctactaaccgtccagataggatagacaagaatgaagagcttcgaaacttgtctttg

SEQ ID NO: 70248 - DNA, 100 bp, Homo sapiens
caggaccatgatggctcagtttcccacagctatgaatgtttgtgaagtgtggatatgcaggctctaactttccagaacacatcttcccagctttggttgg

SEQ ID NO: 70249 - DNA, 100 bp, Homo sapiens
ctggggctcccctgacagccacctgcccactttgtgatcagagccgtgttcggggagtctttcaggcttgaccactatgctatcatcaagtttccgctga

SEQ ID NO: 70250 - DNA, 100 bp, Homo sapiens
tgtctttctcagcaccttggcgaagccttgggtttctttcttaaaggactgatttttagaactccacatttgaggagctggaggatcttcagaagaagcc

SEQ ID NO: 70251 - DNA, 100 bp, Homo sapiens
aggaagctggtcttggaagacgggctgctgaagaaagattagccgaggcacataggatccaagaaaaactctgtgagtatgctcaggtaatcaaaatgtt

SEQ ID NO: 70252 - DNA, 74 bp, Homo sapiens
tcagggacctctctgagcacaggaatgaagaaggagccccacaggaaggaattctggaagatatgcctgtggat

SEQ ID NO: 70253 - DNA, 100 bp, Homo sapiens
tatttggccaaggaaccaggctgactatcaacccaaatcctatagcaatggaactcagcgatgcaaatctgcaaacactaacagaatatttaaagaaaac

SEQ ID NO: 70254 - DNA, 75 bp, Homo sapiens
ctgtgagacatgtctgagactcctgctcagtgtagcattaagaaaactttagaaactgttcctttggagaggaaa

SEQ ID NO: 70255 - DNA, 76 bp, Homo sapiens
ctgaccttggcgacctcagctccggcctccaagagctgcctggagttcagcctcagaatccaggagttcattgaac

SEQ ID NO: 70256 - DNA, 100 bp, Homo sapiens
cgttaaacatctgaaagggtcagagtgatcagcagctggactgtgccttggacctaatgaggcgcctgcctccccagcaaatcgagaaaaacctcagcga

SEQ ID NO: 70257 - DNA, 90 bp, Homo sapiens
cctcctgagtagctggcattacagctcaaccagaacgtaagttctttccaaagaaaatttgttggtgaggtgaagaggtgtgaagagcta

SEQ ID NO: 70258 - DNA, 100 bp, Homo sapiens
gcctcggattaaggaataatttatgaagctccgttgactaccgtggagagatcataatttggggttcaagattccaggtgacatgtacagccatgatggg

SEQ ID NO: 70259 - DNA, 88 bp, Homo sapiens
ccggtgatctacaccatggagaacaagcccatcgtcacctgtggagctcacgggcaacagtatttatgaatacatccatccttctgac

SEQ ID NO: 70260 - DNA, 100 bp, Homo sapiens
tcctgacctcaccgcgcccgtggccgccgtgcaggcggccgtcagcaacctcgtccggggaataccttggcaagcagctccagtccgagcagccccagac

SEQ ID NO: 70261 - DNA, 101 bp, Homo sapiens
taatggatgaaaggaaccgacagatatgattctataacagactcttccagaaatgatatgaagaggaaatttgccctgacaatggaatttgttgaagaata

SEQ ID NO: 70262 - DNA, 100 bp, Homo sapiens
cagtatatttcacatgagtgactcctactccgagacgcccctggaagacttcgtcccccagaaggttgtcagattttcaacccatgaaagtgcagcccat

SEQ ID NO: 70263 - DNA, 76 bp, Homo sapiens
cttcaccacaaaagcgaaatgggcacaccacagacagcacccaagaaaacctcatttggctcgctgaaggatgaag

SEQ ID NO: 70264 - DNA, 100 bp, Homo sapiens
ttcgaaacgtgataagaagcacctggatgagacatttgctacagcatcccacattaagtcaacgagtgctgcagcagctcccagtccagtgctaggaaac

SEQ ID NO: 70265 - DNA, 75 bp, Homo sapiens
ccattagctgctgtcatcaagccctttgccaccattccttcaaatgagcctggaagagttgtgactcttgttgaa

SEQ ID NO: 70266 - DNA, 100 bp, Homo sapiens
gaacattgtagaagaaatggtgaacattgttgttggagtaataagaaacctgactcagaagcaagtgctttgaagaaaaaggtcaacaagggaaaaacag

SEQ ID NO: 70267 - DNA, 100 bp, Homo sapiens
gccataatgaagacttcatcgctagtggcagtgaagatgacagtcgtctagaggagctcaaagccactctgcccagcccagacaagctccctggattcaa

SEQ ID NO: 70268 - DNA, 100 bp, Homo sapiens
ccaatggcctatccaaggacatgagcagtttacacatctcacccaattcagcttcgcagaatcaagaacggctatgtgcgtttaaagatccgtatcagca

SEQ ID NO: 70269 - DNA, 82 bp, Homo sapiens
cgtcccggccttcatcgacatcagtgaagaagatcagcggacaaggcaaaatctcagcaagttcggacctctagtacaataa

SEQ ID NO: 70270 - DNA, 100 bp, Homo sapiens
tctcgacaccaagaagccctgcacccggtctttgacatgcaagaacctaaaggcagacccagaagagctttttacaaaactagagaaaattgggaagggc

SEQ ID NO: 70271 - DNA, 74 bp, Homo sapiens
caacaccaccacagaagatgaggacctcaaaggaatcagagatcattgatttcttcctgggggcctctctcaag

SEQ ID NO: 70272 - DNA, 60 bp, Homo sapiens
cccggattctcatcaccatgagtgatctgcaactctttcaccatctgtaatgcggagatg

SEQ ID NO: 70273 - DNA, 90 bp, Homo sapiens
aagaaatgattatatcaactgggtccaacagcaggcctatggaatgctcgaattacatctttacaagaggaggtgaagcatctcaaacat

SEQ ID NO: 70274 - DNA, 100 bp, Homo sapiens
agtgataatgaaattcagcggctccctccagaaatagcaaacttcatgcagctggtggaactagatgtgtctcgaaatgaacaaaatccagtctcatagc

SEQ ID NO: 70275 - DNA, 145 bp, Homo sapiens
caaagtggtgccgttttctcactatgctgggacattgctgctacttctggcaggtgtggcctgcctccgaggtcactcctggaagcaaggcggctctagctaatttatgtattggagatgtaatcacagccattgatggggaaaa

SEQ ID NO: 70276 - DNA, 100 bp, Homo sapiens
ttccacacgggtgccggcatcagcactgcctctggcatccccgacttcagagcttggggcttccttggtcgcacccaccacctgcctgcccactggtcag

SEQ ID NO: 70277 - DNA, 50 bp, Homo sapiens
atggaacagacaagcaggttgtcttggaatgaattcttccaaaacaaaac

SEQ ID NO: 70278 - DNA, 74 bp, Homo sapiens
cttggtttgcctatgtcaagatcacaggtaccagcaactaaggtttcagagctgaaccctaatgcagaagtgtg

SEQ ID NO: 70279 - DNA, 82 bp, Homo sapiens
ggacagtatggctgagggtcaggtgtgctgccaggaagtgggaatgtccttggcatcattgtgacgtgtgtggcaaaccttc

SEQ ID NO: 70280 - DNA, 90 bp, Homo sapiens
aagatgctggaggacctgcggcgggaacagcaggccacagagctgcttgcggccaagtacaaggcagcttttgggatggagaccagtatg

SEQ ID NO: 70281 - DNA, 97 bp, Homo sapiens
ctaaagtggctgcgtcgattggaaatgctcagaagttgcctatgtgtgacaaatgtggcactgggattgtatgtgatggtgctgatgtttaagaaga

SEQ ID NO: 70282 - DNA, 50 bp, Homo sapiens
agcccctcatcctgagatgggagccgtcttcccagtccaccgtccccatc

SEQ ID NO: 70283 - DNA, 51 bp, Homo sapiens
caaaattggcgattattcctggtggagctccaaagacaacaggccctccct

SEQ ID NO: 70284 - DNA, 75 bp, Homo sapiens
attacacctttgatttcaaaattccgaagaggctcaatctgtaaatccttctagtgttgatgaaaatattgactc

SEQ ID NO: 70285 - DNA, 100 bp, Homo sapiens
agattcggagaattatgagacctactgatgtccctgatacaggaattcctcctgatcagcagagactgatctttgctggcaagcagctggaagatggacg

SEQ ID NO: 70286 - DNA, 83 bp, Homo sapiens
ctcacccagcctgggcaagcacgaatgtccataatggaccgtattctccaaatagcagagcaggagcattggtttgaaaaggc

SEQ ID NO: 70287 - DNA, 80 bp, Homo sapiens
aaaggagtcaacgtgtggccgggcggccaaaggtgctcatggaaacaacctcattgctgttctagccaaatacatctacc

SEQ ID NO: 70288 - DNA, 87 bp, Homo sapiens
ctgtgatgtagagaccctaaagaagagcattgattcatttggacaaggctggctgcaggagctggcccgccgactggagactcccta

SEQ ID NO: 70289 - DNA, 75 bp, Homo sapiens
tgggcacccacggagcctccggggctggcatgagccatgagcccaagtccccttcgctagggatgctttccaccg

SEQ ID NO: 70290 - DNA, 100 bp, Homo sapiens
atccacgccagccgcaccatgccgctcctaagcctgcacagccgcggcggcagcagcagtgagagacccctcctcctgtagagagtggtgctgccctctc

SEQ ID NO: 70291 - DNA, 99 bp, Homo sapiens
gctgttcttgacccacctccttcaaactcggattttccgtttctctcttctcctaagagctgcctgctgccttctggctgagtcatcactagagagtgg

SEQ ID NO: 70292 - DNA, 82 bp, Homo sapiens
cttacacagatattaaaaatttaaagaagcacaaaacaaaagtccattctggaaacacttcaagttgaagaagatgatcgac

SEQ ID NO: 70293 - DNA, 100 bp, Homo sapiens
ttttccagcgctgcctccaggttttgccggagcgctattcttcactcgagacaagcagtttcaccagtgatcattaaagaatgggcagcttacaaaggaa

SEQ ID NO: 70294 - DNA, 98 bp, Homo sapiens
tcgcctcctcgcagcagcgccatgcgccactggcttcaccacgcggtcagacattgggcccgcccgtgatgcaaatgaccctgtggatgatcgccatg

SEQ ID NO: 70295 - DNA, 100 bp, Homo sapiens
aaggcaatgatttataccatgaaatgattgaatctggtgttatcaacttaaaagatgccacctctaaggttcagctctgttcagctccttggggatctcc

SEQ ID NO: 70296 - DNA, 74 bp, Homo sapiens
cttggtttcgggatctcggtgctgcagacggcgagacctcctgcacagattcttctaacagagaaaatgccatt

SEQ ID NO: 70297 - DNA, 74 bp, Homo sapiens
ggctttaccatctttgtggctgtgcttgccaggcctggctccaattgctttcacaacaaaaatttaccatccaa

SEQ ID NO: 70298 - DNA, 99 bp, Homo sapiens
tgaaccggagaccccgaaaacggaagcgcagggagaaggaagaggtgtttgaaaaggattcggaaacttcagatacgaaatatcccgcctcatttacag

SEQ ID NO: 70299 - DNA, 75 bp, Homo sapiens
ggacctacctccatcatcacatgaccaaagcattcctcttctatggaactggggagaaggttggggtttcatgcc

SEQ ID NO: 70300 - DNA, 76 bp, Homo sapiens
gcgccatcttcgaacttagacttccggaaggactttggcgaggtttggagggaagctggttacttttggcctcccc

SEQ ID NO: 70301 - DNA, 50 bp, Homo sapiens
cccagccctggggcctgctgactgcctggagcattggtaagcgtcacact

SEQ ID NO: 70302 - DNA, 74 bp, Homo sapiens
ggcaaccggggaccccggccactggagcaggtcacctgttacaagctaggcaagttcactggcctcaagactgc

SEQ ID NO: 70303 - DNA, 98 bp, Homo sapiens
actatcattactcctccaacaccaatcatcccagacgttgaacaagagatttttcaatcaagactttggaactacgaagatggaagagatttgaagag

SEQ ID NO: 70304 - DNA, 83 bp, Homo sapiens
aagcagcagcaggactcagaggcgagagtggccccagccgggccagaagcagggccgagaactactggtggcgtggccagaac

SEQ ID NO: 70305 - DNA, 100 bp, Homo sapiens
gtcagtgttctcaactcccacacacaggatgtcaagcatgtggtttggcacccaagtcaggagacatatctgaagagatggattaagaatgctttggatt

SEQ ID NO: 70306 - DNA, 90 bp, Homo sapiens
cctttgcctgcttggcctatcaagggagtaactattcccagtcagaggcgctatgtgtattattatagctacctgttaaagaatcatctg

SEQ ID NO: 70307 - DNA, 90 bp, Homo sapiens
ggagggccaagatggcggaagcggaggagtctccaggagacccggggacagcatcgcccaggcccctgatcctaaatgcccaggagatgt

SEQ ID NO: 70308 - DNA, 82 bp, Homo sapiens
ctgagtgggaggcaaacccactcatctgtcctgtatgtacaaaggtggttctcttcccaaagtggaagccaaattcatcaat

SEQ ID NO: 70309 - DNA, 51 bp, Homo sapiens
ttatgtgcttggatgaaaaaattgttaccaggcagtgacattgccagtggg

SEQ ID NO: 70310 - DNA, 101 bp, Homo sapiens
accatatggcccatggaaaagattttgcatctagaggaattgaaaaaccttttgcccagagtagcagccaaacttgaggttgccccgatttctgacatcat

SEQ ID NO: 70311 - DNA, 101 bp, Homo sapiens
ccggcgtgccccaccatgtcagacgcagccgtagacaccagctccgaaatcaccaccaaggctagcttgtcactttctgcaaaggtttccctcagggagcc

SEQ ID NO: 70312 - DNA, 76 bp, Homo sapiens
cgtctcgcgagagtccaagttaaagaacatggcgacgtctaatctgttaaagatagatcagatactgattcatcag

SEQ ID NO: 70313 - DNA, 100 bp, Homo sapiens
gtggcccagcgcgccctagagctgctgcacaactgcgtgcaggaactgaagctcttagaagttattcagcttctcaaggctggaaaagcgaaggaagttt

SEQ ID NO: 70314 - DNA, 74 bp, Homo sapiens
gagtctcagagctgtcagaaaggtatccagctcacatagaagacattgactacgaggaaggaaaagtactcatc

SEQ ID NO: 70315 - DNA, 87 bp, Homo sapiens
gatttcgtcccagcctgacaaccttggaacagaacaagaggacaggaggtgtcgttccaggtgctgggtcttcagctctaaagaggc

SEQ ID NO: 70316 - DNA, 100 bp, Homo sapiens
gctctacccagaattcaattaaagtggctcaggtttcaccggaagacttttgtgaaaagatgtggatcaattatacctatttttggaactatgaatgtga

SEQ ID NO: 70317 - DNA, 75 bp, Homo sapiens
gaccggcaacatggtgcggtcggggaataagaaactgccagaggcatgcagcattggtgatggaaagccctttgt

SEQ ID NO: 70318 - DNA, 98 bp, Homo sapiens
tgcaatggagatgtcaacagagctatcaatgttcttctggaaggaaacccagacacggttgctccttgagggcaggacagttcttatggctttatccg

SEQ ID NO: 70319 - DNA, 100 bp, Homo sapiens
ggggacggagagaacacgagcccatcagggcatcttttatgaccaagactgtccagtaccaaaatgagctacataaattcctaatctgggatacagctgg

SEQ ID NO: 70320 - DNA, 82 bp, Homo sapiens
aaaggggaggttacgcagcaaaccatccagaagttccagggtctccctccactgctgtagtaacccgggtccggggcctcgg

SEQ ID NO: 70321 - DNA, 100 bp, Homo sapiens
aggacagcacctagtcgtggccggaggagtctcagagctgtcagaaagagtgatgaggtcctcaccgtcatcaaagccaaagcccaatggccagcctggc

SEQ ID NO: 70322 - DNA, 90 bp, Homo sapiens
ggaaataaacctgtggagactatcggttttgactctattatgaaacagcaaagtgagttctctggtgatgttgatagcctggaactgggg

SEQ ID NO: 70323 - DNA, 89 bp, Homo sapiens
agtgttcgaagggggctgcagcggagatccgagagcagggggatggggcagaggacgaggagtggactctgaacaggaagtgcctcctg

SEQ ID NO: 70324 - DNA, 75 bp, Homo sapiens
ggtgacgacaggcagcaaaagaccaggggaccagtcagccatcaatgaactcatgcagatgagattgaggtctgg

SEQ ID NO: 70325 - DNA, 100 bp, Homo sapiens
ttcttctgaacagatcaagcaaaagtagataatcagccagaagaattagtgcgtagtgctgaagatggaaatacaactggagcacgcaaagcaagccttt

SEQ ID NO: 70326 - DNA, 51 bp, Homo sapiens
ggcaaacagtacggcagtgagggccgaatacatcaagcaatggtaacatct

SEQ ID NO: 70327 - DNA, 83 bp, Homo sapiens
caaatgtctgactctgactctcggactgagaaacgcaagtgacagctatattgtgcgtgtcaaggctgtggttatgaccagag

SEQ ID NO: 70328 - DNA, 80 bp, Homo sapiens
caaattaaagcaattatgaaagaagtcattccttttttgaaggtgcgggagatgttaaagatgagggactccaatggggc

SEQ ID NO: 70329 - DNA, 82 bp, Homo sapiens
tggcgtgtgggcttttcccacagaaatgaggagaaggcagagcccccccaggctatgaatgccctgatgcggttgaaccagc

SEQ ID NO: 70330 - DNA, 100 bp, Homo sapiens
atttatttcattgtataacacatctatgaaggactggctgactcgctatggttacctgccgccaccccaccctgcccaggcccagctgcagagccctgag

SEQ ID NO: 70331 - DNA, 83 bp, Homo sapiens
aaccagccgaacttcagggtttccaccgttcgttcaaggggttgtgtccactgtggtccccgactctgcccacaagctgttca

SEQ ID NO: 70332 - DNA, 76 bp, Homo sapiens
aacagttaatcctcaatttaagcctgatctaacccctagaaacaggtgctgctggtgagtagcagccggtacccag

SEQ ID NO: 70333 - DNA, 99 bp, Homo sapiens
attctagcaggttcctgagtcctcgagcgcgggaagaaaggagagcgacttgcagttgtggaggtacagtgtgaacggctgaggatgctctaccgggac

SEQ ID NO: 70334 - DNA, 75 bp, Homo sapiens
tgacaccaataattttcaaggaagaaaatcttaggggtttagatgtagattctctggtcattgagcatatccaag

SEQ ID NO: 70335 - DNA, 83 bp, Homo sapiens
ctctggaaaaacttcttgccaaccaaagtgttccacactgattctcgtgactttaaggaccagggatttgaagaggtattagc

SEQ ID NO: 70336 - DNA, 90 bp, Homo sapiens
tccgggagcacgtcatctccatcgagggtctctaattaacagaagatggcaaagcccagccacagcagctatgtccttcagcagctaaac

SEQ ID NO: 70337 - DNA, 100 bp, Homo sapiens
aagaaagtaaagttggaagttaagggagacaaagttgaaaacaaagtgctgatttcaggtatgctgctgaaagtgggaatcctctacattggtgggcagc

SEQ ID NO: 70338 - DNA, 82 bp, Homo sapiens
ctcctagcgcggtgcccgcgccgtgactccgcaggactgatcctttgaaatactccagccatgactaaaagagaagcagagg

SEQ ID NO: 70339 - DNA, 100 bp, Homo sapiens
cggggacccaggagtttcctgtgtccagcgctgccggagccgcctgagcatcctggtggggaagaagttttaagggaacaagctggaggtgacgctactg

SEQ ID NO: 70340 - DNA, 137 bp, Homo sapiens
gaagattctagacttgtgtgcagcacctggagggaaaacaacacacattgcagcactaatgcatgatcaggtaaaataccatgaagattttgaaaaaacaaaggggagaggctttactcccgtcgtggacgatcctg

SEQ ID NO: 70341 - DNA, 75 bp, Homo sapiens
gtatcgctacttcaaagggtactttttagaaccaaagactttaagaaagaaaggccttaatggttgtgagagccc

SEQ ID NO: 70342 - DNA, 85 bp, Homo sapiens
tcaccgacagtgccctgagggccttcgagagctaccgcgccagacagagtgcctggtgaagaatgtgatgggatcactagcatgt

SEQ ID NO: 70343 - DNA, 100 bp, Homo sapiens
gactacatccaccacatgggatatgtacacagtttggaaattttagcattcaggtgccaggaatgcagatgggacagccagtgccagaaacaggcccagc

SEQ ID NO: 70344 - DNA, 82 bp, Homo sapiens
gcaagaaggccctggacacagcaatatctctgggctttcacagcaggaacgaatgcaggaatttgggaactgagctgtgcaa

SEQ ID NO: 70345 - DNA, 101 bp, Homo sapiens
tgtgcatcgcccactccagaagtagcatggaaatggagggcatcttcaaccacaaaggatgaatattctatctttcctcagacatactccatagatattaa

SEQ ID NO: 70346 - DNA, 85 bp, Homo sapiens
cttcgtctttgcagcgtagcccgagtcggtcagcgccggaggtactccaaagattcaggtttactcacgtcatccagcagagaat

SEQ ID NO: 70347 - DNA, 75 bp, Homo sapiens
cttcgggggacacttcagaaagatcggaagtccattggaatattaagcccaggagttgctttggggatggctgga

SEQ ID NO: 70348 - DNA, 100 bp, Homo sapiens
cttatgttcctttataccatctttattgtggccacaaagttaaaggcattaggatttcctgaaggacttgtgatacaagcgtattttgcttgtgagaaga

SEQ ID NO: 70349 - DNA, 75 bp, Homo sapiens
tcagaaagatggcatatcagatatgcaagtctgtgaattaatctgaatctgaagctgaagaaggtgactgaattt

SEQ ID NO: 70350 - DNA, 100 bp, Homo sapiens
gcggtttctagtgcaaatcccctgctcagggtcttcatccagaaacgagagcggttctggtgaggttggaaggatgcagccacccggttgtcatgaaagg

SEQ ID NO: 70351 - DNA, 80 bp, Homo sapiens
gaaattaaccctatacctctgacccagcaccctcatcacatgtgtggattctgggattctcagagtctggcatgacaagg

SEQ ID NO: 70352 - DNA, 82 bp, Homo sapiens
cggcgatccgggcgctcgagacttaccagagccacaagcaaattgtggctactaatttgccccctgaagatcaagatggctc

SEQ ID NO: 70353 - DNA, 83 bp, Homo sapiens
ggaagctcctggaggtcagaggccctttcatcatcaggtcaaaatgcagatcttcgtgaaaacccttaccggcaagaccatca

SEQ ID NO: 70354 - DNA, 75 bp, Homo sapiens
ttccagctgcccgcacgccccgaccttccatcgtagtactcccctgccctcaacaagatgttttgccaactggcc

SEQ ID NO: 70355 - DNA, 100 bp, Homo sapiens
ggcccgtcccacggtctgtggctacggatcccaggaccctcttcgcgggcgattcgcgtagcctcaggttctaagctggtctatgtccatcaccttcttg

SEQ ID NO: 70356 - DNA, 75 bp, Homo sapiens
aaaaatccggctatttctgaaatggtggcacatgaaaggtgccagcgagatttcagattcctgtaaacctctaaa

SEQ ID NO: 70357 - DNA, 100 bp, Homo sapiens
agatgcagagagaggctgcgttcagactggggcactgccatcccctccgcatcatggggtctgtggaccaagcggagctggagtttgttcagatcatcat

SEQ ID NO: 70358 - DNA, 82 bp, Homo sapiens
ggagcctcagttggaagcagccgatccagcctgcggagcctgtggggcagggtgtacagcaagctgtgattcctgggaaaac

SEQ ID NO: 70359 - DNA, 90 bp, Homo sapiens
cgcagcgctgccatggagcccagcagcaagacaattcctcctcgcttcaagaagatgaagaagtagagatggaggccatcagctggcagg

SEQ ID NO: 70360 - DNA, 75 bp, Homo sapiens
gacagccctgtgtgacaccaagataagtaacgcccttcataacacaaggcttttatctgcttattccgccattga

SEQ ID NO: 70361 - DNA, 100 bp, Homo sapiens
ggaacggctgaaggccctacgggagaaaaccgggcgcaagatcatggaagggaagtggttgctgtgtatgttactggtgcttggaactgctattgttgag

SEQ ID NO: 70362 - DNA, 75 bp, Homo sapiens
ttttgtaatggaagggcatggcaagactccacctcctggtgaagaaagcaaacaaccattcccggagtaataaat

SEQ ID NO: 70363 - DNA, 100 bp, Homo sapiens
actttgagccctaccttactggacagtcaaatcagaagcagcgctatgcaaacaagcactgaagaggaatcggagtagaatgcgtcagttggacacaaat

SEQ ID NO: 70364 - DNA, 90 bp, Homo sapiens
gattttgctagagctgaaggctgtgataatgaggaagatcttcaaatgggcattcacaagacctctgctcttccaggcaagtgaacatgt

SEQ ID NO: 70365 - DNA, 88 bp, Homo sapiens
gaggtggaagtccaagtcaaacgcagaaggactgcctcactgagcaaccaagagttttgtggtctttgcaacccttgtggtcattgtg

SEQ ID NO: 70366 - DNA, 100 bp, Homo sapiens
ttcccgaacgataggttggaaaggctcctggatccaaactcgctgagacccaacatgagtgaagtttcctgcaagaaacgggacgactatttggaatggc

SEQ ID NO: 70367 - DNA, 100 bp, Homo sapiens
gagcggctccctaacaggcccgcctgtctgctcgtggccagcggcgccgccgaagattctgaaagtcaagaagacatcatccggaatattgccaggcacc

SEQ ID NO: 70368 - DNA, 100 bp, Homo sapiens
caagcccaaagggcccacttcagccgagctgctgaatcggttgaaggagaagctgctggcagggaacacatgcccactttggaggaattctttgaagaag

SEQ ID NO: 70369 - DNA, 101 bp, Homo sapiens
gcacaaacccactggacaccttcgtcccctttgatccctgtgtgctgaagaggaccttcgcctctgcatttgtccagtaactctggctgtgccggatactg

SEQ ID NO: 70370 - DNA, 104 bp, Homo sapiens
gggaagaccaagacagtgcctggataccttcgaataggacaagtcatcaattgctggctcagaagatgctgaacctcttgctccacccatcaaaccaattaaac

SEQ ID NO: 70371 - DNA, 98 bp, Homo sapiens
ccaaaggagtatctccagcctttcaaggacaaactagaggagttcttccaaaaagggagttctgggaaatcgttcattcatttacagatgaacagaaa

SEQ ID NO: 70372 - DNA, 99 bp, Homo sapiens
tgaggataagagagccacgaaccacggcactgattttcagttctgggaaaatggtgtgcacaggagccaagaggccagtccctgagacgaataggacct

SEQ ID NO: 70373 - DNA, 96 bp, Homo sapiens
gcggtggcttcgtcaagtcggacgtggagatcaactactcgctcatcgagacttcctgggaatgaaaatggttggtgagctgctacgaatgtcggg

SEQ ID NO: 70374 - DNA, 100 bp, Homo sapiens
cccgtatgctgccgtggatctgatcagctgaggcctgagacacaggaccagttgcagtaccatgcaggactagcatctggccttttaaatcagcagtcat

SEQ ID NO: 70375 - DNA, 98 bp, Homo sapiens
tgcaatcacatgcagtgtgctaagcctatccctcggccagatcctgtgcataataatgaagaaacacatgatcaagtgctgaaaaccagattggaaga

SEQ ID NO: 70376 - DNA, 100 bp, Homo sapiens
cagtctggtgaagttccatgcccatccagagaggttcccgtgtggccggtggttagggaagggcatggatgatggaagcctggagcggatcctagttggg

SEQ ID NO: 70377 - DNA, 97 bp, Homo sapiens
tacagatggagggaatgcaggaaagctaagaagaatcacacctcattgcagaaatgcactcggtgatggaaagagagccactattctgaagaacact

SEQ ID NO: 70378 - DNA, 73 bp, Homo sapiens
gcaaatgctattgtcagtcagcaaactccacaaaggctgtattcatcaccaaagaaaaaacttacaccaatgc

SEQ ID NO: 70379 - DNA, 98 bp, Homo sapiens
gtcttcggctagcaagttcaccagcatccctgcagccttctggtataccatcgtcaccatgacaacactaggatggccatgactaccctcgagcagcc

SEQ ID NO: 70380 - DNA, 50 bp, Homo sapiens
agaccagcctgggcaacatagaaggatttgatgccctggatccctttatt

SEQ ID NO: 70381 - DNA, 90 bp, Homo sapiens
agaacaccagccttgcacctgaagaccccacctttcctgttgattccaggcgtgaattccaagaagaaccaaatgtattttgactggggt

SEQ ID NO: 70382 - DNA, 51 bp, Homo sapiens
cccagggcaagccccgctccggccaacaacctcctgacaaggtgatccggg

SEQ ID NO: 70383 - DNA, 75 bp, Homo sapiens
ccctatcaggacatggagtatgaaagacgtattcatgtgattgaacggcgtgctcttcctgagttcttcaatgga

SEQ ID NO: 70384 - DNA, 76 bp, Homo sapiens
cacagctcatgtctcattaatcacaccaacaaaaagatcctgtggtacagctcaatctgaaattgaagtgtctgtc

SEQ ID NO: 70385 - DNA, 98 bp, Homo sapiens
gggaagagaaagcagtttttggacaacagttccttcacctcagcatttttcatggatttcaaataagtgagtctcttctccttcaagtccgtggttct

SEQ ID NO: 70386 - DNA, 50 bp, Homo sapiens
ggttccatcggctgaggagcattggacctgggctatcccttggagcttgg

SEQ ID NO: 70387 - DNA, 73 bp, Homo sapiens
ttgctacagagaaggcagtggaactagccgccaatacaaagggtccacacccagcaccactgagcaagtttgt

SEQ ID NO: 70388 - DNA, 80 bp, Homo sapiens
ccttccctcagcagccgcggcgcgcagggcacttgggtgagaagccctaccactgcaactgggacggctgcggctggaag

SEQ ID NO: 70389 - DNA, 75 bp, Homo sapiens
ctgcaaggatgctcctgggatttcggagaggccgcaggagtcatttcgtcctggatggtcgccggcccacagggg

SEQ ID NO: 70390 - DNA, 87 bp, Homo sapiens
ccccactctttccgccctaatggaggtctccagtttcgggccgcgatgggcctcttggaacattggtgtgttcatctgcattcgatg

SEQ ID NO: 70391 - DNA, 80 bp, Homo sapiens
agccatcatccaacaccgccatcctttcattgagtgggctcggccaccccaaccttctgagacgggatttcaccatgttg

SEQ ID NO: 70392 - DNA, 101 bp, Homo sapiens
cttgcaggcagcctctcagccggccgagactccatcccaacaggaacctaacagtttccttaagaaggctgatattttcatcaatgggtcgcagttaggag

SEQ ID NO: 70393 - DNA, 89 bp, Homo sapiens
gcctcccgggtggcttacagacgctgccagcatcgccgccgccaggtgagaagccctaccactgcaactgggacggctgcggctggaag

SEQ ID NO: 70394 - DNA, 100 bp, Homo sapiens
tttcaatctaaatccaaatctgatacttcgaggtggagctgaagaagggagccactctcaaaatcacgctggataacgcctacatggaaaagtgtgacga

SEQ ID NO: 70395 - DNA, 76 bp, Homo sapiens
aggatgcgccgctccactgtcggtagcaacaagggaccagttactctccacaagaaaattcacacaaccacagtgc

SEQ ID NO: 70396 - DNA, 75 bp, Homo sapiens
agctgcggaacaggacgccctctgatattttctggcatccttaaatcttgtgtcaaggattggttataatataac

SEQ ID NO: 70397 - DNA, 76 bp, Homo sapiens
cagccatcgagtggcagagagatgggcagcctgtctcttctcccaggtacaggtttgcagattccgccagcagcac

SEQ ID NO: 70398 - DNA, 98 bp, Homo sapiens
tggagcaacttcgaccccaccggcctggagcgcgccgccaaggcggcgcgcgagctggagcactcgccaactttgtaagtgtggctttgagaaatgtc

SEQ ID NO: 70399 - DNA, 100 bp, Homo sapiens
cgcggctatcccaccatcaagttcttcaggaatggagacacggcttcccccaaggaatatacagatgcccctgggctgtctgaactctcttcactagttg

SEQ ID NO: 70400 - DNA, 75 bp, Homo sapiens
cggatgagtacgataccgaagcgggctgtgtgccccttctccacccagagccgattcgaagacagtctcttacac

SEQ ID NO: 70401 - DNA, 90 bp, Homo sapiens
tcctccgagggaggggggttgtgaccccaggaccaagaatcgccttcagccctgtctggtgcatccttggcagaaagtgaggaggaaaac

SEQ ID NO: 70402 - DNA, 83 bp, Homo sapiens
caaagttttgcagatcttcaacaagaggacccaggagaaattcgccctcaaaaataccctctaccatctgctttggtcagggt

SEQ ID NO: 70403 - DNA, 109 bp, Homo sapiens
ggatccgctggagcggagccggccgtacgcggtgctgcgagggcagaacctgggagcaatttacagcaatgagggatttatacatgaaaaatggacaaggatttgcatt

SEQ ID NO: 70404 - DNA, 101 bp, Homo sapiens
caagaagctggtgtgcggagatgaaggtgctacagctcgagagggcagagccacagtccctggacggcgtggactgaggccggttccttcctggaggcctc

SEQ ID NO: 70405 - DNA, 75 bp, Homo sapiens
gaaagtggtgaatcccctgtttgagaaaaggcctaagaattttggcattggtatgatctcgtgaaaccttgagag

SEQ ID NO: 70406 - DNA, 90 bp, Homo sapiens
cctctcaatcccagtctcatgcttccagcctggataatgattgagccacctgtccaggtggaaatcacttgggatgagactgatcatgaa

SEQ ID NO: 70407 - DNA, 83 bp, Homo sapiens
ataccttttaatcccctggccgaaagtcatcctttaatagacgaggtaatctcagccaggaaaggagagtttgaaactggatt

SEQ ID NO: 70408 - DNA, 90 bp, Homo sapiens
cgactacaaggagatcgaggtggaagagatgcggaaaacgccatgcggtacataaatgggacgcgtctggatgaccgaatcattcgcaca

SEQ ID NO: 70409 - DNA, 83 bp, Homo sapiens
cttcaggggaaatggcttcagcgcagtatattactgcaggaagaaggagagacgaccatcttgcaactagaaaaagatttgcg

SEQ ID NO: 70410 - DNA, 75 bp, Homo sapiens
ccagggcagcaagaatcctcagaagtactcggacaaggagctgcaggacatggatttgattgacatactttggag

SEQ ID NO: 70411 - DNA, 75 bp, Homo sapiens
ctttgctcttccatccgcctttgatcgtcttcctcttcagccatccagccagatccaggctcctggaagaaccat

SEQ ID NO: 70412 - DNA, 75 bp, Homo sapiens
ggtctcggcaggctcttcgggaaggggagtctgaagatacagtattgctcgtcctcaaagagatctaccaaaccc

SEQ ID NO: 70413 - DNA, 82 bp, Homo sapiens
cccgcactcctggtcctgctcggggctctgttcccaggcttaaaatttgattcaaagtatatgaatttcagagtgcgagctt

SEQ ID NO: 70414 - DNA, 80 bp, Homo sapiens
cgcgctgcggcctggcggcttccaggcgcactaccgcgcaaaatgatgcttcaacacccaggccaggtctctgcctcgga

SEQ ID NO: 70415 - DNA, 100 bp, Homo sapiens
gtgtggcacgtgggctacaattccagcgtggccttcagttctgcacacgtgcgtcaaagtttttgaatcagagccgacaggcacttgaattgaaaatgga

SEQ ID NO: 70416 - DNA, 100 bp, Homo sapiens
agacgatgatgatgatgacatcacccttacagtttaactggtacacccgccgagccatgctggctgccatctacaacacaacagagctggtgatgatgca

SEQ ID NO: 70417 - DNA, 100 bp, Homo sapiens
attctattggacaagtactcactgttctcctgaaaagaaagctgaacattcatctataaatcaagaaaatggcactgcaaaccctatcaagaacggtaaa

SEQ ID NO: 70418 - DNA, 90 bp, Homo sapiens
gcgagaagccccagctgcactacgcgggtctgggcagtggccctgaactctctacctcaaagatttcttctctggacacttcgatgcggc

SEQ ID NO: 70419 - DNA, 100 bp, Homo sapiens
ccctcctccaccgtcgcctcccactgcaaaaaggcctggatataattgaccctgcaatcctgcgcccgggccgcctggacaaaacactgtttgtgggttt

SEQ ID NO: 70420 - DNA, 100 bp, Homo sapiens
ttctttagacacattaactgggaagaacttctggctcgaaaggtggagcccccctttaaacctctgttgctggttatattctgggcactaaatgaaggcg

SEQ ID NO: 70421 - DNA, 100 bp, Homo sapiens
ttacacctgacccagagcctacccatgaagtgcacgttcgaaggctgtgggaaacgcttttcactggacttcaatttgcgcacacatgtgcgaatccata

SEQ ID NO: 70422 - DNA, 100 bp, Homo sapiens
gccgccgctgctacctgcagcgccgtgtggcacgacacaaaaatcagggtgtccgcaatgttgccagtgtctgtctgcagattggctacccaactgttgc

SEQ ID NO: 70423 - DNA, 88 bp, Homo sapiens
acatccggaaatcctgccaacagtgcaaggaagcctggttcagcaggtggccctaaggttggagcacttttccagccattaactccag

SEQ ID NO: 70424 - DNA, 83 bp, Homo sapiens
gaaggggccagagttgaggggtccatagcctagtaactgggtggtcgcaatggaagaagagatcgccgcgctggtcattgaca

SEQ ID NO: 70425 - DNA, 82 bp, Homo sapiens
cggacgacgtgcgtgacttcatcgacaacctggacagctcctgccagcagctgctccctgccacgggagtccccgttacccg

SEQ ID NO: 70426 - DNA, 80 bp, Homo sapiens
ggggagcgaaggctgaggtggcagcggcaggagagtccggccgcgacaggacgtgtctttggtgcaacactaacaaggct

SEQ ID NO: 70427 - DNA, 100 bp, Homo sapiens
gcagaatgcagaaatcatcagaaaaatgactgaagaatttgatgagcaatggtacaacagctccatgaacgtgatctgcacctggttgacggaccggatg

SEQ ID NO: 70428 - DNA, 90 bp, Homo sapiens
aaaggatatgtgttgctaatacccatctttactggcatcctaaagatcatgatgctgcgattaatagatatagccgtttatcaaaaaaaa

SEQ ID NO: 70429 - DNA, 98 bp, Homo sapiens
gccctggtgctcaccaagcaagactccacttcagcctacagctccctgctcacttttcacctgtccactcctcggtcccaccacctgtaccatgcccg

SEQ ID NO: 70430 - DNA, 80 bp, Homo sapiens
gcgtccaaccccgaacggggggagattctgctcacggaactgcagctgaagaaatcaggggagaaacccctgcttggtgg

SEQ ID NO: 70431 - DNA, 80 bp, Homo sapiens
gcgggggcggcgtgggcaagtcggcgctcaccatccagttcatccaggaagctcttcgtgggcggtcttgactggagcac

SEQ ID NO: 70432 - DNA, 100 bp, Homo sapiens
ctcgaagaacagctgtggaaagaagttgcaaaacactgggaccgagatctcactcagcagacagcagcagcccgggagcctgagctcaggaggaactctt

SEQ ID NO: 70433 - DNA, 75 bp, Homo sapiens
gccacttcgacatcgagatcaaccgggagccggtttatgcaactactgctgccaaccccagagagtcgtcctacg

SEQ ID NO: 70434 - DNA, 100 bp, Homo sapiens
tctacttttcaagacaccaagtgagaggccaaccaggaagggaaaaggccgaggcatcagcgtgtgaagaccgcaaagacgatcccgagtacagttgtga

SEQ ID NO: 70435 - DNA, 100 bp, Homo sapiens
gcggtacatcgcctcggtgcagggctccaccccgtcgcctcgacaggtcaaaatgcagatcttcgtgaaaacccttaccggcaagaccatcacccttgag

SEQ ID NO: 70436 - DNA, 100 bp, Homo sapiens
cctgtggcttatctacgctttttagaattgcacttggaggacaaggttgtggaaaatgcccttaaagtgaacccaatactaggtccacaaatgtttcaac

SEQ ID NO: 70437 - DNA, 100 bp, Homo sapiens
tgaatgtaacaaatgtgatgacaagaaggagagatctctgctgcctgcattgagggtcagcagataagcagagagccctagaagaaaccaaagcctacac

SEQ ID NO: 70438 - DNA, 50 bp, Homo sapiens
tttcttaatcagcgcttgcaaagatatgaggccccaggattcctggcgag

SEQ ID NO: 70439 - DNA, 90 bp, Homo sapiens
cttctgggcccccacattaatgaggagaggcagatgcgaaccagaacaatgggacctcctctcaggacacagcggtgactgactccaagc

SEQ ID NO: 70440 - DNA, 100 bp, Homo sapiens
ggctaccaagtccgtgctgtttgtgtgtctggcgagtaaccagctcataaatcacatcgaacagtttttggatactaatgaaacaccgtattttatgaag

SEQ ID NO: 70441 - DNA, 51 bp, Homo sapiens
aatcttccttcaggatatcaaggtcaaaatgcagatcttcgtgaaaaccct

SEQ ID NO: 70442 - DNA, 74 bp, Homo sapiens
ttctctgaggcggcgagagatggtcaggtctggagctcgaccgggccagggaagaaacccttttttcttggagc

SEQ ID NO: 70443 - DNA, 100 bp, Homo sapiens
ggacaattccatttggggaccagagatggacggtcactcagcctatggaggtgacagttaaaggatttgaacctttaattcagtttgcctacactgctaa

SEQ ID NO: 70444 - DNA, 82 bp, Homo sapiens
cgggcgggggcaccgagggctaccacgttctgcgggtgtggaaacaggaagagaactagaactggaagtaaagcattgaaga

SEQ ID NO: 70445 - DNA, 97 bp, Homo sapiens
tcgttcagcagtcatgtaactataagcagcttcggaaaggagccaatgagggtgctggagaatctggtaaaagcaccattgtgaagcagatgaggat

SEQ ID NO: 70446 - DNA, 100 bp, Homo sapiens
cctctacctcactgtggcctatgactggttcctcttcggggatatgatgatacatacgcagaacaaagttacgaaggctacgaaggctattacagccaga

SEQ ID NO: 70447 - DNA, 101 bp, Homo sapiens
gaaagagaagctcttcctgtgagtgctccactccagctacgagaactagtaaattgtcgttgggcagaagaagtaacacaacagcttgatactcttcaact

SEQ ID NO: 70448 - DNA, 74 bp, Homo sapiens
gggcgcttcgccccgggccccccagcatgaagaccccggcggacacaggaccaggaatcaccttcaagcctatg

SEQ ID NO: 70449 - DNA, 100 bp, Homo sapiens
agacctgctacaccagcgtgaagtgtcacatttgaagacgagcactgaggatgaggaaccaactgaagaatatgaaaatgttggaaatgcagcatctaag

SEQ ID NO: 70450 - DNA, 46 bp, Homo sapiens
ccacaccccctgcagtttctcaggagagaagtggatgggccctata

SEQ ID NO: 70451 - DNA, 100 bp, Homo sapiens
ccagaagccaaagataacacctgtgacagttaaagctcagactaaagcccctcccaaaccagattcatgatggcttgcagatgcttgatttcctgaaggg

SEQ ID NO: 70452 - DNA, 100 bp, Homo sapiens
ttctacgacttcgagccgctgcccaccctccccgaggacgagaacgagtccctggagaggcagatgcgcgagcaggaggagcggcacgtgcgggaggcgg

SEQ ID NO: 70453 - DNA, 90 bp, Homo sapiens
gtccccagagcctcagtttgtgcaggacaccgacatggaacagggactcactgggggaagaaggtagataatgactataatgcccttcga

SEQ ID NO: 70454 - DNA, 74 bp, Homo sapiens
ggagctgtgcgagagcctcctcacttgggcttccgaagatcttctcaaggaacactacgttgacctgaaggacc

SEQ ID NO: 70455 - DNA, 75 bp, Homo sapiens
ggccactgcgcagaccagacttcgctcgtactcgtgcgcctcgcttcgagagtattggaagtttccaaccattgg

SEQ ID NO: 70456 - DNA, 50 bp, Homo sapiens
ctacatttagcgcatcatgtgatccgggattgttaaaatgagtcttcgga

SEQ ID NO: 70457 - DNA, 96 bp, Homo sapiens
ctgcatttccaggacctggtcactattcaggacacggttccagcgcagtgcgcgttagccatgtctcaggctgaatcagtgccacctggacacggc

SEQ ID NO: 70458 - DNA, 75 bp, Homo sapiens
aggcccaaccgccgccagcaccatggccagcaccatttccggaacccaagacagaccaggatgaggagcattgcc

SEQ ID NO: 70459 - DNA, 51 bp, Homo sapiens
gagcggatcagagagtatttaaaggggtctgggggtggtggcatctcccct

SEQ ID NO: 70460 - DNA, 100 bp, Homo sapiens
ggatgctcttccttatattgatttaattgacccagctgagattgatctcctattaattagtcagctaaagtaaataatgccagcctgattggactgggtt

SEQ ID NO: 70461 - DNA, 75 bp, Homo sapiens
ggttgctgttgcttggcctggtgggcccagtcctcggtgcggcgcggccagtgtaatgttcaagctcagaaatgc

SEQ ID NO: 70462 - DNA, 96 bp, Homo sapiens
cctccccttggaccgagccgatcgccgcggggcagttcgggccggctgtcctggcgcggtatgatctcgtgaaatcttgagagaaactgaatgacg

SEQ ID NO: 70463 - DNA, 90 bp, Homo sapiens
aaaaggagagaagctgaagcattgcttcaaagcatggggctaactccagaatcccccattgagtgttgcggagataggaacatgggagag

SEQ ID NO: 70464 - DNA, 75 bp, Homo sapiens
atcttcttggggtctccaccgcaggagaccagtatgatgtctgtgccatttgcctggatgaatatgaggatgggg

SEQ ID NO: 70465 - DNA, 97 bp, Homo sapiens
ttcctcttcaagctcatctacaacgagtactgtgggcctggagccaagcccctcttcaggagtaaggtgcggcggcagcacatggagcgttgtacca

SEQ ID NO: 70466 - DNA, 100 bp, Homo sapiens
aagccagacagcttccacagcctgacgccgaccttcgcaggcagtgatatgacctcccaacaagaattcacttcttgcctaaaggaaacactaagtggat

SEQ ID NO: 70467 - DNA, 90 bp, Homo sapiens
catggttactctacagcagcttcactgcctgaaaatgaaaactgaacaaagggattaaattgtgaggtccttccaaccctcctgctacca

SEQ ID NO: 70468 - DNA, 131 bp, Homo sapiens
gttggaacaaggagaagagccatggatcataaagagacacataccaaattggatctatccagttggaagatgctggctcaagtagtttagataatctactaagtagatacatctcaggcagtcacctaccc

SEQ ID NO: 70469 - DNA, 98 bp, Homo sapiens
tgaaattgatgctgctattcagagatcacaacaggaagatggatctgaagttggtgttggaggtgcacaagtaactggctctaatacacggaagcaca

SEQ ID NO: 70470 - DNA, 90 bp, Homo sapiens
cggaggccagcaacctgctcttcgacgagcccattcccaggaaaagaaagaggcgtagaggctccggtgttttttgtgccaattgcctga

SEQ ID NO: 70471 - DNA, 98 bp, Homo sapiens
gcagggaaggagggcgtccgagtcaacaaccgcttcgagctgttccagggtctccctccactgctgtagtaacccgggtccggggcctcggtggtgct

SEQ ID NO: 70472 - DNA, 90 bp, Homo sapiens
agacgcgggatggtcgcgcgtcccctgcacagcacagaggggcagccggagagcctgggaaagatcaggatcctcatgaccagccaaaga

SEQ ID NO: 70473 - DNA, 100 bp, Homo sapiens
ggcaccttttgctccttcgatactcccgatgattccatacggaataagctcattttaattgccagaaacaaaggagaagagatcaactttgggaaactta

SEQ ID NO: 70474 - DNA, 50 bp, Homo sapiens
ggatacttgatcctgataaacgcatatcccagtagaatacgggcttttcc

SEQ ID NO: 70475 - DNA, 75 bp, Homo sapiens
cttgcttccctcggccgggccgtcctcggcggcagtgtcaggaagacttgcactatctgccagatgctgcttcct

SEQ ID NO: 70476 - DNA, 82 bp, Homo sapiens
acgggtttgccgccagaacacagtctctggatggtcgtcagatccgtgtggatcatgcaggcaagtctgctcggggaaccag

SEQ ID NO: 70477 - DNA, 75 bp, Homo sapiens
caggaacagagtcaatttcagggagctcgaggccatgagcagatataccagcccagtgaacccagctgtcttccc

SEQ ID NO: 70478 - DNA, 100 bp, Homo sapiens
gataattataatgaagaagtggctgacttaaaggtaaaagactgggtagagcgattgatgaaaaccctcagagatccctccctgcctctcctagaattgc

SEQ ID NO: 70479 - DNA, 100 bp, Homo sapiens
gaatcgctgagcgatatcacagaacacaagattaatcaatgtcaactgacagatcctggccaatttggagcaaggcttagcagaagacggcggcatgagc

SEQ ID NO: 70480 - DNA, 83 bp, Homo sapiens
gcgcggagcgccccttcgcgtcccctgcaccatgagctggggcaccgagctctggagtctcccccccctccttactccagata

SEQ ID NO: 70481 - DNA, 100 bp, Homo sapiens
gcggccggcaagagcggcggtagcgcaggggagattacttttctggaaggtactccaaagattcaggtttactcacgtcatccagcagagaatggaaagt

SEQ ID NO: 70482 - DNA, 100 bp, Homo sapiens
ggccgtcaacatgtcctttcctaaggcgcccttgaaacgattcaatgacccttctgttgtgtatatctgcggccctctggagatgctgcatgagatcctg

SEQ ID NO: 70483 - DNA, 100 bp, Homo sapiens
ccaagctgaagccactgagaaaagctggtgggcttaaactggatggccggcagctcaaggttgacttggcggtgacccgtgatgaggctgcaaagcttca

SEQ ID NO: 70484 - DNA, 90 bp, Homo sapiens
cccagacgtggtcagcaacgcacagctatcttgacccacccttgtgttctagaacagatcagacattttgtaatgatgcctgaaataaac

SEQ ID NO: 70485 - DNA, 100 bp, Homo sapiens
ccaagcagtggtgggaccagcagctcacctattaaagcaattttccccagcccaacttcactgaatcaccttaaagatatactgacgtcagttgtgtcaa

SEQ ID NO: 70486 - DNA, 101 bp, Homo sapiens
gaagcacggggaacgggtcggatgggctctctaaatacgtacagattctgcgataatgtgtggacttttgtactgaatgatgttgaattcagagaggtgac

SEQ ID NO: 70487 - DNA, 96 bp, Homo sapiens
gtgatctttgataagaatgattcagattttgaagctaaagttaagcaggagcttggtgttggtggcacgagtcagtggaaaatctgtggcctagat

SEQ ID NO: 70488 - DNA, 98 bp, Homo sapiens
gggccgccatggagcccgactcggtgattgaggacaagaccatcgagctcatgtgtaaacaggaacatcgataagtagtgtaaaaacttgcacaatga

SEQ ID NO: 70489 - DNA, 100 bp, Homo sapiens
aacactgaaaccagtcatcactgcatctttttggcaaaccaggaattgaatgatctggcacgggaccctccagcacagtgttcagcaggtcctgttggag

SEQ ID NO: 70490 - DNA, 90 bp, Homo sapiens
aaataaggacaaaagccaagaggaggacagttcgctacacagcaatgcatcgagggagactcatgcatctgtatgccgtgtgcgtggact

SEQ ID NO: 70491 - DNA, 73 bp, Homo sapiens
ggacggacaagcacagtcttcggaagttcctaagaagccagaatctacggatgatgaagaaaaaattggaaac

SEQ ID NO: 70492 - DNA, 80 bp, Homo sapiens
acacaaatctggaacgggtggccgattactgcgagaacaactacatacagagttcgcagtatgtgcagtgcgtggccggg

SEQ ID NO: 70493 - DNA, 97 bp, Homo sapiens
ccctttccaagcagttcaagaagactggatacacgtctgtttaactacgcaaaaggtaatgctggcatggcttactgggaccctaagtgtggcgaag

SEQ ID NO: 70494 - DNA, 74 bp, Homo sapiens
ctgccgtcgccatgtttggctgcttggtggcggggaggctgaatggcaaacatcagcagatctcaggcagactt

SEQ ID NO: 70495 - DNA, 83 bp, Homo sapiens
tctcggatcgaatccctcacgcgggcgcggatcgaccggagcagagagctggcgagcaagatcttgatgtggaagaaatggag

SEQ ID NO: 70496 - DNA, 83 bp, Homo sapiens
tacagaggaatagtctacaaaggaagacttgtaacctggagaagagggaaatcctcattgacgattcaatttgttgaaggcca

SEQ ID NO: 70497 - DNA, 50 bp, Homo sapiens
aagccaatgggaatcacctggttcaaggtatgagttaatacagaaaggag

SEQ ID NO: 70498 - DNA, 90 bp, Homo sapiens
gttccctgatgatcagactcagaaaattttggaaagagaagatgctcggctgatggaatctttgtctgaagtggaagaaaaatacaagaa

SEQ ID NO: 70499 - DNA, 75 bp, Homo sapiens
gagctgctgcctcagtacaaggagagggaaagacgagttgtactgctgtcacaggaaatggacgctggattacaa

SEQ ID NO: 70500 - DNA, 101 bp, Homo sapiens
aaggcggagatccgctacgagggcatcctctacaccatcgacaccgaaaactccaccgtagcccttgccaaaggtactagcaaaggccagacgtcttactc

SEQ ID NO: 70501 - DNA, 101 bp, Homo sapiens
caggggttatcgcacttaagcctcggaacaactttaccagctggtcacctgacttttgaatgccgcaattttctccgagtagaccctaaaagggacatagt

SEQ ID NO: 70502 - DNA, 75 bp, Homo sapiens
ccaggcccacagccgggagatccgagagctcttcaggatctgcataaagtattacaaacaaaatcctcttgatga

SEQ ID NO: 70503 - DNA, 100 bp, Homo sapiens
tcagtgtgacagtccatatgtaaccaaatattatggatcctatctgaagagcaatggtggaacaaagcggcaaaagatatcccatcaaaattatatagcc

SEQ ID NO: 70504 - DNA, 74 bp, Homo sapiens
cgtggagtgacggtgccaccgcggcgcgttgttggcatggagccaaggatgaggaggtaccttccaagcagtgt

SEQ ID NO: 70505 - DNA, 101 bp, Homo sapiens
gcctggacggctcgggcgctggagtcccgcagcgtggacaagcagcatgccgtcatcaactacgaccaggacagggacgagcactgggtgaaggacctggg

SEQ ID NO: 70506 - DNA, 100 bp, Homo sapiens
ccaactgcggacatgctgggtggatccggatcgcatggaagacgcagcctggccgcgctctcccagccagcgtctagttagccctggctcagccaacgag

SEQ ID NO: 70507 - DNA, 98 bp, Homo sapiens
ctcctcgccagcagccgtccggagccagccaacgagcgtggaatcctgaagggcttcgacccactcctcaaccttgtgctggacggcaccattgagta

SEQ ID NO: 70508 - DNA, 113 bp, Homo sapiens
gtgggtttgccccaatgaccggcagcttgcccttcgagccaagtacgtagagaatacaggaaattcttcagagccaatgctggaaagaaaatctatgagtttacgcttcagag

SEQ ID NO: 70509 - DNA, 100 bp, Homo sapiens
ctgggacttatttttgtatagctgataatggaaatgagacaattgaagctcaagcagagcttacagtgcaagctccagagtttcctattttggagaagca

SEQ ID NO: 70510 - DNA, 100 bp, Homo sapiens
cgccgccgctgtccggagccccacagttcacatgagagatcctaataatcaacttcacgtaattaaaaatttgaagatagcagtaagcaacattgtcacc

SEQ ID NO: 70511 - DNA, 90 bp, Homo sapiens
gcacgacctgctcctacagccggcgatccactcccggctgttcccccggaggtcctctcagggtgcgccatcattgtccgaggtcagcct

SEQ ID NO: 70512 - DNA, 71 bp, Homo sapiens
cggacccagagaagaggaaaactctaccggtgcagggtggctttgtccactatggtgaagtgaccaatgac

SEQ ID NO: 70513 - DNA, 100 bp, Homo sapiens
gagacgggagtattatgaaaagatcgatggaacaaaattcatctgtattggggctctgtattctgaacttctggctgtcagcagtaaaggagaactttat

SEQ ID NO: 70514 - DNA, 50 bp, Homo sapiens
ctagtgtggaccctattcctggtttgcagtctcctgaatatttacgcgtt

SEQ ID NO: 70515 - DNA, 76 bp, Homo sapiens
ggtttgaatccttccttgatgatgaagaggaaaggaatgtagaagctgtaagaaatgcaaaagatgagcgtgttcg

SEQ ID NO: 70516 - DNA, 110 bp, Homo sapiens
agaaaggcttcactacccttatcccggagagctgacaatgatgaatctcagtatggcctcacaagtcttggtctacccaccatatgtttatcaaactcagtcaagtgcct

SEQ ID NO: 70517 - DNA, 75 bp, Homo sapiens
ggaaagacccaggagaagccgcccaaagaactgggcctgctttcttccccgggcgatgtgcagagatctttgcca

SEQ ID NO: 70518 - DNA, 75 bp, Homo sapiens
aaaggagcagccctggtgtcacctatcagtaaaaggtttgtctacagattttgagcgttcgaagttgacccctga

SEQ ID NO: 70519 - DNA, 100 bp, Homo sapiens
ggagaacacccccccatggaggcgaggtagagttggggtcgcaggtccactggtgtgtcctccccttccgagtgctgctggtactcacctcacatcgagg

SEQ ID NO: 70520 - DNA, 50 bp, Homo sapiens
agctgtggaaagaagttgcaaaacactggcagcaaagtggggcaccaagg

SEQ ID NO: 70521 - DNA, 74 bp, Homo sapiens
gttggccctgtcggttggtacagataaaactttaagaagttgattcaagtcagttgagacgccagttgtgtgga

SEQ ID NO: 70522 - DNA, 100 bp, Homo sapiens
ctacccctttgcagagaaaagaattctaccactacaaaagctgaccgtatgtcctatcatcaatggggaagaccaccttcgtttgttgaactttcaacac

SEQ ID NO: 70523 - DNA, 82 bp, Homo sapiens
ccactggccagtgattcacgaaaacgcaaattgccatgtgatactccaggacaaggatatatttttgccatcatggatcagt

SEQ ID NO: 70524 - DNA, 110 bp, Homo sapiens
caacagtattattcacctcaagcccaaactccagatcagcaaccaaataggaccaatggaggaagttgacaaaagtgttgaagaactacgtggacggtgctgagaagccg

SEQ ID NO: 70525 - DNA, 74 bp, Homo sapiens
gagtgcgtgggggaccggctgttggcggagcacgagcggctccgcaaataccactgaagaggacacactctgca

SEQ ID NO: 70526 - DNA, 90 bp, Homo sapiens
agaaaattaagcagatggaaatgagacatgcacaaagagaacaggaacttcaacagttaattggccttggtcctcacagctccaaaaaga

SEQ ID NO: 70527 - DNA, 100 bp, Homo sapiens
cccagcgagatcctcggggccccagaggccgcggacaccgacctggagtggcaccctgtgctgcgcacactaaagaaccgcattgaagagaacactggcc

SEQ ID NO: 70528 - DNA, 98 bp, Homo sapiens
gctggtggtggcggccttctacatcctgttcttcaccgttatcatctatgttcggctggacttctccatcaccaagtgtctttggtgcaacactaaca

SEQ ID NO: 70529 - DNA, 83 bp, Homo sapiens
caagctcatcgacttcggttcgggtgcgctgctcaaggacacggtctacaccgacttcgacgatcgcaccccctccctccctg

SEQ ID NO: 70530 - DNA, 83 bp, Homo sapiens
gccgcggctcttttctaaaagtatgttctcaaatagtgatgaagctgtaatcaataaaaaacttcccaaagaactcctgttac

SEQ ID NO: 70531 - DNA, 100 bp, Homo sapiens
aggaagattgctggctcagaggctctatgcaggttccactgtcaagaaactggcagacctttcacttcgtatccaacaaattgaaacaactctcaatatt

SEQ ID NO: 70532 - DNA, 100 bp, Homo sapiens
cgggggaagcagcacgggatcccagcctcaggcctgcacggacggtgttggttgggcaaagggttaccttccagttcaacatttaccttggaagagggga

SEQ ID NO: 70533 - DNA, 100 bp, Homo sapiens
gattttgcacttgtgcagaccgggcgagcagagtaagaagcagaatgttgtaccatctttgggtaggcagacttccctgacgacatcagtgatacccaaa

SEQ ID NO: 70534 - DNA, 100 bp, Homo sapiens
tcactgcaacctcctcctcccagtcgcagatatggccagtacactatgaaccaggaaagcaccaccatcaaagttatggagaagcctccatttgatcgat

SEQ ID NO: 70535 - DNA, 98 bp, Homo sapiens
agcgactcaggaacaagtgtgggagaggaagcggcggcggcggcgccgggcccgggggtggtgacagcaggtctgagtccacagatcctggtccctac

SEQ ID NO: 70536 - DNA, 90 bp, Homo sapiens
caaggatgttcttcaggaggaaggaaattgaacccataagaatggagtgggatacagaaggcaacggatcccggctactcaacagaaatg

SEQ ID NO: 70537 - DNA, 51 bp, Homo sapiens
agcaactgttcaatgggttaagaaactgattattgatgagaagaagtatta

SEQ ID NO: 70538 - DNA, 90 bp, Homo sapiens
gaggttggtcatgaaagagattccttgcagagacagctcaacacggcacttccacaggctgaccggttccctgatgtgttacctgcttct

SEQ ID NO: 70539 - DNA, 101 bp, Homo sapiens
gcgagagcgagtgcctgagcaacatccgcgagttcctgcgcggctgcggggcttccctgcggctggaggcccagaggcagagctacacaaccatggaatcc

SEQ ID NO: 70540 - DNA, 100 bp, Homo sapiens
ggagccgggacccagggcccgggatcgccgagcccgacctcgggcgccccgccggtcacctccgcgcggacaccagctacccagaatggaatcctgacaa

SEQ ID NO: 70541 - DNA, 100 bp, Homo sapiens
aagcaaagcagccactggtgcttgcatgacatgtaataaacatggatgtcgacaggctttccatgtaacatgtgagaaagatcagtctaaagaaaaggag

SEQ ID NO: 70542 - DNA, 108 bp, Homo sapiens
gcaggcccaaccgccgccagcaccatggccagcaccatttccggaccaagaatcgccttcagccctgtctggtgcatccttggcagaaagtgaggaggaaaacacccc

SEQ ID NO: 70543 - DNA, 75 bp, Homo sapiens
tttgcctctttctctcaggctttcctacaactcatgcccagcagcagcaagcagcccaaagagtcgattgatcca

SEQ ID NO: 70544 - DNA, 82 bp, Homo sapiens
gccttggaaagtcaggaccgcgacggcagcagagcaagaaacttgcccaggccaaagaagagaacgtgggcttacatcagac

SEQ ID NO: 70545 - DNA, 75 bp, Homo sapiens
cgcgctgctgtttgctgtccatcctgtgcacaccgagtgttattcttgccatgagaaaaagaatgtgataagtta

SEQ ID NO: 70546 - DNA, 100 bp, Homo sapiens
ggcgtacgccctcatggggaaaatctccccggtgactttcagcttcctgcctgacacagctcacttcaagaagtgcacaatgtcagaacgtggaattaag

SEQ ID NO: 70547 - DNA, 75 bp, Homo sapiens
gcgcgtgctgcaacccgcgcccgcttcggagagagaaatgctggggtatgctatacctccggagcatggaaaacg

SEQ ID NO: 70548 - DNA, 100 bp, Homo sapiens
cgaggctggccgagaaatcccgtgtggactataatgcgagtgcctggctgaccaagaatatggacccgctgaatgacaacgtgacttccctgctcaatgc

SEQ ID NO: 70549 - DNA, 100 bp, Homo sapiens
cgcggccttcccatcaccatcacagagagcgataaacatatgaaccttctgagcacccagaccaggttccctgtagcctcacacgagaacgaaggaacag

SEQ ID NO: 70550 - DNA, 100 bp, Homo sapiens
ggggggcaccctggggcttcacccttaaggggggtctggaacactgtgagccgctcacagtgtctaagtttaatggatcgagaagtggcgttgcttgctg

SEQ ID NO: 70551 - DNA, 50 bp, Homo sapiens
tttctaggaaaggccggacaccagaattcctagaggacctgtgcaacaac

SEQ ID NO: 70552 - DNA, 76 bp, Homo sapiens
tttcaatagcaatgaagccttctaacaagatggctgtatgggcgaaaaagatgaccgaaattcaaactcctgaaaa

SEQ ID NO: 70553 - DNA, 100 bp, Homo sapiens
ctacttacaagtatgatacgggctctgacgactgggataccagttacatggacacagaacagtatgaagaagcagtacgagactatgaaaaagtatacca

SEQ ID NO: 70554 - DNA, 100 bp, Homo sapiens
cagcaacaaccagcctgcagcaggggctttgagaaatcctgattctgggaccatgaatatcctgataacttaagtgactctctcttttccggtgatgaag

SEQ ID NO: 70555 - DNA, 102 bp, Homo sapiens
tgtaatggaagggcatggcaagactccacctcctggtgaagaaagcaaacaattgccatcacgaaagccaaagtggatttctccagtgtggtgtgcctgccc

SEQ ID NO: 70556 - DNA, 73 bp, Homo sapiens
tgagttgggagaagagctccagagactgtggattcaaactctcaaactttgcaaccaataacattggaactga

SEQ ID NO: 70557 - DNA, 107 bp, Homo sapiens
cgacttctaggagcctggggttcggcgctatggaggagctcgatggcgagccaacagtcactaatcctcactatggatgggctcattgaggacattaagcatcggcg

SEQ ID NO: 70558 - DNA, 100 bp, Homo sapiens
gcggtgacccgctaccggaaggccatcgccaaggttatgaagacagtatggagtttccagaccatagtagacatttgctacagtgtctgagcgagcagag

SEQ ID NO: 70559 - DNA, 100 bp, Homo sapiens
tctttgttggcgagatatcaagttcaaaaccagcaatttcaagcctcattgctacgatttcagagtaccctggtaatagctgagcatgcaaatgattccc

SEQ ID NO: 70560 - DNA, 100 bp, Homo sapiens
agaacgacttcgaagtggtaatgcctcgtgtattgagagtgagaacacttggagagatttaatgaagacagctttagaaaacctaattgtacttttgaag

SEQ ID NO: 70561 - DNA, 75 bp, Homo sapiens
aggccctggtgcccgtcatccaccgtgatctcaagtccaacaacatgactacctgtttaagctgcttttgattgg

SEQ ID NO: 70562 - DNA, 78 bp, Homo sapiens
tgggaggttagtgcaggccaagttcctgatgggagcacgctgagaacatttggcagaactatttgtcaatgaagattg

SEQ ID NO: 70563 - DNA, 100 bp, Homo sapiens
agcagttgtctgatgaagagaaggtggctttctagaagatgaccatagaggaccttccagattttccattagaaggaaatcctttgtttggaagataccc

SEQ ID NO: 70564 - DNA, 75 bp, Homo sapiens
cgaggacttccggtggtacctgaaggtgctgtgagaagccatctttccgacttcaaaaaacaccgagctgctaga

SEQ ID NO: 70565 - DNA, 90 bp, Homo sapiens
acgaagagctgcagctcctcctgtgcgggggttgccctgctgtcagacgtctatcctgagaaaatcttgccggacttgttggctcaatat

SEQ ID NO: 70566 - DNA, 100 bp, Homo sapiens
cagccctgcccagacaccagctatgcccccgtggccaccgcctccagcttgccaccaaagacctgcgactttgctcagttaattcaggacagcagaagag

SEQ ID NO: 70567 - DNA, 129 bp, Homo sapiens
catcagggacgtgctggccgtgatcaaacactgcaaggaccccctccggctcaagtgtgtcaagcaaggtgctggagaatctggtaaaagcaccattgtgaagcagatgaggatcctgcatgttaatgg

SEQ ID NO: 70568 - DNA, 100 bp, Homo sapiens
tgcagatttgtttgtcatccttgtacagcaatctcctcctccactgccactacagggaagtgcatcacatgtcagcctgagacctcagatcattgttccc

SEQ ID NO: 70569 - DNA, 88 bp, Homo sapiens
tcctgattcagccatccatcgttattagggaatctagagcaacagcaaagctgaggtcaaactaccgtaaggatggacaccaaggaag

SEQ ID NO: 70570 - DNA, 51 bp, Homo sapiens
taaaggatgaattactgaaattagaatctgctagtcacatggaagcaagtg

SEQ ID NO: 70571 - DNA, 82 bp, Homo sapiens
tccgggagagtgagagctccccaggggagttctctgtgtctgtgaaacccctctgccatgaaccagtccatcccagtggctc

SEQ ID NO: 70572 - DNA, 98 bp, Homo sapiens
ttcaacgagaatgaagccatccaatggatgcaggaaaactggaatactcccccagttgcaagaggcgcaggaccgtggaagacttcaacaaattctgc

SEQ ID NO: 70573 - DNA, 75 bp, Homo sapiens
agtgactgtcaggtcgatcatatgcaatgaatcgctccctggctaatgtgattcttggaggctatggcaccactt

SEQ ID NO: 70574 - DNA, 75 bp, Homo sapiens
attttatactctgactccatgaaggtaaagaatctcatttggacacattgagtcgggcacaactgacccaacttt

SEQ ID NO: 70575 - DNA, 100 bp, Homo sapiens
ctcgatcttcattgctttcctctggacttacgaagttatacggaagcgtctcctcattgatggagatggtgctggagatgatcggagaattaatctgcta

SEQ ID NO: 70576 - DNA, 82 bp, Homo sapiens
gccgcccgccgggcgctctcgcttcagtcagtcgggccgcgccgcgcctcagctctgacggcgggcgctaacaccaccgaca

SEQ ID NO: 70577 - DNA, 90 bp, Homo sapiens
cggccctccggaacctgcctgagtacgctctcctgtgccaaggccaccagcccctcgggttccaagatgcagctactggagacagagttc

SEQ ID NO: 70578 - DNA, 100 bp, Homo sapiens
aaaaaagtaaaagagttaaaggtgttggattcaaagacagcccagaatctctaccccttgttgaaatgggacagttggcagcggctctgatgagcccgag

SEQ ID NO: 70579 - DNA, 75 bp, Homo sapiens
gcaagcggagctcccccaagagccggaaaggagattacctggggcaattgatgttatcggtcagactataactat

SEQ ID NO: 70580 - DNA, 98 bp, Homo sapiens
tggggacatgcaacaataacagttttgtccatcatggaactgtcctggattgtgaggagaaagactgggacttctcgatgaatctcaatgtgcgcagc

SEQ ID NO: 70581 - DNA, 50 bp, Homo sapiens
gggccaaatcactgtggacatggaatatgacagaactgatggtttttcac

SEQ ID NO: 70582 - DNA, 75 bp, Homo sapiens
ggtgagcgcccatatgggggttctggagagcggggtgtgggatatcagttttagagaatgtggcgtggagaaatt

SEQ ID NO: 70583 - DNA, 51 bp, Homo sapiens
ccaagcatgtagaaagccggaatgtcgagttatagcagtgctggattggga

SEQ ID NO: 70584 - DNA, 74 bp, Homo sapiens
agagctttattaccagacatgatctttcaggtgaccaagaatatggcccaggtgaccaaagccctggacaaggc

SEQ ID NO: 70585 - DNA, 100 bp, Homo sapiens
caactacctcattggcgggaaccgcctgaaacagcctccggagtgtatggaggacgtgctcaagttcggctaaagggagctggcctaggagccaaaggca

SEQ ID NO: 70586 - DNA, 96 bp, Homo sapiens
cctgctgggcgccatctccggcattggtaaccatgtgcgaccgaaaggccgtgatcaaaaatgcggacatgtcggaagagatgcaacaggactcgg

SEQ ID NO: 70587 - DNA, 98 bp, Homo sapiens
agctgggccgcctgcaggtcgactcggccgagtatggctgcctcaaggccatcgcgctcttcacgcccgtaccccgagattttccttatgaagaggac

SEQ ID NO: 70588 - DNA, 76 bp, Homo sapiens
ggtgttgaaagtgaaatgtcatgcctctgaaaatgaagtgattcgcctttgccagtctcatctcgtgtctgctttg

SEQ ID NO: 70589 - DNA, 100 bp, Homo sapiens
cagcaggcatcatccgctatgcaattggggactccctggcactggggaaaacagaggaggaggcactgaagcacttccgagtgaagtttaacgaagccct

SEQ ID NO: 70590 - DNA, 74 bp, Homo sapiens
ctcaaaatgaggaaattctgtatgttcttcgccattatattcagactacatgaggaaataattgacttttataa

SEQ ID NO: 70591 - DNA, 120 bp, Homo sapiens
aacaggagcagctgcgccgggaggcagagcggctcagccagcggcagacagaacgggacctgtgtcaggaaacccagcgtttgctggcagaaccagttcctggcatcaaagccgaaccag

SEQ ID NO: 70592 - DNA, 101 bp, Homo sapiens
cggagggtctgaggcggcgcggccatggctcacctccggggatttgccaaccagattctggatgaaattgaagaacataacatcaaaatctatcacttacc

SEQ ID NO: 70593 - DNA, 100 bp, Homo sapiens
cctggctcaggcgctgtcccccaaactctacgagcctgatcagctccaggagctcaagggttttggccaaattgggcgagggcacaaaataaccacttac

SEQ ID NO: 70594 - DNA, 100 bp, Homo sapiens
atgtagtaagaaaacaaaaactgatgaccaagagaatgtgtcagccgatgcaccgagtccagcccaggaaaatggagagtgagaaagatcagtctaaaga

SEQ ID NO: 70595 - DNA, 75 bp, Homo sapiens
attgcagctgcatgttcaagaagtggccggagagttctgcatgttgattcattcgggaactggagcctctcctct

SEQ ID NO: 70596 - DNA, 101 bp, Homo sapiens
aaccaggcgatgcggaagaagctaatcttgtacttcaagaggaggaatcacgctcggaaacaatggatgatgattattctccaccgtctaagagaccaaag

SEQ ID NO: 70597 - DNA, 90 bp, Homo sapiens
cccagattgagctgcggctgctggagctgatgaaccagcatgacacggagatgaagtactatatagatttagcatgtagactgctggggc

SEQ ID NO: 70598 - DNA, 105 bp, Homo sapiens
ggattaaggagattggcgcagctgtccaggccctcaagtgccaccccagagtatcttatgttattcaggctgaaggaaaagagcatattattcacttggaaagga

SEQ ID NO: 70599 - DNA, 111 bp, Homo sapiens
cggatattcagttgcacatccccacatcaatgcactgccaatggtgctggagaatctggtaaaagcaccattgtgaagcagatgaggatcctgcatgttaatgggtttaat

SEQ ID NO: 70600 - DNA, 82 bp, Homo sapiens
gaaccgcagtatcatgctggccaagaagatcatcattaaggacggaggcacgggagtgcatccgccccaacccttttccccc

SEQ ID NO: 70601 - DNA, 82 bp, Homo sapiens
gaagaaaaagatacaacgaactagcacaacgagggaaggaggaagaggagcgaaggcggcgtgaagaggaagaaagagaacg

SEQ ID NO: 70602 - DNA, 100 bp, Homo sapiens
tcgaaaggattggattggcatctttagactagaaaattatggcatgccgtttagcagaactgaagatgggaagatttatcagcgtgcatttggtggacag

SEQ ID NO: 70603 - DNA, 97 bp, Homo sapiens
agccatgccggagaagcgcgcgggcgcgcaggccgcggggagcacctgggtgtcatggagaaactccagctgggcccagagattctgcagcgggaaa

SEQ ID NO: 70604 - DNA, 100 bp, Homo sapiens
caggcaggcgctgagaaggacgcgcagtccatctctctcaggaattgcattttgtgaaaaaagaacaagaattttctgcaaggatcatatctaagtgcac

SEQ ID NO: 70605 - DNA, 100 bp, Homo sapiens
gcccgcgccgcatggaggccggctgaggagcgccgctgcctcgcctcggccgccatggcatcagatgaaggcaaactttttgttggagggctgagttttg

SEQ ID NO: 70606 - DNA, 75 bp, Homo sapiens
agacctcaagaaggagatcaatgagcggctgcttactgctcgacaggacctgaaggagaagaaggagaaggtgga

SEQ ID NO: 70607 - DNA, 100 bp, Homo sapiens
gtcggcagtgtgaggagctgctatggtgctgagtttcctggtagagccggccgagctgaggcggtcgcggccatgaagaaaaagcttgtggtgaaggggg

SEQ ID NO: 70608 - DNA, 100 bp, Homo sapiens
attttcctgcatggattgggagatactggatcaagcttcaggagtctccggaagacatgcctgcagggcagacaccacacacagttatcctgtttgctca

SEQ ID NO: 70609 - DNA, 51 bp, Homo sapiens
tgatgttgtctacagaccaggagggaagtgccagacacagcttcagaatgt

SEQ ID NO: 70610 - DNA, 96 bp, Homo sapiens
tgagttatcttctggaaatgagtcttcaagctctgtaagacatggctctgtacacatatgaagatggctccgatgacctcaagcttgcagcatcag

SEQ ID NO: 70611 - DNA, 82 bp, Homo sapiens
gactcattttccattgataatgggataatcataatactcctcagacccctgcacaattgagagaaaagcccgaagaattagc

SEQ ID NO: 70612 - DNA, 83 bp, Homo sapiens
cgggcccgggccccgagcgcccgaacagtgcctacaccaactaatgttacaattgaatcctataacatgaaccctatcgtata

SEQ ID NO: 70613 - DNA, 100 bp, Homo sapiens
cagtgagcaccttttggcccaatgaatatcagatctatccatactaatggaaatgtaactggaactgactctgatgataaaatcaaggaccatcaagcaa

SEQ ID NO: 70614 - DNA, 83 bp, Homo sapiens
gtggtggacgttcggccaagggaccaaggtggaaatcaaacgaaataccacacacatttattacagtttgatggtgaaggagg

SEQ ID NO: 70615 - DNA, 83 bp, Homo sapiens
ttaattatcagtatatgtgaaatcatgtccactgatcaagatttccatggagaatgattatctgggacctcgaagaattgaga

SEQ ID NO: 70616 - DNA, 100 bp, Homo sapiens
cgcagattggagctgagctgtggctgccagaagatagcgaactctgacagcaatgcaagcttcctccgtgctgccagagcaggcaacctggacaaagttg

SEQ ID NO: 70617 - DNA, 100 bp, Homo sapiens
gaggaggtgcagatggcactttccaaagtggatgcctccggggaggcacagggtggtggtttcctatcctcctcagagtgaggcagaacttgaacttaaa

SEQ ID NO: 70618 - DNA, 75 bp, Homo sapiens
cgcgccgcacgagcaccagcctagagccagggttaagaccctcgtgttctgctccggcaaacatttctactccct

SEQ ID NO: 70619 - DNA, 75 bp, Homo sapiens
ccctgaagagggaagacacgcggaaacaggcaacgccctgctgcggcggctggtccgcattggggtgctggatga

SEQ ID NO: 70620 - DNA, 100 bp, Homo sapiens
tatggctatggtgatcaaagatgaccgtcttaacaaagaccgattttgggaaccagtaggacattgacatacatccgagaacattctgtggtggatccag

SEQ ID NO: 70621 - DNA, 100 bp, Homo sapiens
attccactagaagcaagatggctgaactcaatactcatgtgaatgtcaaggaaaagagaatgtccaagcacacagatgcagcagaagaggtgctattgga

SEQ ID NO: 70622 - DNA, 100 bp, Homo sapiens
tcagcctcctgagtagttgggattacagctggtgtctcgccacccagaaagggccttgcaccctgttccccgccgtctgtagcacccactccagtggaac

SEQ ID NO: 70623 - DNA, 82 bp, Homo sapiens
cagagatcacatttcaactagattcttaggaagtatggattcactaacttcagcgaagtttcttaacaacccaccagaagaa

SEQ ID NO: 70624 - DNA, 100 bp, Homo sapiens
gggagccagccgctgcagccaccaccgccaccatgtcctaccaaggcaagaagaacatcccgcggatcacggtatcatgatattagctggtttgacatca

SEQ ID NO: 70625 - DNA, 50 bp, Homo sapiens
cctgggccgggccccaccggacggtatgggggcaccttccagaacgtgtc

SEQ ID NO: 70626 - DNA, 50 bp, Homo sapiens
gtcgggagtgatcacctaccctacagctctcatttcactcttcagtgttc

SEQ ID NO: 70627 - DNA, 113 bp, Homo sapiens
gccgcccgtccccggcacacgcgcagccccggcctctcggcctctgccggagaaacaggtttggtgcacctcgatttggaggaagtagggcagggcccttatctggaaagaag

SEQ ID NO: 70628 - DNA, 91 bp, Homo sapiens
attttttctcatggatgttcttcttcgagtatttgtagaagggttatcaatactctggctgaccatcatcatcgtgggactgactttggtg

SEQ ID NO: 70629 - DNA, 75 bp, Homo sapiens
cacttttggccaggggaccaagctggagatcaaacgtcatcctgtacagttctacagcatgaataggcctgcctc

SEQ ID NO: 70630 - DNA, 100 bp, Homo sapiens
cttcaccctggtggagcgagacgtcagaagtaatgacagtggaattcagcagagctctgatgatggaagagaatctttaccctccacggtgtcagccaat

SEQ ID NO: 70631 - DNA, 100 bp, Homo sapiens
tgttaatattgatattattcaccggattgatagaactgcaagctatgaggaggttggtcaggccaaagatgaactgctgaccaatcagctgatagaccat

SEQ ID NO: 70632 - DNA, 75 bp, Homo sapiens
ttcaaacctgtatctgtgcaggcaatgtgttttaaccgtgattggagataccacaaagaagaacgagtatggatt

SEQ ID NO: 70633 - DNA, 74 bp, Homo sapiens
gtgacttcctggccttcccttctttactgatcagggtcctgcagagtgtggttctcctgtcagacagccagttg

SEQ ID NO: 70634 - DNA, 100 bp, Homo sapiens
ccgagcagcccatctgcaaggaagtcctggcctcccatctggtccactctggccaggctgccgcacctctacaggaactttgccgcggagcagtatgcca

SEQ ID NO: 70635 - DNA, 75 bp, Homo sapiens
cgcgctgcccacgattcgcttctgaggtggattcatacgacgtgactgtggacgaggaactgggcgagatccagc

SEQ ID NO: 70636 - DNA, 82 bp, Homo sapiens
ccagcttttcggaacagcagagacacagagggcagtcatgagggcactgtccggggagccacgggcatcttccctctctcct

SEQ ID NO: 70637 - DNA, 71 bp, Homo sapiens
ccgctctccgagctcgatccgctgctcgcacgggagccagctgggtgcttccttcaaaatgtctactgttc

SEQ ID NO: 70638 - DNA, 75 bp, Homo sapiens
ggagcccaagaccatcactgacgagtttgagcaggtcctgtcttcggggagaaacattctaaatcacctgccctc

SEQ ID NO: 70639 - DNA, 99 bp, Homo sapiens
ccgggcatgggctgcaagggagacgcgagcggtgcgtgtgccgcgggtgcgctgccggtgacagacaatggcgatgaccactcagaaggaggcctggtg

SEQ ID NO: 70640 - DNA, 98 bp, Homo sapiens
gaagagttactctcaccagagtgtcagcaatgggaccttctcttcggatgaggagaccctggaagacaatctaagggttttggccaaattgggcgagg

SEQ ID NO: 70641 - DNA, 97 bp, Homo sapiens
ttcctgcatggattgggagatactggggtcagtttgaaaaggaggatcgagctcactgtggagtatccatggagatgtggagccttgtcaccaacct

SEQ ID NO: 70642 - DNA, 99 bp, Homo sapiens
gaaccagagcctgaacacactgggaaatgccgtgtcagtggggttgttttgggcctggccagcagccccgagtgtgcttgtggtcggagccacttcaca

SEQ ID NO: 70643 - DNA, 83 bp, Homo sapiens
gctactctctctttctggcctggaggctatccagcgttgctcgtgggggccccgcgggcagaagcgcttccactgcagagagc

SEQ ID NO: 70644 - DNA, 50 bp, Homo sapiens
cagaaattggaggctcagcatagaattatatccagatcgagagacagaag

SEQ ID NO: 70645 - DNA, 71 bp, Homo sapiens
aaattctcaccatggaattaatgattatgaagtgtatgaacccagggcactgtggggacagggcgacgtgt

SEQ ID NO: 70646 - DNA, 100 bp, Homo sapiens
gcccagcacagccagcaccgcacgccctgcaagggaggaaggatctgagtctctccctgcggagacagccctgaagaactcctgtaacgtcaagctggca

SEQ ID NO: 70647 - DNA, 109 bp, Homo sapiens
atggcggatgccctgcagtacctgcagaaggtctctggagacatcttcagcaggttttaaaatcaaagatgggaaaatcggagaaaattgcccttccccatggccagct

SEQ ID NO: 70648 - DNA, 74 bp, Homo sapiens
tttcggtggtgctgaatgttactttgagaaagatcagtctaaagaaaaggagaagaaagtgaaaaaaacaattc

SEQ ID NO: 70649 - DNA, 101 bp, Homo sapiens
ctatagtgacacagcattctaaagtgaatgactccaacgaattaggtggtctgactaccagtggctctgcagagcaaaatgatgcttcaacacccaggcca

SEQ ID NO: 70650 - DNA, 50 bp, Homo sapiens
ctggccctgaccgagacctgggccgcttttcctccgcaaccatgtctgac

SEQ ID NO: 70651 - DNA, 82 bp, Homo sapiens
aatgctgttgctggattgcaaccccgaggtgcacattcaggttcccgagcacaaacatcaagataacgttcactgccctgtc

SEQ ID NO: 70652 - DNA, 83 bp, Homo sapiens
ctgctgtttctcttcgccgacgatgtggaaactaaagcccagagagaaagtctgacttgccccacagccagtgagtgactgca

SEQ ID NO: 70653 - DNA, 82 bp, Homo sapiens
cagtgcccgctttgttcagctgcagcatggagagatagataaacgggtttttcgttggaatatacgttgcacatttatggcg

SEQ ID NO: 70654 - DNA, 98 bp, Homo sapiens
aggaggagtggattaagtgcattaaggacgatgatgacattaatgatgttgcatcgatggctggagtaaacttgtcagaagaaagtgcaagaatatta

SEQ ID NO: 70655 - DNA, 100 bp, Homo sapiens
catgaaatgattgaatctggtgttatcaacttaaaagatgccacctctaaggtagcgctggtggattggaatcttgaagcaggtgtacagtgtaaagctg

SEQ ID NO: 70656 - DNA, 75 bp, Homo sapiens
cggaccatgataatttccccagagcgtcttgatccttttgcagatgagttttcttgaagtacaactaaggacagg

SEQ ID NO: 70657 - DNA, 90 bp, Homo sapiens
ggcagctctgaagaacccccctatcaacaccaagagtcaggcagtgaaggcagaagcaacaaattacccacctgcatgagaggataaggg

SEQ ID NO: 70658 - DNA, 100 bp, Homo sapiens
gagatcaagaggatttggatttgtgcttttcaaagatgctgctagtgttgataaggtcctggtgaacgccatcatcaacagtggtccccgggaggactcc

SEQ ID NO: 70659 - DNA, 101 bp, Homo sapiens
ctggcagagtttctgggtgtgtttgtactcatgacctgtggatgaagagccagagtcctctgaggtcgatgctgctggtcggtggcctggtgtctgtgtta

SEQ ID NO: 70660 - DNA, 88 bp, Homo sapiens
gcggccctatgccgggggtgccgctcagacaatgcagatcttcgtgaagactctgactggtaagaccatcaccctcgaggttgagccc

SEQ ID NO: 70661 - DNA, 88 bp, Homo sapiens
ttaataatgatagaatgaagaccacaataaaagagacctctacttagctcagcaattcttaccttgttctgaaagaacagtaccttgg

SEQ ID NO: 70662 - DNA, 100 bp, Homo sapiens
ttcacatgccaacagattatgctgaagttacagttgctccttgagggcaggacagttcttatggctttatccgttgcgtaagcacagagaggtctgcgag

SEQ ID NO: 70663 - DNA, 75 bp, Homo sapiens
gatccagaagtccagagctgaggactgcctgtttgcaggctacccacctttctgttctgagacccctcaagagac

SEQ ID NO: 70664 - DNA, 82 bp, Homo sapiens
ccagctccgaaatcaccaccaaggtgctcttacagcctgttccaagtgtggcttaatccgtctccaccaccagatctttctc

SEQ ID NO: 70665 - DNA, 80 bp, Homo sapiens
tcaccatacaggaacagggcagacgttagcgtgagtgatcactctcaatcccggggagtgcatccgccccaacccttttc

SEQ ID NO: 70666 - DNA, 85 bp, Homo sapiens
cgcccaagtccctctactcgcgaggcaatagccctctggaacaagacaattcatgtgagataagaaagaagagcccacaagacca

SEQ ID NO: 70667 - DNA, 96 bp, Homo sapiens
gtctggagacgccgtggcagcctgaacggagtgtgcgacggattgggaggaggataagatcaatgccctcattaaagcagccggtgtaaatgttga

SEQ ID NO: 70668 - DNA, 75 bp, Homo sapiens
gtgtcaaacatccatatcataagtggaattttggagatattcaaagtctgaagatgatgagaaactgaaaaagag

SEQ ID NO: 70669 - DNA, 100 bp, Homo sapiens
gtccggggcttgccctggtcttgctcggccgatgaagtgcagaggtttttttctgatttggtgcttccagatgtgagttatcaggtggaatccagtgagg

SEQ ID NO: 70670 - DNA, 75 bp, Homo sapiens
ggaatctgcaggccagggaggagcagagcttagccgagtggcagaatggaggctccagagtgaaattaatgacac

SEQ ID NO: 70671 - DNA, 75 bp, Homo sapiens
agctaagacgccgggactccctggaaacctagaaatggagtggaagctggacacactatgtgacttgtatgaaac

SEQ ID NO: 70672 - DNA, 96 bp, Homo sapiens
tacgtggacttatatcagaccagtgtggatcttcaagaatcattatcgccacatcacagaatcgtatctatctcacagctgacaaccttgtgctga

SEQ ID NO: 70673 - DNA, 90 bp, Homo sapiens
gaagggcgactactacgaggcgcaccagatgtaccggaccctgttcttcagggcacggccgagcagatgaggactgtgtggacgaccggg

SEQ ID NO: 70674 - DNA, 100 bp, Homo sapiens
ggtaaagttgggagcgcagcggcgttggcggcggcggcggcggcagcggcagcgcggcggggccgggtaagaatgattgatgttggctgatattggagtg

SEQ ID NO: 70675 - DNA, 100 bp, Homo sapiens
tggaggtggactggagcagtgagaaagcaaaggctgctctgaagcgcacgacctccgactactttctccttcaagatgaaatacctgtcacaaagagaac

SEQ ID NO: 70676 - DNA, 82 bp, Homo sapiens
tagcttcactcaatgttagtaaggctttcttcgagagtcacccagctccttcagctgagcgtaccatccagcagtgttgtga

SEQ ID NO: 70677 - DNA, 88 bp, Homo sapiens
cgtgggcagccagggtcggtgaaggtgtacctggccttgggcctgacccaggcagagatcaatgagttctttactggtcctgccttcc

SEQ ID NO: 70678 - DNA, 100 bp, Homo sapiens
cagaagggaggctccaagacctcatcaacaattaaggcttgctgcaacctcatttagagagggttgccatcgatgctctacagttatgttgtttgttact

SEQ ID NO: 70679 - DNA, 100 bp, Homo sapiens
gtgcatcaattcttcgacaggaaaaaaatttgctggatattgatgcgccagtcactggttcacagatgaagagtctagagtattcctgcttgataggggt

SEQ ID NO: 70680 - DNA, 96 bp, Homo sapiens
gaccagcagctgtcgccgccgctctcagcaaatggttatgagccttagagtttctgaactccaagtactgttgggctacgccgggagaaacaagca

SEQ ID NO: 70681 - DNA, 100 bp, Homo sapiens
tgcttattagtcatcaccgttattcctactaacgtcctgtgtcactgaggcagcacacttctgcttttgttccttcatcaggacgaatttactcttttgg

SEQ ID NO: 70682 - DNA, 75 bp, Homo sapiens
gggatccttccgcacactgaagagtacgtcttcgggtctacccctaatcacgtgtcagaaactatttaaaagaag

SEQ ID NO: 70683 - DNA, 97 bp, Homo sapiens
aagacaacaaaaacaactgcattgtgtacagcaaaggtggctgcctctttgatgagccgtatagcacatgtggatatagtcaatctgaaggtgatga

SEQ ID NO: 70684 - DNA, 101 bp, Homo sapiens
tgtgcttccagccgtgaacctttgcaccccatgttcccagatcagcctgagaagccactcaacttggctcacatcgtctcctcttttgacttggactatga

SEQ ID NO: 70685 - DNA, 98 bp, Homo sapiens
cagcaccttggcgaagccttgggtttctttcttaaaggactgatttttagaactccacatttgaggactcagcgaatgctctctacaccaaatgcctc

SEQ ID NO: 70686 - DNA, 97 bp, Homo sapiens
agtatggcttccttcgcctgtcgcaggccacccgccagcgcctgagcatccccgtcatggtggtcaccctggatcctggagagctcccagactttgc

SEQ ID NO: 70687 - DNA, 100 bp, Homo sapiens
tggacctgagctacaaccagctgaatgaccaagcagttctgggaggtgatcagtgatgaacatggcatcgaccccaccggcacctaccacggggacagcg

SEQ ID NO: 70688 - DNA, 87 bp, Homo sapiens
gcaagttcctttcggacccgcaggtccacacggtgctggtggagcgctccacgctcaaagcggtttgctgtgtttcaaagaagggtg

SEQ ID NO: 70689 - DNA, 98 bp, Homo sapiens
gaacgcggagagcacgccatgaaggcctcgggcacgtaagactttgaccccgacgcaggcttcagtgattgccgcggatcagaagcctgagcactttg

SEQ ID NO: 70690 - DNA, 95 bp, Homo sapiens
cggctgtaccatggcacccccagagccctcctgcacccgcttctccaggaccccgcagagctggcctggtttgctttcgaccctggctcggcgca

SEQ ID NO: 70691 - DNA, 82 bp, Homo sapiens
ggtgttgcagttcttcaggagagagcaacccaaggagatctgtgcgctggttgggttctgtgatgaggtgaaagagatgccc

SEQ ID NO: 70692 - DNA, 75 bp, Homo sapiens
catcgcgacgctgctcaaaacctcgctccggaaaggggacacctgggtcttactgaagtaacacaaagcttaaaa

SEQ ID NO: 70693 - DNA, 50 bp, Homo sapiens
cagattgctgctgtatgcagagaggttcgggatgagtatcggcaggacta

SEQ ID NO: 70694 - DNA, 71 bp, Homo sapiens
cagtcagagcggagccaagatgcgaatgggcctgcctagggtagttaaaagacgagtgaatgctctcaaaa

SEQ ID NO: 70695 - DNA, 89 bp, Homo sapiens
ttgccgaagatgagactgcccacgcgctcagacatgatatgcggctatgcctgcctcaaagaggactacactgaaacattcaaatgtgt

SEQ ID NO: 70696 - DNA, 75 bp, Homo sapiens
ccatcacgcccagctagccatcttctaattttcattccttcaaaggcactatgtcgtccgaggcccagagatgac

SEQ ID NO: 70697 - DNA, 100 bp, Homo sapiens
catctgcaacctccgtggcagtaagaaaggtgccgacgccaccgccgagcccatgatcctggaacagtacgtggtggtgtccaactataagaagcaggag

SEQ ID NO: 70698 - DNA, 98 bp, Homo sapiens
gagcaaaactaaatgtggcaattgtaaggccatcgattgttggtgccagttggaaagaaccttttccaggtattacttatgaccatgtcgaattaaat

SEQ ID NO: 70699 - DNA, 100 bp, Homo sapiens
catgcccctggccatcttcacaaagattttgatcttggctcctacaagagaaattgctgtacagatacattctgttattacagccattggaataaaaatg

SEQ ID NO: 70700 - DNA, 90 bp, Homo sapiens
tgatgacaaaccctttctatgtactgcgcctggatgtggccagatacttggtgcttgaaaaactgaagaaggaagacgctgaccgaattc

SEQ ID NO: 70701 - DNA, 88 bp, Homo sapiens
ggcgccggcaaggggacccagtgcgcccgcatcgtcgaggaggaagaaatagaatttctctacaatgagaacacggttagagaaagcc

SEQ ID NO: 70702 - DNA, 98 bp, Homo sapiens
gtacaactaccgctgctggaccacaaaccgctgccagaaaagtgcaagtgaaagtgtaggaaaacatatgcttgaagcgtgcaacaataatctggaaa

SEQ ID NO: 70703 - DNA, 88 bp, Homo sapiens
acaccgacatggaacagggactcactggggaggctgacccgcggctgattgagtccctctcccagatgctgtccatgggcttctctga

SEQ ID NO: 70704 - DNA, 75 bp, Homo sapiens
ctggagcaggaccttgctacctacatcacagaatgcagtgttgtccccccggcacgctccacagctggtgacccg

SEQ ID NO: 70705 - DNA, 50 bp, Homo sapiens
aaggattcgaactgcacttctggagacaccaagctggatggtttcctttt

SEQ ID NO: 70706 - DNA, 87 bp, Homo sapiens
atgattcaggggtacaattttggatttgaggtatctgatggtataattgccccaggatatgaagaagaagccttgacaatactttcc

SEQ ID NO: 70707 - DNA, 95 bp, Homo sapiens
ggaaggaaccgctctcgcttcgtcctacacttgcgcaaatgtctccggctgccaggatatcgcagatgaattcagagcacaggagattgatggac

SEQ ID NO: 70708 - DNA, 113 bp, Homo sapiens
cactggggatttggaatgtgtttggagggttgtactgaggtgcagagtcctgcttcgtgatgggcacaagagacattactgccgggagtgttgagtgaagggaccaggtggag

SEQ ID NO: 70709 - DNA, 100 bp, Homo sapiens
agggtatacttcgtggcctgcaccatcggctccaggaggccagagctctactgaagcggcggcggccccgggggccagggggccggggactactgagaag

SEQ ID NO: 70710 - DNA, 82 bp, Homo sapiens
cctgctcctgcccgaccctgccgcctccctcacggagccagcggccgggtaggtgaggtgtgcatcaccttcgaccaggcca

SEQ ID NO: 70711 - DNA, 100 bp, Homo sapiens
gcctcactcccgtttccgagccataaaaggtctaggaccgcttcccccgagccagcaggctgaccccgcactacatctacccaccagccatcgtgcagcc

SEQ ID NO: 70712 - DNA, 50 bp, Homo sapiens
gaagtttctaggaaaggccggacaccagcctacagcctggctcccgcgac

SEQ ID NO: 70713 - DNA, 104 bp, Homo sapiens
acgaaagtgaacaggagccgctcttaggcgacacacctggaagcagaccctgtattcagtggatcagctggcaccacccaaatagataaattggcccatctggt

SEQ ID NO: 70714 - DNA, 75 bp, Homo sapiens
tcagccaacagagctgtggttgccaaggccacctttgatgccatttctaagacctacagctacctgacccccgac

SEQ ID NO: 70715 - DNA, 90 bp, Homo sapiens
cttaagcttgcaactgaactccctgatgctgaacttaggaggactttatggtggtggacttgctttgtgaagagacagttcatgaacaag

SEQ ID NO: 70716 - DNA, 50 bp, Homo sapiens
ctaagctcccaacaattagtcagagcaaatcatggaggaagataaaaaac

SEQ ID NO: 70717 - DNA, 98 bp, Homo sapiens
tcatcctgtccatcgtgtgcctgatgatcacgcagctggctggcttcagtggaccagtattcaaaacctttgaccacatggcccgtcaggatgatgag

SEQ ID NO: 70718 - DNA, 49 bp, Homo sapiens
aacaagccaatcccaggaggaaaaacgaaaggcctaaagaatgtatttg

SEQ ID NO: 70719 - DNA, 111 bp, Homo sapiens
tgagaaagccctgaagcagaagggcatcaccgtgaagcagaagagattttgcaagaacgaggctcaaggatgtgagggacacagtattgacagctgaagaaatgatttacg

SEQ ID NO: 70720 - DNA, 100 bp, Homo sapiens
gggggaggtcgtgtcgcggcgtctgaaaggggccactggatatggccgcgtggaaagtgtcaaaattcttcccaagaggggatctgaaggaggagtggct

SEQ ID NO: 70721 - DNA, 100 bp, Homo sapiens
cagagctgtgggtctggttccaagacactgtcactgaacagttttgccacggtgccgagcgcaggacgatgacccggcccaatgccctggatcgatgccg

SEQ ID NO: 70722 - DNA, 98 bp, Homo sapiens
aaaaatctcgtggatccttttgtagaagtttcctttgctggaaaaaaggctccagaacatgaagcgcctcttggaccagggtgaagatttacgacatg

SEQ ID NO: 70723 - DNA, 98 bp, Homo sapiens
tgctctggaacaactggtgctgatggctcccttggcgaaggagtctgtttttcaacccaggaaggtatctctcctaaatgtgtgatcaaggaattacc

SEQ ID NO: 70724 - DNA, 75 bp, Homo sapiens
gtcgccaaagtgacaggcggtgcggcctccaagctctctaagatagagtttgaggagacaatggatgcactccag

SEQ ID NO: 70725 - DNA, 74 bp, Homo sapiens
gaacaagaagtaggcattgaccccttgtccagttactctaacaagtctggagaaatggagatcttcaccctttt

SEQ ID NO: 70726 - DNA, 96 bp, Homo sapiens
gcggcgcccggatgggcagctgaggacacctcctacctgttcatcactggccctgatgttgtgaagtctgtcaccaatgaggatgttacccaggag

SEQ ID NO: 70727 - DNA, 90 bp, Homo sapiens
ctggggtactacggctacagcaagaacactgatatttgcatttaatggggaacaaaagatgaagaaggaaaaggaatatattcactaagg

SEQ ID NO: 70728 - DNA, 98 bp, Homo sapiens
ctgatgcagcagagcttggaaggatgcttcagctcatcttaggctgtgctgtgaactgtgaacagaagcaaggttttgaaagttgtagtaatggtgta

SEQ ID NO: 70729 - DNA, 100 bp, Homo sapiens
aggtcaaggttaagatggagaacacaagcgtggtattgtccatgaatagtcaaaagagatatgtgcagcgggggctacagcgagtggggctagatcccca

SEQ ID NO: 70730 - DNA, 88 bp, Homo sapiens
aaggatatcgacgtcgtgatccagaagtccagagctgaggactgcctgtttgcagttttccaagagataacttcaccaagatgtccag

SEQ ID NO: 70731 - DNA, 75 bp, Homo sapiens
ggtactctcaatgatgctgaactcaacttctttcaggatcttgctctttcacccaggatggagtgcaatttgtgc

SEQ ID NO: 70732 - DNA, 99 bp, Homo sapiens
ctccgccccctgcatgtctttgttggcaaacagttctgggggtcgtccgatcctgcaggcatcagcaggactcagacctctcagcagcgtgctctgacg

SEQ ID NO: 70733 - DNA, 100 bp, Homo sapiens
tctttctatgctttgtacaactctacagaccgtatcatgatccgctgggcccccagcgcatctcctggaagagcccactcaccctggacgagctcttcgg

SEQ ID NO: 70734 - DNA, 74 bp, Homo sapiens
gcctgttctcatcaccatggcaacagagtgtccgagccacacccagcctcttggcgtctacctgctaacccctg

SEQ ID NO: 70735 - DNA, 75 bp, Homo sapiens
gacggtcttcagggtcacgagatgagcgctatcggtcagccaagaaggatcaagaaggtggagaagaaaagaaat

SEQ ID NO: 70736 - DNA, 149 bp, Homo sapiens
ccagccgccggattccagcccggccggggcctgcgggcgcccagagccgcgccgtccgcgccgcccgttctggtactccaaagattcaggtttactcacgtcatccagcagagaatggaaagtcaaatttcctgaattgctatgtgtct

SEQ ID NO: 70737 - DNA, 75 bp, Homo sapiens
gtggcctgggattcacaccaggaaagaacgccacgaagaaggaatgaagcacgagttctctgtggacatgacctg

SEQ ID NO: 70738 - DNA, 100 bp, Homo sapiens
tggaaaactccttaaaggggaaaggaaatcagccgcacatggcggacaccgacctgttcatggaatgtgaggaggaggagttggagccatggcagaaaat

SEQ ID NO: 70739 - DNA, 75 bp, Homo sapiens
ggcgaacgcggagagcacgccatgaaggcctcgggcacgcatggcctgtatgagaagaaaaagacctcaagaaag

SEQ ID NO: 70740 - DNA, 82 bp, Homo sapiens
agatggaacccatccacataagcggagctggagtttgttcagatcatcatcatcgtggtggtgatgatggtgatggtggtgg

SEQ ID NO: 70741 - DNA, 100 bp, Homo sapiens
ctgcgtgattcccgtgattgcgttacaagctttgtctccttcgacttggagtctttgtccaggacggacaacagctttgagcagttcattattaattatt

SEQ ID NO: 70742 - DNA, 90 bp, Homo sapiens
cgactccctatgttactgacgagaccggcgcctatgtgcttcccaagctgtatgtgaagctacattactgtgtgagttgtgcaattcaca

SEQ ID NO: 70743 - DNA, 98 bp, Homo sapiens
gcctttttcacacggaaactctcaagcacctgcaggacatcaacatcgccacccctgttcacaacatgctgccaggaatactcccccagttgcaagag

SEQ ID NO: 70744 - DNA, 51 bp, Homo sapiens
gcaccgccaagtcggccacctggacgattactttctatgaagacaaaaatt

SEQ ID NO: 70745 - DNA, 86 bp, Homo sapiens
agcatgccctcagcgccatcgggctgtgggacagatgatgtctaccatgttctacccactggtcacctttgtcctcctcctcatct

SEQ ID NO: 70746 - DNA, 87 bp, Homo sapiens
gtgttctgcgtggggacggccgcctagagtggttcagccacaaggagtgtgattcttggagcaaatacccggccagacttggatctc

SEQ ID NO: 70747 - DNA, 90 bp, Homo sapiens
gtgcaagaggtactgtccatcaaacatcttccaccacagcttagaggttgggggccgtcccgctcctaaggcaggaagatggtggccgca

SEQ ID NO: 70748 - DNA, 100 bp, Homo sapiens
tgctgcagcagcagggtacctgagcattgtggtgctgctgtgcaagaaacgggccaagaaagccttgagccgggccatgcttctcacatcttacctgcct

SEQ ID NO: 70749 - DNA, 96 bp, Homo sapiens
agccaagaacagcccaatctcctttctgggcaaacgttccaagaactctttcatcaatctaccaacagcccttaccaacgagcttgactggcccca

SEQ ID NO: 70750 - DNA, 75 bp, Homo sapiens
cttggaccgagccgatcgccgcggggcagttcgggccggctgtcctggcgcggctgtgtggttccgggtgctggt

SEQ ID NO: 70751 - DNA, 74 bp, Homo sapiens
aggaaggctttatgaataaggaggtgtgtttccattgtagaaaacctggtcatggaattgcagattgccccgcc

SEQ ID NO: 70752 - DNA, 101 bp, Homo sapiens
ctgctctgaagcgcacgacctccgactactttctccttcaagatccgagcaccagccggcgcttcagccccccctccagcagcctgcagcccggcaaaatg

SEQ ID NO: 70753 - DNA, 112 bp, Homo sapiens
ggccatggaggacgaggagagacagaagaagctggaggccggcaaagccaagcttctcttttaaaaggactaaaacatgctaacatagtgctacttcatgacatcatccata

SEQ ID NO: 70754 - DNA, 56 bp, Homo sapiens
gtttgtgccagctctccagagagaaaaggggggaccttccttggagcagaggtttg

SEQ ID NO: 70755 - DNA, 75 bp, Homo sapiens
ctggccaagaggagcaattttcgtgccatcagcaaaaagctgaatttgtcacagtggagaggatacaagcagaag

SEQ ID NO: 70756 - DNA, 100 bp, Homo sapiens
gtggtacctggagaatatctaccctgaactcagggagtttgcctggcgtgatcctgagttgcctgaggtcattcacatgcttcagcaccagttcccatct

SEQ ID NO: 70757 - DNA, 75 bp, Homo sapiens
ggcacaaggacgttctcaagtggggcgatgagacctagaggatcaagacataatgggagcatttttagacaagcc

SEQ ID NO: 70758 - DNA, 100 bp, Homo sapiens
aacaagaaggatattggttgccaggagatgagattgcgcgagggctggacttgtcccgagtgaggacctgcgtggttgtggcggaagagaggcctcggat

SEQ ID NO: 70759 - DNA, 90 bp, Homo sapiens
tgtatttagtgtgacgactgttgacctgaaaagccaaaattgcctggaaaagagcagtgagaggagtccgggagatgtgtgatgcatgtg

SEQ ID NO: 70760 - DNA, 87 bp, Homo sapiens
acgaggcaaggagctaaagcagcgtgcgttcagccctggggttagtggatgacagatgtgtggtgcacccagaggccggggaccttg

SEQ ID NO: 70761 - DNA, 100 bp, Homo sapiens
ggcggcgctggtcgtatccggggcagcggagcagggcggccgagacggccctggcagagagcaaaatatgctgtgaattccatcaagaagaaagtcaacg

SEQ ID NO: 70762 - DNA, 83 bp, Homo sapiens
cggcaacgtcgccaagacctcgtatgccaccacgggctgttccctgaccctgcaccatacggagaaaccagaacatgaagaca

SEQ ID NO: 70763 - DNA, 89 bp, Homo sapiens
ctcagtccccacaggtgcggaggagaatgcatacttctccgccttcccaccacccggattcatagtgtgaattcctgcccggccctgag

SEQ ID NO: 70764 - DNA, 82 bp, Homo sapiens
aatggctgatgatttgctggcagctgctgacaaggagccttcacgtaaatgggtccagtcatgcctcccagtaagaagccag

SEQ ID NO: 70765 - DNA, 80 bp, Homo sapiens
cccctgcactccagctatctcaacagcttcttccagctgcagcgcggagagggggatatgagactttctactcggaatat

SEQ ID NO: 70766 - DNA, 51 bp, Homo sapiens
cctgtacacaatcttcatgaaagatgagagctattgttcacataactcaac

SEQ ID NO: 70767 - DNA, 83 bp, Homo sapiens
ccgaggagtggctggagtgccagaagaggatcgacgcctatgtcgacgagcagtccctctccaagatcctggatgtggccagt

SEQ ID NO: 70768 - DNA, 100 bp, Homo sapiens
tcgaagccccttcccaggtcctcaactttgaagagatcgactacaaggagatcgaggtggaagagaggcttcgtgacggagttatcagagacattgagag

SEQ ID NO: 70769 - DNA, 100 bp, Homo sapiens
cgtgtgcctgatgatcacgcagctggctggcttcagtggaccacagatcagatataggagcacaccagccgggcatgagcctctccagctctaaggtgat

SEQ ID NO: 70770 - DNA, 83 bp, Homo sapiens
gtggatctcaagtactaccggccaactgaagtgaatactaagaagtttcagcagtggaatgcctactcttcttataaccggag

SEQ ID NO: 70771 - DNA, 75 bp, Homo sapiens
ggcaattgtaaggccatcgattgttggtgccagttggaaagaaccttttccagaaactatggtccaggaggcagt

SEQ ID NO: 70772 - DNA, 85 bp, Homo sapiens
atggcatgctggtgacggacagtgcagggaagcaactgcagaggtggtcttcgagggatagcacgaggtggtctgacaggactaa

SEQ ID NO: 70773 - DNA, 74 bp, Homo sapiens
tgaaattctcaccatggaattaatgattatgaagggtccgcaagcaggtggtgaacatcccgtccttcattgtc

SEQ ID NO: 70774 - DNA, 100 bp, Homo sapiens
gatcctggagagcctgcaggacggcgcggcagagtccccgtacgcctacagtaacgaaaaacacaccttgactttagtcagatacatcactgtctgttaa

SEQ ID NO: 70775 - DNA, 76 bp, Homo sapiens
gccagcgatctgctgcatctctacctcggcctgggcctcctcgctgcaaattcaacacccaacagcttccttaata

SEQ ID NO: 70776 - DNA, 75 bp, Homo sapiens
cgatgaagtgcagaggtttttttctgagccctatgagtttgtctctctggaatggctgcaaaagtggttggatga

SEQ ID NO: 70777 - DNA, 78 bp, Homo sapiens
gtacgacgtgatcgtgctgggcaccggcctgacgaccaaagagaaccctgtacagtaagaaatatggtgtggacctca

SEQ ID NO: 70778 - DNA, 100 bp, Homo sapiens
tttcccaagtttcctgacttcttccatcctctggaaatcagctgtgcccaataggggcacaaaacgtccccgggatgatgaagaggaggagcagaagatg

SEQ ID NO: 70779 - DNA, 100 bp, Homo sapiens
acaattgagcaagaacaaggtgacacatattctgtctgtccacgatagtgccaggcctatgttggagatgccctgtacagacttttggggaactgggtac

SEQ ID NO: 70780 - DNA, 75 bp, Homo sapiens
gctttttcccgcccgcggttccaccgctctgaaaccgatttctaacagagagatggaattgtcagccacttgaag

SEQ ID NO: 70781 - DNA, 88 bp, Homo sapiens
cggccccagccgccgctgcggagcccgccgggaccccccggagcgcggccacggcgcaggaggctgaacagtacccagggggagattc

SEQ ID NO: 70782 - DNA, 100 bp, Homo sapiens
atttgatgtgactcgtcggcgaatgcaattaggaactgttctgccggaatttgaaaagtgcctacagttttaatggaccagtctcgcttccacgagctcc

SEQ ID NO: 70783 - DNA, 100 bp, Homo sapiens
ccggtttctaatccctgctctgtcactaacaagctgcgtgatcttcggtttactcctggcttgggggcattaggaagcactggaggctcttcgggaacta

SEQ ID NO: 70784 - DNA, 156 bp, Homo sapiens
ttttggaccttttttcatttccatttctaccttgtatgcctcaatttgctggatttaagcactgctgcactttatgaggcactactgcagtcttcagttaagcaacaagtagaagctattgaaaaacagtacatttctgcaattgagaaacaggca

SEQ ID NO: 70785 - DNA, 100 bp, Homo sapiens
ccatcacctggatgcctacgtgggaagggacctcgaatgtgggaccccagcccctctccagctcgaaatcccacttccgagtggatccagttctttaagg

SEQ ID NO: 70786 - DNA, 100 bp, Homo sapiens
aagaaagaccatcaagtttaccaaaaggcttcccaactgatgcaactcttgatgacataaaagaatggttagaagataaaggtcaagtactaaatattca

SEQ ID NO: 70787 - DNA, 75 bp, Homo sapiens
cttttggctagttgttcagctgatggaaccttaaaggcatcacttacacttgaagaaaaacaaaaattagcaaaa

SEQ ID NO: 70788 - DNA, 51 bp, Homo sapiens
ggcactgtctgaggagactacagcaggttaattttctgcaaaagagagctt

SEQ ID NO: 70789 - DNA, 100 bp, Homo sapiens
tcggccaggcgccggcgacctgaggggagagggaacgcagctgaaagcgtgaactgtctgtattgtctgaacttgcattgtgattggcctgtagagttgc

SEQ ID NO: 70790 - DNA, 100 bp, Homo sapiens
agttcaccgacctcaatctggtgcaggccctcagctcgggttcatgacgctctcgatattcctgtgcagaaacctggaccacgtctacaaccggctcgct

SEQ ID NO: 70791 - DNA, 75 bp, Homo sapiens
ggaaaatgaagtggatgccttttggtgctttgcctcttacatggaccaaatgctcaaattgaaattattccatgc

SEQ ID NO: 70792 - DNA, 82 bp, Homo sapiens
cagagttgccagacactatagtcgagccaaacagacgctccctgtgatttatgtcaagggaaaaagaaatagtggtttcaga

SEQ ID NO: 70793 - DNA, 74 bp, Homo sapiens
gccatcatcatgaaggacgtgcccgactggaaggaatgtatcctgtcaggtataatgtcagtgaatggcaagaa

SEQ ID NO: 70794 - DNA, 96 bp, Homo sapiens
cacagttcagtgtattcgttctgtgcctgaactcaaagatgcccttaaaagagtgcagacatcctcagcaccatcggctatgacaacattatccaa

SEQ ID NO: 70795 - DNA, 83 bp, Homo sapiens
ctgccctcttccgatcacaaatattgtcatagcctgggctggaagctcttctacgtcacaggctgcctgtttgtggctgtgca

SEQ ID NO: 70796 - DNA, 114 bp, Homo sapiens
gaaaataatccagagatttccacagaaggactgggatgatacaccttttccacagggaattgagttggtaaatgaaattgcctttataaatacccttgaagcccagaataaacg

SEQ ID NO: 70797 - DNA, 100 bp, Homo sapiens
gtacttcagtgaatgtaacaaatgtgatgacaagaaggagagatctctgctgcctgcattgagggatttatcagcaagactgttgaacgcataactgccc

SEQ ID NO: 70798 - DNA, 100 bp, Homo sapiens
tgcgacgttcacagaggaacactgccggggcccaaccacaagacgactcaataggaggaagatgtgttcagagcaacattgttttgttgacacaagcatt

SEQ ID NO: 70799 - DNA, 95 bp, Homo sapiens
ggagaagttgcaaatggagcaacagcagcaactgcagcagcggcagatgggactgagtatgggctgagtgaagctgacatggaggcctcctacgc

SEQ ID NO: 70800 - DNA, 83 bp, Homo sapiens
cgtcatgcggctcctcatggccgagctgggcttggagatccccgcctatagcaggtgaaagaaaatggcccgaaccaagcaga

SEQ ID NO: 70801 - DNA, 74 bp, Homo sapiens
cggcgtgggagcacctctggggctatggaggcccctgagccgggaatgggtaccacagaccatgtcatcgtcct

SEQ ID NO: 70802 - DNA, 100 bp, Homo sapiens
ggctggtagaaggaattctgcatgccccagatgctggctggggaaatctggtgtatgttgtcaactatccaaaagttgttgactgtggccctcctgatga

SEQ ID NO: 70803 - DNA, 51 bp, Homo sapiens
attcagattttgaagctaaagttaagcagaacttgaaggtgcacattcttg

SEQ ID NO: 70804 - DNA, 76 bp, Homo sapiens
cagggaagttcctttttgaagtagttccagaagaagaagaggacagtgctccagtgaaagtggaagaacaaaggaa

SEQ ID NO: 70805 - DNA, 100 bp, Homo sapiens
cgccgcgggctgcgcgcttctgtgggtgggggaaggcaggactgacgcagagtcagaacaaaatctgcttcatcccaggcatggtaggacctatattaga

SEQ ID NO: 70806 - DNA, 83 bp, Homo sapiens
tttagcgctcgcccagctagccgcaggtgtcgtgaaaactacccctaaaagccaaaatgggaaaggaaaagactcatatcaac

SEQ ID NO: 70807 - DNA, 83 bp, Homo sapiens
agatcctgatgaagttcgagcactaatatttaagaaagaagatgttaactttcaggtcttcagaactactagcagataatttg

SEQ ID NO: 70808 - DNA, 96 bp, Homo sapiens
tggaattatgggcgtgagccactgtgcccaggtgttatgatgctacaacttctggaaaaagtaattgaattggaaaattggacagaggggaaaggc

SEQ ID NO: 70809 - DNA, 75 bp, Homo sapiens
tttcttctgtgtgggaatcactactttgctacagacaacgtttggatgcagggcagctggtggaatttttgaaga

SEQ ID NO: 70810 - DNA, 100 bp, Homo sapiens
gcttctaagccactcactctatggtcatcagaagctgaatttgctgaggctaaacactatcatgccaagttggtgaatataagaaaagagatgctgatgc

SEQ ID NO: 70811 - DNA, 100 bp, Homo sapiens
ccttgaagtatttggctgaggagttttcaatcccatctaacaaagtgccagtggtgcagcaccctcaccatgtccaccccctcacgcctcttatcacgta

SEQ ID NO: 70812 - DNA, 82 bp, Homo sapiens
atcgattcaaacagtgaaagtgaaagagaagagatagaattaaaatctccgaggtcacccacaaaagctgtatataatgcca

SEQ ID NO: 70813 - DNA, 96 bp, Homo sapiens
tttagaaccaacaagggtctcaatgcccacagaaaatattggtgtcatggagaaactccagctgggcccagagattctgcagcgggaaaatccaag

SEQ ID NO: 70814 - DNA, 100 bp, Homo sapiens
ggtaatattcttctgggtgaggatggttcagtacaaatagcagattctcctgagaatgatattcctatggagatcaccacggcagaaccacaggtttccg

SEQ ID NO: 70815 - DNA, 76 bp, Homo sapiens
cacccttccctctgccacgcaggtgccgatggaagtccttaaggcagttcaattaacctccagaagatggctgaac

SEQ ID NO: 70816 - DNA, 100 bp, Homo sapiens
ttgtccgactgggagcagaggaagccttgaggacctactcacagataggaattgaaggaacagcatatgccatatatgagctggctgtggcttcatttcc

SEQ ID NO: 70817 - DNA, 75 bp, Homo sapiens
tgctggtgttctatactggaagaggcatgccagaggtagagcagggccgcgatgggcctcttggaacattggtgt

SEQ ID NO: 70818 - DNA, 113 bp, Homo sapiens
cagtttgacaccacaggctgagctccctgaaccagttgctgatcatctgggctgtgatccacaaacccggttctttgtccctcctaatatcaaacagtggattgccttgctgc

SEQ ID NO: 70819 - DNA, 100 bp, Homo sapiens
tgctgctttttctaactatttcaagatgatatttattcaccaaacaagattagcctgaggcctgctcagtcgttcctaatgaataaaaatcaagtgccaa

SEQ ID NO: 70820 - DNA, 75 bp, Homo sapiens
gtgagtgaccatgcagcaaaagaaggagggtcctctcagtgattaagggctggggagcggccggagctttgccga

SEQ ID NO: 70821 - DNA, 100 bp, Homo sapiens
tcgctgatgagctggtctgcgatcctgaatgggggcggcgtgcccgccggggggctagtggccacgctgcagagcctcgtttgtcccgctggctggaagc

SEQ ID NO: 70822 - DNA, 100 bp, Homo sapiens
tgctctttcacatcctgaaatggctttctgtagaggacatcctggccgtccgagctgcctgtagtggtggagacacgcccagtggatgatcctactgctc

SEQ ID NO: 70823 - DNA, 75 bp, Homo sapiens
ccgccgcctccgccgctgcctcaggagcggaacaacgtcggcgagcgggggcatgaaaatcaacatggacaagaa

SEQ ID NO: 70824 - DNA, 90 bp, Homo sapiens
gcgtgcccagcaagagattaaagatgcagtacgccacggggccgctgctcaagttccagatttgtgttccttgcctgtatctccccttgg

SEQ ID NO: 70825 - DNA, 83 bp, Homo sapiens
aaccatactaaattattccatttgcaacttatccccaacaggacaggacatccagcccaaaagagacctcacccgctttgtga

SEQ ID NO: 70826 - DNA, 82 bp, Homo sapiens
cggaattcgggaccgactgacggccggccggcttcccggaactggaaggtaaaggagatcttcaggaagtcacctttcctgg

SEQ ID NO: 70827 - DNA, 50 bp, Homo sapiens
gcggagcttgacccgtccatcgctgtgaccatgctcgacagctgaccaag

SEQ ID NO: 70828 - DNA, 133 bp, Homo sapiens
agcccccgcgctggtgcagccaccctcgctccctctgctcttcctcccttcgctcgcaccatggtttggtgcacctcgatttggaggaagtagggcagggcccttatctggaaagaagtttggaaaccctggg

SEQ ID NO: 70829 - DNA, 50 bp, Homo sapiens
gggatcttcgcactatcccaagccctgcagagcccagggagatggaagac

SEQ ID NO: 70830 - DNA, 76 bp, Homo sapiens
ccaaacatcaagcagaatgtgatttgcttgaagatatgagaccctgtgtcaaggagagtggaaagcctcatttgaa

SEQ ID NO: 70831 - DNA, 50 bp, Homo sapiens
gaagagctgccagatcccacagggcagcttgtgcagctggaagagaaagg

SEQ ID NO: 70832 - DNA, 88 bp, Homo sapiens
tggaggacacctgtgtgcagtatgtgcagaaacatatttccgcggaaaacacgaaagggtgcggacgcgtcatcactgcagaaacgtg

SEQ ID NO: 70833 - DNA, 100 bp, Homo sapiens
cgaggagccatgaggcgccagcctgcgaaggtggcggcgctgctgctcgggctgctcttggagctttggcgctgaccacaatgctgagcaggaagcagca

SEQ ID NO: 70834 - DNA, 82 bp, Homo sapiens
gtgattgcgttacaagctttgtctccttcgacttggagtctttgtccaggacggtggagccttttgccagcttgaccgaggc

SEQ ID NO: 70835 - DNA, 50 bp, Homo sapiens
gaggtggttcgcagtgggcagcagcaggttggcaaggccacaggcttcct

SEQ ID NO: 70836 - DNA, 51 bp, Homo sapiens
tggacagaaaaccacattgtttacacagctgtgcctactcaacagattcta

SEQ ID NO: 70837 - DNA, 91 bp, Homo sapiens
caaaagtaccaagagactgccttggagaggttactttcaatggaggtacaggtttgcagattccgccagcagcacagcaagctctacagat

SEQ ID NO: 70838 - DNA, 100 bp, Homo sapiens
aatcaaatcagtcactgggatttgggaagttccttcttctttgctggcactgttattacaaccatagctgtcaccactgactaaagaagagaaaactgcg

SEQ ID NO: 70839 - DNA, 82 bp, Homo sapiens
gagactcgtggggctggatgggaatcgtagtcttcctaggagttgtgtgggcaagagcagtttactgttgcgttttgcagac

SEQ ID NO: 70840 - DNA, 116 bp, Homo sapiens
atgtagcatatatcctaaaggagatggaagtgatgtaccatcatgggtagcctttgataaacaggccatgatcatagctttcacgtcggacatgatcccccgcctagtgtactact

SEQ ID NO: 70841 - DNA, 100 bp, Homo sapiens
ccgaggactcagacctctccagcgacgatgtccttgagaagtcctcacagaagtcccggcgagagggtaacccagagaacacagccgaagtggaatgtgg

SEQ ID NO: 70842 - DNA, 98 bp, Homo sapiens
agaccaacagtgcagtctgcagagacttcaacatccctggcttcccgactgtgaggatctgaaacggcaaagaattggaaatcactaacagagtcaga

SEQ ID NO: 70843 - DNA, 90 bp, Homo sapiens
tcaaagacagctttcacagtttgcgggactcagtcccatcactccaaggagagaagcatcaggtattatctactgctgtctgcagaattc

SEQ ID NO: 70844 - DNA, 95 bp, Homo sapiens
ggcctggtggtggcctgggcgctcagcctgtggccaggtccacccagatcaagacctactcatgggacaatgcccaggtgctgctggtaggaaac

SEQ ID NO: 70845 - DNA, 75 bp, Homo sapiens
tgatgaaattcaccagtgaagccgtgacatcctgggatattctttgttgagagccagagactgctgctactttga

SEQ ID NO: 70846 - DNA, 100 bp, Homo sapiens
gtccagcccaggaaaatggagagttaagtgggcagaccaacatccacctcagcaaaaacttcttcctgacgaatcgcgccagggagcgctcagacacctt

SEQ ID NO: 70847 - DNA, 98 bp, Homo sapiens
acgctcagcagcatcagacacatgatccgcaagaacaagtaccgccccgacctgcgcatgtaacaacatgctgtaccccaaggaagacaaggagaacc

SEQ ID NO: 70848 - DNA, 75 bp, Homo sapiens
ggagacgggacgctgctgtacgcttcctcgcttttccagaacaccttccaccatgaccacctcagcaagttccca

SEQ ID NO: 70849 - DNA, 75 bp, Homo sapiens
tagaccagaaccttagtcccgggaaaggcgtggtgaccaagatgaagatgcagaggaccattgtcatccgccgag

SEQ ID NO: 70850 - DNA, 83 bp, Homo sapiens
cgccttttcagaagcggctgcgcacggactgctggagatggtggagtccgtcaagacggtctcgccacattgcccagactggt

SEQ ID NO: 70851 - DNA, 101 bp, Homo sapiens
cgcggccgcggcgccatattgcggccctcagcggccgcgaccgagtcatggctgagacctacggcttctgggaacttggcagacgcagcttagagagactc

SEQ ID NO: 70852 - DNA, 133 bp, Homo sapiens
cggtgaacctggaccaggaggaggttttcaggaccaaaattgtggaaaagtcactctggatgtgatcttcgtggtggaaagctaaattttaaaaccaccccaatggatgcagacagtgatgttgcattggaca

SEQ ID NO: 70853 - DNA, 85 bp, Homo sapiens
aataatgaagaaaaacaaattccgcgtggtaatattccaggtgatttgaagatattaaagctagaaattggaactagaaaatcaa

SEQ ID NO: 70854 - DNA, 100 bp, Homo sapiens
ggtaatggagaccaaaagtatgttgtaccttgtgacagaatatgccaaaaatggagaaatttttggatcccaagagaagccactttgtcttaattgctgg

SEQ ID NO: 70855 - DNA, 100 bp, Homo sapiens
attttggtgttactgctactcctggggatcggtttgatgtggtggttttggcccctttgctgcaaagtgtacctggagtagaacagaaaaattattatgt

SEQ ID NO: 70856 - DNA, 75 bp, Homo sapiens
cggcgctctcctggctcccttctgccccagctccgtctcggcggcggcggggttggggtctgctaggtccccgga

SEQ ID NO: 70857 - DNA, 98 bp, Homo sapiens
aatgaaagctatggatgttttaccaattttgaaggaaaaagttgcatacctttcagtgaggaggacatgtaccgtgctgcagatgaaatagaaaagga

SEQ ID NO: 70858 - DNA, 75 bp, Homo sapiens
agatttcacattatggcagttactaaagaagcacgtgaacaggagctgactaaggctttggaacagaaaccagat

SEQ ID NO: 70859 - DNA, 90 bp, Homo sapiens
aagaagaggagaggaaaaaggaagagagcactgcagccagtgaaaccactgagattgagaggatccagaatccagatctctggaatagct

SEQ ID NO: 70860 - DNA, 100 bp, Homo sapiens
ctgaacttcaccttttggctttcttggcctgatgctgaactctcgaggctggagaatgctggaggagaccttaaggatggccaccaccactatgaaggag

SEQ ID NO: 70861 - DNA, 100 bp, Homo sapiens
tagttttaaaaggatgaaaagcttatgcaacatgctcagcaggagcttcatcaacgatatatgtcagatctaaagcaatacgagaattggagacccaacc

SEQ ID NO: 70862 - DNA, 100 bp, Homo sapiens
aagatcccagaattcagcaacgatgttaatggggaggccaaagagacacagcccatttttttagaataatccagaatggctactctgatctatgttgata

SEQ ID NO: 70863 - DNA, 75 bp, Homo sapiens
ctccgggggacccgcggtccccaccgtgcagcggggcatcatcaagatgggtcattgatgcagtcattctcagtc

SEQ ID NO: 70864 - DNA, 74 bp, Homo sapiens
ctgctcctctcctgggcggcggggatgggaggtgtctcaaaggctgttgagcacatcaataaaactattgcgcc

SEQ ID NO: 70865 - DNA, 95 bp, Homo sapiens
atgtgttccgacagaggatgatgcagatgtacagacacaagcgggccaacaaatagaaaggcacttggggtcttatctgttggactctgaaaaca

SEQ ID NO: 70866 - DNA, 98 bp, Homo sapiens
tcaggtcctcgggggcggcggccacgccaaggacgggacacaactcagatgggaagttcatcgcccgggcacagcggatagagtacgactgtgaacta

SEQ ID NO: 70867 - DNA, 88 bp, Homo sapiens
tcaaaaaagcatttaggcaggtggctcccaaattaccggaaaggactgttcttgaggtattcaggcgaggattaaatccaccacacag

SEQ ID NO: 70868 - DNA, 83 bp, Homo sapiens
gtcagacgcagccgtagacaccagctccgaaatcaccaccaagggacccagacatggagctgcgggaagaagcctggtctccg

SEQ ID NO: 70869 - DNA, 83 bp, Homo sapiens
atgtttcaatattggaagcgctttgatttacagcagctgcaggccacagacctccaccagcacgaagtggacatcgttgtgtg

SEQ ID NO: 70870 - DNA, 51 bp, Homo sapiens
aacccagatgtgcaacaaagtgcgatggtgaccaggcattgatgcaccccc

SEQ ID NO: 70871 - DNA, 50 bp, Homo sapiens
atttgtttggatatcctgaaagatcaatgtattggtaaaggttttcaagg

SEQ ID NO: 70872 - DNA, 100 bp, Homo sapiens
tgtgacagcgagagcggcccggacgacaagggagtaccctgacttctaccggaagctctacggcctcttggacccctctgtctttcacgtcaagtaccgc

SEQ ID NO: 70873 - DNA, 100 bp, Homo sapiens
ccaccaacagggtctgttatctccggtccggggaagagtcaagctgcactaatctagaccagggatccccacccctgggctgcagaccggtccccatggg

SEQ ID NO: 70874 - DNA, 101 bp, Homo sapiens
cgggtccccaaccgacgatggagggagacgtgctggacacactggaggcgctggggtactccaaagattcaggtttactcacgtcatccagcagagaatgg

SEQ ID NO: 70875 - DNA, 74 bp, Homo sapiens
caaccacatcctcctcctcctacacccaaaggctcccatggagagctcagacatatctgaagagatggattaag

SEQ ID NO: 70876 - DNA, 98 bp, Homo sapiens
tctcccaaggtgctgggattacagagagaagggccgtaaggagagagagtccctgcagcagatggccgaggtcacccgcgaagggttccgtctgaaga

SEQ ID NO: 70877 - DNA, 75 bp, Homo sapiens
gtctgttcgcgctgctgctgttcttcgtaggcggagtcgccgagtcggatgccgaggaatgtgacagggctggga

SEQ ID NO: 70878 - DNA, 50 bp, Homo sapiens
aagcgtttcagcgcctacaattacagagttactggaggtgaactgtttga

SEQ ID NO: 70879 - DNA, 74 bp, Homo sapiens
taaagtaaatctcaggtgttacatcattgcacttgtttaaggagttcatgagtaaacatgttcacttaatgtgt

SEQ ID NO: 70880 - DNA, 117 bp, Homo sapiens
tttacagataagcggttccagcctgtccacgacctcacaataggtctcagctgagtctgctctgatcacccaacaagacctagctccccagcagagagcggccccacaacaaaagag

SEQ ID NO: 70881 - DNA, 83 bp, Homo sapiens
cgaacctgctgcttttctcgctatgctgaactgtaggtggctccctcccaccccaacgatttcagagagaaacaagtcggaat

SEQ ID NO: 70882 - DNA, 76 bp, Homo sapiens
tccctgtctgggaccttctccctgcctggacccctactattgcaacaagggaagccctatggggcggatgacttcc

SEQ ID NO: 70883 - DNA, 75 bp, Homo sapiens
cacaaagaatgtttgggaagagtagacaattgtggcagagttaattctggtgcccatggaggtgtttgtggacga

SEQ ID NO: 70884 - DNA, 89 bp, Homo sapiens
agcgcttgacctacaagctgtgccacatctattacaactggccacaactattggatgattatccgaaatgtttcattgtgggagcagac

SEQ ID NO: 70885 - DNA, 100 bp, Homo sapiens
ctgacagacatccctgaatcttggtgtttggacataggaggatagaccactggaacaatgagaaggagagaattctactggtcacagacaagactctctt

SEQ ID NO: 70886 - DNA, 99 bp, Homo sapiens
tcccagcctcaggcgtgcgcggacggtgtgcgggcttgttgattggtgctggctgtgccctctaccccttgggctgggacagtgaggaagtccggcaga

SEQ ID NO: 70887 - DNA, 95 bp, Homo sapiens
gtcggacctttcccgctggcgcgcagcctcagctagctgggttaacaactttggccatgaaggtcttggactcttattggatgagctggaaaagc

SEQ ID NO: 70888 - DNA, 83 bp, Homo sapiens
cagcaggggcgacaacagcatcaggatttttagactctgaggagcagttggagctaatccacattatggaaatggaaaccacc

SEQ ID NO: 70889 - DNA, 106 bp, Homo sapiens
cccgtgtgcgacaagccagccccctacgaccagctcatcatcgacgggatgggagtcccagcttctggagacggggttcctggggatcttcctgtgccctctgtgg

SEQ ID NO: 70890 - DNA, 88 bp, Homo sapiens
gttactgtgtccaggccccgggttctcaggcggtaaccagcgtgagctcgcccgccagaagaatatgaaaaagcagagcgactcggtt

SEQ ID NO: 70891 - DNA, 75 bp, Homo sapiens
gcggcgaccggcggcgtccgaggagaaccccacggacatatcgtatgtgtacagtgggtatgccccgctcagtgt

SEQ ID NO: 70892 - DNA, 75 bp, Homo sapiens
cagaaggcgatcaaggccaagtatccgccagtcaataggaagtacgagttcctctgaagccttggagtttatgaa

SEQ ID NO: 70893 - DNA, 100 bp, Homo sapiens
accgagaccgtgaccgagagcgtgaccgagagcgcgaatatcgtcatcgttagaaggttaccattccatcaaatacaatatctgtgaatggaaggtcaag

SEQ ID NO: 70894 - DNA, 95 bp, Homo sapiens
cagcggttggaggcttcgcccggctttgcagcggggacttcggcggcggcgcctcaggcacctcggcccgggaggagagggcagtgagagatagg

SEQ ID NO: 70895 - DNA, 75 bp, Homo sapiens
ggcctcctcgggagccacgttcacagatgctgagagtgaagggggttgctgctgacacgccgaccgcctgctgct

SEQ ID NO: 70896 - DNA, 115 bp, Homo sapiens
ggaggactctggagctgacagcgcgcacttcacccgcagttgtaacagatcaactcctagcaatcatgatcggatacagcgtctgaggcaagaatttcagcaagcaaagcaagat

SEQ ID NO: 70897 - DNA, 82 bp, Homo sapiens
tggcgaaggagccggctccaaggtggacgacatccttggagaaggcagcgacgacagcgacagcgagaagaggaggcctgag

SEQ ID NO: 70898 - DNA, 100 bp, Homo sapiens
aagaagtggatgatgtgcttggtggagcagctgcctgggagaatgttgactctactgcaggaagctcttcgtgggcggtcttgactggagcacgacccaa

SEQ ID NO: 70899 - DNA, 75 bp, Homo sapiens
ctgcgagctcctcaagaatctcgtgctcaccggtttctcccacatcgacctgggcgacatggagtccaatgggaa

SEQ ID NO: 70900 - DNA, 83 bp, Homo sapiens
ccccaggcgtctgaacgtggccctgaccagagcaagggtgaggacgcttgagcggaagttagaagcaaaaatgatcaaggagg

SEQ ID NO: 70901 - DNA, 74 bp, Homo sapiens
gctcactgcggtcctaaccccgccgcagctcctcggacgcagcatgtagagcgcatgaagtacaggacaataaa

SEQ ID NO: 70902 - DNA, 78 bp, Homo sapiens
cacactatggcgctgaaacggattaataagaatgtttctccatcccagagagatgaagtaattcaatggctggccaaa

SEQ ID NO: 70903 - DNA, 75 bp, Homo sapiens
gatgaacttctacaagcagtatccaagaataatccagaatggctactctgatctatgttgataaggaaaatggag

SEQ ID NO: 70904 - DNA, 90 bp, Homo sapiens
ttcacatccagcagaggaggcgggggcagccgctgagacggtttttcacaagataccatgtttgtgtggaagtgccccgtgtttgctatg

SEQ ID NO: 70905 - DNA, 74 bp, Homo sapiens
atccagatggcagccagtcagtggtggagggtgaagaaggtgaatacagtgaagaggaaaactccaaagtggag

SEQ ID NO: 70906 - DNA, 82 bp, Homo sapiens
atccagcctgcggagcctgtggggcaggggaaaggccatacaaatgtcagacctgcgagcgaaccttcaccttgaagcacag

SEQ ID NO: 70907 - DNA, 100 bp, Homo sapiens
gaggctggctcgagaccagctcatctatctgctggagcaggtgaaatgcctcagctcgtaaaaggaatgaaactgttaaaccaggctgatccctgtgtcc

SEQ ID NO: 70908 - DNA, 100 bp, Homo sapiens
cctgggagcaatggaggatggacctggacaagccctggagaaggagggccggcgcagatgtccaagtaacaaatgtggcaattattttggatctatcacc

SEQ ID NO: 70909 - DNA, 87 bp, Homo sapiens
tcctctttccacgcccagaccagcaacattctgtagcttacacatttgaagaggagtctgcactatggaaacaacctgtcaatccag

SEQ ID NO: 70910 - DNA, 75 bp, Homo sapiens
ccttcctcctcatctacttcaagttattcttaacaaagacactaatatttctttggccttgattgtggctcagca

SEQ ID NO: 70911 - DNA, 50 bp, Homo sapiens
ccatgaaagcgcagccatggcggctgaagtgagtagtgaatatagtatgg

SEQ ID NO: 70912 - DNA, 75 bp, Homo sapiens
tggatgaagttgttcattgtttgtcaccacaaaaaggacaggttactcaaatgagtcgtccagacttgattctct

SEQ ID NO: 70913 - DNA, 82 bp, Homo sapiens
gctggatcttgctcagtctctgccaggggaagattccttgatcatggaagggaagtggttgctgtgtatgttactggtgctt

SEQ ID NO: 70914 - DNA, 83 bp, Homo sapiens
ggggcagcaaccaggagattccctgggcctgcaggaagcccttccgcggaccgaaaggtttatgaaaaccccagatgaaatca

SEQ ID NO: 70915 - DNA, 95 bp, Homo sapiens
ctcggctgctgggggcattccacaacccaaaacaggtgaccagaggttttactggtggtatgccttccaggatgtcaaatttgtcagcaactcgt

SEQ ID NO: 70916 - DNA, 90 bp, Homo sapiens
caaagacagcaaatggttgacacctttacacagagcagttgcatcttgtagtgaggtaatagcctgcagctggtgttttgagaagcccta

SEQ ID NO: 70917 - DNA, 97 bp, Homo sapiens
agaagatcgagacagggtccctatcagaaaagagaaaagctttcaaaggatattgattaccttattggtaaggaaagccaggtgaagagtcaaatat

SEQ ID NO: 70918 - DNA, 100 bp, Homo sapiens
ggaaggcagattcaagcagctgcaagaagtctcaggggatccagaactgcagccagtccttgctgggctgttcctgtccatgtgcctggtcacggtgctg

SEQ ID NO: 70919 - DNA, 75 bp, Homo sapiens
tccggctccgcgggcggcccacggcgaggtggctgagaacaacctgtgcagccagtatgaggagaaggtgcgccc

SEQ ID NO: 70920 - DNA, 76 bp, Homo sapiens
acaggccaaagccagactacagctggttcttgaagctgctgtccacctgatcccggtgtcgactcctaagaatgga

SEQ ID NO: 70921 - DNA, 74 bp, Homo sapiens
ccgagaaccgtcagtttgagccagatgatgaagtggccattctgcctgcccctcagaacctctctgtactctca

SEQ ID NO: 70922 - DNA, 88 bp, Homo sapiens
ctcagcccgttcgctggactgcaaaccgagctcccgtctgccttgcagggagccagttgataatctgagtcctgaggagcgtgatgcc

SEQ ID NO: 70923 - DNA, 98 bp, Homo sapiens
agatcctgtggtattgtggaaattcccagaggactttggagaccagacagtgatgtgtgttctgaaattgtgaaccatgagtctagtacttaatgatc

SEQ ID NO: 70924 - DNA, 100 bp, Homo sapiens
tgactgccatccttgcctcgctcactgcacgccagaacctgaggagagaatggcatgccagtaccctcttatatatggactgattcttattccctgctgg

SEQ ID NO: 70925 - DNA, 101 bp, Homo sapiens
ccagattctgccaattcgttttcaggagcatctccaggttccggagtctcaccactgcatttttcagagacgccatgggcttcttattaatgtttgacctc

SEQ ID NO: 70926 - DNA, 75 bp, Homo sapiens
ctgcattctgcttaattccctttccttagaagtggtccaaaggcaaagttcgggacaagctcaataacttagtct

SEQ ID NO: 70927 - DNA, 98 bp, Homo sapiens
gaaggctgtgcggtctgccaggagctgcggccccgtccggcccgggctgacaatgcagatcttcgtgaagactctgactggtaagaccatcaccctcg

SEQ ID NO: 70928 - DNA, 97 bp, Homo sapiens
ggagctaggagctggcggcgacggccacaggggcggcgacggcgcagtgcgaagcgaaacagggtatgggatgatgggatcattgatccagcagaca

SEQ ID NO: 70929 - DNA, 100 bp, Homo sapiens
ggccttacacgcccccatcagcattgaatgccccagaggagcccgaaacctcccaggcttggtgcaggaaggagagcccttcagcgaggaagctacactt

SEQ ID NO: 70930 - DNA, 75 bp, Homo sapiens
gaagaaactgtggaagtcattaggaacaatggtgcaagatgcacagtctctgacatcagctctcctgggaccctc

SEQ ID NO: 70931 - DNA, 99 bp, Homo sapiens
atgacctccttcgccacttacagtatgcaacacattttcctatacctctggacttgcaattgtgaccaaatatattacaaagggctggaaagaagttca

SEQ ID NO: 70932 - DNA, 89 bp, Homo sapiens
gttggattacaggcaatatttgtctgatgagattgatttgactatatggaggagatgttaaagtaacccatcttgcaggacgacattga

SEQ ID NO: 70933 - DNA, 100 bp, Homo sapiens
cgcgaagctgccaaagccttagacaacgcaaatccagaaaaaccctgtgcatcatcattcttatccttgtcattggagttgcgattatcagtctcatcat

SEQ ID NO: 70934 - DNA, 100 bp, Homo sapiens
gcgagaaagaggaggaggcgagaaactcccaccgacccacagagagtccgatgggtggtccttttattcctgctgctcctgtcaaaactgccttgcctgc

SEQ ID NO: 70935 - DNA, 90 bp, Homo sapiens
ctaatggaggtctccagtttcgaaatacactttcgggaaatggcctctaaatcctggctgaattttttaaccttcctctgtggatcagca

SEQ ID NO: 70936 - DNA, 100 bp, Homo sapiens
ggtcgatggcagccgggacgagctgttccgccggagcccccggcccaagggcgacttctccagccgggcccgcgaagtgcatgctacaagtgaaaactga

SEQ ID NO: 70937 - DNA, 60 bp, Homo sapiens
aaacgcccaccttcaaagaccactccttctttttctgtcaggccaagcagaaggcagcct

SEQ ID NO: 70938 - DNA, 101 bp, Homo sapiens
caaagtgggacgcggcacctacggtcacgtctacaaggcgaggcggaaagatgggtttttcgttggaatatacgttgcacatttatggcgattctgagtgt

SEQ ID NO: 70939 - DNA, 100 bp, Homo sapiens
cagacggctcacctgtgcgggatggaacaaaaggcctcagcaactgttgccattcccaaagaacaccatcgctttgttattggcaaaaatggagagaaac

SEQ ID NO: 70940 - DNA, 82 bp, Homo sapiens
gtcggacccatggtttccagtgcagcgcggagtgggcgatgccagcgtgccagcctggagtactcgggtactttgagttcag

SEQ ID NO: 70941 - DNA, 82 bp, Homo sapiens
ctggattatctactactgctcctcctggcatccgcagtggctgcgatggaaggccgccatggcatcagatgaaggcaaactt

SEQ ID NO: 70942 - DNA, 98 bp, Homo sapiens
ctgcctcctcttcttcctcttcttcctcctccgctaccaccaccacaccagaaactagcaccagccccaaatttctttctcacatggtcatagaggaa

SEQ ID NO: 70943 - DNA, 80 bp, Homo sapiens
tcgagaatacagagagaaaattgagacggagctaagagatatctgcaatgatgtactggattttttatcaagcagaaatg

SEQ ID NO: 70944 - DNA, 75 bp, Homo sapiens
ggtatggaggtgggctagaggccgacgccagccagagagcgcaaggatggaacattactgtggacctggtcattg

SEQ ID NO: 70945 - DNA, 98 bp, Homo sapiens
gtagctggcgtgagttatcttctggaaatgagtcttcaagctctgtaagacatcctcgaggtctttaggaaaacggtgactctggagcacagccctgg

SEQ ID NO: 70946 - DNA, 100 bp, Homo sapiens
gggacccggttccccggcccacagtgggggtgtgcaaacccgagagaactggaaagaattcagaattatgccccagctttcacaatgttgggttacttaa

SEQ ID NO: 70947 - DNA, 75 bp, Homo sapiens
cttgaattacaacaagagccaaactcattttttgatgcaacagtggctgacaagattttgaaaaagaaagaatac

SEQ ID NO: 70948 - DNA, 100 bp, Homo sapiens
gactgcaactgctggattgctgcaaggctgagggacgagaacgagcatccagtcctggatgagccaatagctgaagctgtctgtattatcgcagacacgg

SEQ ID NO: 70949 - DNA, 100 bp, Homo sapiens
gaaacaataacactaaacagtggaacactacagacatttgagattcttcccgtgaccctggcagcaaccccaacaaacgccagaggcagccccctctcct

SEQ ID NO: 70950 - DNA, 100 bp, Homo sapiens
gtaaggctgaaatcattgaagtgcttggagtgcagaactgaaagaggtagtgggcagcagtcagtgacaggtgtaacctctgtggatgacagcaacagtt

SEQ ID NO: 70951 - DNA, 75 bp, Homo sapiens
ggtgtctggcttggtgcggagaccccttcgggagaattaaacaaccaccatgtcgagcaaaaaggcaaagaccaa

SEQ ID NO: 70952 - DNA, 100 bp, Homo sapiens
tgtctgggatgttggcagccacttcaaaatcagacctctgtggcagcattttttccagaacacaaaagaaaccagggtggttatgaccgctactcaggag

SEQ ID NO: 70953 - DNA, 75 bp, Homo sapiens
cggcgacagctcctcgcgcagcagcacaaacgtgcagatatctgatagccctttccgttgcactcaagaggaagc

SEQ ID NO: 70954 - DNA, 83 bp, Homo sapiens
ttttaacctggaggatgcagtgaaagaaacttcctcagtaaagccttcagtatcagacacagcacagcagccatctgaagagc

SEQ ID NO: 70955 - DNA, 98 bp, Homo sapiens
cctcccgagtagctgggaccacagccgccatgtactcggagatccagagggagcgggcagacattgggggcctgatggcccggccagaatacagagag

SEQ ID NO: 70956 - DNA, 130 bp, Homo sapiens
ctttaatgttgccattccccgattccatatggcatgtccaacattcagggtgtctatagcccgattgacttaattcagtgcacaaatgagatgaatgtgaacatcccacagttggcagacagtttatttg

SEQ ID NO: 70957 - DNA, 83 bp, Homo sapiens
cgggtggagctgagccggagacagcggagctggagtttgttcagatcatcatcatcgtggtggtgatgatggtgatggtggtg

SEQ ID NO: 70958 - DNA, 99 bp, Homo sapiens
ctcacccctgttctcggaaaccatccacgaccctcctacaacacagcagtcccctcaggatgagcaggaaaagctcttggatgaagccatacaggctgt

SEQ ID NO: 70959 - DNA, 95 bp, Homo sapiens
gagtctgcgaaggccgggacccggttccccggcccacagtgggggtgtgcaaacccgagagaactggaaacctgtgaaggtcgaaacagctgcgt

SEQ ID NO: 70960 - DNA, 100 bp, Homo sapiens
cagagaaaacctgccaatcaagatgagtatgggtactaggttttgacaagcttgcatcatgcgtgagtataagctagtcgttcttggctcaggaggcgtt

SEQ ID NO: 70961 - DNA, 78 bp, Homo sapiens
tttttcttggatggttgggagcagatcgattttaccttggataccctgctttggaccaagatcactccatggatgaaa

SEQ ID NO: 70962 - DNA, 100 bp, Homo sapiens
aggatccgagcctgtggccgcccatcagggggaagaggcgtcctgttcttcctgggggactggcagtttgccaaggcacgagtaacaagctcacgcagtt

SEQ ID NO: 70963 - DNA, 100 bp, Homo sapiens
tgacaaggcactgctttttcatgacggtacatgtcccagagcaagcacacggaggcccgggagctcatgtactcgggagccctgctcttcttcagccatg

SEQ ID NO: 70964 - DNA, 50 bp, Homo sapiens
cgtgcagaagcgcatctactgcaacctgaggaggagaacccggccttctg

SEQ ID NO: 70965 - DNA, 74 bp, Homo sapiens
agggttggaggcaaagttccgaatagggatgaggcatacgtgattgtaaaccatggctgtgtggatacaagctc

SEQ ID NO: 70966 - DNA, 100 bp, Homo sapiens
tgtcttttatcagtcgagcttccaggactacaatgcctaccaaaaagataaatatcataaggacaagaacaccttgggccgcctttttgcctatcctgac

SEQ ID NO: 70967 - DNA, 90 bp, Homo sapiens
tggcgctgccgcgtgggtcagtggcggaccgagaaactgctggagaccattgaccagctgtacttggagtatgccaagcgggctgcaccc

SEQ ID NO: 70968 - DNA, 98 bp, Homo sapiens
atctatgctggttacacctgctcctttgctgtcagtgaagtggcatggaggagcaggacttggagcgaaggttcgagctgctgagccgcgagctgcgg

SEQ ID NO: 70969 - DNA, 100 bp, Homo sapiens
gacggtgccgagaagcagctgcgaggttgatgccggcccaggatggatcagacctgtgaactacccagaagaaattgtctgctgcccttttccaatccag

SEQ ID NO: 70970 - DNA, 73 bp, Homo sapiens
catgactatcctcctggtggttctgtataaatacaggtgctataaggaggataagatcaatgccctcattaaa

SEQ ID NO: 70971 - DNA, 80 bp, Homo sapiens
cattgatgaaggaaatgctaaagcgattccaaggaactgtggctgcaccatctgtcttcatcttcccgccatctgatgag

SEQ ID NO: 70972 - DNA, 75 bp, Homo sapiens
taactagacatatgcgtactcattcagactaatctggtagcttctggtgctaatgaatctgaaatctacatatgg

SEQ ID NO: 70973 - DNA, 100 bp, Homo sapiens
agcgggcccacatcttccggccaacttccattgaacttcccagcactcgaaagggaccgaaatggagagcaaaggctaggcagctggaagagaaagaccg

SEQ ID NO: 70974 - DNA, 100 bp, Homo sapiens
caaactacccattttcttttttggaactcatgagacgtgcacttacagagtgctacgatgaactggggaacagatatcagcttccagtgtattgcttggc

SEQ ID NO: 70975 - DNA, 75 bp, Homo sapiens
gcgccgctctagcggccgggactctgaactatggcgtgttatccaagataaattctgtgggattataaacatttc

SEQ ID NO: 70976 - DNA, 75 bp, Homo sapiens
ccagaagcagctgtccccacaaaaagtgacgctttacctgcgaccaggccagcaggagatggaaccttccagaag

SEQ ID NO: 70977 - DNA, 74 bp, Homo sapiens
tcatcactgtcatcttcttcaccgtctttgtgcagatcatgagcgtcttgttgttcatcgagcactcagtagag

SEQ ID NO: 70978 - DNA, 82 bp, Homo sapiens
accaactattcgcggagctggaatgactggcaacccagtctatccttcactggagtctgatgatgatgaccctgctttgaaa

SEQ ID NO: 70979 - DNA, 75 bp, Homo sapiens
agaggattgtgtctgcttggtgtggagccatgaaggctccccacaggtgcaggaagccgccgcccagccatggac

SEQ ID NO: 70980 - DNA, 82 bp, Homo sapiens
gactccggaccacaagcactgtagagcttcacttaaaggacaagaagcgatttgaaaaagctaaccaggattcaggtcccgg

SEQ ID NO: 70981 - DNA, 90 bp, Homo sapiens
ggagctgctgtctggaattggcaacatctctgagaggaggagatgttaaagtaacccatcttgcaggacgacattgaagattggtcttct

SEQ ID NO: 70982 - DNA, 76 bp, Homo sapiens
cgcattgcttaactggagcaactgagaaaatatttacaccagcagctccagttcataccaataaagaagatcctgc

SEQ ID NO: 70983 - DNA, 100 bp, Homo sapiens
tagtgcccgccccacccgcatgctctttgtcactccccggcggcagcacgaaagtaccatgggaattttcaggctactaataaaataccagctggacaac

SEQ ID NO: 70984 - DNA, 96 bp, Homo sapiens
cagagcattgatgtctccctgcctctcaataccttgggcccagtcatgaagatggaacctctgaataacctccagatgaccgtcgtgatgtgagta

SEQ ID NO: 70985 - DNA, 101 bp, Homo sapiens
aggacatggagctcgagaacatcgtggccaactcgctgctgctgaaagcgcgtcaaggtgctggagaatctggtaaaagcaccattgtgaagcagatgagg

SEQ ID NO: 70986 - DNA, 100 bp, Homo sapiens
gaacacgggacaccgcggaagccgggaaatggagcagcagccaagctggacagatgacctgcctctctgccacctctctggggttggctcagcctccaac

SEQ ID NO: 70987 - DNA, 100 bp, Homo sapiens
ggggctccaatggcgctttctacaaggaacttttcacacctgagtgcaaattcaaagaatcagtgtttgaaaattattatgtgacatattcatcaatgat

SEQ ID NO: 70988 - DNA, 100 bp, Homo sapiens
gttgtctcggcagcgcccgcggagacgtgaagaggaatgggccttgacgaaggagaagtcggtgaagcacatggatttgtgccttactgtggtggaccgg

SEQ ID NO: 70989 - DNA, 75 bp, Homo sapiens
ctggaactagcgtcaaccttgaaggcatcgtgtggcaggaaacagaagatgacatggctccttactatgaagcct

SEQ ID NO: 70990 - DNA, 98 bp, Homo sapiens
ctaatggtctttttgttcaagataaagtgattttttgcctttgttgattaactggacaaattcagcatccacccaacccaccagtatcaccaggaaaa

SEQ ID NO: 70991 - DNA, 100 bp, Homo sapiens
cgggcttttgctgatatgcatgcatgtaccgaccttctgaacaaggccaacacctatgcaggccccctcttctctcctggaggtcagccggccccttgtg

SEQ ID NO: 70992 - DNA, 95 bp, Homo sapiens
ccgcagagctaaatgggggcctctccagggagtgctctgttcacggctccatcgctgttaattgtctccagctttaagaccacgacatcgagagc

SEQ ID NO: 70993 - DNA, 100 bp, Homo sapiens
acgcaaacagtttgaagctgaggattttggaaatgatcttcattggttagcatgtgccttatatgtggcttgcagaaaatctgttccaactgtaagcaaa

SEQ ID NO: 70994 - DNA, 97 bp, Homo sapiens
gtctctgcctaagtaccgatgcagcagccccacagaccatggtcatgccaggtggccattaagcagatgaatcttcagcagcagcccaagaaagagc

SEQ ID NO: 70995 - DNA, 83 bp, Homo sapiens
cacacgggtgagaagcccttcgcctgcacctggccaggctgcggctggagcacatggattaattgatgtatgttgagtttatg

SEQ ID NO: 70996 - DNA, 140 bp, Homo sapiens
cttgggctgggacagtgaggaagtccggcagacttgtggctacacttctggccagtttgacctggttactccacaggatccgctgaacataggatgttgccacaaaatctacctcgtgtatttttctctttcactcatga

SEQ ID NO: 70997 - DNA, 98 bp, Homo sapiens
aaagagacctctacttagctcagcaattcttaccttgaaggatttttactgggagaggtaagacaagaggaaacgtttagcatcagtgactcacaaat

SEQ ID NO: 70998 - DNA, 89 bp, Homo sapiens
gtgcggcccagcgagttggtcggtcccggggtcacccgctacgggaagcaggcctcgccacaggtatgtcttactgaaagaaagaaaca

SEQ ID NO: 70999 - DNA, 100 bp, Homo sapiens
ctgctgtgggcgctgctggcgctctggctgtgctgcgcgacccccgcgcatgttacagaatgtctgaaggggacagtgtgggagaatccgtccatgggaa

SEQ ID NO: 71000 - DNA, 100 bp, Homo sapiens
aaccaaaccttcaacaacattagggtaagctgctgtactgccatcctcctcctggaagagatcctgtaacttttcagcatcaacaccagcgactcctaga

SEQ ID NO: 71001 - DNA, 100 bp, Homo sapiens
tgagatggcccagcacggccagaggaggaagagcaagcaggccctgagggactataagaaggttcagatccagctggagaatctggagagcagtgtgcgg

SEQ ID NO: 71002 - DNA, 83 bp, Homo sapiens
ggccacaccatttgccgtggccaggctagagtgcagagcagagcgggcggaggaccccgggcgcgggcgcggacggcacgcgg

SEQ ID NO: 71003 - DNA, 75 bp, Homo sapiens
ccataattccagtacagcctatcaaactgtcatcatcatctgcttggtggttctggatgccctcctggtgcttgc

SEQ ID NO: 71004 - DNA, 83 bp, Homo sapiens
gcagccgtagacaccagctccgaaatcaccaccaagcaattctgtggtgttcttggtcacacatttatggagtttctgaaggg

SEQ ID NO: 71005 - DNA, 84 bp, Homo sapiens
agacgatggcggagggagataatcgcagcaccaacctgctgagactaatagacaagtcacgagttacctgtgtcaaatgggttc

SEQ ID NO: 71006 - DNA, 100 bp, Homo sapiens
ctattttaaagagccaagcctcagagagtagtggctctttatgactacacagcgaatcgatcagatgaactaaccatccatcgcggagacattatccgag

SEQ ID NO: 71007 - DNA, 74 bp, Homo sapiens
gcatcgtgcgtgccaagcggcgagttcctgtgccttaagaacattagaaccttcctgtccacctgctgtgagaa

SEQ ID NO: 71008 - DNA, 100 bp, Homo sapiens
gaaccatcaaacaaggctgcagaggtcttctgaccctgcgccagattgttttgagcaaagttgatcagtctcttcataccaacacatcgctggatgctgc

SEQ ID NO: 71009 - DNA, 100 bp, Homo sapiens
gggcgcgggcgtgacggcgctcagccatcccctgctctacgtgaagctgctcatccaggtggttctgatggctttgtaaatatttgggatccatttaaca

SEQ ID NO: 71010 - DNA, 100 bp, Homo sapiens
gagaggagaacgaacatcttctggacctttgtccagtctcactttatctctgcactgacagttgtgttcgtaaactccaaatccctgtcttcgcttaaga

SEQ ID NO: 71011 - DNA, 100 bp, Homo sapiens
cagccgatccagcctgcggagcctgtggggcagatcctgagactccagcaggatgtcttatcaacagcagcagtgcaagcagccctgccagccacctcct

SEQ ID NO: 71012 - DNA, 75 bp, Homo sapiens
aagataattactcaaaatatgcagggaagtggtggctggacctcgtggaagcccctctggctgtgtggctatgga

SEQ ID NO: 71013 - DNA, 76 bp, Homo sapiens
tgaggatctgcccgcttcccaggaaaggtccgaggctgcagaagatgtcaatgttactttcgaagatcaacaaaag

SEQ ID NO: 71014 - DNA, 107 bp, Homo sapiens
tcctgcgcggctgcggggcttccctgcggctggagagtcattcaggagagcaggaaagaaaaggccatccctgtggatgtcgcgctgccacagaagtccagcgaaaa

SEQ ID NO: 71015 - DNA, 100 bp, Homo sapiens
atgtcacagtcatctggatcaggagatgggaatgatgatgaggctactacctctaaagacggtgacacccttggtgcaggaggtgcaccagaacttctca

SEQ ID NO: 71016 - DNA, 99 bp, Homo sapiens
ctcgactaatggcctatacatcggagctacagaaattagaagaacagattgcaaatcagactggaagatgataacagcccgccgtcagtggaaacatat

SEQ ID NO: 71017 - DNA, 80 bp, Homo sapiens
cggctcacctggcggtgcccgaggagtagtcgctggagtccgcgcctccctggtggagacctttggcgacttggcctttg

SEQ ID NO: 71018 - DNA, 100 bp, Homo sapiens
ctagaactcctggcctcaagcgattttcctgtctcagcctacaaagttgctggaactctagaaattttgggaactggccaaacaagtgagtgaatttatg

SEQ ID NO: 71019 - DNA, 75 bp, Homo sapiens
cagaaaccgccccagcgatggaagaggatcaggagctggagaggcttgatagttctgaaatggatcacagtgaaa

SEQ ID NO: 71020 - DNA, 100 bp, Homo sapiens
cgaccaagatggagactgccgagcagccttgagccggtgacatgtacagccatgatgggaatactgatgagccagaatgggtaaagacagagcgagagca

SEQ ID NO: 71021 - DNA, 100 bp, Homo sapiens
tgggaggccggccggtgccagcacctttcggcttctgagacggcggcagcagcggcattcaggaagcctggaagcacgcaatccagaaggccaagcacat

SEQ ID NO: 71022 - DNA, 98 bp, Homo sapiens
gaagagaaactgcaccttatcacccggaacctgcagggttttctagtaccttcacaggagaaaggagacccaaagatgaccaagtgtttgaagccgtg

SEQ ID NO: 71023 - DNA, 75 bp, Homo sapiens
caagcaggtgaccatggcagaactgaacgccatcattggggagtaaacatggaagtactaacttcattccagaac

SEQ ID NO: 71024 - DNA, 98 bp, Homo sapiens
aagaggtgccatgaatttgttactttttcttgtccgggtgcggataagggacccgacactgataaataggaaggttgttgattactcacagtttcagg

SEQ ID NO: 71025 - DNA, 100 bp, Homo sapiens
ctgtacaccgagtgcagccactcggccctgcgccgcgacaagtacgtggccgagttcctcgagtgggccttcctctccggttctgggtgaacatcctgaa

SEQ ID NO: 71026 - DNA, 100 bp, Homo sapiens
gagctctgtgcacctccactgaaacgcaaggagcagacagaacctacaccatccgtgagcggggatctgatgagcttctttcttctggcatcattaacgg

SEQ ID NO: 71027 - DNA, 97 bp, Homo sapiens
aataggatttaaccgctctctgcctcccaggcacagttggcgggcagctcccaggtctccatgagtacggcgccgtcgggggctccacacacacggc

SEQ ID NO: 71028 - DNA, 98 bp, Homo sapiens
aggagtcgaggttcacattgttgctgatgccacctcatcaagaagcatgatggacaggatgtttgccctcgaggtacatggactatatcgcacaacag

SEQ ID NO: 71029 - DNA, 90 bp, Homo sapiens
ggtggacgcccgggccgggctgcgcccgcttcttgcagtattagaaaggaagatatccacacgacaaagtagagaggagctgataagaag

SEQ ID NO: 71030 - DNA, 75 bp, Homo sapiens
ctgctaccccactcctgggccgtccctgaaggaattactctcacttccaccacccgatgtatggaaactgctata

SEQ ID NO: 71031 - DNA, 74 bp, Homo sapiens
cacaggatctgccccagagaaagtcctcgctcgtcaccagcaagcttgcgggagatggggttttgccatgttgc

SEQ ID NO: 71032 - DNA, 75 bp, Homo sapiens
tggaccaaggtgcacgagctcaaggagcacaacgggcaggtgacaggcatctatcctttctctggtgacaaaaat

SEQ ID NO: 71033 - DNA, 100 bp, Homo sapiens
tggaagcttaacttcttatccatcccatctcttggacagatgatgccagttaattactttgaattgtggcaaaggagcagagaactttgacaagttcttc

SEQ ID NO: 71034 - DNA, 100 bp, Homo sapiens
gtgcctgctatcgccgagttctacaacacgtacaagccagctgccatgttgtgagcacataccacatagctccatggagatgcccatgtgactgtgatga

SEQ ID NO: 71035 - DNA, 87 bp, Homo sapiens
ggttcggacgtgggtcgaggctgtagcaggactccaggtgacttaagagattaaaattaatttggttgctgttggttctgaacaaat

SEQ ID NO: 71036 - DNA, 96 bp, Homo sapiens
tttggatctctgctcctatactttccatggtgccaccgaacatcgcagaactgaagaatttggaggtgctcaacttttttaataaccaaatcgagg

SEQ ID NO: 71037 - DNA, 100 bp, Homo sapiens
ctgcccgcgggcccagcctgacgccatctcacgcctgctggaggccgacggtcgcaaggtcctacggtcaagcatccgggagtttctatgcagcgaagcc

SEQ ID NO: 71038 - DNA, 101 bp, Homo sapiens
catggtatgacactgaaatctgtaacggttccaagaatatttgtcaatggtacttttattggaggtgcaactgacactcataggcttcacaaagaaggaaa

SEQ ID NO: 71039 - DNA, 98 bp, Homo sapiens
gcgctttttggaattcagttatcaagctttagagcctggctactcacagttgaagcctgattgcagtgatcactctgagatctatggtacagttcatt

SEQ ID NO: 71040 - DNA, 100 bp, Homo sapiens
cctgcaatttgaagatacatgagacagcagccaaacccccaggtggtgagcttcattttctccaaattggaggaacctgtgatgatattgatgaagctga

SEQ ID NO: 71041 - DNA, 75 bp, Homo sapiens
gatagcacagtcagtcaaccaaacctcaagtatacaattaaatggaatgtatcctgtcaggtataatgtcagtga

SEQ ID NO: 71042 - DNA, 90 bp, Homo sapiens
gtgtattcgcaactctcctcagttcagatttgactggtttcttaagtccagaactgcaatggtgatgatgaacagtctacacagatggct

SEQ ID NO: 71043 - DNA, 100 bp, Homo sapiens
cctgaggtcatcgcctgtgatgagaacccagatgccacctatgattacagagtgtaccttgaaagacttttaacatacgcagagatagatatctgtccgg

SEQ ID NO: 71044 - DNA, 100 bp, Homo sapiens
cacccaccgccgggaggaggaggaggagccgagaggagctgagcgagcgcggaaggcttgcattgatgacaatgttgatatggtgaagtttctggtagaa

SEQ ID NO: 71045 - DNA, 100 bp, Homo sapiens
gtcggtggccggcagtcatctcgcggccgttcagttttcggctttgtgagaaaccttaccatcaaacacgatggccagcaacgttaccaacaagacagat

SEQ ID NO: 71046 - DNA, 90 bp, Homo sapiens
ccttcacccatctgaagggaggaaatagtggcaggtgacagtctgcatgtgcagttttcaggtttaccaaagatgcaggtcattaggaac

SEQ ID NO: 71047 - DNA, 83 bp, Homo sapiens
tattaactgcctttcttctgtgggctgtgattttcagaggggaatgctaagagatttggtgcttccagatgtgagttatcagg

SEQ ID NO: 71048 - DNA, 82 bp, Homo sapiens
tgggaacattcctcataaagcgagtcgtcaaggagttgcagacaatgcagatcttcgtgaagactctgactggtaagaccat

SEQ ID NO: 71049 - DNA, 101 bp, Homo sapiens
ggaggacttgcagaagtaccacaacagggacacctggttccagctgcagcacgtggacgctgactcggaagtgcagagtctcactgtcgcccaggctgcag

SEQ ID NO: 71050 - DNA, 100 bp, Homo sapiens
gagagtcttctctacagaattgcctcatttttgcaactgtgagtatgagagaatgggacgtggtcctggccccttacaagagagatctctctttgagaaa

SEQ ID NO: 71051 - DNA, 75 bp, Homo sapiens
gcaattctcctgccccagtctcctgagcagctggggttacagactcctgaggaagaagagattttaaacaaaaaa

SEQ ID NO: 71052 - DNA, 90 bp, Homo sapiens
cgaaagggaagaaggcgcggtggcaggagctgacagagtgatgggaaacgcgtgagccaggccgagaggatatgaacgagactgccaaac

SEQ ID NO: 71053 - DNA, 74 bp, Homo sapiens
ggcgggcatcttcttcgtgaggctgctcttcgagcgtctcagaccagtatccttcaggggttctcttactctga

SEQ ID NO: 71054 - DNA, 100 bp, Homo sapiens
gagaaacttgaacgcaaagagatccagcccccttataagccaaaagctagatcgagatggtgatcatggagcgtagcaagctctcagagctggccgccag

SEQ ID NO: 71055 - DNA, 83 bp, Homo sapiens
tcaatcactgaagaaatcctggaactgctgaatcagcgaggccttcgagatccagggatgttgacgatgagtatgaggacgag

SEQ ID NO: 71056 - DNA, 75 bp, Homo sapiens
gctccacgccctgctgggtcctacctgtcagagccccaagtaagagatgctaaaaaccttgtacctatggacccc

SEQ ID NO: 71057 - DNA, 75 bp, Homo sapiens
caagcactggaaccgcttccgagacggttcccttctggagaagagtcaccgggtttggttctgtttcccctttct

SEQ ID NO: 71058 - DNA, 75 bp, Homo sapiens
cgaacctcacctttccagggcgcaagtgtctttggtgcaacactaacaaggcttgtctggactacccagttacaa

SEQ ID NO: 71059 - DNA, 80 bp, Homo sapiens
ccatctgggcttggcttccggctccccccatctggctggaacacacatcagtcacgagctgacatggatgtgtgccttac

SEQ ID NO: 71060 - DNA, 75 bp, Homo sapiens
ctcatggcgttggaataccggctctcagcggctctgcaagctttcttcctggtggcagatgacatcatggattca

SEQ ID NO: 71061 - DNA, 134 bp, Homo sapiens
gaacctttgctcatgagcatatctaccaacttaaaaaacagttttgcctcagcccttcgtactgcttttggcttctggatgccctcctccagtacacatcgtatggggtgacaccgcctagcctcagtcactct

SEQ ID NO: 71062 - DNA, 111 bp, Homo sapiens
tgggaatcccgctcggagtttttccaggcccggccgggctgctccgggaaaggccctggtggacgacccaccggagcccgtgtacgcgaacatagagaggcagccccgggc

SEQ ID NO: 71063 - DNA, 50 bp, Homo sapiens
cccaggcagaccttgcagtcaaaggcaccggcagaagctggaggaccaga

SEQ ID NO: 71064 - DNA, 99 bp, Homo sapiens
tcaggaggaagcgatggcttcagacagcatatttgagtcatttccttcgtacccacagtgcttcatgagaggttgcaatgaatgtgtatgagttatcat

SEQ ID NO: 71065 - DNA, 100 bp, Homo sapiens
tgtgcccgggcctgcaccatgagcgtcccggccttcatcgacatcagtgaagaagatcagaagatcaaattcccaggggcttccctaccattgacatggg

SEQ ID NO: 71066 - DNA, 51 bp, Homo sapiens
gaccgacctcaccctgtcgcggaatttacatagtacatgacgaagttaagg

SEQ ID NO: 71067 - DNA, 100 bp, Homo sapiens
tcttccctttggcttgccagaccttccagaagcacgacttttgttacagccacctcgtacatctcatcctgtagtgaagttttcctgtacagactgtgaa

SEQ ID NO: 71068 - DNA, 74 bp, Homo sapiens
ctaaaataatgatgtccgagagcatcagaaaagaacctgctctggtcagaagagaagctgaatttggacgacag

SEQ ID NO: 71069 - DNA, 50 bp, Homo sapiens
tataaacacgaccctgccttgactttagttgctggtcttacatcaaataa

SEQ ID NO: 71070 - DNA, 82 bp, Homo sapiens
cgatcgccgcggggcagttcgggccggctgtcctggcgcgcatggcggacaccgacctgttcatggaatgtgaggaggagga

SEQ ID NO: 71071 - DNA, 75 bp, Homo sapiens
gtcgtcttccacttgcacgaaagctttcctaggccaaaaagagccaaccaatttgttggaaaatcagtcaaaatc

SEQ ID NO: 71072 - DNA, 100 bp, Homo sapiens
tcctccctttcaatacattgaggtcaatggcatgaagctgacggagccccaccaagtctatgtgcaaatcttgcaggtgggctccttcttcatgatcaac

SEQ ID NO: 71073 - DNA, 98 bp, Homo sapiens
cgatggcagcggctgcgccgaggcgcccgactcagtgggtgtataacattctcgacaagaaggctgaagcggaccggattgttttcgagaacccagat

SEQ ID NO: 71074 - DNA, 74 bp, Homo sapiens
cgacacccccgggatcctgtctggagagaagcagcggatcagcagaggaggcaagtgaggcctatctggttggc

SEQ ID NO: 71075 - DNA, 100 bp, Homo sapiens
tttaccttggataccctgctttgggacaacaccatcgacttcctggagtacgtggcagctctgaatctcgtgctgaggggcaccctggagcacaagctga

SEQ ID NO: 71076 - DNA, 100 bp, Homo sapiens
atcttctgtcctgaatacagtatctccttaagtagcaggacccagtgctccataaaggataatagtttccagtacactatccctcatgatgactccttaa

SEQ ID NO: 71077 - DNA, 90 bp, Homo sapiens
agcggggcaggcctctaattcaccgcaggatttccgaatgcctcggctggggtggagcgcctcttgctggggaacaaatgtgacatggag

SEQ ID NO: 71078 - DNA, 98 bp, Homo sapiens
gccgcccccagctcccccgcctcggggagggcaccagtggaaggactaaaagtggtggagattgagaaatgcaagagtgacattaagaagatgaggga

SEQ ID NO: 71079 - DNA, 99 bp, Homo sapiens
tgcctcagccccctgagtagctgggattacaggcacgcgccaccactcccaggtttttctattgggaaagctactgatcggatggatgctttcaggaaa

SEQ ID NO: 71080 - DNA, 73 bp, Homo sapiens
ggcagtgatcaacatggatctcagaacaaatcacctgctgcagtaacagaaccagagacaaataaatttgata

SEQ ID NO: 71081 - DNA, 98 bp, Homo sapiens
tcttgcggtcggctgtggtcttccagcacacagagtctctggaatacgtgttgtgtgtccagaattatatccagatcgagagacagaagattctgaaa

SEQ ID NO: 71082 - DNA, 75 bp, Homo sapiens
aaacttcttaacccctagaccggtttttagtccattgactatgcagcctaatgatggaggagatgtataagaaag

SEQ ID NO: 71083 - DNA, 100 bp, Homo sapiens
ctttggggaaatgcgtgcactgcgtccctctagaggtttggctctttaaccatggatggtggccttcgcaacgttgactgtctttagctttctaatagaa

SEQ ID NO: 71084 - DNA, 80 bp, Homo sapiens
agctgccagaagacgagccggacgcccaaggctacgagaggacgattgcacggagctggagtttgttcagatcatcatca

SEQ ID NO: 71085 - DNA, 75 bp, Homo sapiens
atacaaggctacacagagacagatcaaagcagctcatggaatcttgctctcttgctcagactggagtgcagtggc

SEQ ID NO: 71086 - DNA, 100 bp, Homo sapiens
ggtatatcaagccaaactttgtgattcaggagaactggtcgccatcaagaaagtattgcaggacaagagatttaaggtggaagcactgcaggctcagctg

SEQ ID NO: 71087 - DNA, 98 bp, Homo sapiens
agctaagcaattaactcagttagaaagaacacgtcagcgaaacccatctgatcgacatgttatttgggaccttcgaacttttcatcttttgcatactg

SEQ ID NO: 71088 - DNA, 49 bp, Homo sapiens
ggtgggagtgacccgattttccagtccgatacatacttctgcatgtcta

SEQ ID NO: 71089 - DNA, 73 bp, Homo sapiens
tccctttggatgtagcaaggaagaaattgttcagttcttctcaggtgaccgcttcaggtctgtcatagatgat

SEQ ID NO: 71090 - DNA, 50 bp, Homo sapiens
aagaaggttgggttcagaagaggggtagcctttccagtaaatatatgact

SEQ ID NO: 71091 - DNA, 96 bp, Homo sapiens
caaacactccagccacgaagtcaaggctctgggggccatgtggaaactacataaggttagcattgaagaacgtctgggagcaatggatatagacac

SEQ ID NO: 71092 - DNA, 100 bp, Homo sapiens
cgggaacagccatgcaaaggcaggggaggaagccacctcgagattggccttaagagaaggacggagccacatactgctgacggcccagaactggcagaga

SEQ ID NO: 71093 - DNA, 82 bp, Homo sapiens
ccaggagcctcaaggcggcccggcgggcgactggacggccggacagagaggtggagaagagcgagtacttgagaaagaagag

SEQ ID NO: 71094 - DNA, 74 bp, Homo sapiens
ggatcctacgtgcatgaagatggacgaggtcctgtacagcatcgccgagaagactagacgcttgaagcaaagct

SEQ ID NO: 71095 - DNA, 82 bp, Homo sapiens
ggcagcggagccctgggccatcgccacataaagaagatccctaatagtcatttctcaacaattatatagtcaactgatgtaa

SEQ ID NO: 71096 - DNA, 101 bp, Homo sapiens
cgggagcaggccggcctctgcgagggcggcgactggcggcgcgatggacctgaccgggctcctgctggacgaagaaggcaccttctccctcgccggcttcc

SEQ ID NO: 71097 - DNA, 75 bp, Homo sapiens
ttacaagaatttcttctatcttattaaatgggatgaacttcaccaggagactaaagtccatcaaaaacatccaga

SEQ ID NO: 71098 - DNA, 78 bp, Homo sapiens
gcgttccagacgattgcacggaatgcacttaagcaggaggcaagatccaaactgagatggagactgttccagaagcag

SEQ ID NO: 71099 - DNA, 51 bp, Homo sapiens
aagatggctactctggagttgagtagccacgatggaggtgatgaacctgat

SEQ ID NO: 71100 - DNA, 80 bp, Homo sapiens
gatggcgcctgtgggcacagacaaggagctcagtgacctcctggacttcagcatgcccccgcctctcctggactcttttc

SEQ ID NO: 71101 - DNA, 99 bp, Homo sapiens
gaaatgcatttcggcaaatagtaactgcagtatgcgtgacgacagcatgtacgatccctgaatgggcccgtgggcatatttagtcattcatttttgatc

SEQ ID NO: 71102 - DNA, 82 bp, Homo sapiens
acttctagacgacaaaatgcaaaaaaggaggccaaagactttaatatgaacatcgacatttctgccttctcctgcattgctg

SEQ ID NO: 71103 - DNA, 83 bp, Homo sapiens
aacggcacctgggagaagagccacgagcatgcgggacacgactcctcagcattccaaaatatgcccggtgctatccgcccagc

SEQ ID NO: 71104 - DNA, 97 bp, Homo sapiens
aagaaccctggctggggaaaagggaagtgaaaagagatctgttttcaggcagcaattccatttccgtgagggcgtttctagatgaagatgacatgag

SEQ ID NO: 71105 - DNA, 100 bp, Homo sapiens
cagagcctcagtttgtgcaggacaccgacatggaacagggactcactgggggcacaaaacagcgttctcacggctcaccagccccaagcaccagctccac

SEQ ID NO: 71106 - DNA, 98 bp, Homo sapiens
atgcaagtgatgatggaatcttggccaaaatcgtggctcttgcagccaatgccggaacaggatttgctgttgctgagcctcaaatcgcaatgttttgt

SEQ ID NO: 71107 - DNA, 100 bp, Homo sapiens
gggagataatcgcagcaccaacctgctggtaaatacggcatcatctgcatggaggatttgattcatgagatctatactgttggaaaacgcttcaaagagg

SEQ ID NO: 71108 - DNA, 51 bp, Homo sapiens
accgggaaaagtccaagcatagcaacagtattggtaaaggttttcaaggtg

SEQ ID NO: 71109 - DNA, 76 bp, Homo sapiens
ttttaaacttctgcaagcatcatttaagcgaatgaacgttgataagcatgtcaatccaaagaagcaaacaataggt

SEQ ID NO: 71110 - DNA, 80 bp, Homo sapiens
ctcctgcgacgacgtgatcaccggcagctgtcggaaaaggtaacagaagatggaactcgaaatcccaatgaaaaacctac

SEQ ID NO: 71111 - DNA, 75 bp, Homo sapiens
ctattgggactcttttttcaaatgcaattttccaacttattccagagggtgatcagcccatgacctaaacctcca

SEQ ID NO: 71112 - DNA, 75 bp, Homo sapiens
gagaccgcaattcgagaatcaaagggccgggagcgatgatttatcacacgtcctgatgtcaagcaaagcaagatg

SEQ ID NO: 71113 - DNA, 100 bp, Homo sapiens
ggaatgacagcggcgaggagaacgtcccgctggatctgacccgagtttctctgcaggtggatattgttcccagccagggggagatcagcgttggagagtc

SEQ ID NO: 71114 - DNA, 95 bp, Homo sapiens
ctttggtctgcctgccaatatcgctcgctcatctcagcgcatgatcagttctcagatcctggccaatttggagcaaggcttagcagaagacggcg

SEQ ID NO: 71115 - DNA, 101 bp, Homo sapiens
ccgctgcctggccgagaacagcatgggtgtctcctccaccaaggctgagctccgtgtggactgtgctggtacagggctgcctcttggacccttcccagcgg

SEQ ID NO: 71116 - DNA, 74 bp, Homo sapiens
tgcagctgggaacaactttcttcaaactgccgaagaacagttgagaattgttgaagaacaaagaaagattcatg

SEQ ID NO: 71117 - DNA, 96 bp, Homo sapiens
tgggagaacctgagggaacagccaccgatcgctgccacctccatgtgtacggcagaacagttccgctgtcactcaggccgctgtgtccgcctgtcc

SEQ ID NO: 71118 - DNA, 100 bp, Homo sapiens
aatcttcttagatacttgggttcagccagcaattgcccaaacccaaagtgtggagagtcaaggaaacttttcttttgagctactgacagcttaactcctg

SEQ ID NO: 71119 - DNA, 74 bp, Homo sapiens
cttattcctgtccggagacagcctaaggggttcatgcttgaaccagatccggaacatagacctgatatatttca

SEQ ID NO: 71120 - DNA, 80 bp, Homo sapiens
gcgaagacggtaacccgtgtgactttgactggaaactggcgatggaatatgagaggagccctctggaaagaaaaggacag

SEQ ID NO: 71121 - DNA, 96 bp, Homo sapiens
ggctgacctcgccttccctccgcccacgacatccacctcctccctgaagatgcagctccttcttctccgccttcctgaacctcctggtcagcgcct

SEQ ID NO: 71122 - DNA, 83 bp, Homo sapiens
ccggaagcggagagcggctgatcgcagtccggagtaatagctcttcaagtctgcaataaaaaatggcctccaacaaaactaca

SEQ ID NO: 71123 - DNA, 85 bp, Homo sapiens
agagctaattacaactttcggggcatgtacaatcagagcatgttggcagataaattgaacatgactccagaagaagctgaaaggt

SEQ ID NO: 71124 - DNA, 51 bp, Homo sapiens
aaacaaattcatcccagaaatctaagagacccaacatgagtgaagtttcct

SEQ ID NO: 71125 - DNA, 100 bp, Homo sapiens
taatgtaaattgccgcgatacccaaggcagacattcaacacctttacatttagcagcttttagtttggatgctgaacagcctgattatgatttggattct

SEQ ID NO: 71126 - DNA, 89 bp, Homo sapiens
cccgctctgctgtgggcgctgctggcgctctggctgtgctgcgcgacccccgcgcatggtagacgcaccctctgaagatggtgactccc

SEQ ID NO: 71127 - DNA, 101 bp, Homo sapiens
gtggaggcagcagactcggcacacatcgtcgcccatgctgctgtcgcttcagggagacacgagcaccatgctggtcctgccgctgctgtgttgagagagct

SEQ ID NO: 71128 - DNA, 75 bp, Homo sapiens
ttcggggacctgaagaagatgaacaagcgccagactttatattcagagcaccaatcaaattaagcaagcctgggg

SEQ ID NO: 71129 - DNA, 98 bp, Homo sapiens
ctcagaagagtgagagagagctattagagattgtgaagaagaatttcgatctccgccctggggtcattgtcaggccaggagggccgagggccacacgg

SEQ ID NO: 71130 - DNA, 98 bp, Homo sapiens
gagcgctgggttggacctttacctgtggaggcaacactggccaagaagaggaaagttttggtatgaaccatgatggaattggaaattcttgtgggacg

SEQ ID NO: 71131 - DNA, 82 bp, Homo sapiens
gcaagaggaagctgcagcccacccgggcagccctcaccctggaatccagatcttacataagatggaagtctctcacactaga

SEQ ID NO: 71132 - DNA, 51 bp, Homo sapiens
tggcgaggcctttcaccaagtccatggcctggaagaaacgctggtttatcc

SEQ ID NO: 71133 - DNA, 83 bp, Homo sapiens
cgcggagcgccccttcgcgtcccctgcaccatgagctggggcaccgagctctggctgtttgcagacaaggtcccaaagacagc

SEQ ID NO: 71134 - DNA, 92 bp, Homo sapiens
cctactggcaccacatcactggttcccagaacatcgccgaagcctccagctatgctggtttagtcccaggaagcaccactctgcacagtgct

SEQ ID NO: 71135 - DNA, 82 bp, Homo sapiens
ggtgcagaggatcctggaggcctgggaagccaacgaccacacgcagtgatcgggctgctggacgtattcactcctgatgaga

SEQ ID NO: 71136 - DNA, 99 bp, Homo sapiens
gacgattcagagactgaaaaacctgaggctgatgacccaaagggcggcgactggcggcgcgatggacctgaccgggctcctgctggacgaagaaggcac

SEQ ID NO: 71137 - DNA, 100 bp, Homo sapiens
cagaacttggaatactctactggacaaacatttcctccaagataacggcaaaagcttctatcatttttgttactcttcagtacaatgtcaccctcccagc

SEQ ID NO: 71138 - DNA, 132 bp, Homo sapiens
gggatggaagtaaaagacaatgctggcaactgggctctaatctcctaaagatagacagctcaaatgaattgatggaccagcttttgggaaatatgattgaaatgtgggttgatcgaatggacaacattaccc

SEQ ID NO: 71139 - DNA, 80 bp, Homo sapiens
gtggaagatttaacgaatggggttgtgatggcccaggttcttcaaaagatgagttaaagttcctcgtaattttcgcttgt

SEQ ID NO: 71140 - DNA, 82 bp, Homo sapiens
gggaggtgaatttccatgtcaacatagtcctggtgtggacactgccagcggctgcagccgacttggaatgacctgggagaca

SEQ ID NO: 71141 - DNA, 100 bp, Homo sapiens
cggcgttgaattccgggaagtgggagcttcaggctcgctccgtgcggggccaattcctgtccccccagcagcatggcatcgtgtgctgaaccctctgagc

SEQ ID NO: 71142 - DNA, 89 bp, Homo sapiens
gcagcccgcctggccggagctgtgggagtcctcagccccaagacccagcaggcgtctgagggtctctagcatctccagcaggactccag

SEQ ID NO: 71143 - DNA, 83 bp, Homo sapiens
cagaagcagtacgagaactggcagccaaggagaccttttaatcaaagtgaagtttggggaaagcattgaggacttgcacacct

SEQ ID NO: 71144 - DNA, 98 bp, Homo sapiens
aagggaaacaactcctgagtatgttcacgatcggggtcaggctgaccggttccctgatgtgttacctgcttctgctactgatccaaactgcagaactt

SEQ ID NO: 71145 - DNA, 90 bp, Homo sapiens
gcttcgcggagacggcggaagcggagagcaacagcgcgccgtcaggccttgaaaagaggatagaccaggctgtggaggagtggaatattg

SEQ ID NO: 71146 - DNA, 51 bp, Homo sapiens
cagcctcctgcgtagctgggattacaggcaggagctaacatgattgtgtct

SEQ ID NO: 71147 - DNA, 82 bp, Homo sapiens
ccaatgagtcctttttcaacttcttcaatccattgaaaggtgtgatgaatgcagactctgctaccattttggctgtttggat

SEQ ID NO: 71148 - DNA, 100 bp, Homo sapiens
ccatcgccgatgaccgcggggaggaggatggagatgctctgtgccggcagggtccctgcgctgctgctctgcctggtcagtactgctccccagcctaaac

SEQ ID NO: 71149 - DNA, 100 bp, Homo sapiens
aattgaagccaacggagaactcaaggtcttcatagaccagaaccttagtcccgggaaagagtccctggagaagtgggagcgtctgaccgtggcggatgcg

SEQ ID NO: 71150 - DNA, 75 bp, Homo sapiens
cgggtccgtgcgcccagcgtcccagggcccaggccgagcagtcctgccagcgactcccccacaacttgtcagccc

SEQ ID NO: 71151 - DNA, 97 bp, Homo sapiens
ttaattcccctgaccgtgcctgcaggtcgccccacggctgaattctcggtgataaaggcgcccactggaccctcccaacgcccaatgctttgctttt

SEQ ID NO: 71152 - DNA, 96 bp, Homo sapiens
gaaaagatccctggaatatgaagggacacagtacggtagtcaaacccccagtgaatactacttcagcgtggacaatttagagcgagacttcttcct

SEQ ID NO: 71153 - DNA, 82 bp, Homo sapiens
ggacccaccgctgccctcagctccgagtccagggcgagccagctgaggtgggtgtcctggttggcaaagaccggtcaagttt

SEQ ID NO: 71154 - DNA, 75 bp, Homo sapiens
ctgggatcggcccaaggccagttctccgcaggatgatggagatagccaaagccatgaggctgaagatctccaaaa

SEQ ID NO: 71155 - DNA, 98 bp, Homo sapiens
tgcacctcgctgtccaagcaggctcagaaattattgtccgcaatttggttttcttacggaaactggaaaaaccagagccagcactattttttctaccg

SEQ ID NO: 71156 - DNA, 83 bp, Homo sapiens
accaagtatggcaacatgacagaggaccatgtgatgcacctgctccagggtgtgggccgaagatatgctcatgtggtgttgag

SEQ ID NO: 71157 - DNA, 75 bp, Homo sapiens
aggtgattttcaaagccaagtcaaaatattctccagaattactcaaataccggatggatagaatgacagaagatg

SEQ ID NO: 71158 - DNA, 76 bp, Homo sapiens
gacttttcttatgctgggatgtgccttagaggattatgggaagttcatgatttgttaaaagactatgacttaaaat

SEQ ID NO: 71159 - DNA, 75 bp, Homo sapiens
aggaggaggggctccggctggtctgtggtgaggtgaagatttggttccagaaccggcggatgaaatggaaacgca

SEQ ID NO: 71160 - DNA, 83 bp, Homo sapiens
cccagggaatgccacagcatcctccagcacctcagggatacctcagacaatggcagcttttggattgaaatatttgctgaatg

SEQ ID NO: 71161 - DNA, 100 bp, Homo sapiens
ccactctttgtgccgcagcttcgcaggtacatgtactggacagactggggtgagacgccccggattgagcgggcagggatggatggcagcacccggaaga

SEQ ID NO: 71162 - DNA, 75 bp, Homo sapiens
ccttcgcctggcccaccactcccagaggatcatccagcagctcgtcaacggcatcatcacgcccgccaccatccc

SEQ ID NO: 71163 - DNA, 76 bp, Homo sapiens
cctcttaggcgccgggaccctcaggctcagatcagtggccgaggccccagaggtctacgaccccttccgctttgac

SEQ ID NO: 71164 - DNA, 75 bp, Homo sapiens
ccctggatcaccgacagcacagacagaatccctgctaccaaccttagctggatctccaaaatacaagtgaatcac

SEQ ID NO: 71165 - DNA, 131 bp, Homo sapiens
ctgatcccggagacctttggagttaagaggcggcggaagcgagggcctgtggagtcggatcctcttcggggtgagccagccaagaagtatgatgcgtttttggcctcagagtctctgatcaagcagattcc

SEQ ID NO: 71166 - DNA, 97 bp, Homo sapiens
tacgaggtgctggaccactgctcttccatcctcaacaagtacgacgggcggcgactggcggcgcgatggacctgaccgggctcctgctggacgaaga

SEQ ID NO: 71167 - DNA, 75 bp, Homo sapiens
actttgtagtaagcttcgaaatttgctacatgacaatgagctgtcagtaaaccaagaggagttcattgctattat

SEQ ID NO: 71168 - DNA, 98 bp, Homo sapiens
ctactgacgaagcttggaagttgcagaagatgtctgtgatcatgatctgcatgtttctggtggcatggtccccttattccatcgtgtgcttatgggct

SEQ ID NO: 71169 - DNA, 75 bp, Homo sapiens
gcgcaacttcctggagggggactggaagaccatctcggatcagtttgacaacttagaaaaacacacacagtgggg

SEQ ID NO: 71170 - DNA, 89 bp, Homo sapiens
gagcgaggaggatggcggagtcggggctcctgacggttgaagcactggacaatgccacatactttgtggatggtgtgggtcttgggggt

SEQ ID NO: 71171 - DNA, 106 bp, Homo sapiens
ctgcacccgctcagcgagctcctgggcatcccgctggaccagtcactcagcctctgaagaagcttcgggttcagactcaggcagtcagtcggaaagtgagcaggga

SEQ ID NO: 71172 - DNA, 135 bp, Homo sapiens
aaattcctggaaaaagaagtccaagaagcaaaaaagggactgctaagaagataccaccagcacgtcagctaactgttcagatgatgcaaaatcctcagattcttgcagcccttcaagaaagacttgatggtctgg

SEQ ID NO: 71173 - DNA, 83 bp, Homo sapiens
ggctctatcgtccgcatctcgatggagaacttcctgtttactcctggcttgggggcattaggaagcactggaggctcttcggg

SEQ ID NO: 71174 - DNA, 101 bp, Homo sapiens
agatggcggatgccctgcagtacctgcagaaggtctctggagacatcttcagcagaaaggcctaaagaatgtatttgacgaagcaatattggctgccctgg

SEQ ID NO: 71175 - DNA, 98 bp, Homo sapiens
tatgggggaactgatggcgttcctgttacctctcatcattgtgttaatggtgaagcacagcgattcccgtcagcccaaggccaaccccactgtcactc

SEQ ID NO: 71176 - DNA, 97 bp, Homo sapiens
cgcctgcaaggactggttccacggcagctacaaggctttggccgaccaagtgtgtaccatgctgctattgtcatcttccttgaattctttgcgtggg

SEQ ID NO: 71177 - DNA, 82 bp, Homo sapiens
tgaaaggtctcctaaccgctgcagagagtgctttcttccagagctcgatgcattctatttctcatcatttggctcataactg

SEQ ID NO: 71178 - DNA, 74 bp, Homo sapiens
agagaaggaagtgctagcggtgactttgaagattatccaatgagaattttatatgaccttcattcagaagttca

SEQ ID NO: 71179 - DNA, 100 bp, Homo sapiens
tcggatctggaaacctctagaacaagttatcacagaaactgcaaagaagatttcaactcctggagaagcagaatttgcccgcatcatgagcattgtggac

SEQ ID NO: 71180 - DNA, 98 bp, Homo sapiens
taaaagggagtcgcagctctgcccgatgagagaaagggaaagttaaggatgctggagcagaacaatggatttctctttctctttcatgcaagggatca

SEQ ID NO: 71181 - DNA, 102 bp, Homo sapiens
aaaaatggctacttgggccatgtcatccgcaaaggcctcaatgcctacctggaaggttcatgaaaatgtcactgaaattcacaaatgcaaaacggattgaag

SEQ ID NO: 71182 - DNA, 90 bp, Homo sapiens
ccggagtgagcggagtagcgagtcggcaacccggagatgatcaagttccagatgatcctcagtgagggataccatcctttcaatattcaa

SEQ ID NO: 71183 - DNA, 113 bp, Homo sapiens
cctgttgcgatggcgcagaaaccccgttgacaaggcactgctttttcatgacggcgccatgtcagaaccggctggggatgtccgtcagaacccatgcggcagcaaggcctgcc

SEQ ID NO: 71184 - DNA, 82 bp, Homo sapiens
actgagagagatgcttaaaaatcaccagttactttaatgactgacgaagaatttgatgaactatgttttgaatttggtctgg

SEQ ID NO: 71185 - DNA, 98 bp, Homo sapiens
aaaagcgaaatgggcacaccacaggtggaatgaggtaccatctactgtctccagaggaccgagaagaacttgtagatggcacaagacctagaagaaag

SEQ ID NO: 71186 - DNA, 100 bp, Homo sapiens
aaagaatggctgttgaacatccacaaggcacctgcaagcctgctcctgcaaccagcacgcccgacgctgccggttcaactctgagctgttcagactgtcg

SEQ ID NO: 71187 - DNA, 75 bp, Homo sapiens
aaactgcacagccagaccaacccaattatgaatgatatggaacctagcaaagctgttccactgaatgcatctaag

SEQ ID NO: 71188 - DNA, 146 bp, Homo sapiens
ctttggggccgtagaagaggacagctccctgggattcccggtcggagggcctggaaccagcctcagtaagcccgtgtgaactgctccacccacccactgctgctggaggactcaccatcctgccccagcctctatgccaactggct

SEQ ID NO: 71189 - DNA, 75 bp, Homo sapiens
tcaccctgacctgcttacgcccagcaattctgtggtgttcttggtcacacatttatggagtttctgaagggcagt

SEQ ID NO: 71190 - DNA, 100 bp, Homo sapiens
cctggataagcagctgagctttaagtgcaatgtttcaaatacattttcgagtctggcactaaaggaacgtcaaggtcgtgggaaataaaaggcagttcta

SEQ ID NO: 71191 - DNA, 100 bp, Homo sapiens
cacaagctgcctggatagttcctagcctctggatttgtgtttactcgtttggatggttccatggcccaaaagaaaagagttgaatcaattcagtgttttc

SEQ ID NO: 71192 - DNA, 100 bp, Homo sapiens
cctgcagtagcttccacaaatgcagtcattgcagttggtgacaaagttcctgctgatataaggttaacttccatcaaatctaccacactaagagttgacc

SEQ ID NO: 71193 - DNA, 100 bp, Homo sapiens
tggagtcaggaggaacctcagaacatgggtccgtggtcgtttgtttctccaaggtttgaaaagcagctggcctgcaagatggagtctcgctctgttgccc

SEQ ID NO: 71194 - DNA, 100 bp, Homo sapiens
gcgccctagacatcttctccctcccttgcctcagatcaaatttttggctctcatctgcacaaagtgtgtgaacgtgaaaattccacagttccgtggtttg

SEQ ID NO: 71195 - DNA, 75 bp, Homo sapiens
cctgggccgcctggcggccatcgtggctaaacagctggatgctgacaaatatgagaatgatccagaattagaaaa

SEQ ID NO: 71196 - DNA, 76 bp, Homo sapiens
cagcggcgagcagaactacggcgagcggttggttcgactatgcaatgagggcgcccggaagatggaaaggactgag

SEQ ID NO: 71197 - DNA, 100 bp, Homo sapiens
tggccactatctagctatgaccacgttgctcctggagatgagcacgccctttacctgcgtttcctggatgctcttaaagaacatagataccctggagcga

SEQ ID NO: 71198 - DNA, 75 bp, Homo sapiens
aagcactgacatgccactcatgggtttgaaatatctccattcagctggcattttacatcgagacattaagccagg

SEQ ID NO: 71199 - DNA, 96 bp, Homo sapiens
aatgggtatggaggaggacctggagctgagttcaccacgcccgatggccattactacgacatcctggaactgccctaccacggggacaccctcagc

SEQ ID NO: 71200 - DNA, 100 bp, Homo sapiens
agctgagatatgatgattttgaagtcatttcacatcgaagccatgatttaaatatcggcgttaaggaagctgccacttttgctagagagcaaggctttga

SEQ ID NO: 71201 - DNA, 80 bp, Homo sapiens
ggctccgtgtttctggaaagtgacagcagtgcagagcagagcgggcggaggaccccgggcgcgggcgcggacggcacgcg

SEQ ID NO: 71202 - DNA, 122 bp, Homo sapiens
gtttgtcaactcgtacctgagcctcttctacatcggtttctacctcaaggacatggagcgcttgaaagaggaatctttgccacctcctcatagctctggattcttgggctctaagcctgagg

SEQ ID NO: 71203 - DNA, 82 bp, Homo sapiens
cagaggatggcgcctgtgggcacagacaaggagctcagtgacctcctggacttcagcatgctgtgagccgtgagctttgagg

SEQ ID NO: 71204 - DNA, 85 bp, Homo sapiens
ttcatgtggcctgggtagatcctgaggatccttacaagtccaaaagaaactcttccttcaaaacctgtgaagaaagagaaggaac

SEQ ID NO: 71205 - DNA, 82 bp, Homo sapiens
gcagaagtcgcgtgtctaggtgagtcgcggtgggtcctcgcttgcagttcagcgaccacgaaaccatcatagcctttgcctg

SEQ ID NO: 71206 - DNA, 75 bp, Homo sapiens
tccggaagcaacaagacctggccaacatccttgcctggcagcccccagagccaccccacgtcatgctgcagcgcc

SEQ ID NO: 71207 - DNA, 98 bp, Homo sapiens
aaagaatgacccatttacctcggatccattcacgaaaaacccttccttaccttcgaaggggccagtgtcattcaaggacgtggctgtggacttcaccc

SEQ ID NO: 71208 - DNA, 100 bp, Homo sapiens
tgggattggagattccacccaaacttgctggtcactgggagcttggaatacacgaagactctcaaaatcggaagaagctttcagagctgttaaggtacta

SEQ ID NO: 71209 - DNA, 75 bp, Homo sapiens
ttcacagggaagtcgcctggaaaaaccaatagttgtatgggtttcgacagaccatgatgaaattgagaatgtggc

SEQ ID NO: 71210 - DNA, 98 bp, Homo sapiens
tcaagaagcagctccacgaaaggcagccgcggatcgccgcgctcagcgacaaacaagttgaaatcacaaagattagacacctttttagataggtgttc

SEQ ID NO: 71211 - DNA, 75 bp, Homo sapiens
tcagatccttgagtgataaaggagtagagttccgccatggagtcatagttgcagctgactccagggctacagcgg

SEQ ID NO: 71212 - DNA, 74 bp, Homo sapiens
ctctctcggagttggcaggaagccaggttgcagggtgtccgcttcctcaggaacaagatcactcaaggtgaagg

SEQ ID NO: 71213 - DNA, 50 bp, Homo sapiens
tgaaacaccactgaagcattgccaaggtaactactccagacccccagcgt

SEQ ID NO: 71214 - DNA, 110 bp, Homo sapiens
ctgaagagcgacaagccgctggcagccgcggatctcaccgccgctcagggtcaaaatgcagatcttcgtgaaaacccttaccggcaagaccatcacccttgaggtggagc

SEQ ID NO: 71215 - DNA, 119 bp, Homo sapiens
attcctggttgctggagggagcctggccttcggaacgctcctctgcattgccattgttctgaggggcccacctgaatccagccttctccctggccatgtgcatcgttggacgcctcccc

SEQ ID NO: 71216 - DNA, 82 bp, Homo sapiens
cctcagcctcccgagtggctgggattacaggtgacacccctgcgctttgggaaggacgtcgatgggaaatgccacagcctca

SEQ ID NO: 71217 - DNA, 90 bp, Homo sapiens
catagggcattacttcttttagtttgttgcctggacttgggagttgggcccagagctgcaggaagcttatgtccctgatgccaaaaatgc

SEQ ID NO: 71218 - DNA, 100 bp, Homo sapiens
agggagtgcgtggaggagctgtgcagccgcgaggaggcgcgggaggtgttcgagaacgaccccgagacggccaccagcccctcgggttccaagatgcagc

SEQ ID NO: 71219 - DNA, 75 bp, Homo sapiens
gggaaactaggtcgatggtcggcggcgcccggatgggcagctgagccctggtccagcgcctccctctctcagcat

SEQ ID NO: 71220 - DNA, 100 bp, Homo sapiens
cttttacagaatttgtgcggtacatttctacaacagccttatggtacagcagggaagaactggaaactcagagaaagaaactgcccttccatctacaaaa

SEQ ID NO: 71221 - DNA, 99 bp, Homo sapiens
cagaagatacaggcagaacatgctagtcatggagatcgagaggaaataatgagagtgttcaagcaagcagacttttaactgataaattgtcatataaaa

SEQ ID NO: 71222 - DNA, 100 bp, Homo sapiens
ggcttcctttccgccactgcccaaactgctgaagcagctcccgcgaggaccacccggttgcacagagcattgaggatcaccatcaggaagtgattggttt

SEQ ID NO: 71223 - DNA, 74 bp, Homo sapiens
accaaggagacgctcctggcactgcagcatgtagagcgcatgaagtacaggacaataaagcttcctacacatat

SEQ ID NO: 71224 - DNA, 80 bp, Homo sapiens
aggagacttccttgcttctttggagaatgatatcaaaccagcttatcaggagggcagacttcaaaagctactaaaaatga

SEQ ID NO: 71225 - DNA, 80 bp, Homo sapiens
ccgagaagctgtgcatctacaccgacaactccatccggcccgaggagctgctggagggccctcctggacccgggagcgga

SEQ ID NO: 71226 - DNA, 90 bp, Homo sapiens
gcaaccagccttctagggcggcggagagtgcctggtgaagaatgtgatgggatcactagcatgtctgcggagagcggccctgggacgaga

SEQ ID NO: 71227 - DNA, 50 bp, Homo sapiens
ctcgtggcctgcctctgcgtgcttggaatcgaagcctcttaaaatggcag

SEQ ID NO: 71228 - DNA, 98 bp, Homo sapiens
tctgtgcaatcctcacattcaagctgataggctgcgctaccggaatgtcatccagcgagtgattaggatttatggttggtagagagtatgaagctgaa

SEQ ID NO: 71229 - DNA, 100 bp, Homo sapiens
ggtggaggggaggattttgaggacacttgtggagagctcgaattccagaatgatgaaattgtggggcacccaagccaattgccattgaaccatgtgctgg

SEQ ID NO: 71230 - DNA, 73 bp, Homo sapiens
acagcacggtactggagaacacggatggggatcatcgtcttgctcttcttttatctcagtttgtgggtagcca

SEQ ID NO: 71231 - DNA, 88 bp, Homo sapiens
cagaagccactggagaaaaacggccaagaggcagacctaggaaatgggtgaatgaaaactttgccattgatttgatagcagagcagcc

SEQ ID NO: 71232 - DNA, 50 bp, Homo sapiens
ttcctgtacagcctgcagaactgatatgggtctgcaggatggagttcttc

SEQ ID NO: 71233 - DNA, 51 bp, Homo sapiens
caagtaatggtgcaaagcctgaagtggttccacgagtgtttgggcgcatgg

SEQ ID NO: 71234 - DNA, 100 bp, Homo sapiens
ctcctggattcccacagtccccaacatcatctgttactagcgagaactcagaagtgttccacgtttcagaggcagatattgatgatgttaagaagttcaa

SEQ ID NO: 71235 - DNA, 75 bp, Homo sapiens
caagcaggtagcgccgctgctgaagagtttccaaggagaggatttccaatttccaagcctgatgggatctcccag

SEQ ID NO: 71236 - DNA, 73 bp, Homo sapiens
gaaacgggactggcagtgcccacacgtgtgcgttctccccgtccgcccgaagaacatagataccctggagcga

SEQ ID NO: 71237 - DNA, 100 bp, Homo sapiens
ttcaacgagcgcatgctggagagctacctccacgccaagaagtacctgaagcccagcggcctcagcaatctggcccctcgaaccctagccctgagggagc

SEQ ID NO: 71238 - DNA, 75 bp, Homo sapiens
agagatgtgatgttggagaactacagaaacctggtctccctagaaaatgtggacacagacttgccaggcagcctg

SEQ ID NO: 71239 - DNA, 75 bp, Homo sapiens
gggaggacatggccactgttttcagtattttaccagtacctggaggatcagctgctgctctctgaaaagccacag

SEQ ID NO: 71240 - DNA, 54 bp, Homo sapiens
aggctggtctcgaactcccaacctcaggtgatccacccacctcggcctcccaaa

SEQ ID NO: 71241 - DNA, 100 bp, Homo sapiens
aaggcagtggcggcggccgccccaacggagctgcagacgaaaggcaagaacggcgatggccgccgtaggtcagcatggactggaggaaacagctgccaaa

SEQ ID NO: 71242 - DNA, 97 bp, Homo sapiens
ggtgctggatttctccgttgtgttcatctttttccagtgccatcaaccacctcaaagacactggttggatgaggagaatttctgtgccactgtgccc

SEQ ID NO: 71243 - DNA, 109 bp, Homo sapiens
gattattttaacaggaacaccacttcaaaataacctaattgagtgccgtcccatcctggaagtgccagagagtgtaacaggaccttggaaaggggatgtgaatcttccc

SEQ ID NO: 71244 - DNA, 83 bp, Homo sapiens
ctacacattactgggatgtgatgaactatcttcgttgttgacctcctgtactggagagacattaagaagactggagtggtgtt

SEQ ID NO: 71245 - DNA, 75 bp, Homo sapiens
gaaccatcttcctgcacacagccacgatttgcaaaggttcagccgtctgtatatctccccagatacctgaaactg

SEQ ID NO: 71246 - DNA, 58 bp, Homo sapiens
ttttcctccaggcctttgagagtccacgctgcttttatgagctgtaacactcaccgcg

SEQ ID NO: 71247 - DNA, 76 bp, Homo sapiens
ctgaacgtggacagcctcatcacccggctgctggaggttttgagcagctcaaaatggcagtcaccaacctaaagag

SEQ ID NO: 71248 - DNA, 74 bp, Homo sapiens
aaacacgatttggaaagaagaaatataatcttcatcctggtgtaacacaacaaaggaggctttgaaaatgtttt

SEQ ID NO: 71249 - DNA, 90 bp, Homo sapiens
cgctgcttcatcaacaggatgtgtaacagttttccttcaccatccaaataaccagggtgttcgagatctcttaaaagtgattttggagaa

SEQ ID NO: 71250 - DNA, 75 bp, Homo sapiens
ccgggaggtgatgctggagaactatgggaacctggtctcagtggagtcttaccagcaaggggtcctgtctgccac

SEQ ID NO: 71251 - DNA, 75 bp, Homo sapiens
atccagccttagcaaaccagagtggccaatccgccatggtatagttgaagattgggacttaatggaaaggtttat

SEQ ID NO: 71252 - DNA, 100 bp, Homo sapiens
cgatgccattttagtgccttagtggcgaatattattcagaatgttccagctatcggcaggaccctcatcccccgttactttagcactgtgtttgaaggag

SEQ ID NO: 71253 - DNA, 100 bp, Homo sapiens
ctccggcctcgccatgaggctcttcctgtcgctcccggtcctggtggtggttctgtcgatcgtcttggaagtttctctacaataattggagttggtgttg

SEQ ID NO: 71254 - DNA, 100 bp, Homo sapiens
tgcgggggctgagcgcagaagcggctcgaggctggaagaggatcttgggcgccgccagggtaagcttgatgattaccaggaacgaatgaacaaaggggaa

SEQ ID NO: 71255 - DNA, 75 bp, Homo sapiens
gatgagcagagagctgtgaaatatctttggcttgcagccaacaatgggagagcatttgactacttcaatttagca

SEQ ID NO: 71256 - DNA, 100 bp, Homo sapiens
gggatccgacttgccggcagaacttacgctgcgggaccccgggcactgttgctgctgcgggaggacaaccctccatatgataagggagccttcagaatcg

SEQ ID NO: 71257 - DNA, 82 bp, Homo sapiens
ccaagtcgacgccgcaacccggggaaagcagtgcagagcagagcgggcggaggaccccgggcgcgggcgcggacggcacgcg

SEQ ID NO: 71258 - DNA, 75 bp, Homo sapiens
aaagaaactgacaaaaacatttctgaggatgatcttgaagaccttatagttaattgggatgagagcaaaagcatt

SEQ ID NO: 71259 - DNA, 100 bp, Homo sapiens
tgcactctgcgctttgagctactgggctgtgagctgaacgggtgtccgcaatgttgccagtgtctgtctgcagattggctacccaactgttgcatcagta

SEQ ID NO: 71260 - DNA, 74 bp, Homo sapiens
agcgagtacttcgttccaacatggacatcctgaagccaatcctgaagccgctggagttctggagtgggtggaag

SEQ ID NO: 71261 - DNA, 83 bp, Homo sapiens
tgggattaatctggtggactacgttgttaagtattacctgcgttactatgatcaggcaatctgaatatggcggtgtagtgttt

SEQ ID NO: 71262 - DNA, 101 bp, Homo sapiens
ccgggagcagggagggctccgctagcccggggggccctccccgcggggcagatgggttacacatcattttggaatgactgtatatcatctggattacgtgg

SEQ ID NO: 71263 - DNA, 51 bp, Homo sapiens
gagccaggaccccctagaagtctagaaatgatgacaacggcaacacgacaa

SEQ ID NO: 71264 - DNA, 74 bp, Homo sapiens
aagatcgcgatatggctcaaggactgccggttcttgaatgtataaaactgagtgaagaaaccactacatcatcc

SEQ ID NO: 71265 - DNA, 90 bp, Homo sapiens
gcggctggcagaaacacaggaggaaatcagtgcggaagtttctgcaaaggttggcaaaagcagcttttgatgatgcaattgcagaactgg

SEQ ID NO: 71266 - DNA, 97 bp, Homo sapiens
gactcaccacatacctgcttgtcagccagctccgggcccagggagaggcctgtgtgcagttccagagcagcccgacggccatggaggctgaagagac

SEQ ID NO: 71267 - DNA, 82 bp, Homo sapiens
gatggccttggaagaaatggtgcagagattaaatgcggtttccaagcacacgggaccaagaatcgccttcagccctgtctgg

SEQ ID NO: 71268 - DNA, 75 bp, Homo sapiens
tggggaggaggaggaagaggaagaggaggatgacccacttgtcctcctgcccctgctcgagtcttgcagtgtgcg

SEQ ID NO: 71269 - DNA, 100 bp, Homo sapiens
ctggatttcctcccggacatgatggtcgagggccgcctgctcgttcctgacagaatttaccttatcccatatcacacaactggtcctcagccataacaag

SEQ ID NO: 71270 - DNA, 75 bp, Homo sapiens
tttttaatgtggttggaacaactgagctccaaatgagaagatgaagcaagtgttaaagaagactatagaagaagc

SEQ ID NO: 71271 - DNA, 98 bp, Homo sapiens
ctcatcgctctcggcctcggcctcggcctccgacacggcatgcctcctcctggctccttcccacccccagtgccacctcctggagccctcccacctgg

SEQ ID NO: 71272 - DNA, 98 bp, Homo sapiens
ggacccgagccgtcccagaaaccaaagggcaggcacggcagcaaacgcctgaggcctctgaggaaacactacattccagtaatgaagaggaagaccct

SEQ ID NO: 71273 - DNA, 75 bp, Homo sapiens
ggagaaggataagtcgaaggggaaggcgcctgaagaggacgaaggtctctaattaacagaagatggcaaagccca

SEQ ID NO: 71274 - DNA, 83 bp, Homo sapiens
ctcgcctttgccgatccgccgcccgtccacacccgccgccaggagtcaggaatggagagaagggtaatggttttacctcttat

SEQ ID NO: 71275 - DNA, 100 bp, Homo sapiens
ctcctgagtagctgggattgcagattcctgacattcagacaactgacttgtaactgacttataactgacttgtaatacactgctactatatcaaaccgac

SEQ ID NO: 71276 - DNA, 101 bp, Homo sapiens
caacatactactcaaagacattctttctgtgagaaaatactggtgtgaaatatctcagcaacagtggttagctggcaggacctaatctgtcggatggctgc

SEQ ID NO: 71277 - DNA, 75 bp, Homo sapiens
cgcttccttctgggattggagctcaccagatgaccggaaagaagggatgaccgcgtttgtggaaaagagaaaggc

SEQ ID NO: 71278 - DNA, 109 bp, Homo sapiens
cttggacgagccgagaggcggggctcaaagttcctacccgcgagagggaagaagcaggtggatactttaatactgataagccacaccccaggggtgaaattcttattgg

SEQ ID NO: 71279 - DNA, 83 bp, Homo sapiens
atgacggctccctgctgttcgagtacctgcccagaggggcccactcgctgtcccgtcgcgtggggcaggcagtggcgctgcgg

SEQ ID NO: 71280 - DNA, 100 bp, Homo sapiens
gcaccggcaggtgagaggcggatctacagacataggtctcctaaaaacccagaacagaagatcattaagagagtgattgctcttgaaggagatattgtca

SEQ ID NO: 71281 - DNA, 75 bp, Homo sapiens
ggagagactgcctattctgaatcagccatcaactcagcaaccccaaggtccaggtggaggccatcgaagggggag

SEQ ID NO: 71282 - DNA, 82 bp, Homo sapiens
cagaggaaggacagtggagtctggcatcttattgggtgtcaaattgagaaccaggtagatccccaccacctacagtaaaaag

SEQ ID NO: 71283 - DNA, 75 bp, Homo sapiens
cctaccgtgcgcgccttccttttgtttgggcttcctgtagacacccttttcctgcgcaacagagctgggcctccc

SEQ ID NO: 71284 - DNA, 146 bp, Homo sapiens
cagaggcccaaattgaggcgcaatgatgagaggatgtggtggtctactctgatgtcaatcttgagggctagctcgagagtcaggatgtctcagatttaacaacagttgaaagggaagactcatcattacttaatcctgcagccaaa

SEQ ID NO: 71285 - DNA, 83 bp, Homo sapiens
ccagccccgagcgggacagcgcggcggggagcgacgagtcagggaagtcaaagatgcatccctgagttcttcctagcaggcaa

SEQ ID NO: 71286 - DNA, 86 bp, Homo sapiens
agagaagggagctctatagtcggagtggagaactgcaagataccaatggggaaaacattgcagaatcactggttgcagagggctta

SEQ ID NO: 71287 - DNA, 100 bp, Homo sapiens
agaggccaggctttatgggagcatgggttaccagcgacgcaccctgagtggattagaacaagatgacatgagaattttatacaaataccttaccacctcc

SEQ ID NO: 71288 - DNA, 100 bp, Homo sapiens
gctccggcagagcgtgtctgaggccgtgcggggctccgtggtgctggttttacagacatttcaccagaggaattgaggcttgaataccataacttcttaa

SEQ ID NO: 71289 - DNA, 101 bp, Homo sapiens
gtatccaagacagtatgcaaggccacgacccacgagatcatggggcccaagaaaaagcacctggactgtggttcccctctctcagcgaagtggtgttcttg

SEQ ID NO: 71290 - DNA, 100 bp, Homo sapiens
cccctcctggttcaacgaggcatggctccagggcatctcggaagatccaggtcccaactggaagctgaagctaacaggcctcacctcttccattccggag

SEQ ID NO: 71291 - DNA, 76 bp, Homo sapiens
agaagctgaactccaaaaaatgaaggcaattcagagagagaagggaatttgaagtactgccttgtaattcttaatc

SEQ ID NO: 71292 - DNA, 129 bp, Homo sapiens
gtttttctgttttgcctgaatacatgatttaaacaagagatttccacagaagttaattggccttggtcctcacagctccaaaaagaaacaggatctcgataagctctatgagctgaagtccaaagctcg

SEQ ID NO: 71293 - DNA, 99 bp, Homo sapiens
ttactatagacaaatacttgaaacgatatgaaaaagccattggccacctcagcaaatgtgcatttcaccaaccagagggaagaatttgagggcaccagg

SEQ ID NO: 71294 - DNA, 100 bp, Homo sapiens
gccatggccttcgtcgggggtttggtgggcggcccaccgggactcgccgttgctaatgttctctatgggccactccacaccaagcaggcagtgagcatgt

SEQ ID NO: 71295 - DNA, 100 bp, Homo sapiens
aggaggaggcggaggtccaagcggaaagaaaaacacaccttgactttagtcagatacatcactgtctgttaaaggaaaccaagcgtgaagtggaagtcta

SEQ ID NO: 71296 - DNA, 75 bp, Homo sapiens
ccgaggccgtcggccgccgtcagcgagggcgccgagcaacttcgattgtggagtcctgcatggaagggatctgta

SEQ ID NO: 71297 - DNA, 90 bp, Homo sapiens
gcgaggaggaagaggaggcggccatgtatgaggaggagatggaaagggaagggaagatcagttttcctgccatccaggctgctccctcct

SEQ ID NO: 71298 - DNA, 83 bp, Homo sapiens
cccagctcttccaggactttgagccagtccagaccctgctgctgtcttcaaagaaggactcctcctattttgaggacttctcc

SEQ ID NO: 71299 - DNA, 100 bp, Homo sapiens
ggggaccgaaaggcgacctcggagaatgtggcctccagggggagcccaggcgaccatggccttgctgggtaagcgctgtgacgtccccaccaacggctgc

SEQ ID NO: 71300 - DNA, 90 bp, Homo sapiens
gggggctgctgaccgagagagctcactcagccagaatgattacggacctgaagccaaagaacaagatgcgctagtggacagattgctgac

SEQ ID NO: 71301 - DNA, 100 bp, Homo sapiens
atccagtaaaccgactctggtactgtgacctacagcaggaatccagtggcatcgcggatggccctgctgtggcaccagtgaccaacgggaacacaacggt

SEQ ID NO: 71302 - DNA, 101 bp, Homo sapiens
tgtgtttgttcgtctgctgagactcggctccaaggtcacagctcgtaacactgtgtgcaacttgctttggtgtttgctgttttattgccacagatgacatt

SEQ ID NO: 71303 - DNA, 83 bp, Homo sapiens
cagccccctgatcgcctgcggcaagtgctgcctgcaggtccatgccagcgcgcctcaagttccccatcgactacccatactct

SEQ ID NO: 71304 - DNA, 125 bp, Homo sapiens
cggctggaggctcgcaagaaagccaagaacaagcagctgggccatgaggaaggtactggtgtggcatactcggacagagaagcccaagatgaagcaggaggagcagctgcagcggcagggccggg

SEQ ID NO: 71305 - DNA, 75 bp, Homo sapiens
ccggggcgccgggagctattgggacctgcggctatcatgagaagtttttctctcctacaagaagccataatcccc

SEQ ID NO: 71306 - DNA, 103 bp, Homo sapiens
ccccagccgaccttgagctccaggagttcgtctcttacgtctgcggaagtgcagctgcctcagttcttagcgcaggagggccctcctggacccgggagcggac

SEQ ID NO: 71307 - DNA, 75 bp, Homo sapiens
ttcatggatgcccctgtttctggtggtgccgtgagcgatgtggagatgcaggaacactatgatgagttttttgag

SEQ ID NO: 71308 - DNA, 83 bp, Homo sapiens
tgaggaccgcaaaaatcaatccttcctgcctgacacagctcacttcaagaagtgcacaatgtcagaacgtggaattaagtggg

SEQ ID NO: 71309 - DNA, 95 bp, Homo sapiens
catcttttaccaagtacagaggcttcatcttatgaaatggacaagagggaccctgatgctcccataagacagaaaatgccccttgatgatctgga

SEQ ID NO: 71310 - DNA, 99 bp, Homo sapiens
gacaccaagtctgtgtcagaaggccacctcaagaggaacatcgtggtgaagaccgtggagatgcgggatggagaggccaggaggagaccccaagctggg

SEQ ID NO: 71311 - DNA, 75 bp, Homo sapiens
tgatgagagctataacttaatggtgttggggatgtcctttgcactgaccctgaactgccagattgacaaaaccag

SEQ ID NO: 71312 - DNA, 83 bp, Homo sapiens
ctctctttctggcctggaggctatccagcagtgaacacaacatgctcccttggtctctgcaaccatcgattcctaacagccta

SEQ ID NO: 71313 - DNA, 100 bp, Homo sapiens
ggagctggtctatcccggccctgtcattactccactgggttctggtctccgtgaggccgggtgacgctccagaatgggagacaagccaatttgggagcag

SEQ ID NO: 71314 - DNA, 90 bp, Homo sapiens
gcgctgtcagctgtccacagccccaccttctgccagcaatctgcacatcgtgctgccacacgaggcttcattcgttatggctggcgctgg

SEQ ID NO: 71315 - DNA, 75 bp, Homo sapiens
gatgaggagcccctggcctgcccggacgagttcgatgacttcgtcacctatgagatccggaacatggtggcggtg

SEQ ID NO: 71316 - DNA, 90 bp, Homo sapiens
cacccgtggaaagtacaggtcctgacagctggtaagaatcccgaggatgtggttcgaagatacatgcagaaggtgaaaaacccacctgat

SEQ ID NO: 71317 - DNA, 98 bp, Homo sapiens
gcggcggtggcctgaggaggcccgagcggcggcggtggcggcgaaggccgaggcggtggtggtccctggggaggtgctgcctaccctcctccgcccag

SEQ ID NO: 71318 - DNA, 101 bp, Homo sapiens
ccgcaaccattgacgccatgtcgggttattcgagtgaccgagaccgcggccgggaccgagggtgaaagaacttgtcctggacaacagtcggtcgaatgaag

SEQ ID NO: 71319 - DNA, 75 bp, Homo sapiens
agcaaaggcaagaaggcaacgacgttccatctgtggaaggacctaccaaccagaacccagcttagactagaaagt

SEQ ID NO: 71320 - DNA, 80 bp, Homo sapiens
ggctgaggtggcagcggcaggagagtccggccgcgacaggacgaggctgggaggcggcagaatgcagccagaggagggca

SEQ ID NO: 71321 - DNA, 101 bp, Homo sapiens
ttgttgattaactggacaaattcagaaaagaggcacagttagatgaagaaggacagtttcttgtcagaataatatatgatgactccaaaacttatgatttg

SEQ ID NO: 71322 - DNA, 100 bp, Homo sapiens
gcagatcggcagctgctcagggtacatggagctgatggtgaagttgaagcaaaatgaggccttccctggccccaagatcattgccactgcggtttgccac

SEQ ID NO: 71323 - DNA, 82 bp, Homo sapiens
gtctccaggcccgcgaccgtccgccagtcgtcccgaggaagtccaaagccaagcctaatggcaagaagcccgctgcggagga

SEQ ID NO: 71324 - DNA, 50 bp, Homo sapiens
ggaaaatggagcccttcaccaatggtacctgtggcatatcccattgacct

SEQ ID NO: 71325 - DNA, 90 bp, Homo sapiens
ccagaccatgctggccggggtgcagtaccccagctccatcaacctcacgctgcacctggatgtcctaaacgatgctatatttgatgaaga

SEQ ID NO: 71326 - DNA, 83 bp, Homo sapiens
gcatgagttagtcgcagacatggacaccaaacatttcctgccgctcgggtggtgaaggaggagatctttgatgacaatgccaa

SEQ ID NO: 71327 - DNA, 133 bp, Homo sapiens
ggcctggcttttgtcctgcgcgcgcagattaacgcaaacccggaagcggatcgggtggagtgtaggtcatatcgccgcgatctgtctcgtaactgtgtaatcaaggaactagcaccacaacaggaaggtaacc

SEQ ID NO: 71328 - DNA, 97 bp, Homo sapiens
ggggaagaaagagaatattgttcagttgattatgccagccagatgcaggttatcaatactctggctgaccatcatcatcgtgggactgactttggtg

SEQ ID NO: 71329 - DNA, 96 bp, Homo sapiens
tccccaagccccgcgttagcattcgcaagtccgtgcctgaacccccgccaacaaacaaatggcaacttgataattggctgaataaagtgaacccac

SEQ ID NO: 71330 - DNA, 100 bp, Homo sapiens
ctgtctgagggagatggtgacaagctcaaggcctgcgagcatatcgcacggatgactgccatccctgggttttgccagtagtgaagaaagtggagcagaa

SEQ ID NO: 71331 - DNA, 83 bp, Homo sapiens
cgtggccccgctgttcgacaccaagatcttcaggacgctctggcgtgttaagaccggcacagtcttcactaccgtagaagacc

SEQ ID NO: 71332 - DNA, 75 bp, Homo sapiens
ggaagacttgtaacctggagaagaggtgatgatgaacagtctacacagatggctgcaagttgggaagatgataaa

SEQ ID NO: 71333 - DNA, 100 bp, Homo sapiens
tccagctaccggcccaaggccatctacctggacatcgatggacgcattcagaaggatcctggtgcacctgagccgtggaggggctgaagtccagatcttt

SEQ ID NO: 71334 - DNA, 83 bp, Homo sapiens
caatatctgtcttcggtggactccttcggcagtccacccaccgccgccgcctcccaggttgtggcagcactgcctgaaggtat

SEQ ID NO: 71335 - DNA, 100 bp, Homo sapiens
ctttagcccgcttcgagcgcccgggggcgtgtgaacgagctctatgtcgatgacccagacaaggacagcggtggcaagatcgacgtcagtctgaacatca

SEQ ID NO: 71336 - DNA, 100 bp, Homo sapiens
ctgctgcactttgggttcaaggcgacatccaaaagaaactcttccttcaaaacctgtgaagaaagagaaggaacagaggacacgtcacttactcacagac

SEQ ID NO: 71337 - DNA, 90 bp, Homo sapiens
ctcatctaaattacatctgcaaaaagaccctttttccaagttgcttatggaaccacagagaacagtcccgtgacattcgcgcacttccct

SEQ ID NO: 71338 - DNA, 116 bp, Homo sapiens
tgaagaatggcattccttctaacagaattattttgggagggttttctcagactcaaaagcctcgaaagtttgactgtgaacttccagatatttcattaaaagatttacagtttctg

SEQ ID NO: 71339 - DNA, 100 bp, Homo sapiens
ggctcagtgccaggaggatgggccaactcaaaatctgaagcctgatttgctctttacccaggactctgaagtctcttgcatggcaccaagaatgttacca

SEQ ID NO: 71340 - DNA, 80 bp, Homo sapiens
cgccgctcaccccgcggccgcaccttcccgccttctcagggctggaccccaatggagaacaggtggtgtggcaggcgagc

SEQ ID NO: 71341 - DNA, 83 bp, Homo sapiens
ggcggatcccgcgcgcccccgctcctgcaggtctctaattaacagaagatggcaaagcccagccacagcagctatgtccttca

SEQ ID NO: 71342 - DNA, 75 bp, Homo sapiens
cggagctgttcctattgggccatcttggctccaccaccctgaaatcatgagtggaggatctcaagtccacatttt

SEQ ID NO: 71343 - DNA, 73 bp, Homo sapiens
acgcatgaagctgaattgggctgtggcagctggagccgaggatccagggcaattgaaggaacagactaaaaat

SEQ ID NO: 71344 - DNA, 83 bp, Homo sapiens
ctgaacttccggaaggcggtgatccagctcaccaccaagacgcaggcgggcagggctgggcagcggcctgagtctcagcggac

SEQ ID NO: 71345 - DNA, 82 bp, Homo sapiens
gggggatggttccatcatggcgtcaatgcagacctgcctagagctggaacgttacctccagagcgagccctgctatgtttca

SEQ ID NO: 71346 - DNA, 98 bp, Homo sapiens
ggagcttagccattggcaacgagttaaatatcacccacgagcttgtggttgcagagtcagtggtcgtcattaagaaattgctacagatgcagccagca

SEQ ID NO: 71347 - DNA, 100 bp, Homo sapiens
gaagacctgcaagttattttggaaaagggccgttgctccagggagaactgcaaatatcttcatccacccccacatttaaaaacgcagttggagataaatg

SEQ ID NO: 71348 - DNA, 76 bp, Homo sapiens
cttgggtcctccgagagcagcagcgccatggcaatgacaggctcaacaccttgctcatccatgagtaaccacacaa

SEQ ID NO: 71349 - DNA, 75 bp, Homo sapiens
gccgtctcccctctctggagccgagagaggccggtttcccccacccttcgcctcaacagcatcaagaagctgtcc

SEQ ID NO: 71350 - DNA, 90 bp, Homo sapiens
cacagcatcctccagcacctcagaatttgaaagacatattggctgacctgatacctaaggagcaggccagaattaagactttcaggcagc

SEQ ID NO: 71351 - DNA, 98 bp, Homo sapiens
ttcacagcatcagcagtcatctcactagttatgttcaaaaaagctgaagccgacgtagcttctctgaacagacgcatccagctggttgaggaagagtt

SEQ ID NO: 71352 - DNA, 82 bp, Homo sapiens
caagtagctgggactacagacatgcgccagcacgcctgctgctgaatgccatggtggcaaaactggggaaccgggaggaccc

SEQ ID NO: 71353 - DNA, 100 bp, Homo sapiens
caagcctacatcagcaatgacctcttggactgttatagccacaaccagggttatgtaccgaaggactctaccgtgtcagcgggaataaaactgaccaaga

SEQ ID NO: 71354 - DNA, 100 bp, Homo sapiens
aaaattttatgaagaaaatgggtttctagtaatcaaaaatcttgtacctgatgccgatattcaacgctttcggatgaagacttgtggatatggatggtgg

SEQ ID NO: 71355 - DNA, 83 bp, Homo sapiens
ggcgggaaccggctccggagcgagaacgcgcatgagcgggatcgtgtgcagaagaaaaccttcaccaagtgggtcaacaagca

SEQ ID NO: 71356 - DNA, 100 bp, Homo sapiens
gctgcggcagaagggctacgaagaagtgcttcagcgggccaggaagcgcatccaggaggagcgtgaggatcatccccggagaggacgggaggatcggcag

SEQ ID NO: 71357 - DNA, 98 bp, Homo sapiens
aaagtcgcagcgagctggagccgccggagtgtcccagaagcttttgttgacaattccagtttccgaacaaaacatttcggcaatggtgagggcttcga

SEQ ID NO: 71358 - DNA, 100 bp, Homo sapiens
acctggcttagctattcattgcatgcagtaggaaatccatgaagtccagaagtagaagtcctgcatattcaagacattcatcttctcatagtaaaaagaa

SEQ ID NO: 71359 - DNA, 82 bp, Homo sapiens
accatcaccggcctcctgcaagagtttgatgtccagtacctggagtagaacagaaaaattattatgtctgtgttcccttggg

SEQ ID NO: 71360 - DNA, 50 bp, Homo sapiens
tgctgaaaaggaagttttctggaatgggttggaaaagagactgttcaaac

SEQ ID NO: 71361 - DNA, 50 bp, Homo sapiens
catcccttacagaactcaccacactcaagggctggagaggcagagggaga

SEQ ID NO: 71362 - DNA, 100 bp, Homo sapiens
attcaggagcatttgttacaaatttctgaagaggaggagtttcttaagcttccaaggctaaagaattggcagagggggtcgatttgggaggaaaggtgtg

SEQ ID NO: 71363 - DNA, 75 bp, Homo sapiens
agcacgttaataactcattcagtactgacgtgtacatcgtgatgtgggacaccgaatcagagatcattgatttct

SEQ ID NO: 71364 - DNA, 101 bp, Homo sapiens
gagatgaagatcctgtctgtctgcagctagatgatattctaatgcacaagctgagtgtggaagccccacccaaaatcctggtggagagatacctgattgaa

SEQ ID NO: 71365 - DNA, 83 bp, Homo sapiens
gtggtcttgaaggacactgggatcctgtaacacaggtacaatgactcttcttgcttttcacctaagttgaataagcaccctgt

SEQ ID NO: 71366 - DNA, 75 bp, Homo sapiens
tgagatcttgaaagtgggcgagttgcgctccggtagattgcaaatgacctgctttctttctgttcccgggcgttt

SEQ ID NO: 71367 - DNA, 49 bp, Homo sapiens
cctttatatagaagggagagtaggtctcatagatgatggtgaaacccca

SEQ ID NO: 71368 - DNA, 90 bp, Homo sapiens
ccgtaaaactgtacaactctccatttggcagatacgaccctatattttaaaatgcttaaaacatcttaacccattgcactggttccaatt

SEQ ID NO: 71369 - DNA, 75 bp, Homo sapiens
ttctgatgcccttgtggaacgtgctggggtttgcactgggtcggtggaaggattcaaaatcaacctgattcggag

SEQ ID NO: 71370 - DNA, 75 bp, Homo sapiens
gctttgttgggagtgatggatggacaggctcacttcagcagctctgttggaaataaactgaaagaggggcaaggg

SEQ ID NO: 71371 - DNA, 100 bp, Homo sapiens
gaagatggttccaagtattccctatctagttcacacaaaagatgttggacaatttctacaattttgcttcatcatttgctgtctctcaggcccagatgac

SEQ ID NO: 71372 - DNA, 79 bp, Homo sapiens
aagctggaccacgatggggccatcctggatgtggatgaggatgacgttgagaagaaatggaatctatttggaatttgca

SEQ ID NO: 71373 - DNA, 82 bp, Homo sapiens
tagttgatggaaagtacatttatgcacataaagtccttctcaagattcgtctcctacggtagtgtgcagcttatgcaaacga

SEQ ID NO: 71374 - DNA, 98 bp, Homo sapiens
gcagagccaggaggcggaggcgcgcgggccagcctgggccccagcccacaccttcaccagggactatgcagccatcgtcttctttgctaacaaccgct

SEQ ID NO: 71375 - DNA, 96 bp, Homo sapiens
aggaaatgcatctttatgtcagaaacacaaagcagcccaaccaaaggttgttataccacatttgcataagttagccttggtgaacaacttacagat

SEQ ID NO: 71376 - DNA, 75 bp, Homo sapiens
tgcaaggggtgtttttccgtaagcatactcaggccatgggtgttgagagtgaccaggaaattgtgcagatgattg

SEQ ID NO: 71377 - DNA, 88 bp, Homo sapiens
tggatgatcgagaggatctggtgtaccaggcgaagctggccgagcaggctgagcgatacgacgacaaatttacatgtattggagacca

SEQ ID NO: 71378 - DNA, 100 bp, Homo sapiens
cctgaatccatcattgcagctgcatgttcaagaagtggccggagagttctgcatgttgattcgagtctgtgagccacttcactacaagaacttggagtct

SEQ ID NO: 71379 - DNA, 82 bp, Homo sapiens
attttctccaaaagctgtgaccaagagtaatcaagtcagaggattatatgacttttatctgcctagagaagaactatggatc

SEQ ID NO: 71380 - DNA, 99 bp, Homo sapiens
atggaacacggctccatcatcacccaggcgcggagggaagacgccctggtgctcaccaagcaagatcaggatcctcatgaccagccaaagagaagaaga

SEQ ID NO: 71381 - DNA, 75 bp, Homo sapiens
cagctgtgtgtccagaacgtgccatggagacgcttaacggacatggatttgattgacatactttggaggcaagat

SEQ ID NO: 71382 - DNA, 100 bp, Homo sapiens
ctgcgattttcgccctacgttttcaacggaggatttgtccaatatgtgcagcgttacctggaggcgatcctaatcatgtcacggatgactttgcagctca

SEQ ID NO: 71383 - DNA, 100 bp, Homo sapiens
ccatgtccgcagggggagattttgggaatccactgagaaaattcaagttggtgttcttgggggagcagagcgacacgatgaggcgagtggtacgacagag

SEQ ID NO: 71384 - DNA, 75 bp, Homo sapiens
ccagacgctgcccgcgggcccggccacggcggagccaaggttttggctacgggcctccacctccaccgccagatc

SEQ ID NO: 71385 - DNA, 83 bp, Homo sapiens
cttcgagcgccgcggacgcgtcatcgagtgtgacgtggtgaaagcagcctcccgcgacgatgcccctcaacgttagcttcacc

SEQ ID NO: 71386 - DNA, 50 bp, Homo sapiens
ttgtagaaactgtctttaacctgatcaacaggcggtccttcgggtcggag

SEQ ID NO: 71387 - DNA, 97 bp, Homo sapiens
ggttctttccctttaagatatgtgcaggatcaagttgcggcaccttttcagcgtcgtggttcaattccagaattctttcatattatgaaaagaaagt

SEQ ID NO: 71388 - DNA, 106 bp, Homo sapiens
cctttatcctggtcatcttctatttccaaagtatgttgcacccagggaaatcctcattgacgattcaatttgttgaaggccaatttgtggactcctacgatccaac

SEQ ID NO: 71389 - DNA, 100 bp, Homo sapiens
ctgcgcagctccggccgcctggctccccatactagtcgccggatgtagatatgatggatcagaatggaatgacgcctttaatgtgggcagcatatagaac

SEQ ID NO: 71390 - DNA, 100 bp, Homo sapiens
cacggagcagggtcgaccaagaactgtgaagagaggagttgagaacatctctgttgacattcattgtgctggtagccggtctgggtctccaggaagagtt

SEQ ID NO: 71391 - DNA, 96 bp, Homo sapiens
atcaatatttcacctgatgataagaaagtgatgaagcattgggcccaacaatgatgagttggaatgcagttgaaaagttatgcgcaaaatctgcaa

SEQ ID NO: 71392 - DNA, 82 bp, Homo sapiens
ggcgctgctgctcgggctgctcttggaggttggacgtgataagtatgagcctgcagctgtttcagaacaaggtgataaaaag

SEQ ID NO: 71393 - DNA, 75 bp, Homo sapiens
ccgctacgacaaggacaagcccgtttctttccacaagttgggagccacgtgtaccagtgtgtgttgatcttggct

SEQ ID NO: 71394 - DNA, 90 bp, Homo sapiens
aataataatactgctatatgtgtagaaggaaaattgatggatttgtatcgttgtgcccgtgtcagctcctggggagatcttttacctgtg

SEQ ID NO: 71395 - DNA, 109 bp, Homo sapiens
gctatgttatcattaaagaatatccaaactgatagaaaagatgaatagagcacatttatacaacttccacatcccaagatggagtcttgccctgttgcccaggctggag

SEQ ID NO: 71396 - DNA, 126 bp, Homo sapiens
gagggcttcgtgccctgtgcacgtttgccacctagtgaccaaactgaatgaataatacggcagctagtccaatgtctactgcaacttcaagtagtggaaggagtacagggaagtctataagctttg

SEQ ID NO: 71397 - DNA, 75 bp, Homo sapiens
agcacacagtgcgcggggagcgttcctacagaaactcccatcaagactgaagcagacgttttggcagaaaaccag

SEQ ID NO: 71398 - DNA, 87 bp, Homo sapiens
aaacccagagctcctgtcaaccagccaggtgctggagaatctggtaaaagcaccattgtgaagcagatgaggatcctgcatgttaat

SEQ ID NO: 71399 - DNA, 101 bp, Homo sapiens
gctaccgctcaggtgctgcaggcacagcccgagaaaccgcagcactacacatggctcaatcacaaaggagtgagacagaaacgcctgaatgtctggctggg

SEQ ID NO: 71400 - DNA, 95 bp, Homo sapiens
taacattccaacacataaaaattatttatccaacagctcctcccagactccagttccaacaccatcttctgagatgatcctgattcccagaatgc

SEQ ID NO: 71401 - DNA, 100 bp, Homo sapiens
ggggatccgtcgcacacagcatctccaacaggtgctggagaatctggtaaaagcaccattgtgaagcagatgaggatcctgcatgttaatgggtttaatg

SEQ ID NO: 71402 - DNA, 100 bp, Homo sapiens
ccgccaccagctcctggaccaccatggccaagaaccgcagggacagaaacagttgggatcttatgccttcattcatccggcatggtccaacaattccaag

SEQ ID NO: 71403 - DNA, 97 bp, Homo sapiens
atttcctaccattaagatttttggatccaacaaaaacagaccagaagattaccaaggccctggccaacgtcaacattgggagcctcatctgcaatgt

SEQ ID NO: 71404 - DNA, 100 bp, Homo sapiens
gggagctggaggccctgcggcaggctgggtggagaaggagacatactactgaccccattggaagaagaaccaggcatggaaagatggggagctctggagg

SEQ ID NO: 71405 - DNA, 75 bp, Homo sapiens
cggggaaaaagcggccaaagaagtgaagctgctgctactcgcttggttctacagccattgggatccagacatcag

SEQ ID NO: 71406 - DNA, 98 bp, Homo sapiens
cgccaccaccaccgccgctgccccggctgcctcctccctgagggtacagctcgcagaaagaagaaggtggtacatagaacagccacagctgatgacaa

SEQ ID NO: 71407 - DNA, 89 bp, Homo sapiens
atcgggtggcggctcgggacggaggacgcgctagtagaacaccttctgcagtggggaccatgtgtcctggcacagccctttggataaca

SEQ ID NO: 71408 - DNA, 75 bp, Homo sapiens
atttgacaagactaaaaacacttctctcagaaacagagtgttcctttctgccgaaattctccattcatatagaaa

SEQ ID NO: 71409 - DNA, 74 bp, Homo sapiens
cggcatcgccggcctcgctatgctctctatcaatatcagctcacatcattgaaaagataattttgaagacatgt

SEQ ID NO: 71410 - DNA, 98 bp, Homo sapiens
gagaatatagtaaaaatacgcagtacagtcccaggatagcagtgagattcacttcaaagtgaaaatgacaacacatctcaagaaactcaaagaatcat

SEQ ID NO: 71411 - DNA, 96 bp, Homo sapiens
ggtttttcactctgttcaagagacatgcactgaacttctgaagataatcgagaaataccagctaagactcaatgactctgtttgctggctacacgg

SEQ ID NO: 71412 - DNA, 95 bp, Homo sapiens
atgatctgtcctgaatgtggcttggttgtagatgtactttatgaaaaatcgtgcccggaggcaaggtattaacttaaaacttctacccaatggat

SEQ ID NO: 71413 - DNA, 96 bp, Homo sapiens
tgttaatcaacacgagaccagtacaagcaaatctgtttttgagcctgaagattcttcaatagtagataatgaggccataggaaaaggatacagagt

SEQ ID NO: 71414 - DNA, 51 bp, Homo sapiens
ggccgtctcctgcctcctgcttgcaagtaaaacctgtttcccagcctggtg

SEQ ID NO: 71415 - DNA, 75 bp, Homo sapiens
aaagtgagtgtccatagaagctttggggctcttcctctaatcaggagaaagctgatatggatcagaaactttcga

SEQ ID NO: 71416 - DNA, 100 bp, Homo sapiens
gtgcatttcaagtgaagtgtgctgatgaagtcctctataaggccaggagtggtggctcacacctgtaatcccagctctgggaggccaaggccagtggatt

SEQ ID NO: 71417 - DNA, 90 bp, Homo sapiens
ggatgggggacaggaggctgcggggcctcaggtctttctgtggaatttggaacaattctagtttacacatgtgagaagagttgctggccc

SEQ ID NO: 71418 - DNA, 75 bp, Homo sapiens
ttaagcctgatctaacccctagaaacaggtcatcatcagatttgaaatatttaaagtggatacaaaactatttca

SEQ ID NO: 71419 - DNA, 50 bp, Homo sapiens
aaggacgagccggggcgctgaagcacggccacatgatttcttcgatgcac

SEQ ID NO: 71420 - DNA, 90 bp, Homo sapiens
gggaggatgacgaacccaacctggtgcccggcccgcagcctacccgttccatcccgggctatcccagttccccactgccagggaacccca

SEQ ID NO: 71421 - DNA, 74 bp, Homo sapiens
ccagatccgctttggagggagaaaggagattgcctcggattccgacagcagagatggggtctcgctatgttgcc

SEQ ID NO: 71422 - DNA, 78 bp, Homo sapiens
tggcgatgggttacagtaagaggtgtccccagcgcagccaatcggcttccgaagtaggtgagttgctgcctgaagaga

SEQ ID NO: 71423 - DNA, 50 bp, Homo sapiens
ctgtgtttctcacccaggaggagggtccggcgccagctgccagtcgagga

SEQ ID NO: 71424 - DNA, 80 bp, Homo sapiens
aaaagaaggtgtgaaagttaacaagtttttcagaagaagtgaagtcaagatgaagaaccatttgcttttctggggagtcc

SEQ ID NO: 71425 - DNA, 97 bp, Homo sapiens
cagaagggagaggggagcgaccctggggaccgactctggggaccctcgccgaagagcaggagcattggtttgaaaaggccctacgagacaagaaggg

SEQ ID NO: 71426 - DNA, 100 bp, Homo sapiens
ggaaatccatcagccaggaacaagagaaaagaaattcgaggttaagagattatagaagtcttatcgtgattcgcctttgccagtctcatctcgtgtctgc

SEQ ID NO: 71427 - DNA, 83 bp, Homo sapiens
ctcctgtgtggcgatggtcttcctgctggggctcatgtttgaggcaaaacaacgagtggatgagaaacccagcctgggagccg

SEQ ID NO: 71428 - DNA, 51 bp, Homo sapiens
aacctcaaatgagcaagtcaaggcagggcaagaatcctttcgttccatcac

SEQ ID NO: 71429 - DNA, 48 bp, Homo sapiens
acagtttacctcttatctaacagtaaaagaagccttgagccctataaa

SEQ ID NO: 71430 - DNA, 101 bp, Homo sapiens
cgctccggcggctccgcgccccgcactcccggacccgaagccgggaagtgagcgtcaccctggacccacagtcggccagtgggtacctgcagctgtcagag

SEQ ID NO: 71431 - DNA, 82 bp, Homo sapiens
ccttgctggtgcatgcgtcgtcggcctctgggcagcaggtcaaaatgcagatcttcgtgaaaacccttaccggcaagaccat

SEQ ID NO: 71432 - DNA, 76 bp, Homo sapiens
ggcgggaccagcacaggcggcgttttctccttcggaacgggagcgtctaggggcaagattcttgccaagagaatta

SEQ ID NO: 71433 - DNA, 100 bp, Homo sapiens
ggtgcccatcgggaaatgcatgtgcaaggcaggatatgaagagaaaaatggcacctgtcaaggcctggagctgctgaagactgctattgggaaagctggc

SEQ ID NO: 71434 - DNA, 87 bp, Homo sapiens
cggtgcggcggccgcgacttccccgacgcggggcgctgagaagcagaaggaggaagaggagcgaaggcggcgtgaagaggaagaaag

SEQ ID NO: 71435 - DNA, 82 bp, Homo sapiens
gggagaagctgtctctgatccgcaagcatgctcagaccttcattgctctgtgtgccaccgagatcaatggcttttcaaaagc

SEQ ID NO: 71436 - DNA, 120 bp, Homo sapiens
ctcttacgtctgcggaagtgcagctgcctcagttcttagcgcaggctgcttctgatgcttggaagatatcctctcagccacaaagatggtaataaatctttgcctcccacagttcagacc

SEQ ID NO: 71437 - DNA, 97 bp, Homo sapiens
gcaaatgagctgatggaagatctgtttgaaactaaagtttcctacactactgaggtttaggggcactgtgaagcaaaagccacgcctcagaatccca

SEQ ID NO: 71438 - DNA, 101 bp, Homo sapiens
gaggccaggacacctggaagccgggaaatggcgctgtacgagttggtgaaatgcaacttcaatgtggaggaggccctgcgaaggctgcggttcaacgtgaa

SEQ ID NO: 71439 - DNA, 100 bp, Homo sapiens
ggcctgattgggaagaaactcttagcgcaatgacttctccattgtggttggggtgctgttcccaatggcggtcatttttgtggtggttgctatggtaatc

SEQ ID NO: 71440 - DNA, 74 bp, Homo sapiens
cgcgtccaggtggccgtgaagcacctgcacatccacactccgctgctcgacagattccagtgctgaatattcaa

SEQ ID NO: 71441 - DNA, 80 bp, Homo sapiens
tgcatagcagtagctgttgtttgggctgtgtttcgaaatgaagacagatggaacagattaaaagggccaataaactgttt

SEQ ID NO: 71442 - DNA, 80 bp, Homo sapiens
aaagtgactgaagagcttctgaccgataataggtgtgtgggctgtgaggtcgtgctgtcaggcattgaggagcaggtgag

SEQ ID NO: 71443 - DNA, 50 bp, Homo sapiens
cagccctttgatgaccgcagcagggttccccactgaaggacttggtccag

SEQ ID NO: 71444 - DNA, 98 bp, Homo sapiens
gagctaccggcgggagctgggtcaccggcttgaggggctgcgtgaggcgcggaggcaggccccttcacagatgtagtcactacaaatcttaaattgcg

SEQ ID NO: 71445 - DNA, 89 bp, Homo sapiens
attttttctcatggatgttcttcttcgagtatttgtagaagggcagtctgggctcttggcaacattgctggagatagtaccatgtgcag

SEQ ID NO: 71446 - DNA, 82 bp, Homo sapiens
ccagtgctggatgcggggacccagcgcagaagcagcgccagacaatgcagatcttcgtgaagactctgactggtaagaccat

SEQ ID NO: 71447 - DNA, 50 bp, Homo sapiens
gatggtggaggagcacttctactgcttattcagctgattctgaatcatct

SEQ ID NO: 71448 - DNA, 100 bp, Homo sapiens
tctccaacaatggaggccagtggctggtctcagggatcagtttcattcacggatgtgactgtggactttacccaggaggaatgggaacaactggacccct

SEQ ID NO: 71449 - DNA, 83 bp, Homo sapiens
cttcagaaaaagcatccccgaggaggaagacgaatcgttaaacatctgaaagggtcagatgcagtgcaagctgtttgtctttg

SEQ ID NO: 71450 - DNA, 115 bp, Homo sapiens
gacagcactgatcatgacagatggtgtgaatacattatgtatcgagggctgatcagctatgtttccagtgtcctctgggtgtttccaagagcaacaagaaacgaataaatctctg

SEQ ID NO: 71451 - DNA, 74 bp, Homo sapiens
ggtcccaggggaggcccccacctccccttctattgttctgtggcccagatgggggctccggaggtggcgcccag

SEQ ID NO: 71452 - DNA, 82 bp, Homo sapiens
ccggtggtgggctcagccggtcgagctgcgcgggaggcacgtgtggttctcaaatataggcattctgatgggaacttgtgtg

SEQ ID NO: 71453 - DNA, 75 bp, Homo sapiens
aaattgtcgccattaagaaagaagagagaagggcacagttacctaagtatcaacgtaatcttcctcggccaggac

SEQ ID NO: 71454 - DNA, 51 bp, Homo sapiens
gagaaacccggagggcgccggggctactgcagcactggggtgtcagttgtt

SEQ ID NO: 71455 - DNA, 82 bp, Homo sapiens
aaattatttatccaacagctcctcccaggtgttgacttcaaaatcaaaactgtagagctaagaggaaagaaaattagattac

SEQ ID NO: 71456 - DNA, 98 bp, Homo sapiens
agccaccatgacaggctcagccaaagtaaatccatgatcctcaccgatgtcgggaaggtcactgaacctacctgcctagagctggaacgttacctcca

SEQ ID NO: 71457 - DNA, 100 bp, Homo sapiens
cttcatgaaatacttcagaaagacagagattttactgctgaagattatgaaaagagcagcccgacggccatggaggctgaagagacgatggaatgccttc

SEQ ID NO: 71458 - DNA, 80 bp, Homo sapiens
cacaataagagcagaggatggaacacttcagtgcattcaagatccgtggccgttcacatggtttcaaggcacaatgagac

SEQ ID NO: 71459 - DNA, 100 bp, Homo sapiens
aaatcataaaactttgtaagtggcagaacaaggatttgaagctggcagtctggttccaggctaaagtaaataatgccagcctgattggactgggttatac

SEQ ID NO: 71460 - DNA, 75 bp, Homo sapiens
gcatctgctcagactacttctcatgaactcaccattccaaacgatatgtatgtccctgggaagctgcatgatgtg

SEQ ID NO: 71461 - DNA, 100 bp, Homo sapiens
gggacacttctgcaaccccgcagagcgcatccatcaaagctttgcgcaacgccaacctcaggcgagatgagcaggttgttgccctggatgcccaaaatat

SEQ ID NO: 71462 - DNA, 90 bp, Homo sapiens
cagaatcctcccagggccttgaaagtccatctctgacccaaaacaatccaaacacgatgaggcgagtggtacgacagagcaagtttcggc

SEQ ID NO: 71463 - DNA, 100 bp, Homo sapiens
ctggaacctgctgtatctactcaagagtggaagttttcacaggatcagattttattaagacctctactggaaaagaaacagtaaatgccaccttcccggt

SEQ ID NO: 71464 - DNA, 90 bp, Homo sapiens
gctacatggtgcgctacaaccagccccgcgtagaggaagcgctcactcagctcaaggcagggtgctccgagagatgctccctctcccctc

SEQ ID NO: 71465 - DNA, 80 bp, Homo sapiens
agcagaggatggaacacttcagtgcattcaagaccttaactgatgtaagaaatctcaaatttccaccattatttactcag

SEQ ID NO: 71466 - DNA, 73 bp, Homo sapiens
gtaaagcaaaacagagtcggagtgaaaagaaggcacggaagagaagaagaagttggatgggataccgagatta

SEQ ID NO: 71467 - DNA, 75 bp, Homo sapiens
cccggatgctgaagcaaaattcagagagattgcagaagacagtaaggattgtatcctggagccgctttccctgcc

SEQ ID NO: 71468 - DNA, 96 bp, Homo sapiens
tagacagcagcgactagggctcgggcgccggcgagatgcctttgttcaccgccaaccccttcgagcaagacgtggcactattcctgatcagagaac

SEQ ID NO: 71469 - DNA, 100 bp, Homo sapiens
tggaacttggggtaaaattgctacctgcatttcatactccctctggaataccttgggcattgctgaatatgaaaaggctgctggtggtctacccttggac

SEQ ID NO: 71470 - DNA, 90 bp, Homo sapiens
cttcaagaaaattacggtggtgccgtccgccaaggtcagctgcctataatcttctgtgtgccttaacttgtacctttaatttaaaaatcg

SEQ ID NO: 71471 - DNA, 80 bp, Homo sapiens
accacaatcaaccttattgtggcattgcgccgtacattcgagagtttgagttcagccaggccctggccatccggagctat

SEQ ID NO: 71472 - DNA, 83 bp, Homo sapiens
gagacatcggcctctgcaggcttgccgaagaagggaggtgttttccgagtacttcaaggagctggaggaggagagcatccggg

SEQ ID NO: 71473 - DNA, 100 bp, Homo sapiens
caggtggacggcacggacgacagaagcgactttggtgagactctgtttttggctttcacccccaaccagtgaccaaagacttgaccactcaaagtccagc

SEQ ID NO: 71474 - DNA, 101 bp, Homo sapiens
cggggtccgcaaggccggagaaggccgccgggcccgggcatggtggtctggggcaacgcggaagggtccaaattccaagcctgtagtgtccttcattgctg

SEQ ID NO: 71475 - DNA, 100 bp, Homo sapiens
gcctcctcctcaactttatgattgctgcatatgacagctgtgccactgcatatgttctactggctgaggaagaagcaacaactattgtagatgctgaaag

SEQ ID NO: 71476 - DNA, 100 bp, Homo sapiens
aagctatgcagtatttctttggcatcactgcagctagtaatttgccttctggattagttgtggaaagtaaaaatgtagccctaccaaaaggaactattgt

SEQ ID NO: 71477 - DNA, 100 bp, Homo sapiens
cctctacttagctcagcaattcttaccttgatctcagctaaacgggaagcatttttgaaaagtgattgcacaattgagagtgaaaattactgagtcctga

SEQ ID NO: 71478 - DNA, 82 bp, Homo sapiens
gaggagtccctgtgtgggcagctggagccttcagcaccttccctgataggtgtggtaaggaaggactgggcatcccaaaata

SEQ ID NO: 71479 - DNA, 88 bp, Homo sapiens
taaaacagatctgcgcttccagagcgcagctatcggtgctttgcaggaggaggccactgagggatcccaagaagaggacaacacccca

SEQ ID NO: 71480 - DNA, 50 bp, Homo sapiens
cgccgtggaccctgacggggacggtgccgaggtaaacagagcatccacgg

SEQ ID NO: 71481 - DNA, 74 bp, Homo sapiens
cctgcagaacccaaattggcgtttgtcatcagaatcagagggaaactactaaagttcctggggaagcaaagtag

SEQ ID NO: 71482 - DNA, 105 bp, Homo sapiens
ggaaaaaggaaaaagagaaaagaaatgaaccagtattcttaaattgatttcaagtttgaacaaggcatttttagatgaattcactaactggtcaagaataaatcc

SEQ ID NO: 71483 - DNA, 99 bp, Homo sapiens
atgaaaactcttttatggtagtaaatgctttaggagacaggctttcagtccagtgtaaagctgttggagcgcgggagcaaaggtaaagaatgatgtaat

SEQ ID NO: 71484 - DNA, 50 bp, Homo sapiens
tttttctccctgaggacaacctgagaatcgagagctccagatcatgagaa

SEQ ID NO: 71485 - DNA, 74 bp, Homo sapiens
tgttttgccagcgggagcacttcatcagtttttcagaagaagtgaagtcaagatgaagaaccatttgcttttct

SEQ ID NO: 71486 - DNA, 75 bp, Homo sapiens
aacaagtccacaacctgcttctcacctacctgatagatggaattaaattcacctgtctcggccttccaaaatgct

SEQ ID NO: 71487 - DNA, 82 bp, Homo sapiens
cgaacgggttgcttcccccgctgcgaggatgagacctgcacgcagtggctcacagcagcacgatttgtgacagcccgaggcg

SEQ ID NO: 71488 - DNA, 50 bp, Homo sapiens
taaggattccaagtaactcttatttgcacgaaaggtaatacaggtagatg

SEQ ID NO: 71489 - DNA, 50 bp, Homo sapiens
gcatcgccggcactgccccccagaatgaaaggggagtgtgtttgcctaca

SEQ ID NO: 71490 - DNA, 97 bp, Homo sapiens
acttcataagccagggagagatacgtttggatcaggagttagtgataacagtcaagagaatccatcccattaaatgacctgaagtcagaagtatcac

SEQ ID NO: 71491 - DNA, 83 bp, Homo sapiens
ggcagatattcctccccagcatgtcagcatgaccaagcgcctctactacctctggatgtagggagacgctgttgcggcagctg

SEQ ID NO: 71492 - DNA, 88 bp, Homo sapiens
tatgtacgatggaatccacggatgagacctcagagggtctcaacgcagactacgtgaagggagagaacctggaagccgtggtatgtga

SEQ ID NO: 71493 - DNA, 100 bp, Homo sapiens
cagctctcccggcagcacgaggcgcagctccacgagcacatcaagaaaggcctaaagaatgtatttgacgaagcaatattggctgccctggagcctccag

SEQ ID NO: 71494 - DNA, 100 bp, Homo sapiens
gaggaagaattcccaagccaaagctttccagatattccacatgacatatgatctcgccagtgcagtggtgagaatttttaatctcatcggcatgatgctg

SEQ ID NO: 71495 - DNA, 75 bp, Homo sapiens
cgtgaggccgcggagcgccagctcaatgaagtggagattctggacgcaaagacaagggagaagctgtgtttcttg

SEQ ID NO: 71496 - DNA, 74 bp, Homo sapiens
gcccgtgcactgggccgcgcatttcggcaaggcccagaagtctggctcaggagaggaccctcaggctgcagaag

SEQ ID NO: 71497 - DNA, 83 bp, Homo sapiens
ggctacgaatacgtgagcccggagcagctggctggctttgataagtacaaggtaatagcctgcagctggtgttttgagaagcc

SEQ ID NO: 71498 - DNA, 83 bp, Homo sapiens
tttacttccagaagattggtggagcttgatctgaagcacttcaaatgcttcaccttcagaaggcgcaccactagcaggaagtt

SEQ ID NO: 71499 - DNA, 100 bp, Homo sapiens
ctggacaagatgaagtctttctgccaggtctccgtgaggccgggtgacgctccagaatgggagacaagccaatttgggagcagattggatccagcttcat

SEQ ID NO: 71500 - DNA, 75 bp, Homo sapiens
tcccccctgagcccgaggtgctgacgtcgcaaaaaaattggatatttccctgaaacctgggctcttgaagacgca

SEQ ID NO: 71501 - DNA, 100 bp, Homo sapiens
caaccgaggcctcaacaacaaatgcttcgatgactgcatgtgtgtggaagggaagctgcctatcgtcaatgattgcgatgagctggtggccatcatcgcc

SEQ ID NO: 71502 - DNA, 73 bp, Homo sapiens
tagaacggagctgaccctatccgaacaggcgcagtctttagctctcatggattgggagctgggaaaggaatga

SEQ ID NO: 71503 - DNA, 75 bp, Homo sapiens
agaaggggaacggatctgtgtgcccacagctcctggagccccacaggatgagacctgcacgcagtggctcacagc

SEQ ID NO: 71504 - DNA, 100 bp, Homo sapiens
gaatattgttcagttgattatgccagccagatgcagggtcctatcggtggtgctaatagagatatttctattctccagtgccacggggattgtgaccctt

SEQ ID NO: 71505 - DNA, 50 bp, Homo sapiens
tttaaaacttcgccagaatttctcttggtgctggacaggcatctttgttt

SEQ ID NO: 71506 - DNA, 101 bp, Homo sapiens
gcgacaagccgctggcagccgcggatctcaccgccgctcaggaaagaagatgctgatatgctacaacacggatgaacctggaggacgtggtgcagtgaaat

SEQ ID NO: 71507 - DNA, 100 bp, Homo sapiens
gggggctcagagatccaagtgcgcgccctggcgggtccggaccaagcttgccttgcgccatggactggcagccagacgagcagggcctgcagcaggtcct

SEQ ID NO: 71508 - DNA, 100 bp, Homo sapiens
gacggaggtgctggcacatgagatcgagcggctgcagatggagatgaaggaggacgacgtttcttttctcatggtctgggaggggctgaacgtggtgaag

SEQ ID NO: 71509 - DNA, 100 bp, Homo sapiens
ggcgtccctgcctcaggcctgcccggacggtgtgcgggtcctggctataagtcaccatggcacagcaagctgccgataagtatctctatgtggataaaaa

SEQ ID NO: 71510 - DNA, 100 bp, Homo sapiens
ggagtagatgttactggacctcacctctacagcatctatcctcatggatcaactgataagttgccttatgtcaccatggatatgtcacagatctaagcag

SEQ ID NO: 71511 - DNA, 100 bp, Homo sapiens
ggaacttcatcatcatctacttcacaggaattgccatttatctttgtagaatttgatggctgtaactggaagcaacactcctgggtaaaagttcatgctg

SEQ ID NO: 71512 - DNA, 90 bp, Homo sapiens
ggcgctggaagggatgtcgtctcagcagtgctcgggcgcagggggggccctcagcctcttggccttgaacgggctgttcatcttgattca

SEQ ID NO: 71513 - DNA, 82 bp, Homo sapiens
ggcgcacgagggcaccatggcccagacgcccgccttcgacaagcccaaaggagtgcatccgccccaacccttttccccctcg

SEQ ID NO: 71514 - DNA, 91 bp, Homo sapiens
cccaaaatcagtgattctacatctcaagctcatattttgaagtgtttacgggacagtcattttgtttactcattcagccctgttgcaggtc

SEQ ID NO: 71515 - DNA, 97 bp, Homo sapiens
cgccgtcagcctcatggagcggcggaggctcaaccagctgctcctgcccctgctgcagggttctccaaaaaatgtggaatcctttgcatctatgctg

SEQ ID NO: 71516 - DNA, 100 bp, Homo sapiens
ctccagggaaaggatgacatatttttggacctgaaacagaaattctggaacacctatatggtgttgacttcaaaatcaaaactgtagagctaagaggaaa

SEQ ID NO: 71517 - DNA, 83 bp, Homo sapiens
ggagcccccagcgcagcggccgcgggatggaagcttcctggcgccaggtggccggtggccgaggccgatcccggggacgggcc

SEQ ID NO: 71518 - DNA, 97 bp, Homo sapiens
tacctagcggaggaggcgtgccctggcatctccgacaccatggtggcccagctcgtgcagcggctccagagaattgagcccctgagtcctgagttgg

SEQ ID NO: 71519 - DNA, 49 bp, Homo sapiens
gtttattcttctctggatctagaccagatgcctctttgacaaggccact

SEQ ID NO: 71520 - DNA, 101 bp, Homo sapiens
ggcggctcaagcgcccagaaacccctactcatgatccggaccctgagactcccctaaaggccagaaagcttttctagaatattgcaggaaactgtgaagga

SEQ ID NO: 71521 - DNA, 158 bp, Homo sapiens
cacgaaggaagtacgaggacagcacgtggaggctccgcgctggggcactgctgctcagcccccaacacctgagctcccagttgcttctttgagtcagggtgcagctctggtcacctggcggcctcttcagctcagccctccacaaagtgtgagcctga

SEQ ID NO: 71522 - DNA, 100 bp, Homo sapiens
gaggtgtcggaggtctcatctttgaactactgccggagcttctgccaggaagaggagttgtacgcatgtcagagaggttgcaggctgttttcaatttgtc

SEQ ID NO: 71523 - DNA, 50 bp, Homo sapiens
cgccaccacccactccggacacagcttgcattcacaagagatgggctctg

SEQ ID NO: 71524 - DNA, 75 bp, Homo sapiens
cgtacgcctatctcttcaagtacatcataatcggcgacacagggaaatgatcttcattggttagcatgtgcctta

SEQ ID NO: 71525 - DNA, 90 bp, Homo sapiens
acacgcaaaataaaagacacttgtattcagtcaccaagcaaagagggtgctgttcaaggccctgaagaatttgcagaggggttagtgatt

SEQ ID NO: 71526 - DNA, 99 bp, Homo sapiens
catgtatctgaaaagaaaatttctgtttcatgtgaagaattccgatttggtactttcagaaccatcactgttgctggaggcacctgacaaatcctagcg

SEQ ID NO: 71527 - DNA, 80 bp, Homo sapiens
cggaggaggatgggctgcagacacagcaggctgagcagctgcaaacccccgaaaaaggtttggacatatttgactctttt

SEQ ID NO: 71528 - DNA, 51 bp, Homo sapiens
gcgtctggccaagaatcagaggaagtggaaaagtcctccatacattttctc

SEQ ID NO: 71529 - DNA, 75 bp, Homo sapiens
caccctgaccaccacacccaccaggtctgctgctaccatcttccgttgatgcaagtggagctgcccatcagcctt

SEQ ID NO: 71530 - DNA, 75 bp, Homo sapiens
cttaattcagactttgaggatgttcaggaacagggagctcactcagtgggtttgatgtggtggatgctggctcgg

SEQ ID NO: 71531 - DNA, 109 bp, Homo sapiens
gaagagtctgggcttcgctacgataaagcttatcccggggacaggaggctgaggttggcaaaagcagcttttgatgatgcaattgcagaactggatacgctgagtgaag

SEQ ID NO: 71532 - DNA, 75 bp, Homo sapiens
tccaggcccacatcgacagggacgtcctcattgtcctcggaactgtggctgcaccatctgtcttcatcttcccgc

SEQ ID NO: 71533 - DNA, 83 bp, Homo sapiens
ctgttgctgggctcggcgtgctgcggttgcaatgaggtgtcgctgcagcagcatgcacttcttggtagcagaatggaatgaac

SEQ ID NO: 71534 - DNA, 96 bp, Homo sapiens
catcctcctgactccataaactattggattcataacctgctccatgcttgaaaacatggggattggaattcgagacagggttttgccgtgttgccc

SEQ ID NO: 71535 - DNA, 75 bp, Homo sapiens
ccaagattccagatgttcctgtggaccccagtccaggtgactgtggggatcatgttgttataatgaacacaagac

SEQ ID NO: 71536 - DNA, 98 bp, Homo sapiens
ggagcatatattatggaacacaacctacagcttactccttgatgtggaggactatgaaagacgttatctcctaagtctggaagaagagcgacctgccc

SEQ ID NO: 71537 - DNA, 100 bp, Homo sapiens
cctttcgggggaccttcgagacaaggctgtcagcccctaggtggatttcgccttcacagtgtggcagagcttccctgagaggattgtggggtaccccgcg

SEQ ID NO: 71538 - DNA, 98 bp, Homo sapiens
caccctgagtgcggatttctgctatgatgacaggttgtacggctctccaggtgacattgacctctggcccgcccttatggttgaagacctgattcctg

SEQ ID NO: 71539 - DNA, 90 bp, Homo sapiens
ccaactctagtgctgctgacccaagggaatacctctgtttggacaatagtgcaagtaggaaatccatgaagtccagaagtagaagtcctg

SEQ ID NO: 71540 - DNA, 75 bp, Homo sapiens
tggacccctactattgcaacaagctccagaaacatgacaaggaggactttcctgcctcttggagatcagaggagg

SEQ ID NO: 71541 - DNA, 100 bp, Homo sapiens
tgcaggacaccgacatggaacagggactcactgggggtacatcgaagtcttttgacctccatacagtgattatgcctgtcatcgctggtggtatcctggc

SEQ ID NO: 71542 - DNA, 50 bp, Homo sapiens
gcgagtccggtctcaaaatggaggaggatacgaagcgttttcggcttcct

SEQ ID NO: 71543 - DNA, 83 bp, Homo sapiens
ccttgggcctcgcgccggctatggccgtgccctggggctgagccctcaggcctgtgtggactgtgggagcagcacccaagatc

SEQ ID NO: 71544 - DNA, 75 bp, Homo sapiens
aaaggagtggacattgctagcaatgagctcccaaagccatccaggaagttctactacatcaccctgctacgagac

SEQ ID NO: 71545 - DNA, 75 bp, Homo sapiens
aagacagcgaaaagagaagcagaagccccggtggcaagagtctgaaggtgaacctgatgcagcacatgaagctca

SEQ ID NO: 71546 - DNA, 75 bp, Homo sapiens
ctgcccacttggccgcgaagtggcccgagaccccgctgctgctggaggcaagtactatactggcaattgctggag

SEQ ID NO: 71547 - DNA, 100 bp, Homo sapiens
cggaggcaatggatgaacagagcgtggaggttgggcccatgagatgtgtgctctgtatattccggaggtacaatttgccagtgtttccacaatggaacca

SEQ ID NO: 71548 - DNA, 83 bp, Homo sapiens
agcaaagccacctacagttactatgcctcgaatcaaggtaaatgagctggatggtatcccgttgatcctggacaactgcaaca

SEQ ID NO: 71549 - DNA, 100 bp, Homo sapiens
gggcatccagggagagctttcttgttagagcccacacacaatcgggcgcatcaagtggaaatgactgctgtccatgcaggcaacataaacttcaagtggg

SEQ ID NO: 71550 - DNA, 75 bp, Homo sapiens
ggtggcggcgctcaatggacggaggctgggcctccctattccttgagacacaacaatattgaaattagaccaact

SEQ ID NO: 71551 - DNA, 90 bp, Homo sapiens
ctggcacgaccaggatgagacatcgagtgtgaagagtgatggggctggtggagcgcgacaacctggccgaggacatcatgcgcctccggg

SEQ ID NO: 71552 - DNA, 101 bp, Homo sapiens
ggaaagcgccgagatgacgggctttctgctgccgcccgcaagcagaggctctaattgcctggacgaagaaccccgagctgtctggccggcctttcacagta

SEQ ID NO: 71553 - DNA, 74 bp, Homo sapiens
ctctcctgttttttcaggcaattgaaaacactgcctcagtatctgaacacaagacaaagtcttgctctgtcacc

SEQ ID NO: 71554 - DNA, 75 bp, Homo sapiens
gaccgagagcgtgaccgagagcgcgaatatcgtcatcgttagaagtggtggtgaccgcggtggcttcaaaaattt

SEQ ID NO: 71555 - DNA, 75 bp, Homo sapiens
agagacaagtaaactctcagagtaactgtcccctctgactaccatttctaagacctgcttttttaaaggctgcag

SEQ ID NO: 71556 - DNA, 75 bp, Homo sapiens
gaggagcagcatggcatttcagtcactggtttgcagagtccagagatggggtgatgattatgatgaagaaggtga

SEQ ID NO: 71557 - DNA, 75 bp, Homo sapiens
actggacaccttcgtcccctttgatccctgtgtgctgaagagggtccccagccccaccccagccccaaaggaggc

SEQ ID NO: 71558 - DNA, 50 bp, Homo sapiens
agagacaaaagaaacgggccccgactgcaacaacgaaagcttgacctcct

SEQ ID NO: 71559 - DNA, 73 bp, Homo sapiens
agctgcctctctggtctccaactagtattatgagaggagtcaatcagagtactatactggcaattgctggaga

SEQ ID NO: 71560 - DNA, 76 bp, Homo sapiens
aggttgccttggaaaatgccaacgccgtgtctgaaggaaagcggcgttatgacaggaagcagagtggctatggtgg

SEQ ID NO: 71561 - DNA, 80 bp, Homo sapiens
cgcgctactctctctttctggcctggaggctatccagcgttaacacagaaatctgcctcctgggccatgccgcttctaag

SEQ ID NO: 71562 - DNA, 82 bp, Homo sapiens
tcgggctgaagcgactgagtccgcgatggaggggcataaggaaatggtggcaggcacttcctcctaacaagaaggaagtagt

SEQ ID NO: 71563 - DNA, 75 bp, Homo sapiens
gcgctcattgggaatttagttaaggggagcaagggagcccccggtcctgctggtgctcgtggggagagcggcctg

SEQ ID NO: 71564 - DNA, 82 bp, Homo sapiens
tgagatgtttcatcccaacagaaccggctttacagttgatgcctttcagtatggcgtggttgaaggttgcacagcctatttt

SEQ ID NO: 71565 - DNA, 83 bp, Homo sapiens
atgaagaattggaggaacagtgtgtccagcatgggagagtacatgagacgatgaagcaaaggagtgcctgtgaagaaaacggg

SEQ ID NO: 71566 - DNA, 75 bp, Homo sapiens
gacggctgaatgtgccatcgtcaccctgcaccccgagcagaaggcagaccggtattttgtgttatacaaaccgcc

SEQ ID NO: 71567 - DNA, 74 bp, Homo sapiens
gaagaagtgcttgagactgctgataaagagcttggggaagcaaaggaagtggaaaagcattgtcgctgtggaaa

SEQ ID NO: 71568 - DNA, 75 bp, Homo sapiens
tcgtctccgccatcagctcggcagtcgcgaagcagcaaccatggaaccctaaggactctgcaatatgaataattc

SEQ ID NO: 71569 - DNA, 76 bp, Homo sapiens
gacagcaaaaatgacccaccaatggaagcagctggcttcactgctcaggtggctggtcattgaccgcaaggtttac

SEQ ID NO: 71570 - DNA, 100 bp, Homo sapiens
ctggagctgggtcagtccgccgctcaccccgcggccgcaccttcccgccttctcaggaagggaaaaggccgaggcatcagcgtgtgaagaccgcaaagac

SEQ ID NO: 71571 - DNA, 98 bp, Homo sapiens
ctctgaaaaactcttcaacactgttattgtaaacaaaggtctgtcagtttgtcgtctctgtcaacgggctcaatgtcctgcatgtagactaccggacc

SEQ ID NO: 71572 - DNA, 50 bp, Homo sapiens
agattcgcagtggtcgcttcttctccttgccagtgaaactgaaattgcat

SEQ ID NO: 71573 - DNA, 100 bp, Homo sapiens
acaaaattcctattgttgtgggaggaaccaattattacattgaatctctgctctggaaagttcttgtcaataccaaggtcttcccagagtttgctgctgc

SEQ ID NO: 71574 - DNA, 100 bp, Homo sapiens
taaaaatcgccaaaaattacttggagcaaagggcagtcggcggagcttcgccaaggctggcgcagtcggtggaagttaaacgagctgagcctcgggacag

SEQ ID NO: 71575 - DNA, 100 bp, Homo sapiens
gaagcagcaaggtctagcaattccaaaatcaccaccacgctgggtctggttgtccatgctgcagccatgggctccccaaaggaagtcattttctcagaca

SEQ ID NO: 71576 - DNA, 99 bp, Homo sapiens
gtgctcatgtcccgataccatcggcgcaaggcccagcagatgacccagaaatatgccccaggtgctaaagagctgtgcagaatttgtggaggagtatgg

SEQ ID NO: 71577 - DNA, 96 bp, Homo sapiens
ggagtactggccgagatggctaagaagtccatgccaggaggtcgtctgcagtcaggggcaattccaaaagtcttcagatttccaaaaggaaggact

SEQ ID NO: 71578 - DNA, 100 bp, Homo sapiens
aaacaaacaccaaagactggacagtgacacctgagcacgtcttgcctgagtcccaggaatcccatttaccacattgagttctggacatcaaggttctccg

SEQ ID NO: 71579 - DNA, 88 bp, Homo sapiens
cagcgtcctgctgctgccgctgctgggcggtgctggagaatctggtaaaagcaccattgtgaagcagatgaggatcctgcatgttaat

SEQ ID NO: 71580 - DNA, 75 bp, Homo sapiens
cgccagctctgtccgctgcccacagcctagcagtcgggaccgtactgagatctttctcctggcctgccctccatg

SEQ ID NO: 71581 - DNA, 98 bp, Homo sapiens
gtggagtctttggctggctatgcagacatctttctggcctactgaacttgacgcactggtatttggccatctatacaccattcttaccacacaattga

SEQ ID NO: 71582 - DNA, 74 bp, Homo sapiens
atccggagcctgaccattgggtgctccagttgctcgaggtcaaaatgcagatcttcgtgaaaacccttaccggc

SEQ ID NO: 71583 - DNA, 94 bp, Homo sapiens
aggagctgtgcagccgcgaggaggcgcgggaggtgttcgagaacgaccccgagacgcacatgattaagtaccggtacatcccgttcacacatgg

SEQ ID NO: 71584 - DNA, 90 bp, Homo sapiens
cctacttcaaggataagggtgacagcaacagctcggcgggctggaaggtgtatgaggaattgcgggccactggggcggcagctgcagagg

SEQ ID NO: 71585 - DNA, 50 bp, Homo sapiens
ttggaattgatgatcaagatttccagctgatgtagaaggccaatccttaa

SEQ ID NO: 71586 - DNA, 75 bp, Homo sapiens
aagagtttaaaacctccgtgtctctggctgtctctaggctaagcagaacggtatcagatattgagcgtgggtgga

SEQ ID NO: 71587 - DNA, 98 bp, Homo sapiens
gctattgatgaagaaagtcggaatgagtcaagttcccattatgtaatctccctaaaagcttttaacaatgccggagaaggagttcctctttatgaaag

SEQ ID NO: 71588 - DNA, 96 bp, Homo sapiens
gtcaaggcactcagctcaaatacacacacctgttgccattatagagctggaattaggcaaatatggacagaaggactccatgaaagatgacagaag

SEQ ID NO: 71589 - DNA, 89 bp, Homo sapiens
acctttgatccagaacttgcagcaacaatagaactccatccggcacaacctgtcactgcatagtcgattcatgcgggtccagaatgagg

SEQ ID NO: 71590 - DNA, 100 bp, Homo sapiens
aagttgtcaggaacagattgatcttgttccacgaagccctcaagagttgtatgaactgacatctctgatttggattgcaagtcaagtagctgctttggac

SEQ ID NO: 71591 - DNA, 82 bp, Homo sapiens
agccagtgtggaaaaccagtggtaaatgtcagctacaggccagcttatgaccaggtgtcagttgtacccgaggcgttctcag

SEQ ID NO: 71592 - DNA, 100 bp, Homo sapiens
gtgcccgctcggtcttcggcaacattaagattactttctatgaagacaaaaattttcaaggccgtcgctatgactgtgattgcgactgtgcagatttcca

SEQ ID NO: 71593 - DNA, 100 bp, Homo sapiens
gactctgtatctggaactggtggcgtcggcccaggtcggcgggaaccccctgaaccggacacatgcagatgacaatccaggctctccaggatgaattgcg

SEQ ID NO: 71594 - DNA, 100 bp, Homo sapiens
ccccaggcacctacaccccctagtgaacagagcagccccccaagcagggacccgttgaacaactctgggatgtggatgaggcttccaagaaggagatcaa

SEQ ID NO: 71595 - DNA, 100 bp, Homo sapiens
ccgacaagatggcggacggggagctgaacgtggacagcctcatcacccggctgctggagggcagaagtcaattcatctggaaagactatctctgagtcag

SEQ ID NO: 71596 - DNA, 87 bp, Homo sapiens
acttcgtgctgtgcgggatcgacgcggacagcgggctggagcctgacgagctggcggatgtaaccttctgtaatggaagatgattga

SEQ ID NO: 71597 - DNA, 80 bp, Homo sapiens
atgaaggctgcaatcacatgcagtgtgctaagggtctgaaaagccctcaagaaagcctcagtgatcttggtgccatagag

SEQ ID NO: 71598 - DNA, 98 bp, Homo sapiens
atcatggcggatggcccccggtgcaagaggcgcaaacaagccaatcccaggaggaaaaacgttgtgcagaagattctgaccttatttgaggcttacat

SEQ ID NO: 71599 - DNA, 100 bp, Homo sapiens
gtagcgaggaggaacgcgctaaggcaaagcacctgaccaagatcactccatggatgaaatgacagctgtggtgaaaattgaaaaaggagttggtggcaat

SEQ ID NO: 71600 - DNA, 87 bp, Homo sapiens
actataaagctttggaagatgcagatgagaaggttcagttggcaaaccagatatatgacttgggtggttctcttcccaaagtggaag

SEQ ID NO: 71601 - DNA, 98 bp, Homo sapiens
tgtgccacacaggtagccctggacggcattcagtgttttgcccaggcgcagtcgaacctcctggggaagtgccgccggccgcgcaccgccttcaccag

SEQ ID NO: 71602 - DNA, 100 bp, Homo sapiens
tgcgagaacagctattccacgagaggatccgcgagtgtattggtgtggccactgtaagaaaatgaagccggagtttgagaaggcagcagaagccctccat

SEQ ID NO: 71603 - DNA, 98 bp, Homo sapiens
gtcaactgctcgggccgcgggctgcggacgctcggtcccgcgctgcgcatccccgcggacgccacagcgctatacgagatcctgacacccaatgccat

SEQ ID NO: 71604 - DNA, 75 bp, Homo sapiens
aaaagacagagaaactatgggacacagatatgttgaagattcagtgatctcttctccctggcggaggaatatgag

SEQ ID NO: 71605 - DNA, 98 bp, Homo sapiens
agccactttgcattgactggaaacaatggcatttacagaaagagtcaacagcagtggcaacagctgcacatcattgactcctgggcccaactgtgacc

SEQ ID NO: 71606 - DNA, 87 bp, Homo sapiens
cacacaaaggaacctatgcagatgactgcttagtacagagagtaactcagagagaagaagaaggaggttcctgctgtgccagaaacc

SEQ ID NO: 71607 - DNA, 100 bp, Homo sapiens
gagcagccttggtcttgacctatttggctgttgcttctgctgcctctgagggaggatcttaagtaccaggcccaagataactttatgatgatggatgatg

SEQ ID NO: 71608 - DNA, 74 bp, Homo sapiens
aaagctgtacaagagatcatgcaggggtttgttaaagttgttaagaataaggcctactttaagagataccaagt

SEQ ID NO: 71609 - DNA, 96 bp, Homo sapiens
ctgtgctgtgcctctctcgcccacattttccccaagcactctcaggaacctggcaacagttgccctcggaccagaaagaagaaaatctgactcagg

SEQ ID NO: 71610 - DNA, 85 bp, Homo sapiens
tgagaaagtttatctgccctctcacaggactgtggcccatcaacactctgaaatgtacacgaatggtctgccgaaaaccgaccga

SEQ ID NO: 71611 - DNA, 100 bp, Homo sapiens
ctaacatccccgagcactggcactacatcagcttcggcctgagtgatctctatggtgacaacagagtccatgagtatgcggtgctttgtggtcagctggc

SEQ ID NO: 71612 - DNA, 100 bp, Homo sapiens
aagttggataacttggatgaagaatgggccacagaacatgcctgccagggagttacccagggagattatacacctatggaagacagtgaagaaacctctc

SEQ ID NO: 71613 - DNA, 100 bp, Homo sapiens
ggaggtctcgttccccactcagacgtagcaggtctccaagaagaagaagcagatctcctcggagaagactgggagacaagacttgaaaatagtgtgtcag

SEQ ID NO: 71614 - DNA, 101 bp, Homo sapiens
gaggctacagagccggcggcaggggatggcaagatagcggcgcgggagcgtaccgtatctggaatcccggcgcctagaacgtgtttttcgggagagcaaag

SEQ ID NO: 71615 - DNA, 75 bp, Homo sapiens
tcgctagctcgcaggccgcgccgggaccagggccacgactgcttcccggtgctgttcacctatgacgccgccgcg

SEQ ID NO: 71616 - DNA, 90 bp, Homo sapiens
gtttgcaaatgcagaggaagaatttttctatgaggttgggataattcttcactattccacccttgccacagtactatgggtaggagtgac

SEQ ID NO: 71617 - DNA, 100 bp, Homo sapiens
cggtcatccacctgctgcagatggggcaggtgtggagattcctcggacaagaaggaaaagaaatcttttagccttgaggaaaagtccaaaatctccaaaa

SEQ ID NO: 71618 - DNA, 75 bp, Homo sapiens
tgtactcagcaatgccgactgcctacaacactgtgatggtggcctgcgttttggagaaatggaacgagattgtca

SEQ ID NO: 71619 - DNA, 100 bp, Homo sapiens
ttccaagtgggacagatactggagatcctcaaagtaagcccctcggtgactgggctgctggcaccatggacccaggattattcgaaagcccttatgagac

SEQ ID NO: 71620 - DNA, 74 bp, Homo sapiens
gacctgttcaccagcactgtctccaccctagaggattccccagctttccgttgcacaaacagtgaagtgacagt

SEQ ID NO: 71621 - DNA, 89 bp, Homo sapiens
aagctccctggagcagggaccttatcccagcgtctaccgcggcgcccgtcacctagttgctacaactatctgtataggatgaaagctct

SEQ ID NO: 71622 - DNA, 73 bp, Homo sapiens
gatgaacccaacctagtgggtgtaatacatcatgaactgcaggagcgatcgtcttctgatcaaaggaggtaaa

SEQ ID NO: 71623 - DNA, 89 bp, Homo sapiens
tcgcagactctcatccgccctcagaaagattgtgcgtgtgcgtgtgtgtgcgtgtgtgggtttgttaaagttgttaagaataaggccta

SEQ ID NO: 71624 - DNA, 100 bp, Homo sapiens
atcgatggcctactggggataacattcatgcagaacatcaggtttttcgttggaatatacgttgcacatttatggcgattctgagtgtgagggcagactt

SEQ ID NO: 71625 - DNA, 75 bp, Homo sapiens
cgggtgtctcgtgtgtgaacatcacaggatctggggactttgatgattttaacctggaggatgcagtgaaagaaa

SEQ ID NO: 71626 - DNA, 101 bp, Homo sapiens
atcttcaacaagaggacccaggagaaattcgccctcaaagtgtctgaatctccctggctccatgccccatctctgaagaccagctgtgaatacgtgagcct

SEQ ID NO: 71627 - DNA, 75 bp, Homo sapiens
ctcatgggatcaagttggtcaacccaatgttccgaggctatgcccagcagactgaccccttctggacagccagct

SEQ ID NO: 71628 - DNA, 95 bp, Homo sapiens
ccagctgaagagcgacaagccgctggcagccgcggatctcaccgccgctcaggatgcatcactgtaagcgataccgctcccctgaaccagacccg

SEQ ID NO: 71629 - DNA, 101 bp, Homo sapiens
tgagcggcggcgaacatgcgcttttgacacattggagctttggtgtcatccccagcactcctctggccatccatacaccactgatgccaaaccagagcatt

SEQ ID NO: 71630 - DNA, 100 bp, Homo sapiens
cctagataaaggatccggtgtagtgattattatggatgcccttacgtcgtcctgactcatctgatgaccgttatgtaatgacaaaacatgccaccattta

SEQ ID NO: 71631 - DNA, 87 bp, Homo sapiens
gagtacagcgtcgggcgggggacagctcagtgtgttcatcctcgaggtggtgtgattcagagtgtttcttcatggaagcatggctcg

SEQ ID NO: 71632 - DNA, 100 bp, Homo sapiens
ccggagattgctttctggggaagacacgaatgcagagtttgagtccagatcccaaagcccagtacacaagtatctacggagccctcaagaaaatcatgcg

SEQ ID NO: 71633 - DNA, 75 bp, Homo sapiens
tactcaaactgaaacgtctcctgcatcagggaaacttcgtggcttgcatgacagctattttacgacaaatggaag

SEQ ID NO: 71634 - DNA, 142 bp, Homo sapiens
ctcggcgccgccaaacagcccagctcgcgcttcagcgtcccggcgccgtcgcgccactcctccgaacttcatcacctgattcttccaatgagaattccgtagcaactcctcctccagaggaacaagggcaaggtgatgcccc

SEQ ID NO: 71635 - DNA, 100 bp, Homo sapiens
ccccagattgatattgtgaacatcagcgacagctttgagatgacctatagatttccagggccctgcgaaccagaagacctcatcgacgggatcatctttg

SEQ ID NO: 71636 - DNA, 99 bp, Homo sapiens
ctacgaggaggtgcgcgagaagtacaaaggtgactgtggggatcatgttgttataatgaacacaagacacattgcattttctggaaacaaatgggaaca

SEQ ID NO: 71637 - DNA, 52 bp, Homo sapiens
aaaggcccaaagagacagctcactggactgagagtggctttcacaatggaag

SEQ ID NO: 71638 - DNA, 87 bp, Homo sapiens
tggatctgagcttgtacagaaatacgtcggtgagttgctcttcaaaaaatggactcaatgctttcctcagaagctgcctgggtatcg

SEQ ID NO: 71639 - DNA, 100 bp, Homo sapiens
tgcccctgacacacacagccgacatcaccgtgctccgttggagccccagtggaaactgcctgctgtctggggacaggatgttcagcccacaagagcttac

SEQ ID NO: 71640 - DNA, 100 bp, Homo sapiens
gtaactgtcttcatctttacagaggaatagtctacaaaggaagacttgtaacctggagaagaggaagaagaatttggtgttgatgattcttattctgaac

SEQ ID NO: 71641 - DNA, 90 bp, Homo sapiens
ccaagagtgagcgagcggacccgcgatggtctggagaggtgttggtgaatgttaaggagcactcccggcagatcaacgacatccagttat

SEQ ID NO: 71642 - DNA, 88 bp, Homo sapiens
taaagcccacagagatctacaaccttggagcccagagccacgtcaaagatgctcacaactgtattcctgagctggacagtgagacagc

SEQ ID NO: 71643 - DNA, 74 bp, Homo sapiens
ttatggcggcgctggagagggggcgctgagctgttggggttcttgattattacagacctctttctgaaaagccc

SEQ ID NO: 71644 - DNA, 74 bp, Homo sapiens
tgtgacaacgaccacgtctccaaaatgagtcgcatcttcaacccccatctgtataagcagtttagccaaatttt

SEQ ID NO: 71645 - DNA, 75 bp, Homo sapiens
gttcagaagagccaaggaataaacatgcaatgaacccaaaaggttgccagtagtcatcagagtaccaaaactgat

SEQ ID NO: 71646 - DNA, 90 bp, Homo sapiens
ccttctttcgatcagagatcggcggagaccctcgaagtgcgcaaacttgacactcaccctgaccgattccacctgctcctacgaagcccg

SEQ ID NO: 71647 - DNA, 92 bp, Homo sapiens
tgcggagacaacagcaggggtcagctgggccgcaggggcgcgcagcgcggggagctgccagaaataaactatcaatcttgcccagactggag

SEQ ID NO: 71648 - DNA, 98 bp, Homo sapiens
aaaagctgaaggtggaggcgccgcaagcgctgagctgaagaaacacttaaattctggaaatagcgactcagtatcatggccagcagccttaatgaaga

SEQ ID NO: 71649 - DNA, 98 bp, Homo sapiens
tgtacagaacattgtagaagaaatggtgaacattgttgttggaggaagctgttttaggttatgtgaaagagatgtttcctcatctctaaggcttacca

SEQ ID NO: 71650 - DNA, 74 bp, Homo sapiens
aggctgatggagagctgaacattactcttccagaagagaggcggatgccccaaaccttccgtgacccagcaact

SEQ ID NO: 71651 - DNA, 50 bp, Homo sapiens
gagcggagggagccccagacacgcctacatgaagcggcggcacagctcag

SEQ ID NO: 71652 - DNA, 74 bp, Homo sapiens
gacagaggtgcctggggcaacctccaccttgacggttccaggctctttattgagaaactaccaaaacatcgaga

SEQ ID NO: 71653 - DNA, 100 bp, Homo sapiens
aagcccttcaacgcccgctataaactgctgatccacatgagagtccactctggggagaagcccaacaagtgtacgaggtgacgttaaaggtgcacatcag

SEQ ID NO: 71654 - DNA, 98 bp, Homo sapiens
cgcacccttcagggtcttgagattgagctgcagtcacagctgagcatggaggtaaagatggaccagtgggatttgctgattttgtttataagcacatt

SEQ ID NO: 71655 - DNA, 100 bp, Homo sapiens
ggttcttctgagtgcagctgaagcagcagaggtgattctgcgtgtggacaacatcatcaaagcggcacccagaacaagaaactcctttacgagaagatga

SEQ ID NO: 71656 - DNA, 83 bp, Homo sapiens
acctttcggcttctgagacggcggcagcagcggcattcagaagccccatgtgccactcccctgatctgcagcttcggtaggcc

SEQ ID NO: 71657 - DNA, 100 bp, Homo sapiens
gcaagatcctgatgaaattggcatcgagttagaagccaccagcaagaagtcagccaagagatgtgttaaaggatgttggttcctgcaaacaagaactgac

SEQ ID NO: 71658 - DNA, 51 bp, Homo sapiens
cattgctaagcttgttcactttcagacatatctgaagagatggattaagaa

SEQ ID NO: 71659 - DNA, 87 bp, Homo sapiens
gtgcccttcccggagcgtgccctcgccgctgattatttactggcaagatgagcaggattaccatgaaagaaaagtccagatggactg

SEQ ID NO: 71660 - DNA, 75 bp, Homo sapiens
cagactcgtttctacactggagaactcgtcaaagccatagttgttagaacaggttacagtgtacagcatgtatgt

SEQ ID NO: 71661 - DNA, 75 bp, Homo sapiens
agatttaactacgtggtccggaacaaaatccagtctcatagcagaggagaatataatgtttacagcaccttccag

SEQ ID NO: 71662 - DNA, 100 bp, Homo sapiens
gtttcaagcgattatccagtacacattgataagtgatgtcttggcattgcccattttcaagcaggaagattccagccttccattggatggtgaaacagag

SEQ ID NO: 71663 - DNA, 104 bp, Homo sapiens
gccagtcgcctccaggccaagagggatccttcacccgtgtctggtgtcgtgaaaactacccctaaaagccaaaatgggaaaggaaaagactcatatcaacattg

SEQ ID NO: 71664 - DNA, 82 bp, Homo sapiens
gcacttcgtcatgttcttcgcgccctggtcttgccccagaagctgcgggcacatccacgcctgaaatgcggcgctcagtcct

SEQ ID NO: 71665 - DNA, 51 bp, Homo sapiens
ccgctgcttctgctgaggctgatggcaagaatgtgacagtgatgataacat

SEQ ID NO: 71666 - DNA, 100 bp, Homo sapiens
gtggaagacagcattggtactaatggccaactcaagcacacaagtgtggagagtgaggcgaatctccattcttcctccagcactttttccaccacatcca

SEQ ID NO: 71667 - DNA, 83 bp, Homo sapiens
tgttagaagaattcatgctcatccggtcttccgtgtgtgctaagatcgtgcagctcctggggcagaatgaggtggactatcgc

SEQ ID NO: 71668 - DNA, 90 bp, Homo sapiens
gtacaccgtggtgacattgtatcattggttttctgatgaagaattgaaaagaagagtagctgaggagctggcattggagcaagccaagaa

SEQ ID NO: 71669 - DNA, 80 bp, Homo sapiens
cagccaccgccgcccccaacgtccatgcctgagatttaagtgccctgtatgctcaaaatttgtatcctcagatgaaatgg

SEQ ID NO: 71670 - DNA, 101 bp, Homo sapiens
cagggtggagagctgcagctgcagatggactagaggcttttaccagatttcttaaaactgaattcagtgaagaaaatattgaattttggatagcctgtgaa

SEQ ID NO: 71671 - DNA, 90 bp, Homo sapiens
gcttactctctcagatgacttcgtctcccaccgactgcctgtttaaggaacttgatactaaatttgggactctttgctgcgggagtttgg

SEQ ID NO: 71672 - DNA, 100 bp, Homo sapiens
cccgcagggcctggcactggccaaggagattggccgccatggcatcagatgaaggcaaactttttgttggagggctgagttttgacaccaatgagcagtc

SEQ ID NO: 71673 - DNA, 50 bp, Homo sapiens
ggaactgtcaggtacctcaaagcacgaaagtaggcggtacgaaccctaat

SEQ ID NO: 71674 - DNA, 75 bp, Homo sapiens
gccattttgagcaatggggaacgctcacggactgtgtgtcagcagtcggctttgattataaaggagaagtggaga

SEQ ID NO: 71675 - DNA, 100 bp, Homo sapiens
ctcgaatgtgggaccccagcccctctccagctcgaaatcgtgctggagaatctggtaaaagcaccattgtgaagcagatgaggatcctgcatgttaatgg

SEQ ID NO: 71676 - DNA, 50 bp, Homo sapiens
accgagaccgcggccgggaccgaggtcctggactgctcttcctgctcttc

SEQ ID NO: 71677 - DNA, 74 bp, Homo sapiens
caccagagttgggacggcagccctcagtgcctgccatggactggtcgctctggtgcagtggacagagagtgtgg

SEQ ID NO: 71678 - DNA, 75 bp, Homo sapiens
cggagctggacctgacctacggcaacagatacaagatcctaagtgtgaacgtgaagtccccagccctgctgctga

SEQ ID NO: 71679 - DNA, 90 bp, Homo sapiens
cgccttcctcctcgccatcgcctacttgatcgttaaaggtgaagaggacaataccagcgtcgtctggttttggctgcacaaaggcgaggc

SEQ ID NO: 71680 - DNA, 75 bp, Homo sapiens
tcaaggaccctgtgcgctggccctcaaccatcagtccctgctttaaggagggcatcctggctgtttcacccgtgg

SEQ ID NO: 71681 - DNA, 100 bp, Homo sapiens
cgcggcgccatattgcggccctcagcggccgcgaccgagtcatggctgagacctacggttacttcttgctgcagattctgcgcaggatcggagctgtggg

SEQ ID NO: 71682 - DNA, 74 bp, Homo sapiens
tagaactcgcgtttccacttcagagatctggccaagatcaaggctcgagatcttcgcgggaagaagaaggagga

SEQ ID NO: 71683 - DNA, 101 bp, Homo sapiens
ctggctcagtacatattcaccttgaagaggaagacggggcggaagaccaagatcatcgagatggctaacagagaccctgatgctggaattgatgaagctca

SEQ ID NO: 71684 - DNA, 100 bp, Homo sapiens
cctatctcttcaagtacatcataatcggcgacacagcctgaaatcctgcaggactcccgactcatcaccctgtacctcacgatgcttgtcaccttcacag

SEQ ID NO: 71685 - DNA, 100 bp, Homo sapiens
tccaaagtgcccggacccaaaacaggaagtccaggcgcaggtaaagttgctggagaagcgtgtggtgcacctgggtgtaggaactccggggagaattaaa

SEQ ID NO: 71686 - DNA, 75 bp, Homo sapiens
ttggggagtatgtggaaccgcaggactgcagggtctctccagacctcccagtgccaagtgtataagcgtgtccag

SEQ ID NO: 71687 - DNA, 90 bp, Homo sapiens
ctcccaagtggctgggattacaggtatggatcctggcgggagccagtcaacccctattatgtcaatgccggctatgccctggccccagcc

SEQ ID NO: 71688 - DNA, 98 bp, Homo sapiens
cattggtctaaagtctttccaaaaggtcaaggttcacaaggttgtttgatgtgtgcacagtgtcacgaacagacagagaaaccaaactaactttagtg

SEQ ID NO: 71689 - DNA, 100 bp, Homo sapiens
ggctggactgcaacctggctgtacagctcctcaagtgcaacaagtcccacttccgaaaccacaagtttgccgatgtgctggaaacatgcatgaagagctg

SEQ ID NO: 71690 - DNA, 100 bp, Homo sapiens
gcgaacggggaagtacggaacgggtacgtgaggagcagcgctgcagccgcagccgcagccgccgccggccagaccgagacatgggtgcccggcaccgcgc

SEQ ID NO: 71691 - DNA, 73 bp, Homo sapiens
caagctagaaaataaccagtttgtggcggtcggatcatgctaaaaggagataatattactctgctacaaagtg

SEQ ID NO: 71692 - DNA, 75 bp, Homo sapiens
cagagccgcccagccctgccagctgcgccgggacgcaaaagctggcaggctgacagaggcggcctcaggacggac

SEQ ID NO: 71693 - DNA, 100 bp, Homo sapiens
tgtcatctccctggactatgacagcgtggatggaaaggtctattacacagatgtgttcctggatgttatcaggtatggatcctggcgggagccagtcaac

SEQ ID NO: 71694 - DNA, 97 bp, Homo sapiens
ggggaaactgggactcgatatctgacgcagctaaagctggtcgtctgatgataaggaaattagttgcagagaaattgaatatcccttggaatcatat

SEQ ID NO: 71695 - DNA, 75 bp, Homo sapiens
gcctttggccagaagatcggccacttccagtacaactattattacagctacaaaccactgagtaagcaaaaatca

SEQ ID NO: 71696 - DNA, 76 bp, Homo sapiens
aaagaaaggcaagagaatacttactagttaaagaggacaagaattttgggcagatttgaatgccatgaacgtgtat

SEQ ID NO: 71697 - DNA, 105 bp, Homo sapiens
tctggttgtgtttcaactgctgtattgcagaacagcctcagcctcttcttggacacttaatgattgttggcaagaaatgtgctgctgatctgggcctgaataagg

SEQ ID NO: 71698 - DNA, 75 bp, Homo sapiens
gcggcgctttcggcgcgggcccgggccccgagcgcccgaacagattctacaagggggttgctcctctctggatga

SEQ ID NO: 71699 - DNA, 97 bp, Homo sapiens
gcagaccgtgaggattccaagccaaaggcaagctattggtattgagaaacaacagtcactgttttcagaagaagaagaatataccactggatctgag

SEQ ID NO: 71700 - DNA, 75 bp, Homo sapiens
caaggtggcctaccaggaggccaggggtgtcgccatgctctcaaaggtctatggccctgtgttcactctgtattt

SEQ ID NO: 71701 - DNA, 75 bp, Homo sapiens
gctgggcctgacagagaaggctcactcaaggatcagttggctttagcaattgggcacctcgatttaaagatttcc

SEQ ID NO: 71702 - DNA, 51 bp, Homo sapiens
ttttaatgggcggaaccgtggacacgatgacagatttgaagatctggaaga

SEQ ID NO: 71703 - DNA, 100 bp, Homo sapiens
cggagacgagaccagaggccgaactcgggttctgacaagatggccgggctgccccgcaggatcatcaagatattttcaggaacatctaagaggacagtgc

SEQ ID NO: 71704 - DNA, 80 bp, Homo sapiens
acctacctccttggtcaaagctgggatggggtccgcgggagagctgtggggcttggtgagtgtttcgtggcctctcgggt

SEQ ID NO: 71705 - DNA, 51 bp, Homo sapiens
cacagggcagacccctgtgttttccaaaggagccagaaaacttcggctcca

SEQ ID NO: 71706 - DNA, 100 bp, Homo sapiens
tgaccacaaactgcagcaagtgatcagagataatctctacttgagaaccattccatagtccaaagctgcctttggtgaggaggtggatgcagtagacacg

SEQ ID NO: 71707 - DNA, 86 bp, Homo sapiens
cagattatgactgctggaaggagcacgaggaagcagtttttctatatgagtggagaagacagctgttaccagggaggtcatacaac

SEQ ID NO: 71708 - DNA, 76 bp, Homo sapiens
gcaacagcaagaactgccggcggctcttgtgctgcaggggctttgttcgcgggggtcacagctctcatggctgcag

SEQ ID NO: 71709 - DNA, 75 bp, Homo sapiens
gaagaccacccgagaggaccacatgaagctgaaggtccagggcatggaggacttcgcaggtgagcagtaacggaa

SEQ ID NO: 71710 - DNA, 100 bp, Homo sapiens
agcaagaacactgcgtggccctactttctgccaatgttgaatcgccaggatcccttcactgttcatatggaacgagttgaagcagttaatatggctgaag

SEQ ID NO: 71711 - DNA, 97 bp, Homo sapiens
tcgctcttgtgccctagcaccccgagaaccgtcagtttgagccagatggtttttcgttggaatatacgttgcacatttatggcgattctgagtgtga

SEQ ID NO: 71712 - DNA, 48 bp, Homo sapiens
accaccatgcctggctaattatgggttcgagaccctggagcctgaaat

SEQ ID NO: 71713 - DNA, 74 bp, Homo sapiens
aaaaactgaatgacgcaagttctgataagatgtgtcctccagatgagagtaagttgtttaagaaaggcctgaat

SEQ ID NO: 71714 - DNA, 98 bp, Homo sapiens
ttaaactccatgaagtatgtggagctttacctcgtggctgattatttagaggatctaggggtgtttattcctgctcctatggctcaagggatgagaag

SEQ ID NO: 71715 - DNA, 89 bp, Homo sapiens
ctgtgtccagcaagttgtggaacttctacaggaacgggcagatatccaagtagagcagaaccggcaacacttctatgaactgtctctcg

SEQ ID NO: 71716 - DNA, 75 bp, Homo sapiens
tggtggtggggaccctgagcgtgtggacagagagctcgaggccatgagcagatataccagcccagtgaacccagc

SEQ ID NO: 71717 - DNA, 76 bp, Homo sapiens
cttcaggaaacctgcattctcgaaaacttgttagctttacattgtcagactcccaggaaggaaattacaagtcaga

SEQ ID NO: 71718 - DNA, 100 bp, Homo sapiens
ccaggagtccctctccgcccagttacaagattcctgaatttgacaacttgtacctggatatgaatggaattatacatcagtgctcccatcctaatgatga

SEQ ID NO: 71719 - DNA, 75 bp, Homo sapiens
tcatgaaaagcatgcccatacgattaaacctgcgccagtcctgctcctataattgtcaacacagatactttggac

SEQ ID NO: 71720 - DNA, 82 bp, Homo sapiens
atgacctcaggtttgtcggtcgaagtggaagagggagagcgcgcggcggacgcgcccgggacgcgcggcggcaccgggaggc

SEQ ID NO: 71721 - DNA, 98 bp, Homo sapiens
accttaatatacagccagcctgtcatgagacctccaaacccctttggccctgtatcaggagcacagatgccagagacgcggaacaattgagcaagaac

SEQ ID NO: 71722 - DNA, 98 bp, Homo sapiens
tcctcatggcccggctccttagcacctctccagctgcttgtgaattttctgagacggatgtaacaaatactgaacatcatcaacccagtaataatgat

SEQ ID NO: 71723 - DNA, 51 bp, Homo sapiens
aagcctttgaaagatgtcatagggggccttggacaagttgttactgactat

SEQ ID NO: 71724 - DNA, 83 bp, Homo sapiens
gcccagagactgctgagcccgtccgtccgccgccaccacccactccggacacaggaagctcttcgtgggcggtcttgactgga

SEQ ID NO: 71725 - DNA, 83 bp, Homo sapiens
ccgcccaccagttcgcccgtccccctgccccgttcacaatgtgtcgtgaaaactacccctaaaagccaaaatgggaaaggaaa

SEQ ID NO: 71726 - DNA, 83 bp, Homo sapiens
ctctccttttcgtttccggaaacatggtgatggctggaccggcggaggaggcgggagcccattgtcccgagagcctgtggcct

SEQ ID NO: 71727 - DNA, 101 bp, Homo sapiens
cgcccgcctgccgcctccggagcgcctgtgtggggaccctccattttccatatccaggaaaatgtgatgcgccacaggtatcagcgtctggatcgccactt

SEQ ID NO: 71728 - DNA, 75 bp, Homo sapiens
cgagtgcggcccggaggcggcggagggcaccccgggcgggcggcggctgctacacgatgaggcgagtggtacgac

SEQ ID NO: 71729 - DNA, 75 bp, Homo sapiens
gaagacatgcttacttccccttcaccttccttcatgatgatctgccggtctgccctctgccacactgctgccgtg

SEQ ID NO: 71730 - DNA, 75 bp, Homo sapiens
cagttgcatgctgggcctgccacggaggagccaggtccctgtctgagccagtcagaaaaagagtgcacgccagta

SEQ ID NO: 71731 - DNA, 101 bp, Homo sapiens
gagtcatgagcgacagcggcgagcagaactacggcgagcggacgaagttatacggaagcgtctcctcattgatggagatggtgctggagatgatcggagaa

SEQ ID NO: 71732 - DNA, 48 bp, Homo sapiens
aaagagtcaacagcagtggcaacagaaataggaaggttgttgattact

SEQ ID NO: 71733 - DNA, 50 bp, Homo sapiens
tactatccagatggaaaggattttccaaagaacgccagatcaagtgtccc

SEQ ID NO: 71734 - DNA, 83 bp, Homo sapiens
cattctcgatccagaggaaggcgatactctcgctcacgcagcaggagcaggggacgaaggcatgttatttgaaagcaattgag

SEQ ID NO: 71735 - DNA, 90 bp, Homo sapiens
gaagaagtcaagccgatcttgcagaaattgcaggtctggctctgggagaggagtggacagcagctggttgagatacatccccatctggag

SEQ ID NO: 71736 - DNA, 96 bp, Homo sapiens
cttctggcactggcacttgtcctcctgtttctatagaaactgggttggaagtcagagctgcacaaagggaaagggattcaatgctggattttgaaa

SEQ ID NO: 71737 - DNA, 106 bp, Homo sapiens
tggagcctcagttggaagcagccgatccagcctgcggagcctgtggggcagactgcttttggcttctggatgccctcctccagtacacatcgtatggggtgacacc

SEQ ID NO: 71738 - DNA, 90 bp, Homo sapiens
cgcctccgagcccgccgccacatcctctgaggctactgcagcactggggtgtcagttgttggtccgacccagaacgcttcagttctgctc

SEQ ID NO: 71739 - DNA, 90 bp, Homo sapiens
tctgctccaaagagatctcagcgctcaccgacttctctgaatccggacaatcagatagttcaaaccagcaaggagatgcggacatcaaac

SEQ ID NO: 71740 - DNA, 100 bp, Homo sapiens
aacttgctgctcgggaagaagctaaattgttggcgggtttcatgggcgtcatgaataacatgcggaaacagaatcatgtcaaccctgccatggacttcac

SEQ ID NO: 71741 - DNA, 100 bp, Homo sapiens
ggccacaatacatgcgctatgtcatcaagggaaatgcaataccttatttccagatgactcctatcagcacttctctctgctggaatgatctctcctggtt

SEQ ID NO: 71742 - DNA, 82 bp, Homo sapiens
cgcgtgtgtgagcgcgccggaccaagcgggcccagaagcgggagcaggccgggctctcgccatgggtcactgtcgcctctgc

SEQ ID NO: 71743 - DNA, 75 bp, Homo sapiens
aggaatgttccctgacaatttcgttaaggcatctaataggattcaggaatcaaagaatcagtgtactcaggtggt

SEQ ID NO: 71744 - DNA, 100 bp, Homo sapiens
cgactacatccaccacatgggatatgtacacagctacggagccgagatggctctgagtacctgatccagcacgactcggaggccatcatcagcacctggc

SEQ ID NO: 71745 - DNA, 98 bp, Homo sapiens
gaagctagggtcgccgccactgccgcaggaggcgtgaggttgctgcttttgctcagaggacatccatgaccctaatggtctttttgttcaagataaag

SEQ ID NO: 71746 - DNA, 100 bp, Homo sapiens
gtcattattatgcatgtataaagtcattcagtgatgagcagtggtacagcttcaatgatcaacatgtcagcagggatatgggccctcacattttccaaac

SEQ ID NO: 71747 - DNA, 100 bp, Homo sapiens
aacaacttcgagacatttcaagtattggtcttaaaacagtaattggagaacttcctccagcttccagtgcttgactaccacacaaattaatccactcaaa

SEQ ID NO: 71748 - DNA, 100 bp, Homo sapiens
ttccctagtctctcgtatcccaattattataccctaatgactggcgatctgggtgtccatagtggggaagaactccagctcaccaccactatcacccatg

SEQ ID NO: 71749 - DNA, 141 bp, Homo sapiens
cgaagagttgaagttaatggagaacatgcaacagtacgttttgctggtgttgtccctcccgtggcaggccatggttgcttgttatccgggcaatggaacgggttatgtacgtcatgttgataatccaaatggagatggaag

SEQ ID NO: 71750 - DNA, 75 bp, Homo sapiens
ggtgcccagaggactttcttccagcttctgctgtccttctttgtggagagcaagcggacctggaaaatatgacaa

SEQ ID NO: 71751 - DNA, 75 bp, Homo sapiens
gctacgagctggctttaatcctgaaagccatgcagcggccctggtccagcgcctccctctctcagcatggacgag

SEQ ID NO: 71752 - DNA, 100 bp, Homo sapiens
tcaagtaaaaacaatagctcaaggaaacctttccaacacagatgtccaagctgccaagctgtatagatcaattggagaatacgacgtcctccgtgggatt

SEQ ID NO: 71753 - DNA, 90 bp, Homo sapiens
ctcccggaatatggagccctgggcgcgggggcggcgtgtcaggtggttgcggagctgtactatactggcaattgctggagaagattttgc

SEQ ID NO: 71754 - DNA, 99 bp, Homo sapiens
gaacagattacaaatgagaagctggctatggttaaagcggtggtgaaggcctttattgtcctgaccccacagttcctgtcccatgacaaggatcagctg

SEQ ID NO: 71755 - DNA, 83 bp, Homo sapiens
caacttcgatgttcttctaatactcctcctctaacatgtcagcgttattgtaatgcaagtatctctcctaaatgtgtgatcaa

SEQ ID NO: 71756 - DNA, 100 bp, Homo sapiens
catgtcaataaggggtcataggtggaaaagacatgttttctggatatgccgcagaaggatccgtgccagaagcaagcctgtgagatacagaaatgtttac

SEQ ID NO: 71757 - DNA, 100 bp, Homo sapiens
ctgacagctgtgtactttgccctcagcatctcccttcatgtctgggtcatgctaaaaatgaagctgatcgtcaggcagaaaaacgagaaattaaacgtcg

SEQ ID NO: 71758 - DNA, 95 bp, Homo sapiens
atgttagccacagagccacccccaggcatcacatgttggcaagataaagaccaaatggatgacctgcgagctcattacgccttcccatacattat

SEQ ID NO: 71759 - DNA, 108 bp, Homo sapiens
aggctccgcgggatgcaccgtggtagccgagggcggaggcgacactctcagacaatacaatggtgggtgaagagaagatgtctctaagaaaccggctgtcaaagtcca

SEQ ID NO: 71760 - DNA, 83 bp, Homo sapiens
gcggcggccccgggaccaaggaggctgaaggtgatgtggccgccctcaaccgacgcatccagctcgttgaggaggagttggac

SEQ ID NO: 71761 - DNA, 60 bp, Homo sapiens
ccgcgacaagtacgtggccgagttcctcgagtgggggctcattgtcatccccaagccagg

SEQ ID NO: 71762 - DNA, 100 bp, Homo sapiens
gcgaccccacagtgcagcgctccgtgtttgcatcggtggacaaggtgccaggttcctgggtggagctacccatgaacagcagcaatggcaatgataatgg

SEQ ID NO: 71763 - DNA, 90 bp, Homo sapiens
ggactaataaaggccatggcgccagcagaaatcctgaacgggaaggagatctccgcctacaagcctatcgtggaattcatcgatgcacaa

SEQ ID NO: 71764 - DNA, 100 bp, Homo sapiens
cttcacctgatatctgtgccagagaatggtgaagttaaaatgaactatttgggcaaaccatatgtagccatggttacaacataccaaatggcagttcttc

SEQ ID NO: 71765 - DNA, 75 bp, Homo sapiens
attgggagatccacagctaagacgccaggacccactggaagcctagaaatgggccttcatcctagaataatcact

SEQ ID NO: 71766 - DNA, 83 bp, Homo sapiens
gttcttcatcccagtgtgaatccagcaaaggtccacagagcagtaaggaattgaatgatctggcacgggaccctccagcacag

SEQ ID NO: 71767 - DNA, 73 bp, Homo sapiens
actccttctacaggtgtgtatgttagagatgtttatgattacttccgagctgtcctgcagcgtgatgaaagaa

SEQ ID NO: 71768 - DNA, 100 bp, Homo sapiens
caagtgtccatcttgcagtccttgtttggagagggggctcgaatggttcgtgaactctttgaaatggccagaacaaaaaaagcctgccttatcttctttg

SEQ ID NO: 71769 - DNA, 100 bp, Homo sapiens
ccaggatcttataaaacaaatgctgctgctatgaatatgggtcgaccattccaaaaaaatcgggtcatcacactgaaacggtgttcaaccgggttttgcc

SEQ ID NO: 71770 - DNA, 100 bp, Homo sapiens
ccctctgcgcaaggaggagactcgacaacatgtcacccgcgctccaagacctgtcgcaacccggtttgaaagagaagatagtgaggagctttgaagtctc

SEQ ID NO: 71771 - DNA, 152 bp, Homo sapiens
aagatcattatgcagttcttggacttggccatgtgagatacaaggctacacagagacagatcaaagcagctcgttcatgaactggaatgtaagaggcaccagaggattcctgctctgtcccctggtttgcggcttgcgacgttggacatccc

SEQ ID NO: 71772 - DNA, 92 bp, Homo sapiens
ctattgtgggaccttgtgattgtgattgttaaaatgagtcttcggaagcaaacccctagtgacttcttaaagcaaatcatcggacgaccagt

SEQ ID NO: 71773 - DNA, 75 bp, Homo sapiens
gccatcgttgctgccttcttcgtcaaggtttgatgaacttgtgaaaaaattcaaagtcgaatatcatgctggtgg

SEQ ID NO: 71774 - DNA, 90 bp, Homo sapiens
ttcgggccctcttctcccacctgttcggttagaaaatggatttctgactggaatctcaccactgaaaaaaagcacacccttttaagacta

SEQ ID NO: 71775 - DNA, 82 bp, Homo sapiens
ccagcggccgagcgggcggcttcctggcctgggcgctccggtggcggcggagtgtggacgaatgtggaacctcgctctgtgg

SEQ ID NO: 71776 - DNA, 83 bp, Homo sapiens
caaaatcagaggcatactttatagataacagtcttcactcctatgctgatttttctggtgccactgaagttattttggaagca

SEQ ID NO: 71777 - DNA, 50 bp, Homo sapiens
ttgcttggagctgacgccgacggatctgagaacaattggcaagaaattcc

SEQ ID NO: 71778 - DNA, 98 bp, Homo sapiens
gactcctgctcagtgtagcattaaggagctgtggctaaaggaagtggaggggccgtgggatgcggagagccgagggctaactcccggacagcggaaca

SEQ ID NO: 71779 - DNA, 90 bp, Homo sapiens
gtcgggagtgatcacctaccctacagataaccagcccgagtcatgcagtcttttcgagaaaggtgtggtttccatggcaaacaacagaac

SEQ ID NO: 71780 - DNA, 88 bp, Homo sapiens
acgttgtctaaatttcggtagccatggcacaagaatataacagcccacctgaggatattgaccataaggactcatatctcattacaag

SEQ ID NO: 71781 - DNA, 82 bp, Homo sapiens
gcgggaggtgttcgagaacgaccccgagacgatccacatgaagaccatgcccgccgccatgttcaggctcctcacgggtcag

SEQ ID NO: 71782 - DNA, 102 bp, Homo sapiens
cgttcagagtcctacagtggcagctagtgtcagcagtgggatacctgcgcttgaaggacatcatccaccgtgacatcaaggatgagaacatcgtgatcgccg

SEQ ID NO: 71783 - DNA, 83 bp, Homo sapiens
ctcggagcttgtggacacttatacgatgatatcatcaagttgaatcgaaaggaagggaagaagcagaattttccaagactaaa

SEQ ID NO: 71784 - DNA, 90 bp, Homo sapiens
gcaaagcgcccagcctgccgcctcgctgtccctgcggcttctgggggtgtttgcgagtaaaccccaaagggttagatgaagaaagcaaag

SEQ ID NO: 71785 - DNA, 51 bp, Homo sapiens
tgcaacagtggccgcacgcataggagtcagaaataccatcagaggaggggt

SEQ ID NO: 71786 - DNA, 100 bp, Homo sapiens
cgcgagtgggagcaccaggatctcgggctcggaacgagactgcacggtgagaggccctccagctgcaggggcatttaaagaaagaccaaccaagcccaca

SEQ ID NO: 71787 - DNA, 75 bp, Homo sapiens
aatgccacccagcccttctgggattcaaaggagcccgtctgcatcgggtccacgaggctggtgtcagacctattg

SEQ ID NO: 71788 - DNA, 75 bp, Homo sapiens
agctagcttccagggttcagttcaatttttttgaaacacctgctttgtttcagtttgaaattggcacaatggaag

SEQ ID NO: 71789 - DNA, 96 bp, Homo sapiens
ggcagcggttggaggcttcgcccggctttgcagcggggacttcggcggcggcgcctcaggcacctcggcccgggggtgctgtgcctaccagacagc

SEQ ID NO: 71790 - DNA, 100 bp, Homo sapiens
ccttctgctaccagaaaaccttctccaccagaatccagctcacgctgatcatgtttgagaccttcaacaccccagccatgtacgttgctatccaggctgt

SEQ ID NO: 71791 - DNA, 100 bp, Homo sapiens
cagcctggagcagccggaccagcccagaaggcagcggcggcccaggccagcattcccgcagtctgttgcggttctcccacttttccataagcagaacaag

SEQ ID NO: 71792 - DNA, 98 bp, Homo sapiens
gtcaaggcactcagctcaaatacacacacctgttgccattatagagctggaattaggcaaatatggacagcttcagaggatgattccgaagaagacgg

SEQ ID NO: 71793 - DNA, 100 bp, Homo sapiens
gattttgatgtggatgatgccaaagttttattagatgtatatagctctgtcttcagtccatgctctgatcctttgtggatttcagttcatctcctgtgtc

SEQ ID NO: 71794 - DNA, 75 bp, Homo sapiens
gagtcagaccagagagaacataggatgtttgatcagcaggtaccattaggcttctcagctccaccagatggcctc

SEQ ID NO: 71795 - DNA, 82 bp, Homo sapiens
gcctggagaagctggagaatgacaagagcttccgcggtgtcattctgacctcggtgcctcaggaaccctgaagctgggctga

SEQ ID NO: 71796 - DNA, 88 bp, Homo sapiens
gccagagcgtggagcgctgcgcggcgcggcggccgggccctcgagacggggacggtgaaaggaaagcaagccaggatggatatttacg

SEQ ID NO: 71797 - DNA, 82 bp, Homo sapiens
agttggaagcagccgatccagcctgcggagcctgtggggcagatactgagccttcataagggttgactacctcagatttgct

SEQ ID NO: 71798 - DNA, 90 bp, Homo sapiens
gtgggcacaactgtggtgggatacttgccaaatgggagaggtgctgatactcaaagaaggtttaagttgtctgatctctctataaattcc

SEQ ID NO: 71799 - DNA, 83 bp, Homo sapiens
cgcggtagtgccagggggcgaaggcggcggtggtgaggaagacaatgcagatcttcgtgaagactctgactggtaagaccatc

SEQ ID NO: 71800 - DNA, 80 bp, Homo sapiens
cgtctgcgtgagaatagagaccaccgaggcagcagcccagacgcggcacagagagggcctgggagcttgctgcagcttca

SEQ ID NO: 71801 - DNA, 74 bp, Homo sapiens
caggagagacacgctgggccgaccccagagcggcgctggacagatttggagcaagaggtggtggtggccttccc

SEQ ID NO: 71802 - DNA, 100 bp, Homo sapiens
gcggccagcggagccctgggctggggcaggagccgcaaactctggcctgttctattctgactgcgctattgagtgaattttcaagttcaagtaaaactag

SEQ ID NO: 71803 - DNA, 110 bp, Homo sapiens
ccagtcaggctgatattaaaaaggcttataagaagctcgcccgggaatggctgaactagaagcttttgaaaacagactgaagggtcgtcggaagaagaacaggaaaagag

SEQ ID NO: 71804 - DNA, 73 bp, Homo sapiens
ggccaggaagatggccctgcggcgcgcctttactcactggaaacactaggaagaagtctgctgtgaagaaaag

SEQ ID NO: 71805 - DNA, 96 bp, Homo sapiens
tctgccatgaaggagactgtggaccatgctctcgcacatcagttatttcctgcagatgctctttcagaacaaaggcccgtttcctcctttcaaaag

SEQ ID NO: 71806 - DNA, 82 bp, Homo sapiens
ccatggtagagcagcagatctctaagctgaagaagaagcaggagtcagccagcctgaaagagcaggatggatcttgatgtgg

SEQ ID NO: 71807 - DNA, 82 bp, Homo sapiens
tcttcagcctgagacccatccctagggaacagagttcagaggcagcagaaactggagttagtgaaaatgaagagaaccctgt

SEQ ID NO: 71808 - DNA, 100 bp, Homo sapiens
gggtttctgaatgtcatcgtccactcagccactggatttaagcagagttcaagttgatactgcctctccaagcccaatggaaacatctggatgtgcccct

SEQ ID NO: 71809 - DNA, 98 bp, Homo sapiens
ctttgatgtcaaaggccatgcacacaagctctggattaatcgaattacagctgctagccaggaacatggactgaagtatccagcgctcattgggaatt

SEQ ID NO: 71810 - DNA, 82 bp, Homo sapiens
gggaggctcccgggcttgcgtggcaaattgtggctactaatttgccccctgaagatcaagatggctctggggatgactctga

SEQ ID NO: 71811 - DNA, 143 bp, Homo sapiens
gccgcacccggtcctcagcgactcttctgacctccgcgcgacgtacccgccgccgccgttggctggagactaatagggatgccaaaggaaaaatatgatcctccagatcctcgcagaatttataccatcatgtcagcagagga

SEQ ID NO: 71812 - DNA, 74 bp, Homo sapiens
ttcgatgtgcaggattttggcaagctttgaaaagtccagccgcatttcatgagcagagaaggagcttggagcgg

SEQ ID NO: 71813 - DNA, 75 bp, Homo sapiens
accaccggaactggtcgaatgaggcacctaaaaattgtataccgcagattcaggctccaaacaggcatgcgaggt

SEQ ID NO: 71814 - DNA, 83 bp, Homo sapiens
ctctgggcgaaaattggatgtgaaaatgaagccagaccgagatctgactgcagccatgagcagcaatgagtgcttcaagtgtg

SEQ ID NO: 71815 - DNA, 89 bp, Homo sapiens
gttgcataccactgccattgacaaagagcctcgagctgtggcaggttttcgagggacagttcgttatgcatcaatcaacgcacatcgga

SEQ ID NO: 71816 - DNA, 137 bp, Homo sapiens
tttcacatccttgtctgtgaagctaaactcaatgctgctgtgtgggaagaagatttgtaaagaaaactcttagagagacaagagagacacctccaacttcgacaaagagttcaccagacagcctgtggaactgaccc

SEQ ID NO: 71817 - DNA, 80 bp, Homo sapiens
accagaggtggaagtccaagtcaaacgcagaaggactgcctcactgagcaaccaagacttccgtccagtgcctctggaac

SEQ ID NO: 71818 - DNA, 97 bp, Homo sapiens
cgaggttgtttgcaacgaccgtctggggaagaaggtccgcgttaaattgattgacataaaactggaaaagcctcaggagcaaccagtcagtgaagga

SEQ ID NO: 71819 - DNA, 75 bp, Homo sapiens
tttggcgagagatgtattcagtggaggaagctggcgttgacccggacgacacctataatgagaccccctacgaga

SEQ ID NO: 71820 - DNA, 90 bp, Homo sapiens
caacacctacagccgggagctgtttgaggaggtccagggagtcggtagtaagggatggcgggacgtcaccacctttttttcggggaaagc

SEQ ID NO: 71821 - DNA, 75 bp, Homo sapiens
tctgtgctccaggactccctcaataatacaatgccatccccatcaaatcctggttcagtgaccccagcgacacag

SEQ ID NO: 71822 - DNA, 75 bp, Homo sapiens
aggaactgggatttcaacctgaaagtggaggctgcgaaaatagtaaaataaaacagggtctgttacctagcttgg

SEQ ID NO: 71823 - DNA, 111 bp, Homo sapiens
cagacaaacagcccgcccgaccccgtcccgaccctggccgccccgagcggagcctggagggcgtgatggtgggcatgggtcagaaggattcctatgtgggcgacgaggccc

SEQ ID NO: 71824 - DNA, 75 bp, Homo sapiens
cggcgcccggagcccgcgggcctgacacgcggcgggacatgcagagctgaagaagcaggtggagagtgccgagct

SEQ ID NO: 71825 - DNA, 74 bp, Homo sapiens
cccccaggcaggtggtcaactttgggcctggtcccgccaagctgccgcactcaaaccagacgtcctgggtcctc

SEQ ID NO: 71826 - DNA, 95 bp, Homo sapiens
gacgatggtgtgactgcaaacttcctaattctaagcaccactcttacaggagcttcctgggactgacctgcctgatgcaaatttctactcggacg

SEQ ID NO: 71827 - DNA, 75 bp, Homo sapiens
ccgggccgtgaacgaaagcagtgacggaggagcttgtaccaccgactttgccttcaaaagaaacagcatttttaa

SEQ ID NO: 71828 - DNA, 100 bp, Homo sapiens
ccacgacatgtgaaacggaagctgtctaaatcagatgactgaaatagccaaagccttggctggacagtcagtacgaatctgtaaaggccccagggctgtg

SEQ ID NO: 71829 - DNA, 100 bp, Homo sapiens
tcttcattgaagatagagccgaaatgactgtgtttgtacggccctgagacgggagttaaaggagaaagaatattctgtcctgaatgctgtcgaccaggcc

SEQ ID NO: 71830 - DNA, 74 bp, Homo sapiens
cgtgaacaacctgaacgtcaccgaggagaagtaccaggaggcgttggccaaggcgccggcatcggccgcacagg

SEQ ID NO: 71831 - DNA, 100 bp, Homo sapiens
agcctgtctacatcattatggaactggtttcagaattctgcttggtcagaatcgtgatggcattgtgttcagcactgatgactattttcaccatcaagat

SEQ ID NO: 71832 - DNA, 74 bp, Homo sapiens
aaacttaggggccacgtgagccacggccacggccgcataggcaacaagtgatctggaacactatgacaagactc

SEQ ID NO: 71833 - DNA, 75 bp, Homo sapiens
gaaaggagtgcttatagaatggctcgggttatgtatgattttgctgctgaacctggaaataatgaactgacggtt

SEQ ID NO: 71834 - DNA, 102 bp, Homo sapiens
ctgggaggctgtggcgcgaggcgggactcaaatgctggaggaaggagtctccaaaaaaagttggtgatgacattgccaaggcaacgggtgactggaagggcc

SEQ ID NO: 71835 - DNA, 98 bp, Homo sapiens
gtgccacaggaggctgtgcgggccccgctccgcttcgaatgggtatcatgatattagctggtttgacatcaagtcatttgtgagtcatcagatcttct

SEQ ID NO: 71836 - DNA, 75 bp, Homo sapiens
aggtgtatcaagtaatggtgcaaagcctgaagaattgaatgatctggcacgggaccctccagcacagtgttcagc

SEQ ID NO: 71837 - DNA, 100 bp, Homo sapiens
tgaagacatcaacaaacggcgggaacccattcccagtctggaggccatttatttgctgagccccacggagaaggcaacagagatgcttatttttggaaag

SEQ ID NO: 71838 - DNA, 100 bp, Homo sapiens
cggagaaccagaagacgatgaggctcctgcaaaagatgccatggacaatattaccaggcagaaccaattctacgatacccaagtcatcaaacaagaaaac

SEQ ID NO: 71839 - DNA, 80 bp, Homo sapiens
ttatatcacaggataagtctgaaaaggcctacaattcctgacattcagacaactgacttgtaactgacttataactgact

SEQ ID NO: 71840 - DNA, 100 bp, Homo sapiens
tcctctcatggagaaggtggaagtaaagaattacgatgccgctctccgaaaaatcacctttccccacctatctcattatcgagagcatttgaacattcag

SEQ ID NO: 71841 - DNA, 100 bp, Homo sapiens
aaggcaggcttcgcaggagatgatgccccccgggctgtcttcccctccattgtgggccgccctcgccaccaggaaggggaacagtttgtgaagaaaatcg

SEQ ID NO: 71842 - DNA, 100 bp, Homo sapiens
aaaatggatgcaagtttaggaaatctatttgagtgtcaatccatatctacaaggacagagactggataatgttgttgcaaagaagtctgtcccccatttt

SEQ ID NO: 71843 - DNA, 97 bp, Homo sapiens
aaggcctctctcctgatacagcaggcgctcaccatgttccctggaggacagagcgggatgccaccagcttgtccaaagggaagttccaggagctcct

SEQ ID NO: 71844 - DNA, 76 bp, Homo sapiens
tccttagaccacccgacagaccagaaactcatcccagagttcattaagaagagagaagacacggttcaatgtgtag

SEQ ID NO: 71845 - DNA, 75 bp, Homo sapiens
gttccttgaggaggtttgaaaaagtgctggacgtcattgctcctccttatacctctgacttcgtgcaacttttcc

SEQ ID NO: 71846 - DNA, 82 bp, Homo sapiens
ggctctcggtgccctctccttttcgtttccggaaacatgatgatatcatcaagttgaatcgaaaggaagggaagaagcagaa

SEQ ID NO: 71847 - DNA, 100 bp, Homo sapiens
ccaacaccaaagactgagctggtccagaagttccacgtgcagtacttgggcatgttacctgtagacaaaccagtcgactggtaaatcccccgcaggagtg

SEQ ID NO: 71848 - DNA, 98 bp, Homo sapiens
ctgggaagcaaggcctgctctgtgcggagcagaaacgccttgtgcgaacagaaataaattcccgcggaaaggatgagtcagccagcctgaaagagcag

SEQ ID NO: 71849 - DNA, 82 bp, Homo sapiens
ccccaagtcaccacaaaaacctatcgttagagtcttcctgcccaacaaacagaggacagtgtttgtgaatagcacaatggaa

SEQ ID NO: 71850 - DNA, 100 bp, Homo sapiens
catctgaggaaggaccaggaaggaaaggtctcctctgagcctccggcctccataagacccaaaacagatgacacctcttcccagtcccccgcgccttccg

SEQ ID NO: 71851 - DNA, 102 bp, Homo sapiens
tggaccttcagttccaaagatgatgaatctgaaaggaaatccggaattatcacagaaatctacctgttactcgtattttggacaatcttatggagatgaagt

SEQ ID NO: 71852 - DNA, 80 bp, Homo sapiens
acgaagacagcggagaggagagcggtgcggaggactgagcttcctgcctgacacagctcacttcaagaagtgcacaatgt

SEQ ID NO: 71853 - DNA, 75 bp, Homo sapiens
cacatggctgaccacccctaaaagcacctggccccgctacagcaaaccagaccaaatacacgctgatcgatgagc

SEQ ID NO: 71854 - DNA, 82 bp, Homo sapiens
gtcctacaccaggcagcccccaaatcccggcccagttgggacagaaataacccagagccctggaacaaactgggtcccaatg

SEQ ID NO: 71855 - DNA, 90 bp, Homo sapiens
cgggcatggtggtctggggcaacgcggaaggcttccacctctaccacaggctgccaggcctcatgccagaaagctgcctcctcatcctgg

SEQ ID NO: 71856 - DNA, 101 bp, Homo sapiens
gcctcctgagtagctgtgattacagtcaccaaaggcttcgtgtacagctctttcctaaagccctacaatcctcgccgcagccactccgatgcctccgtggg

SEQ ID NO: 71857 - DNA, 83 bp, Homo sapiens
ccgggaggtcaacgaggtcatccagccgccttcgcccccggaccgctcaccgcaaccatggtctccaaatccgaccaattgct

SEQ ID NO: 71858 - DNA, 83 bp, Homo sapiens
tgcacctctacctgtggctctttctgctgggcctgcccttcaccctctacatgggggatatgagactttctactcggaatatc

SEQ ID NO: 71859 - DNA, 74 bp, Homo sapiens
cgcgaatatcgtcatcgttagaagagaaaggagccgaaaggcgaggccagctcttccaaccctgccacgcccat

SEQ ID NO: 71860 - DNA, 88 bp, Homo sapiens
cagttccaggacatgtgtgcaaccattggcgtggatccgctggcctattagaagcccaggacccaggaaggagacacaggaaatttat

SEQ ID NO: 71861 - DNA, 76 bp, Homo sapiens
caccagttgcacgatcctcaccgcaacattccttatccaatcccttaccgcgccgacaccatgtggatccaggttc

SEQ ID NO: 71862 - DNA, 75 bp, Homo sapiens
gacgactgtgaagggggtcatcaaggctgtgctggatggagtgaaggggtgggaaccgccaaacctctcccttct

SEQ ID NO: 71863 - DNA, 100 bp, Homo sapiens
tcctgaatattatgaagagatgggtataaagcctcctaagggggtcattctctatggtccacctggcacagctcagaaaaatgctcagtatgtcctggtg

SEQ ID NO: 71864 - DNA, 100 bp, Homo sapiens
tcatattgtacttgcgagtgagacccggctggaggaatgttttaattcttcggaaataccaagtggtctcttgaacagagtatctgccaagcccgggctt

SEQ ID NO: 71865 - DNA, 75 bp, Homo sapiens
atacattcctgattacctgccacccattgtgtcttctcaagaagagcaagttgatgatttgaacctcacttctgg

SEQ ID NO: 71866 - DNA, 75 bp, Homo sapiens
gtttgacaatcacattaattcatatgaccatgctcacaagcaggaccacggaggggtgatcgtgaacatcactgc

SEQ ID NO: 71867 - DNA, 71 bp, Homo sapiens
gaaggtctctggagacatcttcagcagagtaaccaacgagtagacctttacaagtggaaagacggcagtgg

SEQ ID NO: 71868 - DNA, 74 bp, Homo sapiens
gtgaagtaggaccgaattcctgtgccgaagaggcctgcagtgggagagcaggcctcaggcccctggacatcgag

SEQ ID NO: 71869 - DNA, 90 bp, Homo sapiens
gtttgtctggattttcctgtagaactgagggcaggacagagcgggatgccaccagcttgtccaaagggaagttccaggagctcctggtgg

SEQ ID NO: 71870 - DNA, 100 bp, Homo sapiens
tcatttgatggtgtatggaaatgagaaatgttgctgaagtgctgctgaaagggccagagatgcaaggatttgggatacattttgaacctttaagctgtct

SEQ ID NO: 71871 - DNA, 138 bp, Homo sapiens
gcagtgcttcagaacacttcccaaatcaaccagatgcttagtgacctcaaccgtgtcgactttgccaatgtccagaacctcagaggatccagaacggcagctggtccttgctggactgttcctgtccatgtgcctggt

SEQ ID NO: 71872 - DNA, 100 bp, Homo sapiens
aaatcgttcaagacagaaaaggctttccatcttgctgctgcaaaaggacacgtggaatgcctcagggtcatgattacacatggtgtggatgtgacagccc

SEQ ID NO: 71873 - DNA, 100 bp, Homo sapiens
aaggaacttggttccccctccctcagcttccgccccaaaagcataagcagtactataatggatgtagacagcacaatttccagtgggcgttcaactccag

SEQ ID NO: 71874 - DNA, 73 bp, Homo sapiens
tgacaatacaggaaatgtttggctttcaacgcttcaggatattgaaataggagtgcagcatattttagcagat

SEQ ID NO: 71875 - DNA, 100 bp, Homo sapiens
gtggaaatgagaatggcaggaaatgcatggaaacagacttgtaactgtctcatggcctggtcgtccaaatcccagagccctgtatgatgagattcgtcag

SEQ ID NO: 71876 - DNA, 100 bp, Homo sapiens
tttttcgacgcctccgccgccgcctgaggaggcgagctagccgggagttacaccgccaccgccagagaccgtccaggctggacttgaactccttcctcgg

SEQ ID NO: 71877 - DNA, 83 bp, Homo sapiens
ccctgatgctggcgcagggcacggtgggcgcctacctgattttgagaagagggggaaaaaggaagtttgtcctgtcctggatc

SEQ ID NO: 71878 - DNA, 90 bp, Homo sapiens
cgggggaacagctagcggcaagtgtttaactgctgaagagatcttttcccttcatggcttttcaaatgctacccaaataaccagctccaa

SEQ ID NO: 71879 - DNA, 98 bp, Homo sapiens
ggcaagaaaaatgccagccagaagaggcgttcgctgcgcgtgcacattccggccttctggcggccgcccctggtttctcctggggggtgatgagcggg

SEQ ID NO: 71880 - DNA, 100 bp, Homo sapiens
aaaatctcctggcaattacaagttcttcagatgctatatatttggcaaggcatgttggtttgcgtgtgggaatcccaaaggagaccccagctctcacgat

SEQ ID NO: 71881 - DNA, 75 bp, Homo sapiens
cagaactggttcttgttacaactcctcttactagtgggatatttcagcagttgaatcagttgaattcacttcatc

SEQ ID NO: 71882 - DNA, 78 bp, Homo sapiens
aaggattccaagtaactcttatttggagcacggtctgaatctgcacagagcaagatgctgagtggagtcgggggcttt

SEQ ID NO: 71883 - DNA, 110 bp, Homo sapiens
ctgtttcgccacagttcctaccttatgagctcggttttcttatgcttataagagtggaacagatggactttctggccgagaccagccagtggagctgctgaatcctgccc

SEQ ID NO: 71884 - DNA, 150 bp, Homo sapiens
gtgccgctataatctgtacactctctgctattgtctgctgcatccaaatcttctccctggacctcgtgcatacggaatcagagatcattgatttcttcctgggggcctctctcaaggatgaggttttgaagattatgccagtgcagaagc

SEQ ID NO: 71885 - DNA, 100 bp, Homo sapiens
ggccccttcacctgtgtaagcagagtgctgagccatcactgtttcaggtgcctgattattacaaaataattaaaaatccaatggatttgtcaaccatcaa

SEQ ID NO: 71886 - DNA, 96 bp, Homo sapiens
ctcgcctcccggccgagctgacgatctttgaaccaccagctccaggagaaggcaactccagtcagaacagcagaaataagcgtgccgttcagggtc

SEQ ID NO: 71887 - DNA, 100 bp, Homo sapiens
tgtggccagtatcttacaccagaagagatgaatgcaagtgggctggaaaagacatcctgaaccagacgtcctgggtcctctccagcatggcagccctcta

SEQ ID NO: 71888 - DNA, 75 bp, Homo sapiens
gctgcggatgttactcaggccatgcactgttacttaaaggaacctaagaggtgtgaacatgtatgccatgttgac

SEQ ID NO: 71889 - DNA, 82 bp, Homo sapiens
aggaggggtgtttctggccacgtgcttcaacgctctgctgcccgctgtgagggaaaagtgtgccgtgcaggtgaagctggag

SEQ ID NO: 71890 - DNA, 82 bp, Homo sapiens
ttcaacaaataccttgcatacatggagtctaaaggagcccatcgtgcgggtcttgcaaagggtattacttatgaccatgtcg

SEQ ID NO: 71891 - DNA, 100 bp, Homo sapiens
aacgagttgtggttctctttgaaagatgtgtcatatcatgtgccctctatgaggagttttggattaaggaaaggcagcaacaggtggaagctgttgagtt

SEQ ID NO: 71892 - DNA, 101 bp, Homo sapiens
agtctgtgtccttccagctgcagatacggaggctttggtcttctctccagacccactgctgctctcaaaacaagtgtaacttctatgacaacaaagacctg

SEQ ID NO: 71893 - DNA, 89 bp, Homo sapiens
atcaactctggtatggacacagcttctagtgttgctttggatcttgtggaaagtcagagttgggggccgtcccgctcctaaggcaggaa

SEQ ID NO: 71894 - DNA, 90 bp, Homo sapiens
ccgctcctaagcctgcacagccgcggcggcagcagcagtgagagctgagctgactgctgcccactttggaggaggcggtgggctccttca

SEQ ID NO: 71895 - DNA, 100 bp, Homo sapiens
gcgaggcgcgccctggagctgctagagatccggaagcacagccccgaggtgtgcgaagccaccaacttcctgcctgacacagctcacttcaagaagtgca

SEQ ID NO: 71896 - DNA, 100 bp, Homo sapiens
cgaatctgtgaaatttgatgctcgctcaatgacagctttgcttcctccgaatgctgagggttggaaaagcaaaagcagatgtgtggcccaaaactgctcc

SEQ ID NO: 71897 - DNA, 100 bp, Homo sapiens
gcgagcctcgtggtgtggtgtatggccgtgggcatctcctacattagcgtctacgaccaccaaggtgctgaccttaaggaaagagccaaaatgagttcca

SEQ ID NO: 71898 - DNA, 75 bp, Homo sapiens
ttggaatggaagttttcttgaaaaaaatcaacaggcagagctcgccctgcaggaggcaattaggattgcccagga

SEQ ID NO: 71899 - DNA, 76 bp, Homo sapiens
ctttaagagagatggctctgatgtcatttatcctgccaggatcagcctccgggagctgcacgagttacaagacagg

SEQ ID NO: 71900 - DNA, 83 bp, Homo sapiens
cagtacaacatctacaatgttggctcaaggccacgcccagatttcttctaccgctgcttccctgatgggctagcccattctga

SEQ ID NO: 71901 - DNA, 115 bp, Homo sapiens
atacatgctagaaagcaaacatctctctgtagtcctacaaggatttgtacacacagatatgacgaaagacttgaaagaagaacatttaaagaaaaatattcctcttgggaggttt

SEQ ID NO: 71902 - DNA, 100 bp, Homo sapiens
atgatggggagcttgaggacacttaccacgaaagatcctgaaggagctagacgagtgctacgagcgcttcagtcgcgagacagacggggcgcagaagcgg

SEQ ID NO: 71903 - DNA, 75 bp, Homo sapiens
cagcaacaagacagagctggcctggagtccgcggctggccgcgtgagtagcccgtggaacacagagcattcctaa

SEQ ID NO: 71904 - DNA, 95 bp, Homo sapiens
atctttgaaatgctaagattcttggataccacagtatcataaaattcctctaaatgcaatatggaatgtgcagatgtcccactattaactccaag

SEQ ID NO: 71905 - DNA, 122 bp, Homo sapiens
ggagttggaatttgtgcaatgtttagccaacccaaattaccttaatttgtttctgccacccacttagcagacaaggtagaggaggcagttctggatcgtttgaagcctctcttggtcaaggc

SEQ ID NO: 71906 - DNA, 100 bp, Homo sapiens
taggcgcggggcggtcggctgcggtggcggcgtttggatgattgtctctcggcggcggagtcggtgtcatggagaaactccagctgggcccagagattct

SEQ ID NO: 71907 - DNA, 100 bp, Homo sapiens
gtcagaaggtgcattttaccttttgtattgatgaagatgaccctactgctgatgataccagtgctgctgtaactgaagaaatgccaccccttgaaggaga

SEQ ID NO: 71908 - DNA, 101 bp, Homo sapiens
cagaacgttgcaaactctggaaaaaaacttggctctacattaatcatactcctccaccactgtccaagagtaaggagagagaaatggacaagaaagatttg

SEQ ID NO: 71909 - DNA, 99 bp, Homo sapiens
tgacccaggggctggagcgaatcccagaccagctcggctacctgcggggatccagttacggctcgctcatgacagcccatgggaaataccagatctttg

SEQ ID NO: 71910 - DNA, 83 bp, Homo sapiens
aaatggggcctgggggacggtaggagcctccgtgcggagaccactgttcaaggccacaggacacaccagcccctcggatacca

SEQ ID NO: 71911 - DNA, 83 bp, Homo sapiens
cggggaccagcagctgtcgccgccgctctcagatggctttggaagattcagaacagaagcacaatcttttacattcaatcttt

SEQ ID NO: 71912 - DNA, 96 bp, Homo sapiens
ctggagaggaactgaggcctcccaccaaaaccaagcactgacatgccactcatgggcggagtacgtccagcttgttactgaacttcgaatgacaag

SEQ ID NO: 71913 - DNA, 99 bp, Homo sapiens
cagccaggagtcatgagcgacagcggcgagcagaactacggcgagcggggactctgtaagctcggttcggctggagggactgacttcagcatgaagcag

SEQ ID NO: 71914 - DNA, 98 bp, Homo sapiens
taaagatgcagctatttacagtggacagaaactgaaggggtgaaagaaaacccaaggtcgttgaggacttccacatggagattggcacaggaccagac

SEQ ID NO: 71915 - DNA, 100 bp, Homo sapiens
tgggagtcgaagcgagggtctgaagttcacgactactagaaggggaggggagtggaaaggctctcagtgaaaaagggattgtcgatcagtcacaacaagc

SEQ ID NO: 71916 - DNA, 101 bp, Homo sapiens
tgatgaccagatcctgcagctcacagggcctacaaagggagacatggaaatcccctttgaagaagtcctggagagggccaaggccggggaccccaaggcac

SEQ ID NO: 71917 - DNA, 74 bp, Homo sapiens
aggctcactccgatttaaggtgcccgagtccacgctgatggactgccgtagacagcaaatttttcagaacataa

SEQ ID NO: 71918 - DNA, 100 bp, Homo sapiens
tccagggatgcagtggaaactaatgagaagaggtggctgatggccaagagtctacaccaccaacacctgcacccacttcaggaattgtgggtgcattaat

SEQ ID NO: 71919 - DNA, 100 bp, Homo sapiens
cctggcctcgcttctgtcccagaatgagtttgaaaaaatctgcagaaaggaggtgaaaccattaggattaacagtaatgagagatgtgaccatttcgaaa

SEQ ID NO: 71920 - DNA, 100 bp, Homo sapiens
ccacgtctcgtccacgacctccctagctggggtatggccgtcaatgtgtactccacatctgtgaccagtgaaaatctgagtcgccatgatatgcttgcat

SEQ ID NO: 71921 - DNA, 110 bp, Homo sapiens
caccaccaagagcccaggaccgtccaggcgtagcaagtcccctgcctccaccagctcagacagttcggcatggttttcctcatcagcccacagcattagcctttgatcca

SEQ ID NO: 71922 - DNA, 92 bp, Homo sapiens
ctggggccagggaaccctggtcaccgtctcctcagcctctggtgcacatggcttcctccccggcggtggacgtgtcctgcaggcggcgggag

SEQ ID NO: 71923 - DNA, 82 bp, Homo sapiens
actggatgaactgataaaacccaccagtctagctgggaacttctccacttcatctagcagcacagtatggtcattattccac

SEQ ID NO: 71924 - DNA, 98 bp, Homo sapiens
agagcagaagtctgtggagaccgcaaaaagtgttcctttctgccgaaattctccattcatatagaaaccaagtatgaggacaacaaaggaagcaatga

SEQ ID NO: 71925 - DNA, 100 bp, Homo sapiens
cgaaatgagacttttgaagtgcctttgatttctgggacaacaccatcgacttcctggagtacgtggcagctctgaatctcgtgctgaggggcaccctgga

SEQ ID NO: 71926 - DNA, 50 bp, Homo sapiens
cagcacagaatttggcttatggactcagaattcatgattgaagaaatgca

SEQ ID NO: 71927 - DNA, 51 bp, Homo sapiens
tagaactgaacttgaaacacttcaaagaacaacatcaagcctttttgtatc

SEQ ID NO: 71928 - DNA, 90 bp, Homo sapiens
agcttgccgcacaaaaagctagagagtcctggtacctgggctagcttggttcctttccaagtgtcaaataggacacccatcttaccggcc

SEQ ID NO: 71929 - DNA, 100 bp, Homo sapiens
gcaaccgatggagacgcagtaagcgaggtgaatcttggaagcaaccagtaccttttctctgtcatagtggatcctaaagaaatgccctgcttctgtttgc

SEQ ID NO: 71930 - DNA, 82 bp, Homo sapiens
tccagtaatggtggatgaagttgttcattgtttgtcaccacaaaaaggacaggaaatgatttgcagctgagtgaatcaggaa

SEQ ID NO: 71931 - DNA, 100 bp, Homo sapiens
ctccagcctccgcaggcccaaccgccgccagcaccatggccagcaccatttccggctgttttggagtcagcggaagatcaccaaggccagggagtggttc

SEQ ID NO: 71932 - DNA, 100 bp, Homo sapiens
ccggcctcggcggctgaggaaagcaggaggaggtggcggcggcgggaagatgtttggtgcacctcgatttggaggaagtagggcagggcccttatctgga

SEQ ID NO: 71933 - DNA, 100 bp, Homo sapiens
cagctccttggggtttccggctgcagggcggtaaggatttcaacatgcctctgacaatctctagttgcaaactagaatatcaggcatgtgtcttaggaaa

SEQ ID NO: 71934 - DNA, 80 bp, Homo sapiens
agaaggacttcggaatgcactacaacaggaaaatcatattatagatggagtaaaggtgctcctgacctctgataaagctg

SEQ ID NO: 71935 - DNA, 100 bp, Homo sapiens
ggagaattccagtttccccctaaatcgctcaacaaatgatgataattccgaagaaggcttccacactattcattcaggaaggcatgaatatgcattcagc

SEQ ID NO: 71936 - DNA, 75 bp, Homo sapiens
aggaaccggaatacctcggaagccgggaaatgggtctagacagtttcaaagtgaaacagaagttcttcgctggca

SEQ ID NO: 71937 - DNA, 82 bp, Homo sapiens
ccgagtcaacaaccgcttcgagctgaaactatgttccaacttcctgtcaacaatcttggcagtttaagaaaagcccggaaaa

SEQ ID NO: 71938 - DNA, 101 bp, Homo sapiens
ggagtcggggacccaggagtttcctgtgtccagcgctgccggagccgcctgaggagagttcccaggagaaaaaagcaaaaggctgcgctaccatgatgaag

SEQ ID NO: 71939 - DNA, 75 bp, Homo sapiens
gactgacaagaaatgagccttgaaggtcaatctgggtgacacccgagtctcctgagacggggttttgccatgttg

SEQ ID NO: 71940 - DNA, 123 bp, Homo sapiens
ccccaagaagaccattcagatgggatctttccggatcaatccagatggcagccagtcagtggtggaggctatgtccaaactgggtcttcggcaggttacaggagttactagagtcactatccg

SEQ ID NO: 71941 - DNA, 74 bp, Homo sapiens
ttaaagggaagcgggtcgttatgaggacgcgtgaccaaaaccaaagacggccatgaagtgagatcgtgcaaagt

SEQ ID NO: 71942 - DNA, 100 bp, Homo sapiens
cggaagattccagaagtgaagaagtcgaggagcagaccacggtggcttcgttaggaggtgactcccacacgggtcatgctgttgtctcctgatccagccg

SEQ ID NO: 71943 - DNA, 80 bp, Homo sapiens
ggttcttctccagcgccctggcctccctcaccttggacacctcgcttgggctgaccaactgactgaagagcagattgcag

SEQ ID NO: 71944 - DNA, 50 bp, Homo sapiens
tggggagaggtgttttggaccaacaagaccccaccaacaactgaacgctt

SEQ ID NO: 71945 - DNA, 100 bp, Homo sapiens
agcagaggtcgtaaagaatacaaatgctgcagaggtggtaaataaagatgtcctggacgtttacattgagcatcggctaatgatggagcagcggagtcgg

SEQ ID NO: 71946 - DNA, 100 bp, Homo sapiens
gaaaattggagatttgataacactggagatcagcaccaaatcccacagaggcatctgaggtgtcatggagaaactccagctgggcccagagattctgcag

SEQ ID NO: 71947 - DNA, 80 bp, Homo sapiens
ctgcagagccgcagtccctccgagtacaagttgtgcaaagtgaggaagattactgtgggagtgaagggaatccctcacct

SEQ ID NO: 71948 - DNA, 100 bp, Homo sapiens
cccagatggagattctggcaaaccagctcacggggctcatggacatgaagattttctacaaggggaagaacactggacccctatggtgtagccgtgggtg

SEQ ID NO: 71949 - DNA, 73 bp, Homo sapiens
gacttaatagacaattagcccaggcatttgcaagtaaaatcactggcatgttgttggaattatccccagctca

SEQ ID NO: 71950 - DNA, 82 bp, Homo sapiens
gaggaaaacaacttcgagggcagagtccggcctctttggcctacccccgttggctccgctgccccaggtcgatgagtcccct

SEQ ID NO: 71951 - DNA, 98 bp, Homo sapiens
tggaaaatgcgctcgggctggaccagcaggctctgacgcccgctctgcggcttcggtgtttgaacaggccacagtccaggagcgcttacattcaggag

SEQ ID NO: 71952 - DNA, 76 bp, Homo sapiens
caggaacggggtgctctacgtcacggagaagcagctgttgaagacagagctggggtccttcttcacggagtacctg

SEQ ID NO: 71953 - DNA, 74 bp, Homo sapiens
agcaacttaagaaccagattcgagtaacagcatcagagaagacaaagggagcaacttcccctggacagaaggca

SEQ ID NO: 71954 - DNA, 87 bp, Homo sapiens
ctactttggattcacccacagcggggcggcggcggcggcggctgcggcccaatatagagggaagtgtaacatctcccatttttctga

SEQ ID NO: 71955 - DNA, 50 bp, Homo sapiens
cgtgaagaacctgaaggacacactagataacgaaggaggcccaacttcat

SEQ ID NO: 71956 - DNA, 90 bp, Homo sapiens
gccatagagagtctccgggtccctggaaagggtgctgataagactgtgaaaggcccagatggactgaccgcctttgaagccactgacaac

SEQ ID NO: 71957 - DNA, 83 bp, Homo sapiens
gctggcgctgaccttcatcacagacaacagcctggtggcagcggatggttcgtggagacccaagggccattgtggaatatcgg

SEQ ID NO: 71958 - DNA, 82 bp, Homo sapiens
gccgcgctccaaccgcctcctcctcctcagtaacgcgggggtccattgtagggggagaaagaaatattcaggatttaaagca

SEQ ID NO: 71959 - DNA, 100 bp, Homo sapiens
ctgatactaacctcttattcagaatgtcccaacagagtaattccctcctggtcccagacagtctaagaggcacagataaacgcagaaatggacctgaatt

SEQ ID NO: 71960 - DNA, 103 bp, Homo sapiens
cttagctgtgctcgcgctactctctctttctggcctggaggctatccagcgaaatctggcattttttaaagtttgcgccccacaaagaggaaatattccaaag

SEQ ID NO: 71961 - DNA, 75 bp, Homo sapiens
gcaccctggaccgccagcagcagtgagaaggcttgtccagccggaagccctgagggcagctgttcccactggctc

SEQ ID NO: 71962 - DNA, 50 bp, Homo sapiens
acgcctgccactcctgcccccagagagagcaggagattcggatgggtcag

SEQ ID NO: 71963 - DNA, 100 bp, Homo sapiens
gaagctaccggccagggttttctttactctggggtcccggctgccctgtggcctcgctcctcggaggatggagaggagaaaacctatggtggctgtgaag

SEQ ID NO: 71964 - DNA, 75 bp, Homo sapiens
tcaccgcgctcgttatcatgtggcagaagcactatggtaatgtgaggctacaggagatgatggcaacaatgtgcc

SEQ ID NO: 71965 - DNA, 100 bp, Homo sapiens
gccgcccagcccggccccgcccgcgccggaagagccacgccgttacagaatgtctgaaggggacagtgtgggagaatccgtccatgggaaaccttcggtg

SEQ ID NO: 71966 - DNA, 75 bp, Homo sapiens
gcgaccccagtcggtgctccggggaggtcacctgacgaggaggacttcagaaatgggcttgggaaccagctgagt

SEQ ID NO: 71967 - DNA, 101 bp, Homo sapiens
ccgcgggcggtgtagaggcggcggacgggccggagggaggatgttaaagccccgcgggagaactaatgccgacgtgatgaccgccctgtcccagggctaca

SEQ ID NO: 71968 - DNA, 87 bp, Homo sapiens
acatttccgtggcaaccaaagacgggcgcctatcagtacacaataaggttaccaccaccctgtgaatctgcctgcacagtaccaaca

SEQ ID NO: 71969 - DNA, 74 bp, Homo sapiens
ctggctgccggctcctgtgacttcaagtgtcgattactgacagccctgtcctaggagcacaacgtccgagaaat

SEQ ID NO: 71970 - DNA, 75 bp, Homo sapiens
cccaggtcctggcggcccccagccgccgcccacgcagcagggacagcagcaggaccagcacttccgcacgacgcc

SEQ ID NO: 71971 - DNA, 100 bp, Homo sapiens
agcagagcttggaaggatgcttcagctcatcttaggctgtgctgtgaactgtgaacagaagcaagtgcctcaggactaggattactttctgaccagcaac

SEQ ID NO: 71972 - DNA, 133 bp, Homo sapiens
tcgccaggctcggaggaaccggcagctctccacgcccctgcccgaagcctgacccgactgcctctctcagtgagagatgatttacacaatgaagaaagtacatgcactttgggcttctgtatgcctgctgctt

SEQ ID NO: 71973 - DNA, 106 bp, Homo sapiens
tacacggccagttttgaaatcgacacacaaagaatagagttgagcctgtgggacacttcggcaattctgtggtgttcttggtcacacatttatggagtttctgaag

SEQ ID NO: 71974 - DNA, 75 bp, Homo sapiens
gaggtgggctagaggccgacgccagccagagagcggaagagagaatggattctgcaagaccatgtctacacagac

SEQ ID NO: 71975 - DNA, 83 bp, Homo sapiens
ttccactgttcctgccacagcggcttcgagctctcctctgatggcaggacctgccaagcttcctgcctgacacagctcacttc

SEQ ID NO: 71976 - DNA, 100 bp, Homo sapiens
cagcaggcactggagctggtggtgcaggaggtctccagcgtgctcaggtcggcggaggagaaggccaaatttgagtccctctttaggacgtatgacaagg

SEQ ID NO: 71977 - DNA, 100 bp, Homo sapiens
cactgcggacgcgactcgagggtgacgctcgctccgctcgtcccgctcgtcatggcctacccgggatacggaggaggggctgccaatagctacctgcgag

SEQ ID NO: 71978 - DNA, 98 bp, Homo sapiens
ttgaaaaattaagtgaattgatttggttggaatgctcttttaccgatgctttaacatacagccactagatcaatgtccgagttaccaccatggatgca

SEQ ID NO: 71979 - DNA, 50 bp, Homo sapiens
ccgcgggatacgcctcagcgcgtactatactggcaattgctggagaagat

SEQ ID NO: 71980 - DNA, 101 bp, Homo sapiens
tctccggcccctccagctgccccctgtgtggcaaacctttcttgagctcaggtgacttaagagattaaaattaatttggttgctgttggttctgaacaaat

SEQ ID NO: 71981 - DNA, 98 bp, Homo sapiens
ttgcttctgtagaccagctccaacaggattccatggtagctgggatgttagggctcaggcctatatgaacccaatagcaatggcgagatcaaggggtc

SEQ ID NO: 71982 - DNA, 100 bp, Homo sapiens
gaaataaaagatgaacaaaaatctgggacaggtttgttatccaggcataagaccaagaaattatcttcagaaaaggacattcatgaaatcagtttatcca

SEQ ID NO: 71983 - DNA, 100 bp, Homo sapiens
agttcaagatgaagtactggggcgtagcctcctttctccagaaaggaactgcaggactcatgcacacgttcaatgcccacgccgccactgacatcacggg

SEQ ID NO: 71984 - DNA, 98 bp, Homo sapiens
cctggatgccttcccaaacctgaaggacttcatctcccgatttgagatctgactgcagccatgagcagcaatgagtgcttcaagtgtggacgatctgg

SEQ ID NO: 71985 - DNA, 90 bp, Homo sapiens
caaatgcagtcggcttgtcctggctcttgccctcatcctggttctggaatcctcagttcaaggttatggaggttttgatgactatggtgg

SEQ ID NO: 71986 - DNA, 100 bp, Homo sapiens
gtcaggggagtgttgaagactctgcctcctacaaatatatgagctctgtgaaaatgttacagcctcgtctcagtagtatcctgttcaagctcacatttga

SEQ ID NO: 71987 - DNA, 75 bp, Homo sapiens
gctaagactccaggacacccctgaagccgagaaatgaacccagtgacttgattgtaaaaatttacagagcggaat

SEQ ID NO: 71988 - DNA, 83 bp, Homo sapiens
gaagtaggccgtctcgctctgggtctccaggcccgcgaccgtccgccagtcgtcccgagaaacgcttcgttaagggactcagg

SEQ ID NO: 71989 - DNA, 74 bp, Homo sapiens
tcctggacaccatctgcactctgtcagccagaatccaagctgaacagcataaggaaggacattcttgcacacgt

SEQ ID NO: 71990 - DNA, 96 bp, Homo sapiens
tgctgcccagaatgcccttcgggagctcatgatggagcagtccaagaagtcctccctcatggtggcccgcagtattctcaacaacaagctcatcag

SEQ ID NO: 71991 - DNA, 100 bp, Homo sapiens
aattgcaccacagatatatgggtttactatactggcaattgctggagaagattttgcaattgttgcttctgatactcgattgagtgaagggttttcaatt

SEQ ID NO: 71992 - DNA, 75 bp, Homo sapiens
tcggcctctgcaggcttgccgaagaagggaggtgtcgtgaaaactacccctaaaagccaaaatgggaaaggaaaa

SEQ ID NO: 71993 - DNA, 75 bp, Homo sapiens
gtacgagttgaatcattgttcaaataagttttacatggacggatggcaaattaaacagcagtaacttggtaattc

SEQ ID NO: 71994 - DNA, 101 bp, Homo sapiens
agacgatctcggagacgagtggtgggagaaccagccgactggagcaggcagcagcccagtagccggatcgagctgggagatgtgacaccacacaatattaa

SEQ ID NO: 71995 - DNA, 82 bp, Homo sapiens
cgccatggagcagccgaggaaggcggtggtagtgacggactggccaatcacaggcaggaagatgaaggttctgtgggctgcg

SEQ ID NO: 71996 - DNA, 85 bp, Homo sapiens
ggcaccaactattcgcggagctggaatgactggcaacccaggaagacctggaagcgctcatagcccatttccagacactcgatgc

SEQ ID NO: 71997 - DNA, 98 bp, Homo sapiens
ctcctgacagagctgaccctgaagctgccttggccttcaagtcacaggacgcagcgattccctgccctcttcggtgttattacacaggcaggacttca

SEQ ID NO: 71998 - DNA, 87 bp, Homo sapiens
gaagagacagcccccaaaagaacaggtgtttttggtgcccacaggagaggtttttgaacagcaggtactgaacgacacctgggtctc

SEQ ID NO: 71999 - DNA, 90 bp, Homo sapiens
ggactcgggcagtgaagagagcctggtggactcagactcagaccccgaggagaagggatctgtgccagttcagaagcaggcgagcctctt

SEQ ID NO: 72000 - DNA, 97 bp, Homo sapiens
tgctttctcggagcaaaagtgaatatgctgaatttcagtatcggaggaggcacagacaacgtcgtcgaggagatgttcacagtctactcagtaatcc

SEQ ID NO: 72001 - DNA, 82 bp, Homo sapiens
tgtgtaatcatctgaagaaattggtcccaagggtcctgcagttctgagcttgggttccctttgcctggacaccaaccaagcc

SEQ ID NO: 72002 - DNA, 80 bp, Homo sapiens
gtatgatcttcccaagaaagaggacgctttactctaccagagcaaggtaaaggcatgacttcctggcaccacagggaaaa

SEQ ID NO: 72003 - DNA, 100 bp, Homo sapiens
gatcttcttccacaatggatattccaagtttcttgtcttctacaacaatgatcggagtaaggcctttaaaaggggcgtgaggtcccaggaagtggccaaa

SEQ ID NO: 72004 - DNA, 90 bp, Homo sapiens
ccgtgcgccggcctttggtcgcctccgtgggcctcaatgcctctgcctgtgagtttctggatattgtagagctgctgctccagtctggtg

SEQ ID NO: 72005 - DNA, 83 bp, Homo sapiens
cgtccgtccgccgccaccacccactccggacacagcagaaaaatatggctcaggagactaaccagaccccggggcccatgctg

SEQ ID NO: 72006 - DNA, 75 bp, Homo sapiens
cgggccctggggaagagaagcagttcctggaggtttgtgactggttatatcctctagttcctgatagatctccgg

SEQ ID NO: 72007 - DNA, 100 bp, Homo sapiens
acttggaccaagaactcaaactttttgtatctcgacactctgcaagattctctcctgaagtcccagctttgactctcccggatcttgcagagcagtttgc

SEQ ID NO: 72008 - DNA, 100 bp, Homo sapiens
aaatgatccgcctgcctcagcctccaaagtagctgagactacaggacttaaccaccaccatgtcgagcaaaagaacaaagaccaagaccaagaagcgccc

SEQ ID NO: 72009 - DNA, 100 bp, Homo sapiens
ccgcttcaccgtgcccctgcccgcgaccatggcctcctccgaggtggcgcggcacctggagcctgcagacagggggatttgcctgggaaggagaagtaga

SEQ ID NO: 72010 - DNA, 75 bp, Homo sapiens
cttccagtcccctgaggtgatggcagcaggtattaatctctggagaagacacatccacagttagcactttcttca

SEQ ID NO: 72011 - DNA, 100 bp, Homo sapiens
gccacctgtgccatccaaactgcacctacggaatggctgcagtctgtccaggccaccatgatcctgtcgatcatcttcagcattctgtctctgttcctgt

SEQ ID NO: 72012 - DNA, 85 bp, Homo sapiens
cccaataaccaggtgcttggcaaaatcgagcgggccattgtgtactaatggtcacttgatgtgcgctggctgttttatccaccta

SEQ ID NO: 72013 - DNA, 100 bp, Homo sapiens
ctctccaaagaaattcctcaaacagaatttcacacagggtattccatggagaatgaggatttcaaatatgcgtgcattagagaatgattttttcaattct

SEQ ID NO: 72014 - DNA, 100 bp, Homo sapiens
gtgacccctggactcccgacagcagaatcccagtgatcaagggaggacccctggaacacaactaccgattgaagcagttccattttcactggggggccat

SEQ ID NO: 72015 - DNA, 74 bp, Homo sapiens
ctacatgcagatatcaagccagacaatatcctgggattaatgaaaatcaagttccatcctcagacaagaggtaa

SEQ ID NO: 72016 - DNA, 82 bp, Homo sapiens
gaccaagagggtgttcgactgctagagccgagcgaagcgtgacaaaggggacccaggcccaatgggcctgccagggtacatg

SEQ ID NO: 72017 - DNA, 75 bp, Homo sapiens
gctcttggcaggagtagctgatcaaaccaaggatgggggcataatcaacccatttcctgcttcaaaaggaatcag

SEQ ID NO: 72018 - DNA, 98 bp, Homo sapiens
accaatgctcaagtgatggctggttttcaggaactcataaatgccacctcaacaattcagagaatgaccagtccatgggtgagatgcagataatcgga

SEQ ID NO: 72019 - DNA, 74 bp, Homo sapiens
gtcacagccacactctgcaccgctaggccgtccccgaccttgcctgaacaaggagcagcggctgcggcagcgca

SEQ ID NO: 72020 - DNA, 100 bp, Homo sapiens
cgcgaccaggccgggcacctccgagcgcaaggacagcgcgaggtccgcgcagcccagcgcagccattatttggcatgatcattactatcggccagtctat

SEQ ID NO: 72021 - DNA, 101 bp, Homo sapiens
tagagagcaagaggaagtcagggggaaatgaggtgctggagaatctggtaaaagcaccattgtgaagcagatgaggatcctgcatgttaatgggtttaatg

SEQ ID NO: 72022 - DNA, 75 bp, Homo sapiens
cagcccccagcctcggacgccgtggcccttgggagagagaagaaagccccgcccccacctccaacctcgatgccc

SEQ ID NO: 72023 - DNA, 74 bp, Homo sapiens
gctgccgttcagcacccgtcgagcgccggtctaattgaagccaacggagaactcaaggtcttcatagaccagaa

SEQ ID NO: 72024 - DNA, 109 bp, Homo sapiens
ggaaaaggaggaattcgccgtgcccgagaatagctccgtccagcagctacaaggctttggccgaccaagtgtgtaccatgctgctattgtcatcttccttgaattcttt

SEQ ID NO: 72025 - DNA, 101 bp, Homo sapiens
gtctttctccgcggcgaaggtgaagagttgtcccagctcggcccgcgggggagccccgggagccgcacgatgcgacctaaagtcatgtggcacctccttcg

SEQ ID NO: 72026 - DNA, 75 bp, Homo sapiens
catgatgcaaggaggcgtgtacggctcaggtggagaaaggttgggcccgaaggcatcctgcagaacggggctgtg

SEQ ID NO: 72027 - DNA, 89 bp, Homo sapiens
gttcagcttctggaggatgcttatgctattgagtcacaactacaacttcacggacttaacattgaagaaagtatgcggatgataaagcc

SEQ ID NO: 72028 - DNA, 83 bp, Homo sapiens
ctgagtggttgtgtggtcgcgtctcggaaaccggtagcgcttgcagcatggtgtcccgacccaggctaagcttgagcatggct

SEQ ID NO: 72029 - DNA, 100 bp, Homo sapiens
cagtttccccatctgcaaactccggaccctggagacgctgtttggaatgtgagatgggcgtgaggtcccagcttgaagagaaagaaaacaagaagttccc

SEQ ID NO: 72030 - DNA, 99 bp, Homo sapiens
gtagtaagaaaacaaaaactgatgaccaagagaatgtgtcagccgatgcaccgagtccagcccaggaaaatggagagatggccaacttagcatttatac

SEQ ID NO: 72031 - DNA, 100 bp, Homo sapiens
gtatcctcctcagtatccaccgacagcattccaagggaagcaccattttccacaaaactctcaagaaggacttgttgcaactggaaaagcaattaaatgt

SEQ ID NO: 72032 - DNA, 96 bp, Homo sapiens
ctctgggatattatcgatgagttcatctaccagggtgattttgtagacagaggttactatagtttggagaccttcacttaccttcttgcattaaag

SEQ ID NO: 72033 - DNA, 74 bp, Homo sapiens
aaggccgcgttggggtgagaccctcacttcatccgggagcgtccccggatttcgacatccaccctcgacctggg

SEQ ID NO: 72034 - DNA, 75 bp, Homo sapiens
gcgccggccagcagcctgcacacccaggaagcagggcggtccctcatcaagaagagctgtaggtaaaacttgcct

SEQ ID NO: 72035 - DNA, 100 bp, Homo sapiens
atgctgcactaaggggaaatcccaggttctaggtcccaattctactgcaaatagtatcatggcatcttatcagcaacagaagacttcggttcctgttctt

SEQ ID NO: 72036 - DNA, 100 bp, Homo sapiens
tgcgaggctgggagccgccgcccgggctggactgcgagggagaaccgaagattacaggaggccagcatgaggttggaacaagagaatgatgaccttgccc

SEQ ID NO: 72037 - DNA, 105 bp, Homo sapiens
ttagctgctgtggaggcacatacctacccagcatgcctcggtcctataaggtatactaccatgtgctggggctgggcgagcctctggccctgaagtctccccggg

SEQ ID NO: 72038 - DNA, 101 bp, Homo sapiens
agacaagacaaatgtgcccttggctgggatcaccaggagaaattgcagctgcatgaatcccaaaaagtttcagagactcctccactctctgggaatgacac

SEQ ID NO: 72039 - DNA, 100 bp, Homo sapiens
agcaaaggccacagtgaactccggcgtggctgaggaaggaggaggcacccacaggctgctgggaggagagcataagatatcctgctggatgacattgtcc

SEQ ID NO: 72040 - DNA, 100 bp, Homo sapiens
tggaaagtcagctccaccacagcttccttctttctacaaaattggatctaagcgggccaactttgatgaagaaaatgcgaatttttcacagacaacctat

SEQ ID NO: 72041 - DNA, 50 bp, Homo sapiens
agggggcggcagcctcggcccgaagtaccttgaggttatgcggaaactcc

SEQ ID NO: 72042 - DNA, 75 bp, Homo sapiens
acgtgcttcctgcttcatagataagagcatgggtggtaaagtaccacctgctactcagaaagctaaatcagaaga

SEQ ID NO: 72043 - DNA, 75 bp, Homo sapiens
cgctatgtacgccctcttcctcctggccagcctcctgggcgcggcttagaccatgctcagcctccaagcagcctt

SEQ ID NO: 72044 - DNA, 82 bp, Homo sapiens
catctacatgggcagaccaactcacttgaaataactgtgaatgtcccagatgtaggatgcatagctgttgttgaacatgagc

SEQ ID NO: 72045 - DNA, 101 bp, Homo sapiens
atgtgttcgatgcattgatgttgaagtctcccacagtgaagggcctgatggaagcggcagaggcaaggctggcagcaaaacgggctgcccgggcagaagca

SEQ ID NO: 72046 - DNA, 83 bp, Homo sapiens
acagtgttcagcaggtcctgttggagatgatagttattaatgctgcactggctttagcagcaaaaccacagagtaaactggcc

SEQ ID NO: 72047 - DNA, 100 bp, Homo sapiens
gttcctgcagtaccccactctacgatcaggtctttcctggggctgctgggctcccggctccccacctcggtgtcacagaaggcacttgggagcaggggtg

SEQ ID NO: 72048 - DNA, 90 bp, Homo sapiens
agctcagacctgccaatttaccagagataattgataacaccctgtaacagctgacttcattaccatctcagaagcagcaaaggagccagc

SEQ ID NO: 72049 - DNA, 100 bp, Homo sapiens
cctggacttcgcgcagtgcctggggtactacggctacagcaagaaactgaggcttcttgaagagcttgaagacacttggctcccttatctgacccccaaa

SEQ ID NO: 72050 - DNA, 100 bp, Homo sapiens
tcaatgaatggattgctgtgaacagatgctgaaaacgccattcaacagatgggtggccagtggcttggtggaagacaaatcagaactaactgggcaaccc

SEQ ID NO: 72051 - DNA, 76 bp, Homo sapiens
aggactcaggagcaaatcagtaatgttgtaagccaatgttgtgaggcttcaagttcagacatcactgagaaatcag

SEQ ID NO: 72052 - DNA, 75 bp, Homo sapiens
cctttaccagctggggttcctgtcgaatgggatcgtttcaggtttggaaggtttgcagttgctgctcttcagtcc

SEQ ID NO: 72053 - DNA, 90 bp, Homo sapiens
cgccctgctgtccttgtggtacctgctccgacggcgaagaaatgtccatgacctccctcagggtgtgggcccatcgctggatggatctgt

SEQ ID NO: 72054 - DNA, 75 bp, Homo sapiens
gagagttcctggccgagttcatgagcacatatgtcatgatgggaaatgcaataccttatttccagatgactccta

SEQ ID NO: 72055 - DNA, 97 bp, Homo sapiens
gaccagctagagaccatacagacctaccggtctgtcagtgagatggcttctaacaagggccgttgctccagggagaactgcaaatatcttcatccac

SEQ ID NO: 72056 - DNA, 100 bp, Homo sapiens
tatgcaccagcacgcctggctaaatcaggtatttggatccaatctcgctaatctgtgtcagagagagaatggcacagtaccaaagtttgtgaagttatgt

SEQ ID NO: 72057 - DNA, 99 bp, Homo sapiens
gagaccatgacgcccatgcactaccacctgcgggagatcatcatctgcacctaccgccagccaaaattgaccaagaggcagaggaaaattcactgacag

SEQ ID NO: 72058 - DNA, 75 bp, Homo sapiens
atttcttctgtatgaccagacaaaagatttaccttcagctttaacaaaaaattggccgtcaaaacctgagtcctg

SEQ ID NO: 72059 - DNA, 100 bp, Homo sapiens
agatcgacccgtacttgaagccctacgccgtggacttccagcgcaggctaaagtgaacaactccagcctgataggtttaggatacactcagactctaaag

SEQ ID NO: 72060 - DNA, 132 bp, Homo sapiens
cgagatgtctcgctccgtggccttagctgtgctcgcgctactctctctttctggcctggaggctatccagcttcaaatctgaacatcaatgatgtactagggaactactcattgactcttgttgatgcattg

SEQ ID NO: 72061 - DNA, 99 bp, Homo sapiens
ctgggtttcccgggagatcccaggcggtgacagagtggagccatggctagagaagaggactgtcagaaggacgtagaaggcacggttttactgtgagga

SEQ ID NO: 72062 - DNA, 51 bp, Homo sapiens
ctttaatcctgaaagccatgcagcgggcgtcgattagcaaggtaaaagtaa

SEQ ID NO: 72063 - DNA, 83 bp, Homo sapiens
cggatgccctgcagtacctgcagaaggtctctggagacatcttcagcaggaatctgaacctgtgatgttaagaaatcagtaaa

SEQ ID NO: 72064 - DNA, 82 bp, Homo sapiens
gacagatttgtcatgaagaaactcaatgatcgtgtcatgagagtggccaagactaagcagcagattgaggagcagcgggtgc

SEQ ID NO: 72065 - DNA, 75 bp, Homo sapiens
acaagcgtgagccactgcgtggcctgagcttagaccatgctcagcctccaagcagccttgtcatcgacaaagaat

SEQ ID NO: 72066 - DNA, 101 bp, Homo sapiens
aagcatgtgtcttccccagctctgcagccacatactatccgtttgttcaggaaccaccagtgacagatttaaggaagaaatctctaaacgttttaaatcac

SEQ ID NO: 72067 - DNA, 100 bp, Homo sapiens
cgagagaggcaccgggatcgtgaccgagaccgtgaccgagagcgtgaccgagagcgcgaatatcgtcatcgttagaaggcgtagcgtgcctcctgtgatt

SEQ ID NO: 72068 - DNA, 73 bp, Homo sapiens
cgggaagcgtcgggattaggtgaaagtatgatctcgtgaaaccttgagagaaactgaatgacgaatgaaacta

SEQ ID NO: 72069 - DNA, 82 bp, Homo sapiens
tctcagggagccgctcccggccactttaagaattactggttacaaaaggaactgtggctgcaccatctgtcttcatcttccc

SEQ ID NO: 72070 - DNA, 100 bp, Homo sapiens
atcaccagaaactagaacgtgaggctcggatatgtcgacttctgaaacatccaaacatcggaatgcccaattcttctggactcatgaaccgtcgtgatgc

SEQ ID NO: 72071 - DNA, 75 bp, Homo sapiens
ttatgagctcggttttcttatgcttataagagtggaacagggccgagaactactggtggcgtggccagaacacac

SEQ ID NO: 72072 - DNA, 89 bp, Homo sapiens
atcctctacaggacccgctttctaccattaagcagtatcctggtgtgaaccagctatcctccagtataggaggattgagtcttcagagt

SEQ ID NO: 72073 - DNA, 74 bp, Homo sapiens
cgaaaaattgcagaagcacaagccaaactggtaagttctcttctacgctgtatgagactggtggctgtgatatg

SEQ ID NO: 72074 - DNA, 96 bp, Homo sapiens
tgtcctgacttctttccaggtgatgtcaagagtttttctaatatgggcagtaacacatagcgtcaaagaggttgcagatattttattccaaactgc

SEQ ID NO: 72075 - DNA, 90 bp, Homo sapiens
gaagttactgccgcgccaccgagtccggaccggagactttggggcctaactaggtgatgatgaacagtctacacagatggctgcaagttg

SEQ ID NO: 72076 - DNA, 100 bp, Homo sapiens
gttataacgctacacgaagaactaagaatattattagcacaagagcaccatactttgagggtatcgatatcctgaagcttgtagcagcccaagtgggaag

SEQ ID NO: 72077 - DNA, 75 bp, Homo sapiens
cccttcctcaaataaggaaattgacacctggcgtggtggacatcgagcagctggatccccgcggccggactcccc

SEQ ID NO: 72078 - DNA, 100 bp, Homo sapiens
ccttgcttctgtagaccagctccaacaggattccatggtagctgggatgttagggctcaggatcaagattataggaccggcccaagtgaggagaaaccca

SEQ ID NO: 72079 - DNA, 98 bp, Homo sapiens
attctgcctttttttgggaagaaagagatattatggcctttgccaatagcccctgggtggttcagatgccagaccagtttgaccaggcggttgtgctg

SEQ ID NO: 72080 - DNA, 98 bp, Homo sapiens
aagaagaactcaagaatgttactaacaatctgaaatctctggaggctgcatctgaaaaggatgatcctttcaaaaataaagccttgttatttagcaac

SEQ ID NO: 72081 - DNA, 98 bp, Homo sapiens
tctgtttctctgctgcaccgacctcgacgtcttgcctgtgtcccacttgttcgcggcctataggctgttcggctcttgaatcccagcgatgaaaccag

SEQ ID NO: 72082 - DNA, 90 bp, Homo sapiens
agagcatctgaaaaccctggccaaggacgaggaatgatcaccaagacacacaaagtagaccttgggctcccagagaagaaaaagaagaag

SEQ ID NO: 72083 - DNA, 96 bp, Homo sapiens
gagctgggcgacgagctgaccctgggagacatcgacggtgtcagttgtacccgaggcgttctcagcagcagcaagtacctgtggtggatttccagg

SEQ ID NO: 72084 - DNA, 51 bp, Homo sapiens
agggtcaacaaaaggagtttctgggaggaactgcaagcacatgttgaccag

SEQ ID NO: 72085 - DNA, 82 bp, Homo sapiens
ctccttctccagcatgggctcgcctgtcaacgcgcagctgctcagataaagaatttgatgagccagctaggaactaagcagg

SEQ ID NO: 72086 - DNA, 75 bp, Homo sapiens
gtccccgccagtcagaagttgagggtgttttgaatgctgtatcaaatgcctggggggcattccctatgcctctct

SEQ ID NO: 72087 - DNA, 90 bp, Homo sapiens
agtgactcaaactgtgagaacttcagctccggctcccaccttgtctttgtcccgtcattgagagatgtgcaccatgagcctgtgtacccc

SEQ ID NO: 72088 - DNA, 100 bp, Homo sapiens
cgccgcgtcccctctctccccgcgctgaggctgcggaccgggcccggcgggattagcagaattaaacaaccaccatgtcgagcaaaaaggcaaagaccaa

SEQ ID NO: 72089 - DNA, 75 bp, Homo sapiens
gatgtctttggcccagagctggacaccctcctggactcgctgtttgctgtgttctacaagggggacgagtgcctg

SEQ ID NO: 72090 - DNA, 100 bp, Homo sapiens
agaagtttcagtgagcgggagctggcagaggttacaacctgccatattcattcatccagtgatgatgaaattgactttaaagaaacgggtttctcacagg

SEQ ID NO: 72091 - DNA, 76 bp, Homo sapiens
ccgcgctgcactacgcctttcaggacgagaaccacctgtttggaaattttagcattcaggtgccaggaatgcagat

SEQ ID NO: 72092 - DNA, 149 bp, Homo sapiens
ggaagaggtcaaatacatgaaaaatggggcagaagaagagcagaaaatagcagccaggaaccaagaaaacttgagtgaccgactcctcatcaaaggtggacggatcatcaacgatgaccaatccctttatgctgacgtctacctggagg

SEQ ID NO: 72093 - DNA, 100 bp, Homo sapiens
cagggaccaggcggaggcgtcgcgggagcctttggggcaccacagagatgcgggactggcattgcggactgacctccagggagaggcccagatctgatct

SEQ ID NO: 72094 - DNA, 105 bp, Homo sapiens
agagatcaccatggtagagcagcagatctctaagctgaagaagaagcagacaatgcagatcttcgtgaagactctgactggtaagaccatcaccctcgaggttga

SEQ ID NO: 72095 - DNA, 101 bp, Homo sapiens
aaaacatcaagaacaattttgtgctcatatatgagctgctggatgtctgaaaggcactttattatgcaggtggtctgtgaagccacacagtgtccagatac

SEQ ID NO: 72096 - DNA, 105 bp, Homo sapiens
attcaagaatcatctgtaaacctgataacactgcatgaaatgttagaggagaaactcccatgtatggaatcccactgtatgatttataaacagacaatatgtgag

SEQ ID NO: 72097 - DNA, 50 bp, Homo sapiens
gcagcacaacacagggaagcttggggaggaacctgggcaagtctggcctg

SEQ ID NO: 72098 - DNA, 100 bp, Homo sapiens
ggaataaggaagcgacctgcaaccgacgtcccgccggaggtggagcccagttcccaggacgtgcgccaggcgctgggccggcccgtgctcctgcgctgct

SEQ ID NO: 72099 - DNA, 90 bp, Homo sapiens
ggggaaaggagggtcgggaaaggccgagcgtagcatcttcatgatacagttaagaggaatcttgacagcgccacttcccctcagaatggc

SEQ ID NO: 72100 - DNA, 82 bp, Homo sapiens
gaaagagaatgatgaagagaaaggcccggagactgtctccaattgagaaacatggcactgtttttcctgcactctacccacc

SEQ ID NO: 72101 - DNA, 74 bp, Homo sapiens
atgagctcagttggctgcaggagcagctagcacaggagcctgatcaggtgtacgaggggatcaccttcgaggac

SEQ ID NO: 72102 - DNA, 100 bp, Homo sapiens
cgggacatagaacaggtgccacagtatggtcgatacatccgctctgctctgcgtcaagagaaggctctttctgccatagctgacctcctgactaatgaac

SEQ ID NO: 72103 - DNA, 74 bp, Homo sapiens
tcatgtcttgctgttgatttgtgaataaggcaactatcgtacccagatgtgggataagcagaaggaggtcttcc

SEQ ID NO: 72104 - DNA, 115 bp, Homo sapiens
gcgggccctggctcaggaacagggacagcacctcatcccctggatgggggaccacaagatcctcatcgacaggcaccgtctgcgtcctgctgtccttccccttcatcttcagccc

SEQ ID NO: 72105 - DNA, 100 bp, Homo sapiens
ggaaccccagacctgggtccccagaagagccccttgtgggagaagaatggctctgagaactcacatctgagaatgactgaccctgttccttgaggctgtg

SEQ ID NO: 72106 - DNA, 90 bp, Homo sapiens
aaatgcacaagctggagcccaactgataatccttgaacatgggagttctgggaaatcgttcattcatttacagatgaacagaaaagactc

SEQ ID NO: 72107 - DNA, 75 bp, Homo sapiens
cgacgccagcgtttccagtcaccgcttctttggacccaatgctgaaataagggctctctttacctatgaaggcaa

SEQ ID NO: 72108 - DNA, 97 bp, Homo sapiens
agaaggaccagattattgagatggcctgtctgataactgactctgatctcaacattttggctgaagttcatgcaaatattgaaaactcttggaatga

SEQ ID NO: 72109 - DNA, 75 bp, Homo sapiens
agggagcctctgacggcgtctgttgctgggcatattggattttacccatcataggcgctgttctcttaggtttcc

SEQ ID NO: 72110 - DNA, 82 bp, Homo sapiens
gggaggagcgctccggtggtctggcgcgctgggctcgctagacaatgcagatcttcgtgaagactctgactggtaagaccat

SEQ ID NO: 72111 - DNA, 101 bp, Homo sapiens
gcagcggcaacagtaacgaaaaacagggctgtgtttgcaagagcagacccttggacctggtgtttatcattgatagttctcgtagcgtacggcccctggaa

SEQ ID NO: 72112 - DNA, 100 bp, Homo sapiens
cttcggccgcggctccaagcagctgggcatccccacagattcgggaactggagcctctcctctgtcacagtgacaatccatctcagctcatctggacatc

SEQ ID NO: 72113 - DNA, 75 bp, Homo sapiens
ttggtgattctacaaaaaaagacactgaggttgagagttcagttgattccaccatctctagttcttcttccacta

SEQ ID NO: 72114 - DNA, 100 bp, Homo sapiens
gagttaccaagatgaacacgagttcaacgcccacctggtttgtcgcatgtgctgtatggagagcccgagcccagcacattgtgccctgtactatatctca

SEQ ID NO: 72115 - DNA, 90 bp, Homo sapiens
agaccttggagtaattcgtcgacaggttcatctcagaagaagttgttggcacctgatatgtttacagaatctgatgatatgtttgctgcg

SEQ ID NO: 72116 - DNA, 88 bp, Homo sapiens
ggcggcgctggcgcgggaggagctgaagaaatcaggggagaaacccctgcttggtggaagcctgatggaatatgcaatcttgtctgcc

SEQ ID NO: 72117 - DNA, 83 bp, Homo sapiens
caaccaattcatagaatagactcccctggatttaagccagcctctcaacagactggatgatgtcctggttggggcacctctct

SEQ ID NO: 72118 - DNA, 97 bp, Homo sapiens
cccaagcgggagaaacggccccgcctgccccggaaactcaaggcaaacctgcccttgctgcagcgggagctcctgcactgtgcacgcctggccaagc

SEQ ID NO: 72119 - DNA, 82 bp, Homo sapiens
gattcattccgttatcctaaaacagttaatatgatcctctgttgaagcaagaagacaaactgtatggtggagaaagaagtgg

SEQ ID NO: 72120 - DNA, 74 bp, Homo sapiens
cctgtgtctgcctccttcttgaatagcccagtgaattcatctaaacagatgctcccataatactctcagatagt

SEQ ID NO: 72121 - DNA, 100 bp, Homo sapiens
tgctcctggctacatagctccaggagtctccccaggacagtgctatcacccgggatattaaccgaacattcccagcccatgactactttaaggacacagg

SEQ ID NO: 72122 - DNA, 75 bp, Homo sapiens
agtacctgctgaaccacaaacaatggaaactaaatatattttgccaactttggaaaaagaattattcttggcaga

SEQ ID NO: 72123 - DNA, 75 bp, Homo sapiens
caacttccgcgggcgtttaaatagcagcctctctcccctcccaccgcctagaacattccatattctgcttcacac

SEQ ID NO: 72124 - DNA, 101 bp, Homo sapiens
ctgcacagcacagaggggcagccggagagcctgggaaagacctggaatggccaaatatcaaggtgaagttcaaagtttgaaactggatgatgattcagtta

SEQ ID NO: 72125 - DNA, 75 bp, Homo sapiens
ttttctcagatgttggatatttgcttggaaaaacgtgtgggtacgaccttgaaaaatctggtccttcatcagaac

SEQ ID NO: 72126 - DNA, 100 bp, Homo sapiens
aggcgaggctagggaggacctcacttccccggggtgtaataatgttaactgagagctgtaggtaaaacttgcctactgatcagttacacaaccaatgcat

SEQ ID NO: 72127 - DNA, 90 bp, Homo sapiens
tgaggaagagtcaggggcacagagagatggagagagacctagttaggtttttccagagcttctcggatgccctaatcgacgaggaccccc

SEQ ID NO: 72128 - DNA, 50 bp, Homo sapiens
gcacttttaaacattacagttgtataagatggagtctcgctctgttgccc

SEQ ID NO: 72129 - DNA, 91 bp, Homo sapiens
caaccatgctcaacttcggtgcctctctccagcagactgcgggggatatgagactttctactcggaatatcctgagtgttgcgtggatgta

SEQ ID NO: 72130 - DNA, 50 bp, Homo sapiens
gtatcccactggtgtatacacagtcttactactttgaccgcgatgatgtg

SEQ ID NO: 72131 - DNA, 100 bp, Homo sapiens
ctatttctgctccgtcatccatgccactattccagtgctgaatattcaaatgaaaatttttcctgcactttgtactgtagcagggaccatattttcctgt

SEQ ID NO: 72132 - DNA, 74 bp, Homo sapiens
acagtctgcatgtgcagttttcagagctgaagaagcaggtggagagtgccgagctgaagaaccagcggctcaag

SEQ ID NO: 72133 - DNA, 100 bp, Homo sapiens
ctgaatgtggacaccaacaccctggaaacccccttcgatgacctccagagcctcccaaacgacgtgcatcgactgtgcggggatcttgaagcttagaaac

SEQ ID NO: 72134 - DNA, 98 bp, Homo sapiens
gaaattttgagccatttcgaatcacttaaaggagtggacattgctagcaatgagctcccaaagccatccaggacttcgtcttctatgctccccggctg

SEQ ID NO: 72135 - DNA, 75 bp, Homo sapiens
tctgttctccgcagcctgatgggaaagatgccaccctcctgatacatgaagccaccctggaagatggtttggaag

SEQ ID NO: 72136 - DNA, 90 bp, Homo sapiens
aacacctgaaggtgaagaacatcatccagtggcagacactgaaaataagtgtgaagatgccttaagaaaaaataagagcttaattgggcc

SEQ ID NO: 72137 - DNA, 86 bp, Homo sapiens
cggcgctctggctctggctgtgcgcgctggcgctgagcctgcagccggccctgccggtgtcgtgaaaactacccctaaaagccaaa

SEQ ID NO: 72138 - DNA, 82 bp, Homo sapiens
gaagaaaccagccgaacttcagggtttccaccgttcgttcaagggcagctgtgcggagggtagtggcagccatgaaccggat

SEQ ID NO: 72139 - DNA, 82 bp, Homo sapiens
ctttggaagccgtgcggagcgagttacgagaattcccggccgctgcaagggtggtattgagcacgctgcggcagctgagcac

SEQ ID NO: 72140 - DNA, 87 bp, Homo sapiens
gcggctgggcatcctcctgagactccggggtcagacgcccactccaggccagaagcggactcctagaagaggggagcagcaaggatg

SEQ ID NO: 72141 - DNA, 100 bp, Homo sapiens
tttttgtacttacaaagtccatgctaacctactatgagggtcgagcagaggtgccaatgggtcatgtttggttagaaggtgacaatctacagaattctac

SEQ ID NO: 72142 - DNA, 75 bp, Homo sapiens
gcccccagaagtgatcgctcagctggagaacgcggctaaagttctgatggatcttaagattgaaagtgatgttca

SEQ ID NO: 72143 - DNA, 75 bp, Homo sapiens
ctctcttcagtgttcacagagatgcaaccactgagatctgtatctgtggacctgaatgttgatccctcgcttcag

SEQ ID NO: 72144 - DNA, 75 bp, Homo sapiens
gctgcgggatcccaaatcggaagtgaattcggattgtttgctgcaaccatgtccaagggacctgcagttggtatt

SEQ ID NO: 72145 - DNA, 82 bp, Homo sapiens
cagaaattctggaacacctatatggtagttgtcctgggaacccctgcagaagaagatggtggtggcaaaattgatttaattg

SEQ ID NO: 72146 - DNA, 135 bp, Homo sapiens
gtttttgacaactatgcagtcacagttatgattggtggagaaccatatactcttggactttttgatactgcagggatacaggaagatgctgacagaagagtttcacagaacagccttggggagatgacaaaactt

SEQ ID NO: 72147 - DNA, 77 bp, Homo sapiens
tccttctgcagtccctcgtccagccacccccagagcaaaatatgctgtgaattccatcaagaagaaagtcaacgaca

SEQ ID NO: 72148 - DNA, 96 bp, Homo sapiens
gcaagggcatggggttgccggagagaagaggattggtcctgcttttaagcctagctgaaattcttttcaagatggagtctcgctctgttgtccagg

SEQ ID NO: 72149 - DNA, 75 bp, Homo sapiens
tctgtaggaaggaacttggttccccctccctcagcttccgccccaaaaggctgaactcacgggaatcaaatggcg

SEQ ID NO: 72150 - DNA, 50 bp, Homo sapiens
tccccgaccttgcctgaacaaggtttacccaaggtccagcctagccccta

SEQ ID NO: 72151 - DNA, 96 bp, Homo sapiens
ccctggcattttaggtgtcggttgggtagaacattaaccaggtggtatttgttggaaatttcttgagaattaatacgatcgccatgcggcttttgg

SEQ ID NO: 72152 - DNA, 98 bp, Homo sapiens
cttctgctgatcgacattgagcagtcctacatcaacacgaaccatgaggacttcatcgggtttgccaagaaattttatgctttggatccttcattccc

SEQ ID NO: 72153 - DNA, 100 bp, Homo sapiens
gatgagaaaatccttcaatcagcagttagctgatgccatagctgttatcaaaggaatgtaccagaatcaattctgtttatgggaagagtgacaaatcctg

SEQ ID NO: 72154 - DNA, 82 bp, Homo sapiens
ggcaaggcttgtttactatggccgatgatctggagcagcagttgaaaggattgttgacaaaaggaaaaataaaaaagggaag

SEQ ID NO: 72155 - DNA, 100 bp, Homo sapiens
cgtggcctgggagttcagcttttagagcaggtgtatgatcttttggaggaggaggatgaatttgatagagagggagaagagcctgctgagtgcagtgagg

SEQ ID NO: 72156 - DNA, 82 bp, Homo sapiens
ctcggagcgcggtccctgtattggtctcctgctcctagagagtcatcttagtgggatttggggaagcaacagggctgtgtgg

SEQ ID NO: 72157 - DNA, 100 bp, Homo sapiens
ttccaaattctgtcatcaaatcctgtgctgctgttcctcgtgtctactgcttatgaaaagcaatttcctgcaaccagtaaggacaactttgatatgtgca

SEQ ID NO: 72158 - DNA, 100 bp, Homo sapiens
gaatttgtgacagctgcagttgctccccgcccccgagcagccgaggcccaacacagagatactttcattgaagaacgctatggaaaatataacatcagtg

SEQ ID NO: 72159 - DNA, 75 bp, Homo sapiens
gtcggcggcagtcgggccagacccaggactctgcgactttacgttttctaaatagctttgaggagttacaggctg

SEQ ID NO: 72160 - DNA, 75 bp, Homo sapiens
caaagcgttgaggatcctgcagaatgagcccctgccagagaggctggaggatgttttagaagaatgtatgtctct

SEQ ID NO: 72161 - DNA, 75 bp, Homo sapiens
gttggcatggcctgtgccatcagtatcttaatgaaggacataagcagatgttcaacccaacagaggaaagccaga

SEQ ID NO: 72162 - DNA, 100 bp, Homo sapiens
caacaacgagtacctcaaccctgagctgcgtgagaacccgcccatgaagccagatttctcccaggaaccagtgttatccaaggagcagcctgcgttccag

SEQ ID NO: 72163 - DNA, 80 bp, Homo sapiens
aacgtgttgcagagaccatgtgctatgcctacatgaagcagggcctgctttcttccccgggcgatgtgcagagatctttg

SEQ ID NO: 72164 - DNA, 87 bp, Homo sapiens
tacaaacataggatgttttggcgagagatgtattcagtggaggaagctgggctccacagagagctgcaacaccaccacagaagatga

SEQ ID NO: 72165 - DNA, 100 bp, Homo sapiens
tgcggcgcggggagccagcgagcgcgccttcggcattggccgccgcgatgtcagctcagtgctgtgcgggccagttatacatgggaagctgttgatacca

SEQ ID NO: 72166 - DNA, 100 bp, Homo sapiens
ctgaagagggaagacacgcggaaacagagtgtaccatggcttccagtaacactgtgttgatgcggttggtagcctccgcatattctattgctcaaaaggc

SEQ ID NO: 72167 - DNA, 75 bp, Homo sapiens
ggtgaccaagctcggggccgagcgggaggcagccgtggccgagttgtcacaggtagtactgatggaattggaaaa

SEQ ID NO: 72168 - DNA, 75 bp, Homo sapiens
tttcattttgtttggaagatggaccaaagcgatacaaagcatcaagtgtacctgatttgtgaacctatcttgctt

SEQ ID NO: 72169 - DNA, 83 bp, Homo sapiens
gggagatcccaggcggtgacagagtggagccatggctagagactcggtgaaatacctggagtgctcagctctcacccagagag

SEQ ID NO: 72170 - DNA, 90 bp, Homo sapiens
cggaaggagtgcgcaggcgcggaatctccgacttgccatggtcgtctttgtctgccgatggcccactgcgtgaccttggttcagctgtcc

SEQ ID NO: 72171 - DNA, 100 bp, Homo sapiens
cgataatggcggatatggaggatctcttcgggagcgacgccgacagcgaagctgagcgtaaaggtactccaaagattcaggtttactcacgtcatccagc

SEQ ID NO: 72172 - DNA, 123 bp, Homo sapiens
ctgggaccgaaccagcatggggagtcggaaggggacaaatccgcgatcccagtcatgcatacagccagctaaaggtgtggatgagcaaatacggctggagtgccgacgagtcggggcagatct

SEQ ID NO: 72173 - DNA, 74 bp, Homo sapiens
tccccctgaagagttaccagatttctccgaagaccctacctcctcaggagttttgcatcccttgctttggctga

SEQ ID NO: 72174 - DNA, 100 bp, Homo sapiens
agaagaaaggaggcatcacatgtttctgctgtggggggcccttccgagcagcagacaggagcaaggctatgtggttgatgttgcagaatgatgagccgga

SEQ ID NO: 72175 - DNA, 80 bp, Homo sapiens
ttttgtctgcccctattgtaagtgcagatggaacacaacaggccttgtttgtatgaagtccagcacatctgtggttgagc

SEQ ID NO: 72176 - DNA, 98 bp, Homo sapiens
ttctatgctgtggaaaagaaagcatactgcgagccctgctacattggattaaagcctgtggtttccacagaagcaccacctatcatatttgccacacc

SEQ ID NO: 72177 - DNA, 100 bp, Homo sapiens
ccttctttgggccttcaccatcttccacaaagcccaaggagacccaggtgttggagacggtggagaggctgggcgaggcggtgaggacagagctgaccac

SEQ ID NO: 72178 - DNA, 97 bp, Homo sapiens
gcctgcgcctcttcccctgcagcgccgtgcagctcgccgcctaccgcaacagctgatgtgggtaaagctggagctgaaagggaattccgaggcctcg

SEQ ID NO: 72179 - DNA, 50 bp, Homo sapiens
aagaaagaccatcaagtttaccagttttcaaatggaacattttgatgcat

SEQ ID NO: 72180 - DNA, 88 bp, Homo sapiens
gggactttcttcgttgccatgaggaaagaattctccgagacaagttggatggcttgaggactggtactaaaaggaaacgtgactggga

SEQ ID NO: 72181 - DNA, 97 bp, Homo sapiens
cgaccttgagctccaggagttcgtctcttacgtctgcggaagtgcagctgcctcagttcttagcgcagaaatatggctacacacacctttctgcagg

SEQ ID NO: 72182 - DNA, 95 bp, Homo sapiens
cggattccagcatggacgtcttccacctggagggcatgactacatctgtcatgctgcggataaccgtctggtccttgtgcacaaaatccgtgtct

SEQ ID NO: 72183 - DNA, 89 bp, Homo sapiens
agacaacaccatcgagcacctcttgcccctcttcctggctcagctgaaggatgaggaccgccgggagagcctgcccacctccccaccct

SEQ ID NO: 72184 - DNA, 76 bp, Homo sapiens
aaaagttaggattgaagcctgcatgtggaaatgatcctagataattgatagatcctgtggttcaactggatttcta

SEQ ID NO: 72185 - DNA, 82 bp, Homo sapiens
ccggatctcaacaatcccttcaaggtggaaaaatgctaatcactgaaagaaaacattttcggtcaggaagaattgcacaaag

SEQ ID NO: 72186 - DNA, 82 bp, Homo sapiens
tccagcctgcggagcctgtggggcagacaaatggaatcctgtgctgaacccgaatcttccaaaaaacagcctacaatctgtg

SEQ ID NO: 72187 - DNA, 100 bp, Homo sapiens
ccaaaccgcctgtctctggaaataagaaaagctctgagggtctccaaagttaccagaggaaggctgaattttatgggattacatggatcgtcttctagac

SEQ ID NO: 72188 - DNA, 103 bp, Homo sapiens
gacaagaaagaggagacgcagccgcccgtggcgcttaagaaagaagtttgcagctcaccttgtgaagatgaaatatccaagaatctgtattctagatggtggc

SEQ ID NO: 72189 - DNA, 75 bp, Homo sapiens
cccgcatccgcgccgtcatggtgacagtgagggccccaaggctgttgcagctcctcgacctgatcggttggtcaa

SEQ ID NO: 72190 - DNA, 82 bp, Homo sapiens
ctcaacatctctcagagacgaaagatgagtgaccgaggaggtggcgttcctttgaggaaaattgacagacttttcaactaca

SEQ ID NO: 72191 - DNA, 100 bp, Homo sapiens
cctgggcctcccggtccgcaagcagttctccaaggagaagtacatcctggactcatcgccagagaaactccacaaggaattggaggaggagctcaaactc

SEQ ID NO: 72192 - DNA, 134 bp, Homo sapiens
gttcagcttccaaagagatacagggcagaggaaaatgcaagaagactgatggagcaggcttgcaatattaaagttcaaaccttgtactactcagctgatcacaagctgcttgatgggaacctactagatggaca

SEQ ID NO: 72193 - DNA, 50 bp, Homo sapiens
ttctacagagctggatattgagatcttttcctaataactactgggacaag

SEQ ID NO: 72194 - DNA, 83 bp, Homo sapiens
gtgattccccggaatcgtgtgctgggctggtcccccttggtgccagaaccctgtggagcatcatgaactgggaagagtagctg

SEQ ID NO: 72195 - DNA, 89 bp, Homo sapiens
ttcagcaagaggaccgggctgggcgcgcccggccgcgacgcccgggacccagattgcgggttcaggatccatcagttacacaagtgaca

SEQ ID NO: 72196 - DNA, 100 bp, Homo sapiens
ttcctcgcctggagcacgttccccgccttcaaccggctgcaaggggatcgcctgcgcgtcccgctcgtttcgatgcttgtggttggtggcatcgaccggg

SEQ ID NO: 72197 - DNA, 100 bp, Homo sapiens
cagcagtgcaaacagacttcggagtacctgcgctatgaagacacgcttcttctggaagaccagccaacaggatctctctaggagctgacactcgaacctt

SEQ ID NO: 72198 - DNA, 100 bp, Homo sapiens
ctccacactgctggccggagactcggactcccaggaggaagcgcacggcaagctcgtgctctggtcggtcccttaagctcctaggatttttagatgttga

SEQ ID NO: 72199 - DNA, 74 bp, Homo sapiens
gacacaaaagaagccatcgcaaattatgtgaaagaacaggacgcaggccttgatgccctttcctctatcataag

SEQ ID NO: 72200 - DNA, 100 bp, Homo sapiens
aacagaatgaagaaagtcagggggactgcaaaggccaatgttggtgctggcaaaaagaaaaatagtagtctagtcattcaagtgaaaggtccaagaaagg

SEQ ID NO: 72201 - DNA, 90 bp, Homo sapiens
cggagcatgaagacagagcgggtgactggaggtggctccccagtctcaaatatctatcagtgtagaagagtgggaagacaccaaagactc

SEQ ID NO: 72202 - DNA, 98 bp, Homo sapiens
gtggagcccatggaatcggtcctggaggacagatatccgtgaccctgggaagaagcctgtgatgctgtttctccatggcggctcctacatggagggga

SEQ ID NO: 72203 - DNA, 98 bp, Homo sapiens
agatattgggagatccacagctaagacgccgggactccctggaaacctagaaatggaaattagaaatatcttctggaaagctggccagatttgcagat

SEQ ID NO: 72204 - DNA, 82 bp, Homo sapiens
ggagcctcggggtccggaaccagacgatgagacagagttgcgaccgcgcggcaggtcaaaatgcagatcttcgtgaaaaccc

SEQ ID NO: 72205 - DNA, 83 bp, Homo sapiens
gaaaagcgctgcggcccagggggtaaagagagctctggattaatcgaattacagctgctagccaggaacatggactgaagtat

SEQ ID NO: 72206 - DNA, 98 bp, Homo sapiens
aaggatccagcttccttctgaaaaggcgatcttcctgtttgtggataagacagtcccacagtccaggtgtgatgaatgcagactctgctaccattttg

SEQ ID NO: 72207 - DNA, 100 bp, Homo sapiens
cacccagcatttcatccctcgtcgaaaggattggattggcatctttagaaaaaatccagttacactcttaaaggaattgtcagtgataaagtctcgatat

SEQ ID NO: 72208 - DNA, 83 bp, Homo sapiens
ctgaggaacggtgcctggaaaagctccagtcagtctcagtcatcctacatcatcaggaatccacagcagaggcgcatcagcca

SEQ ID NO: 72209 - DNA, 50 bp, Homo sapiens
ggatgtcatacgaacccgtgtgcagacggagtttccctcttgttgcccag

SEQ ID NO: 72210 - DNA, 83 bp, Homo sapiens
cgccgcccggggcgaggcagggccagcagcaggcgggaggttctgcggggagtgtctccagccctgcctgcaggtgccatccc

SEQ ID NO: 72211 - DNA, 100 bp, Homo sapiens
ctccattgattatgatagcagtgggcttttcacagtgggctttactgtgttgagataagctgtcattggaaggaatagtggtacaaagagctgaatgccg

SEQ ID NO: 72212 - DNA, 100 bp, Homo sapiens
atcgcctgggtggttgttggcgtgtccctgcagcgaaggatcctggttgacaatgcagatcttcgtgaagactctgactggtaagaccatcaccctcgag

SEQ ID NO: 72213 - DNA, 90 bp, Homo sapiens
ttgaagcacaatgatccttttgctcctggtggaacagttgttgcagcaagcgattcagaggcagaggaggtggacacggtggacgtctcc

SEQ ID NO: 72214 - DNA, 75 bp, Homo sapiens
cgcactcagctccaccatccagcgcttctacaagaacgaggcccttcgtgtatctatggaagagcagcggcagcg

SEQ ID NO: 72215 - DNA, 101 bp, Homo sapiens
ttcagttttttgcagaagaatattatcccttctcagaggattttttatcaagcagaaatgcatcgaacaacgagaatcaagatcactgagctaaatcccca

SEQ ID NO: 72216 - DNA, 100 bp, Homo sapiens
ctgctgaagtggtttttcctaatggaaaatcacatacctttccagaaatcatggatcggatctacaaaaatgtcatgaataaagtcagtgaaatgagtag

SEQ ID NO: 72217 - DNA, 100 bp, Homo sapiens
ccggctcccaccccggcccgaccccgacccggcccggtcaggccccatactcaggaatactcccccagttgcaagaggcgcaggaccgtggaagacttca

SEQ ID NO: 72218 - DNA, 74 bp, Homo sapiens
ctctcgccaagggccccaatgagtggcacacagtctactatcaccgacagcaggatgatgggcaggacagggag

SEQ ID NO: 72219 - DNA, 83 bp, Homo sapiens
cccagagacatggagagttgctacaacccaggctcccactgcagcagctcgggggaccccgctgagtacaacctgcgctcgcg

SEQ ID NO: 72220 - DNA, 99 bp, Homo sapiens
tgttgagaaattggatcttacacttgaaatacagactgttggggaacaagaggcatctccttggaaacaatgccatctttgaatgtgagagataaacct

SEQ ID NO: 72221 - DNA, 124 bp, Homo sapiens
tttgtatctcagttaaagaagatgaagaagtcttcaggggagattgtctactgtgggcaggctgctggtggtctacccttggacccagaggttctttgagtcctttggggatctgtccactcct

SEQ ID NO: 72222 - DNA, 87 bp, Homo sapiens
ctgttttggaactgtcaggtacctcaaagcgatatggttaataggagaattgccatggacttgatactgaagatggcagattcccag

SEQ ID NO: 72223 - DNA, 50 bp, Homo sapiens
aagatcatcattaaggacggaggcacggtcctgcagacattcgctttgtc

SEQ ID NO: 72224 - DNA, 75 bp, Homo sapiens
gccttccatagggctgagtctgggaccgagtgaaactggaacgccaagctgaagaagaacgaatacggaagcaca

SEQ ID NO: 72225 - DNA, 100 bp, Homo sapiens
ctgccgcagccaggagatggttcgggcctagcggagccgggactggagatcagaacactgaggctcagagaagttaactactccaaagtcatatagccag

SEQ ID NO: 72226 - DNA, 100 bp, Homo sapiens
gagaagcattttgcttttaaaatggcaagtggagcagccaacgtggtgggacccaaaatctgcctggaagataatgtgctccgtgtgtttgacagtggcg

SEQ ID NO: 72227 - DNA, 100 bp, Homo sapiens
gctcctccctgccagatagctcttattttgagataaagaactatatgcttggatgaagtgtgtgaagggacagcctcatgatcacaaacatttaatgcca

SEQ ID NO: 72228 - DNA, 100 bp, Homo sapiens
gggactggcagtgcccacacgtgtgcgttctccccgtccgcccgaaggaacttgctactaccagcaccatgccctaccaatatccagcactgaccccgga

SEQ ID NO: 72229 - DNA, 82 bp, Homo sapiens
tatttgaagtctgtgtcaaacatccatatcataagtggaattttggagatattcaaaggtcttgagagctgatgacaataac

SEQ ID NO: 72230 - DNA, 96 bp, Homo sapiens
gaccttgctacctacatcacagaatgcagtgaagtagcagaaccactcctggacctgaaggaaggaatagaccagttggagaacaataaaaccttg

SEQ ID NO: 72231 - DNA, 101 bp, Homo sapiens
aattgcacacagatgatgagtactccctgcgacaaggactgtgtactgcatgaatgaggctgagatagttgatgttgctctgggaatcctgattgaggtaa

SEQ ID NO: 72232 - DNA, 83 bp, Homo sapiens
cccaccatgtcagacgcagccgtagacaccagctccgaaatcaccaccaaggtgaccaggcattgatgcacccccaggaaggc

SEQ ID NO: 72233 - DNA, 90 bp, Homo sapiens
cccagatgcaagagctgcacaagtctctccggatccctgtttattgggaaggatatgttcgattcttaaatacgccatctgacaaatcag

SEQ ID NO: 72234 - DNA, 75 bp, Homo sapiens
aggccaagtatccgccagtcaataggaagtacgagttttgctgacctctctgaggctgccaaccggaacaatgac

SEQ ID NO: 72235 - DNA, 82 bp, Homo sapiens
ccactgcgcccagccttgatcttgagccagatgacgtgtactactgtggaataaagtacatcaaagatgatgtcatcttaaa

SEQ ID NO: 72236 - DNA, 75 bp, Homo sapiens
tgaatctctgcccgcaacacatatcaggattaaagagccaacgctggaaatgtttctgtctagaatcttagcatc

SEQ ID NO: 72237 - DNA, 100 bp, Homo sapiens
gcagatgaacctgtacgccacctgggaggtggaccggagctcgtccagctgcgtgcctaggccacagacctccaccagcacgaagtggacatcgttgtgt

SEQ ID NO: 72238 - DNA, 90 bp, Homo sapiens
cacagttcctgggaaggtggagccaccagcctctccttgtctattgcgtctgcagacatggatttcaaccagctggaggcattcttgact

SEQ ID NO: 72239 - DNA, 88 bp, Homo sapiens
tgctgccgactctgggcggcgaggaaggcgtctcccgggcagaatccagagaccacatttgaagtatatgttgaagtggcctatccca

SEQ ID NO: 72240 - DNA, 76 bp, Homo sapiens
ccgggccgcgcgccccgcgccctcgtgggctggtgtctcgcagctgagctgctgcagatccaggcatcccaggaaa

SEQ ID NO: 72241 - DNA, 82 bp, Homo sapiens
cccagctcccagcccctccaaagatttactttcccatccgtgactcctggaatgcagctttggacatcagacagtgcaggag

SEQ ID NO: 72242 - DNA, 75 bp, Homo sapiens
ctgatgaacagcaccgagatggagtggctcagtccagagcgtgagtccattcacatcctgagtgttgatgagaag

SEQ ID NO: 72243 - DNA, 100 bp, Homo sapiens
gcctgcagtctgcggctggaatcaggatagacaccaaggcaggacccccagagaggctgtggccaggccagctgggctcggggagcgccagcctgagagg

SEQ ID NO: 72244 - DNA, 82 bp, Homo sapiens
ctgaaggctgcgagggactaagagcagattgctgctgacacgccgaccgcctgctgcttcagctacacctcccggcagattc

SEQ ID NO: 72245 - DNA, 100 bp, Homo sapiens
tcagacaagttctggaggagatgaaagctttgtatgaacaaaaccagtctgatgtcatggtggctgtatggacagtctgacagaacagagactgacatct

SEQ ID NO: 72246 - DNA, 100 bp, Homo sapiens
cccggcacacgcgcagccccggcctctcggcctctgccggagaaacagcttttgaagaaggtcagcaccaagagacctccacctgccatggatgatttgg

SEQ ID NO: 72247 - DNA, 98 bp, Homo sapiens
ccagagttgtgggccgccgtcggcagcaagaacagagagagaggtggacagatctgagagatactgaggttgaaatcacaaagattagacaccttttt

SEQ ID NO: 72248 - DNA, 92 bp, Homo sapiens
ggggcggcgtgtcaggtggttgcggagctggtaagacaatgcagatcttcgtgaagactctgactggtaagaccatcaccctcgaggttgag

SEQ ID NO: 72249 - DNA, 75 bp, Homo sapiens
atgattgcaactgggtgggtcaaaggacagtcattttgtttactcattcagccctgttgcaggtcccaataaact

SEQ ID NO: 72250 - DNA, 100 bp, Homo sapiens
cgcagaactaactgatgacgaacatgagaatgaatcgaaacatgaagaactggcaggtaatgactttacatgagtttggaactggtctctagtgggaagt

SEQ ID NO: 72251 - DNA, 100 bp, Homo sapiens
ctttctgggactgcagcaccagggtggctacgcctcccggctggccagtgaaagacgtgttcacctcgtcgtgtcccgccaggttcggcagcggagccct

SEQ ID NO: 72252 - DNA, 75 bp, Homo sapiens
ggccttgactacggaggggttgccaggtttgaagtgttgacattccttttgttgtgttacaatgctgccttaact

SEQ ID NO: 72253 - DNA, 100 bp, Homo sapiens
ctctgtttctccccaaaataaccattctccagatccaggcgctacactaagtatgagaccagcccccattccaatagaggaccctgaatggagacaaacg

SEQ ID NO: 72254 - DNA, 100 bp, Homo sapiens
gagtatgtcggaggagagcgacatggacaaagccatcaagattatggtgacaagctgaacatggagctgagtgagaaatacaagctggacaaagagagct

SEQ ID NO: 72255 - DNA, 103 bp, Homo sapiens
taatcacagactcctatttgaagtatttgacgaaaatagactgcctgagaaatgccagtggcctgacagcagcagacattgcacaaacccagggtttccaaga

SEQ ID NO: 72256 - DNA, 100 bp, Homo sapiens
catccttatacatggagttgatattacaaccagtgacactgcaggttcacctttccttgccagtgaagatggcgtgcttggcggagtgattgtcctccgt

SEQ ID NO: 72257 - DNA, 80 bp, Homo sapiens
ggcctcggcgtgctgcgcctccgcggctgccctgcgccagacctgcctagagctggaacgttacctccagagcgagccct

SEQ ID NO: 72258 - DNA, 83 bp, Homo sapiens
ccaagaactaagtaacgatctggatgcccaggtagcggaattggtactggtccaggagttatccaggatagattttcacccac

SEQ ID NO: 72259 - DNA, 100 bp, Homo sapiens
tgctctggaaatgttcccagaacattgcacgatgcctcctgatctgcctcttctccaagaaactcaaccactagtgacaatgaccagcctcctgactact

SEQ ID NO: 72260 - DNA, 101 bp, Homo sapiens
ttcaatgcagtgatgatccgagccttcccagccaatgcgacctcctgccccccgaggtctgcagtctcctgaacccagcagccatctacgccaacaacgag

SEQ ID NO: 72261 - DNA, 75 bp, Homo sapiens
agacaggcgcctgagtaacccggggcaagggtcaaagaattgactgtagatccaactgctgctggtgatgttcgt

SEQ ID NO: 72262 - DNA, 50 bp, Homo sapiens
ttcggtagccatggcacaagaatataggtgtcaacatctgggccctggtg

SEQ ID NO: 72263 - DNA, 100 bp, Homo sapiens
tttaattacatcattgcatttttccttggaacagcagcctgcctttaccagctgctgctggacacccactcgctgaagatggtcctgctcgatctcccct

SEQ ID NO: 72264 - DNA, 83 bp, Homo sapiens
ccacagctcatcatgatggacttggagctgccgccgccgggactcccgtcccagcaggagaccctgccctggttcaccaaagg

SEQ ID NO: 72265 - DNA, 95 bp, Homo sapiens
tgtagaagatgaggacttcattcaagctctggataaaatgatgctagaaaatctacaggggtcttgctcctcagaacaaaccagaattgcagaag

SEQ ID NO: 72266 - DNA, 76 bp, Homo sapiens
ggaaataccaagtggtctctgactacaaagctgatgaagacccagcattattccagtcagtcaagaccaagagagg

SEQ ID NO: 72267 - DNA, 75 bp, Homo sapiens
taaaacaaaaatattatggtctttgtgcacatttacatcaaggacgatactttgatgaaatcagccaggacacgg

SEQ ID NO: 72268 - DNA, 83 bp, Homo sapiens
cccgccagtatctgatgaaggtaagaggccctgggaggagcggggacactgaggacctctctccaaattggcctctcaactca

SEQ ID NO: 72269 - DNA, 99 bp, Homo sapiens
gcgggatcttcaaccacctcgagcggctgctggacgaagtaatagttatgcacgagtgcgagctgtggtgatgacccgagatgactcaagtggtggatg

SEQ ID NO: 72270 - DNA, 96 bp, Homo sapiens
gctcccagcgtgagcgacgcagaagacgggtgatttctgcatttccatctgagtgtgggactgcagcgatggagtgtgtgaggcagtacatcaacg

SEQ ID NO: 72271 - DNA, 100 bp, Homo sapiens
atccctgcctcgttttggtacaccattgtcaccatgaccacactgggaactctctttgctcacaagttaccaaaaaaaaaagagccaacatgttggtatt

SEQ ID NO: 72272 - DNA, 75 bp, Homo sapiens
cttggtcccagagtcatcatgaagtttgtgaagtgtggatatgcaggctctaactttccagaacacatcttccca

SEQ ID NO: 72273 - DNA, 90 bp, Homo sapiens
ggacgccggtctctgttccgcaggatgtggacccatcaacttgtgccagtacagggtctgtgcagtggagtaggcacttcagtggtcgaa

SEQ ID NO: 72274 - DNA, 76 bp, Homo sapiens
gacctggtgcgttgctgccacaaatgcagatgcctgtgaggagccaccaacatttgaagctatggagctcattggt

SEQ ID NO: 72275 - DNA, 82 bp, Homo sapiens
gaggcctctctctacctgacatcaaggtctacctggtgggcaatgaacaggacttcgagtaagaaggtgatttacagccagc

SEQ ID NO: 72276 - DNA, 80 bp, Homo sapiens
ttggctgtgacgaagaacaagaagctccggaattctggtgacttaagagattaaaattaatttggttgctgttggttctg

SEQ ID NO: 72277 - DNA, 89 bp, Homo sapiens
tttacgtctcattcaagaaaccgaagtgatttccagaggatttacactttgcagagcttgaagtgaaaaccagagaaaaattagaagct

SEQ ID NO: 72278 - DNA, 82 bp, Homo sapiens
agccggcgagttgagtggcgagtgagaagccctaccactgcaactgggacggctgcggctggaagtttgcgcgctcagacga

SEQ ID NO: 72279 - DNA, 75 bp, Homo sapiens
atttcagcaacaatgcctctgttcaaactcccagatgctgtcatcctattgtggaaggtgaatgataacaaggag

SEQ ID NO: 72280 - DNA, 105 bp, Homo sapiens
tttcattgtcttttccgcccgcttcgatcgcctcgcgccggctgctctttccgggtgagaagccctaccactgcaactgggacggctgcggctggaagtttgcgc

SEQ ID NO: 72281 - DNA, 102 bp, Homo sapiens
caaagccaaggagaagttctcccagctggcagaagcctatgaggttggtgttcgaggaagagacattgttgttcttggtgtggagaagaagtcagtggccaa

SEQ ID NO: 72282 - DNA, 96 bp, Homo sapiens
cgcagttcgggcgcagcacgccggccgcaggagcacggatgccccccggagccgcgggctggcagtgtaatgttcaagctcagaaatgccttatgt

SEQ ID NO: 72283 - DNA, 74 bp, Homo sapiens
cgttatcttccgactgatccagctggtggtcctggtctacgtcatcggagcctggagacacaggccccatcctt

SEQ ID NO: 72284 - DNA, 110 bp, Homo sapiens
gtcctggagccctcctcaggtgagctggagctgcccggctcggcagcgggaaggtaaagggagaagatgaggaagagaacaatttggaagtacgtgaaaccaaaattaag

SEQ ID NO: 72285 - DNA, 100 bp, Homo sapiens
gacccttctctgctctacctggaggtctccactctggtcagcaagtatccagacatcaggtgtgacgtatgcagccaaaggctactttgacgccctggtg

SEQ ID NO: 72286 - DNA, 90 bp, Homo sapiens
cgcaggcctcgtgccgttacggccatcacggcggccgcagtggcgtcctggagccctcctcagccccatctgctttgatatgattgaaga

SEQ ID NO: 72287 - DNA, 50 bp, Homo sapiens
cagagggtacttcagtattgaagaggactatgaatctcttccaaaagagg

SEQ ID NO: 72288 - DNA, 100 bp, Homo sapiens
cagcccaggagctcctggaagatctccgcactctggagcataatgtttccagatttcggaaggttcacgagtgttgccgacacgccctcccaactgcaga

SEQ ID NO: 72289 - DNA, 90 bp, Homo sapiens
ctgcctccggggacaagaaactagagcaaataaccgttttgaaattgtttctggtcctcataccgtgtggttgagtgaaatcaaaacttc

SEQ ID NO: 72290 - DNA, 90 bp, Homo sapiens
cggcgccgagggcttccacctccacggggattgtggctgcacggctcaacggttcccttgatttcttctccttggagacccacactgccc

SEQ ID NO: 72291 - DNA, 50 bp, Homo sapiens
gaaaacaggctgttgaactatgcaagtgagatgaacccggtacctcagat

SEQ ID NO: 72292 - DNA, 109 bp, Homo sapiens
acggggttcgggtgtctcgtgtgtgaacatcacaggttttaaatgcacagagagcaggatacaaggcagccatagttcacaatgttgattctgatgacctcattagcat

SEQ ID NO: 72293 - DNA, 95 bp, Homo sapiens
ggcgagtttccgatttaaagctgagctgcgaggaaaatggcggcgggagtatggaaccacccctttagtttgggctgcacgaaagggtcatttgg

SEQ ID NO: 72294 - DNA, 100 bp, Homo sapiens
aatcagacatctcatcaagtagtcaaggagtgatagaaaaggaatccttgggacctcttcttttggagattgtagaaggcatgaaacaaaaaatgtggag

SEQ ID NO: 72295 - DNA, 100 bp, Homo sapiens
ggcatggttcgtgccaaattccgaagcaatcttcctgctaaggccattggacacagaatccgagtgaggagaaggcagagcccccccaggctatgaatgc

SEQ ID NO: 72296 - DNA, 96 bp, Homo sapiens
aaagagaatgtaagacaggaaaataattaaatattcttaccgaggaaatggctagtgatgagctgaaagagatgcggaaaaacttgaccaaagaag

SEQ ID NO: 72297 - DNA, 144 bp, Homo sapiens
gtgccaacatgggaaagaaacggacaaagggaaaaactgttccaatcgatgattcctctgaaactttagcggctgcatttcaacaaggaaagatacctcctactccattctctgctcctcctcctgcaggggcgatgataccac

SEQ ID NO: 72298 - DNA, 82 bp, Homo sapiens
gaaagcaattgtactctatcaaaagaggatatgttgtcgttccaggggtagaggaggcatgaaggatgaccgtcgggacaga

SEQ ID NO: 72299 - DNA, 100 bp, Homo sapiens
gccgaaagtcgcagagctgaagcagaagatcgaggacacgctatgtccttttggcttcgaggtttaccccttccaggctgaaggtgatgtggccgccctc

SEQ ID NO: 72300 - DNA, 80 bp, Homo sapiens
atcggagcgtgtggatttgagccgccgcattttttaaccctagatctcggaggatttgttggtattgaggaaaacggtga

SEQ ID NO: 72301 - DNA, 160 bp, Homo sapiens
aggtgttcaaacagcactgccaaatagcagaagaataccatgaggtcaaaaaggaaatcaccctgcttgagcaaaggaagatcttcagggaatgtttcaggtggaggaaggggctcttggtcaatgagcctgaagactgcatggcaacctttgccagctt

SEQ ID NO: 72302 - DNA, 83 bp, Homo sapiens
gaacatttttggaccctaggttttggctcattggttgatggacggatggctacatggatgtgatggagatggtttactatcgg

SEQ ID NO: 72303 - DNA, 90 bp, Homo sapiens
ttcattttttgcttggtttggaaaaatttcattagaggtccaagacaagctgctgctatctgcgtgccacttactggtctcactggccac

SEQ ID NO: 72304 - DNA, 101 bp, Homo sapiens
cctgaatccatcattgcagctgcatgttcaagaagtggccggagagttctgcatgttgattcgtcctaggcctacttacaagcctccagtctcaaattatc

SEQ ID NO: 72305 - DNA, 80 bp, Homo sapiens
gttaaggattccaagtaactcttatttgaagctgcacacatacatgtaagagaagcaaaaatgtcagatgatatcaggaa

SEQ ID NO: 72306 - DNA, 83 bp, Homo sapiens
tcatgtcaagcgaagccttgaaaaagctgccctgagacggtgtcccgccgaaagacctgatggccaaaagaaaggaagaaaat

SEQ ID NO: 72307 - DNA, 101 bp, Homo sapiens
cgctatgcaggtgcggaagctggtgggcactcagcaccctctgcttaccacagccaggtcatggaaaatggaagatttgcaaaatacaaatattttaccca

SEQ ID NO: 72308 - DNA, 75 bp, Homo sapiens
tggatcagattattcacgaagctctagaaagaagcatcagatggtgaaggagaaggagacacagaagtgatgcag

SEQ ID NO: 72309 - DNA, 100 bp, Homo sapiens
ccgaggaacgagagcgcgaagctaaggggtgatccattcatgttgcagcagtctacaaatccagcaccaggaattctgggacctccacctccctcatttc

SEQ ID NO: 72310 - DNA, 75 bp, Homo sapiens
tgtattccctagagggttacgggacagatgcagttatctacattaaggcggctatgagaggttttcctccgagta

SEQ ID NO: 72311 - DNA, 89 bp, Homo sapiens
tgaacgcacaggccgtcgctatgagcgggaccaccctgggcacagcaggcatcggagataacgaaggaggcccaacttcattcaataag

SEQ ID NO: 72312 - DNA, 74 bp, Homo sapiens
tgtttgccttccatcatgctaacttcccacctttcagagtccactgctgaatcccacttaatggagaaggaact

SEQ ID NO: 72313 - DNA, 100 bp, Homo sapiens
agctccctgctgattcacaagcacttatgtcacttctgcacttcagtaaaccaggatggggattcgacggcacgggtagcccagtgtgtctcaccaaagg

SEQ ID NO: 72314 - DNA, 96 bp, Homo sapiens
tgaccaacagataactgaggacaatggacctgcctgggcatagacttccttaaggaagtctgcggtcttgcagttcttcagactgctttaataaag

SEQ ID NO: 72315 - DNA, 100 bp, Homo sapiens
ggtacttgaagacacctgtactgttgagtgcagcagctgccccgagccccgtgcttggcaacattccccccaacgatgggatgccgggaggccccatccc

SEQ ID NO: 72316 - DNA, 98 bp, Homo sapiens
agccgctcttccccacctgcccggtgcccgaggaggcagccaagctcgtagcctgccactccgtgcttgggacccctgattttagcaggatggcccaa

SEQ ID NO: 72317 - DNA, 75 bp, Homo sapiens
agagcagcggaaaatgatccagtcacagctgcaggatggactttctggtcctcttcttgttctacctggcttcgg

SEQ ID NO: 72318 - DNA, 100 bp, Homo sapiens
acagtgtgatcccagctttaaaggagatgcaggagaaaatacggcattgctagtaccaaatatgccccaacagcggcaagaccagcatcatcagagtgcc

SEQ ID NO: 72319 - DNA, 82 bp, Homo sapiens
agacgcagccgtagacaccagctccgaaatcaccaccaagctggcccgagataacttcttccgctgtggtgtgctgtatgag

SEQ ID NO: 72320 - DNA, 100 bp, Homo sapiens
ccgctctctgctcatcaatgcagttgaggcctcctgtatccgaacacggatttgtaggtgaaaatgcccagccaatcctagaaaataatattggaaaccg

SEQ ID NO: 72321 - DNA, 75 bp, Homo sapiens
tatcgaggtggatggaaagcaggtttgtttgaagagactgtaccagagggccagggaggaggagaaaggaattga

SEQ ID NO: 72322 - DNA, 90 bp, Homo sapiens
ctcaaggcggattaattagcccaagaaacattatattcatagagatggaaccatgtaaccaccacgaccaagaggccagtaaccaccaga

SEQ ID NO: 72323 - DNA, 82 bp, Homo sapiens
gcagggcctgcagcgggagctggacggcgagcgcgagcggcgcgagaaataattcgccaaaatgacgaacacaaagggaaag

SEQ ID NO: 72324 - DNA, 83 bp, Homo sapiens
atgacatatttttggacctgaaacagaaattctggaacacctatatggcgtcccacagggagagtgaggaggccctgcagaag

SEQ ID NO: 72325 - DNA, 100 bp, Homo sapiens
gacactttgtcgatgaagatcttgattgtgacctctgtggaaaatgagccatgaaccaaccaataacttctcctccgccgtgaagtccccggtccaggtc

SEQ ID NO: 72326 - DNA, 97 bp, Homo sapiens
ggtattggatgattcgtatctaagactctgggacactcctgaagtcgggaaatggtgctggagaatctggtaaaagcaccattgtgaagcagatgag

SEQ ID NO: 72327 - DNA, 98 bp, Homo sapiens
tgcccaccaatgccagcctgtccttcctgcagccgaggcctgcctggagccccagatcaccccttcctactacaccacttctgacgctgtcatttcca

SEQ ID NO: 72328 - DNA, 100 bp, Homo sapiens
ccaattaggtcacttcaacctcttgttggaagattattcaaaagtgatccaaaccaaccagttcctcaggataccaagttcattcatacaaaacccaatc

SEQ ID NO: 72329 - DNA, 140 bp, Homo sapiens
ccgaccgccagcatgatcgccgcgcagctcctggcctattacttcacggagctgaaggatgaccaggtcaaaaaggtactaggttttgacaagcttgcatcatgcgtgagtataagctagtcgttcttggctcaggaggc

SEQ ID NO: 72330 - DNA, 89 bp, Homo sapiens
gcagaaagtgaggaggaaaacacccccattcataagcttaaatcgtctcagaaggacaaggtccgccagtttatggcgtgcactcaggc

SEQ ID NO: 72331 - DNA, 90 bp, Homo sapiens
cggcatacagaatgcctatgaccggcgtcgagaatttcaactgaaaaacaagagctggatctcagaggatgacttctaccggccttcccg

SEQ ID NO: 72332 - DNA, 99 bp, Homo sapiens
tccggtttagaaaccccagagacacccgtgtagatgggtacatcacggcttctctcccacgttaagacttaataaagtgctctggaactgaacccgcag

SEQ ID NO: 72333 - DNA, 83 bp, Homo sapiens
gatccagtccccgctaccggcctgagcctcgcgttgcagcaagagagatgaaggtttttagaacttcagccataaaaatgggc

SEQ ID NO: 72334 - DNA, 75 bp, Homo sapiens
cttgctctttctgtggcaaaaggcacagttgaatgctgttgatgctttgattgactccatgagcttggcaaagaa

SEQ ID NO: 72335 - DNA, 75 bp, Homo sapiens
gtgttcgactgctagagccgagcgaagcatgtccagctcgccgctgtccaagaaacgtcgcgtgtccgggcctga

SEQ ID NO: 72336 - DNA, 75 bp, Homo sapiens
cagctcctgggtcatttttctccctgaggacaacctgaggcaccataaggatgaagtggctggtgacatattcga

SEQ ID NO: 72337 - DNA, 100 bp, Homo sapiens
tagatcttctgcactgtttacaggcacaggacatggcccagtaattcataatgctgaagctaaaattcaacaatacatttctcacagaaatattcgagag

SEQ ID NO: 72338 - DNA, 80 bp, Homo sapiens
ggggccggaggcggcgcgccctgcaagagccgcggcgagtcctttgcacatgttggcaacacacgcatccgcatcggcct

SEQ ID NO: 72339 - DNA, 75 bp, Homo sapiens
gtgctgctcctcacggacgaccaggacgaagtgctcggcggcatgggagccatttgtgcaggccaagctgcggcc

SEQ ID NO: 72340 - DNA, 75 bp, Homo sapiens
ctggcccgaaaggagagcctgttttagctaaagaagatactgaggcagctattcaatcaatattatacaaagaaa

SEQ ID NO: 72341 - DNA, 75 bp, Homo sapiens
gaaaaaggaaactggaaggaaaaccattgcgcgctcctttaccctcatcgtggaggcctgggactgggacaacga

SEQ ID NO: 72342 - DNA, 107 bp, Homo sapiens
ctgagttttgcagatatcctcagtggtgactggaatgttgatactgcctctccaagcccaatggaaacatctggatgtgcccctgcagaagaagacctgtgtcaggc

SEQ ID NO: 72343 - DNA, 100 bp, Homo sapiens
accagcctgctcgtcaacatcccacagtctgtagatggacggcagatccgagtagaccaggcaggcaagtcgtcagacaaccgatcccgtgggtaccgtg

SEQ ID NO: 72344 - DNA, 74 bp, Homo sapiens
tcaagacctggtccttggagaccattagtcaagccagatacgtaggtaacctttccagagatgtgacagaagtc

SEQ ID NO: 72345 - DNA, 100 bp, Homo sapiens
ttcaaaatcgaatgcatgggaagaaacttccatgaaaattgctacaggtgtgagtattgcctaagtgtaatcttgaacatgggcggtgctgtgagtgctg

SEQ ID NO: 72346 - DNA, 100 bp, Homo sapiens
cagctgaggaggacccccaaagatcgcccaggaccacaccgcagcgtaactgcaggcctctcagcgaaaaagggggaaagcaaagacccgggtgtgcatc

SEQ ID NO: 72347 - DNA, 75 bp, Homo sapiens
accctcttcgctgtgaatgagttcattctccttaacctgctaaagagcccagcattacatcaacatgcccgtgca

SEQ ID NO: 72348 - DNA, 100 bp, Homo sapiens
gaagtcgagtggcagcctggtctgcatgggcagccgaccaaggggactctgactggaaataccggcatgcaggattgatggccttatctgccattggtga

SEQ ID NO: 72349 - DNA, 51 bp, Homo sapiens
gccgactgggctacaaggccaagcaagagattgggtctctccacattgccc

SEQ ID NO: 72350 - DNA, 125 bp, Homo sapiens
atgcggcccctgctgctactggccctgctgggctggctgctgctggccgaagcgaagggcgacgccaagccggaggatgagacaaaaggacccagtgaaaggaatgacagcagatgactaaagcc

SEQ ID NO: 72351 - DNA, 100 bp, Homo sapiens
ctgcgggagccgggctaggacgccgagcggtgactccccgccgctcccgggggccgtgacgatctgtacccccgatttggtggtattcctggcttgtgct

SEQ ID NO: 72352 - DNA, 100 bp, Homo sapiens
ctgtgacgctgtcacctgcgctgtgacctgctccggagtcataaagaggacgccgggacaccaagaagcagggaaatggctctgtgtgctccgggatgga

SEQ ID NO: 72353 - DNA, 83 bp, Homo sapiens
aaagctgctggaatcgggggaaccaaagcttcaagttcttggaacaaattcttccaatcagtgaaagtcgaagagtactacag

SEQ ID NO: 72354 - DNA, 74 bp, Homo sapiens
caaaagtgaagaaactctgcaagcccttagatgtcatttgtcagagtgaaccgctgtggtccccgagttggtgt

SEQ ID NO: 72355 - DNA, 76 bp, Homo sapiens
cacctcgtggggtgtgtgagggccgagtgaaatcgtgcatttgcggaatggggtttttttggcatctgaactggaa

SEQ ID NO: 72356 - DNA, 98 bp, Homo sapiens
cgggcgccactgcagagcctgtccgtcagtccctaggtatccgcactgctcagggctcaccatctgctacctggatatgctgatgaccagtgaggagc

SEQ ID NO: 72357 - DNA, 75 bp, Homo sapiens
cttcgctggtctgcgcgggtcacgcgtccccagtcctcgggcgggacgaagttatacggaagcgtctcctcattg

SEQ ID NO: 72358 - DNA, 96 bp, Homo sapiens
aagaatcattgaaagcaaacaattataatgaagccgtgtatttggttagcactctacgtatatgaatatctgctccatgtaggagctcagaaatca

SEQ ID NO: 72359 - DNA, 100 bp, Homo sapiens
agaagggaaaagcaaaggagaagagacaggacgcgggaccgtgcagccgacaggaatggatattttgaacagtgccatagaaaatcttatgacctcatcc

SEQ ID NO: 72360 - DNA, 88 bp, Homo sapiens
agcggctcccagtccctgaaagcattaccgggttcgctaggctcacagcactgctgatggttcttcagaactcaggaatcgtgttgca

SEQ ID NO: 72361 - DNA, 98 bp, Homo sapiens
tcggagcccgagtccgcgggaagatggcggcgccgctcatccccctctcccagcagatggtcatcatgggccagtgctactacaacgagaccatcggc

SEQ ID NO: 72362 - DNA, 100 bp, Homo sapiens
gagagacctaaacatcgttgtccacgtccagcattatgagaacatggacacgagaacccccataaataatcttcagtggtgtcttaactgtcaaactggg

SEQ ID NO: 72363 - DNA, 112 bp, Homo sapiens
ctgttgcctatcagaagtcaattcaaaggacctgcccccagagagaatggagatggcgatggagatggagcaactggaaagaagaagaaaaagaagaagaagaagagaggac

SEQ ID NO: 72364 - DNA, 87 bp, Homo sapiens
cgcagtggtggaggtggttacggcaacagcagaggatttggtggagaatgctgcgtttttatatggccttggtttggtctacttcta

SEQ ID NO: 72365 - DNA, 100 bp, Homo sapiens
cgcgccgtggctccggatctcttcgtctttgcagcgtagcccgagtcggtcagcgccggagatgtaccccagagctggccctcctgcctctgtcatggcc

SEQ ID NO: 72366 - DNA, 125 bp, Homo sapiens
cattttcagttagccttgattgactgtaatccatgtactttgtccaatgctgaaaagtttgccagatccggcccggtgcctgggttccaggaggacacgctgcagttggccttcatcgacttgag

SEQ ID NO: 72367 - DNA, 74 bp, Homo sapiens
gaacaacagtaatgatattgtaaatgcgattatgtaaagagcagtgagctgcaggccatcaagacggagctgac

SEQ ID NO: 72368 - DNA, 96 bp, Homo sapiens
cgaatcctaaagcgtttcctcgcttgcattcagctcctctgtgtttgccgcctgggtgctggagaatctggtaaaagcaccattgtgaagcagatg

SEQ ID NO: 72369 - DNA, 98 bp, Homo sapiens
gtcaatgtatacaacgatacccagatgctgggactggcgcaaggatgttttgactacactattccatatattaaagaaaggatacaatttggcaaaag

SEQ ID NO: 72370 - DNA, 90 bp, Homo sapiens
tgcagcgccacctctacctccaggacgtgatcatgcaggtggccgacgtgcctgagaagcccaggaactctaatgaatcattgattgacc

SEQ ID NO: 72371 - DNA, 50 bp, Homo sapiens
agatggcgacggcgaccatagctctcgctgaccccgcactacatctaccc

SEQ ID NO: 72372 - DNA, 75 bp, Homo sapiens
aggctctgggggtgcagccgggggctacggaggagctggaggagattcggaggaacctgagtgcctcagtcatcg

SEQ ID NO: 72373 - DNA, 100 bp, Homo sapiens
agggctcgtacttctgctcgcagatatccatgacgacattgaaaatgaattttttgtattcaccagatattcttatatgagaagatctattttaaacagt

SEQ ID NO: 72374 - DNA, 98 bp, Homo sapiens
tcgaggcatgcttgacacacatcataaactctgcacattcattctcaaaaacccacctgttgcagagttttcaaggcaaagatgtggcagcaattgca

SEQ ID NO: 72375 - DNA, 74 bp, Homo sapiens
acacggccagatctgccctccagcatgttatgttacccagagaactttccaaacaagtacctaaaactcatctg

SEQ ID NO: 72376 - DNA, 90 bp, Homo sapiens
gtgctgcaacccgcgcccgcttcggagagagaaatgctggggacctcagcagccatgtcgaagccccatagtgaagccgggactgccttc

SEQ ID NO: 72377 - DNA, 83 bp, Homo sapiens
gccagctgcacactcttggggctctacctctttttcaaagaaaaggggaagatagtgatgtactcagtataaatgcagatgct

SEQ ID NO: 72378 - DNA, 75 bp, Homo sapiens
actacaaggacagcagcgactttggggcccgtcaccctcagaaatgcctccacggctgtgtacgcctgttgcaac

SEQ ID NO: 72379 - DNA, 83 bp, Homo sapiens
gccaacatggcggaacgcaggagacacaagaagcggatccaggctacgtgcaggcctgccgcgccctgatgattgctgcctcg

SEQ ID NO: 72380 - DNA, 98 bp, Homo sapiens
ctgcttccagtgttcgccgagaggtaccgggggtgacagctccgggaccggccgaaaggcgaggaaccggtgcacattcaggttcccgagcacaaaca

SEQ ID NO: 72381 - DNA, 100 bp, Homo sapiens
ctgcagcatgtcctgggtttcaggctcatcgagaggtaccaggtaccgcctggctggccttcccggagagtaccagcagcggaacatcaccagcccggag

SEQ ID NO: 72382 - DNA, 98 bp, Homo sapiens
cctgcaatgtgtccaaggaattactggaagctaatagaccacctttcactcacctgaggactccacagaagatggtatattatgggaaaccttcttgt

SEQ ID NO: 72383 - DNA, 83 bp, Homo sapiens
acaacaattccgatggcaaagccgttgccaagtgaaactggaacgccaagctgaagaagaacgaatacggaagcacaaagcag

SEQ ID NO: 72384 - DNA, 80 bp, Homo sapiens
agagctctccgggttccccggctcgcggggcccggcgaagggcagatatggctcgtggacagcagaaaattcagtctcag

SEQ ID NO: 72385 - DNA, 83 bp, Homo sapiens
cggggaccagcagctgtcgccgccgctctcagggctgtcacatggtgactgaagaacttcattccataacgtttgaaacacag

SEQ ID NO: 72386 - DNA, 83 bp, Homo sapiens
tgaaggacgcgcaggagaagctggagctcacggagaagaaggcctccgacgctgaaggggatgctaagggagataaagcaaag

SEQ ID NO: 72387 - DNA, 100 bp, Homo sapiens
tttccacctcctgacacaacaccactcatggaacacacgggccaagcgggagaagctgacagagctgatgttcgagcagtacaacattcctgccttcttc

SEQ ID NO: 72388 - DNA, 90 bp, Homo sapiens
cccagtttatggcttccagtggaggcattttggggcagaatacagagatatggaatcaggctccaccgaggacaccgcgtccagcttgtg

SEQ ID NO: 72389 - DNA, 51 bp, Homo sapiens
cctcactggacgccacaggggcaagggtgtccgcaatgttgccagtgtctg

SEQ ID NO: 72390 - DNA, 82 bp, Homo sapiens
atcttaattgggcacgaaagagggagtgcatccgccccaacccttttccccctcgtctcctgtgagaattccccgtcggata

SEQ ID NO: 72391 - DNA, 96 bp, Homo sapiens
tcttgatctatatccatagattggaatattggtgggccagcaatcctcagacgcctcacttaggacaagccagaaatgtacacacaggagagctgg

SEQ ID NO: 72392 - DNA, 100 bp, Homo sapiens
caaggagtcatatatccttcatatgatccatcttagtgaagaattaggatacaggataacaaagccattgacctttgccgattgtgttggggacgaactt

SEQ ID NO: 72393 - DNA, 101 bp, Homo sapiens
gcttctctgaggcggcgagagatggtcaggtctggagctcgaccgggccagtaggcctggaaaatccccagagaggagtcacgtctcttcggagccctacg

SEQ ID NO: 72394 - DNA, 101 bp, Homo sapiens
agaaagtaaagttccatcctgagaatatttcacaaagaatttccttaagagctggactggcagcaggtggggaatcagctctggctcccagtgtatttaaa

SEQ ID NO: 72395 - DNA, 98 bp, Homo sapiens
gtttttactagagccaatcacctgtcatgcctggaacagggatcgtactcgctggtgggcttaaactggatggccggcagctcaaggttgacttggcg

SEQ ID NO: 72396 - DNA, 97 bp, Homo sapiens
gggaacctactgtggggccgcggccggaccgagcgcctcgacctcggtctgaggattttttatcaagcagaaatgcatcgaacaacgagaatcaaga

SEQ ID NO: 72397 - DNA, 75 bp, Homo sapiens
gggtcttatgcacagaagtatggcaagttggaagctgaaggtgttcctgaagtatctgaaaaatatgaaattagc

SEQ ID NO: 72398 - DNA, 48 bp, Homo sapiens
tggaattaggcaaatatggacagaattcctccacgtactgggaaggca

SEQ ID NO: 72399 - DNA, 101 bp, Homo sapiens
ctgtacacagcaagacgttgagttacatgttcagaaggaatcctatgaggatggttgtgaggattatcctactctatcagaatatgttcaggattttttga

SEQ ID NO: 72400 - DNA, 75 bp, Homo sapiens
gacgacttgaagccagccaaaagagaaactgtcttaactttcatagttcaaggacgcccacagaaaacacagagt

SEQ ID NO: 72401 - DNA, 98 bp, Homo sapiens
gccacgctcagcgccgagggcgagatcgtgcagaaaaacacaccttgactttagtcagatacatcactgtctgttaaaggaaaccaagcgtgaagtgg

SEQ ID NO: 72402 - DNA, 89 bp, Homo sapiens
acaacctatcagtacccaagggcaattctatccgttgatcttagtggtgaaatgcaactgcagatagaagacctgactcgtaaactgcg

SEQ ID NO: 72403 - DNA, 96 bp, Homo sapiens
ggatagtggagctgcccactctagaggagctgaaagtagatgagagaaacagcacccaggactatcttccaaagagttctggatatcctaaagaaa

SEQ ID NO: 72404 - DNA, 101 bp, Homo sapiens
cgatgacgcgctcactgttcaagggaaacttttggaaatggtggagtcaatgaagaaagtagcagggatggatgtggagctgacagttgaagaaagaaacc

SEQ ID NO: 72405 - DNA, 100 bp, Homo sapiens
cctggaatatgaagatatgtgagatggtggatgaatccccagcacacagcaagaaggaggccatcagcaaactgggaagaggaccctcaccaggaaccac

SEQ ID NO: 72406 - DNA, 119 bp, Homo sapiens
ccggcgtgtgcccttcaagcagggcatggagtattaccgtgccctcaagacccggaatgtgcctgttcgacttctgctggatgtgtctaggagattggaagactcatggcagtgaatac

SEQ ID NO: 72407 - DNA, 76 bp, Homo sapiens
ggccgctctgggatcccggccaccagcaattgtccgcctaccgtatgtgaacgggagctgtgtgtgtttgcttttc

SEQ ID NO: 72408 - DNA, 95 bp, Homo sapiens
catttctcctattgaggagtcaacaaatgatcttccagtggtccccagctcaaagaggtctgctgtttcagctccaaagtcaaccaaaggcaatg

SEQ ID NO: 72409 - DNA, 98 bp, Homo sapiens
actactgcctgcctgcctgcctgctacgaattgtctatttcacagcaatattaccagtgacttgaaagcatttacagacaagtttggttttgatgtcc

SEQ ID NO: 72410 - DNA, 100 bp, Homo sapiens
gaaggaagatggcggatctggaggagcagttgtctgatgaagagaaggaggataagatcaatgccctcattaaagcagccggtgtaaatgttgagccttt

SEQ ID NO: 72411 - DNA, 75 bp, Homo sapiens
ggaacctgtggaagaacattgtggtcctgtgtgtgaactcggagagctggtgacggcctccaaggccatcattga

SEQ ID NO: 72412 - DNA, 75 bp, Homo sapiens
agacacgggacccgcttcgaggccgctttggcgccaaatcctgagaggccacaagaggaagctgaatgaagagga

SEQ ID NO: 72413 - DNA, 100 bp, Homo sapiens
cgtggcggcgctggaagggatgtcgtctcagcagtgctcgggcgcaggtcaaaatgcagatcttcgtgaaaacccttaccggcaagaccatcacccttga

SEQ ID NO: 72414 - DNA, 51 bp, Homo sapiens
gtggccacgctgcagagcctcgatcttgtgcctcaagcagccattgagtat

SEQ ID NO: 72415 - DNA, 75 bp, Homo sapiens
cagctgccgccgtccatcctgctcaaggtttggttgggatgttccagtaattctgagaaattcagaagagaccca

SEQ ID NO: 72416 - DNA, 100 bp, Homo sapiens
ctagaaaccagtatttcttcttgtaagacaagcctgcagcgggttcagctgcatattgccatgtttcaggtgtgatccctcacatccacaaatctctgat

SEQ ID NO: 72417 - DNA, 100 bp, Homo sapiens
tgcaattttatctacagaaaacaaatctgagttcctgttaacggattactttgatcacagtcaccttctatatagcaccatccccaggatgcaggagccg

SEQ ID NO: 72418 - DNA, 90 bp, Homo sapiens
ccagcaacttctaatggatcctcttccaaaaccacaaacttgcctacgtcagtaacagccaccaaggaagaaggaccatggaaatctcag

SEQ ID NO: 72419 - DNA, 76 bp, Homo sapiens
aggctcccttgacaggcggctttgcatcggaaatcagctctacagttcagggagactcatgcatctgtatgccgtg

SEQ ID NO: 72420 - DNA, 74 bp, Homo sapiens
tcgggcttcatctcttgtgtggggagtttcatcctagcgggttttggcacaaataccagtgggaatagtatttt

SEQ ID NO: 72421 - DNA, 50 bp, Homo sapiens
gagacagctgccatccactgactcgtaaactggacctaccatgaaagact

SEQ ID NO: 72422 - DNA, 100 bp, Homo sapiens
aaggattcatttgaaggcctgctatccctccagtatttatgtgttcagagcaacattgttttgttgacacaagcatttagaagaaagtttgtgattcctg

SEQ ID NO: 72423 - DNA, 85 bp, Homo sapiens
gcagcaaagtggcccaaatccatggcattcgtggcgtcaacacggacagcggcagtgtctgcagggaggcctcctttgacggcat

SEQ ID NO: 72424 - DNA, 50 bp, Homo sapiens
ggaacccaggccccgccgaggcggccaggcccagggccccggccagtgcc

SEQ ID NO: 72425 - DNA, 100 bp, Homo sapiens
tggtcatcccgcctgccatcacccccggttacagaatgtctgaaggggacagtgtgggagaatccgtccatgggaaaccttcggtggtgtacagattttt

SEQ ID NO: 72426 - DNA, 100 bp, Homo sapiens
actgttcagcaaactccccgaagcagaacgcctcattgtgggggtgacaacagatatgactctggatggaatcacctccccagctgaacttttccacctg

SEQ ID NO: 72427 - DNA, 74 bp, Homo sapiens
tcagctctctgttttggaaaatggagtcaagagcaatctgaatccaaatgcaaaggagtttgttcctggggtga

SEQ ID NO: 72428 - DNA, 82 bp, Homo sapiens
gggagtggagcttggtttcgggatctcggtgctgcagacggcgagacctcctgcacagaggctgggaggcggcagaatgcag

SEQ ID NO: 72429 - DNA, 82 bp, Homo sapiens
gtgaggggggccttagagggcctccccaggccgcctccgcccgtgaagatcaccggcgtaatcaacccagcgttggacaaat

SEQ ID NO: 72430 - DNA, 97 bp, Homo sapiens
cctgatatattcatgggagtactggccaagtccaagtgtcctcgattaagagttgaagaagaggatgaacttgaatctggagaccaagaggatgagg

SEQ ID NO: 72431 - DNA, 96 bp, Homo sapiens
gccgcgcgcccagcgacccggggcgcacgcggaggacgcgagggggacgctgcctggccgcgagctccctctttgcccactagcagggcattagct

SEQ ID NO: 72432 - DNA, 50 bp, Homo sapiens
ctgttctaggaggtcaattccatgtgtgaagatcattcaccgatgaagac

SEQ ID NO: 72433 - DNA, 87 bp, Homo sapiens
gcagtacattaatactgcttctaagacagatgtaatccctgttcattactacttaatacctccaccaacaaagactaagaatggcag

SEQ ID NO: 72434 - DNA, 98 bp, Homo sapiens
aagagatgtgattaatgtattccaccacctccgccagttaagaggaaaaaggatgttgtcttggagcttgaatttgaaggtgtaaaggagaagttcac

SEQ ID NO: 72435 - DNA, 101 bp, Homo sapiens
ttagaagatctaattgagagagaggtattgaagcccctgggtgataatttgatggaggaaaacataaggcagtctgtaacaaactctatcaaagcaggcct

SEQ ID NO: 72436 - DNA, 97 bp, Homo sapiens
tggccaagttactggagccgatacaatgcagatcttcgtgaagactctgactggtaagaccatcaccctcgaggttgagcccagtgacaccatcgag

SEQ ID NO: 72437 - DNA, 90 bp, Homo sapiens
tggatgaaatagatctctcggctctgaggtaaaggcatgacttcctggcaccacagggaaaatcgggtgcaagcccagaaactatttccc

SEQ ID NO: 72438 - DNA, 95 bp, Homo sapiens
tataggattttattgcacaaaggcaacggtgactttcaaagttttatgacttacctagtggagcctttatttacagaatgggccaggttttccaa

SEQ ID NO: 72439 - DNA, 90 bp, Homo sapiens
agcagctggaggaactgttcagtcaggtggggccggtgaagcagtgcttcgtggtgactgaaaaagatatgagggaaggcaccattggag

SEQ ID NO: 72440 - DNA, 115 bp, Homo sapiens
ttactcggaggcagcaaaggtggctgctaatgcaccaaagagggatcgtgatctggaactcgctgctcgaattggacaagctctcttaaagcggaaccatgtcttatctgagcag

SEQ ID NO: 72441 - DNA, 90 bp, Homo sapiens
tgaaaggaattcctagatctaaacaccaggatgtgggctctcttgatgagaagatgaagagcttggatgtgaatcaggactcggagctca

SEQ ID NO: 72442 - DNA, 83 bp, Homo sapiens
agtgaagaacatggacctttggtttttcagaagaagtgaagtcaagatgaagaaccatttgcttttctggggagtcctggcgg

SEQ ID NO: 72443 - DNA, 76 bp, Homo sapiens
ctgaaattgatagcagtttgaatgtgagaaagatcagtctaaagaaaaggagaagaaagtgaaaaaaacaattcct

SEQ ID NO: 72444 - DNA, 100 bp, Homo sapiens
aatgagagactatctcaagaacttgaatacttaacagaacctcaacctactggcttactcgcatccagtcttttctctactgcaatgagaacggcctcct

SEQ ID NO: 72445 - DNA, 100 bp, Homo sapiens
ccctgcacttgggacccccttgctgcagcttccacctagcagccaccagaggatgaagcctgctgggagcgtgaatgacatggccctggatgccttcgac

SEQ ID NO: 72446 - DNA, 76 bp, Homo sapiens
ccatggcccaagtgtgtggggaactttgggaattcttctaagccaagtacaagaagctggagaagcgatgagaaac

SEQ ID NO: 72447 - DNA, 90 bp, Homo sapiens
taattgatataggctttggctatgatgagacagatccatttattgataactcagaggctgtgctctcagggtcagaatggggcaacatgc

SEQ ID NO: 72448 - DNA, 75 bp, Homo sapiens
acaagaagtcttaccctcaggtcaaagtatcctggtcagatataggaggactggaaagtatcaaactgaagttgg

SEQ ID NO: 72449 - DNA, 99 bp, Homo sapiens
atagccagtccctggagctggtgcacaggttccagtattctaccttgtaaatactgttatttgtatatactgtaaatgatgacatcggtgggcactaac

SEQ ID NO: 72450 - DNA, 83 bp, Homo sapiens
atttagaaggaggttcaggctacggtgagccgaagagagcaaagtcccagaacccactgcgcagcttcaagcacaaaggaaag

SEQ ID NO: 72451 - DNA, 50 bp, Homo sapiens
gtgcccaagcctggattaaaaagtgcaagccagcagtaagccgcagcagg

SEQ ID NO: 72452 - DNA, 90 bp, Homo sapiens
atcgctggtgccatcctggtagcagctattgtccttgggggcacaggctggggatttaaacatgtcatgctgcccaaggacatagccaag

SEQ ID NO: 72453 - DNA, 82 bp, Homo sapiens
tacctgccccacagcctccagttactaagcctcttttccccagtgctggacagaggaggatgatgttcaagctatcaccgat

SEQ ID NO: 72454 - DNA, 88 bp, Homo sapiens
cggcggaagcggagagcaacagcgcgccgtctttcccagggaactccgatgaagtgttccaacaaaatgagcgagtgaaccaagaaga

SEQ ID NO: 72455 - DNA, 76 bp, Homo sapiens
gcctttcagagatgtgcctgcctatagtcaggtggtgaagaaggtgaagtccatgcagatgttccacatgcccatc

SEQ ID NO: 72456 - DNA, 100 bp, Homo sapiens
tagcctagctgttctcaaggcggattaattagcccaagaaacattatattcatgccacgtgctgtacgccgacatcaagatggagaatgggaagtccaag

SEQ ID NO: 72457 - DNA, 83 bp, Homo sapiens
ctcgggcctggtgctgctcgcctacttcctgccggcgcaggacccctctgccatgaaccagtccatcccagtggctcccaccc

SEQ ID NO: 72458 - DNA, 75 bp, Homo sapiens
gggacgtgatgctggagaattataggaacctggtctccctggaattaacactgaatcctccggaaggaattgtag

SEQ ID NO: 72459 - DNA, 100 bp, Homo sapiens
ctggagtgatctatcaggcaccagacttgggatcagttataaactctagagtggtccaatgatgcatcagcagcctccttctcagcaatacaatatgcca

SEQ ID NO: 72460 - DNA, 74 bp, Homo sapiens
tgtcctcaagtgatcctcccaccttagcctcctaagtagctgggaccacagagacgggatttcaccatgttggc

SEQ ID NO: 72461 - DNA, 51 bp, Homo sapiens
ggaaggagggtggaagtatggtttccagccaggaatagttgctgaacaccc

SEQ ID NO: 72462 - DNA, 87 bp, Homo sapiens
tatgcagagttggctttcaaagaatgtactcgacaccttgcgaatcctcactatggatgggctcattgaggacattaagcatcggcg

SEQ ID NO: 72463 - DNA, 83 bp, Homo sapiens
gagagagcattacaagccagcctctgggaccgaggtaggtagccatccaagcttcctgaaggaggttcgagatcacatgcagg

SEQ ID NO: 72464 - DNA, 95 bp, Homo sapiens
cctgccgcagctggcgcagcccacgctcatgatcgacttcctcacccgcgcctgcgacctcgcatcccagccatcactcttccacctgctcctta

SEQ ID NO: 72465 - DNA, 75 bp, Homo sapiens
cttcttacccagggcttagaaagtaacgattttgaaatgctaaatcttgcagtgagctgcatactccatcgctag

SEQ ID NO: 72466 - DNA, 90 bp, Homo sapiens
cattcacatacgtcaaggaaattgagagtggtgcacgtatcaacatctcagaagggaattgtcctgagagaattatcactttggctggac

SEQ ID NO: 72467 - DNA, 76 bp, Homo sapiens
ttgctagcaatgagctcccaaagccatccagggcatgctgttgaagcgaagtggcaaatcgttgaataaagagtgg

SEQ ID NO: 72468 - DNA, 80 bp, Homo sapiens
aaatgattcgggaatatcggcaaatgaaactggcgatggaatatgagaggagccctctggaaagaaaaggacagaccctg

SEQ ID NO: 72469 - DNA, 96 bp, Homo sapiens
gtttttccaggagcttcacacaatcgatttgagcatagtctaggatatttgttcagtcgaatcaaggtgaagaggaaacaacaagaatttcatatt

SEQ ID NO: 72470 - DNA, 75 bp, Homo sapiens
ctggggccagggaaccctggtcaccgtctcctcagattggcggcagtaagcacacaatgaatgatcacctgcatg

SEQ ID NO: 72471 - DNA, 90 bp, Homo sapiens
tggagaaggagaggctgcggctgaaacagcaagaactgcttcggcaggtgaggccacagatccaaaacgctaacgatgtattaattgcac

SEQ ID NO: 72472 - DNA, 100 bp, Homo sapiens
gctcttgggtttagcaaaagttcatctccttctgcatccttaactgagaatgagatggcccactgcgtgaccttggttcagctgtccatttcctgtgacc

SEQ ID NO: 72473 - DNA, 88 bp, Homo sapiens
ctgacactgaaacattaggtggttttccagtagaatttcttatccaagtgggatggggaaagacaccatagtcataaaagaagaaagc

SEQ ID NO: 72474 - DNA, 95 bp, Homo sapiens
gtcgcgtgtctaggtgagtcgcggtgggtcctcgcttgcagttcagcgaccacggtgtggacactgccagcggctgcagccgacttggaatgacc

SEQ ID NO: 72475 - DNA, 106 bp, Homo sapiens
tttcacttactgcaggattttcagcttcagcaagcagaatgacaattctaggtacaacttttggcatggttttttctttacttcaagtcgtttctggagaaagtgg

SEQ ID NO: 72476 - DNA, 74 bp, Homo sapiens
cagaggagcagatagaacacctgcagcgcaagctgggtgccaccaagcaggctatcttagcggcacagagacga

SEQ ID NO: 72477 - DNA, 100 bp, Homo sapiens
tatccccagtacaggaggtgcgggcggctgctgaagaacagattaaggtgctggaggtgacggaggagctattctcaagctggaataactgagactgaat

SEQ ID NO: 72478 - DNA, 100 bp, Homo sapiens
ggatcaggtgttttcaggttaaccgtcaggtcagcaaaacggttactggaccagattgttgaaaaaggaagaccagctcctggcttccatcatggcgatg

SEQ ID NO: 72479 - DNA, 83 bp, Homo sapiens
cgctccggatggccatcatggtgcaggcctccggtgtggctgtctctgatggtgtcatcaaggtgttcaacgacatgaaggtg

SEQ ID NO: 72480 - DNA, 51 bp, Homo sapiens
tcacgactgactttcgggatggagatcactcctctgccaaagatcccaaca

SEQ ID NO: 72481 - DNA, 137 bp, Homo sapiens
gctgccagaggaggagccagaaacagatctcagccccgggctcccagctgcccacctcatagggaaggcccggcgactgaagcaggcaaaggaggaggcacagatggaggtggagcaataccgcagagagcgagagc

SEQ ID NO: 72482 - DNA, 97 bp, Homo sapiens
gtgcagtggcacctgcgcgaagctggccaaagcctgcccagacggctcacctgtgcgggatggaacaaaaggtctccagaaatgctttgggttcatc

SEQ ID NO: 72483 - DNA, 121 bp, Homo sapiens
cagctgcttccattggccagtatgaagtggtgaaggagtgtgtgcagcgtgcctggatcaaagtggaacagctgaagccatatcatgctcataaagaggaaatgataaaaattaacaaggg

SEQ ID NO: 72484 - DNA, 75 bp, Homo sapiens
ggaatggctcatcactctgggctttgggaacataacaacaggtcaaaatgcagatcttcgtgaaaacccttaccg

SEQ ID NO: 72485 - DNA, 75 bp, Homo sapiens
gtcagctgctgaccctctccccaagaagatgaaagattcagtgatctgcttggctttgaggaagagtggcagtac

SEQ ID NO: 72486 - DNA, 75 bp, Homo sapiens
tggcgaacaaatgctgctctccttccgaccagatcacctcttaggcagagcagtgggcgcagatgccatggcggg

SEQ ID NO: 72487 - DNA, 75 bp, Homo sapiens
ggcgacttcaactccgtcggaggcaactcactttgttggagggatgtataggggcttttttccagacttcaagct

SEQ ID NO: 72488 - DNA, 50 bp, Homo sapiens
gtcagccagggctgaacccccgcaggtgctggaggtggtgagagccaact

SEQ ID NO: 72489 - DNA, 90 bp, Homo sapiens
gagtcggccaagcatgggcaaccactcaggacggcccgaggatccggaaccaggccaagtcctgtatctgccatgtctgtggcgtccacc

SEQ ID NO: 72490 - DNA, 100 bp, Homo sapiens
gctttccttcgctgcgctaaggaatgaaacccttccagctcgatctgctcttcgtctgcttcttcctcttcagtcaagggacatggatgaagctggaaac

SEQ ID NO: 72491 - DNA, 100 bp, Homo sapiens
ctagttcctctccagctcagccgcgtagcctgcctagggtagttaaaagacgagtgaatgctctcaaaaacctgcaagttaaatgtgcacagatagaagc

SEQ ID NO: 72492 - DNA, 88 bp, Homo sapiens
ctgccggggcccaaccacaagacgactcaataggaggaaggtggcacgcactacccttcttcctggcctcctgaagaccatagcagca

SEQ ID NO: 72493 - DNA, 82 bp, Homo sapiens
gagcacgcgggtctgtcatcatgtcgcgttacgggcggtacggaggaggatgaagccccacccgcccttcaggatgccagcc

SEQ ID NO: 72494 - DNA, 82 bp, Homo sapiens
acggccagaaagttccgccatgagctggggcacggagctgtggacaatgcagatcttcgtgaagactctgactggtaagacc

SEQ ID NO: 72495 - DNA, 51 bp, Homo sapiens
ctcctggacaacaaccgcatcatcgaacgggttttgctctgttgcccaggc

SEQ ID NO: 72496 - DNA, 96 bp, Homo sapiens
tcaggcagtacgggaagaacttcttcagaattagaaaggagctgcttcccaataaggaaacaagaacagcagcagcgaccagaggcaggcctgtaa

SEQ ID NO: 72497 - DNA, 99 bp, Homo sapiens
cgctgctgacaccgccgccacaccgccgccacaccgccgctgcctcagtcatgccgggacaagaatccttcaagaaacaggaaaaaactcctaaaacac

SEQ ID NO: 72498 - DNA, 90 bp, Homo sapiens
tgaaaagatgggaacagcagaaaatcaaaacaagctctttatgagaatggcatctaaggaggaaatcagtggtgcttcaggatattgtga

SEQ ID NO: 72499 - DNA, 88 bp, Homo sapiens
ctgaattgtgctgccttggccaaaagaggctttgaacttggcctactccagcatttacggcagctaccggaacttcgtgggacctcca

SEQ ID NO: 72500 - DNA, 50 bp, Homo sapiens
gcgcgcgcgaaaactccgggcagggcagcgggtggcatgagacgtgggaa

SEQ ID NO: 72501 - DNA, 75 bp, Homo sapiens
cttttcaatgctgcgaaagctgccaaaagtgacatgcaggcgccaagcccatctttgtgtgcttgcatccaactg

SEQ ID NO: 72502 - DNA, 114 bp, Homo sapiens
cagaggagaggcgcccccgccggccgccgcgccgcccggcagcctcggcagactgggactcttcaattaatctgacatttcacaaatccaaaattgccgtggatgaactcttta

SEQ ID NO: 72503 - DNA, 75 bp, Homo sapiens
aaaacggaagcttctgaaaccaggaagtggacgacaatgcagatcttcgtgaagactctgactggtaagaccatc

SEQ ID NO: 72504 - DNA, 90 bp, Homo sapiens
tgaagagcgacaagccgctggcagccgcggatctcaccgccgctcaggtgcagggctcgcggcctggcaagaatgtacagctgacagaga

SEQ ID NO: 72505 - DNA, 75 bp, Homo sapiens
aagactcaggacggacaagcacagtcttcggaaggaagccgctctgtgacccacctctgaatcccacaaaactgc

SEQ ID NO: 72506 - DNA, 98 bp, Homo sapiens
caggaggaaaacagttccgttcattctttcacaggcatcagtgtcattcaaggacgtgactatagaattcacccaggaggagtggcagcaaatggccc

SEQ ID NO: 72507 - DNA, 100 bp, Homo sapiens
agtgagagctccccaggggagttctctgtgtctgtgaaggtgagcttgtcggccacagactgctacattgtgcatgagatctacaatggggagaatgccc

SEQ ID NO: 72508 - DNA, 90 bp, Homo sapiens
aaatatatccgcagggttcggatgagaccaggtggtcgtcggttttctgagggtacttcagctgacagagagattcagagaacgttaatg

SEQ ID NO: 72509 - DNA, 80 bp, Homo sapiens
gagtcttaaaatcctgctctggccggattccagactcgtgggggaaaggctggaaggtgggagtcaatcattttgacaag

SEQ ID NO: 72510 - DNA, 100 bp, Homo sapiens
ggctcatattctacttcattcagaagatcaggtacacaaatgcacgcgacaggaaccagaatgatgtctatgaatgggctcgtgaccaccgtgcccacca

SEQ ID NO: 72511 - DNA, 100 bp, Homo sapiens
cccaaaatgaatgcttccttttcacttaaaagtaaagagaaatttaatcctgagtggtacaaaggagaaccagcgaatttccttttgcaaaatgttttgt

SEQ ID NO: 72512 - DNA, 50 bp, Homo sapiens
gccagcagtcagtaatacagaaggatacctgcccactatgtctatccgca

SEQ ID NO: 72513 - DNA, 100 bp, Homo sapiens
tgtcaggcccaaatggaatgtggaaatggagtcatccagggtgttggggatgtcctttgcactgaccctgaactgccagattgacaaaaccagccagacc

SEQ ID NO: 72514 - DNA, 50 bp, Homo sapiens
gttgaatcattgttcaaataagggaatggcattgctgcctttgagtcggt

SEQ ID NO: 72515 - DNA, 90 bp, Homo sapiens
ctggctctgtgcggctcatcaaggttgtgattgaggacggcagttgcagtggtgcagaatggctgacctcagtcttgcagatgcattaac

SEQ ID NO: 72516 - DNA, 100 bp, Homo sapiens
gcacttggtgcagcgctacctggctgacggcaggctgtaccatcgccactgcttccggaatccatcaacagcatcaagtccagactaagcaaaagtgggc

SEQ ID NO: 72517 - DNA, 100 bp, Homo sapiens
ctgatgttgctaaatgtagacaatggttagagaagaattttccaaatgaatttgcaaaacttactgtagttggatccttatgactatgaaatgattgaag

SEQ ID NO: 72518 - DNA, 100 bp, Homo sapiens
tcgcccggctgcgaccgccggggatgctgctccgcgcgctcctgctcctgctgctgctcagtcctttgccagacatccacgacagcgatggcagttccag

SEQ ID NO: 72519 - DNA, 51 bp, Homo sapiens
agtttgtggacagatttatattgtatgcagatctcaatcgccacgtggatg

SEQ ID NO: 72520 - DNA, 96 bp, Homo sapiens
cgaccagctgcgccaacatgccctggctgaaggccttaccgaggaggagtatcagtccacattcttgagtctgatgacctccacggccagcgaggc

SEQ ID NO: 72521 - DNA, 75 bp, Homo sapiens
ctcaaaggccaagctgtgcgcaaacagctttggtcaagtctggcaccatctttgacaacttcctcatcaccaacg

SEQ ID NO: 72522 - DNA, 100 bp, Homo sapiens
tgtgcctgctgctgagcagcgccgcgggttatatacaggcatgtagaggacttatgatcgctgctgtcagcctgggcttctttggttccatatttgcgct

SEQ ID NO: 72523 - DNA, 73 bp, Homo sapiens
tttggcgggggccgaggtcgaggcggaggctttagagatgctggctatgagtttgacatctgcttcacctcag

SEQ ID NO: 72524 - DNA, 83 bp, Homo sapiens
ctgtcacaggccatgctctggcaaaaactcccgaaccgacagccacaagtggcgcccgaacagggacgtgagtgaagaaggtc

SEQ ID NO: 72525 - DNA, 98 bp, Homo sapiens
cgcagcctcttcgagcgccgcggacgcgtcatcgagtgtgacgtggtgaaagtttcgagaggcccgtgccatgagaccgcctggggtgagcaaggcga

SEQ ID NO: 72526 - DNA, 98 bp, Homo sapiens
tctgccactgcaactgtggccggaatatgatgaagaatgggctaagaaaattcagagtgaaaagtttcgctggcataactctcagtggctggagatgg

SEQ ID NO: 72527 - DNA, 140 bp, Homo sapiens
gacggcagggctccctctggatgtggaattctccgtccctttccagggagggaacaaagcccacaagcaccggctgcctggagttgggagaggagcaatacaacacccctgtagccaccaccactgggacagcactgggt

SEQ ID NO: 72528 - DNA, 75 bp, Homo sapiens
gcaatcaagcaattcttctgcctcagcctcccgagtaactgggactacagatcctgataacttaagtgactctct

SEQ ID NO: 72529 - DNA, 100 bp, Homo sapiens
ttggtggaggggtggtgaccatcgaaaggagcaagagcaagatcaccgtgacatccgaggtgcctttctccaaaagcaccacaccccactctggccggag

SEQ ID NO: 72530 - DNA, 109 bp, Homo sapiens
agtggcctgtcgttggaagagtacaagctgatcctgtccacaggtgtcatggagaaactccagctgggcccagagattctgcagcgggaaaatccaaggcttatttatg

SEQ ID NO: 72531 - DNA, 50 bp, Homo sapiens
attctcaggaagagcttgaaaaacctgcaggctgggacaatgaaaagaaa

SEQ ID NO: 72532 - DNA, 95 bp, Homo sapiens
ttctcaaccttgtgggatgtgaaaactctgttactgaaggtgatgatgaacagtctacacagatggctgcaagttgggaagatgataaagttaca

SEQ ID NO: 72533 - DNA, 82 bp, Homo sapiens
agccaataggacatgatccaggaagagcagtaagggactgagctgctggctacagagtgcggtggcgccagcacagaactct

SEQ ID NO: 72534 - DNA, 101 bp, Homo sapiens
acactggtgtctcctgcggaagggcagctgggcacgccttccagaccgagttttccaagagataacttcaccaagatgtccagtgataggcaaaggtccga

SEQ ID NO: 72535 - DNA, 75 bp, Homo sapiens
cgcggagaccggcgtgggacagccacctggagcgcagctgccagattcattccacttaaaacctgaaaacattgg

SEQ ID NO: 72536 - DNA, 100 bp, Homo sapiens
gtgcctcatcgtggccctgcccaagatcatcctggctgtcaagtccaagaattcagaaggagctggcggacatcactttagaccctccacctaattgcag

SEQ ID NO: 72537 - DNA, 73 bp, Homo sapiens
gcagtggtcgcttcttctccttggaaagtcgagatggtcgtgtggacagctggcgaaacttccaagccaatac

SEQ ID NO: 72538 - DNA, 90 bp, Homo sapiens
aagtcccccaaagatgagatttacctgtgagatgtttcatcccaacagtaacacaagtggcaagacagccgggaacccctaccccatccc

SEQ ID NO: 72539 - DNA, 85 bp, Homo sapiens
cccagctcgcccagcgtccgccgcgcctcggccaagggggatatgagactttctactcggaatatcctgagtgttgcgtggatgt

SEQ ID NO: 72540 - DNA, 100 bp, Homo sapiens
ctgcagcgtgtagtgcgagtggggcggacgcgcgcagcccgcccgcccggcgaccagcaagaaatgttttagcaagtgcatcagctgacaacactgtaat

SEQ ID NO: 72541 - DNA, 71 bp, Homo sapiens
gcaggtcgtccccgaccttctatgaggattgcccagctcaagcatccgcacttccactaatagccaagtag

SEQ ID NO: 72542 - DNA, 100 bp, Homo sapiens
tcagccttgaattttcagatacaaagaagtttatcggaattctatgccagcttccagttttcagcagcagaaacttcgagtctgtgaagtctgctctgcc

SEQ ID NO: 72543 - DNA, 100 bp, Homo sapiens
cccgggagggccggggccgcgctcagcaccccccggggaaagacattttctgctcccaccgagttggcagggcctgcttcctgaatctcctgggtgtgtc

SEQ ID NO: 72544 - DNA, 98 bp, Homo sapiens
ctggattacacacagcaagttcctgcttctgggacagctctactgacggacctgaaggagaagaaggagaaggtggaggagaaggcaagccggaaaga

SEQ ID NO: 72545 - DNA, 100 bp, Homo sapiens
gtatggcagttattggcaggctgccatgacaaccaggcaatgctggatagataccgaattcttatcacaaaggtcaaagttggaaattgtaatactccta

SEQ ID NO: 72546 - DNA, 75 bp, Homo sapiens
cgcaggcaccttcctcagtcgcgccgtgcaggagctgtccaagatcacgatgccaatcgccttcaacgagcctct

SEQ ID NO: 72547 - DNA, 83 bp, Homo sapiens
ccggaagatcggcagcggctccttcggagacatctatctcgatccagagacaatggccccgatgggatggagcccgaaggcgt

SEQ ID NO: 72548 - DNA, 50 bp, Homo sapiens
gccgggatcacattctgattattgtaaaccatggctgtgtggatacaagc

SEQ ID NO: 72549 - DNA, 99 bp, Homo sapiens
gaccgaccagcccaagaaacatctcaccaatttcaaatccggctggcgcccatgcggctctacacgctctccaagcgccactttgtcctcgtgtttgtc

SEQ ID NO: 72550 - DNA, 89 bp, Homo sapiens
cgcaggtccttcatggcaagcagatacgattcagaatggggatgaaaagcatgagcacaggccctcgggaccaaggatcacgtcatgac

SEQ ID NO: 72551 - DNA, 90 bp, Homo sapiens
acttcaaaaattaccattttatgatttactggatgaactgataaaacccaccagtctaggtgtggatgaggtcaccattgtcaacatttt

SEQ ID NO: 72552 - DNA, 75 bp, Homo sapiens
ctatggtgaagtcttttgtacagtggttaggtggaacggcacatgtgtgatggggacattgttatcttcaaccgg

SEQ ID NO: 72553 - DNA, 75 bp, Homo sapiens
ggcaatgcggctggaggcggaggcaacggcggctggagctgccgggagtgcatccgccccaacccttttccccct

SEQ ID NO: 72554 - DNA, 100 bp, Homo sapiens
aaaatgtcaacaaattgatggggggaagagacacggcaggcctgggtggcaaaggaggcccttaccggctggatgcaggccatacggtgtaccaggtctc

SEQ ID NO: 72555 - DNA, 96 bp, Homo sapiens
gctcgctgggagagaggtacctctccttttccctctccctttccctaagccaacaagtcccaaatttggaaaagctgactcatatgaaaagctgga

SEQ ID NO: 72556 - DNA, 60 bp, Homo sapiens
cttcctcccggcgtggcagatgctccaggttgccaggcaggaggggaggatcattctgac

SEQ ID NO: 72557 - DNA, 50 bp, Homo sapiens
gtcccttcctgtaccttgtcctcagggaaaaagacctcgatgaagttctg

SEQ ID NO: 72558 - DNA, 80 bp, Homo sapiens
gacgcaccgcccggactcaccatgaacactctggacctggaggaaactggcgaggctgtccagggcaatatcaacgccct

SEQ ID NO: 72559 - DNA, 76 bp, Homo sapiens
gactttattgatgcatataaaagtctagggcaggcatatagcaataccaagtttccaggcccgaagagcatcccag

SEQ ID NO: 72560 - DNA, 100 bp, Homo sapiens
tgtgtgtattcgagtaaccagtgccattcacctcattgatccaaacaccctacaagatgttggagtccggggtgacctggtctcagtgaagaaatcttta

SEQ ID NO: 72561 - DNA, 84 bp, Homo sapiens
aagacgccctggtgctcaccaagcaagccctgggcgctgcctatggcacagccaagagcggtaccggcattgcggccatgtctg

SEQ ID NO: 72562 - DNA, 90 bp, Homo sapiens
ggggaatatgcggcgcgcgtggatcctgctcaccttgggcttggtggcctgcgtgtcggcggagtcggaggaggaagccaagaatctggt

SEQ ID NO: 72563 - DNA, 75 bp, Homo sapiens
aactactggacaagtgtgcacaattgatccagggctcagaaacacttatgggattttctaagcacggagggttca

SEQ ID NO: 72564 - DNA, 83 bp, Homo sapiens
gccgaaagagcactggactccggaagctattcaggattatgaaactgctcaggaacacaatgaaaatgatcagcagattcgag

SEQ ID NO: 72565 - DNA, 88 bp, Homo sapiens
tatacacacatcactaaaaattatccctactacaggactgcggacaagggctggcagcgtgagtgcatctccatccacgttggccagg

SEQ ID NO: 72566 - DNA, 75 bp, Homo sapiens
gaaatttaaagccggccgtggatctaaaagagcctcagggaacccagccagcacagcagcagcagccttgcctct

SEQ ID NO: 72567 - DNA, 101 bp, Homo sapiens
ccagctttacttcatcttgttcatgatttcacaaaaaatgttggtttgatgatctgtggccatgtacatatgcctcagaaggggaagtttactcccagtcc

SEQ ID NO: 72568 - DNA, 98 bp, Homo sapiens
gctgagtggtttttcggatcatgtctggtggctccgcggattataacaggttgacaggactgaggtgattcgcacctgcataaacccagtgtactcaa

SEQ ID NO: 72569 - DNA, 82 bp, Homo sapiens
tgcagtttgcaatatgactttggaggaattctcggctggagagcagaagaccgaaaggaatactcccccagttgcaagaggc

SEQ ID NO: 72570 - DNA, 100 bp, Homo sapiens
ctggtctctggctgtccagagttgcttcctgttgacgacagctctcctcagagagaaaaggaacagttccgtaagctctttattggtggcttaagctttg

SEQ ID NO: 72571 - DNA, 95 bp, Homo sapiens
tctggacacagaagtatttgtgacaggaccctttagatcctacaagatcagtgattgtgatccgctccctggtagcagatggtgtagcagaaaga

SEQ ID NO: 72572 - DNA, 50 bp, Homo sapiens
gcgccgtcgcgccactcctccgagctgtgtttgatgtggacaagaagaaa

SEQ ID NO: 72573 - DNA, 97 bp, Homo sapiens
gactgatctccatgtcctgttgtggggcttttacagcctttgggtgtcatggagaaactccagctgggcccagagattctgcagcgggaaaatccaa

SEQ ID NO: 72574 - DNA, 100 bp, Homo sapiens
atccctgcccacgggcgaaggcagcatcagccatgaggagcagaagtcagtccggctggttcatgattacaaagaaggaaccccagaagagaagacctac

SEQ ID NO: 72575 - DNA, 100 bp, Homo sapiens
ttattgaatatcaagaggaggagttgttggtggataagattgtggaccagctgcagcagttaatgcaggtgtatgacttggctgcccttcgggattattg

SEQ ID NO: 72576 - DNA, 110 bp, Homo sapiens
agaagggcaagagaggtggatctgtgagggaaaagacccaataggataactcaagttactgactgtttattccatggctccgttccctttcccacaattggcagagttga

SEQ ID NO: 72577 - DNA, 95 bp, Homo sapiens
cggaccgggaccaggaccgggccccactttccagctgctgatactttggctgtgaggcaaaaaaggagaatttatgatatcaccaatgtcttaga

SEQ ID NO: 72578 - DNA, 100 bp, Homo sapiens
gcttctagtcggacaaaatgcagccgagaactccgctcgttctgtgcgttctcctgtcccaggtaagaccatgaattatggcatttcttaaatgaagcgt

SEQ ID NO: 72579 - DNA, 50 bp, Homo sapiens
cgccgttcgctgcgctgccggattcagaccaggatgtagcactcaaactt

SEQ ID NO: 72580 - DNA, 50 bp, Homo sapiens
gagaagcattccgtgtgtttgataagattgttgatccatttcagatactt

SEQ ID NO: 72581 - DNA, 83 bp, Homo sapiens
gttctttgtggatggacttgattctgatgagagccgggaagatttccagaggattccagaacttgccatcaacccactggggg

SEQ ID NO: 72582 - DNA, 75 bp, Homo sapiens
ctctctgcttttgccacagcagttcctgcagcttccttgagattgcaaaagttgagaagctcaaaccattagagg

SEQ ID NO: 72583 - DNA, 82 bp, Homo sapiens
gtccttggaggcctactgcaagcacaagtacccagagcagccgggaaggagcatcagatccatgctgctgctgactcggagc

SEQ ID NO: 72584 - DNA, 75 bp, Homo sapiens
cacgagctgcagcaccacttccgggctgtgggtgagcgtggaggatgctcagatgcacaccgtcaccatctggct

SEQ ID NO: 72585 - DNA, 100 bp, Homo sapiens
cgccactggggcagccagcacaatcgggcggaggtggcgctgccccttcaggtgtacagagccagtgggccggatggagccactggcagaggccagagaa

SEQ ID NO: 72586 - DNA, 74 bp, Homo sapiens
tagtcatgtacagaacatgatcaagggtgttacactgatggtgaaaggcttttctaaccgtgctcggaaagccc

SEQ ID NO: 72587 - DNA, 90 bp, Homo sapiens
tcttggctcacctcccaggttcaagcgattctgctgcctctgcctcccgagcagctgggattccaggagagaaggctcttatgaccgata

SEQ ID NO: 72588 - DNA, 90 bp, Homo sapiens
ttgaagaatagagccataaagaaagcaaagcgcagaaatgttggatttgaaacgctgaccggaaaggagattgagattgacattgaacct

SEQ ID NO: 72589 - DNA, 101 bp, Homo sapiens
caggacatcttgaccatcttcaagcgcctccgctcggtgcccactaacaaggtgagaagccctaccactgcaactgggacggctgcggctggaagtttgcg

SEQ ID NO: 72590 - DNA, 90 bp, Homo sapiens
tgactggggagtcggcaggcggcagaaaaagcttgtggtgaaggggggcaaaaaaaagaagcaagttctgaagttcactcttgattgcac

SEQ ID NO: 72591 - DNA, 82 bp, Homo sapiens
gtgattccctgcggtgtgcaagtccgactggaacagagtcatcttagtgggatttggggaagcaacagggctgtgtggggta

SEQ ID NO: 72592 - DNA, 51 bp, Homo sapiens
caggactgcgccgcgtcttcctcaaggaattactctcacttccaccacccg

SEQ ID NO: 72593 - DNA, 75 bp, Homo sapiens
cagttagtgattgtcaagtggggaacacgacagacttctgttccgctttgagaattcacgtgagtggctccacca

SEQ ID NO: 72594 - DNA, 80 bp, Homo sapiens
aggcaggaaaggggttaatgcatcacttgatgtgccggtgacttcagcgccagtcaccgcgttctaccgcggctgcatga

SEQ ID NO: 72595 - DNA, 85 bp, Homo sapiens
aaatcctaatgacagtctccaaattcgcctccatctgtaccatgctctcccggggctgaagctgagtgcagatcaggtggccctg

SEQ ID NO: 72596 - DNA, 73 bp, Homo sapiens
agcttgggagactgagacaacagctgtgcggtcagagaagaaacgccttaggaagccaagcaagtggcttttg

SEQ ID NO: 72597 - DNA, 107 bp, Homo sapiens
tgaagagcgacaagccgctggcagccgcggatctcaccgccgctcaggtattctaccttgtaaatactgttatttgtatatactgtaaatgatgacatcggtgggca

SEQ ID NO: 72598 - DNA, 98 bp, Homo sapiens
ttcaaccacagccgtgtgtatcacagaagttataaagttattgctaagtgtgggaattttagctaatcatgatttcattggagaatttacaacaagct

SEQ ID NO: 72599 - DNA, 96 bp, Homo sapiens
cgggaccaccctgggcacagcaggcatcggaggttaatttggagtggcccctggagtcagtttcctacaccatccgaggccccacccagcacgagc

SEQ ID NO: 72600 - DNA, 100 bp, Homo sapiens
ccggagcccgagtggatcggggacggagagaacacgagcccatcagggtctcttgcaacgtgtgagctgcctcttgccaagagtgagtggcaaaagaaac

SEQ ID NO: 72601 - DNA, 100 bp, Homo sapiens
gaagacattaaatctgaaggtgacactcagtccaattaaaactgatctgataagacctcagatcagacagagtcttgccacttgcctagtgaggcttttc

SEQ ID NO: 72602 - DNA, 100 bp, Homo sapiens
gttggaacaagaagagtcaaggacagttcagggaggagttctccaagatttcagccttccaagttctgatgtaacaaacaacttaaaacccagtcttcat

SEQ ID NO: 72603 - DNA, 100 bp, Homo sapiens
gccacggccgtctctggagagcagcaggtcatcatcagatttgaaatatttaaagtggatacaaaactatttcagcaatgcagacaattaagtgtgttgt

SEQ ID NO: 72604 - DNA, 100 bp, Homo sapiens
atcagatcgatctaagatggcgactgtcgaaccgataatctcagtgataccttgaagaagctgaagataacagctgttgacaagactgaggatagtttag

SEQ ID NO: 72605 - DNA, 147 bp, Homo sapiens
tagcagaggacgcggccaggcgattcggtgaagcgattcctgcaggcgttggttcccctctttgacctgcttttaatctagacaacgagcaaccagattatgatatggattcagaagatgagactttattaaatagacttaacagaa

SEQ ID NO: 72606 - DNA, 75 bp, Homo sapiens
ctggcgcagcctccctctattaccaggtgagaagccctaccactgcaactgggacggctgcggctggaagtttgc

SEQ ID NO: 72607 - DNA, 75 bp, Homo sapiens
gacgagggccacagtgggattaaaaagaccactgaggagcaggtgcaggattttttatcaagcagaaatgcatcg

SEQ ID NO: 72608 - DNA, 75 bp, Homo sapiens
acctccggaccgagggacgcggcttgccagcaaagcacggacagagaaggaggagaagctgagccaggcctatgc

SEQ ID NO: 72609 - DNA, 95 bp, Homo sapiens
aacagattttacgggttaaggacacggaagatgaatgactgtgataaatatgtttttcgtatgcaaaaatatcataaaagtaatggtggtattgt

SEQ ID NO: 72610 - DNA, 83 bp, Homo sapiens
cgagctggagggagaatttcaagaactgcaggagccttcacgtaaatgggtccagtcatgcctcccagtaagaagccagaaag

SEQ ID NO: 72611 - DNA, 100 bp, Homo sapiens
tactcacccatggacatccaggtgctgagccaggagcggcagcctttctgggacggcaaaacagaacagaaaggcggagataaaaagaggggtgttaaaa

SEQ ID NO: 72612 - DNA, 100 bp, Homo sapiens
ggagagcggcctgcgggcgatcgggccgaggtgtggatgaggtcaccattgtcaacattttgaccaaccgcagcaatgcacagagacaggatattgcctt

SEQ ID NO: 72613 - DNA, 90 bp, Homo sapiens
ggaggcgaccgccatggcgttcctcaaactccgtgaccagataatgagtgtgtatatggcaactaccctgaaatacctttggaagaaatg

SEQ ID NO: 72614 - DNA, 80 bp, Homo sapiens
gctatctagcttgataataggaccatccaaagaaaggcagatatctggggaagatgaagtagagtgctctgacaaggacg

SEQ ID NO: 72615 - DNA, 101 bp, Homo sapiens
ctgctgagctacgcggtgccctcctgcgggcgctcggtggagggtctcagccgccgcctgtgctggagaatctggtaaaagcaccattgtgaagcagatga

SEQ ID NO: 72616 - DNA, 75 bp, Homo sapiens
tctgctgttgctcttctccgccgcggcactgatccccacagatgccatggacaatattaccaggcagaaccaatt

SEQ ID NO: 72617 - DNA, 115 bp, Homo sapiens
ggtttttgctgcgccaacgcagtgaccgaaggctccgctcacgcccggatgcagcagcttttttatgagaattacgagcagaacaaaaaggggtacattagagatctccataaca

SEQ ID NO: 72618 - DNA, 144 bp, Homo sapiens
gctgggaggtggagtcgttgctgttgctgtttgtgagcctgtggcgcggcttctgtgggccggaaccttaaaggaagaggagttgtacgcatgtcagagaggttgcaggctgttttcaatttgtcagtttgtggatgatggaat

SEQ ID NO: 72619 - DNA, 100 bp, Homo sapiens
ggagaaggataagtcgaaggggaaggcgcctgaagaggacgaaggtcaccagtgaaaagttgtgcagagcccaacatgagcttcatttccaagctgccac

SEQ ID NO: 72620 - DNA, 100 bp, Homo sapiens
ttccaacacataaaaattatttatccaacagctcctcccaggatttaagtgccctgtatgctcaaaatttgtatcctcagatgaaatggatttgcatctt

SEQ ID NO: 72621 - DNA, 94 bp, Homo sapiens
tgggcagaggcttgggccgccgagctggacccggaccggttttgggttgggagccacgtgtaccagtgtgtgttgatcttggcttgattcagtc

SEQ ID NO: 72622 - DNA, 97 bp, Homo sapiens
attaagttggagcagggagaggagctgtggataacgggaggtgaatttccatgtcaacatagtcctggtgaccaagaatatggcccaggtgaccaaa

SEQ ID NO: 72623 - DNA, 98 bp, Homo sapiens
gcaccaggacgccgtcacggccgcgctgctcatccccaaggaggacggcgtgatcacggccagcgaggacaggttggatttggtctagggagtcccag

SEQ ID NO: 72624 - DNA, 75 bp, Homo sapiens
cagtgtccatgatgaggaccgagatgatgctgagtttgtgtgtgaacggacactgaaatattttctaggaattgc

SEQ ID NO: 72625 - DNA, 50 bp, Homo sapiens
gaagacttgtaacctggagaagagacttcagtattgatgctcctccatcc

SEQ ID NO: 72626 - DNA, 50 bp, Homo sapiens
ggactctatgattgaaaatatggtattgcgcagcgatgcacggccatcaa

SEQ ID NO: 72627 - DNA, 75 bp, Homo sapiens
aagacacctccaggagcccagctcacagccaccggtaccttcttccaggtgaatacatcaagacctggaggccac

SEQ ID NO: 72628 - DNA, 100 bp, Homo sapiens
ttcgctgtgagaagtatccgcgacgagctatccgggaaagggccgaatgcgatcaaacctaatccgcgagacttgctaattacacagggagccgctctgc

SEQ ID NO: 72629 - DNA, 100 bp, Homo sapiens
ttcgccttctacagcctggactacagtgaggcggaaccaaccctcctggccatgggaggggccgtggtggacgagggccccacaggcgtcaaggcccctg

SEQ ID NO: 72630 - DNA, 100 bp, Homo sapiens
taccaaatgatggacaatgtcacctggaaaataatatgtacacaatgagccattattataatatgtggatcgagagaaccatatatacaactgcatataa

SEQ ID NO: 72631 - DNA, 50 bp, Homo sapiens
ctgaagttgaggtgactattgaagttggttgaatctggcgatgtggaacc

SEQ ID NO: 72632 - DNA, 117 bp, Homo sapiens
ttatttcaacttcacctcggcaacaattacttacctggcccaggaggatgggcccgttgtgaaaacaatggactgctcttcctggagacctcagccctggactctaccaatgttgag

SEQ ID NO: 72633 - DNA, 74 bp, Homo sapiens
gacctggagaccgttacgacggcatggttgggtttcagtaacacctaattttaaggacagactgcatctccgag

SEQ ID NO: 72634 - DNA, 83 bp, Homo sapiens
ctttctgctgctgaagtaatgcaatggtctcaatctctggaaaaacttcttgccaaccaaacaaaatgatgcttcaacaccca

SEQ ID NO: 72635 - DNA, 80 bp, Homo sapiens
atcttaggctgtgctgtgaactgtgaacagaagcaagaataatggctttcaatgagttcctatgtggatttttaaaagaa

SEQ ID NO: 72636 - DNA, 51 bp, Homo sapiens
gtctgcaaagtgtccccggcaagaaggtacatgtcccagagcaagcacacg

SEQ ID NO: 72637 - DNA, 75 bp, Homo sapiens
cagctttaaaggagatgcaggagaaaatacggcattgctagttgcctttccccatcttcctggttctgctccttc

SEQ ID NO: 72638 - DNA, 51 bp, Homo sapiens
cgagatcttccgccactacgacgtggtaccatgcgacgacgctatgaagat

SEQ ID NO: 72639 - DNA, 100 bp, Homo sapiens
agaagcccccgggaggagcagaactttgagggcgaaggggccttgtgcccgagcgggaagaagttccgcagcaagccgcagctggcgcgctacctgggcg

SEQ ID NO: 72640 - DNA, 98 bp, Homo sapiens
ggctgcggcatcgccggcctcgctatgtccctggatggctttgtatttgcactaaatcaggaaggaaaatttttgtacatttccgaaacagtctccat

SEQ ID NO: 72641 - DNA, 98 bp, Homo sapiens
aatgaaaaaaacgcaccttggagaaaaattttaacgtttgaggatctcttatacagacgcaccaaagccctcattgactatgagaactcaaacaaagc

SEQ ID NO: 72642 - DNA, 75 bp, Homo sapiens
aaagatgagcttgatgaactcaaagaggcctttgcaaaagttgcccactgtttgtaacatggaagattggtcgag

SEQ ID NO: 72643 - DNA, 88 bp, Homo sapiens
taggggccagcagatgcaggaaaatttcgatattgaagtgtcaaaatccatagatggaaaagatgaaagacgagaggaccttcgagga

SEQ ID NO: 72644 - DNA, 75 bp, Homo sapiens
agaaaatcatttgtgatgggtcagctagtatgcaggctaggcaaactgagtcagtggatcggtggggaaaatgct

SEQ ID NO: 72645 - DNA, 100 bp, Homo sapiens
caggaattgaagaataaccctgcaaccccttctacagccatgggagcccacccacctttgggttcctgttggacatcgatggagtgcttgtgcggggcca

SEQ ID NO: 72646 - DNA, 73 bp, Homo sapiens
atttgggtcagatagatttggaagagactatgtgaaagggtttggaggaaaatttggtgtgcagacagacaga

SEQ ID NO: 72647 - DNA, 100 bp, Homo sapiens
ccgtgaggatcaaagttgtcccactgaccaggctgtaaactttggaactgataagtgagagagataagatccctgcatgtcactgagtccaccatgcttt

SEQ ID NO: 72648 - DNA, 82 bp, Homo sapiens
catacaatatttaatccagaagtatttcaaccacagatggcactgccaacagatttacaagggtcccgactcttccttccgg

SEQ ID NO: 72649 - DNA, 100 bp, Homo sapiens
caggacttcgacctggagccgtcccaggactgtgcaggggactctgtcacagaagtgcttcgggagatccaggatgcagtggccagggcggggcaggtgg

SEQ ID NO: 72650 - DNA, 100 bp, Homo sapiens
ctgcggtcgggccaaggttccgcgccgggcgtggacggtgtggggcggtcccggccccgcaggtgcaactgacatgggtgaaccccagggatccatgcgg

SEQ ID NO: 72651 - DNA, 100 bp, Homo sapiens
ggcaacgtgtaatcagaaggcacagattagaggaaggaagaggtgttcagtgtgaggtggagctgatagagtccatagaggacctgagacaacctgggaa

SEQ ID NO: 72652 - DNA, 90 bp, Homo sapiens
cagaaggagtggacttgattgatatatatgctgacgaggagttcaaccagctcggcttgcccttcccctgcttgtgccgtgtaccctgta

SEQ ID NO: 72653 - DNA, 100 bp, Homo sapiens
cacgacgtgggtcccctgccagatttgtgtaaaagcagtctgggcgcaggctggggacccagatggaattcaaacttatgcctgctctcaaggtgctcac

SEQ ID NO: 72654 - DNA, 82 bp, Homo sapiens
tccaaagcacaggaatctcactctgttaaagctggtctgttctaactgagcttgctttgaccagatcaagttctttaagtga

SEQ ID NO: 72655 - DNA, 50 bp, Homo sapiens
gggacctctgcctaggaaagccaggctgccacagagcccaaattccctgc

SEQ ID NO: 72656 - DNA, 75 bp, Homo sapiens
ttcgcagggaggatgtcgggacaccccggaagctgggaaatgaaaaagcttgtggtgaaggggggcaaaaaaaag

SEQ ID NO: 72657 - DNA, 76 bp, Homo sapiens
ctctctgctcattggggcgttgaggaaaatgcactcggtgatggaaagagagccactattctgaagaacacttggc

SEQ ID NO: 72658 - DNA, 100 bp, Homo sapiens
agctttgatgatgatgttttgcccaccccatcggggaacctggctgaagaatctgttggttcagagatggttctaggtaatggatgtgaagaacagaaac

SEQ ID NO: 72659 - DNA, 83 bp, Homo sapiens
gaagcacagtcagcaaaagcaaagacccctcggggctgctcatctctgtgatcagcccagggccttgctgccgccatgactga

SEQ ID NO: 72660 - DNA, 82 bp, Homo sapiens
cttggctctcaacttattcccttcaattcaagtaacagacaaatttacatgtattggagaccagaccagaagcccttctgaa

SEQ ID NO: 72661 - DNA, 75 bp, Homo sapiens
caatggggacccgggacgacgagtacgactacctattcaaaggccacgtgctgtacgccgacatcaagatggaga

SEQ ID NO: 72662 - DNA, 95 bp, Homo sapiens
gactggcaaaagcacaaggattctcgctgtgacagagacaacaccgagtatgagaaggtcatcgagcagctcggtgggaagcagctggtcatgaa

SEQ ID NO: 72663 - DNA, 97 bp, Homo sapiens
ctctcctggtccaaggacacctacagccccgacgaacatttctgggtgacactcaacaggattcccgaggacgggaggggcaagctgcggccaacca

SEQ ID NO: 72664 - DNA, 100 bp, Homo sapiens
cgtccatggacacacgcagctgggagggcacgaagcccccggcaaagggatgcccgctgtctgtagccccggcatggtgcccgtggccctgcccccggcc

SEQ ID NO: 72665 - DNA, 82 bp, Homo sapiens
agatcctaagaagcccccgggaggagcagaactttgagggcgaaggggccttgtggagaatgcagttgaaactaattttgtg

SEQ ID NO: 72666 - DNA, 148 bp, Homo sapiens
tctaccagcactgccattctgtcccgtcttgaaacatcatgccctggttgccctctcctggaatagggcagggtgcgtcagggaaatcatgcagccatcaggacacaggctccgggacgtcgagcatcatcctctcctggctgaaaat

SEQ ID NO: 72667 - DNA, 100 bp, Homo sapiens
gtatagtgaggatcaggagatctgatcctgattgcagaaccttccctgattacagaatcttgggtacctctcccacaccgagctggctccactgcgtgct

SEQ ID NO: 72668 - DNA, 75 bp, Homo sapiens
gagaggatggctactatttcaccaatctgggtacacagggacaagagaagatgatgatgatgggaccaaaggaag

SEQ ID NO: 72669 - DNA, 46 bp, Homo sapiens
tttgcatcctgcagtccatgctggtgtttggagaagagggattgac

SEQ ID NO: 72670 - DNA, 90 bp, Homo sapiens
gaggacaccccggtggtgcaaatggccacgctgacctacgagacgccacagggtggagagtctggctcagcaggcaacagtgacaatgcc

SEQ ID NO: 72671 - DNA, 75 bp, Homo sapiens
tgaggaacgagccaagaaatttccaactggaggaggagctggctctgtgtggctccaggctgctggtcttgggct

SEQ ID NO: 72672 - DNA, 82 bp, Homo sapiens
cgggaccgacccctctgctcgcggccgcgcctttgagaagagccgaatgcacataaggtcgccagcccaccctccggacccg

SEQ ID NO: 72673 - DNA, 89 bp, Homo sapiens
atcatgctgggagccatctgtgccatcatcgtggtagttattgtaaaaggaattacggagatatagaattgctgttccagctgctccga

SEQ ID NO: 72674 - DNA, 100 bp, Homo sapiens
gttcacctccaagtttgtacgcaggagccaagccgccatggcctaccacagcttcctggtggagcccatcagctgccacgcctggaacaaggaccgcacc

SEQ ID NO: 72675 - DNA, 118 bp, Homo sapiens
gcaacttcgctgtggtgaagctggggcggcaccggatcaccaagacggaggtgcatgtgagggaaccctggcttgttcaacctgtcacctcatctttgaagatcacatatatgagaag

SEQ ID NO: 72676 - DNA, 75 bp, Homo sapiens
attgacccttgaaggaatcaaacagttttatattaatgttgagagagagactggcgatggcgtgaacgatgctcc

SEQ ID NO: 72677 - DNA, 125 bp, Homo sapiens
catttgacttggaagcaatgtttgaacaaactcgaagaacagctgtggaaagaagttgcaaaacactgggtgttggagcgggccggagagaagtagagtgggctgcgaggagaaggaaacaggcc

SEQ ID NO: 72678 - DNA, 100 bp, Homo sapiens
gtcaaacaagtgttggttgccccaggaaacgcaggcactgcctgctctgaaaagatttcaaataccgagaccacaccgctgttccagaccctctccatgg

SEQ ID NO: 72679 - DNA, 100 bp, Homo sapiens
ctgggggagataggtggaattattggcaccaatgatgtgaaaactgtgctttgtaacagagccagactggtttcctatctcccaggattttgctctttag

SEQ ID NO: 72680 - DNA, 102 bp, Homo sapiens
gcccggtgctgggcgcgcaccgtggccaccctgtgggcctggcgctggaggcagcggtgcacgtgcagcaggtgctggatgtgtctggggcagacatgttgg

SEQ ID NO: 72681 - DNA, 82 bp, Homo sapiens
ccgagacggcgatccgggcgctcgagacttaccagagccacaaggttggagcaaaacgtcccactcactggaggcacctgag

SEQ ID NO: 72682 - DNA, 75 bp, Homo sapiens
gaagcagaagaagctgaggatgaagaagatgattctgaagacaatcctcagactttacttttttctgcaacttgc

SEQ ID NO: 72683 - DNA, 100 bp, Homo sapiens
cagcacagccggctccgggatgagcgcacggacgggatttccatttaaacagggttaatttggaagaatcttcaggagtggaaaactctccagctggtgc

SEQ ID NO: 72684 - DNA, 51 bp, Homo sapiens
taatcgattgcattggcaatgagacagagatgggatttcaccatgttggcc

SEQ ID NO: 72685 - DNA, 90 bp, Homo sapiens
ttcaggagtcacctcaaacatacaacggctaaggttgtttacattcagagctctatcaataagaggaatacatattacagtgaattcgac

SEQ ID NO: 72686 - DNA, 103 bp, Homo sapiens
ggatttgttaaggattccaagtaactcttatttgtccaaaagaaactcttccttcaaaacctgtgaagaaagagaaggaacagaggacacgtcacttactcac

SEQ ID NO: 72687 - DNA, 97 bp, Homo sapiens
agcaattctggaagcgcagcaacagcaagctcccgggcagcctccatccctgtgagatcactgccctgagccaatccctacagcccttacggaagct

SEQ ID NO: 72688 - DNA, 101 bp, Homo sapiens
aagaggttgagtcttgccgtggtgccttcaggggaatgtcatcccgggctagaagagctgcaaaaggctgtcagatagaggaaagggtcgccagagacaag

SEQ ID NO: 72689 - DNA, 100 bp, Homo sapiens
ggcgctgcgccaagccgggccggagtggtgcgagccggcggggctgcggagggccagtggactcagcactgccccccaggtgttgagtaccagctctcca

SEQ ID NO: 72690 - DNA, 83 bp, Homo sapiens
ccccagccgccgctgcggagcccgccgggaccccccggagcgcggccacggcgcagtgtggacgaatgtggaacctcgctctg

SEQ ID NO: 72691 - DNA, 82 bp, Homo sapiens
ccctccccaagtccccatctcagaaagaaatgaccgcccggatgtgccactgagagccccgcgggtctcccggtgcccgaac

SEQ ID NO: 72692 - DNA, 87 bp, Homo sapiens
tctggaagctgagccggcggcgggaggagctagggctggagcctctccagcctcccgcgaaggaccacggaggggtgatcgtgaaca

SEQ ID NO: 72693 - DNA, 75 bp, Homo sapiens
gccacggtgatgagccgggcctggcggacgcggcgccatcgcagtcagtttgatgaaggccggaacaactttgaa

SEQ ID NO: 72694 - DNA, 100 bp, Homo sapiens
aaagtacaattctattgcacatcaatgatatcatcccagggaagcagctcgagagtgtcgtagaaagaagaaagaatatgtgaaatgtttagaaaacaga

SEQ ID NO: 72695 - DNA, 74 bp, Homo sapiens
aaatgaacccaaacatagacttgcaagagcataaaggcatcacaagtggtcgggctcagctactctggttccta

SEQ ID NO: 72696 - DNA, 74 bp, Homo sapiens
agatacacacactgccctggatctcaggctgactgtgctgtcctgattgttgctgctggtgttggtgaatttga

SEQ ID NO: 72697 - DNA, 50 bp, Homo sapiens
tactactgtgacaacattaacggaagagcttcagcttcaccttctttaga

SEQ ID NO: 72698 - DNA, 98 bp, Homo sapiens
aactgtggagcctcttctgtaaccaagggggtgaagccagccagttttgacaaagtagcaattcctgaagtgaaggaaattattgaaggatgcatacg

SEQ ID NO: 72699 - DNA, 101 bp, Homo sapiens
ggacgatgcatcccaagtgtcctccactagcaacgatgttagttcttcagattttgaagaagggccgtcgaggaaaagaccattcctcaagaattttgtat

SEQ ID NO: 72700 - DNA, 50 bp, Homo sapiens
tcttccagggtcggatcaaagaagggctggagtgcaatggcgcgatctcg

SEQ ID NO: 72701 - DNA, 83 bp, Homo sapiens
catcacagccaaggaagccctcatctgcccaaaatatatacagccctgctctgggacacacctccattggatttaaaagacag

SEQ ID NO: 72702 - DNA, 85 bp, Homo sapiens
gatttgattttttggatccattctttctctcaataagcttcagcaaccaggagggattgactgagatcttaacaacagcagcaac

SEQ ID NO: 72703 - DNA, 83 bp, Homo sapiens
agtggtggatcagaccaaagatggaatgtgaaagatgttgcagaagtgttccagaagtggctgaagatagaaggaaaaaagtg

SEQ ID NO: 72704 - DNA, 83 bp, Homo sapiens
atcttctgtattctggaaactgacaagacgcggcttttatcttcacctttctctatagctgtgagccgtgagctttgaggcgg

SEQ ID NO: 72705 - DNA, 100 bp, Homo sapiens
cttgagtctggccagcgggtcaggctcttgctagatcagcaccggaggtggaagactgggtgccaaagcatgctttctgcgggacattcctttctcggcc

SEQ ID NO: 72706 - DNA, 82 bp, Homo sapiens
agctgcagaaggacaagcaggtctaccgggccacgcaccgcctgctgctgctgggttttaaaatcaaagatgggaaaatcgg

SEQ ID NO: 72707 - DNA, 96 bp, Homo sapiens
tgagtccggagcgcctagccctaccggactacgagtatctggctctgtctcccactccgtgctgtctgagatgcaggtgattgagcaggaaacccc

SEQ ID NO: 72708 - DNA, 98 bp, Homo sapiens
aagccgccgggcgccgcgcctttggatattctctaagccgctttcatcatgggagaaatagagcagaggccgaccccaggatcacgactgggggcccc

SEQ ID NO: 72709 - DNA, 75 bp, Homo sapiens
ttcagttgcacatccccacatcaatgcactgccaatggatcagcggcaaactgaagccatccagttgctacaggc

SEQ ID NO: 72710 - DNA, 96 bp, Homo sapiens
ggagtatttgtagacacctaccccaatgaggagaagcagcaagaggagtccttcaataatgttaaacagtggctgcaggaaatagatcgttatgcc

SEQ ID NO: 72711 - DNA, 96 bp, Homo sapiens
cgcgaatatcgtcatcgttagaagattctgaggttgggaccaagaaggaactatctattttaaaccaaaaattttccgaagaagtaaaaaccccag

SEQ ID NO: 72712 - DNA, 124 bp, Homo sapiens
atctcagatgtggagtgtcggagtcagtggtcaacaatggagctgctgcagaattatatccagatcgagagacagaagattctgaaagggttcaatgaaatgagagtcatcttggacaatgagg

SEQ ID NO: 72713 - DNA, 100 bp, Homo sapiens
ctccactccgtcccccgcgggtctgctctgtgtgccatggacgggtataccgctgggccgaccactcaagcacggtgctgcagcggctgaacgagcagcg

SEQ ID NO: 72714 - DNA, 126 bp, Homo sapiens
gccggccatgtaagatcgtcgagatgtctacttcgaagactggcaagcacggccacgccaaggtgatggaggacgaggagaaggcagtggagatcttgggcaacacggaagctgctcatcctccat

SEQ ID NO: 72715 - DNA, 100 bp, Homo sapiens
taggaatatttccaatttcatatgttgagcgggtccatatggaatatttgctggtagggatgcctccagaggactggccacattttgcctagataaagat

SEQ ID NO: 72716 - DNA, 90 bp, Homo sapiens
tagcttcaaaaatgacaagttcgataaaagtgtgcagaccaaggaaggggaacagtttgtgaagaaaatcggtggtatttttgccttcaa

SEQ ID NO: 72717 - DNA, 80 bp, Homo sapiens
gcatacagaatgcctatgaccggcgtcgagaatttcaactggatatgctgcaggctgctagtcattatcgccaaaataga

SEQ ID NO: 72718 - DNA, 75 bp, Homo sapiens
cttggtacacaaaatggatctggtacaggaggatcaacgggacctgcctccacagctttccttgctgatagccag

SEQ ID NO: 72719 - DNA, 83 bp, Homo sapiens
cctaaaagcacctggccccgctacagcaaaccagcttaaagcttttcaagccaggccaagaagctgtgaagtaccagggtcct

SEQ ID NO: 72720 - DNA, 124 bp, Homo sapiens
ggggctacctcctcggtcctggacaccatctgcactctgtcagccagggtcttcctgggcaagaaggaccacctgtccatgtccaccagggccatcaggcccacagaggagggcggcctccacg

SEQ ID NO: 72721 - DNA, 82 bp, Homo sapiens
ggaaaaactggagagcttcatcaaaaatagtgatagctttgataagtgtggaaacaggaagagaactagaactggaagtaaa

SEQ ID NO: 72722 - DNA, 75 bp, Homo sapiens
catgtcctgttgtggggcttttacagcctttggaactcccccactggaaaggattctgaaagaaatgaagtcagc

SEQ ID NO: 72723 - DNA, 75 bp, Homo sapiens
tcgcttttcccctggccttctgtatcttcatggtgcggctcatcttcgagaggggccacctacagatgctcctgc

SEQ ID NO: 72724 - DNA, 98 bp, Homo sapiens
gcgtcttgccaccgggcctgtcagttgacctaccccttgcacacctaccctaaggccaaagaggtgctgaaaaaatatttggagtccaaggaggatgt

SEQ ID NO: 72725 - DNA, 75 bp, Homo sapiens
agtgcggacgctgtgcgagaaggtaacaccgtgattcacttagatcaagcattagccagaatgagagaatatgag

SEQ ID NO: 72726 - DNA, 50 bp, Homo sapiens
ggcgaacccgcggcgcaataacgctgatgaacttattagtcctaaagaca

SEQ ID NO: 72727 - DNA, 75 bp, Homo sapiens
atcccatcgggagatgctcatcaggtatcagaacaaggtttaatagaaatccttaaaaaagtaagccaacaaaca

SEQ ID NO: 72728 - DNA, 75 bp, Homo sapiens
gagactcagaatcgaatctcttctccctccccttcttgttctgatacaacaccccttttaaatggatcaagccaa

SEQ ID NO: 72729 - DNA, 82 bp, Homo sapiens
gaggcggccacccgagacgcggcgcgcacgctccggcctgcggagaatggggtactaagagaaaagcacgaagctgtggatc

SEQ ID NO: 72730 - DNA, 75 bp, Homo sapiens
ggcattcaaagatgaatatatggtcaatttggtcagagctccagaagttcctggaactcatgtcgtgtcccattt

SEQ ID NO: 72731 - DNA, 98 bp, Homo sapiens
cgttgcacccagctgccctcccgggaggctgcctgcctcctcagaagtcccgggctgaagacctgggcctgaaggcgaaggccctggagaagacagtt

SEQ ID NO: 72732 - DNA, 96 bp, Homo sapiens
cacttttgagtgcaactgccttccagagcctgtcatagggaactgcatggatagaagttctccaggacaagcagtggagctgccggatcacaatgg

SEQ ID NO: 72733 - DNA, 126 bp, Homo sapiens
ctgtgaggaggtgatcaaaaacctcagcctggaggccattcagctgtgcgaccgggacggtttatcatgttcattccgatagctatgagacagaaaaccagcattacggaagaagcttaacaaaag

SEQ ID NO: 72734 - DNA, 98 bp, Homo sapiens
caacagattttgatgtcctttcttataagaagacaatgttgcacttaactgatattcaggtctcctctgagcctccggcctccataagacccaaaaca

SEQ ID NO: 72735 - DNA, 87 bp, Homo sapiens
ccgtcctccttcgccgccgcgcacaaccgcacgtgcagggcgaagctgtgctcaggcccgggctggacgcagagccagagctgtccc

SEQ ID NO: 72736 - DNA, 74 bp, Homo sapiens
ggaggtcgttgcacccagctgccctcccgggaggctgcctgcctgttggagtccgtgcggctggagtaccgtgc

SEQ ID NO: 72737 - DNA, 74 bp, Homo sapiens
acaggcacccgccaccacgcccagacgccatttggaatgaacaggaaaaggctgaactttttacagataagttt

SEQ ID NO: 72738 - DNA, 109 bp, Homo sapiens
caccttccggcggccgaagacactgcgactccggagacagcccaaatatcctcggaagagcgctcccaggagaaacaaggctgacgcgccactatgtagcgggtttcgg

SEQ ID NO: 72739 - DNA, 75 bp, Homo sapiens
ggacgccagcggacacgcgggcgaggacctcctctgtcagagagagcagctttgtggaaaagatgaagaaaacgg

SEQ ID NO: 72740 - DNA, 98 bp, Homo sapiens
tagagtggacccatcacagcatgaaaccacacgtctaagagtgtaaccagttccagtagcagtagcagtgacagttctgccagtgattcttcatcaga

SEQ ID NO: 72741 - DNA, 100 bp, Homo sapiens
gggcgctccgggaagggcgagactggagcagagccgctgggcgccggagccgaggcgagcgccgcgcgcaccactgaatgctgcctttttatatggtctt

SEQ ID NO: 72742 - DNA, 82 bp, Homo sapiens
cagtactaccggcccctgcatgcgggcgctaatattgacacctgctcagaagaccagaggaccccgttgatggaagcagccg

SEQ ID NO: 72743 - DNA, 75 bp, Homo sapiens
gaaccattgttagtgaacgtggacaaagctgttgtctcagggagcacagaacccaacaagcttcgaaatggccac

SEQ ID NO: 72744 - DNA, 75 bp, Homo sapiens
gcctgctgcccgctggagggggtcaggccatcaccccagcaggagggtgaggacaaaatcttcttaatcaacaag

SEQ ID NO: 72745 - DNA, 98 bp, Homo sapiens
gggtggagtgtaggtcatatcgccgcgcatctctgcgccggatgtcatctaacagattccctggatcatctggatcaaatatgatttattatctggtt

SEQ ID NO: 72746 - DNA, 100 bp, Homo sapiens
tggccaggaaggcctgccagatatttgtgagaaatctgcctaaaacgttgaaggagaatcaattcttcaactcaagatgtctgatttactgtgaatttgc

SEQ ID NO: 72747 - DNA, 100 bp, Homo sapiens
ggacagtggcacacagataccgtttattaaaagagctgtggctgacatatttgacagtgattggtacacttctcgaaatctaattgggggcgctgacatc

SEQ ID NO: 72748 - DNA, 82 bp, Homo sapiens
tggtcttgctcggccgatgaagtgcagaggtttttttctgacctcctgccccccgaggtctgcagtctcctgaacccagcag

SEQ ID NO: 72749 - DNA, 88 bp, Homo sapiens
tacccatctctagaggacctaaaagtggaccaagccattcagattactactttgtaaccagggaggtgatgcagcgtgacatagcagc

SEQ ID NO: 72750 - DNA, 101 bp, Homo sapiens
cgctggactgcgagacggcccggctgcagcgagcgctggacggagaggaaagcgttgcccagcaggaggctgaaatgttcaaacgctacaatggaacattt

SEQ ID NO: 72751 - DNA, 96 bp, Homo sapiens
cgccagccactcgcccctggcctcgcgggccgtgtctccggcatcatgtgtggtttaaacttacacgaatcgctttctggaggaggaggggacccg

SEQ ID NO: 72752 - DNA, 100 bp, Homo sapiens
cagatgaacccatcaaagagtgcgggaagaaggagaaagggccaacccctgaagaagcaatacagaaactgaaggagacagagaagatactgatcaagaa

SEQ ID NO: 72753 - DNA, 101 bp, Homo sapiens
ctggtgttcgcccacgaccatgaagcatcagatggtgaaggagaaggagacacagaagtgatgcagcaggagacagttccagttcctgtaccttcagagaa

SEQ ID NO: 72754 - DNA, 51 bp, Homo sapiens
ttatctccaggccttattaaaaaggatggccaggccatgttatgggatctc

SEQ ID NO: 72755 - DNA, 82 bp, Homo sapiens
ggcatcctctacaccatcgacaccgaaaactccaccgtagcccttgccaaaggaaagtgatgaccccatggcttatattcac

SEQ ID NO: 72756 - DNA, 82 bp, Homo sapiens
caaaggaagacttgtaacctggagaagaggaggagacatcacagctttcccagatcgggaggaaaaatatggaatgtgtttt

SEQ ID NO: 72757 - DNA, 98 bp, Homo sapiens
agctcgggacttcggcctgacccagcccccatggcttcagaagagccctgtgcctaaggatagagataaattttatttcaaattaaagcaaggaatag

SEQ ID NO: 72758 - DNA, 100 bp, Homo sapiens
acaacctctcccccggctccatcgacctcaaggacatcaacttccggccgcagatgtcccagagacacctatggctgccgatgaaggctcagcagagaaa

SEQ ID NO: 72759 - DNA, 75 bp, Homo sapiens
attggtgacaaaatcagaggcatactttatagatggccgaacagacccaattttggatgatgttggtgaagcttt

SEQ ID NO: 72760 - DNA, 75 bp, Homo sapiens
accggggcatctccaacatgctggatgtcaacggcctcttggctgcttcaacccccaactccactgctggtgcag

SEQ ID NO: 72761 - DNA, 97 bp, Homo sapiens
agggacaggatccggaggcgccagctcaaccgtcacccttgcaattatggatatttaaaagggtcagacagtgtggagggggagttcccctcctcac

SEQ ID NO: 72762 - DNA, 100 bp, Homo sapiens
gtgacctcctcttagaagagtcaaatgttcagccagtatcaacaccagtaacagtgtgtggagatatccatggacagatcgaagccgcggtcaaggccgc

SEQ ID NO: 72763 - DNA, 75 bp, Homo sapiens
ccgcccagccacgcctcatggagcccatctaccttgtggagatccagtggcctgaagcacgaggacaaacgtgga

SEQ ID NO: 72764 - DNA, 82 bp, Homo sapiens
cgctacggaccttaaaatacccatagccccttcgcccctgcaacaggcacttctccccacactgtgccctgtccacggtgcc

SEQ ID NO: 72765 - DNA, 100 bp, Homo sapiens
ccctcggccaaacggccagacgccgacgtcgaccagcagagactggccagaagctgggcttacagagattctctaaaggcagaagaaaacagaaaattgc

SEQ ID NO: 72766 - DNA, 100 bp, Homo sapiens
gtggtggcataggttatgaagctaatcctggcgttccaccagcaaccatgagtggttccatgatgggaagtgacatgggagttggtctctcagtccatgg

SEQ ID NO: 72767 - DNA, 144 bp, Homo sapiens
gttgcagctgattaaggactatcgggagaaagtggagtccgagctgagatccatctgcaccacggtgctgtctgtggattctagccttgggggtctttcacgatccagcactgtggccagcctcgacacagattccaccaaaag

SEQ ID NO: 72768 - DNA, 98 bp, Homo sapiens
gacgaggaggctggaggtactgagaggatggaaatcagcgcggagttaccccagacccctcagcgtctggcatctgagacctgacagatgccaaaaca

SEQ ID NO: 72769 - DNA, 87 bp, Homo sapiens
caagttggccaggaacaaaagcatacctaccttcccctagaggacccgctggggcccagcccctactcatggtgcccagaagacctg

SEQ ID NO: 72770 - DNA, 101 bp, Homo sapiens
cgcagctgcggaaagccgaggcggtggcgctcaagtaccagcagcaccaggagtccctctccgcccagttacaagttgtctgttttgatgccaagataaac

SEQ ID NO: 72771 - DNA, 82 bp, Homo sapiens
tcgagtgaccgagaccgcggccgggaccgaggagttgtctgctggttctcagcttgaagaagattctgcagtccttattgat

SEQ ID NO: 72772 - DNA, 74 bp, Homo sapiens
cgacggtccccactttcccctgagcctcagcacctgcttgtttggaaggtaaacgcaaagcactgaagttgaat

SEQ ID NO: 72773 - DNA, 96 bp, Homo sapiens
attgagatgatccttacggaaaaggaacagattgttcctaaaccagaagaggaggttgcccagaagaaaaagcttatgtccctgatgccaaaaatg

SEQ ID NO: 72774 - DNA, 89 bp, Homo sapiens
catcggcaagggcaacttcgcggtggtcaagcgggccacgcacctcgtcaccaaggccaagatggagtttcactcttgtctcccaggct

SEQ ID NO: 72775 - DNA, 90 bp, Homo sapiens
tgaaaacaaaatagcagagaaacctgactgggaggcagaaaagaccactgaatctagaaatgaggaggacgaatccatgaaccaaccagg

SEQ ID NO: 72776 - DNA, 131 bp, Homo sapiens
cgaagggctccagtatccttttgctgtgacgagctacgggaagaatctgtatttcacagactggaagatagggtgttcagagctctgccggatccctatggtggaatataaactcgacagcgagggcaccc

SEQ ID NO: 72777 - DNA, 50 bp, Homo sapiens
gtggaggacaggaacctgctggtggagcatggggaagtgattgactgtgt

SEQ ID NO: 72778 - DNA, 98 bp, Homo sapiens
ttgggggagcacgattggatttgccgaagattaggaagaatccactgatagaaatcatttccatcaataccggttccagaaacgccgctggactgcga

SEQ ID NO: 72779 - DNA, 74 bp, Homo sapiens
agaacttaaagaaggcctgcggcaaagagatgagcttattgaggattattgcatcgagcttttagtgtcttctt

SEQ ID NO: 72780 - DNA, 51 bp, Homo sapiens
ggaacatcagcaatgcttctgcggggatctgatgagcttctttcttctggc

SEQ ID NO: 72781 - DNA, 100 bp, Homo sapiens
ggtccgctgagcggggcgacccgagatgagtgccaaaccaaatatggaaatgctaatgcctggagatactgtaccaaagtttttgacatgctcacagtag

SEQ ID NO: 72782 - DNA, 90 bp, Homo sapiens
cacttcagtgcctcagagtgcagttcccaaggaggcttcaagacaaagggccccttacacaccagacagaaaatgcttggacagaagaga

SEQ ID NO: 72783 - DNA, 80 bp, Homo sapiens
attctggtgatgaaagaattgaaaaatcccaacatcgttaactttttggacaggcttagagaagaaaacgcaggttctgc

SEQ ID NO: 72784 - DNA, 80 bp, Homo sapiens
cagacaaaactctctgacccagtttatgagggataccaataactagtgcctcgtactacgcgacagtgaccctggatcag

SEQ ID NO: 72785 - DNA, 51 bp, Homo sapiens
gcagatggccgtacgtgtgaagaaatggactcagaactcaaggaagaaatt

SEQ ID NO: 72786 - DNA, 75 bp, Homo sapiens
gaactgggaagacccagatctgtcatacgctagctgtcacctgccagcaacgtagcttacagagtttggaggcaa

SEQ ID NO: 72787 - DNA, 100 bp, Homo sapiens
ccgacggtggcggcgggatgcaggctcctggatttggatttggaattgcaatatctggtggacgagataatcctcattttcagagtggggaaacgtcaat

SEQ ID NO: 72788 - DNA, 96 bp, Homo sapiens
ccccagctccctgatacaggccaatgtgaccgtggggacttgctcgggcttttgttcccagaaaaaccgcatgcacgagtctctcatgctcttcga

SEQ ID NO: 72789 - DNA, 117 bp, Homo sapiens
gatagactgcattggtcgtgctcgcttaggtggcagcacccagcccagtgccaggcatacattgggcgctcgattatgtttgagaccttcaacaccccggccatgtacgtggccatc

SEQ ID NO: 72790 - DNA, 100 bp, Homo sapiens
tgaaggtggaacggggctcccaggacctccactaatcaccagaacaaaatgtgcaggccccttcacagatgtagtcactacaaatcttaaattgcgaaat

SEQ ID NO: 72791 - DNA, 100 bp, Homo sapiens
gctcaacagaatattccacctgccttgacatgtgttttaacttctagtcatggcgaatgatcgcaggagagcacagactggaccctgctacgatctctct

SEQ ID NO: 72792 - DNA, 99 bp, Homo sapiens
atagcagaaagctggtgttacacacaggtggaatgaggtaccatctactgtctccagaggaccgagaagaacttgtagatggcacaagacctagaagaa

SEQ ID NO: 72793 - DNA, 75 bp, Homo sapiens
aacagacatgagttcttatgctgaagcacttcgagagagttcagacgatgaagactgttcggcgaaaggaagaaa

SEQ ID NO: 72794 - DNA, 90 bp, Homo sapiens
ggaagaatccactgatagaaatcatttccatcaataccggctttttgcctgaattcatcaatggagactttgattctattaggcctgaag

SEQ ID NO: 72795 - DNA, 83 bp, Homo sapiens
cacatcaaagaggtggtgcggaagatgatcagccaggcacagaagtgtactaatggtcacttgatgtgcgctggctgttttat

SEQ ID NO: 72796 - DNA, 100 bp, Homo sapiens
caaggatgatccagttggaccttttggacaggaaagtgtaacatcagttacagaggggagtcggtgaagtacttcctggacaacttggaccggatcggcc

SEQ ID NO: 72797 - DNA, 98 bp, Homo sapiens
tgtggctctttctgctgggcctgcccttcaccctctacatggtttacccaaggtccagcctagcccctaggcaccatgtcggacagtgatctaggtga

SEQ ID NO: 72798 - DNA, 82 bp, Homo sapiens
ctggtggctccgcggattataacaggtccttctatatgatccactctttgactggaccatgaatcctttgaaagctttgtat

SEQ ID NO: 72799 - DNA, 122 bp, Homo sapiens
ggaaagtttttgggacatgcacagatgtttggcagcttcaaaaggtcatacagcagatggaacaaaaaaaattacaacaaggaattcctccatcagggccagctggagaattgaagtttgag

SEQ ID NO: 72800 - DNA, 80 bp, Homo sapiens
aaggaccagaagaaactgcaccggaaatgtgcctaccaggtgctgaaaggacatgatgatcatgtgatcacatgcttaca

SEQ ID NO: 72801 - DNA, 90 bp, Homo sapiens
cagggaaggcactcaaaagtggggggcaggaaaggtgctggagaatctggtaaaagcaccattgtgaagcagatgaggatcctgcatgtt

SEQ ID NO: 72802 - DNA, 98 bp, Homo sapiens
ctggctcccaaagattggtttgcaaacttcgacaaaatactcttctccactcgctattgaattctgcttggtcagaatcgtgatggcattgtgttcag

SEQ ID NO: 72803 - DNA, 98 bp, Homo sapiens
gaagaaccaccaaagttaccacgaagccggaagcagaggtgctgttgatgggtaaaagtgggtctggtaagaccagcatgaggtctattatctttgca

SEQ ID NO: 72804 - DNA, 100 bp, Homo sapiens
ctcatggggaaaatctccccggtgactttcaggaataaagggattcattcctcattttaactgatgttacagtgaagatgggttcttgaactcttggaag

SEQ ID NO: 72805 - DNA, 74 bp, Homo sapiens
ttcaagtcatcccaaatatggttccatccctaaacttatacaaactcccgttattgaaaatcgtagttcacaac

SEQ ID NO: 72806 - DNA, 143 bp, Homo sapiens
aagaagctgtgcattgttggtgggattctgctcgtgttccaaatcatcgcctttctggtgggaggcttgattgatggaaatcctgtatgaatgtggaagccattagcagagtaattgctgtctgttaccatgacaaccagccg

SEQ ID NO: 72807 - DNA, 100 bp, Homo sapiens
ttcagttgcacatccccacatcaatgcactgccaatggtgtgagttcttgatacgaatgaaaggccaagagtttgttgatgagattcaaggtagatatcc

SEQ ID NO: 72808 - DNA, 102 bp, Homo sapiens
ctatcactcaagagactcttcatttagattggattctgaatatcagggtgagcatggacaatcttgtgccaaaatgcttgtgaatcgagcattgggccgctg

SEQ ID NO: 72809 - DNA, 49 bp, Homo sapiens
tcggtttcctggacccattccgactcagtccagttacaacacagggatc

SEQ ID NO: 72810 - DNA, 100 bp, Homo sapiens
aaggttcaaaaactaagcatccagaggccctgagcagctttcagcactggagacagccctcagcgcctttttccaggagaccaacatcccctacagccac

SEQ ID NO: 72811 - DNA, 80 bp, Homo sapiens
tgataagaatgttttacaaagagatctccgtatagagaaaagtctgatgatcccaggaaacatcatttctttaaaacgat

SEQ ID NO: 72812 - DNA, 51 bp, Homo sapiens
ccttccagctgtttgaccgaacagactgcaaaattcaaaatggggctcaag

SEQ ID NO: 72813 - DNA, 90 bp, Homo sapiens
cacgtggaacctggcttcgcccttattgtctgtcagcgttgatggcactcagaggactgtccagtacttggggtgcattgaagttctgcg

SEQ ID NO: 72814 - DNA, 90 bp, Homo sapiens
ctcccggaccggcggcgtgaaagtcgtgatatcatcgttgaactgtgccgctcagtggaattggatctcaaccaagcacatatggaggag

SEQ ID NO: 72815 - DNA, 89 bp, Homo sapiens
gttgggctcgcggcgagcggacggggtcgagtcagtgcgttcgcgcgaggcgccatgtcagaaccggctggggatgtccgtcagaaccc

SEQ ID NO: 72816 - DNA, 76 bp, Homo sapiens
atgacaggcatgttgtataaatgtacaggcactgcctccttacctgtgaggaatgcaaaataaagcatggattaag

SEQ ID NO: 72817 - DNA, 100 bp, Homo sapiens
ctggtccccggccggccggagcggcggcggtggcggcgcgaggcggcatgagggagccgctcgaattaaacaaccaccatgtcgagcaaaaaggcaaaga

SEQ ID NO: 72818 - DNA, 75 bp, Homo sapiens
gtgcgccggcagaggatccagtgttcaccatcctggccccggaaggtattagaaaactactcggatgctccaatg

SEQ ID NO: 72819 - DNA, 50 bp, Homo sapiens
gcaggctacagtccactccagcatgactgaaagagcatattccttttgtg

SEQ ID NO: 72820 - DNA, 75 bp, Homo sapiens
gatctgtgagggaaaagacccaataggataactcaagttactgtctttaacacctctgtgtgaagatgacaacca

SEQ ID NO: 72821 - DNA, 102 bp, Homo sapiens
gtgtaccaggcgaagctggccgagcaggctgagcgatacgacggtgtttcagtcacctccagtaacacgggcgtgccagatatctcgggttctgtgtactcc

SEQ ID NO: 72822 - DNA, 98 bp, Homo sapiens
ctcaactaactacaattgtattggcagctagagagatcgttaactgaagacaatatgcaaaattctcacatggatgaatacagaaattctagtaatgg

SEQ ID NO: 72823 - DNA, 75 bp, Homo sapiens
ctgtagtgtttgccaatgttggagccgtctgcaaagtgtccccggcaagaaggcccgatgagagaaagggaaagt

SEQ ID NO: 72824 - DNA, 100 bp, Homo sapiens
gggccttcgagagctaccgcgccagacagatacacaatcatcatcttactagttctctgtgttgctcgctaaccagtcccccagttcagtagactggagc

SEQ ID NO: 72825 - DNA, 51 bp, Homo sapiens
catcttatctacgaaatgattcaggagggccgcaagaacgagatgctgctg

SEQ ID NO: 72826 - DNA, 50 bp, Homo sapiens
cgccagcatgccccagtccaaaggatttttagactctgaggagcagttgg

SEQ ID NO: 72827 - DNA, 50 bp, Homo sapiens
gaagatgtagacacagtgcagccaaaagcaattggggcactgaagatgat

SEQ ID NO: 72828 - DNA, 89 bp, Homo sapiens
catgaatgcaatatttatgatgtgaaaaatgacacaggattccagaattggaaataacgggagggaggacctggtccagcttcccttcc

SEQ ID NO: 72829 - DNA, 100 bp, Homo sapiens
gcaagttcatgaaacctgggaaggtggtgcttgtcctggctggacgctactccggacgcaaagctgtcatcgtgaaggagaagtacagcatcggggagcc

SEQ ID NO: 72830 - DNA, 101 bp, Homo sapiens
gtggcccagtacctgctctcagacagcctcttcgtgtggggcttcctgaagaatgagaaggacaatgccctgctgtctgccatcgaagagtcccggaagag

SEQ ID NO: 72831 - DNA, 101 bp, Homo sapiens
ggcggccgtggacaacatgatggtcagaaaaggggacacggcggtgcttaggttacaagagaagcatgtcaaagatgagcagattgaacattggaagaaga

SEQ ID NO: 72832 - DNA, 75 bp, Homo sapiens
cctccgagctgaagcagctcatccaccagcagctgagcaaggtggcttcccacacttctgactcggacgttcctt

SEQ ID NO: 72833 - DNA, 74 bp, Homo sapiens
gaaaattccaccagaaaaaatgagggagctggaacggaagtgtggagagtatagtgaagatgatgtaaatgaat

SEQ ID NO: 72834 - DNA, 83 bp, Homo sapiens
cgtgctgcgcctccgcggctgccctgcgccagaggctgggaggcggcagaatgcagccagaggagggcacaggctggctgctg

SEQ ID NO: 72835 - DNA, 51 bp, Homo sapiens
aggagggagctactctaaggctgagtgcagcgacagtgcccagggctctga

SEQ ID NO: 72836 - DNA, 121 bp, Homo sapiens
ccagaggaagctggaggcgctgatccgagaccctcgctcccccatcaacgtggagagcttgctgtgtttgggaaatgggaagtaatgacagctggcacctgaactaagtacttttataggc

SEQ ID NO: 72837 - DNA, 75 bp, Homo sapiens
ggcagattatggctttgtccccacccagcactgatgatattataaagtgtgatgaatgcagactctgctaccatt

SEQ ID NO: 72838 - DNA, 75 bp, Homo sapiens
taccacttatgagggtatcttcaagacgctaagctcaaagctacgtcaaaagctacctcctcccggataagcaga

SEQ ID NO: 72839 - DNA, 100 bp, Homo sapiens
gggaaaatctccccggtgactttcaggcgctccaggcccctgcctgtcacgagaacatggtgaaggttggcggctacatccttggggagtttgggaacct

SEQ ID NO: 72840 - DNA, 82 bp, Homo sapiens
ggggattgtgggagtctccgcgtcccgctcgctgggagagagccgccaccggcacggccaggccagcatggtggaccactta

SEQ ID NO: 72841 - DNA, 75 bp, Homo sapiens
tgtcttcggtggactccttcggcagtccacccaccgccgccgcctcccaggccacggcatatgcctccaaggacg

SEQ ID NO: 72842 - DNA, 98 bp, Homo sapiens
ggactgagagcgcctggaggctcgagcggaggggaagcagtttaagtgcacggtgtgtgactacacagcggcccagaagccacagctgctgcggcaca

SEQ ID NO: 72843 - DNA, 100 bp, Homo sapiens
accacagtttgcagaacctacagaaacgttgtttggtcccgattccggaaaaggtgccaagagcttagttgaactccttaattttgaacagaaaatgctg

SEQ ID NO: 72844 - DNA, 75 bp, Homo sapiens
gcagaggccttctctagaccttgccaagatggcacagggtgtggtgtctatctgaagaatattttactttcaaag

SEQ ID NO: 72845 - DNA, 97 bp, Homo sapiens
ctgtcactccacctcgaacagctaatccgccgaagaaaaggcaagcacgaggagcggcaggacgagcatggctacatctcccggtgcttcacgcgga

SEQ ID NO: 72846 - DNA, 100 bp, Homo sapiens
ctggtgccggcgtttgggctacggttgttgttggcgactgtgcttcaagcgggtacccagtgtgttgaacaaattcaagagttggttctacgcttctgtg

SEQ ID NO: 72847 - DNA, 98 bp, Homo sapiens
gtctgcagggcctgggccgccgctgctacctgcagcgccgtgtggcacgacacaaaaatcagattccagttcttcagacaaacaatggtccaagtcta

SEQ ID NO: 72848 - DNA, 75 bp, Homo sapiens
gatcccgctgtggtacttctcgcagtccccgcgcgtggtcatccagttgggccggtgcacaaacagcgtggtcaa

SEQ ID NO: 72849 - DNA, 100 bp, Homo sapiens
agcaaagcgcccagcctgccgcctcgctgtccctgcggcttctgggggtaccgctagagcgacatgatggtggaatctgcctcggagacaatcaggtcgg

SEQ ID NO: 72850 - DNA, 73 bp, Homo sapiens
ttagcagtccattccaaagacaactataaacgagtgactgggacaaggtttgatgaacttgtgaaaaaattca

SEQ ID NO: 72851 - DNA, 83 bp, Homo sapiens
gccgaagctctggtcagtgccatgatccggcaggagcgctccacatcctaccaggagatttaacaacctgggtgtcctgcatg

SEQ ID NO: 72852 - DNA, 96 bp, Homo sapiens
atttccaccgtgcagatcctcacagaaggcttccctcctggagattcacctggtaactgaagaggagggatcagctaatatgtatgcaatacatca

SEQ ID NO: 72853 - DNA, 82 bp, Homo sapiens
taataacgagttctctagcgctagtgatgtgacaatgcagatcttcgtgaagactctgactggtaagaccatcaccctcgag

SEQ ID NO: 72854 - DNA, 100 bp, Homo sapiens
agaccttcactacctattctgacaaccagcctggtgtgcttattcaggtcattgctagaatcgtggatggaagcagattcactgagttcaaagcctttta

SEQ ID NO: 72855 - DNA, 98 bp, Homo sapiens
ggacgcgcgagacaatgaggagatgcagacagacatgctgaactatctggaagtccactgaaaagcaaaagcactaggaagcctttggcatgtatcat

SEQ ID NO: 72856 - DNA, 51 bp, Homo sapiens
cagtatcataaaattcctctaaatgcaatgatgtgatgccagccacttact

SEQ ID NO: 72857 - DNA, 82 bp, Homo sapiens
ctgggaacccgcggtggagcgggacacgaacgtgccctgggcgctgcctatggcacagccaagagcggtaccggcattgcgg

SEQ ID NO: 72858 - DNA, 90 bp, Homo sapiens
gctcctgtctccgatgaggacgaaggaaacttggatttaactggccagaagcaggtattcaaagcagagaacaatccctgggtgaccccc

SEQ ID NO: 72859 - DNA, 100 bp, Homo sapiens
ctcgtctggtgctatcctgtcatacatcatgtgtgtgagatggagtctcactctgtcacccaagctagagtgcagtggtgtgatcatagcactggagcct

SEQ ID NO: 72860 - DNA, 50 bp, Homo sapiens
caccttgatccagcggacttacggtctctcagcaaacctgctgggcgaca

SEQ ID NO: 72861 - DNA, 75 bp, Homo sapiens
tgtgcgccgggtggagattctcagtgaaggaaatgaagtccgatccatgctgcagaatggtgtctctgattttga

SEQ ID NO: 72862 - DNA, 75 bp, Homo sapiens
ttaaacatcccctacagaacagtgaggactcagaagacaaagatgtgaagaccaagaaggatgattctcactcag

SEQ ID NO: 72863 - DNA, 100 bp, Homo sapiens
aggaagaagaggacgacgacgacgaggaagaggaggtttctgagacagcaccagttgcccttgaagcagaaaacagaggtgaaatgaaactagctctcca

SEQ ID NO: 72864 - DNA, 75 bp, Homo sapiens
gaaagctttcctaggccaaaaagagagccgagactgtctgaagctgggcccacctgctgagggagaagtcgtcca

SEQ ID NO: 72865 - DNA, 117 bp, Homo sapiens
aaggaggaagggaaccaacccactttctcggcgccgcggctcttttctaaaagtgaaagatgaatgggagggctgattttcgagagccgaatgcagaggttccaagaccaattcccc

SEQ ID NO: 72866 - DNA, 75 bp, Homo sapiens
gaggactgatcatttcttgcagctctaaaaaccatggctcgggacacagcattgttggttttgccatgtactatt

SEQ ID NO: 72867 - DNA, 59 bp, Homo sapiens
aagtggcacacactggagagatatcacggctgtggacaaattgaatgtaattgatgatg

SEQ ID NO: 72868 - DNA, 75 bp, Homo sapiens
acctacgctatcaggaggccctgagtgagctggccactgcgtttttacccagtcttgctaggtcagcattagaaa

SEQ ID NO: 72869 - DNA, 95 bp, Homo sapiens
cgggtggttaaacttcgcaaaatgaaatggagaaggtagaggagatgccacataaaccacagaaagatgaagatctgacacaggattatgaagaa

SEQ ID NO: 72870 - DNA, 97 bp, Homo sapiens
caaaaatgtgcatactcacagagttagagagagggatggtggtcctgcattcagctcttttcacatttgatttgattgaaagtgttctagctcgagt

SEQ ID NO: 72871 - DNA, 88 bp, Homo sapiens
gtccctgcaccatgcaactttgcacttcagatccaacgaggaggaggaaggcgtgtgctgtggtaacagtgtatcatgtatgccactg

SEQ ID NO: 72872 - DNA, 100 bp, Homo sapiens
tcagctggaaaatcaaggactatctggaggagctgtgggtccaggctcagtacatcacagacgcagaaggtccctgcgctgcccacagcacacagatgag

SEQ ID NO: 72873 - DNA, 126 bp, Homo sapiens
agcagtgcagaaaattccttgtctggaagctgccaatccttggacaggtcagcagacagggaatggttgtatctcttgtcacatgaaatgttgaatccatactatggcctcttccagtattcaaga

SEQ ID NO: 72874 - DNA, 100 bp, Homo sapiens
ctctgattttgtttcattttcagctggagacttaaatgacaccaagcaaagcctacttagtttagatctccagtctcacagaaagttctccgctcccaga

SEQ ID NO: 72875 - DNA, 83 bp, Homo sapiens
ccccctttcgcttaagtgaaaaagcctcttcagaagaaacttgactccttcccagctcaggacccttgcaccaccatatatgt

SEQ ID NO: 72876 - DNA, 90 bp, Homo sapiens
agctcactgccatgtcctcctgcagccggcgctccaagctcaaggcctataatgcaaagagcaaaagctttgaagatcctcccaaccatg

SEQ ID NO: 72877 - DNA, 100 bp, Homo sapiens
ggccatcttcccactctctcttcgcatcatcttccctctggggagctgatcaccttctattactattggaagaagacccccgaagcagccagctcccgag

SEQ ID NO: 72878 - DNA, 75 bp, Homo sapiens
ggtgcgtctgccgcagagtcggcacctgaaggacatggaggagggcctgaggctatggcaggaggagcaggagag

SEQ ID NO: 72879 - DNA, 89 bp, Homo sapiens
cgtgagtgatcactctcaatcccggtgccggtggtggtgtgcacattgagccccggtatagacagttcccccagctgaccagatcccag

SEQ ID NO: 72880 - DNA, 100 bp, Homo sapiens
gcttcctacagcacaacaaatgtgaatgcagggttcataaattcatggaacgtgaaggtcgcagacctcgtcttcttgtagcaaaaatgggacaagatgg

SEQ ID NO: 72881 - DNA, 100 bp, Homo sapiens
agcgaacgccagggaccctgtgcaggcctgctcctccgtttgcaagattttcagctgaactctcatctctcaacactggcaaatattcataagatctacc

SEQ ID NO: 72882 - DNA, 98 bp, Homo sapiens
caacatcaacacttgcagggaaatgatcagtctgttggatttctgttccgaaacaccaatgtggaagatgtccttaatgcccgaaaactggagcgaga

SEQ ID NO: 72883 - DNA, 75 bp, Homo sapiens
tgttcagctagtgagtcataaagatatacaagattccctaacagtgtctatccccgtcgaggtcaagatcaagat

SEQ ID NO: 72884 - DNA, 75 bp, Homo sapiens
acctttgctgcaaaaaattacggagtatctgactgtcttctctcagatgattgcatttcatgatccagagctgag

SEQ ID NO: 72885 - DNA, 90 bp, Homo sapiens
ctcactcggccaaggaaactcccagggcccgcccaggacccccaagccgccgcggacgcagatgatggagcagtggtatcacctgacctt

SEQ ID NO: 72886 - DNA, 91 bp, Homo sapiens
cctcccggcgccactggccggtgccctacaatttcttgcagaacataaattattaggaaacattaaaaatgtggccaagacagctaacaag

SEQ ID NO: 72887 - DNA, 75 bp, Homo sapiens
gcgctcgtctggcggagctgggtgacatttacaaagaggaaatttgggttgatgaagaaggcttatgagctgagc

SEQ ID NO: 72888 - DNA, 50 bp, Homo sapiens
tctgagtctccctctgtcacgggagagggacccaatcctgtagctggaag

SEQ ID NO: 72889 - DNA, 75 bp, Homo sapiens
aaagtatttgtggtaataacccttaccgggagtttcactgaaggtagcaactgggaagtggaagcagatcagcaa

SEQ ID NO: 72890 - DNA, 75 bp, Homo sapiens
gcctcagcccccgcaaggatggcctttcctaccagcagttccaagagcctctgagttcctgccttttttcatctc

SEQ ID NO: 72891 - DNA, 100 bp, Homo sapiens
cccaaaaacgctcagatgctgtccagaagatacgatgaatggattaaagcagataaaatagtaagacctgctgataaaaatgtgccaaagataaaacatc

SEQ ID NO: 72892 - DNA, 83 bp, Homo sapiens
cttggactgagtcctgcaggacacagggatcatagacggtatttctatgtaaacgaacagtcgggcgagtctcagtgggagtt

SEQ ID NO: 72893 - DNA, 82 bp, Homo sapiens
tctgcaatagatacatggagcccatcagaatggcagatggcttatgaaccacagcaaagggaagcatcgtgctgaagtatga

SEQ ID NO: 72894 - DNA, 50 bp, Homo sapiens
caggaacattgctgtggattcccagtgctgggcctaaaggagataacatt

SEQ ID NO: 72895 - DNA, 75 bp, Homo sapiens
gtttctggggcaaaaacattcaagaatgagagcgagaacacctgtcaaggtagtaccgttgtcagcacacagcgt

SEQ ID NO: 72896 - DNA, 100 bp, Homo sapiens
cgagcctcacctttattctctcagcacactgcagatgttcagcccacaagagcttactggtgaaggaatgggacaagacccatctttatgcaaagccagc

SEQ ID NO: 72897 - DNA, 97 bp, Homo sapiens
ccccgccgcccgcctgcgcctccggggccggccctgcaggtgaatctggattgggaaagtcgacattaatcaactcattattcctcacagatttgta

SEQ ID NO: 72898 - DNA, 89 bp, Homo sapiens
gaagatgtttcaaggagaggcccagcatatacaaaggcatggaagtatgaaaatgggtttgtggatgcacttagatgtttgcaatgagc

SEQ ID NO: 72899 - DNA, 83 bp, Homo sapiens
gttggtgaaggtgaacaggtgaccataactctgccaaatatagaacactcaaggccaaattatacaagaaaaagagataccag

SEQ ID NO: 72900 - DNA, 91 bp, Homo sapiens
ggcgcctggcctcgaggccgctgctgctggcgctcctgtcgttggcattgcagtgtcgagatggctatgaaccctgtgtaaatgaaggaat

SEQ ID NO: 72901 - DNA, 82 bp, Homo sapiens
ctctttgatcttgaatattatgtccatcagttgatattcactgatggactccaaagaatcattaactcctggtagagaagaa

SEQ ID NO: 72902 - DNA, 100 bp, Homo sapiens
cctggaccctgcccagcagaatttgtatagagatgtgatgttggagaactacagaaacctggtctccctagtgcaaacggttagagcaggagcttcatca

SEQ ID NO: 72903 - DNA, 83 bp, Homo sapiens
ctccacattgagagcaaaatctacaagatgatgcagggaggaggtttacccaaggtccagcctagcccctaggcaccatgtcg

SEQ ID NO: 72904 - DNA, 100 bp, Homo sapiens
gacaagctgatggacagtatggtggccgagtttttaaagaacagtaggatccttgctggggacgtggagacccataatgattgaagatagtgggaaaaga

SEQ ID NO: 72905 - DNA, 100 bp, Homo sapiens
atcttgaggagtgatccctgtcccagcccctggaaaggggcaggaacgacaaactcaaagtccagttcctcagatgttagcaatgatggttgatttggaa

SEQ ID NO: 72906 - DNA, 76 bp, Homo sapiens
cttgctaacaggctcttatgatatgaaaataaaggtgacagacctacaagccttatacaggatgctgtgttctttg

SEQ ID NO: 72907 - DNA, 100 bp, Homo sapiens
tctcaggtgaaaggagcagtagatgatgatgtagcagaagaatcttttagctgaaaaagtagagcagctgatggaatggagttccagacgctcaatcttc

SEQ ID NO: 72908 - DNA, 100 bp, Homo sapiens
atctcaggaatctggtctcattggctgcgcaaaccatgcaggatgatttactgatggacaaaagcaaaacccagccccagccccagcagcagcagcggca

SEQ ID NO: 72909 - DNA, 74 bp, Homo sapiens
caagtggcagattatggaatagttgcagatttatttaaggaaggtgaaccttccggaaagagaaaagcagaaga

SEQ ID NO: 72910 - DNA, 83 bp, Homo sapiens
tcttcaacaagaggacccaggagaaattcgccctcaaaatctgactgcagccatgagcagcaatgagtgcttcaagtgtggac

SEQ ID NO: 72911 - DNA, 100 bp, Homo sapiens
cgagtacggccacgaccccgcgagcggcggcatcttctcctccgactacaagcggtggccaaggtggaatacgtcaggaagaagccaaaattaaaagaag

SEQ ID NO: 72912 - DNA, 75 bp, Homo sapiens
ggcgacctgaggggagagggaacgcagctgaaagcgtgaactgtgtatagtggaggattacaagccaccgttcta

SEQ ID NO: 72913 - DNA, 89 bp, Homo sapiens
gaagcaagaaggccctggacacagcaatatctctgggctttcacagacctcagttggatgaacccattccactgtatgaggcaaaagtt

SEQ ID NO: 72914 - DNA, 100 bp, Homo sapiens
cgcctcttcttagttgatgatttagttgattctctgaaggttcgagaaatggctgctactaccttaagcggtctgctacagtgtaactttcttaccatgg

SEQ ID NO: 72915 - DNA, 83 bp, Homo sapiens
ctcagcagctccagccagcggacccgacggctgagaggtgtgggcagaagaaaaagctagtgatcaacagtggcaatggagct

SEQ ID NO: 72916 - DNA, 100 bp, Homo sapiens
agcttttgtagagaagtgctgcaaggctgacgataaggagacctgctttgccgaggagggtaccatgcttgggaagattgaatttgaaggtcagcctgtg

SEQ ID NO: 72917 - DNA, 83 bp, Homo sapiens
cctaaaatgacgacacgccccacaggtcttgggaggattaagtgaggggacatgagggaaccctactctggaaactgtcagtc

SEQ ID NO: 72918 - DNA, 83 bp, Homo sapiens
cgaaccggcgctcctgcccccggggtgacgcgcagctcccagccgggttctctataaaggtgtcttaaaaaggttgattttgt

SEQ ID NO: 72919 - DNA, 75 bp, Homo sapiens
agcactgctccacctctgattccaccaccgggatttggagtggatcagttacgagatgacaatctagaaacttat

SEQ ID NO: 72920 - DNA, 92 bp, Homo sapiens
caagcctgttcggcgggactgtgatggccagagagatgacgatcttagacctgcctagagctggaacgttacctccagagcgagccctgcta

SEQ ID NO: 72921 - DNA, 74 bp, Homo sapiens
ccgcgccgcgctccaaccgcctcctcctcctcagtaacgcgggtgcatggctgcctcctaatcccatagtccag

SEQ ID NO: 72922 - DNA, 90 bp, Homo sapiens
gttgccggcaccatggagtcaccttttagcccgggactctttcacaggctggatgaagattgggattcacatctctttaatcaatgggag

SEQ ID NO: 72923 - DNA, 99 bp, Homo sapiens
aaaacggagacttggatgaggtgaaagactatgtggccaagagcacaatcattgtggagaagacagttcaagacctcctgaacctgatgcatgacttga

SEQ ID NO: 72924 - DNA, 100 bp, Homo sapiens
catggttgccggctcccctctcaggacaacccagatgtgcaacaaagtgcgatggtcttgagtcaccacgtccgaatataattcttgggttagtaatctg

SEQ ID NO: 72925 - DNA, 97 bp, Homo sapiens
gtctgcggaggaggagctgcagcaagcgggagaccaggagctcctccaccaggccaaagacttcggcagttctaatagaagactgtatcccggtact

SEQ ID NO: 72926 - DNA, 125 bp, Homo sapiens
tccggggcttgccctggtcttgctcggccgatgaagtgcagaggtttttttctggtggtctttgggaagaagcttcctgcctttgccaccatccccatccaccagctgcagcatgagaagaaata

SEQ ID NO: 72927 - DNA, 75 bp, Homo sapiens
atttaggagctctgctcaaagccagacgagtcatttcctacagtgtaaagaggacaacccggactttgaaggcgt

SEQ ID NO: 72928 - DNA, 147 bp, Homo sapiens
gccgagatgtctcgctccgtggccttagctgtgctcgcgctactctctctttctggcctggaggctatccagcgtactaggttttgacaagcttgcatcatgcgtgagtataagctagtcgttcttggctcaggaggcgttggaaag

SEQ ID NO: 72929 - DNA, 82 bp, Homo sapiens
aatggaaaggaatagacaggctacgcctggacaaatactatatgggcatccgtttccgaggctttagtatccctgaatgcca

SEQ ID NO: 72930 - DNA, 75 bp, Homo sapiens
cctccgagccaggccgccgcaaagcaggttattcagcttctcaaggctggaaaagcgaaggaagtttcctacaat

SEQ ID NO: 72931 - DNA, 101 bp, Homo sapiens
gtgaccaaggaggagtacaaggacatcctgcgcaaggccgtgcagaaggtggtctttgggaagaagcttcctgcctttgccaccatccccatccaccagct

SEQ ID NO: 72932 - DNA, 74 bp, Homo sapiens
tcccagtgacgggtctggagtgcgtgggggaccggctgttggcgggcagttgcagtggtgcagaatggctgacc

SEQ ID NO: 72933 - DNA, 75 bp, Homo sapiens
gtccactgtacccatggtttaaacaggactggctacctcatttgcaggtaaagcagctgagcagccattttcaga

SEQ ID NO: 72934 - DNA, 98 bp, Homo sapiens
ggcaggacacggaggaccggagcggcctgtccgaggtaaaaggattgagagggaagaagaggaagaagaagaagcccttcctttagatatgatggatg

SEQ ID NO: 72935 - DNA, 82 bp, Homo sapiens
gacatcgtcttcagcaagatcaagctttatcctgtggataaacgcagagtgaacgagtttggggagtcctacgaggagaagg

SEQ ID NO: 72936 - DNA, 75 bp, Homo sapiens
cagtagcttttctgagaatacttgctgaaaaggaagttttctggaatgggttttataggatcacattgacaaaag

SEQ ID NO: 72937 - DNA, 50 bp, Homo sapiens
atgaagagctacatgaagctgtgcggattgatgagtacgattactccaag

SEQ ID NO: 72938 - DNA, 90 bp, Homo sapiens
ggcctagacctgaactcttcagataatcagagtggaggaagtacagccagcatgttcctgcaagggctggtgtggaaacaagcagtgtgg

SEQ ID NO: 72939 - DNA, 100 bp, Homo sapiens
cgtggaggcagcggccgagttgagcgccaaggacttggcgatgtacatcaatgaagttaaacgggacaaggagaccttgaggaaaatcagcgaatttcag

SEQ ID NO: 72940 - DNA, 100 bp, Homo sapiens
cacaatctcaatcgttgctgaatcctttcatatcctaataggaattaacctccaaataaaacatgactgttgctctaggtcgtaaccagcctttgaaaaa

SEQ ID NO: 72941 - DNA, 83 bp, Homo sapiens
atgcagatgcccctcctccaccagaggactgggaggagcatgtcaacaggaagcagttcaggtacttttgaagcattctgcag

SEQ ID NO: 72942 - DNA, 83 bp, Homo sapiens
gaggtctccgcggcccgaggtctccgcccgcaccatgcggctgggcagatgatatcatcaagttgaatcgaaaggaagggaag

SEQ ID NO: 72943 - DNA, 100 bp, Homo sapiens
gttgacatgcagaagcgcctccatcgaagtgtttttctcaccttcctccgcatgtccactcacaaggaatccaaaaaggccaatgatgaggccaatcaga

SEQ ID NO: 72944 - DNA, 75 bp, Homo sapiens
gccatcttcatcctggtgatggcaaatgtcgtggacatgggtgtgggccgaagatatgctcatgtggtgttgagg

SEQ ID NO: 72945 - DNA, 76 bp, Homo sapiens
aggctggaacttgccctgtctcctcgcagatgaggagccaaggcaaagagggaccactgtgctcatggacccatcg

SEQ ID NO: 72946 - DNA, 133 bp, Homo sapiens
ttccaaagagatacagggcagaggaaaatgcaagaagactgatggagcaggcttgcaatattaaagacttatggagcaaggatgactgacacaaacacaaaaatcattctgcctgttgaatgaatcataaaat

SEQ ID NO: 72947 - DNA, 80 bp, Homo sapiens
aattagaacttattatggatgaaatgaaacagattctaactccaatggcccaaaagtattgcacatctattacaaatttc

SEQ ID NO: 72948 - DNA, 90 bp, Homo sapiens
cccaccgcacgttcagaagtcggatatgaagatcaatgatgcagactgatggttttgatgaagctgggcatttataactagattcattaa

SEQ ID NO: 72949 - DNA, 98 bp, Homo sapiens
gttgggctccgggaagccgttcgggctggggctgtcggccgcggggcggaggcactcgcgcggggggtctccctgacttggtcccagaccccaactat

SEQ ID NO: 72950 - DNA, 74 bp, Homo sapiens
gactttcctccaagagcacattgcctggtaagatgctttacccagaaatacccaccagtaaagtttttatcaga

SEQ ID NO: 72951 - DNA, 100 bp, Homo sapiens
gaaaaaatggttgacctcacccaggacagagcgggatgccaccagcttgtccaaagggaagttccaggagctcctggtgggcatcgttgtggagaatgac

SEQ ID NO: 72952 - DNA, 100 bp, Homo sapiens
gaggcaggatgaagatgactgtggatttcgaggagtgtctgaaggactcgccccgcttcagttgcatccaagaattgatgcccggagagctgatgaaaac

SEQ ID NO: 72953 - DNA, 98 bp, Homo sapiens
tcagccaccgctccctcttcccacggtccagagggggcaaacctctttatttaccaccttccacaggaatttggagaccaggacattctgcagatgtt

SEQ ID NO: 72954 - DNA, 100 bp, Homo sapiens
actccggacacttgttttccagtgtgatcttacccttaaagctgtgctgtgacatgtatatggatgaatgaacagtgtagcagtatcatcacaggagggg

SEQ ID NO: 72955 - DNA, 95 bp, Homo sapiens
agacctggagaccgttacgacggcatgatgcaaccttaaaatcagtgacaagaaacattccaaacaagcaacagtcttcaagaaattaaactggc

SEQ ID NO: 72956 - DNA, 100 bp, Homo sapiens
ggctctgtggacgtagacgagcaccgccggccggagaagccagctgaagatgagtggggtaaaaccccagacgccatgaaagctgccatggccctggaga

SEQ ID NO: 72957 - DNA, 100 bp, Homo sapiens
ccgcaggagactctcaacgggggaatcaccgacatgctcacagatctcttccgttccctgctggcagttcatcagctggatcagccacatggtggcctta

SEQ ID NO: 72958 - DNA, 90 bp, Homo sapiens
atgtgtatggaccttcagttccaaagatgatgaatctgaaaggaaatccggaattatcacagagtgcagcctgatcttcctcttctccct

SEQ ID NO: 72959 - DNA, 123 bp, Homo sapiens
gccgcagctgcgggtccgggattcccagccatggcagattcctccgggcagcagggtactccaaagattcaggtttactcacgtcatccagcagagaatggaaagtcaaatttcctgaattgc

SEQ ID NO: 72960 - DNA, 100 bp, Homo sapiens
aggggaagctgacagagatacctacagacggagtgctgtgccacgtggagccgccaccaaaatgcagattttcgtgaaaacccttacggggaagaccatc

SEQ ID NO: 72961 - DNA, 85 bp, Homo sapiens
ggcgaccaagatcaggaacctgccctgggattgtcaatgaggcagatcagattccgatttgacgggcaaccaatcaatgaaacag

SEQ ID NO: 72962 - DNA, 50 bp, Homo sapiens
atgcctggcagccccgctctctgcaaggcaaggccagaggaactgactcc

SEQ ID NO: 72963 - DNA, 76 bp, Homo sapiens
gatacttcctttccatgaaagcagcaaggattcttgtaaaaatgtcgtcattgaattttgagaagcattctgaaaa

SEQ ID NO: 72964 - DNA, 75 bp, Homo sapiens
cttcaaacgctcttcaggcgcagtgtgcgttcagctgtgtcagctaatgttcaatcaaatgcctggtaggaattg

SEQ ID NO: 72965 - DNA, 100 bp, Homo sapiens
tgggtatattgtgtgatgctgaggtttggggctctgaacaagaaggaacacagagggtgcgacagcccagaccctgatacttcatatgtgctaactccac

SEQ ID NO: 72966 - DNA, 115 bp, Homo sapiens
attgttcagttgcaaaaagaaactggagccaccatcaagctgtctaagtccaaagatttttacccaggaagatgatccctatgatcttgaagatgtttctgcacagaaatgaggg

SEQ ID NO: 72967 - DNA, 50 bp, Homo sapiens
cttcaacagaatgtggcaaccagaacaactctgctcatggtgattacatg

SEQ ID NO: 72968 - DNA, 74 bp, Homo sapiens
gcgggcgagcggtggtttggacgccggcggagacgcgggcgagggctggtgaattaccagatctctgtcaaggg

SEQ ID NO: 72969 - DNA, 95 bp, Homo sapiens
gacagttcacataagaagttcttcgatgtatctaaacttggcaccaagtatgactcattctgatgaaggaaagagcgtccctgtgcagctgcgtg

SEQ ID NO: 72970 - DNA, 82 bp, Homo sapiens
ctggaccaagatcgagcccagcgtcaacttcctcaagtcgcccaaaggctcagccggagatgggccctgacgtgctggtgca

SEQ ID NO: 72971 - DNA, 101 bp, Homo sapiens
cggaggcgtcgcgggagcctttggggcaccacagagatgcggttgcagagtgggcaggatcttaagacccgataggtgcagaacccatctggacacggaga

SEQ ID NO: 72972 - DNA, 75 bp, Homo sapiens
cagaccttcatcattgacttattattgcactgtccaagcaaaatgtgaaagatgttgcagaagtgttccagaagt

SEQ ID NO: 72973 - DNA, 97 bp, Homo sapiens
cactgcttctccgtgggcagcattggcgaccagcgcttcacggtgtcatggagaaactccagctgggcccagagattctgcagcgggaaaatccaag

SEQ ID NO: 72974 - DNA, 97 bp, Homo sapiens
agggagccattatatgaaggaactgcaggtggcagtcacagaccagacaagaaagctgaagcgtcatccagacaagactgaaccataccttcagcca

SEQ ID NO: 72975 - DNA, 75 bp, Homo sapiens
tcctgatttccattcagaaaaccgtgtgggcccatcgctggatggatctgtcagaacacggctttgggctggccc

SEQ ID NO: 72976 - DNA, 51 bp, Homo sapiens
tcccaggtcaagagcctctgcgagaaggtatggtttaggaatgatttatta

SEQ ID NO: 72977 - DNA, 99 bp, Homo sapiens
tctcctgtcaaggctgaggcggcaaaggaatcgtctaagtctcagggtgtccgcaatgttgccagtgtctgtctgcagattggctacccaactgttgca

SEQ ID NO: 72978 - DNA, 50 bp, Homo sapiens
cctggcagactgtttaatttcagtggttataaattggcactgggattttg

SEQ ID NO: 72979 - DNA, 75 bp, Homo sapiens
aaccagctcgggggccaactctgaggagtccactgcagcaggattacttccttaggatagattgccagaagtgga

SEQ ID NO: 72980 - DNA, 100 bp, Homo sapiens
gttacagtttcgactcctctctgcaagtgaataggcccagaaaggataaggatgctaaattccgtctgattctaatagagagccggattcaccgtttggc

SEQ ID NO: 72981 - DNA, 100 bp, Homo sapiens
cagaagaaggtgaagatcgagctggataagagcaactcatcccaagaacagtatccataaggaagatggaaaagggggacagaataaatgttaccctaag

SEQ ID NO: 72982 - DNA, 99 bp, Homo sapiens
tgccgtgccacctgctgcacccacgaatctgcccacccctcctgtaacccagcctgtttcacttcttgactcctcagacccctgcacaattgagagaaa

SEQ ID NO: 72983 - DNA, 83 bp, Homo sapiens
gtacagtctctgcacctcgcgccccagcagtccttcagtgaatctacagacctattttctcaggagctcagcctggccttact

SEQ ID NO: 72984 - DNA, 100 bp, Homo sapiens
gagctttattaccagacatgatctttcagaatgtttggaatggttttggaaaaaattattattcctgaaattcagaaggtatctggaaatgtagagaaaa

SEQ ID NO: 72985 - DNA, 83 bp, Homo sapiens
gttgagcctgtgggacacttcggtgcaagagaagcctgagccagtgccgctggagagccgctcctgcgtcctcatccgccgcg

SEQ ID NO: 72986 - DNA, 101 bp, Homo sapiens
ttccatcaaaaagtgattaagcagagaatggagaagaaggttgattccagggccacccagtgctcctgcagaagatcgttcaggaacacccgacagcattg

SEQ ID NO: 72987 - DNA, 90 bp, Homo sapiens
gcagatatgaccattaaactatgggattttcagggctttgaatgcatcagaaccatgcacggtcccgatcacacagcaagaatccaaaaa

SEQ ID NO: 72988 - DNA, 73 bp, Homo sapiens
aaagggtggtggtcacgtggcccagatttatgcatcccagccatcactcttccacctgctccttagagaaggg

SEQ ID NO: 72989 - DNA, 100 bp, Homo sapiens
gctcgggccacggagaggagcagcccccggagacagcggcacagaggtgcttctgccaggatcccaagtgatggtggtttcctcggagggcgagctgagt

SEQ ID NO: 72990 - DNA, 132 bp, Homo sapiens
cggcgctagcttcggagtctcccgcgcgcacctcagccgcctcctagcggcgcggcgctcgctcctacggtactccaaagattcaggtttactcacgtcatccagcagagaatggaaagtcaaatttcctga

SEQ ID NO: 72991 - DNA, 100 bp, Homo sapiens
gaatcggccggttttgagaggggaagatggggacaaagccgctccacctcccatgtcggcacaggttttcactttgtcacccagtctggagtgcagtggc

SEQ ID NO: 72992 - DNA, 100 bp, Homo sapiens
tgccaaacccaagttggttggagatgtggattttgaagcaacaggtcaccttcaagccagtgtcctgacccagtgccttaaggttttggtgaaattagcc

SEQ ID NO: 72993 - DNA, 100 bp, Homo sapiens
gacaggaggcagtagccaaacacccagtaatctatgccagcaattatgacaatgttagcagaccatgcagctcgtcagctgcttgatttcagccaaaaac

SEQ ID NO: 72994 - DNA, 82 bp, Homo sapiens
gctgaagcgactgagtccgcgatggagtgtggccagactccactgatgatagctgccgaacaaggcaatctggaaatagtga

SEQ ID NO: 72995 - DNA, 75 bp, Homo sapiens
cagctggcagaagaagcaacacgcaaacgagagctgaggctaatgaaaaacaggggcactatgaacgaagaggag

SEQ ID NO: 72996 - DNA, 98 bp, Homo sapiens
agaccgtgaccgagagcgtgaccgagagcgcgaatatcgtcatcgttagaaggccgaccagtgcacgggtctccagggcttcttggttttccacagct

SEQ ID NO: 72997 - DNA, 88 bp, Homo sapiens
ggagaagtgtccggggtagccccgttacagatatgatgcttcctggtgtgtttagtggttggtgccattccaattttctgtgctgaaa

SEQ ID NO: 72998 - DNA, 82 bp, Homo sapiens
gagcccgccgtctacccgtggccgctgccggtctacagttctctgtggcccatgaccttcggcctggcctgctgcgccgtgg

SEQ ID NO: 72999 - DNA, 90 bp, Homo sapiens
gggaggagcaggccacacaggcacaggccggtgagggacctgcccagacctggagatgaggagcgggaaggcctcctgcaccctggagac

SEQ ID NO: 73000 - DNA, 107 bp, Homo sapiens
cctgttttgcaaaaaccatcagtgtttgggaatgattctgatgatgatgatgagcggaaaggaagcctcctttatttaatatgaatgcaatgagtgccttatatcac

SEQ ID NO: 73001 - DNA, 100 bp, Homo sapiens
ttaggaatcccctggcccccgctgtgcaggaggaagccctcctatgacactgaaacagatcctagtgagggattgatgaatgttctaaagaaaatttatg

SEQ ID NO: 73002 - DNA, 100 bp, Homo sapiens
atcagccccagatttgacgtgcaactcaaagacctggaaaaatggcagaataatctgcttccatcccgccagtttggagtttatatcccctgtatctatg

SEQ ID NO: 73003 - DNA, 89 bp, Homo sapiens
tggtaagcccacgaacacaaatgcaggagggagaggtgccaagaagcagcggtacacgcggcttacagggagaacacagttggcctcca

SEQ ID NO: 73004 - DNA, 90 bp, Homo sapiens
accagggaccttgtggatgcagcgagtgcagtgacagaggcagtgaaagctcagaaaaggatgcgcctccacttagcaaggctgggcagg

SEQ ID NO: 73005 - DNA, 88 bp, Homo sapiens
ctggatatgcccgttcagtttacagttcattttttgcttggtttggaaaaatttcattagagactgttcgccatggatttccctatca

SEQ ID NO: 73006 - DNA, 90 bp, Homo sapiens
gagagcagttgaagaagtgaagaaattattggtacctgcacctgcctagggtagttaaaagacgagtgaatgctctcaaaaacctgcaag

SEQ ID NO: 73007 - DNA, 83 bp, Homo sapiens
gcggcgctggagagggggcgctgagctgttggggtgagaagccctaccactgcaactgggacggctgcggctggaagtttgcg

SEQ ID NO: 73008 - DNA, 101 bp, Homo sapiens
ctgggaacagacaaagaaacactctccttctgccacatttgttttgagctaaatattgagggctgtaccagtgcaggtcctcactttaatcctctatccag

SEQ ID NO: 73009 - DNA, 95 bp, Homo sapiens
ctggccgcctggacggctcgggcgctggaggtggaatatgtgatcaagtgtgacatgtcagctctgcagaagattctgtatcgccatatgcaagc

SEQ ID NO: 73010 - DNA, 75 bp, Homo sapiens
gtgaccgagagcgtgaccgagagcgcgaatatcgtcatcgttagaaggccgcagcctgggattccccagggaccc

SEQ ID NO: 73011 - DNA, 93 bp, Homo sapiens
cccgcttcgctgagggccttgagaaacttaaggagtgtgtgttgcgtgacgaagatgctcatgaagcagcaggaccggctggaggagcgagag

SEQ ID NO: 73012 - DNA, 100 bp, Homo sapiens
tttgcaacttatatcgccagtccagcagctaaggatattttgtgcaggtttggctccagcagctgctgttgccaccaccactagttcaagcaccatgcag

SEQ ID NO: 73013 - DNA, 100 bp, Homo sapiens
tgtctttaccaaacttattaataggaataccactattccaaccaagaagagccaggtaattttaaccaatcagatgacaacaaagattgatagaaatcag

SEQ ID NO: 73014 - DNA, 50 bp, Homo sapiens
attacctggagatgatgacatggataggatgtgaaatggtctgacttcgg

SEQ ID NO: 73015 - DNA, 74 bp, Homo sapiens
gggaccagcagttactgggaagctactgtgtgaagacattcacaggacacagagaatgggtacgtatggtacgg

SEQ ID NO: 73016 - DNA, 98 bp, Homo sapiens
aagactctgagcccccgaactctgcaaagcctccagaggacataccacctccaggatcaggatgcagagggtgatgaattagaagacaatggaaagaa

SEQ ID NO: 73017 - DNA, 75 bp, Homo sapiens
catcagtgcccttgtggcgaatggggctcacgtcgagcaaatgttctctagttacccaactaccactgtacttcc

SEQ ID NO: 73018 - DNA, 122 bp, Homo sapiens
gtcttcggctttgttcagaccctgacaggttgtgaggaccaagcacgcctcttcaaagacgagggtctcactctgctcactctgtctcccaagctggagtgcagtggtacagtcacggctca

SEQ ID NO: 73019 - DNA, 51 bp, Homo sapiens
cctcccaagtatctgggattacaggattatggctgctgttcctcaaaataa

SEQ ID NO: 73020 - DNA, 100 bp, Homo sapiens
cagcgccccagcatttgccatcttcaagtttgttcaggcgagtgtctccctcaaacgcctgaggatctttctctcccatgaggagctggaacctgacagc

SEQ ID NO: 73021 - DNA, 100 bp, Homo sapiens
ggccctgaggctgcaccaagtggcgaaggagccggctccaaggtcaatgagtggtcattgaagataagaaaggaaatgagagttgttgacaggcaaataa

SEQ ID NO: 73022 - DNA, 100 bp, Homo sapiens
tagaggggatgcagatatgtatgatcttcccaagaaagaggacgctttactctaccagagcaagggtctataagaaggagaaagctcgagtcatcactga

SEQ ID NO: 73023 - DNA, 100 bp, Homo sapiens
ccgggagcacgtcatcgccatcgaaggttcatctgcagaagccagcggacgcctctgttcaacttgtgggttacctggctcatgagaccttgccggcgag

SEQ ID NO: 73024 - DNA, 100 bp, Homo sapiens
gcatatcctgggtagcctctaggaagcgctagacacatattgcagtgcttttgtccacaaaggctgccgagaaagtctagcctcctgtgcaaaggtcaaa

SEQ ID NO: 73025 - DNA, 132 bp, Homo sapiens
cacacttccaagaatccccacctgtgtgcttctagagcagacagatggggtcagagtgatctttaaagagtcttgcagaagagactacacagcaggcccgagaccatcctgagaggcctgtgtgcaaggctg

SEQ ID NO: 73026 - DNA, 74 bp, Homo sapiens
ctctttccatcagtctcaacatagaaggccagatgcagatggctggagatgggtgcagatcccagggatctcga

SEQ ID NO: 73027 - DNA, 100 bp, Homo sapiens
gttttaaaaagggaccttaaacgcattgccaaagcttctggaggaaatcatcagatatgccgactggtcaaccagcagcatagtttacattgccagtggg

SEQ ID NO: 73028 - DNA, 100 bp, Homo sapiens
gggagaaaggcgggcccgggaacagatgccactgccgccaggagccctgtaacatcagccatcgtcaaccccaccgtgttcttcaacatcaccgttgacg

SEQ ID NO: 73029 - DNA, 75 bp, Homo sapiens
ggaggcctgactctgggagcacgcagattttttatcaagcagaaatgcatcgaacaacgagaatcaagatcactg

SEQ ID NO: 73030 - DNA, 75 bp, Homo sapiens
ggcacaccacagctcttgttgaagacgtatgccagggctacaagatttgttcctgatcttgaagatattgtaaat

SEQ ID NO: 73031 - DNA, 82 bp, Homo sapiens
ctagtttgactctgacagtcctcccactaagccgccaccggcacggccaggccagcatggtggaccacttacttccagtgga

SEQ ID NO: 73032 - DNA, 82 bp, Homo sapiens
ctatcgtggtcgtaggaggctgtcctgtctgcagatggagtcatcagaacccactgtgaggaagtgacttctccttgaggtc

SEQ ID NO: 73033 - DNA, 74 bp, Homo sapiens
gcgcagaaccggccgcgcccgaaaaagcttgtggtgaaggggggcaaaaaaaagaagcaagttctgaagttcac

SEQ ID NO: 73034 - DNA, 95 bp, Homo sapiens
tgattccccccgcatcgcctcccgtggaagcccaggcccgcttcgcaggatttttgtccctgagtcatggaagacagaagagctgaaaagtcatg

SEQ ID NO: 73035 - DNA, 90 bp, Homo sapiens
gccgaggagaaaacagcaggcacccaagcgggcggcaggtgtggtcactcacctgtctaccactcccgtgaaatggcagctcgtgccttg

SEQ ID NO: 73036 - DNA, 74 bp, Homo sapiens
gtgaagagctagagcgaatattgggggtccagattttatggaaatgagctcaagaaagaaaagcaagtcaacca

SEQ ID NO: 73037 - DNA, 50 bp, Homo sapiens
cggctcccagccacaccaagttcagggtctcactgtgttgcccaggctgg

SEQ ID NO: 73038 - DNA, 98 bp, Homo sapiens
cgcgatatttgggagcggccccgagacgcgcctggcgcgggtgtgctatcgagtagtgatgcagctttgtggactttggggtcatcctgttttagcag

SEQ ID NO: 73039 - DNA, 100 bp, Homo sapiens
tcggaacgctcctctgcattgccattgttctgaggtgtcaccaccccaataaacttagacaatgataaataacagagtcctattcacataagggtgctta

SEQ ID NO: 73040 - DNA, 51 bp, Homo sapiens
agatgatgataaacggcgtgaattggatggaggtttgcttctgaataaccc

SEQ ID NO: 73041 - DNA, 75 bp, Homo sapiens
ggaagatttaacgaatggggttgtgatggcccaggttcttcaaaagatctctaagcgaaagacatgaggcctcag

SEQ ID NO: 73042 - DNA, 83 bp, Homo sapiens
cggccctgggaccaaagtggatatcaaacgtcagcccaaggccaaccccactgtcactctgttcccgccctcctctgaggagc

SEQ ID NO: 73043 - DNA, 96 bp, Homo sapiens
cctccgagcgcccccggatcatggccaccgagctgctcagatggaagataaaaagccctttatcctgtcttccatgaggcttcctctcctggacac

SEQ ID NO: 73044 - DNA, 99 bp, Homo sapiens
tcttcattctgtcctccaagggggacccgctcatctacaaagactaggccttcgaggaagaggcccacctccttcatgggcctctgagcctgaacgccc

SEQ ID NO: 73045 - DNA, 100 bp, Homo sapiens
gcaggccgtgaatgagaaaaatggagaaaacaagacaagcccattcattcatttgagcatagcaaaaagatgtagcacttaagcctcaggaacgtgtgga

SEQ ID NO: 73046 - DNA, 75 bp, Homo sapiens
ggaatatttcaagacaccgaaagtgccggtggtggtgtgcacattgagccccggtatagacagttcccccagctg

SEQ ID NO: 73047 - DNA, 100 bp, Homo sapiens
actccctgccgaagcccagcccctgatgtcccagcagtattcacaggcctccactgggctctcagtaggtgggatttgtcagcagttctcattgcctgag

SEQ ID NO: 73048 - DNA, 100 bp, Homo sapiens
gaatggacagagccatccctgacacccggcatgaccacccacttcgatgtgttgttcttgtcgcacttagggacatcaatcaaggagaagagcttttttc

SEQ ID NO: 73049 - DNA, 83 bp, Homo sapiens
cagatggaaacacatgaaagacttcctcaaggactacagtatgcacttaatgtccctatggctgtatgggcgaaaaagatgac

SEQ ID NO: 73050 - DNA, 100 bp, Homo sapiens
atcagcgccgtctccaccgagccgggcaaggagtactgcgtcttgccttacacctgaaatagtcagtacaccttcctctccagaagaggaggataaatca

SEQ ID NO: 73051 - DNA, 100 bp, Homo sapiens
cccggccgggagccgcgcgaggcggtttgtctacagattttgagcgttcgaagttgacccctgactaagtatactttgctgctccctcagcctttgaaaa

SEQ ID NO: 73052 - DNA, 90 bp, Homo sapiens
gctgctggtggggctcacggcgcctgccttggcgctggccggctacatcgaggtgaagctcgtgtgtggagtgccacggtacaatcagac

SEQ ID NO: 73053 - DNA, 97 bp, Homo sapiens
cgctactctctctttctggcctggaggctatccagcatttttctgtgaccatgaaagagagaaataaagaatgatccatgatttctaaacacctttt

SEQ ID NO: 73054 - DNA, 76 bp, Homo sapiens
ttgtggttttgatttgcatttctctgatggccagtgatgttgaaagtttgatgattacccccttcttgcctgttgt

SEQ ID NO: 73055 - DNA, 50 bp, Homo sapiens
cgcctgctgctgtcgtcgggagccaaaacctattgatgtacaagtcatta

SEQ ID NO: 73056 - DNA, 100 bp, Homo sapiens
ccagagtattgccgcggtggaaatggagggcaagtgtccagagaatggctgggatgaaagtacacttgaactctttttacatgaacttgcaatcatggac

SEQ ID NO: 73057 - DNA, 100 bp, Homo sapiens
ctgctttatggacttgcatcaggagtagcaaaaacgccacctcctggatatatcagtgaagatggagaaacaagtgaccaacagttgaatcaaagtatgg

SEQ ID NO: 73058 - DNA, 98 bp, Homo sapiens
cttgtggatgcctctcatcgggagaatgctcttcaggatagtatcttggccagggaactcaaacagcagatgcagttgaatctggtatcaagtgtcac

SEQ ID NO: 73059 - DNA, 100 bp, Homo sapiens
gaaatcttggagaagggtctaaaggaacaagcacatcatgattgacttggggactggcaacaacaacaagattaactgggccatggaggacaagcaggag

SEQ ID NO: 73060 - DNA, 111 bp, Homo sapiens
cgcggccgctcgcgcctctcgatgggcagctcgcacttgctcaacaagggcctgccgcttggtgccctacgagacgctgaacaaacgctttcgcgccgctcagaagaacat

SEQ ID NO: 73061 - DNA, 80 bp, Homo sapiens
cctaacagacttcctggactgtgtgatcattagcccgcagggccccggaccccggcttccaggagcgcttcttccagcag

SEQ ID NO: 73062 - DNA, 74 bp, Homo sapiens
ctgagcgagaactatttgcctggggccgtggagacagcgggaaccctactctggaaactgtcagtcccagggca

SEQ ID NO: 73063 - DNA, 75 bp, Homo sapiens
gcatgtccccctcaatatcctgaatcccccatcccagaagacaaagaccgcagatttgtcttctcttactttcta

SEQ ID NO: 73064 - DNA, 83 bp, Homo sapiens
gtgaagatggcgtctaccagccgggggatatgagactttctactcggaatatcctgagtgttgcgtggatgtaaaacccattt

SEQ ID NO: 73065 - DNA, 74 bp, Homo sapiens
atgggatctttccggatcaatccagatggcagccagtcagtggtggaggatgttgttttccagtggctcacgac

SEQ ID NO: 73066 - DNA, 100 bp, Homo sapiens
atttaggcagctatagcttcttcagtttcccagaactgcaggtgctggatttatccagggaaatcctcattgacgattcaatttgttgaaggccaatttg

SEQ ID NO: 73067 - DNA, 75 bp, Homo sapiens
gagcagggcattgagcggcgttttctgaaagctccacttggatcaggtggctactctttagaaattggaagcctg

SEQ ID NO: 73068 - DNA, 75 bp, Homo sapiens
gcctgtcactgggggcaccattaacatgatggagtacctgttgcagggtgacaaccaaagccaagcaactgaagg

SEQ ID NO: 73069 - DNA, 100 bp, Homo sapiens
ctggaatgtcattacaccttaactccatatattcatccacatccaaaagattgggttggtatattcaaggtaattattcgaggtggaggacatattttac

SEQ ID NO: 73070 - DNA, 105 bp, Homo sapiens
gggaaatcgtgcacttgcaggccgggcagtgcggcaaccaaatcggcgccaaggcccgaatggaagtggatgcagatggaaatggtgctaagatatttgcctatg

SEQ ID NO: 73071 - DNA, 83 bp, Homo sapiens
ccagccccgagcgggacagcgcggcggggagcgacgacaacatgaaccgtgaagaccggaatgtgctgcgtatgaaagaacgg

SEQ ID NO: 73072 - DNA, 100 bp, Homo sapiens
gcctagtaaattacagaagaacaaacagagactgcgaaacgatcctctcaatcaaaataagaattactggaagaatttagtccagttgttgagagacttg

SEQ ID NO: 73073 - DNA, 100 bp, Homo sapiens
gatctgcacagcttccaaagacaagaaagtgagagtcattgatcccaggaaacaagagattgttgctgatgattacatggaagccctggccaggctccac

SEQ ID NO: 73074 - DNA, 75 bp, Homo sapiens
actccttcggcagtccacccaccgccgccgcctcccagcaaatctccaaaatgatggagctggccagagagaaac

SEQ ID NO: 73075 - DNA, 100 bp, Homo sapiens
cctgctggacggcgtggtggagaagctcagcgtcctcaagaggaaggttgactatagtcaatggggccaatggagccaagtgtatggaaacccacaacag

SEQ ID NO: 73076 - DNA, 80 bp, Homo sapiens
tcggaaaatggttcccactgccgggcgagaataccctctaccatctgctttggtcagggtgccgctcgaggatttaaaag

SEQ ID NO: 73077 - DNA, 100 bp, Homo sapiens
cccgcgaggagactctcgggctttgagggatgctgagaacttgctggagtcacagccactgggatcctttctcatcagggtcagtcacagccatgtgggc

SEQ ID NO: 73078 - DNA, 75 bp, Homo sapiens
gagactttctccttcaagtacttggcagatcactctcttagcagaacactctgctccagccaaggtggtgagggc

SEQ ID NO: 73079 - DNA, 100 bp, Homo sapiens
cataaagagaaagctagtgaatgggaaaatggtagcggtgctgcaacctgtactggatgtttggggatagaaagatgaatgggacatgatttgtgtgctc

SEQ ID NO: 73080 - DNA, 100 bp, Homo sapiens
tggccattgagatcggggtgcgagccctgctcttcggagtcttcgtagcaaattggtcaggagatgttggaaaaccttagtcatgacagagaaaagatac

SEQ ID NO: 73081 - DNA, 74 bp, Homo sapiens
taggagctgatgctgcatcgtaataacatttgcagagcgctttcacaggtcctcgggcgggaagtgtacacctc

SEQ ID NO: 73082 - DNA, 75 bp, Homo sapiens
caggggacccctgacccaggttacggaccggaagtgctccagaactcaaggttatggaggttttgatgactatgg

SEQ ID NO: 73083 - DNA, 50 bp, Homo sapiens
cagcattctttctttccttaggaaaaactctgggagggtctcacggaact

SEQ ID NO: 73084 - DNA, 100 bp, Homo sapiens
caggtcttgtagcagcgcctcctcgagacaagaggagcagcagcggcaccgcccctcaccctggagggtcctgtacaatctcatcatgggactcctgccc

SEQ ID NO: 73085 - DNA, 111 bp, Homo sapiens
tgctcctccaggcgctgcccagccccttgtcagccagggctgaacccccgcagtgtacaagtccccagagtatgagtcccttggttttgagcttactgtggagagattagt

SEQ ID NO: 73086 - DNA, 75 bp, Homo sapiens
ttgtggcaccgtgagattctccaggctttgatgaactaggtggacttctcaaaccaacagtggcctctcagaacc

SEQ ID NO: 73087 - DNA, 98 bp, Homo sapiens
atctgggtgtatatcaaacggcaagatgtccagtaatgtcccggcggatatggtcatcactccccaaaatggacgttaccaaatagattccgatgttc

SEQ ID NO: 73088 - DNA, 100 bp, Homo sapiens
tcgagagcgagagtcacgtcccggcgctagcccagcccgacccagtgcctgcccagcccgcggacttccaggccgaggtggagtcggacaccaggatcca

SEQ ID NO: 73089 - DNA, 100 bp, Homo sapiens
ggggaccaggaggttggacacagaccattgcaatggaaatggaataaacatcatcctgaccttcatctctgggcttgttccgggaagcgaaaagaccaag

SEQ ID NO: 73090 - DNA, 75 bp, Homo sapiens
ccccatcgcagaggccatgctgacctacaagcagaagaggaggcatacacggaatacctgaggagcatccactat

SEQ ID NO: 73091 - DNA, 83 bp, Homo sapiens
cgggaggggcgaaggcgggcggcagaggcgatcagcaaacggggattcagcgtccgatcctttggaacagggactcacgtgaa

SEQ ID NO: 73092 - DNA, 50 bp, Homo sapiens
cccggcaccacccatcttgagtatctgggcagccgatgaagtgcaacctt

SEQ ID NO: 73093 - DNA, 100 bp, Homo sapiens
gaatgatccttactaaccacgaccatcaaatccgtgtcggagtccttacaggaatggcggcgctagatagtaaggcatcagggaagatgggaatgcgagc

SEQ ID NO: 73094 - DNA, 76 bp, Homo sapiens
ctcgtggtctaaagcttcggcacaagggcccaactggaattccacttacggggtatcgggtgctgcttcggtatga

SEQ ID NO: 73095 - DNA, 83 bp, Homo sapiens
gtcagtttacgcctctgagatcacacagctgcctgggggccgtgtgatgcccaaggcctatcatggtcaccatcaagcactgg

SEQ ID NO: 73096 - DNA, 100 bp, Homo sapiens
ggtccccaacgcatcatgccagggagccaagcgtcctgcccggccgatcttttgccagaaatgagggcatactggcctgacgtaattcactcgtttccca

SEQ ID NO: 73097 - DNA, 82 bp, Homo sapiens
ggaaagtttgcagaagtggaaggagcagaacgtgagggtgtaacttacaaaaaggtcagcccaaggccaaccccactgtcac

SEQ ID NO: 73098 - DNA, 90 bp, Homo sapiens
caaaattgacccctacattaacattgatgcaggaacattctctccttatgagcatgtgcctgcaacttctcacccacactttcaacagag

SEQ ID NO: 73099 - DNA, 82 bp, Homo sapiens
tcgtcagcactgactttcagctatggaatcgttacagaatgtctgaaggggacagtgtgggagaatccgtccatgggaaacc

SEQ ID NO: 73100 - DNA, 50 bp, Homo sapiens
ggacctcaacccaggagttaaaaagaacactcgtgaaactgctcaggcca

SEQ ID NO: 73101 - DNA, 101 bp, Homo sapiens
ggagcttcttgagagaaaaaccaagaaaagacaactggaacaaaaaatcagttccaaactaggaaggtctactttgaggatgaggacagggcagaactata

SEQ ID NO: 73102 - DNA, 100 bp, Homo sapiens
gctacttctcgctctgcttcatcccactattattttggcacaacaggaagaccaagatcactccatggatgaaatgacagctgtggtgaaaattgaaaaa

SEQ ID NO: 73103 - DNA, 96 bp, Homo sapiens
aagcctcagcttggctttaaccgtgaccggaggcctgtgcacctggatcaggcagccttcaggactttgggatttacagccagttacttactcaga

SEQ ID NO: 73104 - DNA, 100 bp, Homo sapiens
gggggagagaataaaactccagcgagatccgggccgtgaacgaaagcagtgacggaggagcttgtaccaccggtaatagttaacctcttctgtgagaagt

SEQ ID NO: 73105 - DNA, 97 bp, Homo sapiens
gaggagcagcatggcatttcagtcactggtttgcagagtccagatactagagtaaaaggatggtttcttctggacaattatatacccacatttatct

SEQ ID NO: 73106 - DNA, 100 bp, Homo sapiens
aaactcaaaaaccatctggtgctgtggattgcaaccttgaatgaccaaccctgagaaaggaactgattttgtcttcaaatattggacaacatgatttgga

SEQ ID NO: 73107 - DNA, 101 bp, Homo sapiens
cctagactgatgcttattagtcatcaccgttattcctactaacgtcctgtgtcactgagattccagaggggtgactaccatattgatgtctgtatcaatga

SEQ ID NO: 73108 - DNA, 100 bp, Homo sapiens
cggagctgctccgtggccacgaggacgtcaccatggttgtggttcaccttgaaactattctaggagcctcagttcaacatgttaaactgaagaaaatgaa

SEQ ID NO: 73109 - DNA, 83 bp, Homo sapiens
cgtcgtggaagcaggactgcgccgcgtcttcctcaagttccagggtctccctccactgctgtagtaacccgggtccggggcct

SEQ ID NO: 73110 - DNA, 75 bp, Homo sapiens
aaagaagtctttacaccgccaatccacttcctgtggcaactacaggggaaaagacagagtctctaatacagcaat

SEQ ID NO: 73111 - DNA, 96 bp, Homo sapiens
aatgagaagaattatgaactcttgaaatgggcctttgggtccccgaggattagctgaagctacagagatgtgcactcaagagtgcttggttttggg

SEQ ID NO: 73112 - DNA, 75 bp, Homo sapiens
gcccccgaaagtgttaagcacatggtggagaggcaagcacggattccagggacaagaatccttcaagaaacagga

SEQ ID NO: 73113 - DNA, 89 bp, Homo sapiens
ggagattttgatgtggatgatgccaaagttttattagagtcacctaaggtcctgcgagtacaagggtcgacccccaaaggcaggggcag

SEQ ID NO: 73114 - DNA, 100 bp, Homo sapiens
tggagaatggcatgctggtgacggacagtgcagggaagcaactgcagagggccctgttggaggaagccagaaagcgaagactgctggaggactccgactc

SEQ ID NO: 73115 - DNA, 82 bp, Homo sapiens
gcaagaacagagagagaggtggacagatctgagagatactgaggaagctcttcgtgggcggtcttgactggagcacgaccca

SEQ ID NO: 73116 - DNA, 100 bp, Homo sapiens
tggagacatgagcaagaaaagcctctgggagcagaagggaggctccaagacctcatcaacaattaagttgcatttgctggtctggcctttgcgtccttct

SEQ ID NO: 73117 - DNA, 74 bp, Homo sapiens
gggaggcgacgctaagttgctgatcgtggcgagttgcatgctgagaatttgaaaaatgaagatgatgtagacac

SEQ ID NO: 73118 - DNA, 96 bp, Homo sapiens
agggacactcaaactaccagagcaacagccaactcagtttataaatccagaaacacctggctatgttggatttgcaaacctccccaatcaagttca

SEQ ID NO: 73119 - DNA, 100 bp, Homo sapiens
agctggcagcagcatctcagcccaagagaaggtggacagcgccatgtccctgatccaggcagccaagaacttgatgaatgctgtggtgcagacagtgaag

SEQ ID NO: 73120 - DNA, 90 bp, Homo sapiens
aaaggatgacatatttttggacctgaaacagaaattctggaacacctatatgactgtacaatttgttcaaggaatttttgtagaaaaata

SEQ ID NO: 73121 - DNA, 75 bp, Homo sapiens
tcactttagccactgctactacaggtcacggtctagatcacattctcgatccagaggaaggcgatactctcgctc

SEQ ID NO: 73122 - DNA, 100 bp, Homo sapiens
acagatgaatcaaattgttggtcttggcatttcaacacagagagcaacttttattacgtggaacaaacatttgggcctggacctggtgcctcggaaggac

SEQ ID NO: 73123 - DNA, 90 bp, Homo sapiens
aagaaactaataataataattccagcttctacacaggacaagcactttctcagaagcccgtggccctgctgacgagagacagcccacccc

SEQ ID NO: 73124 - DNA, 90 bp, Homo sapiens
agttgatctttggagccactgattatacctctagtataggttatcaacgaaacttctcagcatcacgatgaccttgaataaaaattgcac

SEQ ID NO: 73125 - DNA, 74 bp, Homo sapiens
gtgcttccaggcggccgtgcagctggcgctgcgggcaggacagactgatgggaagaagagttactataagaagg

SEQ ID NO: 73126 - DNA, 83 bp, Homo sapiens
tgctaacagaactggaccttttcgatgagttttgatcatcctgagaaaaatgggccttggcctgcagacccaataaaccttcc

SEQ ID NO: 73127 - DNA, 87 bp, Homo sapiens
agtacctgctggagaagggagactacaaggacagcagcgactttggggcccgtcaccctcaggctttttctcctccgtgacagccag

SEQ ID NO: 73128 - DNA, 100 bp, Homo sapiens
tccagaaaagagtaccctgtgcttatgacaagactgccttggcattagaggactcagcccaggagagtgttattactcgagatattcatcgtacatttcc

SEQ ID NO: 73129 - DNA, 75 bp, Homo sapiens
cccacacctccggaccgagggacgcggacctggcgcactgtcatgcctacctggtagaaatgagccagctcctgc

SEQ ID NO: 73130 - DNA, 98 bp, Homo sapiens
tgaacattggtctaaagtctttccaaaaggtcaaggttcacaaggcatctccttggaaacaatgccatctttgaatgtgagagataaacctagtttca

SEQ ID NO: 73131 - DNA, 51 bp, Homo sapiens
agtatttgaggagaaagcatttggttgatcttgcaggaagtgaaaacattg

SEQ ID NO: 73132 - DNA, 76 bp, Homo sapiens
gattcctggctccctagaccacaggagtgggaatagctttgcgaaaaatgggcgcaatggccaagccagattgtat

SEQ ID NO: 73133 - DNA, 83 bp, Homo sapiens
gtcgtggcagagaaaaccagctgagacagggcgccacttactagactgcctctgtcaccgggtccctccacccttgtctcctg

SEQ ID NO: 73134 - DNA, 83 bp, Homo sapiens
cgagctggcgggtcccgcgggccaggccgtggagcatttgacattgtgcagcaaagaaatggttatggagaagcccagtccgc

SEQ ID NO: 73135 - DNA, 100 bp, Homo sapiens
atccagaagatcacacagtgttagtgaagatagtccaagtcctaagagacagcgcctctctcattcagtctttgattatacatcagcatcaccagctccc

SEQ ID NO: 73136 - DNA, 100 bp, Homo sapiens
tgaaaaagctgtggaaggctctggataaggaccagtacctgcccaggaaactggccatggtttcttgccacatgctgtccgagctggaggaggttatcca

SEQ ID NO: 73137 - DNA, 100 bp, Homo sapiens
aatgaagcagccgatcatggcggatggcccccggtgcaagaggcgcaaacaagccaatcccaggaggaaaaacggtccacgctgcttttatgagctgtaa

SEQ ID NO: 73138 - DNA, 90 bp, Homo sapiens
acgccatcctgccgcagctggcgcagcccacgctcatgatcgacttcctcacccgcgcctgcgacctcgcagggagagcaacaagccccg

SEQ ID NO: 73139 - DNA, 75 bp, Homo sapiens
cgtggctgcgtcaccgccgcccccccagacaagatggacaccgcggaggaagaggccacaagaggaagctgaatg

SEQ ID NO: 73140 - DNA, 78 bp, Homo sapiens
tggagttcagcccactactctgaaccaggtgtaattacttcaagcctccaggatggcaatccagttccgttcgctctt

SEQ ID NO: 73141 - DNA, 75 bp, Homo sapiens
gaaaacccagagaaaagtgaaacaattcaggacactaagctaaaccagccccagaaatatttgaaaatgaagtca

SEQ ID NO: 73142 - DNA, 50 bp, Homo sapiens
ctcattcaaggttacccagttgataccattgttcttatcgcttcaatagc

SEQ ID NO: 73143 - DNA, 90 bp, Homo sapiens
cattcaggaattctcctgccaccgcgtggtgcttgccgcagccagcaactatttcagttggttaccacagagaagcgcttcctcaaagac

SEQ ID NO: 73144 - DNA, 109 bp, Homo sapiens
tgcgcctcgaggtgcgcgccggcccggactcggcgggcatcgccctctacagccacaatgcagatcttcgtgaagactctgactggtaagaccatcaccctcgaggttg

SEQ ID NO: 73145 - DNA, 100 bp, Homo sapiens
ccagaatcaggtgtctgaaaaacaggagttcagagcactttcactaccttttatgaggtagattgtgatgtcatagatgggggcagggctagtcaacttt

SEQ ID NO: 73146 - DNA, 101 bp, Homo sapiens
gcagtctgtggtgtgtttgctgttcccaggctgtccggagtacacatggcttagaagttccattaagccataagggaaaactgatggtgacagaggaatat

SEQ ID NO: 73147 - DNA, 75 bp, Homo sapiens
ttggttacctatgtacctgttaccactttcaaaaagtgttgcggagataggaacatgggagagaaacaatctggg

SEQ ID NO: 73148 - DNA, 83 bp, Homo sapiens
tcccgccggccgtctccttaacaccgaacaccatagcctgggctggaagctcttctacgtcacaggctgcctgtttgtggctg

SEQ ID NO: 73149 - DNA, 74 bp, Homo sapiens
gctgtgctcgcgctactctctctttctggcctggaggctatccagcgtgattgcccacagtgagtatcaaaagt

SEQ ID NO: 73150 - DNA, 75 bp, Homo sapiens
gaggaggtcgctgagagctgggaagaggcggcagacagcgggctgaagaaatcaggggagaaacccctgcttggt

SEQ ID NO: 73151 - DNA, 100 bp, Homo sapiens
cggactcactgccctgcaccaggcatcgttggcttcacagtatgactgatgatcctccaacaacaaaaccacttactgctcgtaaattcatttggacgaa

SEQ ID NO: 73152 - DNA, 89 bp, Homo sapiens
agggaatgatattcagtggtgtttttctcaggtgaaaggagcagtagatgatgatgtagcagaagaaatggtggagtcaatgaagaaag

SEQ ID NO: 73153 - DNA, 100 bp, Homo sapiens
tgcgcgcgggaagcagcaccaagttcacggccaacgccttggcactaggaaatgagccgtcagactgctacagcattacctaccggtacctcgaagtgtc

SEQ ID NO: 73154 - DNA, 100 bp, Homo sapiens
ccatccgccaggagccctcttccttcagtgttatagttttgccgctggactcttccctcccttcccccaccccatcaggatgatatgagacttgaaagaa

SEQ ID NO: 73155 - DNA, 75 bp, Homo sapiens
tttaatacaacatcatcaatcattttgacaacctgtatcccaagcagcggttttaatataactgcaggagttgat

SEQ ID NO: 73156 - DNA, 75 bp, Homo sapiens
cttgtctttccctagtactctgcaaacaggcggggagacaaccccttccccaagaatgctgatgggactatatgc

SEQ ID NO: 73157 - DNA, 83 bp, Homo sapiens
atttgtttgtttctgccagtgaaaaccaccaaaacaatccagctgttccctcagacaatgcagatcttcgtgaagactctgac

SEQ ID NO: 73158 - DNA, 96 bp, Homo sapiens
agaaaatgaagaaattggaggaggtgcagaaggtggacagggtaaaagaaagagacttttttctaaagaataacacacatgcaggacttgaaagat

SEQ ID NO: 73159 - DNA, 74 bp, Homo sapiens
aaaaaccttcgactatgcagagacatgagatggtagccaacccctcaggtggaaccgtcccaaaatgtcccttg

SEQ ID NO: 73160 - DNA, 80 bp, Homo sapiens
gtcccagtggccctcggcgcggcagcgctccagctcgctctccaccttcagttacagaatgtctgaaggggacagtgtgg

SEQ ID NO: 73161 - DNA, 80 bp, Homo sapiens
ggctctgtaggaaggaacttggttccccctccctcagcttccgccccaaaaggaatatattaaaggaatctgtgaacctg

SEQ ID NO: 73162 - DNA, 100 bp, Homo sapiens
aggcgatgtcgccgaaaccgggctgcaggcgggttaaagatcgaggtccggaagccactaggagattttttaattggttttattggagcattaacctggg

SEQ ID NO: 73163 - DNA, 75 bp, Homo sapiens
ctcaaaggaacggagagaaccgggacccccctgcggggacccggaactggtggttggttctagctattgccatgg

SEQ ID NO: 73164 - DNA, 100 bp, Homo sapiens
caggcggccgcgttccccacagaggacagcaggacttccaaggagagcatgtcggaggctgatcgcgcccagaagggagaccaaattttgaggaaggtgg

SEQ ID NO: 73165 - DNA, 100 bp, Homo sapiens
gaacaaagacaacattgttcctggaacgccctctttttaaaaaagcattgcagtgtcgagatggctatgaaccctgtgtaaatgaaggaatgtgtgttac

SEQ ID NO: 73166 - DNA, 99 bp, Homo sapiens
gacaacgaccacgtctccaaaatgagtcgcatcttcaacccccatcttgcctgatttgagatggggtcccaggtctcggtggaatcgggagctctgcac

SEQ ID NO: 73167 - DNA, 50 bp, Homo sapiens
tggccttcgtacccgtcttgattgagaaaaatggctacaaacttcctagc

SEQ ID NO: 73168 - DNA, 96 bp, Homo sapiens
gcctttacacacctcagaaatttatagataacaggatcatttcatctaagggtgttttgaatgctgtatcaaatgcctggggggcattccctatgc

SEQ ID NO: 73169 - DNA, 101 bp, Homo sapiens
gggggttgctgacccagaggagagttctccaaacatgatcgtttactgcaaagtgctggagaatctggtaaaagcaccattgtgaagcagatgaggatcct

SEQ ID NO: 73170 - DNA, 97 bp, Homo sapiens
agctgggtctggagacgccgtggcagcctgaacggagtgtgcgacggattgggaggttaaagctgaagctcaacaaagatatagtgatctctgtggg

SEQ ID NO: 73171 - DNA, 100 bp, Homo sapiens
ccagctcagcagctgcaatggaaccttactcaggagatgactgatgacatggattcatacacaaacgtatatcgtatgttctccaaagagcctcaaaaat

SEQ ID NO: 73172 - DNA, 50 bp, Homo sapiens
acagaatcaccagcactggctgaaggaattacatgaatgacagtcttcga

SEQ ID NO: 73173 - DNA, 100 bp, Homo sapiens
cttcctagtgtgtactttttcatcccagatcggagcacagtgctacttggaatgttcagctctgactcagaaaggtctcaaagcggtttttgatgaagca

SEQ ID NO: 73174 - DNA, 100 bp, Homo sapiens
gggggtgaagctggagatatttcgggagcaggacatcgagactttacatggctctgttcacgtcacgctgtgtgggactcccaagggaaaccggcctgtc

SEQ ID NO: 73175 - DNA, 74 bp, Homo sapiens
cctcgtcggctgcatagcaagccttttgttccaggaatcacaaatgatatggaaaagctccagaaagctgtgac

SEQ ID NO: 73176 - DNA, 100 bp, Homo sapiens
atcctcactggacgccacaggggcaagaatgagtccctggaacgccagatgcgtgaaatggaagagaactttgccgttgaagctgctaactaccaagaca

SEQ ID NO: 73177 - DNA, 100 bp, Homo sapiens
aaagaatgcttgctcagtgagggtagctggtgcagaagccattttttaaacttaggtatttaagtactgaaagctgcctgctgaagatgaagtcttacta

SEQ ID NO: 73178 - DNA, 134 bp, Homo sapiens
tgaaacaattcacatttatgacatgaaaaagaagattgagcatggggctctagtgcatcacagtgatccacatcttcatttgaatattgaggaatcaaaccaagagtttatggtgaaaagtgaagaactctacg

SEQ ID NO: 73179 - DNA, 100 bp, Homo sapiens
gagtgagagatggaacccgaagaagaaaggattcgttacagccagagattgagaagcaaccacttcacaagaagattctgaagttggccatttttgatcc

SEQ ID NO: 73180 - DNA, 90 bp, Homo sapiens
aatatccttgtgaagtccaaggccttccagtatttcatgtgaaacaggagggcgttagtggatcagaagtcatctgtcattaaacacagc

SEQ ID NO: 73181 - DNA, 59 bp, Homo sapiens
aagacaaagagtggacatttgtcatagaaaataatcaagtgacggatactaatagaaaa

SEQ ID NO: 73182 - DNA, 83 bp, Homo sapiens
ccaccccgcaggtacgggggcggtggctacggacgccggagccgcagaaggggtagaagagccatccaaaaaacgagttatag

SEQ ID NO: 73183 - DNA, 100 bp, Homo sapiens
gaaagatatagagacaacgactatgtccaattttcatgctcaggtagtgggcagcagtcagtgacaggtgtaacctctgtggatgacagcaacagttact

SEQ ID NO: 73184 - DNA, 90 bp, Homo sapiens
cagtcggcactgctactgcgaagacagctggcaggtaactgcatcctgcccagcatgacggccccctgcccgccgccacctccagacccc

SEQ ID NO: 73185 - DNA, 83 bp, Homo sapiens
ctgaagggaggcaaggaggcggactgagcgctcccaattgggacctcctgccccccgaggtctgcagtctcctgaacccagca

SEQ ID NO: 73186 - DNA, 83 bp, Homo sapiens
tctttgtgcacatttacatcaaggtcagcccaaggccaaccccactgtcactctgttcccgccctcctctgaggagctccaag

SEQ ID NO: 73187 - DNA, 105 bp, Homo sapiens
ggcggaggcggcggaggccagggaggaagatgtcgtaatgagcggtagcccagccatgacccataggaatctgacttcctccagtctgaatgacatttctgataa

SEQ ID NO: 73188 - DNA, 75 bp, Homo sapiens
cagagccaaggccaagctctccaagttcagcatccccaagcagggggagagtggtggacatgacaacagagtcaa

SEQ ID NO: 73189 - DNA, 100 bp, Homo sapiens
atattgttacaattttttttcaagaactgccgtcttctttgcctgcactaatggactcagcccaaaaccatgtttgcccaagttgaatctgatgatgagg

SEQ ID NO: 73190 - DNA, 83 bp, Homo sapiens
ctcgggcgccgacgagatcggccccgtgtgaccccagagggtgagtacatcccgctggaccaccaggatgtggatgtgggctt

SEQ ID NO: 73191 - DNA, 90 bp, Homo sapiens
aggaaacaagatggtccttaaaaccgaagaggaggacgtgaactttgaggcgctgatcatcaccatgtcggtagtcgggggaaccctcct

SEQ ID NO: 73192 - DNA, 100 bp, Homo sapiens
caacacataaaaattatttatccaacagctcctcccagggtttctcctcttcaaaaatctgaagttgttgagatggttaagaaacaagtcaaagtcgtaa

SEQ ID NO: 73193 - DNA, 74 bp, Homo sapiens
cgagttagaaatcctacaaaggaccttgtatgcagtgccattcagaatcaggatttcactgtgatcgaagacta

SEQ ID NO: 73194 - DNA, 50 bp, Homo sapiens
tcgaagagctctttcaaggaatcagagtggacgcttctcttgtgagccag

SEQ ID NO: 73195 - DNA, 83 bp, Homo sapiens
cgcgagcacagagcctcgcctttgccgatccgccgcccgtccacacccgccgccagcaaaagactgttgaagtagagagcatt

SEQ ID NO: 73196 - DNA, 96 bp, Homo sapiens
cactacagggaagtgcatcacatgtcaggaccagtcctgcctctgttgtagaagacatgtggtgtatataaagtttgtgatcgttggcggacattt

SEQ ID NO: 73197 - DNA, 50 bp, Homo sapiens
gatttaccaccaagtctgatgtggttagagcctggcaatgccgtttgggt

SEQ ID NO: 73198 - DNA, 97 bp, Homo sapiens
acaacgacagcgacggctacgccgaagcactcgttccgggggtgaagcctcctgcgccggccttgcctcgggctcaacatgggaaaagacattccgg

SEQ ID NO: 73199 - DNA, 100 bp, Homo sapiens
ctggaattacatgaacataccaccctagtaaaggccaagtggaggtgactggtgatgaatacaatgtggaaagcattgatggtcagccaggtgccttcac

SEQ ID NO: 73200 - DNA, 75 bp, Homo sapiens
gttgcatcaaatacttcatatttggcttcaatgtcatattttggatttgagttctgtgaacctgcatttgttgtt

SEQ ID NO: 73201 - DNA, 102 bp, Homo sapiens
actttattatgcaggtggtctgtgaagccacacagtgtccagatacgaggggtgtccgcaatgttgccagtgtctgtctgcagattggctacccaactgttg

SEQ ID NO: 73202 - DNA, 75 bp, Homo sapiens
cattttgcagttgttgaaattgtccccgcagttttcaatcatgaacccagtgacttgattgtaaaaatttacaga

SEQ ID NO: 73203 - DNA, 75 bp, Homo sapiens
cttattcaccatgacttatcaggttgattcttcaccacactgaaaccattaggaaaaatccttgtggttaacagc

SEQ ID NO: 73204 - DNA, 98 bp, Homo sapiens
gtcttcgatgcacaggagtggccgttatggaacgcaggaatgtatcctgtcaggtataatgtcagtgaatggcaagaaagttcttcatatggatcgaa

SEQ ID NO: 73205 - DNA, 76 bp, Homo sapiens
gggctgctggggacagctgctggtgtggttcggagccgcggggtgctttcttctgcgacctggtactcatctacct

SEQ ID NO: 73206 - DNA, 100 bp, Homo sapiens
cggccggggcagcgctcctggcgctgctggctgcgctctgcccggcgagtcgggctctggaggaaaagaaagaatgattacggacctgaagccaaagaac

SEQ ID NO: 73207 - DNA, 97 bp, Homo sapiens
actcagcaggcaccccagggccctccagtgggggccatgcttcccagagcggagacaacagcagtgagcaaggcaaatgaagaggattcttccagtt

SEQ ID NO: 73208 - DNA, 75 bp, Homo sapiens
ggaaggcatggactcggagattggctgcctcatccgcttctatgcagcttatgttcctgaggaagaattgaaggc

SEQ ID NO: 73209 - DNA, 51 bp, Homo sapiens
cgtctaaactgcagaagtttacaagacaacgactgaaagacctttcattca

SEQ ID NO: 73210 - DNA, 100 bp, Homo sapiens
cggttggagtggacgtcattgccgggaacgagcgagtcgccgctgcagccctagtgactgcggcctgcatcccgttaatgaaggagttcccccttctgag

SEQ ID NO: 73211 - DNA, 52 bp, Homo sapiens
cctcgctgtccctgcggcttctgggggaagctgccctctgtcgacagctccc

SEQ ID NO: 73212 - DNA, 82 bp, Homo sapiens
tcgacgccgcaacccggggaaagcaggtgtcccgacccaggctaagcttgagcatggctgagcaggagcccacagccgagca

SEQ ID NO: 73213 - DNA, 75 bp, Homo sapiens
gtgcatgatgtgcgatgtgcggaagggcacctccacccgtgttccttgcctgtatctccccttggttcaatagct

SEQ ID NO: 73214 - DNA, 101 bp, Homo sapiens
ccaggaggagagcccacaggtgctaaagagagcagtaccctgatggagtcccttgcagggaacctcaggacctgacccaaccactgtctacgtggacatga

SEQ ID NO: 73215 - DNA, 75 bp, Homo sapiens
gcacctttgacaccgtcctgtgggccatagtgagtgacctgcaggaagaaggcaagaatgccatcaactcaccga

SEQ ID NO: 73216 - DNA, 82 bp, Homo sapiens
ccacggcgcagacgcgggcgagctgcggctcggacgccagcggacacgcgggcgagccgtgttgccgcccgctgtgctatga

SEQ ID NO: 73217 - DNA, 80 bp, Homo sapiens
tgatgaaggtggaggcagcgcggctctcagtccagaatgacagggtccagaaactggcgagccacgagggacatgtgtag

SEQ ID NO: 73218 - DNA, 98 bp, Homo sapiens
cggcggcgcgcggacccaggcgcggatggcgaggccagcaggaaaatgtttataggaggccttagctgggacactacaaagaaagatctgaaggacta

SEQ ID NO: 73219 - DNA, 127 bp, Homo sapiens
gtctgacatcgcgacgctgctcaaaacctcgctccggaaaggggacacctgttgttgacctcctgtactggagagacattaagaagactggagtggtgtttggtgccagcctattcctgctgctttc

SEQ ID NO: 73220 - DNA, 98 bp, Homo sapiens
ctcatcagtgagctgtccctgctggaggagcgcttccgggcggctgtatttggaaactcccattggtccagagagacagaacaatgagaagaaatccc

SEQ ID NO: 73221 - DNA, 100 bp, Homo sapiens
cggattttctgttttcggaagttgctgggttcgttttattcagcggcagtggtgctttcccgaatctcagaatgccgtgcctcatctccagacatggagc

SEQ ID NO: 73222 - DNA, 75 bp, Homo sapiens
agctctgctaattgggccaaatgctcctttaatttttgaacgagacggtctggaaaatcccgaagcagaagcccg

SEQ ID NO: 73223 - DNA, 75 bp, Homo sapiens
ttcctgtacagcctgcaaaactggatcgtgggactttaccagatcggtttgtaataacacctcgaagacgctatc

SEQ ID NO: 73224 - DNA, 74 bp, Homo sapiens
ggaggcaggaccaggacgccgggaccatcgaaaggtgtcgtgaaaactacccctaaaagccaaaatgggaaagg

SEQ ID NO: 73225 - DNA, 75 bp, Homo sapiens
aagacttgaacttaatacagcaagaaagaccatcaagtttaccaggtttcgaaaaaacgatgaaatgaaagctat

SEQ ID NO: 73226 - DNA, 83 bp, Homo sapiens
tgcgggactctcattcctctgaaggaggagcagcagcgcctggccgagctctccaagtccaacaagcagaacctcttccttgg

SEQ ID NO: 73227 - DNA, 90 bp, Homo sapiens
ttgttgtagaaccaagtgaagccacaaacagatcaggaaagtccatcagcttgataatggaggagaacaatgactccacggagaaccccc

SEQ ID NO: 73228 - DNA, 100 bp, Homo sapiens
ggactggctggagccactgttggactgaataatattaatgcactagcaggtaccatcaacagcaaagaggccatgctgcgacagaaggactatgagaccg

SEQ ID NO: 73229 - DNA, 75 bp, Homo sapiens
ggactgccaggagacgagtccccggttgtcatggttgattcttcaccacactgaaaccattaggaaaaatccttg

SEQ ID NO: 73230 - DNA, 100 bp, Homo sapiens
cgatggccgggatcctggagcactcggtcatgtacccggtggactcggtgaaggagaccagttttgattttaaatgttctcaatccagactaaagacaac

SEQ ID NO: 73231 - DNA, 100 bp, Homo sapiens
ctgaagaagcagcgtaccaagaaaaataaagaagaggctgcagaatatgctaaacttttggccaagagaatgaaggaggaagataccaactagagataaa

SEQ ID NO: 73232 - DNA, 100 bp, Homo sapiens
tcccgcgcgaggagctgcggcacacgcccgagctgcccctggccccgcggccgctcaaggagggctccatcacgcaggaaagaccacagcaagattcttt

SEQ ID NO: 73233 - DNA, 82 bp, Homo sapiens
aatccgagaagagcagagcggagggagccccagacacgacctgcctgaccagtgcacgcccaacccctgcgataggaagggg

SEQ ID NO: 73234 - DNA, 75 bp, Homo sapiens
ttcaacagccagggagaaagcctggatgctcaaggaactgtctatcttgaccatgcaggtgccaccttgttctcc

SEQ ID NO: 73235 - DNA, 75 bp, Homo sapiens
gtgcgacggaggtcagcagagaagatatcaggggtctgaccagtgcctcacagctggaacaattgaataaacgat

SEQ ID NO: 73236 - DNA, 75 bp, Homo sapiens
cccctcctcccctagcttcactcaatgttagtaaggacttctgcacggacctggccgtctccagtgccaacttca

SEQ ID NO: 73237 - DNA, 96 bp, Homo sapiens
ctgagaatcaccgcttagaagcctcagctgtgattggctaccttctcccatcaccccagctgagccattatctggatattgtggaagtaaacattg

SEQ ID NO: 73238 - DNA, 100 bp, Homo sapiens
tcatcgccacgttccactttcctcaccccaaatatgtggacctgtacaagaatttgcaccatcctgggattgtaaacctggaatgtatgtttgaaacccc

SEQ ID NO: 73239 - DNA, 100 bp, Homo sapiens
ttgcaagagattccaaccttccagccccttttgaaaggtggtatcacggaaaacttgacagaacgatagcagaagaacgcctcaggcaggcagggaagtc

SEQ ID NO: 73240 - DNA, 75 bp, Homo sapiens
ttaatcctcaatttaagcctgatctaacccctagaaacaggatgtcactgattttatcagtcatttgttcatgca

SEQ ID NO: 73241 - DNA, 100 bp, Homo sapiens
gcgaccaagtacttgtggcagttgtggtcagtttcgctttgattgctaccctggtatatgcacttttcagtcactccatggattcctttgggcaacccag

SEQ ID NO: 73242 - DNA, 96 bp, Homo sapiens
tcttgaagaatagagccataaagaaagcaaagcgcagaaatgttggatttgaaagggtcctccgcggaagggcagctgaatggactccagagcagc

SEQ ID NO: 73243 - DNA, 87 bp, Homo sapiens
aatccaattgcacctaccaaaaaaatcattgatcctcttccccccattgatcattcagagaatgtcaaaactggaccaatggggcca

SEQ ID NO: 73244 - DNA, 90 bp, Homo sapiens
ggaaggcgaaaggaggggttcggaggagagggttcgatctccgtacgcaccagtgtactaatggtcacttgatgtgcgctggctgtttta

SEQ ID NO: 73245 - DNA, 90 bp, Homo sapiens
cctggtcatcttctatttccaaaggcaccagtgtcttgtcacctggactccacataggactaattattatactggcaataatgatctata

SEQ ID NO: 73246 - DNA, 75 bp, Homo sapiens
cgcagatgttgtcaaggtggcctaccaggaggccaggggtgtcgccatggcgctgagatgcgtctggagagccag

SEQ ID NO: 73247 - DNA, 74 bp, Homo sapiens
ctggaaaaggtacacaaagtagaagaccttcttccgattatgaagaccagcatctcagacatgtcgaaaaagat

SEQ ID NO: 73248 - DNA, 90 bp, Homo sapiens
gccacgcagtgctttgcaacgctaattagactcatgccacttgaggcaccacactgtaactcgaggcatcaccaaaggcgtgaaggagga

SEQ ID NO: 73249 - DNA, 90 bp, Homo sapiens
cagctacttgggactcctctctcaagagaagctgcaagagcaacatctttcctcaccccaaggattcactccttctccagttgcacagcc

SEQ ID NO: 73250 - DNA, 85 bp, Homo sapiens
agggaccgggggaaccgccgccccggccggacctcgaccctgagctctatctcagtgtacacgagacgaccttaagtggacagag

SEQ ID NO: 73251 - DNA, 96 bp, Homo sapiens
aacttgtggaatggtgagaaagtggccctcatggagcacagcaactgctcgtcggagcccggcttctgggcacaccctcctggggcccaggcgggc

SEQ ID NO: 73252 - DNA, 82 bp, Homo sapiens
catgggagaaaaccagacctccacttccaaggatatagagcagctgagctgcccctcctggacctgatgaagctgtacgaag

SEQ ID NO: 73253 - DNA, 51 bp, Homo sapiens
ctgcggagcagctaccgctcagggagcggcagcctcagccccaggacctgc

SEQ ID NO: 73254 - DNA, 101 bp, Homo sapiens
ccggtgcaagaggcgcaaacaagccaatcccaggaggaaaaacggtattttgaaggtggcgtctcatctgtctacctctgggatctggatcatggctttgc

SEQ ID NO: 73255 - DNA, 74 bp, Homo sapiens
ttgtcttcttcgctttagacaagccattcacctgctcttccctctacgattttccataacacagtttttacttg

SEQ ID NO: 73256 - DNA, 83 bp, Homo sapiens
caggaagcagagtggctatggtgggcaaactaagccgattttccggaaaaaggaaacaaagcttagcaggagaggagagccag

SEQ ID NO: 73257 - DNA, 90 bp, Homo sapiens
cgagactggagcagagccgctgggcgccggagccgaggcgagcgccgcgcgcaccactgcagcgatggattttgggtggggaagtcctcc

SEQ ID NO: 73258 - DNA, 99 bp, Homo sapiens
tgacagcacaggtcacagtaaggccaaaaatgtgcatactcacagagttagagagagggatggtgatgtacttgaaggatataatggaacaatatttgc

SEQ ID NO: 73259 - DNA, 100 bp, Homo sapiens
cacggaggacggggccgggcgacctgggcaccagcaggacccgaggccaggagccaggggcccagaagagaactattgtcgagtgatgcgatgaaagaat

SEQ ID NO: 73260 - DNA, 87 bp, Homo sapiens
catgcatgattatgatcacccagggaggacaaatgcatttctagtggctacaaatgcccctcaggaaatgggtcctgatgaatatga

SEQ ID NO: 73261 - DNA, 129 bp, Homo sapiens
gctgcccggtggtgctgcacagcttcacgcagctagaccccgacctgccgcgcccggagctttgtgtcaacatgaccaatgagaagatgcaccactatatcaatgaagtgctttttctccacgagcaag

SEQ ID NO: 73262 - DNA, 134 bp, Homo sapiens
ccaacgtcagccagctcccgagcggttgggcctccatcctttggtacaacatgctggtggcggaacccaggaaaactctctgcagaggaattagagcgaaaacggcaagagatgatggaaaacgccaaatggag

SEQ ID NO: 73263 - DNA, 75 bp, Homo sapiens
gcggcagtggtgctttcccgaatctcagaatgccacggtcctaaaatctctacacttgccaaaaaacaacagtct

SEQ ID NO: 73264 - DNA, 100 bp, Homo sapiens
tggggctggacctgctggtgttcgcccacgaccatgattgctcgctgtaagcagctcatctgtgaccccagctacgtaaaagatcgggtagaaaaagtgg

SEQ ID NO: 73265 - DNA, 51 bp, Homo sapiens
cttctggctgaaggagtacaaccttcagaatggcagaagatgatccatatt

SEQ ID NO: 73266 - DNA, 100 bp, Homo sapiens
tcggcgtctctctcggcagtcaccggagtgcccgagggggaagcacgatttacggaagggcagcagaagaagcctttgtaaatgacattgacgagtcgtc

SEQ ID NO: 73267 - DNA, 100 bp, Homo sapiens
cccacaacgatgcgtctcctggatgggttatttggaaatagcggtgcttgcagcgcttgcggacagtcgattcctgcgagtgaactcgtcatgagggcgc

SEQ ID NO: 73268 - DNA, 101 bp, Homo sapiens
agcgcatgcaggactgccagcgggagctccagagcctgctggtggaggagaaatttggttgaacaacagatgctctcagaaactccagaagatgcccaaac

SEQ ID NO: 73269 - DNA, 98 bp, Homo sapiens
tctccatgcagtgtgtcaaggatgatgagaaaccagcctggacaccaagtctgtgtcagaaggccacctcaagaggaacatcgtggtgaagaccgtgg

SEQ ID NO: 73270 - DNA, 85 bp, Homo sapiens
gagctggaatgactggcaacccagggatattccaatgcctttagttagctcaggagtagagcatggtaacctgagagagctggca

SEQ ID NO: 73271 - DNA, 78 bp, Homo sapiens
caacgatgaccagtccaggcccagcctctcgaatgggcacacctgtgtagatacctcttccaaatgcatgatgaagat

SEQ ID NO: 73272 - DNA, 75 bp, Homo sapiens
gagaggccacagcccggactccatcgactcccccggctcttagactaaatggatgatgaacttgttgttggacat

SEQ ID NO: 73273 - DNA, 83 bp, Homo sapiens
tctgaagtgaacactgcagggccatttgacaatgcagatcttcgtgaagactctgactggtaagaccatcaccctcgaggttg

SEQ ID NO: 73274 - DNA, 80 bp, Homo sapiens
ccctggagcctcagttggaagcagccgatccagcctgcggagcctgtggggcagatatcgcaaacggcaccagttcaggg

SEQ ID NO: 73275 - DNA, 88 bp, Homo sapiens
cgggtcaaggcattcatcctctagctggttgtggcagcactgcctgaaggtatgagaccagattctaatctttatggttttccatggg

SEQ ID NO: 73276 - DNA, 74 bp, Homo sapiens
tgaggagaaatgaacagctgaccctacatgatgagaggtttgagaagggctacttctacaagtccgaacagcca

SEQ ID NO: 73277 - DNA, 112 bp, Homo sapiens
cagctgaagagcgacaagccgctggcagccgcggatctcaccgccgctcaggccgagcctcttgaagccattcttacagatgatgaaccagaccacggcccgttgggagctc

SEQ ID NO: 73278 - DNA, 51 bp, Homo sapiens
ggagtccggacatctgaaacttgagaggacatgtactcccaggattccata

SEQ ID NO: 73279 - DNA, 82 bp, Homo sapiens
ggatgaacaggctctattagggctaaatccaaatgctgattcagactttagacaaaggacgctgttggaagctctgactgtg

SEQ ID NO: 73280 - DNA, 50 bp, Homo sapiens
acacccgctgtcctctggcctcccacacgctccatgatgcgttatctggg

SEQ ID NO: 73281 - DNA, 100 bp, Homo sapiens
ctccgcaggctgccggctccacccctcaggagctgcaattggaacatgcaagacaagcctttgcactcaaagacaaaagcaaaagtggcatgatttctgg

SEQ ID NO: 73282 - DNA, 100 bp, Homo sapiens
cgtggggtcactggtgtatgtcatggaaggttctctacttaaaagacaatgactactgatgaaggtgccaagaacaatgaagaaagccccacagccactg

SEQ ID NO: 73283 - DNA, 98 bp, Homo sapiens
aatccagcagcagcatcctaaaacctctcacatttaaatcaaacggtattgagatggattgggttatgaaacataatggtccaaatgacgctagtgat

SEQ ID NO: 73284 - DNA, 75 bp, Homo sapiens
cccggggcgggggcgatggcggcggcggcggccggagcttctctcagccggtgctggagaatctggtaaaagcac

SEQ ID NO: 73285 - DNA, 96 bp, Homo sapiens
tggaacaaggagaagatccatggttattagagaaagagaaaggatttctaagcaggaactccccagttggaggacgagtaagtcgtgaattaaatt

SEQ ID NO: 73286 - DNA, 75 bp, Homo sapiens
ccgccgtgagcgcccggagcggtccgcgagccaccgaggcccagctgctcaagatgaggaggtgcgcggggccgg

SEQ ID NO: 73287 - DNA, 100 bp, Homo sapiens
ccggagccgaggcgagcgccgcgcgcaccactgcatctgacagatacgtctcatggtgtaagaaataagtgcctgcagttacttggcaatcttggctctt

SEQ ID NO: 73288 - DNA, 75 bp, Homo sapiens
aacccatcgacaagaaggcaccttgatcctgccatgaagcagtttctgctgtacttggatgagtccaatgccctg

SEQ ID NO: 73289 - DNA, 74 bp, Homo sapiens
tgaaaaagttctggaaaggtaacagctatcaggctactgggaacgttatttggaaacattcctgtggaaaacca

SEQ ID NO: 73290 - DNA, 51 bp, Homo sapiens
agagcagttgcatcttgtagtgagtgttttccaagcagtgaagcacttgcc

SEQ ID NO: 73291 - DNA, 80 bp, Homo sapiens
aagaacaagggtggtgttgcagtaaaagcacatcaggccaccgaggtccgtatctgccctgtggaattcaaccccaactt

SEQ ID NO: 73292 - DNA, 51 bp, Homo sapiens
ctttgacagcaggttgcaaattccagaaagctgagtctgatctggattaca

SEQ ID NO: 73293 - DNA, 82 bp, Homo sapiens
ccgggcctgcaccatgagcgtcccggccttcatcgacatcagtgaagaagatcaggccatcagcatcagcaaagccatcaac

SEQ ID NO: 73294 - DNA, 93 bp, Homo sapiens
ctggcattggaacttcctgttctgatagcgtggaaggatcctgattgagtcaatgctttgcattctcagtcctctgcataaagctgagagatg

SEQ ID NO: 73295 - DNA, 100 bp, Homo sapiens
accacttcgccctggtggtgcacgagcagatccagtgggtacttcggtccttggtggaagcatctagctcaggtgtgtcggtactgagcctgtgtgagaa

SEQ ID NO: 73296 - DNA, 83 bp, Homo sapiens
gctgagtggttgtgtggtcgcgtctcggaaaccggtagcgcttgcagcatggccagctgcgggccgtccagcggctgtgccac

SEQ ID NO: 73297 - DNA, 98 bp, Homo sapiens
ctcgccctcctctggggatcgctgtgcgccgctcttgcaagcttaggatatgaaaagagctgtgtgttgttcaattgtgcagccttagctagccaaat

SEQ ID NO: 73298 - DNA, 90 bp, Homo sapiens
ccagatctcagaggagcctggctaagcaaaaccctgcagaacggctgcctaatttacagcaaccatgagaaatgagccgtcagactgcta

SEQ ID NO: 73299 - DNA, 96 bp, Homo sapiens
tcctatctgcgacaattaagagcactctaagaggaaaacacatcccaccacagtccgggcagctccccctccacctacacagaatcaccgaaggcc

SEQ ID NO: 73300 - DNA, 75 bp, Homo sapiens
gtaaatcctgaggtttatagaaaggattcatgactttgtaatggaggtaaaaaagctccagttttatttaataaa

SEQ ID NO: 73301 - DNA, 90 bp, Homo sapiens
gcgaagctggccaaagcctgcccagacggctcacctgtgcgggatggaacaaaagccatccctccattcattatgaacactttggaaaag

SEQ ID NO: 73302 - DNA, 75 bp, Homo sapiens
ccttgataagatggcttcggagggaatgaggaacactgagactccgttcctgcttgtcttgtcctacctccacgt

SEQ ID NO: 73303 - DNA, 74 bp, Homo sapiens
ctggaccatagctcctgggagaagctcagtgtccgcaacgcatcttctctccagactgccgatcccagaaagcc

SEQ ID NO: 73304 - DNA, 83 bp, Homo sapiens
agacagtcctcgtcagcactgactttcagctatggaatcggctaaaaccagaaaagcttgaaaaagatctggacagatactca

SEQ ID NO: 73305 - DNA, 101 bp, Homo sapiens
ggcttcaagcagtcctcctgcttttggcttcttgaagtgcttggattacaggaaccagcacctatgacagaagatctgctagaagagcagtctgaagtttt

SEQ ID NO: 73306 - DNA, 89 bp, Homo sapiens
cctgaggaaaatatcgattcaaacagtgaaagtgaaagagaagagatagaattaaaatctccgagggacctatctaggacatctgtgct

SEQ ID NO: 73307 - DNA, 82 bp, Homo sapiens
ctgagttccctgatccccacacctacatcaaaactccgagacgtctcccacaacctgctccgggcgctggacgttgggctcc

SEQ ID NO: 73308 - DNA, 81 bp, Homo sapiens
cgatgctcttcttggaaaaccagatccagaaactggaggagtcccgctcgaagctagccacagctccggagcaagccccag

SEQ ID NO: 73309 - DNA, 83 bp, Homo sapiens
gcgcaccccaacacccccaccagctgggcctcggggttatgatgtgattgctcaagcccaatctgggactgggaaaacggcca

SEQ ID NO: 73310 - DNA, 97 bp, Homo sapiens
ccgctgctcgcacgggagccagctgggtggtgattttctatgatagcgactggaaccccactgtggaccagcaggccatggacagggcccaccgctt

SEQ ID NO: 73311 - DNA, 109 bp, Homo sapiens
ggggcttattcttgttttctcaatggaacaggtcttcgaatctccccaggaacatctcactcactccatcactcgatgagataatatgagatttctacttcggagaggc

SEQ ID NO: 73312 - DNA, 114 bp, Homo sapiens
aggagaccatggctgactacctgctgtacaccctcaacaaacaccagcgctttggggggatatgagactttctactcggaatatcctgagtgttgcgtggatgtaaaacccatt

SEQ ID NO: 73313 - DNA, 75 bp, Homo sapiens
atcaggaaaacaagcctggttcagttaaacctactcaaactattgtcccccagtcaaccagagaggagaaaagag

SEQ ID NO: 73314 - DNA, 78 bp, Homo sapiens
tggaaagtttcaagaggcataagatacaggtcacaagacacccacttcaggagtcctgcctcacacccacaggaagga

SEQ ID NO: 73315 - DNA, 75 bp, Homo sapiens
ccgcggcctggagtacaacgaggtcaacgtcaccctggacctgggccaggccgccatggcatcagatgaaggcaa

SEQ ID NO: 73316 - DNA, 100 bp, Homo sapiens
gtgccacaggaggctgtgcgggccccgctccgcttcgaatggacagccttttgattgattatcaatttaccttcagcttattacaggaagatgatcgcca

SEQ ID NO: 73317 - DNA, 101 bp, Homo sapiens
gaagaccgcgcgcagggcctgcagcgggagctggacggcgagcgcgagcggcgcgagaaaggaacggcaggagcagctgatgggatatcggaagagagggc

SEQ ID NO: 73318 - DNA, 80 bp, Homo sapiens
agatgaaacctgctgacagtgagaagaacaatgatgaacaggaagcggtgcaggaggttcctagagttgttcagaatcct

SEQ ID NO: 73319 - DNA, 75 bp, Homo sapiens
ggaaagaggaggaaaacaaaagctgctacttatggaagatacaaaggagctttcattgttgaggttcctcagtgc

SEQ ID NO: 73320 - DNA, 83 bp, Homo sapiens
tatggagcatatattatggaacacacttttgtctggccctctgagccccaatgagagtttcctgaggtacctcacccttccac

SEQ ID NO: 73321 - DNA, 100 bp, Homo sapiens
gatcgccgggaacccttgccgctgctgtcctgcgaccccaagcagcagacggactggactgagccctggctcatggggctggccaccttccacgcgctct

SEQ ID NO: 73322 - DNA, 126 bp, Homo sapiens
gcgcgggacggctctgtaggaaggaacttggttccccctccctcagcttccgccccaaaagacgcagtaaaacgcaggactcttcccgcttggattcgcgaaggtcttgaaaaaatggaacgtgaa

SEQ ID NO: 73323 - DNA, 75 bp, Homo sapiens
tctggaaagctttaggagttcacagtaagtcataaggacgaggctccgggaagagggcaccaagtacaagtcttt

SEQ ID NO: 73324 - DNA, 98 bp, Homo sapiens
cgaggagctgctgccgcctgacggggctcccgagcacggtaccagctggaggatgagtctgcgcatttggatgaaatgccactaatgatgtctgaaga

SEQ ID NO: 73325 - DNA, 83 bp, Homo sapiens
acttgtggagagctcgaattccagaatgatgaaattgtggggaaatttgcagtggtgagaaaatgtataaagaaagattctgg

SEQ ID NO: 73326 - DNA, 100 bp, Homo sapiens
ccgccgcctgctccccacacggactccaggcggtccccacccacagaagcagaccttcagctcagctttgctgctggtgatgtggtgctgattcagccct

SEQ ID NO: 73327 - DNA, 74 bp, Homo sapiens
tccttgcatttttgttggctgaattgggtacaagctggacatcgtggagttcatcccctctctcctctactttg

SEQ ID NO: 73328 - DNA, 100 bp, Homo sapiens
cggtgaaatcctgtcctgaagactgtaaggatccatcagttacacaagtgacaagaaatgttccaccaggacttgatgaatataatccattctcggattc

SEQ ID NO: 73329 - DNA, 98 bp, Homo sapiens
ttcagagacctaagctttttccagagaagagaagctttactggtgttccagccctaagggatttcttcagtgccaaccccttcaccccttggacctct

SEQ ID NO: 73330 - DNA, 100 bp, Homo sapiens
gggggttgctgacccagaggagagttctccaaacatgatcgtttactgcaaagacccagatgatgtggtaccagttggccaaagaagagcctggtgttgg

SEQ ID NO: 73331 - DNA, 100 bp, Homo sapiens
attatctgctttgtgggataatttcctcattggttgagtcagtgagttgcgtgtctgcaagagagcatcctatctggctgtgggtgagcgtggaggatgc

SEQ ID NO: 73332 - DNA, 95 bp, Homo sapiens
gaagcaacacccgctactacacagggacccagagtgctgccctgcccaggaggtacatgctgcgggagcgggagggggccccagagcctgcatcc

SEQ ID NO: 73333 - DNA, 90 bp, Homo sapiens
acatcagtgcttattgcaccaagtcgggttttagtgattccttcctcaaatgttagcattacaacctatcatggtgaacttacttcagat

SEQ ID NO: 73334 - DNA, 99 bp, Homo sapiens
tagctattttggttacccttcttttcgtcgttcatcactttccaggctaggctcatctcgagcttatgaaatgttatctgatccagtgaaaagacgagc

SEQ ID NO: 73335 - DNA, 78 bp, Homo sapiens
gaggacgcgcccggcgcccctgagccggccgagcggcgacggaccgcgaggcttgcttccggcgtcatggctcaaagg

SEQ ID NO: 73336 - DNA, 75 bp, Homo sapiens
gccgtgggtaggagatggagaaattccaagttcagattctccagattcctcctgcatggaaaaactactttcaaa

SEQ ID NO: 73337 - DNA, 74 bp, Homo sapiens
tttcgaaatgctatcagagtcaatcctagacattataatgcatgggcaattgaaggaacagactaaaaatcgtg

SEQ ID NO: 73338 - DNA, 51 bp, Homo sapiens
ggagtcaccgcagctccaccgtattcaccagaccagagcacttgggcagca

SEQ ID NO: 73339 - DNA, 82 bp, Homo sapiens
ctgctccccaagaagactgagagtcaccacaaggccaagggcagttgtgaaaaacttcaggacaaaaatgtttcatttaagg

SEQ ID NO: 73340 - DNA, 83 bp, Homo sapiens
agataaactagggcttcagtctcttcgtaacagaacagaattacatgaatgacagtcttcgaaccaatgtgtttgttcgattt

SEQ ID NO: 73341 - DNA, 100 bp, Homo sapiens
agacccagtccctgagagagctcatctcagatctggagcatcggctgcaggggtcagtgatggagctgcttcagatttagaaatctggactggccagtga

SEQ ID NO: 73342 - DNA, 100 bp, Homo sapiens
tttttgatgctgaggagctcctggtcgatgaagaggatgatgtttttggtgaaggtggacgacatccttggagaaggcagcgacgacagcgacagcgaga

SEQ ID NO: 73343 - DNA, 98 bp, Homo sapiens
catcctcccacctcagccttgcactactgcagtcttcagttaagcaacaagtagaagctattgaaaaacagtacatttctgcaattgagaaacaggca

SEQ ID NO: 73344 - DNA, 75 bp, Homo sapiens
ggcgctgacggtcccgcacgtctgccgctgccaccggcgcgcccgaaactgataaatttcaaacggaagagagtg

SEQ ID NO: 73345 - DNA, 146 bp, Homo sapiens
caaaatgagtctacagttataccaagtggatagtagaacttatctactggatttccgtagtattgatggactgactgcattgcacagatgatggatatttacgtatgtttgaaacgaccatcctggatggtggacaataaaagaat

SEQ ID NO: 73346 - DNA, 80 bp, Homo sapiens
ccaaaccaggttgcatttcctgaaggggaagagcaagatgcagtcagtggagagtgaagatagtccaagtcctaagagac

SEQ ID NO: 73347 - DNA, 100 bp, Homo sapiens
tcttcccttacagtttctttgagcagtttgtggaagcgatcagatctgaaggtttgaatgggccaatgagtatcctcatcattgaagcattctatggagg

SEQ ID NO: 73348 - DNA, 97 bp, Homo sapiens
ggactacaggcgtgtgccaccacgcccaggattccatatggctctcatatcattccattccatctctgccaagatttggataccgcaaaaatttgtg

SEQ ID NO: 73349 - DNA, 75 bp, Homo sapiens
gaaaaggccagtgttgtccctactgcatagttgatgcggatgaaattaaaaggctaggaaagagatttaagaagc

SEQ ID NO: 73350 - DNA, 83 bp, Homo sapiens
accccttcatgcccaaatcccggaaactccagcgtgtctccagccgtggaacttgctactaccagcaccatgccctaccaata

SEQ ID NO: 73351 - DNA, 100 bp, Homo sapiens
aaacagtttctcaagacccttacaggagttcttccagaacgccaaaagttacttggactcaaagttaaaggtttactcctggcttgggggcattaggaag

SEQ ID NO: 73352 - DNA, 100 bp, Homo sapiens
gaggcagtggcaagaaaaggggctttgcctttgtaacctttgacgaccatgactccgtggataagattgtcatatgtccgtggttcagaccctgtattaa

SEQ ID NO: 73353 - DNA, 100 bp, Homo sapiens
gggccgcgccacttccgcaaacaggtgcagaggttccgaaaacagaacagacttttgaagagcgcctgatcctcaaagctttcttgctcaagtttgtcaa

SEQ ID NO: 73354 - DNA, 100 bp, Homo sapiens
atcttcctggccgatggcaatgtcttcaccactgggttcagccgcatgagcgagcggcagctggctctctggaatccggcgcatattaaatttcctattg

SEQ ID NO: 73355 - DNA, 82 bp, Homo sapiens
actggccgaatggcagcagtagatgacttgcaatttgaaggtcccctcttgctgttggctgcacatcaggaaggctgtgatg

SEQ ID NO: 73356 - DNA, 100 bp, Homo sapiens
ggcctgacaacttcatctttgggaggctgccggcgtggaccgcgggaaggcggggctggggctcggcgggaggccacccccacagccgccccgggaggag

SEQ ID NO: 73357 - DNA, 100 bp, Homo sapiens
cagcagcacgtaaagtcagtgacatgcccatgcgagtacctgaggaagttttaccaacagactgcagtttcttcactaccaaaatgacatcattttccac

SEQ ID NO: 73358 - DNA, 100 bp, Homo sapiens
atgaaaatccagcagtatgacaaggcactggatgatgcaatcaaagctcgacttctcaatcccaagtggccaaaggtgactgaaaactcctgaggcattt

SEQ ID NO: 73359 - DNA, 100 bp, Homo sapiens
aatctctcgggaagaatctgagcaaattgtcctgataggatcaaagacaaatggaaagttcctgttctaaatggcttctaagaagttgggtgcagatttt

SEQ ID NO: 73360 - DNA, 73 bp, Homo sapiens
ggcaagatatggcaccgcaagccgtccccggccacgcgggacggagaatggatcttggagaatgtctgaaagt

SEQ ID NO: 73361 - DNA, 83 bp, Homo sapiens
ggagccggcgctgagaggggctgcggccggagcgggcggctgagacaaaggcgacggtaagaatgattgatgttggctgatat

SEQ ID NO: 73362 - DNA, 96 bp, Homo sapiens
catggagacctcagcactcaagcagcaggagcagcccgcggcgaccaagatcaggaacctgccctgataactgcgacctccacttcaaggtggccc

SEQ ID NO: 73363 - DNA, 100 bp, Homo sapiens
ctcagctgagtgtgccacacaggtagccctggacggcattcagtgttttgccatcatctgccctccaccatccatacctacgtttgcaacacttcgtgtt

SEQ ID NO: 73364 - DNA, 74 bp, Homo sapiens
gacgtcttgcctgtgtcccacttgttcgcggcctatagcactattcctgatcagagaactccagttgcttcaac

SEQ ID NO: 73365 - DNA, 100 bp, Homo sapiens
cgagcgggcgaggtggcggcggcggcggagcgggagcgggtaccgggcgcgggcagagcgcggcggcgcgggcctcatcatttctgtctcctgtttctcc

SEQ ID NO: 73366 - DNA, 74 bp, Homo sapiens
cgccgcttgtgctgcagccatggcccacctgtagatccagatgaagactctgacaacagtgcaatttatgtaca

SEQ ID NO: 73367 - DNA, 50 bp, Homo sapiens
tggttttggaccagacaggcgtgtctaagacgactgggtttggattcaga

SEQ ID NO: 73368 - DNA, 90 bp, Homo sapiens
cacagtatggtagccacacccccaggacgctgtgcagagctgcaagtccgtatcactgaggctgtggccacagccactgagcagagagag

SEQ ID NO: 73369 - DNA, 90 bp, Homo sapiens
gtggaagttcatcgtctgattaggccatgttacaggagctgaattttggtgcatatttgggtcttccagctttcctgctgccccttaatc

SEQ ID NO: 73370 - DNA, 96 bp, Homo sapiens
gcgcacgtccgcgagatggcttgctccattgtcgaccagaaggctgccctgaggatctgtgtttggtgaaaaggagccaaattcacctgcagggca

SEQ ID NO: 73371 - DNA, 100 bp, Homo sapiens
ggtgaaagaagctgccaagatagccaaagacaagacgcaggagaaaatcgagacctcaagtaatcattcccaattaatatgatcctctgttgaagcaaga

SEQ ID NO: 73372 - DNA, 98 bp, Homo sapiens
cgcggccccccagccgctggagaaggagaacgacggctactttcggaagggcagagcggcttgggtaaatccaccttaatcaacaccctcttcaaatc

SEQ ID NO: 73373 - DNA, 50 bp, Homo sapiens
cgcctggctccccatactagtcgccgatgtgaactatgaagactttactt

SEQ ID NO: 73374 - DNA, 87 bp, Homo sapiens
ttttatggcccacccatcacaagagaatgctgcttatctaccagatatggctgaacatgacttattcagctgattctgaatcatctt

SEQ ID NO: 73375 - DNA, 100 bp, Homo sapiens
aatagttttggctgggcgtgaaatgactagattggccgggcttccagcatagagaacaagcaggactggataaagcatatccgcgaagtcatccaggagc

SEQ ID NO: 73376 - DNA, 75 bp, Homo sapiens
gggtggcttacagacgctgccagcatcgccgccgccaggactgatcctttgaaatactccagccatgactaaaag

SEQ ID NO: 73377 - DNA, 100 bp, Homo sapiens
gtcggtggggcccgaggccgaggggcccaggcagagcccggagaaaagccacatgattggcccccgccgcatccacacagtccgtgtgcggggaggtaac

SEQ ID NO: 73378 - DNA, 98 bp, Homo sapiens
cggaaaagtgttgcctcatcttattcccctgagtattgaaaacaatcttaatcttaatcaggaataaaattgaagggtgtttttcttagagaacatca

SEQ ID NO: 73379 - DNA, 75 bp, Homo sapiens
tgagattcttcagttctccatgtggaaaagcagctgtggacccagcttccctactttgtaattgactgacttcaa

SEQ ID NO: 73380 - DNA, 75 bp, Homo sapiens
cgtgtgggagcgggagctgcggaaaggagcggcctattgccaattcatggacatgctcttccctggctgcattag

SEQ ID NO: 73381 - DNA, 78 bp, Homo sapiens
ctactgctgcctctgtcactcctggtgaccagcattcaaggaccacagaatactggccatggtgcaacttctggtttt

SEQ ID NO: 73382 - DNA, 80 bp, Homo sapiens
gcttggaaaaacgtgtgggtacgaccttgggaaatcctcattgacgattcaatttgttgaaggccaatttgtggactcct

SEQ ID NO: 73383 - DNA, 98 bp, Homo sapiens
ttaaacctaccatccaaatcaaacaggagtcaggtttggaaggtttgcagttgctgctcttcagtccaaagtagaacagtatgagcgtgaaaccaatc

SEQ ID NO: 73384 - DNA, 82 bp, Homo sapiens
agtaatgctggggaccctgagatcgtcaagtctcccagcgaccccaagcaataccggcaccatgactcctgtgaggatgcag

SEQ ID NO: 73385 - DNA, 100 bp, Homo sapiens
aagtacaaaatgcaattgcaagagcagagtgagcgattacagtctgacctggtagtatgcattgtaattggtgtgctgtattttgctattcatgtaagca

SEQ ID NO: 73386 - DNA, 101 bp, Homo sapiens
aaagttcagtgggaagcatgtcgtctttatcgctcaggctctgaagagtgttgtactctatgttatcctggctccttttgacaatgaacagtcagatttgg

SEQ ID NO: 73387 - DNA, 97 bp, Homo sapiens
ctctggcactgtcattggcagcaattgctttatcaccaacagtgtcattggccccggctgccacattgggtgtccgcaatgttgccagtgtctgtct

SEQ ID NO: 73388 - DNA, 82 bp, Homo sapiens
tttgagaactcctccagcaacccatacctgatccggagaatcgaggagctcaacaaggtgagaagccctaccactgcaactg

SEQ ID NO: 73389 - DNA, 100 bp, Homo sapiens
cgaacgtcatgagcatagtgatcccattgggggttgatacagcagagacgtcatacttggaaatggctgcaggttcagaatgacctgtgtagaaaaagca

SEQ ID NO: 73390 - DNA, 50 bp, Homo sapiens
cttggaaatagtcagcatacctgtatctggagtccatctttcaccatctt

SEQ ID NO: 73391 - DNA, 74 bp, Homo sapiens
aggaatgaacatgtatttaaccaagttccaacaaaagaatgctgccgcagaaaactctctgcagaggaattaga

SEQ ID NO: 73392 - DNA, 100 bp, Homo sapiens
gcgagctgagtggttgtgtggtcgcgtctcggaaaccggtagcgcttgcagcatgcccaacagcatggtggtggaacaccccgagttcctcaaggcaggg

SEQ ID NO: 73393 - DNA, 99 bp, Homo sapiens
ggcgccgctgtagccgcccaccggtttttctgccacttttgcaagggcgaggtcagccccaaactaccgcattgcagtgtcgagatggctatgaaccct

SEQ ID NO: 73394 - DNA, 100 bp, Homo sapiens
tgttagggaggcactcaagatgaaaactacttcaactaaaagccaaccacttgaacaaggaaagaccacagcaagattctttcattcgtctcctcctagc

SEQ ID NO: 73395 - DNA, 82 bp, Homo sapiens
cgcggttagcccgtcagtccctgctctgtgcgcgcctccatctgggccatggatggagttcctgagttggaggtagaagaag

SEQ ID NO: 73396 - DNA, 83 bp, Homo sapiens
gctgagcccagtatgggaaagatctaccttctggaagctactactacgtggtgcttggaaagccatgccagtgacggtaaccc

SEQ ID NO: 73397 - DNA, 83 bp, Homo sapiens
gaatgtttttgaccagaaaaccgacaaccttcccagaaagtccaagctcgtgtatggtttgaagtggtgaacatggatttttc

SEQ ID NO: 73398 - DNA, 100 bp, Homo sapiens
gtgaacagtgtcccatcccaagtacagatgtgaatctggctacactggacagcactgtgaaaagacagactttagtattctctatgtagtgccaagtagg

SEQ ID NO: 73399 - DNA, 90 bp, Homo sapiens
ggtcgtgccgccggcgggtcgggccgggcaatgcctcgcgggcgcaatgaatccgcggcagggacctgatgcccagaaccctggacgggc

SEQ ID NO: 73400 - DNA, 74 bp, Homo sapiens
ccgcacttacctatgaggccagcaagcggaggtgctgggagcgagttggctgctatcatggtgaacttacttca

SEQ ID NO: 73401 - DNA, 75 bp, Homo sapiens
atgacattgtagtacagtatccaagtggcaatagcatttgacattgtgcagcaaagaaatggttatggagaagcc

SEQ ID NO: 73402 - DNA, 100 bp, Homo sapiens
gaagattttctacaaggggaagaacactgatggactcaccctgtcacccaggttggactgcactggcctcaacctcctgagttcaagtgatcgtcccacc

SEQ ID NO: 73403 - DNA, 75 bp, Homo sapiens
acaaagtcatcaagctagtggacatcacggacatccagaagttttgggaggtcatcagtgatgagcatgggattg

SEQ ID NO: 73404 - DNA, 50 bp, Homo sapiens
cttaagaggagctttgatgtccgagaggagccagatgaccaagatgctcc

SEQ ID NO: 73405 - DNA, 87 bp, Homo sapiens
ctttcccgctggcgcgcagcctcagctaggctaccaagcagtttctcgaagagattaacaagtggacagttcagtacaatgtttccc

SEQ ID NO: 73406 - DNA, 75 bp, Homo sapiens
ctggaatcgactggggcatcttcccggaatcagattcaaagctttcaccaacaatcaccagtggtttacacaaca

SEQ ID NO: 73407 - DNA, 83 bp, Homo sapiens
tgaagacttcagatctggtttgtctgccccaagcaagtctcttgggaggaggaggcggcggctggctcgaaacaggtttacca

SEQ ID NO: 73408 - DNA, 90 bp, Homo sapiens
cagtttaggtctcaaggcaagcctattgagttaacacctctgccgctgctaaaagttgattatggaagattcccacaagagtaccacgtc

SEQ ID NO: 73409 - DNA, 82 bp, Homo sapiens
ctcggggttctctcctgcccccaagctgggggtaggttcaaggtggtggtcagtgtcctgtctgcggttacgacgtgcctgg

SEQ ID NO: 73410 - DNA, 90 bp, Homo sapiens
ataaagacaggagtggagtgatatcagacaccgagcttcagcaagctctctccaacgtttcagcacccatttggactttcacaatcagag

SEQ ID NO: 73411 - DNA, 100 bp, Homo sapiens
cccacttgttcgcggcctatagctccaagccctcagtgagcctcagcccaggctgcaggcagcaggcctgccacacacagaggtgccacaagggaaggga

SEQ ID NO: 73412 - DNA, 97 bp, Homo sapiens
ttcaacttctgccgacaacttttctcctgatttgaggctccagggttccttgaaaagaaaacaggtagttaacctatctcctgccaacagcaagcga

SEQ ID NO: 73413 - DNA, 100 bp, Homo sapiens
taaacagctgaaggatgaaggagccagtttggctgaaaataaaaggactttccttatcccagttgattgtgcagaatacactgcctgtcgcttgtcttct

SEQ ID NO: 73414 - DNA, 80 bp, Homo sapiens
gcatccagctcctcctgctcgtggagtttgcacataagtggaacaagaactggaaaatatgcccaggttaccaacaatcc

SEQ ID NO: 73415 - DNA, 101 bp, Homo sapiens
gcgaggaactgttatgcaggctcctgctgttcggcaggtcaatccccaaaataaactgataaatttcaaacggaagagagtggcagcatttagaaagaatc

SEQ ID NO: 73416 - DNA, 90 bp, Homo sapiens
atcctgcctccaacccatttggaccctcagcccatcctggcagcttcctgcccactggccccctgacagtacatccctaccacacagagc

SEQ ID NO: 73417 - DNA, 99 bp, Homo sapiens
ccaacctgctcacctaccgcggcggccaggcgggaccccgcggcctggcgctgctcaatggatgatcggctgaatgtaacagaggaactaacgtccaac

SEQ ID NO: 73418 - DNA, 83 bp, Homo sapiens
gcgcaggatttcaaaaccgacctgaggtttcagagcgcagccatcggtgcgctgcagatcatgtttgagaccttcaacacccc

SEQ ID NO: 73419 - DNA, 100 bp, Homo sapiens
cactgcggcctcaaactcctgggctcaagtgatcctcctgcctcagcctcccgagtacctgagattagcccagttttagcctcatctggcatagattatg

SEQ ID NO: 73420 - DNA, 95 bp, Homo sapiens
tcccactaccagctggaactgcagtgctgcatcgactggacccatgtcactgaccccctcataggtaaaatatacccaggaccataaacagatga

SEQ ID NO: 73421 - DNA, 75 bp, Homo sapiens
caaaatcctcggattctctacttctgctccttagattgtaagcaaaagaaatcaaggtcaagatctggaagcaag

SEQ ID NO: 73422 - DNA, 100 bp, Homo sapiens
ccaggatgactactgtgtcaagaaagaccacagcaagattctttcattcgtctcctcctagcctgggggaccaggctcgaactgaccctggacatcaaag

SEQ ID NO: 73423 - DNA, 87 bp, Homo sapiens
gaaggagatcaacctgaggccgcagatgtcccaggttccttgcattgactccatggagagtatatcacctgatttccgtcatgatac

SEQ ID NO: 73424 - DNA, 73 bp, Homo sapiens
atctacaaccttcgatctcctgacgaaatcctgaggttggcttgaagcctgtgtggtatagtcccaaagtttt

SEQ ID NO: 73425 - DNA, 100 bp, Homo sapiens
tcaggcggggagaagacagtggcagctctggccctgctctttgccatccacagggaattcctggggaagtcggagcctgagcaccagcactgagcctggc

SEQ ID NO: 73426 - DNA, 83 bp, Homo sapiens
ctgaaccggcacctgcacacctggatccaggataacggaggctggggtcctgacttgtcctgggcaagccaagtccattgctt

SEQ ID NO: 73427 - DNA, 90 bp, Homo sapiens
aaacaactggcagaatttgctaggagtttcactgaccagctgcgtaaaatctctaaggatgcaggaatgcccatccagggtcagccatgt

SEQ ID NO: 73428 - DNA, 98 bp, Homo sapiens
tgtgaatgtgcggcggagtgtccgggtgaaaaccaagacaccaactctacaacattacctgtcatatactgaagaatctcttcttccagttatgcagc

SEQ ID NO: 73429 - DNA, 95 bp, Homo sapiens
ggaactgattcaggagaagaacctctgctccccacctcagagagttttgtggctattttcaatggacaccagaactctaccttttatgtaaaatc

SEQ ID NO: 73430 - DNA, 50 bp, Homo sapiens
aagaagaccaagacccatcatgccccagaatcccactctggggtggcgtc

SEQ ID NO: 73431 - DNA, 75 bp, Homo sapiens
gggcctcaaacgtggagatcaactcctctctgttaatggagtgcaaaactggttgaacagcggatgaagatatgg

SEQ ID NO: 73432 - DNA, 75 bp, Homo sapiens
agtaagcttgggaggtaggagttggcgagtagtagcgaggagacgaagatggaacgcagccccaacatctcctgg

SEQ ID NO: 73433 - DNA, 51 bp, Homo sapiens
ctctaagtacactcgtcttgaataggctggtgcagcatggaaacacggatt

SEQ ID NO: 73434 - DNA, 100 bp, Homo sapiens
catttatcaccttctgtggaaaggaagctgcacaggaagccgtgaaactggaggagatgttaaagtaacccatcttgcaggacgacattgaagattggtc

SEQ ID NO: 73435 - DNA, 74 bp, Homo sapiens
agacaccgaaggagccaacaaaagaagatgttaaacttcatagaatcaggatttaaaaactggaacggtgaagg

SEQ ID NO: 73436 - DNA, 83 bp, Homo sapiens
cctcaccaagaagatgaagaagattgtggatgccgtgatcaagtacaaggacagatatcagttttagagaatgtggcgtggag

SEQ ID NO: 73437 - DNA, 100 bp, Homo sapiens
tgccttcctgttcacggtgaccttcgcttggtgtcctcctggcctcagcaacctgacaattctgtcgtgtcccgccatcgtcagccagtggcagcaggag

SEQ ID NO: 73438 - DNA, 75 bp, Homo sapiens
cgtctcttacgtctgcggaagtgcagctgcctcagttcttagcgcagagctgtaggtaaaacttgcctactgatc

SEQ ID NO: 73439 - DNA, 51 bp, Homo sapiens
ggccagtcctgacaaaatgcttcagcactattcatggccgaattgatcaag

SEQ ID NO: 73440 - DNA, 100 bp, Homo sapiens
cgggaggtggaggttgcagtaagccaacaccgtgccactgcactacagcctgggcgacaggaattgaagatgttcctgctccttctacatctgcagataa

SEQ ID NO: 73441 - DNA, 76 bp, Homo sapiens
ccgcaacgtaaaatccttggaaaaggtgggtaattccagaattgattggccataccattgtcactgtattactgct

SEQ ID NO: 73442 - DNA, 101 bp, Homo sapiens
aagccactcaacaactctttatgtgacaggtctacttccccagcaggacagcatcattctcctatatcttctagacatcactcatcttcctcacaatcagg

SEQ ID NO: 73443 - DNA, 75 bp, Homo sapiens
catcagactgaccgtgtcttacatcagttcagagaggtggtggtgaagtttattaagaaggagaaggtcttggag

SEQ ID NO: 73444 - DNA, 95 bp, Homo sapiens
gctgtgcttgccttattggtgatgtgcattgtcttacgcccttcaagagtggcctcatcctgcatgactcgcctgtcccggtctcgtacagcctc

SEQ ID NO: 73445 - DNA, 75 bp, Homo sapiens
tcctcggtgctgtggtgcagagctagttcctctccagctcagccgcgtagtgttttacctcaatcatatatccac

SEQ ID NO: 73446 - DNA, 98 bp, Homo sapiens
attcactattattgcccagagcagatgaaactggatgcatttgaagacatgctggagaacccactgaacagcacccagtggatgaatgatccagaaac

SEQ ID NO: 73447 - DNA, 83 bp, Homo sapiens
cttgtccttgctggtgcatgcgtcgtcggcctctgggcagcagttcccatggagaatgttgcaacaattgctgattgtgccag

SEQ ID NO: 73448 - DNA, 75 bp, Homo sapiens
ccccgccgctgagccgtcgcggagccgcgcagccctcggagcacgccccatggctgggggttatggagtgatggg

SEQ ID NO: 73449 - DNA, 100 bp, Homo sapiens
gcagaagcaatcactcagtttcttcctaactgtgatccagatgatcctcacagatttggagtcaaaatatggacctgagaaaatatctccagaaaatgat

SEQ ID NO: 73450 - DNA, 100 bp, Homo sapiens
ctgaaagtcacgattaggactgacaataaggaggccagatgctccagtgcctgatggcgaaagtgagaaaactgtagaagaaagttcagatagcgaatct

SEQ ID NO: 73451 - DNA, 100 bp, Homo sapiens
gaaaggacaagatgaagtggaaggcgcttttcaccgcggccatcctgcaggcacagttgccgattacagcaatgtctcaggctgtgcagacaaacggaac

SEQ ID NO: 73452 - DNA, 78 bp, Homo sapiens
tgagacctggtgcccttcgacggcctggctgatccgcattttgaaagcgaagcagaagccgtagaatcagcggcgagc

SEQ ID NO: 73453 - DNA, 100 bp, Homo sapiens
aatgaagccctcaagggctgaaaataaatagggaagatggagacaccctctgggggtcctctctgagtcaaatccagtgccctgtgcagagcccgagtgc

SEQ ID NO: 73454 - DNA, 75 bp, Homo sapiens
tgcggcggagggaaaaaggaagaggagaaggaaattgtcccgaatccctgcaggcagggttaacacagagtatcc

SEQ ID NO: 73455 - DNA, 92 bp, Homo sapiens
gcgtccagcacctacgtcccgctgccgtcgccgccgccaccatgcccaagagaaaggagcatcagatccatgctgctgctgactcggagccc

SEQ ID NO: 73456 - DNA, 74 bp, Homo sapiens
ttaattagcccaacctgttcttgcaaacaagcagatatttgtgtgtggatgattcaacagccacacaaagcagc

SEQ ID NO: 73457 - DNA, 75 bp, Homo sapiens
ccgatagcagccatcgtggatgagaagatattctgctgtcatggaggagccaaaaacctgtatatcatctccgtg

SEQ ID NO: 73458 - DNA, 106 bp, Homo sapiens
gaggaaggaacgaggcaaggagctaaagcagcgtgcgttcagccctgggggagcatcgagtacagctgtccggcctccaacgagtgtgagatcaccaagcggagac

SEQ ID NO: 73459 - DNA, 98 bp, Homo sapiens
tgtggagggcctggtacaagggaatgtcacaagcacaggtctgggatccccaaggcctgggcaggcatagacttgaaggtacaaccccaggaacccct

SEQ ID NO: 73460 - DNA, 99 bp, Homo sapiens
aaagaggccaaagatctgacagaactggttcagcggagaataacatatcttcaggagatgcagaaactaccagaggccgttcagctaattgagaaggcc

SEQ ID NO: 73461 - DNA, 83 bp, Homo sapiens
tgcacatccaggctggtcagtgtggcaaccagatcggtgccaagcacatggattaattgatgtatgttgagtttatggagctg

SEQ ID NO: 73462 - DNA, 100 bp, Homo sapiens
ccagatgcaagcgtggattgggggaaaagactactttgtgtgtatccattctggagagattgctccaagctatggaaccggttcacgtggcccggaacct

SEQ ID NO: 73463 - DNA, 50 bp, Homo sapiens
gtcagccttcccagtagctggaactacagtcccggctgagacaacaggac

SEQ ID NO: 73464 - DNA, 82 bp, Homo sapiens
aaaggagtcagggatggcccttactcagtttttcagaagaagtgaagtcaagatgaagaaccatttgcttttctggggagtc

SEQ ID NO: 73465 - DNA, 100 bp, Homo sapiens
aaagagctgaggttgctctgtgcagaggacgagcaaaccaggacgtgctggatgacagcgttcagactcctcaagatggttgccaccctggggaccacaa

SEQ ID NO: 73466 - DNA, 98 bp, Homo sapiens
gccccttagcgggtgggggaagctggtaggcacgggcggctccgcagtgaccggactcgggggaggtttgtttctgcgtcacatgatcttggcctaca

SEQ ID NO: 73467 - DNA, 71 bp, Homo sapiens
ggaaggcttcaaaggctgtcgcaaggaggaaggtgctggaggcgctgctgccgctgaagggcctagaggag

SEQ ID NO: 73468 - DNA, 101 bp, Homo sapiens
gtaccgtccaactacgtggagcggaagaacagcctgaagaagggctccctcgtgaagaacctgaaggacacactagctgtttggggcaacttcgttaatat

SEQ ID NO: 73469 - DNA, 73 bp, Homo sapiens
gtcaaccgagaatgagctaaaaggacagcaggtgctaccaagtcaccatcatgtctcttctcaccaccctctg

SEQ ID NO: 73470 - DNA, 90 bp, Homo sapiens
ggggagcgactcatggagctgccgtaaggaaagatgaatgggagggctgattttcgagagccgaatgcagaggttccaagaccaattccc

SEQ ID NO: 73471 - DNA, 98 bp, Homo sapiens
gtgatctccagcgccggcctcctcagtgcgaagaagctgcagccgcacctggccaaggatcaaagatccagctaacaggcgctacgaggtgcccttgg

SEQ ID NO: 73472 - DNA, 74 bp, Homo sapiens
acttcacctttgtctcctcagcagacgcggaagtcagatggttggaatcgagtacatccttttgcatgctcaag

SEQ ID NO: 73473 - DNA, 101 bp, Homo sapiens
aaatagttgtctcaagttgcaaatgtaaacctgttccacttttagagcttgctgaaggggttccttgaatttctacgtgaattttaggatcagcttgtcca

SEQ ID NO: 73474 - DNA, 100 bp, Homo sapiens
atcaagtgcccttggacaaagcctgaaaccaggaaaaggggaagatagtgatgtactcagtataaatgcagatgcttatgacagcgacatagaaggccca

SEQ ID NO: 73475 - DNA, 75 bp, Homo sapiens
cagggatccatatgtcttgcctgcagccagcggtgggtttggaggatttgggacaacatctacaactgcaggttc

SEQ ID NO: 73476 - DNA, 80 bp, Homo sapiens
gttagtttctgcgacttgtgttgggactgagtgatagattcgtgtggcctttcaaatgattgtgaagtggtggaaatgga

SEQ ID NO: 73477 - DNA, 101 bp, Homo sapiens
gggagatatgttgtgaaagaagcagtagcagtgaatctacagggacgccatcgaatccggtgttcttgtggattggggctgaggccaatgccacggagaag

SEQ ID NO: 73478 - DNA, 75 bp, Homo sapiens
cccatcgcaaacccaaagatccccgttcctggagattctgattgaggctggtgtttggaatgctttatcctgcat

SEQ ID NO: 73479 - DNA, 100 bp, Homo sapiens
agatgaagccttatctaaatcagtgcctgtcacagtggatgatgatgatgacgacaatgatcctgagaatagggcaattaggacaattgttcaaagtagt

SEQ ID NO: 73480 - DNA, 100 bp, Homo sapiens
agaatattgactattagtgctttcatcacgcggctccatccaaacccctgctttccctcactccagtatctcacatgatgctattgctcaagagtctaaa

SEQ ID NO: 73481 - DNA, 75 bp, Homo sapiens
caaaacaagccctccaggaactcacttgatgcgatgaagagagttgaagaaatcaaacagaagcgccaagctaaa

SEQ ID NO: 73482 - DNA, 87 bp, Homo sapiens
gaattctccaacaatggaggccagtggctggtctcagggcagctggtggaatttttgaagaaaatggaatctcgaggccccctttcg

SEQ ID NO: 73483 - DNA, 100 bp, Homo sapiens
gaagacatcacatccagtgcacagggttacacatcattttggaatgactgtatatcatctggattacgtggctgtatgttaattgaattagcattgagag

SEQ ID NO: 73484 - DNA, 82 bp, Homo sapiens
gaattcattgagaaatatgacaagtctctccaccaagccattgaggaaaccgaggtacttggagcttgaggtcacacagctg

SEQ ID NO: 73485 - DNA, 51 bp, Homo sapiens
ataggtagagctgggcttctttcagatggctctgagagattcctctgcgaa

SEQ ID NO: 73486 - DNA, 98 bp, Homo sapiens
ctcacactgtcaccatggcttgtatctctgccaaccaagccatgaccacaggtgtattgtacgagcattgaaagatccaaatgcatttctttttgacc

SEQ ID NO: 73487 - DNA, 98 bp, Homo sapiens
cttcatcgtctccatcctctacctcaagtatgagccagggcagagcggcttgggtaaatccaccttaatcaacaccctcttcaaatccaaaatcagcc

SEQ ID NO: 73488 - DNA, 83 bp, Homo sapiens
gtccttctaggctcaacagaatattccacctgccttgacatgtgtgggctaccttgagaatggagcgaggagccaaggagaag

SEQ ID NO: 73489 - DNA, 82 bp, Homo sapiens
ggttctgccatgccgatgtaccaggtcagggaagtcaaagatgcatccctgagttcttcctagcaggcaagcagccgtgcac

SEQ ID NO: 73490 - DNA, 74 bp, Homo sapiens
cggagtacgtcgttcccgctgcgctaggggaagcgggcagctgagatgagtgaactgagtgtggcacagaaacc

SEQ ID NO: 73491 - DNA, 75 bp, Homo sapiens
attctgaactcaacttctgaaatttacagaaacaaactacatctcagggacacatgacggaagtgtgtatttttg

SEQ ID NO: 73492 - DNA, 102 bp, Homo sapiens
gcggcgcgatggagcagcgaaaacgtggttgtagagttccgtgactcccaggttaaaaagatcaagtggcatgagcagccttttggggaaaattggtgccaa

SEQ ID NO: 73493 - DNA, 100 bp, Homo sapiens
gaagaagcaggatgaactgaaacggattgccagagaattggcagaaggaaagatatgatccgccaaatgatgattaaaatatttcgctgcattgagccag

SEQ ID NO: 73494 - DNA, 83 bp, Homo sapiens
gcaagagtatgtgtagtctgctatgaaactattagtaaagtacgagctcaactggaggcagtcctgtgcggaaatctgaagaa

SEQ ID NO: 73495 - DNA, 50 bp, Homo sapiens
gacaagaacctgaccgagagggagacgctctgctgttgcccgtattcagg

SEQ ID NO: 73496 - DNA, 82 bp, Homo sapiens
cccgctctgctgtgggcgctgctggcgctctggctgtgctgcgcgacccccgcgcatggtgctgaccttaaggaaagagcca

SEQ ID NO: 73497 - DNA, 118 bp, Homo sapiens
ctcggctgcgccgcgtgtcctcggagcgcggtccctgtattggtctcctgctcctagagggggatatgagactttctactcggaatatcctgagtgttgcgtggatgtaaaacccatt

SEQ ID NO: 73498 - DNA, 107 bp, Homo sapiens
accaagccggggactaaggcgagccggagaccgagcccgaacagcagacaatgcagatcttcgtgaagactctgactggtaagaccatcaccctcgaggttgagccc

SEQ ID NO: 73499 - DNA, 87 bp, Homo sapiens
caacatcgcggtgcagcgaatcaagcgggagttcaaggaggtgctgaagagcgaggaggccatttatgccagtgttcttcctggaga

SEQ ID NO: 73500 - DNA, 75 bp, Homo sapiens
gccgccgccgccgccgcccggaccccggcgcgctgaatgcagcccccaggctccgctcttgccagagggacagga

SEQ ID NO: 73501 - DNA, 96 bp, Homo sapiens
ccggagcgctgcagggggctgcgcctgcctgctccgccccagacctgtcggcgaaagggcatcctagaatacgtttccacacgggtcttgtggatg

SEQ ID NO: 73502 - DNA, 100 bp, Homo sapiens
tgtcttgtgccagctttcatcctgagttgccaatcattatcacaggttcagaagatgatgttggagtccggggtgacctggtctcagtgaagaaatcttt

SEQ ID NO: 73503 - DNA, 96 bp, Homo sapiens
ggcagatttgaaaattcacccttgtagagtcattcctgcctttgagcggactcccttttaagatttgcttgctgaaaatggtcgattaagcaatac

SEQ ID NO: 73504 - DNA, 100 bp, Homo sapiens
ccgagccggaactgcggcagtctctccctgccaggctcttcatccaaggcttctggagttacagtgaatgatgaagtcatcaaagtttttaatgatatga

SEQ ID NO: 73505 - DNA, 100 bp, Homo sapiens
aaaatggagctggaggagctttatttgtgggggaagtttgttgccctggagaacatcagctgcaagattaagtcagggtgcgaggggcacctcccgtggc

SEQ ID NO: 73506 - DNA, 109 bp, Homo sapiens
tggccaactgctgtatccgcatcgcccttcctgcccctcgaggctcaggaactggtggccagcatcgaaatgttcagccttttagtgatgaagatgcatcaattgaaac

SEQ ID NO: 73507 - DNA, 82 bp, Homo sapiens
tgatgggcagtcatggtcccagaaacgtcactatcaagaaggctttgaattgtattccatggtgccatctatttgtcctcta

SEQ ID NO: 73508 - DNA, 83 bp, Homo sapiens
caagttcttcgtggagcctcatctcatcttacaggagcagactagggcatcattgcagaatacaacaaaatcaatgatgtaaa

SEQ ID NO: 73509 - DNA, 74 bp, Homo sapiens
ggaggaggaagaagaaggtgatggtgtctcccagtctgctaaagccctaaggccatcaccatggacttccagca

SEQ ID NO: 73510 - DNA, 83 bp, Homo sapiens
tagcaaattgcgtcagagcaatcctgaattttgtcccgagaagctatcagttgagggatttgcagttgataaaatggctggag

SEQ ID NO: 73511 - DNA, 102 bp, Homo sapiens
aaacttcatcttctgtaggatctgatgaaaattctcttcattctcttggactgaacttaaatactgatagcttctgcagaaagccgtcattacacctgattt

SEQ ID NO: 73512 - DNA, 83 bp, Homo sapiens
acgaggaggtgcgcgagaagtacaaagcaaacggggattcagcgtccgatcctttggaacagggactcacgtgaagcttccag

SEQ ID NO: 73513 - DNA, 100 bp, Homo sapiens
agaattagaagatgatgagcagtttgtttctctgtatggcacagaagaatatttgggggtgcactatagccatctggagctgagccctggggagccagtg

SEQ ID NO: 73514 - DNA, 85 bp, Homo sapiens
ccaagaaattagacaagaaacattggaaaagaaatcctgataagaactgctttacccaacatgagtgaagtttcctgcaagaaac

SEQ ID NO: 73515 - DNA, 100 bp, Homo sapiens
agtgagtgttcgaagctcatggagatgtttggtgttccttggcctgaagatatggaatgcagtagagagttaattgttaaatccagtatggccacaggag

SEQ ID NO: 73516 - DNA, 75 bp, Homo sapiens
aacaagcagaagaacgcttagaaagagatcacatctttcgacttgaaaaagaaatggatcagacaatggctgcca

SEQ ID NO: 73517 - DNA, 100 bp, Homo sapiens
cgagaccgtgaccgagagcgtgaccgagagcgcgaatatcgtcatcgttagaaggtccacgctgcttttatgagctgtaacactcaccgcgaagatctgc

SEQ ID NO: 73518 - DNA, 96 bp, Homo sapiens
tacacactgggggccctggatgacgagggcctgctcactcgcttgggccgccggaaactaatctggattcactccctctggttgatacccactcaa

SEQ ID NO: 73519 - DNA, 97 bp, Homo sapiens
ccgagcccttcctcaactcagcgatgacatccctttccgagtcaactggcccggcaccgagttctctctggatgaaacaggcgcctatttaatcgac

SEQ ID NO: 73520 - DNA, 75 bp, Homo sapiens
ctcctgcctcccagagaggggagccggcgaggatcaaaatcttcgaaggaggaaatgccagatctggagtaagga

SEQ ID NO: 73521 - DNA, 75 bp, Homo sapiens
gcctgatgatcacgcagctggctggcttcagtggaccagccgggtgctcgtccactgccgggaaggttatagccg

SEQ ID NO: 73522 - DNA, 75 bp, Homo sapiens
ctgcgcggcgcggcggccgggccctcgagacggggacgccgcaaggaggaagccgtgcgtggactagaggaggcg

SEQ ID NO: 73523 - DNA, 98 bp, Homo sapiens
gcaaattagctgagaccacagataaagtcaaacaaggcttttgggaagaatttgaggtggcaaatcttccaaaagactacatgataaccctcaaatat

SEQ ID NO: 73524 - DNA, 101 bp, Homo sapiens
gagcttcgccaaggctggcgcagtcgttccagggtctccctccactgctgtagtaacccgggtccggggcctcggtggtgctcctgatgcccctcacccac

SEQ ID NO: 73525 - DNA, 100 bp, Homo sapiens
aacattgaccgtattacaaaattctacgattaggactgaaaatgagcaggcctgtgaggacatggacatcctaaaatcagaatcctatgggacagtggtc

SEQ ID NO: 73526 - DNA, 90 bp, Homo sapiens
gaacctaaatggatgggtggagctgagagttttccagaaaaagaccttctgcactgtccatctaaggatgcaattgaagctcattttatg

SEQ ID NO: 73527 - DNA, 98 bp, Homo sapiens
cttgctggacatgtcctccattttccaccagaaggccgaaaaggtcgtccctgatggcccctggaggcgaagctcatcacaggatgaggaaaggacag

SEQ ID NO: 73528 - DNA, 82 bp, Homo sapiens
cggcagacgcggtcctggatatacttcagaatgaactctggaagcccagccagggacaatgcaccttcacagagattctgca

SEQ ID NO: 73529 - DNA, 83 bp, Homo sapiens
taatcgcgctcaccaagcaggtgctgaaaggctcccggagctccgagattccctataaggagcccctgctggtgcaccagaac

SEQ ID NO: 73530 - DNA, 126 bp, Homo sapiens
gaaggctttcagcatcgcacaggatgccctgcacatccccaggctcctggagccagaaggatagtgatgaggaagaagaagacactgaaaatgttgaggctgcaagtagtgggaaagtcaccagaa

SEQ ID NO: 73531 - DNA, 75 bp, Homo sapiens
atttgtagtcatgtacagaacatgatcaagggtgttacactggtgcctatggttcatgcttgaagttttaatgac

SEQ ID NO: 73532 - DNA, 100 bp, Homo sapiens
ggctgacctgtcagggatcacaggggccaggaacctagcagtctcccaggtgaaggaatctctctccagttactgggagtcagcaaagacagccgcccag

SEQ ID NO: 73533 - DNA, 88 bp, Homo sapiens
ggagcccccagcgcagcggccgcggagacaaggagaaggccttaggatctactgggggagtccggaggagcagtctcttctgtcccgc

SEQ ID NO: 73534 - DNA, 50 bp, Homo sapiens
acagcaggcgctcaccatgttccctggagaaaccaaagcccaaaccccgg

SEQ ID NO: 73535 - DNA, 100 bp, Homo sapiens
gaacgcgagaagggaagatgggggccgtcctgaggagcctcctggcctgcagcttctgtgtgctcctgagaggacctgaaggagaagaaggagaaggtgg

SEQ ID NO: 73536 - DNA, 100 bp, Homo sapiens
gcactaaacatgaagagcttgaaagcgaagttcaggaagagtgacggtaaaccagacttgaatacaacattgccaattagacaaacagcatcaattttca

SEQ ID NO: 73537 - DNA, 100 bp, Homo sapiens
agtggtgctgtcagcgcggccgtcggagacatgggagacccggggtcggaggttcgagaacttgtcttggacaattgcaaatcaaatgatggaaaaattg

SEQ ID NO: 73538 - DNA, 98 bp, Homo sapiens
gtgaagaaaaccttgaatcctgtgtataacgaaatactgcgggtccttttggaataaatcatgggattgagcttcattcagatgtggtggaatatgcc

SEQ ID NO: 73539 - DNA, 74 bp, Homo sapiens
ctgaacgcaagattcgtatcattatggcagagcccctggccatggaggcacagatacagaactttggacagacg

SEQ ID NO: 73540 - DNA, 90 bp, Homo sapiens
gctcgcggccctgcagttcttccggagtcagggcgctgagggagcgttgacagggaagcagccggatgaaacctgctcctccaaagccag

SEQ ID NO: 73541 - DNA, 90 bp, Homo sapiens
atctctccagtttccatatgttgagattctacttattcatcagtttgttgtgcttgtcaagatcaggctccggcagctgttgtgcctccc

SEQ ID NO: 73542 - DNA, 98 bp, Homo sapiens
taaaatcctcacttactatggagcccagaaagagaggaagctcaagcggcagagtgttcacaatttcactttaccctcctgggccactgaggacacca

SEQ ID NO: 73543 - DNA, 74 bp, Homo sapiens
catcaccgacctcatcagtgagctgtccctgctggaggagcgcttccggagcatggatcattttgatgacattg

SEQ ID NO: 73544 - DNA, 100 bp, Homo sapiens
ggaactaagccgagtaagaagacatacaaaagcctcttctgaaggaaaagacagtgtagtcctgcaaaacattttgagttgggtgcaaacatttggtgct

SEQ ID NO: 73545 - DNA, 95 bp, Homo sapiens
ggctcagccccatcatgctgggagactataaatattcaggaagagatagtttgatttttttggttgatgcctccaaggctatgtttgaatctcag

SEQ ID NO: 73546 - DNA, 91 bp, Homo sapiens
atatcataagtggaattttggagatattcaaaggtcagcccaaggccaaccccactgtcactctgttcccgccctcctctgaggagctcca

SEQ ID NO: 73547 - DNA, 75 bp, Homo sapiens
acaaccatgctggtttgcttcagactggtggaagttaaacgagctgagcctcgggacagcaagagccaagcgccg

SEQ ID NO: 73548 - DNA, 75 bp, Homo sapiens
gcgcacgcacagcatcaacgcgctgctgatcatcggtggattcgagtgtgaaatggcctttccccgggtcaagcc

SEQ ID NO: 73549 - DNA, 83 bp, Homo sapiens
ggaccgagtcgcgagtgtgcgccgtccgccgcccgccggatcccccggaccccccgaccttggaatcgaagcctcttaaaatg

SEQ ID NO: 73550 - DNA, 100 bp, Homo sapiens
gcattccgatcatctgaggaacagcagatgctgttgcatgaaaaagcagaagccctgcaagaagaggtagaagagttactaagattgccttctgatttcc

SEQ ID NO: 73551 - DNA, 74 bp, Homo sapiens
ggtgcagcttcaagcttaggaccacccaccatgcctatccagacatgcgtcgggatgtccaggaaatttttcgc

SEQ ID NO: 73552 - DNA, 76 bp, Homo sapiens
tgaaggcgctaaggcacatatactcaggggtcctcataaacagacttcatctgcagagagaaagagacgattacct

SEQ ID NO: 73553 - DNA, 99 bp, Homo sapiens
ccatgtcagacgcagccgtagacaccagctccgaaatcaccaccaaggttgagaacttgttgcttagtaaccaagggaccattaagctgtgtgactttg

SEQ ID NO: 73554 - DNA, 100 bp, Homo sapiens
gcagtgagcaccttttggcccaatgaatatcagattttctaccctagcaaggatggtacgaagattccaatgttcattgtgcataaaaaaggcataaaat

SEQ ID NO: 73555 - DNA, 100 bp, Homo sapiens
gacgtttgcccagatccatgagatgcaggaccttggggacaagctgcgcatgatcgtcatgggacacagaagaccacagcaccgggaagtccagtcagcg

SEQ ID NO: 73556 - DNA, 99 bp, Homo sapiens
cagcagggaggtccagatgaaaaagaaaagactaccgcactgaaaggagtcttttagtcctgctatacagctgcaccttgtacatcaagctccatgtaa

SEQ ID NO: 73557 - DNA, 100 bp, Homo sapiens
cttcatgcagttctccatcgtgccaaagcccccgagcgcccacagcatgaaggaggaggccttcctccggcgccgcttctccctgtgtccaccttcctcc

SEQ ID NO: 73558 - DNA, 90 bp, Homo sapiens
cccgcgccgaccgcgttcctatggacagacgcacagacacctgcagccacgacaagggacccgaggcggaggagggcgtcgagctgcagg

SEQ ID NO: 73559 - DNA, 95 bp, Homo sapiens
tcagggcagatttacgggaagttgccggtgttgggagtaaaaatctggtttgacttaattcagtgcacaaatgagatgaatgtgaacatcccaca

SEQ ID NO: 73560 - DNA, 98 bp, Homo sapiens
gctacttataccactgaaaatttggatttagctttcaatcccaacaatggcataaacttggaggaggcagtggagagagcatcctggtatcacagctt

SEQ ID NO: 73561 - DNA, 100 bp, Homo sapiens
ctaatttgatggagaaggttcgaggcctacagaacctagcctatcagctggggctggatgagtggtcagttaaatgaaagcatggaccatgggggagttg

SEQ ID NO: 73562 - DNA, 100 bp, Homo sapiens
gaagacatcaagggaaaatggggtgaggaagattttgaagacaatcgtcacttatacagtgacatattcgatgccatgttccctgtcactcacatcgctg

SEQ ID NO: 73563 - DNA, 99 bp, Homo sapiens
gcaaatcgagtgcacctgggatgacaaaaagtcatagtggtgtgacaagtgatctttagacagtgactgagtatggatcatttgaacgaggcaactcag

SEQ ID NO: 73564 - DNA, 88 bp, Homo sapiens
agttatcataaccttgaatggcgactagatgtacaggtgcagtagacattgttgcaatcatgatcggcaatctgaaaggcacaaaaat

SEQ ID NO: 73565 - DNA, 97 bp, Homo sapiens
catctctccctggaagacctaccagctggtctacttcctggataagatcctccagaaatcccctctccctcctggtgcaggtgatggtcctaccagt

SEQ ID NO: 73566 - DNA, 100 bp, Homo sapiens
cttagctgtgctcgcgctactctctctttctggcctggaggctatccagcgtccttctggcactcctctggtggaccgcccccatcggccacacttgccc

SEQ ID NO: 73567 - DNA, 82 bp, Homo sapiens
tggaacggaagtgaggatcacctacagacgcatcttctctccagactgccgatcccagaaagccaggtgatcaccattaacc

SEQ ID NO: 73568 - DNA, 100 bp, Homo sapiens
tgggcctcggggttctgaagttcataccacctccgcagacgcccccaaacaataataatttttcaccatgcatcggaaaaaggtggataaccgaatccgg

SEQ ID NO: 73569 - DNA, 75 bp, Homo sapiens
gacagagtggagccatggctagaggcattcctgcatcgcatccggcagaacgtggccgactcagtggagaagggc

SEQ ID NO: 73570 - DNA, 78 bp, Homo sapiens
accttttaccatgaatagttctactccttctacagacctaagtcagtgttagtctaccactgtacatctggtaacctc

SEQ ID NO: 73571 - DNA, 80 bp, Homo sapiens
acctgcgcggctactacaaccagagcgaggacgtccgccagttccttgggagtggggtcagccctgacttggccaacgag

SEQ ID NO: 73572 - DNA, 104 bp, Homo sapiens
gggagatgctcttcggcctagtgcgccagggcctcaagtgcgatgatatgatggtaattccctgctaagtagcattgaatgttatgaccctatcatcgacagct

SEQ ID NO: 73573 - DNA, 96 bp, Homo sapiens
gtcggaggaaaatgactccccagtcgctgctgcagacgacactgttcctgctgagtctgctcttcctggtccaagattatgccgacaagcccctgg

SEQ ID NO: 73574 - DNA, 100 bp, Homo sapiens
cggaagtttgcacagtccccagcagctggcagaagaagcaacacgcaaacgagagctgaggctaatgaaaaacagtttccaggagactgacaaggcgtgg

SEQ ID NO: 73575 - DNA, 75 bp, Homo sapiens
ctttgaacagatactccaacttctacaacaagaggccagccagtgaccttcagtgaggaagtcttcttggcccag

SEQ ID NO: 73576 - DNA, 50 bp, Homo sapiens
gagcctgcagagcgcgcagtacctccgacaatgcagatcttcgtgaagac

SEQ ID NO: 73577 - DNA, 50 bp, Homo sapiens
actgtccggatcttccctccctggaaagcgtctctagcagctgatatccc

SEQ ID NO: 73578 - DNA, 99 bp, Homo sapiens
gcccatacacgtgttctgttcagactcaacatacacccagaacaatgcaggtgcatctaactgtgcaaggctccagtgatcattctacatatattgtac

SEQ ID NO: 73579 - DNA, 100 bp, Homo sapiens
gaaccgggcccagcagcactgggagggtggcctggaggagatggtggaggagctcaacagcgggaaggtgatgtacgccttctgcagagtgaaggacccc

SEQ ID NO: 73580 - DNA, 90 bp, Homo sapiens
gagaatcttcttcgaataactgaaacctggaaagcttacaacagtgactttgaggaatcagatatggagattaatcaccaacttcttatt

SEQ ID NO: 73581 - DNA, 93 bp, Homo sapiens
ccaaatgtctgactctgactctcggactgagaaacgcaagtgcctccggagccagcgtggtggccatagacaacaagatcgaacaggccatgg

SEQ ID NO: 73582 - DNA, 83 bp, Homo sapiens
ctcgtattctcctgcccttccccaggagaccatagacagactgacctcacagctggaggctttccaggccaaaatgaagaggg

SEQ ID NO: 73583 - DNA, 98 bp, Homo sapiens
tggcaaaggggacgtcccaacgaagagaccacctgtccttcgagcaggagaggagagccagagaagtgacagggaagctacaggttacaacagatttg

SEQ ID NO: 73584 - DNA, 50 bp, Homo sapiens
tggaaggagcagcgggccgcgcagtgtttctaagacctcagagaaatttg

SEQ ID NO: 73585 - DNA, 100 bp, Homo sapiens
tggagctcgagaacatcgtagcgaacacggtgctactcaaggcccgggaagactaatagggatgccaaaggaaaaatatgatcctccagatcctcgcaga

SEQ ID NO: 73586 - DNA, 100 bp, Homo sapiens
caaggaactcaaggtttcgctgccgtggagtggatgccaatagaaactggaaagtgaagtggtgtggttgcatgatggaatttgaacattacttcaagag

SEQ ID NO: 73587 - DNA, 100 bp, Homo sapiens
gatctgcgatttccccttccaagccatggtgcagttccaccggcaccatggccaggagggctccatcctgaaagcagccttccaggatgctaatgtctgc

SEQ ID NO: 73588 - DNA, 75 bp, Homo sapiens
aagttacctacgtgttagaaataaatctgatattgcaccttcacagcaacaaggagtaaaccaagccaattcagc

SEQ ID NO: 73589 - DNA, 90 bp, Homo sapiens
acggattcatttagagctgcggaacaggacgccctctgatgttgaatcgctcctagctgacccctcacgtctcttatgatacgtacagaa

SEQ ID NO: 73590 - DNA, 98 bp, Homo sapiens
ctagggagcgtctccggctgcacagcgctcaggcattctgtgaaactttagaagagacaaactaccgcttacagaaagaactacttgaaaaacaaaag

SEQ ID NO: 73591 - DNA, 51 bp, Homo sapiens
ggacgagatgcccaagactctgtggataatattaatgcagctgtgatggat

SEQ ID NO: 73592 - DNA, 51 bp, Homo sapiens
ctgctacttttcctgcagcagttggcttcggaaatgtgtggacacctacaa

SEQ ID NO: 73593 - DNA, 98 bp, Homo sapiens
tcagaggattatatgacttttatctgcctagagaagaactatggatctacaacatggagactggaagatgggccaattcctgtccccccagcagcatg

SEQ ID NO: 73594 - DNA, 100 bp, Homo sapiens
aggacatgctgtgcactcatgaagagactttcgggcctctggcaccagttatcaagaagaaggtagataatgactataatgcccttcgagaaagactcag

SEQ ID NO: 73595 - DNA, 90 bp, Homo sapiens
ccaccatcaagttcttcaggaatggagacacggcttcccccaaggaatatacagtgcccctctcagctgaggaggaaccgagagcggcgc

SEQ ID NO: 73596 - DNA, 135 bp, Homo sapiens
gaaaagatgggcagagtcttggaattagaattgttggctatgttggaacatctcatacagaagcgatccaagcagcggaagttacagcagaaggccttccgcaagaggcagctgaaggagcagaggcaggcccgg

SEQ ID NO: 73597 - DNA, 83 bp, Homo sapiens
ggatatgtcttgcagtctcatatttctcctctgaagattgttgtgtccactgtatcctggcttgcttgttctgcgaattcctg

SEQ ID NO: 73598 - DNA, 75 bp, Homo sapiens
atcctacaagcaagctgaatggaggccagatagtaccatgatagctgtatcaggtatttgaagtataccatacaa

SEQ ID NO: 73599 - DNA, 90 bp, Homo sapiens
tcggcgctgggctggaggcggcggagcgcgagagcttcgagcggactcaggttctcttagaagcacaagatatggcagtgagagaccata

SEQ ID NO: 73600 - DNA, 74 bp, Homo sapiens
tcccgaatacttcagaagtggggaaatgggccaattcctgtccccccagcagcatggcatcgtgtgctgaaccc

SEQ ID NO: 73601 - DNA, 95 bp, Homo sapiens
atctaagatggcgactgtcgaaccgccgtgttgccgcccgctgtgctatgagcagtcagagcgccgtctccacaagagtttacaaatgaaaatgg

SEQ ID NO: 73602 - DNA, 100 bp, Homo sapiens
agaaggcggcgccgcgacctggccggctgggagtgtccactcgccttccaccagcatggcaacgtcttcacagtaccgccagctgctcagtgactacggg

SEQ ID NO: 73603 - DNA, 90 bp, Homo sapiens
accttatcccctcaacaacttttcagtggcaaatgatagtgtcgaaccaagtggaacaaagaaagaagatctgaatgacaaagagaaaaa

SEQ ID NO: 73604 - DNA, 100 bp, Homo sapiens
aggagcaatatgatgctgagttgcaggccctgagggagagtgtggaagaagcaaccaaggggaaaagtatgaattgcacgcagcgactgacaccactccc

SEQ ID NO: 73605 - DNA, 85 bp, Homo sapiens
accctctgaagaaatactcactgcatgaacagagatatttttaaggaatcatttccagcaatggaaagagatggaaggagatccg

SEQ ID NO: 73606 - DNA, 100 bp, Homo sapiens
gtcgtgaagaagcaggaggctaagaaagtggtgaatcccctgtttgagaaaaggcctaagaattttggcattggttgtggcagcactgcctgaaggtatg

SEQ ID NO: 73607 - DNA, 75 bp, Homo sapiens
ggaaggcaagaagcagtataagatgatctgccatgtgttcgagtcggaggatatgtctgtgatcatgatctgcat

SEQ ID NO: 73608 - DNA, 73 bp, Homo sapiens
ggacatcctgcgcaaggccgtgcagaagcaggccctggcccgggtggatgaccttcggctggtgaggacgctg

SEQ ID NO: 73609 - DNA, 100 bp, Homo sapiens
aaaatggccacacgcgtacccccgtagcggaaaaacagcctggagacacaggccccatccttcccaatggggacacttcagggagcggctctcaggtccc

SEQ ID NO: 73610 - DNA, 75 bp, Homo sapiens
tcccggcgacatactacctctggccccgagatcagaatgccgattccacctgctcctacgaagcccgactttgat

SEQ ID NO: 73611 - DNA, 89 bp, Homo sapiens
agatgattcagtgcaagagagttgttaatggggtcgctgtgatgaaattcaagaaccccccagtgaacagcctgagcctggagtttctg

SEQ ID NO: 73612 - DNA, 101 bp, Homo sapiens
ccgccgcccctcaccagacagatcgctgtcaaaaccctaggttttagatggagcaggattagatattgatttccatcttgcctctccagaaggcaaaacct

SEQ ID NO: 73613 - DNA, 98 bp, Homo sapiens
ggctgtaatgttccaggacacctgccatcatggagggttatccagcacctggaggatacctgctacctcttatgttcctgaggaagaattgaaggcag

SEQ ID NO: 73614 - DNA, 75 bp, Homo sapiens
gtataagaacctggccaacaagattgtccccattgccatccagggacaagaatccttcaagaaacaggaaaaaac

SEQ ID NO: 73615 - DNA, 96 bp, Homo sapiens
tcagaacagaagggtgggaagccagagccgcctgccatgccccagccagtccccacagcataacagggaatctaagggaggaaattatcaactgtg

SEQ ID NO: 73616 - DNA, 90 bp, Homo sapiens
aaccatccaaggactcattgacttcatcaaaaagtttcttaaacttgtggcctcagaacagttgtgccttgctttccatgacatttcccc

SEQ ID NO: 73617 - DNA, 82 bp, Homo sapiens
catcaccggcagaacacagcagggcggaggaaagtgcaggttttaaaatcaaagatgggaaaatcggagaaaattgcccttc

SEQ ID NO: 73618 - DNA, 113 bp, Homo sapiens
atggtgatggagattttgatgtggatgatgccaaagttttattagacttaattcagtgcacaaatgagatgaatgtgaacatcccacagttggcagacagtttatttgaaaga

SEQ ID NO: 73619 - DNA, 74 bp, Homo sapiens
ttggagtccggacatctgaaacttggcttgtaaacatataacataaaaatggcttccaaaagagctctggtcat

SEQ ID NO: 73620 - DNA, 75 bp, Homo sapiens
accgtgagttcgtgtggctgagaaagcagctacagagaaatgctggtttggtcgtgcctgccagtgtagagccgg

SEQ ID NO: 73621 - DNA, 100 bp, Homo sapiens
gcggtgcctgagcccgtgcctgtcttcagatcttcacagcacagttcctgggaaggtggagccaccagcctctccttgctccagtgatccacaagctcag

SEQ ID NO: 73622 - DNA, 100 bp, Homo sapiens
agcactgcgctgtcagcgatagcccagtggatggccattccagaggaagcagaccagcccactacagagccaggcatggtcctggacagtgtggaagcag

SEQ ID NO: 73623 - DNA, 75 bp, Homo sapiens
gagatggtagaaggagagcctccatacctcaatgaaaatcccttgagggaagagagaagggcacagttacctaag

SEQ ID NO: 73624 - DNA, 125 bp, Homo sapiens
gagactctgtccttcatccgagacagcctggagaagagcgaccagctcactaagaacatggaaggtgctcgggtcttcggggcactgggtcccatcggtccctcctcacctgggctcaccctcgg

SEQ ID NO: 73625 - DNA, 100 bp, Homo sapiens
agacactgaagcgactgcagagccagaagggagtgcagggaatcatcgtcgtgaacacagaaggactccatggcttccgagttgctgactgaccctccac

SEQ ID NO: 73626 - DNA, 90 bp, Homo sapiens
tcaagcgccgctttgccattggctcccaggtgtctgagcacagcatcatcaaggacttcaccaagcagtggtacaggagctgcagcaggc

SEQ ID NO: 73627 - DNA, 98 bp, Homo sapiens
ccgtgggcagccccccgcagacgacaaagggtggaggatatgaaagtgaaagtgcttacccaaatgcagaacttgtgttcttggagatccacaacatt

SEQ ID NO: 73628 - DNA, 107 bp, Homo sapiens
cggagaaacaggcgccgcgggctccgcgcccggccggacccgggcccgagcaggttacgggcaggacttgagtggcttcggacagggcttctcagaccccagccagc

SEQ ID NO: 73629 - DNA, 101 bp, Homo sapiens
acaaaaacggcccttggatgatggagacaagttggatggcttgaggactggtactaaaaggaaacgtgactgggaggccattgccagcagaatggaggatt

SEQ ID NO: 73630 - DNA, 82 bp, Homo sapiens
ccgtgccctggggctgagccctcagagacaagaggagcagcagcggcaccgcccctcaccctggagggtcctgtacaatctc

SEQ ID NO: 73631 - DNA, 100 bp, Homo sapiens
agcgtgaccgagagcgcgaatatcgtcatcgttagaagctcctttggtgaagattaaacagagcttaacaaaactgaagcaagaaactgtagagatggac

SEQ ID NO: 73632 - DNA, 87 bp, Homo sapiens
aaggccccagcccggctcagtcggccgagagcgagggaggagccccccgacccagctgagatctgtatctgtggacctgaatgttga

SEQ ID NO: 73633 - DNA, 75 bp, Homo sapiens
aatgtcattactgaaactcagtgcactctaggtggatattccatctattataaccaagaaactattaaaagcagc

SEQ ID NO: 73634 - DNA, 122 bp, Homo sapiens
ctgcgactgtaagagaacaattgaaaaagcttcttgtcaagtttcaagtgcccaggaagtctagtgaaggggcctttatcatctgctggactcctggattggttttgttacttctagacgtg

SEQ ID NO: 73635 - DNA, 80 bp, Homo sapiens
gatgcctcgctgacctgaacatctttccagaactgttaagtgcagtagacattgttgcaatcatgatcggcaatctgaaa

SEQ ID NO: 73636 - DNA, 100 bp, Homo sapiens
cagcgatggaagaggatcaggagctggagagcttggtgatccagctatttttcctgccgtaattgtggaacatgttcctggtgctgatattctcaatagt

SEQ ID NO: 73637 - DNA, 96 bp, Homo sapiens
agaatccttatgccaatgcaggaaagaatccagatgatatccctctgaagaagatatgatcgaatgggccaagagggaaagtgagagagaggaaga

SEQ ID NO: 73638 - DNA, 75 bp, Homo sapiens
ggaaggagcatcccaggacctaccagaatctggcccagctgagagccagcctggaggttacccagcagcaggcca

SEQ ID NO: 73639 - DNA, 75 bp, Homo sapiens
accgaattctgccttgtctgtttattgctgtgggacctttgcattcacagctctgatggagggcaaaatcaataa

SEQ ID NO: 73640 - DNA, 120 bp, Homo sapiens
gcatcacaagtcgcctgcagccgcccgaagagccaagagtcagtattccggccagcttcacgaagtcagagaggtagcaaaccatgtgatttcttctgactctatttcctcttctgccag

SEQ ID NO: 73641 - DNA, 100 bp, Homo sapiens
ctgaagcaaaagatcagcgaggagcagcagcagctccagcaggcgctggctcctgctcaggatcacctgctgttaccagctaccacccataacaagacca

SEQ ID NO: 73642 - DNA, 96 bp, Homo sapiens
ccgcgtcctcaagccggcacctgagcggcggagacggctgtagcacaagcattactctactgactggcagagacaggagaggtagatgtccacgcc

SEQ ID NO: 73643 - DNA, 128 bp, Homo sapiens
gtttgtggctgcatttttatctctggtggctctgctacggcggcgcagaaatgaggcagaagcggaaagtttctgatgaagaattgaaaagaagagtagctgaggagctggcattggagcaagccaag

SEQ ID NO: 73644 - DNA, 101 bp, Homo sapiens
ttcgcgtctctctgctgcggcgcggggaccgctgtgctctcgtaagactttgaccccgacgcaggcttcagtgattgccgcggatcagaagcctgagcact

SEQ ID NO: 73645 - DNA, 96 bp, Homo sapiens
gccttcgcgtctgcccggccaagaggcaaaggggaggttacgcagcaaaccatccagaaggctgttactgaggcggagacacgggtgatgattggc

SEQ ID NO: 73646 - DNA, 100 bp, Homo sapiens
caccttcaatccgctctactggaatgtggtgctggagaatctggtaaaagcaccattgtgaagcagatgaggatcctgcatgttaatgggtttaatggag

SEQ ID NO: 73647 - DNA, 95 bp, Homo sapiens
gcaattgacctcacctcaagcacacccaatggacagcatgcctcaccaagtcacatgacaagcagtaattaataaaatgtctccaacatctctaa

SEQ ID NO: 73648 - DNA, 87 bp, Homo sapiens
cccgagaagtcatggacctaatcaggtgtcctgttcccagacctgagctgatctaccacctagagcatgggcaggagccatggacca

SEQ ID NO: 73649 - DNA, 83 bp, Homo sapiens
gcagcgggtcctacgaggagggctgtcagagcctcatggagtacgggttatatcctgtgttgtgacctcatggtttaagtggg

SEQ ID NO: 73650 - DNA, 100 bp, Homo sapiens
gcccaagctagagtgcagtgaagccgcgacatcccaggctcaagtgatcctcccacctcagcttcctgagaatccagatgcaggccaagtacagcagcac

SEQ ID NO: 73651 - DNA, 96 bp, Homo sapiens
gagaaggaaacgggactaaactggcgggctccgtggaagcgtggccggcagcgtcccggacgaggagtggtatgtgtgcaacagagagaaattatg

SEQ ID NO: 73652 - DNA, 87 bp, Homo sapiens
ggggctcagagatccaagtgcgcgccctggcgggtccggaccaagcgaccgtggcagccatgtattacagctactacatgctaccgg

SEQ ID NO: 73653 - DNA, 75 bp, Homo sapiens
tcagaccataaccgcctccttcacttggccatggtgtccatgggctctggagaccatcagttcaacctcgcagag

SEQ ID NO: 73654 - DNA, 82 bp, Homo sapiens
ccctgcgccggcctcggccaccgagatcctgctgacgccggctagggaagttctactacatcaccctgctacgagaccccgt

SEQ ID NO: 73655 - DNA, 100 bp, Homo sapiens
ttttacaatttccactggaactgtgttcagattcacttccttctcatccttttccaccagctaaagtgtatgggtttcgacagaccatgatgaaattgag

SEQ ID NO: 73656 - DNA, 75 bp, Homo sapiens
ccgggaccgacccctctgctcgcggccgcgcctttgagctcccaaaatggcgatgacaccggcacctggcccaac

SEQ ID NO: 73657 - DNA, 82 bp, Homo sapiens
tttcataggcgtggccgagaaggccttttggctgagcgttcacgggccccgagcagggaaggtgctgagctactggtgcttc

SEQ ID NO: 73658 - DNA, 90 bp, Homo sapiens
gtcctgagatcaaatggcacttcattggccacctacagaaacaaaatgtcaacaaattgatggaccccaccaacaactgaacgctttggt

SEQ ID NO: 73659 - DNA, 99 bp, Homo sapiens
cgcacggacccatgaaccagccgggcggcgcggcggctccgcaggcctttgcccagtttgatgctgagggtgatgggacagttgatgccgagaacatgt

SEQ ID NO: 73660 - DNA, 99 bp, Homo sapiens
gatggtcttcagagagcaactatcctccccagctttaccgatttgttacaactcaagcaagggccagcagaaattctcttttgacagatataattgctg

SEQ ID NO: 73661 - DNA, 75 bp, Homo sapiens
cagtctgcatgtgcagttttcagccacccaggctactttgggaaagttggtatgaagcattaccacttaaagagg

SEQ ID NO: 73662 - DNA, 73 bp, Homo sapiens
cgcgccccgtgcgcttcccgcgggagcaccagttcttcgaggccaagatcaaggctcgagatcttcgcgggaa

SEQ ID NO: 73663 - DNA, 90 bp, Homo sapiens
caagtatatggaacctctgcaggagattccatttgttatcccacgacccatccttgaagaaggctatttttatgattcccacaaatccac

SEQ ID NO: 73664 - DNA, 83 bp, Homo sapiens
ctcgatgctggcctggagcagaaactgagctggaccactggagcctcggtgagggaataccctctaccatctgctttggtcag

SEQ ID NO: 73665 - DNA, 97 bp, Homo sapiens
ctggcggccgttgaaaaatggcgactgtggcagagttgaaggctggaagatgagaatgtgcctactgctcctgatcctccaagtcaacatttacgtg

SEQ ID NO: 73666 - DNA, 83 bp, Homo sapiens
tgatattgtgcttgccatccttgaattactaaagtgctccatctcgaaaagcgagaaaggcctccagaccaccaacactcagc

SEQ ID NO: 73667 - DNA, 100 bp, Homo sapiens
gcctcaccctctgggtcatcgaccaagagactggggatatttatatctggggctggaatgaatcagggcagctggccctgcccaccaggaacctggcaga

SEQ ID NO: 73668 - DNA, 93 bp, Homo sapiens
cttcggattatagtctctgaccatgtggaattcccagtacgacaggcagacatatctgaagagatggattaagaatgctttggattaaggatt

SEQ ID NO: 73669 - DNA, 74 bp, Homo sapiens
atccgaccaccgaggctggagggggagaacacccaggtatgggatggcaccaggacaccatttccatcttggag

SEQ ID NO: 73670 - DNA, 75 bp, Homo sapiens
gatgccaggaccacctggaagcctagaaatgtgtaaacaggaacatcgataagtagtgtaaaaacttgcacaatg

SEQ ID NO: 73671 - DNA, 90 bp, Homo sapiens
aacaaaccggaagcagtagaagtaacatttgcagcatctgtgttttgtgtgagcctggaccccaagaccaataccttggcagtgaccggg

SEQ ID NO: 73672 - DNA, 75 bp, Homo sapiens
cccagtctgtgtctcaaatcaaccacaagctggaggtacaacaaataacactgtgactccaacctcacaacctgt

SEQ ID NO: 73673 - DNA, 80 bp, Homo sapiens
gtcgggacaccccggaagctgggaaatggagtgcgccggtctcggggaaatgcccggttccttcgtgcccacggtcaccg

SEQ ID NO: 73674 - DNA, 98 bp, Homo sapiens
agacagtctgatgtttacatgggtgcaaagttccccatcaagtggacggcccccgaggcagccctgtacgggaggttcacaatcaagtctgacgtgtg

SEQ ID NO: 73675 - DNA, 100 bp, Homo sapiens
aatgccacaaatgcaaatacttgtgcactgggagagttgcccagaagattgttgccacaaggaagaagcagcagctgtccataggaccctgcaagtcgct

SEQ ID NO: 73676 - DNA, 90 bp, Homo sapiens
gccgggggcctgctgcgcccggctgcatatctatgtgagactgaattttcctcttagacttcagctaaaactgtgtattgcatcaggctg

SEQ ID NO: 73677 - DNA, 82 bp, Homo sapiens
gtggcggcgctgctgctcgggctgctcttggagatataacacgtgggaaccggaggagaacatcctggaccccaggctgctg

SEQ ID NO: 73678 - DNA, 100 bp, Homo sapiens
ttgacaaggcactgctttttcatgacgctgcatcttcctcccgtgaggctggccgagctccacgctgatctgaagatacaggagagggacgaactcgcct

SEQ ID NO: 73679 - DNA, 50 bp, Homo sapiens
tgcgggttcaggaggtacccaaactgaagattgtccagaacatcgtgggc

SEQ ID NO: 73680 - DNA, 100 bp, Homo sapiens
gtgggaaagagtttggcgttgaaagaagtgattgctggaatgactcttccatatgatactctggatcaagtaaggaacagattggaagaagtctctccta

SEQ ID NO: 73681 - DNA, 75 bp, Homo sapiens
gagaaccgggacccccctgcggggacccggaactggagcatattaatgaaaagtgccataaactgaaaaaccaaa

SEQ ID NO: 73682 - DNA, 100 bp, Homo sapiens
gaaccagttcaggcaacatgtgacaactttgagggaaacaaaggagtcagtggatcggtggggaaaatgctgcttaccctgggccctgggctgtagaaag

SEQ ID NO: 73683 - DNA, 80 bp, Homo sapiens
aatgaaatgaagagttattctcaagctgtcacaggagatgtatatacaaagacgatatctttatggtcgtatatcaatag

SEQ ID NO: 73684 - DNA, 74 bp, Homo sapiens
tgccgctttccacctagaagaagtacattgtgaagtgccatggcaacacgcttctgccccagttcctggggatg

SEQ ID NO: 73685 - DNA, 50 bp, Homo sapiens
gctcattcctaacagtggatttacttgttgaatataagctgggattccaa

SEQ ID NO: 73686 - DNA, 100 bp, Homo sapiens
gcgcactttttgcaagcagaactgaaggatgccctggggagtggaggaacgggccaaggaccctaaagtaaattggttgaagaaattagatcccaaagat

SEQ ID NO: 73687 - DNA, 87 bp, Homo sapiens
actgaattatcacttctggcagatgagaaacaagggcagctgcgttccctgcacctgacatgtgacagcgccccagttgggagccag

SEQ ID NO: 73688 - DNA, 74 bp, Homo sapiens
ccggcagcgggacccggcgaagacgcgaccgcggcgcgagtcaccatggttgtatcagagtaagatggacggta

SEQ ID NO: 73689 - DNA, 75 bp, Homo sapiens
tggagcccaactgataatccttgaacatgtttcaggagtcagtgaccttcaaggatgtgtccatagatttctctt

SEQ ID NO: 73690 - DNA, 98 bp, Homo sapiens
tctttgacatggagagaatttcactatattcaggattatagctggacagacatccgctgcccctttgaaaaacgaagagatgcagcatgcgtgttttg

SEQ ID NO: 73691 - DNA, 97 bp, Homo sapiens
tcctgccatctgatattacaatctaccaccttattcaggaaggaaattgacagaactttcataaagccaaagactggcagaaataaagtaaataatg

SEQ ID NO: 73692 - DNA, 74 bp, Homo sapiens
caagcatgtggtttggcacccaagtcaggagaaccgactgggtctccagtagtctctgaggagccgctcgacct

SEQ ID NO: 73693 - DNA, 100 bp, Homo sapiens
ttgtagacgccatgtccaaaagttaaatctactacagggacaagtttcagagctgccactcagttgatcacttgtaaaacatgcaacagaacagtgaaac

SEQ ID NO: 73694 - DNA, 75 bp, Homo sapiens
ggccttgtgacacaaggaggcaaagttatttgggcacattttctgtgacaagtttccaaacctagcagtcggaca

SEQ ID NO: 73695 - DNA, 99 bp, Homo sapiens
cgagctgctgatacagaagagatggatattgaaatggacagtggagatgaagcctaagaatatgatcagatgccatggacaatattaccaggcagaacc

SEQ ID NO: 73696 - DNA, 90 bp, Homo sapiens
gtttagccttgcgactggcccagtatccaggtcgaggttctgcagaaggttgtgactttagtatacaggctcccatttaccaaaccaaaa

SEQ ID NO: 73697 - DNA, 100 bp, Homo sapiens
atactgcatatcagaaacaacagaccaactgccagagttttctctgggtgttaacagcggttggactacagacaattgcttccgggcagcgttccaaaat

SEQ ID NO: 73698 - DNA, 100 bp, Homo sapiens
actctggagtgaagagatctgcctggaaccctgactctatcactaggctcgtggtcccaagaagcatctgaagcgggtggcagctccaaagcattggatg

SEQ ID NO: 73699 - DNA, 100 bp, Homo sapiens
caacttaaaagatgccacctctaaggatcagttccatgacaagaccccttatacgattatgtttggtccagataaatgtggagaggactataaactgcac

SEQ ID NO: 73700 - DNA, 75 bp, Homo sapiens
gtcaagtattacgcggtgggcgacatcgacccgcagcgagtaaccagctcataaatcacatcgaacagtttttgg

SEQ ID NO: 73701 - DNA, 100 bp, Homo sapiens
cctccttcaccgccgcagaccccttcaagttctagtcatggtgcgctacaaggaggagtttgagaagaacaagggcaaaggtttcagcgtagtggcagac

SEQ ID NO: 73702 - DNA, 98 bp, Homo sapiens
tcttggaagataattactcaaaatatgcagggaaggacactcaatcacttgtcggaagtccctcaacccgtatagcacctcatattattggagcagaa

SEQ ID NO: 73703 - DNA, 75 bp, Homo sapiens
gaagatcgcagactttggactctgcaaggaagagctgggcatgtggagcacatgaggacagaccgcaggctgcag

SEQ ID NO: 73704 - DNA, 99 bp, Homo sapiens
agagcttggaaaagttgagccctcttcgagagaaattggaagaacagtttaagggaacactgactatgccaaatggagactacattgaaggttatttta

SEQ ID NO: 73705 - DNA, 95 bp, Homo sapiens
tgcagagtgcctaaaccataacctcacaatcttctttgatgtcaaaggccatgcacacaaggcagacatgcagcgttgggaggagcagagccagg

SEQ ID NO: 73706 - DNA, 98 bp, Homo sapiens
gaggacccagaggaaacccagccgcttctggggcctcctggcggcaggtgcgcgcggagccatggttatcatgtcggagttcagcgcggaccccgcgg

SEQ ID NO: 73707 - DNA, 101 bp, Homo sapiens
gagtacgcaaacactttatgtcaatgaagcagagattgatattcgtttgagagaggaattttctaaaatgtgttttgaaacattactccagttttccttca

SEQ ID NO: 73708 - DNA, 100 bp, Homo sapiens
cagcctgcggagcctgtggggcaggttgccaagagggtgatcctgttgtcgggcacaccagccatgtcccggcccgcagagctctacacgcagatcatcg

SEQ ID NO: 73709 - DNA, 100 bp, Homo sapiens
ggagagttacagcctgtactacctgaaggagcttcagctgcccctgaagaagaccaatgatgcgagctcagagtcaatagcatccttctctaaacaggag

SEQ ID NO: 73710 - DNA, 100 bp, Homo sapiens
acccgacaacaggttgtctcagagtgtgtaccatggagcgtcttccgagggatccctgtccccagatactaggtccctatgcctcccccacgttcctccc

SEQ ID NO: 73711 - DNA, 83 bp, Homo sapiens
gctccaggacccgctgcagcagggctgtgtgagctcaggtatgtgaaacataatggatctaagagtcagagttacacaaaaag

SEQ ID NO: 73712 - DNA, 74 bp, Homo sapiens
gtgctggcatcagcacagacaccgctttgccgataggcctgaccgccgctgcctacagagtcacactcaatcct

SEQ ID NO: 73713 - DNA, 82 bp, Homo sapiens
ggcaaggagctaaagcagcgtgcgttcagccctgggatcctgagagtgagaagcctgactgaccccgcctagacgccaggcc

SEQ ID NO: 73714 - DNA, 80 bp, Homo sapiens
tgggacagccatggtttcagacggaaggtgggagtcaatcattttgacaagtctcctgaaaggaacagctagcaggaact

SEQ ID NO: 73715 - DNA, 100 bp, Homo sapiens
gtgacaactttcgtttccctctgagggaattgggaggtcggcggccccaaaagcaaacgggtgaaccacctctagagaatggattaattccatacctggg

SEQ ID NO: 73716 - DNA, 100 bp, Homo sapiens
gcatgaatggagcaaaatggcggatcatgtgcaggtttgccaataggattatcctgctgccatcatgtcttggtttgttgatcttgctggaaaggcagaa

SEQ ID NO: 73717 - DNA, 98 bp, Homo sapiens
gacttttcgtgtcccgctgtaaggaaacaagatggtccttaaaaccgaagaggaggacgagttttgcggcctccaggtggtggatccaatttttcatt

SEQ ID NO: 73718 - DNA, 90 bp, Homo sapiens
ctccagccgcccgcgggccagcgcaccggtcccccagcggcagccgagcccgcccgcgcgccgattctgcttctcagaagatgcactatt

SEQ ID NO: 73719 - DNA, 98 bp, Homo sapiens
aggacatattcgatgccatcgtgatggcggatgagaggttgttaaaaacaacttgaatcctgtttggaggcctttcaagatctctcttaactcactgt

SEQ ID NO: 73720 - DNA, 96 bp, Homo sapiens
tctacagccgcaagaacaacatcgtcctcagtgccggcatcctcttcgtggctgcagccgcttacaaacacgcagatggcaagaagattgatggca

SEQ ID NO: 73721 - DNA, 50 bp, Homo sapiens
cccggattcaggattcagatgaaccagttccagggccctgcgaaccagaa

SEQ ID NO: 73722 - DNA, 98 bp, Homo sapiens
agcagccgtccggagccagccaacgagcgcaggagcattggtttgaaaaggccctacgagacaagaagggcttcatcatcaagcagatgaaggaggat

SEQ ID NO: 73723 - DNA, 87 bp, Homo sapiens
cggccctcaccgccctcaccacccctatccagacggctgcccttcaagtaccaggtggcaatgaccatgagatcttcacagacccca

SEQ ID NO: 73724 - DNA, 75 bp, Homo sapiens
cgcagatcctgagacccggacagtggcagtgaaacagattgcagtgagcatgctgacctaccccttcctgctagt

SEQ ID NO: 73725 - DNA, 89 bp, Homo sapiens
ggcacgagtcgggtcctgagaccagggaaagaatatggcaaagctgatgcaagatgggtttattttgatccaaccattgtgtctgtgga

SEQ ID NO: 73726 - DNA, 51 bp, Homo sapiens
gatcaagaccggcgtggtgaagcgagacattactgccgggagtgttgagtg

SEQ ID NO: 73727 - DNA, 88 bp, Homo sapiens
cgatctccgccctggggtcattgtcagaccagcatctcagacatgtcgaaaaagatgttttgatccctaaaataatgagagaaaaggc

SEQ ID NO: 73728 - DNA, 51 bp, Homo sapiens
cacagttgaagcctgattgcaggtgccagcgagatttcagattcctgtaaa

SEQ ID NO: 73729 - DNA, 100 bp, Homo sapiens
ggcgagcatcaaaagccggggagccgccttgctccgaaccttcagctttttgggctttgagattgtgagaccggggcatccccttgtccccaagagaccc

SEQ ID NO: 73730 - DNA, 100 bp, Homo sapiens
gccgatcctccaggcatgccccgctacgagctggctttaatcctgaaagccatgcagcggtatctccagatgaaatggccactgcttgatgtccaggcag

SEQ ID NO: 73731 - DNA, 79 bp, Homo sapiens
gaaaagaacagagccatcattcaagaagtttgcttcatgtgtggcgggcgtgtttgtgtgcctgctggagtacccccgg

SEQ ID NO: 73732 - DNA, 98 bp, Homo sapiens
aggcagcctatggggagctcagggccatggtgctggacctgagggccttctatagaatgtttctggatctaccgatggtctggttgacagcgctggca

SEQ ID NO: 73733 - DNA, 99 bp, Homo sapiens
tggaacagatttcaaaaggacgtaatactccactgtgcgacagggagaatgtgtgcaagtgtggctatgcccagagccagcacatggaaggcacccaga

SEQ ID NO: 73734 - DNA, 75 bp, Homo sapiens
tcttttcagcaaatatgggaaggccagaagcctgtcttagatgttcatgcagaactagacagaattacacgaaaa

SEQ ID NO: 73735 - DNA, 101 bp, Homo sapiens
gcttctgcctggtgctctgcgtcctcatcgggcttatgttcgaggatgctccaaagtgacctgcatcagcttgacccgggaggcctccattaaactgtcac

SEQ ID NO: 73736 - DNA, 100 bp, Homo sapiens
ctggatccccgcccaggaagcccctctgaagcctcctcgccgccgtttctgagaaggagctgctaagacacatggttgcacagaaggtgaaaccaaatct

SEQ ID NO: 73737 - DNA, 79 bp, Homo sapiens
atcatggtgattctggtgctgggctacgcctctggacgagaccagccagatgagcgacctcccggtgaaggtgatccac

SEQ ID NO: 73738 - DNA, 82 bp, Homo sapiens
tcagtgcgccgctctccagcccgcttgaacggtagaattgggctatttgctgaagcttcttggtggcccttgctagcccagg

SEQ ID NO: 73739 - DNA, 100 bp, Homo sapiens
ctggggctagtggtcctctggtcttccctgaccccgcggccggacgacccaagcccgctgagcaggatgaggtgtcctctcgcatggcagagcaagtggg

SEQ ID NO: 73740 - DNA, 50 bp, Homo sapiens
cctggggttgaggaactgcctcaaaccagtccagctacgggggcccagcc

SEQ ID NO: 73741 - DNA, 101 bp, Homo sapiens
gagcagatccgatggagaggctgagctgctccaggacttgggacatatgtagagtgtgtcggtcagaaggaacacctgagaaaccgctttatcatccttgt

SEQ ID NO: 73742 - DNA, 90 bp, Homo sapiens
cccggtttaagatctccaggtgaagtagatttttatttgtttctgccacccacttagcagacaaggtagaggaggcagttctggatcgtt

SEQ ID NO: 73743 - DNA, 82 bp, Homo sapiens
ggactccgaagcccagcggctccccgactccttcaaggctccccaggtgtgtcctggtagacaactgctcccaggagctggc

SEQ ID NO: 73744 - DNA, 82 bp, Homo sapiens
ctgctgctgcttcaatgtccgcatcgcaaccaccgccctggccatctaccatgtgattttgagaagagggggaaaaaggaag

SEQ ID NO: 73745 - DNA, 100 bp, Homo sapiens
ggctctggagcaattaaagccactgctttcggaagcaagatttccagatgtagcaaatgggtttattgaggaaataattcattttaagaattattatgat

SEQ ID NO: 73746 - DNA, 100 bp, Homo sapiens
acccagtctgagtgtctgtccccagagcctcagtttgtgcaggacaccgacatggaacagggactcactgggggacacattcagctaacgtattttagca

SEQ ID NO: 73747 - DNA, 74 bp, Homo sapiens
gcagcacgtggccctgcagtttgagccaggacccctgaggagaaggcagagcccccccaggctatgaatgccct

SEQ ID NO: 73748 - DNA, 100 bp, Homo sapiens
gcatatatcagactagcacggggcaatacaatttgagagggaagatctgatctcctagaattagagttggtacagaaaccatttcagctccaaaaatgtt

SEQ ID NO: 73749 - DNA, 75 bp, Homo sapiens
ccatcttcgacttgagcgaagttttatgcaaggcctccggtgtggctgtctctgatggtgtcatcaaggtgttca

SEQ ID NO: 73750 - DNA, 82 bp, Homo sapiens
cagccgatccagcctgcggagcctgtggggcagctctacccttctccaaaagaagagccaagagaaggtccttttctacaaa

SEQ ID NO: 73751 - DNA, 51 bp, Homo sapiens
ccttgaagcagaggagcagcaggaccaggtcaaaatgcagatcttcgtgaa

SEQ ID NO: 73752 - DNA, 80 bp, Homo sapiens
cctttccagagagccagaaagaagttattcagcttctcaaggctggaaaagcgaaggaagtttcctacaatgcactagcc

SEQ ID NO: 73753 - DNA, 97 bp, Homo sapiens
ctagctgaaataacccttgatcctcctcctaattgcaggttatcaacatggattatggaatgcaagaaaagaatccaattgatcatgttagcttcta

SEQ ID NO: 73754 - DNA, 100 bp, Homo sapiens
ccttccagctgagctacggagggctccggcacttctgctggcccagatacactgactacggctctgaacaagaaggaacacagagggtgcgacagcccag

SEQ ID NO: 73755 - DNA, 74 bp, Homo sapiens
ctgggaccggaggagacatcggcctctgcaggcttgccgaagaagggagggcaagaagtacaagcccctggacc

SEQ ID NO: 73756 - DNA, 101 bp, Homo sapiens
aggagaagtaccaggaggcgttggccaagggtgtgttctactccctcttctgggaatgaagcctccccagcaaagcctatacctgcttgttgattctgttg

SEQ ID NO: 73757 - DNA, 100 bp, Homo sapiens
tcgccgtcaccgccgcggctccggccctggccccgatggctctgtgcaacggagactccaagactggtcaaacaaatggattttacagaggcttacgcgg

SEQ ID NO: 73758 - DNA, 75 bp, Homo sapiens
tccagaattacgggcaagcgctgttcaaacccatgaaatctcacattcttgaaggtggcattgaagagcactaag

SEQ ID NO: 73759 - DNA, 98 bp, Homo sapiens
cctgctggaccagctcatgggcacggctcgggacggaaaatctggagagctgaagagttggagctattcacgagactgaacatcacttccttgttgac

SEQ ID NO: 73760 - DNA, 89 bp, Homo sapiens
agcgacatcaccaagctggaggtggacgccatcgtcaacgccgacaatgcagatcttcgtgaagactctgactggtaagaccatcaccc

SEQ ID NO: 73761 - DNA, 100 bp, Homo sapiens
gacagcacaggtcacagtaaggccaaaaatgtgcatactcacagagttagagagagggatggtgcatcctggtggggaagaagttttaagggaacaagct

SEQ ID NO: 73762 - DNA, 100 bp, Homo sapiens
gcctcccgagtagctggggctacagttccgggagaacctccaggacctgctgcccatactgcccaatgctgatgactacttcctcctgcgctggctgcga

SEQ ID NO: 73763 - DNA, 100 bp, Homo sapiens
cttggagaaagactactttggacttttgtttcaggaaagccctgagcagaaagaacggaaaacagttcttccttcaaagcatgcagtacctgaagtaata

SEQ ID NO: 73764 - DNA, 75 bp, Homo sapiens
ggatcgctgtgatcgtcacttggtgtctttaaaggattgccatttaatgccattcaagatctactaagcatcatt

SEQ ID NO: 73765 - DNA, 80 bp, Homo sapiens
aatacaggccaaactacaattcccgagagggaaatcctcattgacgattcaatttgttgaaggccaatttgtggactcct

SEQ ID NO: 73766 - DNA, 141 bp, Homo sapiens
caacgacctgtttgagagtgggaacatgacgcaggtgcaggtgtctcttctcgccctggcggggaagaagatgctcatgaagcagcaggaccggctggaggagcgagagcaggacattgaggaccagctgtacaaactcga

SEQ ID NO: 73767 - DNA, 74 bp, Homo sapiens
acgaggagaatcctgggtttagccattgagaaatcaatgtggactgaacataaatcacctgatggaaggactta

SEQ ID NO: 73768 - DNA, 97 bp, Homo sapiens
atcgacaagctgcccatcgaggagacgctggaggacagcccgcaggtggagtattgctcctggaaaatccaaaaggtgacaataggttggacctttt

SEQ ID NO: 73769 - DNA, 98 bp, Homo sapiens
ccggacacacccttactctccgaggtggacatctataccgtcaaggtggaagacctgaccttcacctccccgttctgcctgcaagtgaagcggaatga

SEQ ID NO: 73770 - DNA, 75 bp, Homo sapiens
cctggagcctcagttggaagcagccgatccagcctgcggagcctgtggggcagactggagttccatagactttct

SEQ ID NO: 73771 - DNA, 75 bp, Homo sapiens
aattacaatagttggcatggctttaactggagtcaaattgactttatcagctttaatcgatgggaagaacttcag

SEQ ID NO: 73772 - DNA, 98 bp, Homo sapiens
gaaggcttgtgtctcatatatgagggaaaatcaacaaacttttgagtctgctatgaccagggccagagcactcagatctcagtcagaggagtctgctt

SEQ ID NO: 73773 - DNA, 98 bp, Homo sapiens
gtgccggcccccacctaccaccccttggagacagcctacgtgctgcctggcgcccgggggcctcccggggacaacgacagcggtggcctacccgagcg

SEQ ID NO: 73774 - DNA, 100 bp, Homo sapiens
ctcgctccgtggccttagctgtgctcgcgctactctctctttctggcctggaggctatccagcgtgctggcattgacggagtggaggaaattaagcgcca

SEQ ID NO: 73775 - DNA, 74 bp, Homo sapiens
ctagaccttgcgtgtggagagagaattcgactggagaaggtgctgatgtatggacagccgtatcgtgttacctt

SEQ ID NO: 73776 - DNA, 82 bp, Homo sapiens
caaatcatggagccgctggggtcccttttgcctcagatactattttgaagagtccctgtgaagcaggaagagtgagggcagg

SEQ ID NO: 73777 - DNA, 97 bp, Homo sapiens
gaatgcactaaacatgaagagcttgaaagcgaagttcaggaagagtgacgttatatcttaagtgtggtgctgctaacattgcccaggcagcatctgg

SEQ ID NO: 73778 - DNA, 75 bp, Homo sapiens
taaagtcagtgacatgcccatgcgagtacctgaggaagaaacccgatggaggcaatgtacccacacatattctac

SEQ ID NO: 73779 - DNA, 100 bp, Homo sapiens
tgctcgagtgcctgcaggatgtgagggaggtggaagttgatgggtcgaaactaaatgtgaccagcacgtggaacctggcttcgcccttattgtctgtcag

SEQ ID NO: 73780 - DNA, 100 bp, Homo sapiens
tccccagggcggcatcgtcgtctatgggggctactcgaaacagggactttgaacatgtcggggatcgccctcagcagactcgcccaggagaggaaagcat

SEQ ID NO: 73781 - DNA, 83 bp, Homo sapiens
cggaggcagaggtggaggcgctttgaaagggactttgaacatgtcggggatcgccctcagcagactcgcccaggagaggaaag

SEQ ID NO: 73782 - DNA, 100 bp, Homo sapiens
tgatgctggagaactgcaggaacctggcctcactagggagactcatgcatctgtatgccgtgtgcgtggactgcctggaaggggttcacaagatcatctg

SEQ ID NO: 73783 - DNA, 100 bp, Homo sapiens
cccgctcgctgggagagaggtacctctccttttccctctccctttccctaaggactggaatgtcacgtggaataccagcaaccccgacttcaccaagtgc

SEQ ID NO: 73784 - DNA, 83 bp, Homo sapiens
gagcctcagcccggggaggccaggctggcagccctcaccgcaggagacaggacagagcgggatgccaccagcttgtccaaagg

SEQ ID NO: 73785 - DNA, 83 bp, Homo sapiens
gaagagttgtcccagctcggcccgcgggggagccccgggagccgcacgtcagagcaccataacatggtgtgggaagtgaagac

SEQ ID NO: 73786 - DNA, 98 bp, Homo sapiens
tactacacaaccgtctccagccttggtctgagtggactgtcctgcagatgccatggacaatattaccaggcagaaccaattctacgatacccaagtca

SEQ ID NO: 73787 - DNA, 75 bp, Homo sapiens
gtaagttgatccatccagatgaggatatatccctggaattagaaggtgacgaggagggagaagacgaggatgatg

SEQ ID NO: 73788 - DNA, 75 bp, Homo sapiens
tttacatgcacttgaacagactagaaattgcaccacagatatatgggttgttaccttccgaacaagaatctatca

SEQ ID NO: 73789 - DNA, 100 bp, Homo sapiens
gcgggacgaaccctgctccgcgcgagatcacttttctccagagaatgcaaatgacacggccaaggaaacatgcctaaattggtttttcaagattgcctcc

SEQ ID NO: 73790 - DNA, 83 bp, Homo sapiens
gatcgcctcgcgccggctgctctttccggtctgcgctcctcagaccaccggcaggtgaacagcctgatgcagaccgaggagtg

SEQ ID NO: 73791 - DNA, 83 bp, Homo sapiens
cgtgtgccgcgctctgggcacagccttggaaagtcaggaccgcgacggcagcagagcagaactgtggctgcaccatctgtctt

SEQ ID NO: 73792 - DNA, 100 bp, Homo sapiens
cagggggctgtcgcccgaatgcaggaagaccgtgatgggagctgcagcacagtcgggggtgtaggttatgggggccaagaagcttgagagaagaaaaatt

SEQ ID NO: 73793 - DNA, 50 bp, Homo sapiens
ccacggcccagcaggaggacccaggtctccataacccctcggacaaacgc

SEQ ID NO: 73794 - DNA, 100 bp, Homo sapiens
gggatgtctacctggtaatagaggacttgaagcagaaagcaagtgaatacgagtcagaaggtatttatcagtggcattaaatcagagtgcagaaaagtac

SEQ ID NO: 73795 - DNA, 98 bp, Homo sapiens
gaggagggcatattgacgcaatcagaaaatcaagtaaaggaacccaacagagatctcttctgttctccactgctagggaaaggtggcccagacagcgt

SEQ ID NO: 73796 - DNA, 82 bp, Homo sapiens
caacttctgctacagacgactcactgtgctgtcgtcatgcctcaaacccgatcccaggcacaggctacaatcagttttccaa

SEQ ID NO: 73797 - DNA, 100 bp, Homo sapiens
ggaggccttgccgtaggtggcttcgagtggaacggcctggagaacagctggcgccagcaccgcgaggccgcggcgtatctgcatgggcgcctgcaggcac

SEQ ID NO: 73798 - DNA, 90 bp, Homo sapiens
gtgcgagaactgcgcagacctggtggaggtgttaaatgaaaaaaacttgctttatttgacgaatggaattccttggctgtttatgtttca

SEQ ID NO: 73799 - DNA, 50 bp, Homo sapiens
actacagcaacctcgtctcagtggggtattgtgctcacaaaccagaggtg

SEQ ID NO: 73800 - DNA, 101 bp, Homo sapiens
tgtaaagcaatatttcgagcagtttggcaagggttaccttcccgccaatgtagaccggagaccagccactctccagagaaaacaaaaagaatattttgcat

SEQ ID NO: 73801 - DNA, 75 bp, Homo sapiens
ttaaacttgggcttcgcagtcctctcacctccataccccggatttggagcaagacactaagggcgactaccagaa

SEQ ID NO: 73802 - DNA, 100 bp, Homo sapiens
tcttctgggtctcttcagattatcttcaagagattcagacccaattagaacactctgtattaagccagcaatgtgtgggttgctgaccgaggaaataaaa

SEQ ID NO: 73803 - DNA, 97 bp, Homo sapiens
ggacaggacaggacccggcgctggaagctgcaccgccagcgcgccgcccctccgtccctccgccccgcggcgcaggattgacttctaaagactcttg

SEQ ID NO: 73804 - DNA, 100 bp, Homo sapiens
aggaatgcagtgctttccacgccctctcagcagctctgtgctgcttctatcaccgcaagtctttcattggagtcaagcttatgtccctgatgccaaaaat

SEQ ID NO: 73805 - DNA, 100 bp, Homo sapiens
agcctcccgagcagctgggactacaggggaagaagttcctgggcgacctgcagccagacggaaggatcatgtggcaggagaccgggcagaccttcaactc

SEQ ID NO: 73806 - DNA, 100 bp, Homo sapiens
gagcgagaaagccgttgcctccagcaccacttctaatggtatcattggaacatttcaagatcatcaaatcaaattccacagggattggtgaccaaccaga

SEQ ID NO: 73807 - DNA, 100 bp, Homo sapiens
tgtgtgattgctttgcatgactgcaatggagatgtcaacagagctatcaatgttcttctggaaggaaacccagacacgaatccaggagtcctccagctga

SEQ ID NO: 73808 - DNA, 100 bp, Homo sapiens
tgtttgtttctccaaataccatctgttgcagactggggtgcatgacattttagagagctgtagtacacatggatgaacgacgagaagaacaaattgtaca

SEQ ID NO: 73809 - DNA, 100 bp, Homo sapiens
ccactggagctatacagcttttctgcaaaagaatcccaaggactgcagcaaagccaaaaagctggtgtgtaatatcaacaaaggctgtggctatggctgt

SEQ ID NO: 73810 - DNA, 85 bp, Homo sapiens
catggtcgtgccactagccagctcggaagcccaggtcatcatcagatttgaaatatttaaagtggatacaaaactatttcagcaa

SEQ ID NO: 73811 - DNA, 50 bp, Homo sapiens
tctttgctacgtacagcaaaaggtccagagggggcaaacctctttattta

SEQ ID NO: 73812 - DNA, 98 bp, Homo sapiens
ttccggcgacagttggcgatcccactctatgacacgatgaggcgagtggtacgacagagcaagtttcggcatgtatttgggcaagcggtgaaaaatga

SEQ ID NO: 73813 - DNA, 76 bp, Homo sapiens
ccgacgcctcagccgcttggggcccgcacggaccctctacttcagaccctgatgctcccataagacagaaaatgcc

SEQ ID NO: 73814 - DNA, 74 bp, Homo sapiens
tgagctatccacatccaggaactgacaatctgttgatgttaaatggtacaggtgaacaaaggcagagtaaactg

SEQ ID NO: 73815 - DNA, 100 bp, Homo sapiens
gccgcgccgcccggcagcctcggcaggatttgaagcctagcaacattgttgtgaaatcagactgcaccctgaagatccttgactttggcctggcccggac

SEQ ID NO: 73816 - DNA, 100 bp, Homo sapiens
cggcgatgtgccaccgaggctgaggatgatggtagattgccaggttcatcatgcctagtggcgtataagaagaccccgccaccggtccctccacgcacca

SEQ ID NO: 73817 - DNA, 75 bp, Homo sapiens
tttgtgtgcaatgccccgggctgtggacaggattctggactctacttataatatccctaactgctggattctcct

SEQ ID NO: 73818 - DNA, 50 bp, Homo sapiens
ggaaaggagaggatcccggagccgggaatccttcctgtggattatcttaa

SEQ ID NO: 73819 - DNA, 96 bp, Homo sapiens
agggagtcgagccagcgtcgccgcgatggtgttgttggagagcgagcaggagagatggagccatctcagtgtgtggaggagctggaggatgatgtg

SEQ ID NO: 73820 - DNA, 75 bp, Homo sapiens
gccaaaaagtgtctagtcaacttaattgagaaggatgtagatgctgcctacatgaacaaggtggagctggaggcc

SEQ ID NO: 73821 - DNA, 90 bp, Homo sapiens
cctggcccgcggcgccgcgggagcgccgggccccgacgatatgatttggctatcaaagaccttaaagaagccttgattcagcttcgaggg

SEQ ID NO: 73822 - DNA, 75 bp, Homo sapiens
ggaaatcgggctgaagcgactgagtccgcgatggaggcaaactaggcgtggcaactgctggctgcgtgaatgaag

SEQ ID NO: 73823 - DNA, 51 bp, Homo sapiens
gtgaagtcaagtaaaatcgcacactggcacggatgggcagaagcctttgca

SEQ ID NO: 73824 - DNA, 75 bp, Homo sapiens
acaatggtcaccgtctcttcaggggagacaggtgtggacatgagtggctgggatgcagtgccgtagcaggctggg

SEQ ID NO: 73825 - DNA, 90 bp, Homo sapiens
tgtaaagctgtcctcatttgtgactatggacctatggagttggatttctccagaggacattgtgttcatgacaatctatcaccacaaggc

SEQ ID NO: 73826 - DNA, 82 bp, Homo sapiens
cagcgctgccgccgcgtcctcagccaccgctccctcttcccacgacctgcctagagctggaacgttacctccagagcgagcc

SEQ ID NO: 73827 - DNA, 87 bp, Homo sapiens
tcacagatgctgagagtgaagggggatatgaagaagctgaagtccggaaaaaacttgaggaaaaagacaggcaggaggaagcacagc

SEQ ID NO: 73828 - DNA, 75 bp, Homo sapiens
ggcaaattgcaaaccataaggatgtttcgttccctgatcagcaagttgctcggatggaaaaactagctggtttgg

SEQ ID NO: 73829 - DNA, 90 bp, Homo sapiens
tctataagaacgtggtcctgtatattattgaggttggagaaacgtacggtaaggatataacctcccggggcaaagacaagccgattgccg

SEQ ID NO: 73830 - DNA, 75 bp, Homo sapiens
agaggctgaacctggacactgagctgtgagtaccagagtgcccactggttccaacagttcttctcagaccacaga

SEQ ID NO: 73831 - DNA, 119 bp, Homo sapiens
ctgtaatcccagcactttgggaggctgaggcgggcggatcacaaggtttcatcagagcaagaaaaagaacaagagactttaataagccagaaaagcatccctgagcctctcccagcagc

SEQ ID NO: 73832 - DNA, 89 bp, Homo sapiens
agctgcacagcgagggcaccaccgtcctgctcttccagttcgggatggacaaccgcatccagggtggctacgagaacgtgccgactatt

SEQ ID NO: 73833 - DNA, 98 bp, Homo sapiens
tgcagcctgccccgcggccaacatgagcttcttgttatttcgccagaagtttgagtatcactactcctgaagagatgattgaaaaagccaaaggggaa

SEQ ID NO: 73834 - DNA, 90 bp, Homo sapiens
atccgttggtgcatgaaagtcttctaaccattccaaaatctctttcaggactgaagcgggtcacgggcgggtttaactccaagaacagat

SEQ ID NO: 73835 - DNA, 108 bp, Homo sapiens
agggggagtgcgcggcggccgcagctgccacaaaccagtggaggcgctccatttgggaacattaatggctgcccacggctacttctttccaatctcagatcatgtcct

SEQ ID NO: 73836 - DNA, 90 bp, Homo sapiens
cgggagcgggagcggacgcggcctcagtcctgcgcgggtcagctatcacattgaaatgagcttctttgaagtatataatgaaaaaattca

SEQ ID NO: 73837 - DNA, 75 bp, Homo sapiens
atcatcggtacccagttcaggaagctccgggatggtgatcgggagccatttgtgcaggccaagctgcggcccgag

SEQ ID NO: 73838 - DNA, 100 bp, Homo sapiens
ggaaagcggcgttatgacaggaagcagagtggctatggtgggcaaactaagccgattttccggaaaaagatgcttcaggactgccccaaggcccgcaggg

SEQ ID NO: 73839 - DNA, 90 bp, Homo sapiens
tccaaattcgcctccatctgtaccatggatcttacacatttgttccatggcttctcagctttaaaaggggaagtgccctagaagaaaaag

SEQ ID NO: 73840 - DNA, 83 bp, Homo sapiens
atgccgctcctaagcctgcacagccgcggcggcagcagcagtgagagcctcccgcgacgatgcccctcaacgttagcttcacc

SEQ ID NO: 73841 - DNA, 87 bp, Homo sapiens
ttcacaaaccttgtgtctcaatttggctacaaaaggagtggagtcaacatatcaatggagcaagtcacagtcgtcgatgccagcttc

SEQ ID NO: 73842 - DNA, 75 bp, Homo sapiens
aaattaaccaagatcattgactgcttggaagtggaaagtatgcctcagactcctcccttttcagcaatgtttgac

SEQ ID NO: 73843 - DNA, 51 bp, Homo sapiens
ctttattgaagctcacctttgtctaaataaatttccagcacctatctagag

SEQ ID NO: 73844 - DNA, 101 bp, Homo sapiens
ggcttcggaggaaagacaagctggagcacagtgtgaaccggttggcaatggagacaagaaaagtaatgaaaggaaatcattccagaaagacagctgcattt

SEQ ID NO: 73845 - DNA, 90 bp, Homo sapiens
agataagctgtcctctgcaaaccccaccatggtattacagagctccttaataagcatttatagtcagtttttggcagcaatagaatcact

SEQ ID NO: 73846 - DNA, 95 bp, Homo sapiens
tgcagccaggctgggattaaatgccaggggcagatttattgaaattaactagagatgatgtgatccaaatctgtggccctgcagatggaatcaga

SEQ ID NO: 73847 - DNA, 75 bp, Homo sapiens
tgtgccatcagtattgaaacctgacctcattgatgtaaacctccacagctgttgagaaaaaggagaaacctcttc

SEQ ID NO: 73848 - DNA, 100 bp, Homo sapiens
gaaatcagcagacatcctttaaggcataggttaattgaacattgtgatcacatatctgatgaggtctctgcaatgaaatgtggcctcttgccaatctccc

SEQ ID NO: 73849 - DNA, 83 bp, Homo sapiens
gcggatctcaccgccgctcaggcgcgagcccagcattgacctgctgcaggccttcgtggagcactggaagggcatcacgcact

SEQ ID NO: 73850 - DNA, 75 bp, Homo sapiens
tattctcctaacatgtatcctggagcgaatcctaccttccaaacaggacatggatttgattgacatactttggag

SEQ ID NO: 73851 - DNA, 100 bp, Homo sapiens
cctggaggctgtcctggcgtggcggcgctctgagctggtcttctggcggtggatgccccaggagtctcccaaagggaagaggaagttggatttgaaccaa

SEQ ID NO: 73852 - DNA, 142 bp, Homo sapiens
ttgatcctttctacaatgaatccttcagcttcaaagttccccaagaagaactggaaaatgccagcctagtgtttacagcctttgaactggaacatcagcctttttcctgcctttggactcaaactgaaacatcagttctttc

SEQ ID NO: 73853 - DNA, 75 bp, Homo sapiens
ctggtagagccggccgagctgaggcggtcgcggccatgaaggaaactcaaggtcccatgagcccccttggtgatg

SEQ ID NO: 73854 - DNA, 82 bp, Homo sapiens
gggttccagggagatcaaggacttcaaggatttctacctttccatagcaggggctcacaacgaagtaagacagtagatgaca

SEQ ID NO: 73855 - DNA, 98 bp, Homo sapiens
tcagaactgttccttcagccaaagaaacaagccgtggaataggtgtatcaagtaatggtgcaaagcctgaagtagaagaccatgatggagaaggtgat

SEQ ID NO: 73856 - DNA, 80 bp, Homo sapiens
ggaaactatccttggtctggcagacaccaaagactctgcacagaagcagaagaactcgcctctgttgagtgtaagtagcc

SEQ ID NO: 73857 - DNA, 75 bp, Homo sapiens
gttttttcctgtatgaagcggttggcaccactgaagtgaccgaatgagaagtgtatgctgacttgtaaagtgaag

SEQ ID NO: 73858 - DNA, 75 bp, Homo sapiens
ctacttcacattttccccaatatatgggccagtgtcgttattatccttgtggagtaatagaatcaatactgccaa

SEQ ID NO: 73859 - DNA, 50 bp, Homo sapiens
ctcttcatttttcggtctggaatgtggaagacctggagcggaacaacggc

SEQ ID NO: 73860 - DNA, 98 bp, Homo sapiens
agcctcccgagtagctgtgattacaggtcacctaacccatttgtggcttcctctacctgtgctcagccatggccagcgagagctcacctctgctggcc

SEQ ID NO: 73861 - DNA, 76 bp, Homo sapiens
tttcagttgctgtgaaaagggatgtcatgggaagccagtgaggtagtcagattcgacacctcttagaggctgcaat

SEQ ID NO: 73862 - DNA, 95 bp, Homo sapiens
tacctgttaccactttcaaaattaaacttgtggttccgtgggttgatatccagaaattagaaagaacgtccaatgtctttctgacggataccatc

SEQ ID NO: 73863 - DNA, 74 bp, Homo sapiens
gaaaggccaatttcatgaatttcaagagagtaccattgggggcgtccctgagggcctccatcctcgctcgggac

SEQ ID NO: 73864 - DNA, 100 bp, Homo sapiens
agagctacctatctatggagaaaatcattcaagtggccaagacctctgctgcacagagaggtgagagacttcagaggctgccctttcttttcatctgctg

SEQ ID NO: 73865 - DNA, 100 bp, Homo sapiens
aaccccaaggaggacgagggccggttgccgggcgcgggcgagaaaggtatgtgccgtccaggtgaaaaacactgggaagatgtatgcctgtaagaaactg

SEQ ID NO: 73866 - DNA, 88 bp, Homo sapiens
gaagtcctttcaagtctctaggactggactcttcctaagcaagtccgtatgtgccaagagttgtaacctctgcacaacagaaagcagg

SEQ ID NO: 73867 - DNA, 83 bp, Homo sapiens
ttccagaagacgcactacccggacgtcttcaccagcaaattgtggctactaatttgccccctgaagatcaagatggctctggg

SEQ ID NO: 73868 - DNA, 90 bp, Homo sapiens
gcgcacagagctctcagcgccgctcccagccacagcctcccgcgcctcgctcagctccaacatgagatgctgcaggcgaaaacgaaggaa

SEQ ID NO: 73869 - DNA, 100 bp, Homo sapiens
cctgtctggacagggcaccagcctgaaagtgaaaggaaagatatgatccgccaaatgatgattaaaatatttcgctgcattgagccagagctgaacaacc

SEQ ID NO: 73870 - DNA, 101 bp, Homo sapiens
ttcgtctcccaggacgccacctactccaagcccccctcgcctatgccttcagacatcaccagccaggtccatctggttggtattgacatctttactgggaa

SEQ ID NO: 73871 - DNA, 75 bp, Homo sapiens
cggcggcccggcccggctcgacgccaatggctggaggagagcaggagtgttcagaagcaaatgaagatcctgcag

SEQ ID NO: 73872 - DNA, 83 bp, Homo sapiens
gaatcctccgaatcttctgatgcagcggtggtgacgctgattgaagacgggaagaatgactccctgccgtctgagtccacgtc

SEQ ID NO: 73873 - DNA, 95 bp, Homo sapiens
acttctgcccggaccctgctggctatcctgcgcctttccactgctctgtccgtgcactggagaaggcgaggtcaagtgcccaactgcagaccaac

SEQ ID NO: 73874 - DNA, 82 bp, Homo sapiens
gctgtgtgcggtgctgctgagcttggcctcggcgtcctcggggctgttttgctgcagcttctgaagtgttaaagcacttgaa

SEQ ID NO: 73875 - DNA, 100 bp, Homo sapiens
gcggacttgcgggccatggaggagcgataccgccgctacgtggacaaggcccgcatggccccatcacaggtatatggaggagtgacctactataaccccg

SEQ ID NO: 73876 - DNA, 99 bp, Homo sapiens
gtggccccgtgtcctgcaggtattgggagatccacagctaagacaccgggacctcctggaagccaaaaatgttgactggtctgagtgtctccaatggaa

SEQ ID NO: 73877 - DNA, 97 bp, Homo sapiens
attcgatccagaagtatttttcaacattcttctgcctccaattatttttcatgctggatacagcttaaagaaggccctgggaggagcggggacactg

SEQ ID NO: 73878 - DNA, 98 bp, Homo sapiens
atcgttgctgccttcttcgtcaaggaacatgcttgccaactcagccagcgtgaggatcctcatcaagggaggcaaggtggtgaacgatgactgcaccc

SEQ ID NO: 73879 - DNA, 100 bp, Homo sapiens
cgggagcgacgccgacagcgaagctgagcgtaaagtgtctttggtgcaacactaacaaggcttgtctggactacccagttacaagcgtcttgccaccggc

SEQ ID NO: 73880 - DNA, 100 bp, Homo sapiens
tttgtctgtttgatatcaccaaactggaggatgcctatgtattccctggggatggcgcatcacacaccaaaggttgggagccacgtgtaccagtgtgtgt

SEQ ID NO: 73881 - DNA, 80 bp, Homo sapiens
atcatgtctgcgagccaggattcccggccctgggaggagcggggacactgaggacctctctccaaattggcctctcaact

SEQ ID NO: 73882 - DNA, 83 bp, Homo sapiens
gtccgttctctcaggctcccgttcaggccgccatggcatcagatgaaggcaaactttttgttggagggctgagttttgacacc

SEQ ID NO: 73883 - DNA, 75 bp, Homo sapiens
ggcggaagcggagagcaacagcgcgccgctctttcgacgtgtagcagcagctttgccgggaatggaaagcacaca

SEQ ID NO: 73884 - DNA, 90 bp, Homo sapiens
ttgtaactcgagagagactacttctggcatcctttaagaatgagggtgccgaaccagatctaatcagatggaggtttgctcttgttgccc

SEQ ID NO: 73885 - DNA, 100 bp, Homo sapiens
cgtctccggggaaagccgtggccccgagggcggatccgaggctgagtcatcactagagagtgggaagggcagcagcagcagagaatccaaaccctaaagc

SEQ ID NO: 73886 - DNA, 90 bp, Homo sapiens
cacttcatctgcaaatatttcaataagtacccaaaagtcctggtacctgggataaaagttgcagcgtcccaccatccaccagacagacca

SEQ ID NO: 73887 - DNA, 82 bp, Homo sapiens
ccatgaaccaggctgcacaggtgctgtctcgatcgtcactgaagaggttctcagaggcactgtgactgacttccctggattt

SEQ ID NO: 73888 - DNA, 100 bp, Homo sapiens
gcgccaagcaagtgctctacgtgcctgtcaagaccacgatagaagaagtcagagatgccatggaaaatgaaatgagaacccagcttcgccgacaggcagc

SEQ ID NO: 73889 - DNA, 75 bp, Homo sapiens
gctggaactgggttttagcaaggtccaaaagcctgccaacccctgggaattctacattgggacccagttgatgga

SEQ ID NO: 73890 - DNA, 100 bp, Homo sapiens
ggatgctgaacagcagttttgaggatgaccccttcttctcccacatggtccaagcatgctaaacctgtggcatgttcaggggactggcttggagtgagag

SEQ ID NO: 73891 - DNA, 75 bp, Homo sapiens
tcagcagcgcggcagagtcatggggatgcctgggaaccactcacctccttctgtgccatgaggccacctcagccc

SEQ ID NO: 73892 - DNA, 76 bp, Homo sapiens
tggtgtttcaaagggtggtgaagaactaaggaaattcagttcatgaagataagaagtttcttgacaaatacatgcc

SEQ ID NO: 73893 - DNA, 75 bp, Homo sapiens
ggccgtctcgctctgggtctccaggcccgcgaccgtccgccagtcgtcccgagaggttgacggatatattcagac

SEQ ID NO: 73894 - DNA, 110 bp, Homo sapiens
gatttggatgaatatacccttagaaaaaatgtggcagtgtgactctgacatcattagaagcatgccagaacagactggtgaaaagtaaaccttttcacctacaaaatttc

SEQ ID NO: 73895 - DNA, 100 bp, Homo sapiens
tctctctgctgtttgtggcttgccaaggagctccagaaacagaatctgatattgatgctgctgctgcaatgatgcttttaaatacttctatagaacaagg

SEQ ID NO: 73896 - DNA, 90 bp, Homo sapiens
tggaaatggagggcatcttcaaccacaaagatgagctgcttcagaaagagcaaaactattcagatgacgtcttggccaacatgattagtg

SEQ ID NO: 73897 - DNA, 99 bp, Homo sapiens
tggccctgtgatccctcaagactggtccacggagtgtatgaccacaaacagccatcaagctggaggaaagcaggaatgttcagaggcaaatgaagattc

SEQ ID NO: 73898 - DNA, 75 bp, Homo sapiens
ctcctcagcagaagcccagagacctgcgcctccccgtggggacatttccacagtcaagagcctctttgccaagcg

SEQ ID NO: 73899 - DNA, 110 bp, Homo sapiens
ccctcactattgtttccagtgagctccagcttgctccatccatgaccacagtggaccagctcgagtctcaagtggacaatgatgaagaactgccagcatgcgaatgctga

SEQ ID NO: 73900 - DNA, 94 bp, Homo sapiens
ctatgtgtcccagtattacaaccacttctgcagtcctggccaaggaagtccgaggcagcgggggccttccaggcccaggacgagggacggtcac

SEQ ID NO: 73901 - DNA, 82 bp, Homo sapiens
actcagattccctcattgatacctttcctgagtgtagtacggaaggagcacgtgaattgcctctgcttacgttcaggccctg

SEQ ID NO: 73902 - DNA, 100 bp, Homo sapiens
ttcggccgaaggcccgagcgcccgaggcgtctgggatggtgtgggaccggagactctccaacatgtgccttctgaccatacaaatgaaacttccaacagt

SEQ ID NO: 73903 - DNA, 97 bp, Homo sapiens
aggaaaccataggttacatcgttctggatttaagaaccgctcaagaaacaaagcagaacaaccctccaggtgtgctggccctgctggacgaggaatg

SEQ ID NO: 73904 - DNA, 75 bp, Homo sapiens
gctgttcccaaatgctgactccaaagaatttcttgaggttggcaaaaagcagcctgctctggatgttctttatga

SEQ ID NO: 73905 - DNA, 50 bp, Homo sapiens
ctcccaagtaactgggattacaggtgagaattatgaagatgatgacctag

SEQ ID NO: 73906 - DNA, 75 bp, Homo sapiens
gttcctggtgctcgaggctggcggcgaggaagccccacccctgcagaggacacacctcctccacttccccccaag

SEQ ID NO: 73907 - DNA, 75 bp, Homo sapiens
ggtggatcagcgcctacccgagtgtgcgaagctagccaaggattttttatcaagcagaaatgcatcgaacaacga

SEQ ID NO: 73908 - DNA, 83 bp, Homo sapiens
agtcatgatagaaatgaaccatttgtctttagtcttggcaaagctggaggagctcacagaggctgaggatgctctttctgaag

SEQ ID NO: 73909 - DNA, 50 bp, Homo sapiens
atcggcgccgcggcaagagccaggtgtttgtaaaatgtatgaagaacatc

SEQ ID NO: 73910 - DNA, 99 bp, Homo sapiens
ttttcggacaggtttagaaaatggaatcctcctctgcgaatattgatgatgttaagaagttcaaaccgggttacctggaagctactcttaattggttta

SEQ ID NO: 73911 - DNA, 149 bp, Homo sapiens
gaggaagaaagctatctagggacgagatctagaatcaactgagagagatgcttaaaaatcaccagttactttaatgagaactgcaagcacatgttgaccagataactgaaatggcagcagtaatgaggaaagccattgaaattgacgag

SEQ ID NO: 73912 - DNA, 83 bp, Homo sapiens
gctcctccccagggcccagtgcggactcgcctccgtgaagggattacatctactacaacgacgtgtatgcctttaatctggac

SEQ ID NO: 73913 - DNA, 97 bp, Homo sapiens
aagtattccagaagtccaacaagagaatataatcaatcctcaagacctaacaggtggtcgttctcgttaccggaccacttcttcagccaacaatccc

SEQ ID NO: 73914 - DNA, 128 bp, Homo sapiens
gtgattgttggtctgctggtgggactcaatgttctcgatgccaatctctgcttgaaaggagaagacttggattctcaggagacagtgtttcacaaaatgattttccttctgaagctcccatctccttg

SEQ ID NO: 73915 - DNA, 100 bp, Homo sapiens
gagcctggccctcattgcggaacagcccatactgaatgaacacaccttctgtgctggcatgtctaagtaccaagaagacacctgctatggcgatgcgggc

SEQ ID NO: 73916 - DNA, 100 bp, Homo sapiens
ggcagcccgtatcacatcctagactttttacttcgaggagaagagtctcacgagttgtcctggaaatttagctttggagtcaaacccttctgaccatcca

SEQ ID NO: 73917 - DNA, 89 bp, Homo sapiens
aaagtatgcaccagctgtcatcgtttgtcagaagaaagcagctggctcagaaaacagatgtgaactatgaagactttactttcaccata

SEQ ID NO: 73918 - DNA, 74 bp, Homo sapiens
ctcctcagttagcaaatcttacagttggcctggcaacctcattctttaacgagaggaacataaatattactaag

SEQ ID NO: 73919 - DNA, 75 bp, Homo sapiens
gctcaatgcctcagaaattcattgacgttgagaaagaagggccttaatggctgtgacagcccagaccccgatgcg

SEQ ID NO: 73920 - DNA, 100 bp, Homo sapiens
ggtgaaaagcaaagctggaaggattcggagagggttggggccgtcttcctcatccttccttttctcggggctcccgtggacattcactactttcactgcc

SEQ ID NO: 73921 - DNA, 87 bp, Homo sapiens
gttagtcacccacctacatgttgaggtcacaaggcacttaaagcattgttgaggtcattggtaggtcttcaggaagagttgcttttc

SEQ ID NO: 73922 - DNA, 75 bp, Homo sapiens
aacatcacgatgctgctcatgaaatcatcgagaccatccgaaatgcgtgtactgccggaagcggatgaagaaggt

SEQ ID NO: 73923 - DNA, 75 bp, Homo sapiens
ggcttgtgggtcatcttgcacctttacaaacaaggtgccggtggtggtgtgcacattgagccccggtatagacag

SEQ ID NO: 73924 - DNA, 88 bp, Homo sapiens
cccatcttccaccgacaagccgtcgggacactcacatgggagtcaagaaggtggagcaaacacaacctctggtcctataaggacaccc

SEQ ID NO: 73925 - DNA, 75 bp, Homo sapiens
gaaagcacaagcgtaccaaacgggcaaggacatctctacaaaggattgcaataaagttcaagaaaaaagaggtgc

SEQ ID NO: 73926 - DNA, 93 bp, Homo sapiens
cgggccctgtcgcgaacctccggcgcgctgccccgccggaccgtggaatgtatcctgtcaggtataatgtcagtgaatggcaagaaagttctt

SEQ ID NO: 73927 - DNA, 97 bp, Homo sapiens
aagctgccggcagccctgcggctacggagacaggtacctagtcgatagtcgctggttcaaacagtggaaaaaatatgttggctttgacagttgggac

SEQ ID NO: 73928 - DNA, 121 bp, Homo sapiens
gatattcctgaagtcaactgggttttgcagtatgaccctcccagcaatgcaagtcaagctgtattagtcgacaggaccatttacatttcaggacagataggcatggacccttcaagtggac

SEQ ID NO: 73929 - DNA, 100 bp, Homo sapiens
ggctacgacctgacggacaccacccaagcaggtgctggagaatctggtaaaagcaccattgtgaagcagatgaggatcctgcatgttaatgggtttaatg

SEQ ID NO: 73930 - DNA, 50 bp, Homo sapiens
tccgcggcttcattcttgaacaatgaatcctccaatgtacctgactctcc

SEQ ID NO: 73931 - DNA, 89 bp, Homo sapiens
cgatccgccgcccgtccacacccgccgccagttctagcgactgcgaagatagctcgctgagctggaaccccacagatcaccaacaaaaa

SEQ ID NO: 73932 - DNA, 96 bp, Homo sapiens
gcttgctggagaatgacccagatgtcccaggtgcaggagctcttccatgaggcagcccagcaggtatccttagtctgttggagcatggagaagagt

SEQ ID NO: 73933 - DNA, 74 bp, Homo sapiens
atgtaactataagcagcttcggaaaggagccaatgaggatttttcggacgccgcccgatactacattccctgag

SEQ ID NO: 73934 - DNA, 98 bp, Homo sapiens
gcagcaccatcaacagatgcccctgataaaggatacgttgctggaggaaagcaggaatgttcagaggcaaatgaagattctgcagaataagcaagctc

SEQ ID NO: 73935 - DNA, 75 bp, Homo sapiens
gcggactttgccagcagactacggtgattctctggcaaagcgaggcagtgctggagtacaatggcaggatctcgg

SEQ ID NO: 73936 - DNA, 95 bp, Homo sapiens
ctaaaatagaaaaatctccagctcctcaaaagcagtatcctggtgtgaaccagctatcctccagtataggaggattgagtcttcagagttctcca

SEQ ID NO: 73937 - DNA, 100 bp, Homo sapiens
ggaggagggggcgaccacaagatggcggggaggttcccctgaaggatgctaaggaatacgctgaatccataggtgccatcgtggttgagacaagtgcaaa

SEQ ID NO: 73938 - DNA, 90 bp, Homo sapiens
gaggctgcgcggggccgaggccgcctccgagcgccagatattcttgtgactactccaaatcgactaatctatttattaaagcaagatccc

SEQ ID NO: 73939 - DNA, 97 bp, Homo sapiens
cgcggtggagccgccggagtctgagaagatggcccactgcgtgaccttggttcagctgtccatttcctgtgaccatctcattgacaaggacatcggc

SEQ ID NO: 73940 - DNA, 87 bp, Homo sapiens
tatccccgtgtcaagaaaaaaaaggctttatatgtaaaatggaggcagaaaatcccgttttgtcaacctaatgaagcattcaaagaa

SEQ ID NO: 73941 - DNA, 100 bp, Homo sapiens
gcgaaggtctcagagctttacgatgtcacttgggaagaaaaatggctacaaacttcctagcacatgagaagatctggttcgacaagttcaaatatgacga

SEQ ID NO: 73942 - DNA, 51 bp, Homo sapiens
ccgtggcctccaacctgcaggacgtaataatagacgtggatggaatacaac

SEQ ID NO: 73943 - DNA, 100 bp, Homo sapiens
gaagctgtttcctaatagtttggaccagacagacatgcacggagactcagaatacaacatcatgtttggcttcaccatcatcatcgagccctttgacgac

SEQ ID NO: 73944 - DNA, 50 bp, Homo sapiens
ggcctcccgctcctccgtacaggtcacagctgctcttctggaggtgtcct

SEQ ID NO: 73945 - DNA, 75 bp, Homo sapiens
ctggcaggaccttgaccagccgagggccatcgccttggaccccgctcacgggtgctgggtttgtgcggagccgct

SEQ ID NO: 73946 - DNA, 74 bp, Homo sapiens
ctgacaagagcatcaaccctctgtgtactaatggtcacttgatgtgcgctggctgttttatccacctactagca

SEQ ID NO: 73947 - DNA, 76 bp, Homo sapiens
cagaggacaacgaagtgttcgccgtgctggtatagaggactctaagaagtggggcatgctgtttctggtgaaccag

SEQ ID NO: 73948 - DNA, 100 bp, Homo sapiens
tgttccagaacattcttgggatcaagaagttcgaacatcagctcctttacaatgcctgccagggtatttgaagtataccatacaactgttttgaaaatcc

SEQ ID NO: 73949 - DNA, 101 bp, Homo sapiens
ggcgtactttgggcttcatcatggaggactacctgcagggttgtcgagctgctctgcaggaagatcccagtgtctgagtgaactaacagtcctgctttcag

SEQ ID NO: 73950 - DNA, 83 bp, Homo sapiens
cacttctggacctggaccaactcctgggagaacttcagacagggtgacgagaacaagtcagtgcgcgaccgtttcaacgcccg

SEQ ID NO: 73951 - DNA, 90 bp, Homo sapiens
agctgtgcgacgtgaccctcaaggctttcaccagttctcaggatgcccatagggatgggtgaagcctgcctggcctgtggtgcttcccag

SEQ ID NO: 73952 - DNA, 83 bp, Homo sapiens
atgaaagtgctgctcatcttaagcaagtggctggaacaggtgtacccaagaatttgatgctttgtccagacttggaatcccag

SEQ ID NO: 73953 - DNA, 100 bp, Homo sapiens
gtgagatacaaggctacacagagacagatcaaagcagctcgtctatcagccacagtctctgcaagtttccaagagcagcagaaaatgaacacattgcagg

SEQ ID NO: 73954 - DNA, 74 bp, Homo sapiens
gagggtctggaggagccttctcaagaacagaggaaaatgtttataggaggccttagctgggacactacaaagaa

SEQ ID NO: 73955 - DNA, 82 bp, Homo sapiens
tcttccagtgccgctgggatgactccgtcacctacatcttccaccagcttctggggaaagcaggcaggatgggagagtcgcc

SEQ ID NO: 73956 - DNA, 74 bp, Homo sapiens
gtggagcctgaggatcccatgttcctgatctggaagacctgaacttccctgagatcaaacgaaggaagatggct

SEQ ID NO: 73957 - DNA, 82 bp, Homo sapiens
atagaaactcacatgagacaaatgcgctcagcttcaattggccaagaagcttgagagaagaaaaatttcagaaaaattgtct

SEQ ID NO: 73958 - DNA, 83 bp, Homo sapiens
tacacttcgactctcaaagcaataccaggatagctgttgtttcagagaaaggtgaaggacttaactaagtacttggatcccag

SEQ ID NO: 73959 - DNA, 90 bp, Homo sapiens
agttttttattcaacttagaaaagaattgcgccgcgcggtgaggttctctagtccacgctcgcagccatgccgtccaagggcccgctgca

SEQ ID NO: 73960 - DNA, 83 bp, Homo sapiens
cttcaactcttttctctcgggcttcatctcttgtgtggggagtttcatcctagcgggttcaaaccttgtactactcagctgat

SEQ ID NO: 73961 - DNA, 97 bp, Homo sapiens
cgcgaatccggcccccgcagcgggacccgggacactcatgaggaccatgatacttccactgagaatacagacgagtccaaccatgaccctcagtttg

SEQ ID NO: 73962 - DNA, 96 bp, Homo sapiens
ggcagtaaaactgaggaggcggagccaagacggtcggggctgcttgctaactccaggaacaggtaataccagctgagaaaattgatggagtatttg

SEQ ID NO: 73963 - DNA, 75 bp, Homo sapiens
cgcccccgggagcgggcgcccagaggtctcagccttagatccaaggacagtccaaggaagtcctaagaccatgga

SEQ ID NO: 73964 - DNA, 90 bp, Homo sapiens
ctgatttgaacctcacacatgggaagtaggcaaacagggaaactgaggaccagagagggttggtcaaagaaaaagtgatgtatgaaaaag

SEQ ID NO: 73965 - DNA, 100 bp, Homo sapiens
ctcgctgtaccccatcgcggtgctcatagacgaactccgcaatgaggacgttcaggattgacttctaaggactcttggtacatgaggaagaaacccggaa

SEQ ID NO: 73966 - DNA, 100 bp, Homo sapiens
ggaaggattgtctaatgatggagaaacaatggtaaatgtgccacatattcatgcaaggcagaaagtgaaactcttcactgctcacaacaatatgaccaac

SEQ ID NO: 73967 - DNA, 93 bp, Homo sapiens
gtcatttgctactatgggaaccgaggggagcctgatcctatcgttttgacgccagccgcttacaaacacgcagatggcaagaagattgatggc

SEQ ID NO: 73968 - DNA, 100 bp, Homo sapiens
gtggaaaatgacggttataagaccatttatttctttggagacaaaactatgccaaccgagacatgggtgcccggcaccgcgcccgagcccactccattca

SEQ ID NO: 73969 - DNA, 98 bp, Homo sapiens
tttggatgtagcaaggaagaaattgttcagttcttctcaggagggtgcatctgcccggaagactcagactcctgcagcccagccagtaccaagaccag

SEQ ID NO: 73970 - DNA, 74 bp, Homo sapiens
caaagtttatactatcagaccttattttcctaaggatgagcctcttagcaatgcataccacgagttagcacaag

SEQ ID NO: 73971 - DNA, 50 bp, Homo sapiens
caccacagagcccatcaagcccgagcagccgaacaacaacgtatccttac

SEQ ID NO: 73972 - DNA, 74 bp, Homo sapiens
cttgggcaccgagagggactacgtgggcaccttgcgcttcttgcagtcggtgggttggtcacttctgtgcaaat

SEQ ID NO: 73973 - DNA, 83 bp, Homo sapiens
cacagttggagaaaatcggcagctgagacggccttggccgctgtttttggaaggaagaaagatggaaagcggtgcagttctgc

SEQ ID NO: 73974 - DNA, 75 bp, Homo sapiens
cttcgctgtggcatggcggacgaggggaagtcgtacagcgaaattgcatctgatggtctcaagggtcgtgtgttt

SEQ ID NO: 73975 - DNA, 75 bp, Homo sapiens
tttgctactgtcagatggattgactatggaaaagttgccaaattggtgaacctgttctctgacccaccccagccc

SEQ ID NO: 73976 - DNA, 76 bp, Homo sapiens
ggcgtcgcgcgcgcctgtagctcgcgggcctcgcagtactatactggcaattgctggagaagattttgcaattgtt

SEQ ID NO: 73977 - DNA, 83 bp, Homo sapiens
agtcagaagaaggctgctattgaaagagagtatgcacaggaagaaaaaatgctgggcatcttggtgcagcacaaagtccggag

SEQ ID NO: 73978 - DNA, 83 bp, Homo sapiens
tggcgcctgtgggcacagacaaggagctcagtgacctcctggacttcagcatggtcctctccacccggatcctggccatgaag

SEQ ID NO: 73979 - DNA, 75 bp, Homo sapiens
gcagggctccaccccgtcgcctcgacagagagctattgcttaccttttcccaagtggtttgtttgagaaacgagc

SEQ ID NO: 73980 - DNA, 100 bp, Homo sapiens
aagtcatcccacacttcctgttacaataactgctcatgaagatagacacatcaaattttttgacaataaaacggattcgccatgaagtcagcgtaaataa

SEQ ID NO: 73981 - DNA, 74 bp, Homo sapiens
tttatccaaagattaaaacttgaagcaacccttaatgtgcatgatggttgtgcctggacagcgagtccgcctcc

SEQ ID NO: 73982 - DNA, 82 bp, Homo sapiens
ctggccgcgcctggcctggccgggaccatgcgtccgtctccaagagagtatgaagagagtgcgtctgtagggcagggaagat

SEQ ID NO: 73983 - DNA, 100 bp, Homo sapiens
cggagacggcggcaggagctgggcccagagacgcggggacgggccgtgggcccccggaacgaggggctcttggctttgggcctcagtgcaagtccattgg

SEQ ID NO: 73984 - DNA, 74 bp, Homo sapiens
cgtctagcatttccaggcattatgggtttctatgcttgagtctgctcaacagcaggcagccagtgtcccaatct

SEQ ID NO: 73985 - DNA, 83 bp, Homo sapiens
catcgatagggatgcagaggatcagaaccggtacctggatggcatgacaatgcagatcttcgtgaagactctgactggtaaga

SEQ ID NO: 73986 - DNA, 83 bp, Homo sapiens
cggggactgcaaccctaatcaggaaccctaaggactctgcaatatgaataattccctagagaacaccatctcctttgaagagt

SEQ ID NO: 73987 - DNA, 74 bp, Homo sapiens
cgagcagcggacgccggtctctgttccgcaggatgtctctaggtaacaggagaattcgagtggacgttgctgat

SEQ ID NO: 73988 - DNA, 75 bp, Homo sapiens
agagcgggcagccttccaggtggacagggagatgcagttaaagacttgatgcttcgctttctgggtgaaaaagct

SEQ ID NO: 73989 - DNA, 75 bp, Homo sapiens
acatggtcatgagctttgtgaacctggcaaaagctggcaggctgacagaggcggcctcaggacggaccttctggc

SEQ ID NO: 73990 - DNA, 95 bp, Homo sapiens
ggaaccctgccctctctgtcagacacctgtccttccttctacagaccatgctggacttcttgtcggatcaggaacatccatgatagcagtcttct

SEQ ID NO: 73991 - DNA, 98 bp, Homo sapiens
tcgcctgcatgtccatcatggccttgctgctgctgctgctcctgctgctattgtacaagtataagcaggtctgtgcagacttttgcagacaaatcaaa

SEQ ID NO: 73992 - DNA, 74 bp, Homo sapiens
tcatctccttctgcatccttaactgagaatgaggtcattgagactgcctcttctcaaagggacactgtcctcag

SEQ ID NO: 73993 - DNA, 75 bp, Homo sapiens
agaagtgtgaggcaaacttgagagtgtccttctctcctgcaaggtagacaagggcgtggtccccctggcagggac

SEQ ID NO: 73994 - DNA, 75 bp, Homo sapiens
ttttgaagaaatctggaagttttccacctaccatgctctcggcccttcctcaccagactctgtcctgagacctcg

SEQ ID NO: 73995 - DNA, 118 bp, Homo sapiens
gctggcaggcgagggagcccgcgtcggctgagagcccacaggcccccacaggtcgcaatggaagaagagatcgccgcgctggtcattgacaatggctccggcatgtgcaaagctggtt

SEQ ID NO: 73996 - DNA, 82 bp, Homo sapiens
ttggatgtagcaaggaagaaattgttcagttcttctcagcttcagctttagctgcagctgcctctgttcagccacttgcaac

SEQ ID NO: 73997 - DNA, 96 bp, Homo sapiens
ggctttgaccgagaggctgctggagctcgtgtttggacgcaaggccaatgatgaggccaatcagagtgatacaagtgtctccttgtcagaacccaa

SEQ ID NO: 73998 - DNA, 90 bp, Homo sapiens
ctggtggctccgcggattataacaggtgtcgtgaaaactacccctaaaagccaaaatgggaaaggaaaagactcatatcaacattgtcgt

SEQ ID NO: 73999 - DNA, 73 bp, Homo sapiens
aacaatagctcaaggaaacctttccaacacagatgtccaagctgccaacatgaatacaactttgtctgagagc

SEQ ID NO: 74000 - DNA, 80 bp, Homo sapiens
caaagttttgcagatcttcaacaagaggacccaggagaaattcgccctcaaagttatgaagacagtatggagtttccaga

SEQ ID NO: 74001 - DNA, 100 bp, Homo sapiens
aagaaggagtttggagaggacaatgacaatgcggagacatctgccagtggatctccagacactttactaccatcagaggaagaatacaagcgattgagtg

SEQ ID NO: 74002 - DNA, 95 bp, Homo sapiens
agacgcagtggggcggggacagggcctcggcttcactgtcaacctgccctggaaccagacgagctcttccagaaagtggcagaggattacgtcag

SEQ ID NO: 74003 - DNA, 90 bp, Homo sapiens
agagctggagagcgccgaggacgacgagcgcagctgtcggggccgcgagtcggacgaagacctgtgcaacagacctgcagaccaaagctg

SEQ ID NO: 74004 - DNA, 75 bp, Homo sapiens
gtaatggtggatgaagttgttcattgtttgtcaccacaaaaaggacaggccctctactggtctatccgcagcgag

SEQ ID NO: 74005 - DNA, 100 bp, Homo sapiens
tagagcgtttggaagatctggatacctgtatgagttttccagaaaaagaccttctgcactgtccatctaaggatgcaattgaagctcattttatgtcatg

SEQ ID NO: 74006 - DNA, 72 bp, Homo sapiens
agaatcactcggagggcggcggagtgatcgtcaataacaccgagagtgtccccaactcctgcccagccagtc

SEQ ID NO: 74007 - DNA, 75 bp, Homo sapiens
cttccttctacagccaatatgaaaaggcctatgtggaaccatcagagaatctacaatccctgatggagaagaatc

SEQ ID NO: 74008 - DNA, 90 bp, Homo sapiens
tgcccgggccggagtgagtgcgcgcgggcgaaaatggcgtacatccaggataaagataaagtttctctaaccaagaccccaaaactggag

SEQ ID NO: 74009 - DNA, 100 bp, Homo sapiens
gcatccgagagcccggactggagggaggagctgtgcagtgagaagcaaagcaggaaacaagcctattacaaatcaacttggattaacctttcagttacct

SEQ ID NO: 74010 - DNA, 75 bp, Homo sapiens
gccgccgccgccgccaccatgttctccaaggagaagtacatcctggactcatcgccagagaaactccacaaggaa

SEQ ID NO: 74011 - DNA, 75 bp, Homo sapiens
gcagccggtgtaaatgttgagcctttttggcctggcttgtttgcaaagacaggggcaagtgtccgagtggtgaat

SEQ ID NO: 74012 - DNA, 50 bp, Homo sapiens
catggaggctgagcatttattcagactcgctctttactgagcgtgtttga

SEQ ID NO: 74013 - DNA, 75 bp, Homo sapiens
gctctttctgggaaaagttatagcggacaaggcaaaatctcagcaagttcggacctctagtacaataaggcgaac

SEQ ID NO: 74014 - DNA, 82 bp, Homo sapiens
ccctgaagttgcctcttctggtgtcaaagcttttggacattcctgggacatgtcatgctgcccaaggacatagccaagctgg

SEQ ID NO: 74015 - DNA, 83 bp, Homo sapiens
cttcacgatgtttcccttggtcaaaagcgcactaaatcgtctccaagatcaaagaatcccgagttaggatctggatgaaggat

SEQ ID NO: 74016 - DNA, 101 bp, Homo sapiens
ggaaggcgttcgcttggtgggttaggcctgtgtgttgcttagccgaaagaggcatcgttttctctttagtaattcgccaaaatgacgaacacaaagggaaa

SEQ ID NO: 74017 - DNA, 100 bp, Homo sapiens
ctgcgttttgccagtcacctctcaactgtgtgccaaagatggcaggatggtggctggcaaagtgttgatggcaaagcaagaaattgttgaatgtgtagcc

SEQ ID NO: 74018 - DNA, 82 bp, Homo sapiens
caatatctgtcttcggtggactccttcggcagtccacccaccgccgccgcctcccaggctccaaccaggaatggagacgcca

SEQ ID NO: 74019 - DNA, 83 bp, Homo sapiens
cggggggccctccccgcggggcagatgatgtatcctccactcctcgctggccaccatcctgctgcccaacagaagaagctctt

SEQ ID NO: 74020 - DNA, 100 bp, Homo sapiens
ctagagtctgaacgcaacagaattcagatgcgtagcttgcagcagcagttctccagggatcatgtaccgcaagtcctgtgcatcatcagcggcctgtctc

SEQ ID NO: 74021 - DNA, 100 bp, Homo sapiens
gaggccggggccgcgctgagggcgcccagctgctacagagggccggagctggagatgtggtctctgggagtcactctgtacacgctggtctttgaggaga

SEQ ID NO: 74022 - DNA, 98 bp, Homo sapiens
tcggagaccccgcgccgacggctgctcaaacatcaggaccaaagccggccagggtacctcagcacccccagaggcctcacccacagctgccccagagt

SEQ ID NO: 74023 - DNA, 97 bp, Homo sapiens
ctgggttacaaggctgcggacttccagctgcacacacatgtatgctgagggttggaaaagcaaaagcagatgtgtggcccaaaactgctccaaagaa

SEQ ID NO: 74024 - DNA, 82 bp, Homo sapiens
agaagaagcagaggctgctctggagaagggggatgagagtgctgactgtcacctgtgacaacctcatcagccttgaaaggtg

SEQ ID NO: 74025 - DNA, 76 bp, Homo sapiens
tgaagccacagctaaggctgtgttggagcccattcagagcaccagtctagtgggtgatggcaccacctcagtgacc

SEQ ID NO: 74026 - DNA, 90 bp, Homo sapiens
cgggtccaggacatctgagggctgaccctgggggctcgtgaggctgccaccgctgctgccgctacagggttacacatcattttggaatga

SEQ ID NO: 74027 - DNA, 75 bp, Homo sapiens
gagcctcagttggaagcagccgatccagcctgcggagcctgtggggcagggcaaatccagacagaacctttgact

SEQ ID NO: 74028 - DNA, 75 bp, Homo sapiens
cctccacctctccctccaacacccaacatgagtgaagtttcctgcaagaaacgggacgactatttggaatggcca

SEQ ID NO: 74029 - DNA, 80 bp, Homo sapiens
ccgagagcgcgaatatcgtcatcgttagaagttgctggatttgtgcgactcggtgaaggatgatgcccggagggtgatct

SEQ ID NO: 74030 - DNA, 74 bp, Homo sapiens
tggtgttcgcccacgaccatgggtatttgaagtataccatacaactgttttgaaaatccagcgtggacaatggc

SEQ ID NO: 74031 - DNA, 100 bp, Homo sapiens
gcaagatgaagcagatgctgcccttcaaatgatcacagtgtcaatgcagtgtttacgaaaatggggttacagaagatgtgaagatatttgttggattaaa

SEQ ID NO: 74032 - DNA, 82 bp, Homo sapiens
cgggaggcgcggcgagggcgccagaaagatggatactatgatgctgaatgtgcggaatctgtttgagcagcttgtgcgccgg

SEQ ID NO: 74033 - DNA, 75 bp, Homo sapiens
ccatcttcggcatgtccttcgcctgccagtctagtttatgccaacgtgacttcattcatacagatgaaccaagga

SEQ ID NO: 74034 - DNA, 82 bp, Homo sapiens
tgaaaacctctcaccccgtcgttgcctccacttggcccgtccatagagccaggaatcccttggcaccatgtcctgtgtgcat

SEQ ID NO: 74035 - DNA, 73 bp, Homo sapiens
cggggtgcgccggcagaggatccagtgttcaccatcctggccccggaagtttacgttgttaaagggaagctgg

SEQ ID NO: 74036 - DNA, 90 bp, Homo sapiens
cgcagggaaggaggagaagagcaatggcagagagcaagatttgccgctggcagtttgaaattggcacaatggaagaagctggaatttgtg

SEQ ID NO: 74037 - DNA, 100 bp, Homo sapiens
tgtagatccaggagctcccaatgcgaaaaatctcctggctgcagctgcaagcttatacgacttgatagtcttagcgcctactggaatgtaaattgcagca

SEQ ID NO: 74038 - DNA, 75 bp, Homo sapiens
aaagcagccggtgtaaatgttgagcctttttggcctggcttgtttgcaaaggctgggatcatctgtcagctcaat

SEQ ID NO: 74039 - DNA, 82 bp, Homo sapiens
tgtctccactgcatctgaagaccaaattgtgaccggcatgggctgcaggagccgcggcgggtggaggagctgcagaaccgca

SEQ ID NO: 74040 - DNA, 74 bp, Homo sapiens
caaaggctttgatgaatacatgaaggagctagtctgcgggccaggcatcgacatccgcaacgactatcagcagc

SEQ ID NO: 74041 - DNA, 100 bp, Homo sapiens
ggacgttatgagcggagacttgatgggtacaccaggggttggaaaaaccacactaggcaaagaacttgcgtcaaaatcaggactgaaatacattaatgtg

SEQ ID NO: 74042 - DNA, 83 bp, Homo sapiens
gtatttgcggatagctccaaactgggatatccatccagtccaatggatcagatgggcaagatgagacctcagccatatggcgg

SEQ ID NO: 74043 - DNA, 82 bp, Homo sapiens
ttaccgtgggcaacaccaccatgcatgttatgaaagatctccttccagaaaccacctaccgcttgcaagtagaagtctcagg

SEQ ID NO: 74044 - DNA, 96 bp, Homo sapiens
actggtccacggagtgtatgaccacaaacagccatcaagtgtttctacacctgtgggttatgacaaagacaactgccaaagaatcttcaagaagga

SEQ ID NO: 74045 - DNA, 98 bp, Homo sapiens
cacctccctgctgctgctgctcttcgccatcttcatgggcctgcgggcctccaagtgaggagatccggcgcttggaggaggtacggggcgatctccag

SEQ ID NO: 74046 - DNA, 50 bp, Homo sapiens
ctctggccaacactgcctttttccagtcggtcctgaccgccagcctgtcg

SEQ ID NO: 74047 - DNA, 101 bp, Homo sapiens
gggtgaagaagcctcatcgctacagccgattacacctcaacaagaaggcaactgacaaacagccttatagcaagctcccaggtgtctctcttctgaaacca

SEQ ID NO: 74048 - DNA, 90 bp, Homo sapiens
ccgagggactgggagtcgttagtgaggtggtgatctttgtgaagtctgtgcagcggtgcattgccttggcccagctactagtggagcaga

SEQ ID NO: 74049 - DNA, 87 bp, Homo sapiens
gcggcaactctttgatgtactactataatgggaaagcggtgatgatgaacagtctacacagatggctgcaagttgggaagatgataa

SEQ ID NO: 74050 - DNA, 75 bp, Homo sapiens
tttattagatggtgacactgcagttggcaaaaagggcagctagctgtagaaagagctaaacaagtagaagagttc

SEQ ID NO: 74051 - DNA, 90 bp, Homo sapiens
cttcttttcccacaaggagggaacgtacgctgcaaagcgggtgatgtgaagataaatgtgataacgtctacaaagtcctccaaattctcg

SEQ ID NO: 74052 - DNA, 99 bp, Homo sapiens
ctggagaaggacgaagaggaagccttggttgcagagaacacatcttagaagatgaaaaacctgaatctatcagtgacactactgacttggctctaccac

SEQ ID NO: 74053 - DNA, 100 bp, Homo sapiens
gtaatgaaaagagacatgaagaattggtatttcaaatgaccaccatgttgcaaaaggaaaatgtttataggaggccttagctgggacactacaaagaaag

SEQ ID NO: 74054 - DNA, 95 bp, Homo sapiens
accgagagcgtgaccgagagcgcgaatatcgtcatcgttagaagagtttgtgaagcggctccggtactgcgaatacctagggaagtatttctgtg

SEQ ID NO: 74055 - DNA, 83 bp, Homo sapiens
tgtccttattatcggaccccgaggatcaggaaaaactatggtttactcctggcttgggggcattaggaagcactggaggctct

SEQ ID NO: 74056 - DNA, 100 bp, Homo sapiens
ccgaggaacgaagaaacagacattcaacatgattgcatttgaaaaatgcattcgatttaacccggatgccacagtgtgggttgcaaagcagcggatcctg

SEQ ID NO: 74057 - DNA, 105 bp, Homo sapiens
cagaggccgccatcaaccgccagatcaacctggagctctacgcctcctacgtttacctgtccatggtggtgttcccactgatgaagagcaggcgactgggttgga

SEQ ID NO: 74058 - DNA, 75 bp, Homo sapiens
gccaacagtacctcattgctctttggcgactcttattggcaatgtcgtgaacattcagacgggccactgggttgg

SEQ ID NO: 74059 - DNA, 100 bp, Homo sapiens
cctctacaacgaaggtgaagccacggaagataaggcatagaatgtcaagctaaccaggcgtccgctacttcagaagagtgtactgtcgcatggggagtct

SEQ ID NO: 74060 - DNA, 90 bp, Homo sapiens
gcacgggcggcaccatcacgggcattgccaggaagctgaaggagaagtgtcctggatgcaggcccctcaagaccctctcccgagaacggc

SEQ ID NO: 74061 - DNA, 98 bp, Homo sapiens
aacccagcaacacgctcctgacttcccttcccaaggactcgacctgagaactcaaagcattcagcaaaccagggttccaaggtgaatgtatagatttt

SEQ ID NO: 74062 - DNA, 90 bp, Homo sapiens
gcctcctgcaccagctggacccctacatgaagaagctggcagccgagggaaaatatgtgtctgcaagagcttattatgagagagccttac

SEQ ID NO: 74063 - DNA, 97 bp, Homo sapiens
ttcgtttgaagtaggaatgctagtctggcataaacataaaaaataccccttctggccagcagtgatcattgagaagcagccaggccacattcggagc

SEQ ID NO: 74064 - DNA, 88 bp, Homo sapiens
cagaagagtgagagatggaacccgaagaagaaaggattcgttacagccagagattgatttgccaacattacaacaaaggagatggacc

SEQ ID NO: 74065 - DNA, 100 bp, Homo sapiens
ccactgagtaccggagacaggtgcagtccctcacctgtgaagtggatgcccttaaaggaaccaaaacattcagaactctcagaacttaatgtgaaagtga

SEQ ID NO: 74066 - DNA, 75 bp, Homo sapiens
gttgcttgatcaggtggaacagattcagaaggagcaggattaccaaaggctatcagttgagggatttgcagttga

SEQ ID NO: 74067 - DNA, 100 bp, Homo sapiens
ggtgacctgactctctgaggctcattttgcagttgttgaaattgtccccgcagttttcaatcatggcatctctgccggccttgccacaaccgtgagaagg

SEQ ID NO: 74068 - DNA, 75 bp, Homo sapiens
caaatagtagttctggtaccagctatcatgaacagaaaacttctgtgaagctatcagtaaacttcaagaaaatta

SEQ ID NO: 74069 - DNA, 100 bp, Homo sapiens
aaaacggggccccgatgagtctttactgatctctctgttcgtctttccagactccgacctgagcatgcgcacactgagcacgcccagcccagccctgata

SEQ ID NO: 74070 - DNA, 74 bp, Homo sapiens
ctgtattttgctattcatgtaagcacagtcttcacagtattgcagtacacgagcaagaagccattaactctgac

SEQ ID NO: 74071 - DNA, 97 bp, Homo sapiens
ttcgagtgaccgagaccgcggccgggaccgaggtacatcgacgccatcagcaacaagcagggcgagctggagaattacgtgtccgacggctacaaga

SEQ ID NO: 74072 - DNA, 75 bp, Homo sapiens
ctgaagttctacctgcggatcatactgggggccaatggaactgctcgcagaaagaagaaggtggttcatagaaca

SEQ ID NO: 74073 - DNA, 100 bp, Homo sapiens
cgcctcgcgccggctgctctttccggaacctaaaggcagacccagaagagctttttacaaaactagagaaaattgggaagggctcctttggagaggtgtt

SEQ ID NO: 74074 - DNA, 74 bp, Homo sapiens
gcagccagtactctatatgaacaatccgtctggatcacggatgtaggaagtgttcaaaagaatgctgaaccggg

SEQ ID NO: 74075 - DNA, 90 bp, Homo sapiens
cagagagctattattccctgtattaaaggctgctttgctggctctgcaagaaaatggactagacgcaactacagtgaaacaagagcactt

SEQ ID NO: 74076 - DNA, 100 bp, Homo sapiens
cttatgcttataagagtggaacagtcataccatgggcagttttaccgggaccactgccatggcctgggtacctacatgtggccagatggctccagtttca

SEQ ID NO: 74077 - DNA, 73 bp, Homo sapiens
ctagccagttacattccagaggatgaggcgctgatgcttcgggatggacgactctaaaatagagctcaagctt

SEQ ID NO: 74078 - DNA, 75 bp, Homo sapiens
agtgctgcacgaggagcgattcctcaagaacaccaagtatcttcaagaccttctcatggagagtgtgaatttttc

SEQ ID NO: 74079 - DNA, 75 bp, Homo sapiens
aggaaatctaaagcatgaacaggcatctaatgttcttagtgacattagtagaaagcttcttgctatctacctcca

SEQ ID NO: 74080 - DNA, 80 bp, Homo sapiens
ccccgggatctcggctgtccttcctcccggaccaagaatcgccttcagccctgtctggtgcatccttggcagaaagtgag

SEQ ID NO: 74081 - DNA, 95 bp, Homo sapiens
gactagccactttgcattgactggaaacaatggcatttacagaaagagtcaacagcagtggcaacaggtttgcccaaaggaccagccaaaacctc

SEQ ID NO: 74082 - DNA, 75 bp, Homo sapiens
gtgtacaaatacccctttgaattaattatggctgtgaccaagaatatggcccaggtgaccaaagccctggacaag

SEQ ID NO: 74083 - DNA, 100 bp, Homo sapiens
tggtaaatgacgaaggggcttcttccagagccaaggaggaagggttgtccgggtggggaccaaggcatactgaacacattttttagcagctgggcaacaa

SEQ ID NO: 74084 - DNA, 100 bp, Homo sapiens
ccactcgcccctggcctcgcgggccgtgtctccggcatcatgtgtggtcgagctgtgtttagagtgcatcgaatgggccaagtcagagaaaagaactttc

SEQ ID NO: 74085 - DNA, 96 bp, Homo sapiens
gattttctccaattaaccagatcttgccctggtgcagacaagacttagacgaaaggaccgtggcagcaccaccagccttggcagcgacttctccct

SEQ ID NO: 74086 - DNA, 100 bp, Homo sapiens
agaattttccacctcctgacacaacaccactcaataacgaaggaggcccaacttcattcaataaggagcctgacggatttatcccagacggtagaacaaa

SEQ ID NO: 74087 - DNA, 100 bp, Homo sapiens
tgttttctgctacctcatcctggcttaaaagtagctaccaatccaaactttgatggaaaattgaaaggtttcataggcgcaacaggaactttgggacaag

SEQ ID NO: 74088 - DNA, 100 bp, Homo sapiens
tttatgtgagaaaatctacaatttcttcgagacactcatataaaggtttgaccgaattgcacacacaaaggagacaatgctctctgatggtttgaactca

SEQ ID NO: 74089 - DNA, 90 bp, Homo sapiens
caggagagtccggccgcgacaggacggtggcataacaagctgttcagatggtacaagtaaccgggacagctttcgactggatgacgatgg

SEQ ID NO: 74090 - DNA, 96 bp, Homo sapiens
ctgagtgtctgtccccagagcctcagtttgtgcaggacaccgacatggaacagggactcactggggcgagtaaccagctcataaatcacatcgaac

SEQ ID NO: 74091 - DNA, 100 bp, Homo sapiens
caatgagccagtgcggcagttggctattttctgtccccatgtggcactccaaacaacgcaaaagtactttgactcaggagactacaacatggccaaagcc

SEQ ID NO: 74092 - DNA, 87 bp, Homo sapiens
caggaactctacaacccaatccagggattaaagcctgtggtttccacagaagcaccacctatcatatttgccacaccaactaaactg

SEQ ID NO: 74093 - DNA, 75 bp, Homo sapiens
gcgagctcctcaagaatctcgtgctcaccggtttctcccacatcgacctggatactatttttgagacaacaaatt

SEQ ID NO: 74094 - DNA, 100 bp, Homo sapiens
ctgaccccccctccgctccccggcagctcgctctctcccctcagcgtaatggggagagtgccaacaatttccattaataagacagaaggttgccacatat

SEQ ID NO: 74095 - DNA, 82 bp, Homo sapiens
tgtacagcatcaactacctgcactttggggagcctaagtcctggaaggatgcctgtggccctcggagagcacagtgtcaggc

SEQ ID NO: 74096 - DNA, 97 bp, Homo sapiens
tgcgcgtcgcagtcgcgcggagcccggcttccgacgtgcagcctggcagtgcagtgggtatttgaagtataccatacaactgttttgaaaatccagc

SEQ ID NO: 74097 - DNA, 98 bp, Homo sapiens
gcgggacaagcgcgacgcccggcgcgagctcaagctgctgctgctcgcaaactgtcatcaggagcttaaataggacagattttcacggcagtggatat

SEQ ID NO: 74098 - DNA, 101 bp, Homo sapiens
caaacagggaaactgaggaccagagaggaattctggggagacattgccaaggaattttactggaagactccatgccctggcccattccttcggtacaactt

SEQ ID NO: 74099 - DNA, 100 bp, Homo sapiens
cgaggagtcagaaactcagccactggttgccttggtaggcaataaaaaatcttttagctgaaaaagtagagcagctgatggaatggagttccagacgctc

SEQ ID NO: 74100 - DNA, 75 bp, Homo sapiens
ccgccgcagaccccttcaagttctagtcatgcaatgagtattacccagcagatctgcaagttgctccaacccagg

SEQ ID NO: 74101 - DNA, 82 bp, Homo sapiens
cggcggccttcgaggaggtcatgaaggacctgagcctgacgcgggccgcgcggatgtccagctcgccgctgtccaagaaacg

SEQ ID NO: 74102 - DNA, 77 bp, Homo sapiens
gttctccctgcagcagtcagcccaaaggaagattctgaagactactttgaggtcaacattccaacagacctacgagc

SEQ ID NO: 74103 - DNA, 100 bp, Homo sapiens
ggggctgctgaccgagagagctcactcagccagctattaatattactcagccaaggttcagtggcacagatgcctttggatacacctcattcctggctta

SEQ ID NO: 74104 - DNA, 135 bp, Homo sapiens
tgatggcatcaatataagacaaacttgtaatctgattttcagcctgtgtcgatacaataatcgacttgcagaacatattacaggctgtgccagccctggaaaaacagttacaattgttgttcgtggttctaacaa

SEQ ID NO: 74105 - DNA, 100 bp, Homo sapiens
gaaacgatcctttttggatctctgctcctatactttccattctgtgatatgagcaacaatggaccagaagattttatctctagcagcagaaaaaacagca

SEQ ID NO: 74106 - DNA, 100 bp, Homo sapiens
ctcactgccggcgtctacgagtcagccaaagtcttgaacgtgactttgctgctatttgagcacagtgatattgttgtcatttcactactcagtgttttgt

SEQ ID NO: 74107 - DNA, 100 bp, Homo sapiens
cagagaccatgtttgacaagacgcggctgccgtacgtggccctcgatgtgctctgcgtgttgctgggaatacatcccagttcagactggagcacatgctg

SEQ ID NO: 74108 - DNA, 100 bp, Homo sapiens
ctgaaaatgaagggtgattacttccggtaccttgctgaagttgcgtgtggtgatgatcgaaaacaatctctactgacaccacgcttggcccccagcaaac

SEQ ID NO: 74109 - DNA, 100 bp, Homo sapiens
gaagaagatcgccaagagatcaaagataaaatcttttgtgaaagtgtataactacaatcacctaatgcccacaaggtgccgacgccaccgccgagcccat

SEQ ID NO: 74110 - DNA, 51 bp, Homo sapiens
atcagtgatgaagatgaatcgacggaggacatccgcttggagccagatcta

SEQ ID NO: 74111 - DNA, 75 bp, Homo sapiens
ccaagatgggcatctattacattccaattagaggatttcctacaatcaagatatttcagaaaggcgagtctcctg

SEQ ID NO: 74112 - DNA, 97 bp, Homo sapiens
agatggttccagagacgggagtcctgggcccagagccgagatgagcagaacctgctgcagcagaagaggttttagattcaggaagactgaaagaata

SEQ ID NO: 74113 - DNA, 82 bp, Homo sapiens
agcacagataattcagagatctttctcttctccagaaaattttcagagacaagcagtggtttttcgttggaatatacgttgc

SEQ ID NO: 74114 - DNA, 100 bp, Homo sapiens
ctgtgggccaggtgcaggagacatcaaggatcctggatgaggctgtgggtgagcgtggaggatgctcagatgcacaccgtcaccatctggctcacagtgc

SEQ ID NO: 74115 - DNA, 98 bp, Homo sapiens
tctgatcccagccatggccttcctctcctgcgtgagaccagaaagctgggagccctgcgtggagttcaacagcatgatcctttactgtgtgcccaagc

SEQ ID NO: 74116 - DNA, 75 bp, Homo sapiens
gtggcagatttgttattggtgggcctcagatttgttcccgacaaggagttttctggttcagaccgtagacagaga

SEQ ID NO: 74117 - DNA, 100 bp, Homo sapiens
cacgagtatgtgccctgggtcaccgtcaatggggtaagaaggtgttttaccctgtggtgttcagtctttacaatcctgccattgtttatgccaaccagga

SEQ ID NO: 74118 - DNA, 100 bp, Homo sapiens
gggatctttccggatcaatccagatggcagccagtcagtggtggaggatgctttcattggatttggaggaaatgtgatcaggcaacaagtcaaggataac

SEQ ID NO: 74119 - DNA, 100 bp, Homo sapiens
tcggagaaacaggcgccgcgggctccgcgcccggccggacccgggcccgaggggattgcagtggcaaagctaggctaggtcttggaggctggtgtaaggc

SEQ ID NO: 74120 - DNA, 99 bp, Homo sapiens
aggattctgcctggccctgggaagagaagcctagatatctggtttcaggcacagaactgtatatccaataatagtgaaatggatcccactaattatgac

SEQ ID NO: 74121 - DNA, 83 bp, Homo sapiens
gaaggtggtctaccggcgcttcaccgagatctacgagttccatgagctcgaggccatgagcagatataccagcccagtgaacc

SEQ ID NO: 74122 - DNA, 100 bp, Homo sapiens
gtccgaggctcgcgggcggcgggcccggaatggactgctgaattatgaagtatttcagacccagtagtagaacatcactctgccactcactcctttatct

SEQ ID NO: 74123 - DNA, 100 bp, Homo sapiens
cgggagcccaggagcctgccccgccctggggacgaagagctgcagctcctcctgtgcggggaaaggaaaacctcttcagcgcaaggtgaaaccacctaag

SEQ ID NO: 74124 - DNA, 75 bp, Homo sapiens
cccgccacggtggaggatctggtctatgttaacaatgaatgggcaaccagtgttggggaaggagggagctttgga

SEQ ID NO: 74125 - DNA, 50 bp, Homo sapiens
ggaacatcagcaatgcttctggatggggctggtaagtagcaaaaagccgg

SEQ ID NO: 74126 - DNA, 75 bp, Homo sapiens
gcaacagccactagtgggtttgccagtggaacggcaagcctgcacgagctgtgtgctgccagagtgtcagaggtc

SEQ ID NO: 74127 - DNA, 100 bp, Homo sapiens
agagagcaaggaaaggcttggtttggctgtagcagcaattcctgaaggtctccccattgtggtcacagtgacgctagctcttggtgttatgagaatggtg

SEQ ID NO: 74128 - DNA, 100 bp, Homo sapiens
agcatgtctttcagagcccggcaccacccatcttgagtatctggacgagattgaggagctgcgggccgagatgctggagatgcgggacgtctatatggag

SEQ ID NO: 74129 - DNA, 100 bp, Homo sapiens
ggattccaagtaactcttatttgggcaaacttgaagataaatcttttgactccagctctttagaggatctaaagtgaccttgatggacagtggaagaaat

SEQ ID NO: 74130 - DNA, 100 bp, Homo sapiens
tgccgctccacgccactccagaagagtatgatagtcaagctggtgcgagacaagttgcgcgtcatgaccctttccatagttaaagagaagttgactgcgg

SEQ ID NO: 74131 - DNA, 50 bp, Homo sapiens
tggacgctaggaaatgccaaccatgacgtgccatctgggattgacagctc

SEQ ID NO: 74132 - DNA, 75 bp, Homo sapiens
ctctgagccccggcggcgcccgggcccacgcggaacgacggggcgaggttgaaatcacaaagattagacaccttt

SEQ ID NO: 74133 - DNA, 95 bp, Homo sapiens
gcggatggccccaggtgtaagcgcagaaagcaggcgaacccgcggcgcaataacgcctcctggatgaggaagtgagccgcactctcaacgcggag

SEQ ID NO: 74134 - DNA, 98 bp, Homo sapiens
ctcatgatccaccggcctcggcctcccaaagtgctgggattataggcgtgagccaccgtgcctggctgaaggacccagatgatgtggtaccagttggc

SEQ ID NO: 74135 - DNA, 75 bp, Homo sapiens
atcttgaatcatgaagctactaaccagagccggctctttctcggtttgcagtatcctcagagtctgaattttgag

SEQ ID NO: 74136 - DNA, 100 bp, Homo sapiens
cacccattgtgtcttctcaagaaggttcttagcatgataatcaacgcagcctacaagcctggaagggtattaagagaattacagctggtagaagatcccc

SEQ ID NO: 74137 - DNA, 83 bp, Homo sapiens
gtcggagacacggtggaaacgcttatggtgaaatgacaatggatgctctgttggctcgattgaaacttctgaatccagatgac

SEQ ID NO: 74138 - DNA, 75 bp, Homo sapiens
ccagtttgaaattctcagtgatcagtcagtcaactttggttttagtaatgatcaccagcagcttgcaaaacttat

SEQ ID NO: 74139 - DNA, 74 bp, Homo sapiens
cagcctcctacctgctgattcctgcagcctcctatgtgctcccagaggtgctgcgagagatgtgcaagcaggga

SEQ ID NO: 74140 - DNA, 97 bp, Homo sapiens
aagaccaaaaagggtgtggatctgctgcagaatcttataaagtattaccatgcacagtgcaagtcttgacccctgaatttaagaaattcttaaagac

SEQ ID NO: 74141 - DNA, 100 bp, Homo sapiens
cggctccccggtgcctgcgcggcgggccattgagatggcccagcacggccagagcttcatggcggctgaagagatgcattggcctgtccctatgaaggcc

SEQ ID NO: 74142 - DNA, 100 bp, Homo sapiens
gcgagaggaggccgtccagcagatggcggatgccctgcagtacctgcagaaggtctctggagacatcttcagcagaaccgtcagccccccctcaagacgt

SEQ ID NO: 74143 - DNA, 51 bp, Homo sapiens
caacttaagagcttcttcaaagaatgtcgtactctcaggaggctccaccat

SEQ ID NO: 74144 - DNA, 75 bp, Homo sapiens
catgatgtacagaaccaagtctcttcactactgacagcagatcccaggtacagagggcacgctatgaggcagcta

SEQ ID NO: 74145 - DNA, 50 bp, Homo sapiens
acccgcggtggagcgggacacgaacgtgactgattcttgctattccaaat

SEQ ID NO: 74146 - DNA, 83 bp, Homo sapiens
tgagaaataaggacaaaagccaagaggaggacagttcgctacacagcaatgcatcgagcaggtgacgggaaggtggcggagcg

SEQ ID NO: 74147 - DNA, 138 bp, Homo sapiens
atagatctcatactacaattgccaaatacgcacaataccaggcttcctccttccaggaatcattgagagtgtgcggagatgatcatcagcatggacagcagccagatccacagcaaagacccccgttacggagccagc

SEQ ID NO: 74148 - DNA, 87 bp, Homo sapiens
gagaccgtgaccgagagcgtgaccgagagcgcgaatatcgtcatcgttagaaggattgcacctctgcctccacctcccctactacca

SEQ ID NO: 74149 - DNA, 83 bp, Homo sapiens
tactatgggtttaccaaactacttgaactttttgaagccatacctgatactttacaatgggcaggcttggctgaaatgagaac

SEQ ID NO: 74150 - DNA, 50 bp, Homo sapiens
tcgttctccagatcctcgatcaccaaagttgtccaatctggagattccac

SEQ ID NO: 74151 - DNA, 75 bp, Homo sapiens
tcagccagcctattcttttggaattggaagcaccgctgaaaatttgtggaggagatgttaaagtaacccatcttg

SEQ ID NO: 74152 - DNA, 75 bp, Homo sapiens
cagcagcatctcagcccaagagaagtgttctaatcttaggcgcttcaggcggagttggtacttttgctatacagg

SEQ ID NO: 74153 - DNA, 100 bp, Homo sapiens
agcagactacgaaatgccgaccaagtcacaaggccacagtgagcacggtagaaagatgcaaccttaaaatcagtgacaagaaacattccaaacaagcaac

SEQ ID NO: 74154 - DNA, 90 bp, Homo sapiens
acctgagtgacctcggccagctgcagtccagctccagctaccagatcaataagatggagtggtggagccgcttggtgtccagtgaccctg

SEQ ID NO: 74155 - DNA, 100 bp, Homo sapiens
agagtggaccacggggagccccacgagggtggttctcttcccaaagtggaagccaaattcatcaattatgtgaagaattgcttccggatgactgaccaag

SEQ ID NO: 74156 - DNA, 87 bp, Homo sapiens
caacaagtgtcacggcatacaagcaggattaaactgcaaatatctcatgaagctgctgcctgtatcactggtctccgggcagccatg

SEQ ID NO: 74157 - DNA, 100 bp, Homo sapiens
cgggagatcgctcagctggccgtgtcctggcaggacagtcattttgtttactcattcagccctgttgcaggtcccaataaactcttcataaggttgacag

SEQ ID NO: 74158 - DNA, 100 bp, Homo sapiens
ggggcaggagtgcatcaagtgccacatcaacgtgtatccacacaagcagccaaggccacctttgatgccatttctaagacctacagctacctgacccccg

SEQ ID NO: 74159 - DNA, 75 bp, Homo sapiens
tggagatatggcgcaactgcggcgccatgttggcagataaattgaacatgactccagaagaagctgaaaggtgga

SEQ ID NO: 74160 - DNA, 83 bp, Homo sapiens
ctgccctgggctggaacgaccctggcatcagaacacaccatgatggctgtgacctaagaccctcaggaagccccggggtcatg

SEQ ID NO: 74161 - DNA, 100 bp, Homo sapiens
gggcactccacagattctgttgcgaaggcagccatctttagttcgtctttcctagagaggggtcttgttcctcgccttctaggtgacatcctttctttgt

SEQ ID NO: 74162 - DNA, 75 bp, Homo sapiens
gggacctggcaaagtacttcagaacttttattccttccagaagcagaaaggcttcccaactgatgcaactcttga

SEQ ID NO: 74163 - DNA, 75 bp, Homo sapiens
gagaatgtaactccgttgaagcagatcgaacagaggctgcaaatagaataatatgtactatcagaagtaggagac

SEQ ID NO: 74164 - DNA, 100 bp, Homo sapiens
gcagggaggggtgcgaggctagccacgcaggcggggccctggagccacccagagttccctcactgaagatctgagcatgacccgggacgaggcactgccg

SEQ ID NO: 74165 - DNA, 80 bp, Homo sapiens
gacctttataatgatccacttccacttgatgaatactgatgttctaatcatgtcagataaagatgatattgagactccac

SEQ ID NO: 74166 - DNA, 100 bp, Homo sapiens
acttaagttttccgtgtgcgggttgcaaggagcgtgcgtgcgtctgtgtgaggatgatttggctgagaagaggagaagtaatgaggtgctacgtggagcc

SEQ ID NO: 74167 - DNA, 82 bp, Homo sapiens
ttaaggattccaagtaactcttatttgaaagaactggttgtcttcttgggcggtgttgcagggttcatctttactttttacc

SEQ ID NO: 74168 - DNA, 75 bp, Homo sapiens
gtccctcaagcccctacatcccttcaccagcaaaccagtccagctacgggggcccagccagccagcagctgagtg

SEQ ID NO: 74169 - DNA, 83 bp, Homo sapiens
cccatctatcagcaggctccgggctgaagattgcttctcttctctcctccaagttccagctattcttcagatgctctggattt

SEQ ID NO: 74170 - DNA, 75 bp, Homo sapiens
ctcggagattggctgcctcatccgcttctatgcaggatgcctttgtggaactgtacggccccagcatgcggcctc

SEQ ID NO: 74171 - DNA, 90 bp, Homo sapiens
gcccaggcgcagatgcgggccctgctggaccagctcatgggcacggctcgggacgaggagaattctgcctaagccaactcgaaaaagccg

SEQ ID NO: 74172 - DNA, 100 bp, Homo sapiens
aaatgtgttgtgccagcaggtccacctgttgagtcattcttatagaagagcatcagaggaagataaaaaagaatcctcaatgtcaggcccctgagcccaa

SEQ ID NO: 74173 - DNA, 75 bp, Homo sapiens
acaaatactattatggataagatgatgtctgttcggcacttgaagtactccttgtttaagaaatcactactgggc

SEQ ID NO: 74174 - DNA, 83 bp, Homo sapiens
gggaagagaagatcatcgagcatttcaaacggtgatgtgtccaatctagatcccaacttctcatttgaaggcaccaaactgga

SEQ ID NO: 74175 - DNA, 75 bp, Homo sapiens
taaatgcatttccaattcctctgttgttaagctctattatcaagtcctaaattttggaatgattgtctcatcggc

SEQ ID NO: 74176 - DNA, 75 bp, Homo sapiens
ttgtaatcagctgaggccatgtcaggagacggagccacggagcagctcccatggctattgaagaacaagtggctg

SEQ ID NO: 74177 - DNA, 100 bp, Homo sapiens
acttcagcctctctcccctgtgccaagtttgtcccgctggctggaagcctggcagtgacacgattaagcccaacgtggatgacagcaaggaatatttctc

SEQ ID NO: 74178 - DNA, 100 bp, Homo sapiens
tcctcatcatcatcgcctcctgcgtcatcaacttaggcggtgtggttacagaggaggctacatggaggtgatcaacctgcaccctgagatcaagggccag

SEQ ID NO: 74179 - DNA, 75 bp, Homo sapiens
aaagcccacagagatctacaaccttggagcccagagccacgtcaaaaatgcctaccgcaggaatgggatggcttt

SEQ ID NO: 74180 - DNA, 100 bp, Homo sapiens
aatgacttaatcgtctttttggcagaccagaatgcaccctattttaaacccaaagtaaaggtatctttcaagagcatctttccttgaagaagtacattat

SEQ ID NO: 74181 - DNA, 100 bp, Homo sapiens
gaggaggaccaggcccgcgggctcagctctcgccgccagcgggccgcaggatagtaatgatgacactgaagatgtttcactgtttgatgcggaagaggag

SEQ ID NO: 74182 - DNA, 71 bp, Homo sapiens
agaatctcaaccatgatgcaattgtagttcgaaagaatgtggatatactgaaagatcctgaaacagtcaag

SEQ ID NO: 74183 - DNA, 101 bp, Homo sapiens
gggcggagctgtgcgagagcctcctcacttgggacccattccaacaatctcgtaaaacatggtggattactatgaagttctaggcgtgcagagacatgcct

SEQ ID NO: 74184 - DNA, 98 bp, Homo sapiens
agtgggtgtaatacatcatgaactgcagggttgcatcataaatacaaaggactgaagttataaaagagaaaagagaagtttgctgctaaaatgaatct

SEQ ID NO: 74185 - DNA, 75 bp, Homo sapiens
aacagcagcgccgtcccgtccgacagccaggcccgggagaacccagctcaacattggcaatgtgctccctgtggg

SEQ ID NO: 74186 - DNA, 75 bp, Homo sapiens
ccagcaacccatcgtcagaaaatttcaggaaaatgccagtgaagggaaggcccctgcagaagacgtctttaagaa

SEQ ID NO: 74187 - DNA, 90 bp, Homo sapiens
aagctggagtaccagcgccgcgaggcctttaaggtactgggcctaatcgctacgtgcctctttggctatgatgcctatgtcaccttcccc

SEQ ID NO: 74188 - DNA, 82 bp, Homo sapiens
gctggccagcgagagccagggctccaaagaactcgatggccaccatgtctgggagatggaagcgaaaactgaccgggacctg

SEQ ID NO: 74189 - DNA, 75 bp, Homo sapiens
caagtaatggtgcaaagcctgaagaggagctgacaagcacaagtgtggaacacatcattgtcaatcctaatgctg

SEQ ID NO: 74190 - DNA, 51 bp, Homo sapiens
atttggactccagtggtagctatggccaagactaaggggctgcagagcggg

SEQ ID NO: 74191 - DNA, 90 bp, Homo sapiens
ttgcaagtgcgagcactatggagtagcgcagggtctcgagctgtggccgtggacttaggcaacagtttgtgaagtgtggatatgcaggct

SEQ ID NO: 74192 - DNA, 90 bp, Homo sapiens
ctgagcaaggagcgggtccgtcgcggagccggagggcgggaggaacatgacatcgcggagggaatgggtactgttcaaaaaggaatgccc

SEQ ID NO: 74193 - DNA, 75 bp, Homo sapiens
ccgccgccgcccggaccccggcgcgctgaatgcaggggtattccctcagcggatactacacccatccatttcaag

SEQ ID NO: 74194 - DNA, 75 bp, Homo sapiens
ctggcctcgtgcggcggcgaccggagaatccgcatctggggcacggaggctgactggaaataccggcatgcagga

SEQ ID NO: 74195 - DNA, 100 bp, Homo sapiens
gaactggcatatttcttcactactggaattgttgtttctgcctttggatttcctgttattcttgctcgtgtggctgtgccctggatgagcgacacagaag

SEQ ID NO: 74196 - DNA, 98 bp, Homo sapiens
ctccggcttccgtcccggacagagcccgtggtcgcgcaggtttttcttcccccagtccctcagctgctgctgctgctcaggaggtcagatctgccact

SEQ ID NO: 74197 - DNA, 50 bp, Homo sapiens
cctagtacctcctaccattgtcaactggatgttcacggaagaccagggtg

SEQ ID NO: 74198 - DNA, 90 bp, Homo sapiens
agttcgctctagcagacaagatcagatccacaggaaatatatcctggacaattccagccatctctctgtcacaaattcatagccttgtca

SEQ ID NO: 74199 - DNA, 74 bp, Homo sapiens
tatgacattaacagacaagacacttttcagaaagacaggcggctgagccagaggccaactgcagaggaactgga

SEQ ID NO: 74200 - DNA, 99 bp, Homo sapiens
tggcagctcgtgcaattgttgccattgaaaaccctgctgatgtcagtgttatatcctccaggaatactggccaggagctatcgaaaaaccttgaactga

SEQ ID NO: 74201 - DNA, 126 bp, Homo sapiens
ggcaacttatgcaagaaactgttgaattagacccgtttcctatagatgagaaaccatacaagctgtggtaatatgcacgtgtcactagctgaggccctggaggttcggggtggaccacttcaggag

SEQ ID NO: 74202 - DNA, 82 bp, Homo sapiens
ggcggggctgaggcggccgcggggcccgagcgcaggtatcacctcttctgggctcaagatggacaacaagaagcgcctggcc

SEQ ID NO: 74203 - DNA, 112 bp, Homo sapiens
tggggaggtcctccatgcgcagtcatgagtcgcttcaagtttatcgcctacatgaagcggcggcacagctcagtcagtgacagccagccctgcgaaccgccctctgtcggca

SEQ ID NO: 74204 - DNA, 75 bp, Homo sapiens
tgttcctgtgatgtggaggaaattttccgcaagcggatcctgttacagtgcaaagaagaaatggcaaacggataa

SEQ ID NO: 74205 - DNA, 75 bp, Homo sapiens
gtgacaccaagataagtaacaagaagcacagcgtgctgatgtctgtgattgccggggaggctgtcgcatccgtga

SEQ ID NO: 74206 - DNA, 115 bp, Homo sapiens
gcagtgttcgtgggatggggcagcgggctgcagctggcggccggaatccgcgcgcagcccggatataagagttcggaccgcccagcacacaaggtcagcatgctgctcctctgtc

SEQ ID NO: 74207 - DNA, 75 bp, Homo sapiens
ttagagcgtctggccaagaatcagaggaagtggacccttctcaggtgcagccagagagacactagcccactgatg

SEQ ID NO: 74208 - DNA, 100 bp, Homo sapiens
ggtagaggcagtggcgcttgagttggtcgggggcagcggcaggatgtacagttacccagcacgtgtacctcctcctcctcctattgctcgggctgtagtg

SEQ ID NO: 74209 - DNA, 82 bp, Homo sapiens
gttgtcaactctgtgggaagaacagcagctcagatggcagcctttgtgggataccatacttgcagagctccttcagatacat

SEQ ID NO: 74210 - DNA, 82 bp, Homo sapiens
ccaggagaggagcactttgaggacatggcctccgacgaggacatagtctcactgtcgcccaggctgcagtgcagtggtgcca

SEQ ID NO: 74211 - DNA, 90 bp, Homo sapiens
ggaaatagtggcaggtgacagtctgcatgtgcagttttcaggctccgtccatgccacatcggtagcagcctcaagagtggagcaggcact

SEQ ID NO: 74212 - DNA, 83 bp, Homo sapiens
cggatgccatggttacttttgccacgacaatgcagatcttcgtgaagactctgactggtaagaccatcaccctcgaggttgag

SEQ ID NO: 74213 - DNA, 86 bp, Homo sapiens
gccctgagtcactgcctgcgcagctccggccgcctggctccccatactagtcgccggttggccttcattccacgatgtgatcaatt

SEQ ID NO: 74214 - DNA, 98 bp, Homo sapiens
ccagcgtctgcattgctccggactcagccaagttccccaacggctccccgtcgtcctggtgctgcagcggatttgcatgcagccactgttaacccgga

SEQ ID NO: 74215 - DNA, 74 bp, Homo sapiens
cccagatgtctgacagccctgtgtgacaccaagataagtaacgtttactagaaattcccaactgttccaaagtg

SEQ ID NO: 74216 - DNA, 100 bp, Homo sapiens
ccttatggtaatgtcggccattgagaaattgttgaggcaggttctagagcacaagttgaaagaagctgatgaaatgcacacattgttacagctagagtgt

SEQ ID NO: 74217 - DNA, 75 bp, Homo sapiens
cactccctttcctctgctgccgctcggtcacgcttggtactccaaagattcaggtttactcacgtcatccagcag

SEQ ID NO: 74218 - DNA, 96 bp, Homo sapiens
ctgtaatcccagcactttgagaggccgagatggatctgagaacgctgtctgggcttggtaccaagagctggtatttcacagcagcgaccgcctcac

SEQ ID NO: 74219 - DNA, 73 bp, Homo sapiens
tcattttgattgtagtagcagtggagactttgctaccaggacttgctggcccctctggggagatggttaaatc

SEQ ID NO: 74220 - DNA, 101 bp, Homo sapiens
taacgggaggtgaatttccatgtcaacatagtcctgggtaactaaggaagtggatgctacatctaaagaggccaaatccttcttcaagcagaatgagaaag

SEQ ID NO: 74221 - DNA, 75 bp, Homo sapiens
atgatcattgacagagagaaccagtgcgtcattatcaggacattggctccctggattatcaagagtttgtagttg

SEQ ID NO: 74222 - DNA, 75 bp, Homo sapiens
gcagaaattatattttccagcccgtgtctgcaggaactctaatgaatcattgattgaccagcactattttaccag

SEQ ID NO: 74223 - DNA, 75 bp, Homo sapiens
caacttcgtctggagaaaagtggtgacttattggccctacatcattcgaggaatggcgcccccgacgacgccctg

SEQ ID NO: 74224 - DNA, 100 bp, Homo sapiens
agcgaacgcatgcaacacgtggtccagcttccccctgagccggtgcagatggcagttgaattcctgcatgaactgaatgttccatttttcaaagttggat

SEQ ID NO: 74225 - DNA, 75 bp, Homo sapiens
cagtggacgtcccaactcggcaaaaccgttttgagcacgagggccgggaggaggatcagcggttgatcaacttgg

SEQ ID NO: 74226 - DNA, 75 bp, Homo sapiens
gcccttccttgacagcccgggccgagaagagtgaagacatttccacctggacacctgaccatgtgcctgccctga

SEQ ID NO: 74227 - DNA, 75 bp, Homo sapiens
cagcagggcagttctctctcgggttcaaaaggtggacccccaaaagtacaagggcatatttaacggattctcagt

SEQ ID NO: 74228 - DNA, 100 bp, Homo sapiens
gactggcgcgtacgagatctccgaccagtctgggggcgctggcggcctgcgcagccacctcaagaagccggcaggagtgactctcggcatggaggaccca

SEQ ID NO: 74229 - DNA, 82 bp, Homo sapiens
gggaaccctggtcaccgtctcctcagagcataatggcagcgtctgaggttgctggtgttgtggccaatgcccccagtcctcc

SEQ ID NO: 74230 - DNA, 83 bp, Homo sapiens
tttattgaagctcacctttgtctaaataagtgaatcaattcagatatttgctgagattgagaactgctcttcccgaatggtgg

SEQ ID NO: 74231 - DNA, 82 bp, Homo sapiens
aaccaattccggacacataacaagcagcagtgaggacaccaaagaagctccaccatgaggcgaggtggatggaggaagcgag

SEQ ID NO: 74232 - DNA, 95 bp, Homo sapiens
accctcgtcgtggacagatacgcattttctggtgtggccttcaccggtgccaaggagggtgaaatccgagctacagctttcaatgagcaagtgga

SEQ ID NO: 74233 - DNA, 90 bp, Homo sapiens
acttgattacccgttaagtcccccaaagatgagatttacctgtgagatgtttcatcccaacattggccagttctacttcttaatccggaa

SEQ ID NO: 74234 - DNA, 101 bp, Homo sapiens
ccccagcgatggaagaggatcaggagctggagagttctttattggtgaaaacatgaatccagatggcatggttgctctattggactaccgtgaggatggtg

SEQ ID NO: 74235 - DNA, 76 bp, Homo sapiens
ccctgcagactggcaggagcagattccaaaggcacaggaagaagcttgcagaccggagtacactgggaagcatcaa

SEQ ID NO: 74236 - DNA, 100 bp, Homo sapiens
ctcccgccagtctccagccatgggttatgaagacagtatggagtttccagaccatagtagacatttgctacagtgtctgagcgagcagagacaccagggt

SEQ ID NO: 74237 - DNA, 83 bp, Homo sapiens
tgctggcgagacgggggtgatgcccacccgggcgagaaaggaagcgccgcggagccatcaacagcaagcagctcacctacctg

SEQ ID NO: 74238 - DNA, 75 bp, Homo sapiens
aatttacagagatcatcctcttcagaaacactctggacttattggacaaaatgttgacattcaacccacacaaga

SEQ ID NO: 74239 - DNA, 95 bp, Homo sapiens
agatcattatggagcagagatcaggccaagtttggaatcactgggtgcttctcagcttcacgggaaagggcctgctgtaccacggaaattgtgac

SEQ ID NO: 74240 - DNA, 100 bp, Homo sapiens
ctgaaaagtcgcagcgagctggagccgccggaggagcatctttccttgaagaagtacattattgacattgtggttgaaagtacagctccagcagaagctt

SEQ ID NO: 74241 - DNA, 96 bp, Homo sapiens
attggttccaaggggaccaacccacaaagaaccttgtgaagtttggtcacaaacaagtcattttccaagccaccacagtgattcagctgcttcctc

SEQ ID NO: 74242 - DNA, 100 bp, Homo sapiens
cggaagatgaggaatgaggtggtccataaagtgaggtgaagaagctaagtctcagaaagataactcacccaagaggacacaaggataaacctgataccca

SEQ ID NO: 74243 - DNA, 73 bp, Homo sapiens
agatgtggggggattctcgacctgctaacagaactggaccttttcggctttgatcactcagactcgagccaaa

SEQ ID NO: 74244 - DNA, 75 bp, Homo sapiens
tctacgcaagaatgaactggagacagagaataggtgtaaacgtcctacttcggggcaacttgccagagatagaag

SEQ ID NO: 74245 - DNA, 60 bp, Homo sapiens
caagttccacaatatattgactactgccacaattccggcccgatgagagaaagggaaagt

SEQ ID NO: 74246 - DNA, 75 bp, Homo sapiens
caaacttggaggatttgataatgctcaaccacaggaattatctcttggaatctccgcataggttcagtgttgctg

SEQ ID NO: 74247 - DNA, 101 bp, Homo sapiens
cgtcgactgcccagagtccgcggccggggcgcgggaggccatgtcaaaggacgccctgaatctggcgcagatgcaggagcagacgctgcagttggagcaac

SEQ ID NO: 74248 - DNA, 96 bp, Homo sapiens
tttggggaccgggaccgggatcgtgaccgtggaggaaactggcgatggaatatgagaggagccctctggaaagaaaaggacagaccctgtgctttc

SEQ ID NO: 74249 - DNA, 51 bp, Homo sapiens
ctccagtgccaacagccaattctacaggttatgcattagacccttcattag

SEQ ID NO: 74250 - DNA, 100 bp, Homo sapiens
gaggaaaatgttttgccacgtggatgtgaagatttcctctaaaagatacgatgaatggattaaagcagataaaatagtaagacctgctgataaaaatgtg

SEQ ID NO: 74251 - DNA, 100 bp, Homo sapiens
tgcccgttgtgtttgtgaaacagagaaagataggcggccatggtccaaccttgaagtttaacttacatgtgtagagctggagcaattcggacagatgata

SEQ ID NO: 74252 - DNA, 87 bp, Homo sapiens
cctggactgcattgtcgaatggtccaagaaccttcgagatctgcggtctggggtctggttgaaagatggcggccctcactaccctgt

SEQ ID NO: 74253 - DNA, 100 bp, Homo sapiens
gttgccaagagtcacagtgactcatgcattctttcttcaaacaacctccctaccaaggatcttctttcagctctttcgacgtgtagcagcagctttgccg

SEQ ID NO: 74254 - DNA, 100 bp, Homo sapiens
aggcaaagtttacaaggaagaaacacaaaagttgcagtggttctgattcagaagaaaacccctttgcccccaggttgcacaccgatgctccagaattgtg

SEQ ID NO: 74255 - DNA, 100 bp, Homo sapiens
gccgacgggtcctgagtctccagagctcggtgaggcgtcccggaggcggcgatcacgctcaaaaagtttccaagaagacaggaccccggtgttccacagc

SEQ ID NO: 74256 - DNA, 90 bp, Homo sapiens
gccacgtggatgtgaagatttcctctaaaagtcttttatcacgagtcatgaatacaggatcacagtttgtgatggaaggagtgaagaacc

SEQ ID NO: 74257 - DNA, 75 bp, Homo sapiens
ggactggatcaacaccggggagtctgcggatgacgtccggttgtttgccttcgtgcgcttcaccaccggggatgc

SEQ ID NO: 74258 - DNA, 82 bp, Homo sapiens
caccacgcgccccgcgcggcccgcccggatcgtggcctctcgagagcaaggattttttatcaagcagaaatgcatcgaacaa

SEQ ID NO: 74259 - DNA, 83 bp, Homo sapiens
gccaaaccccctcctctgcctcgctccaacacagggcgtgatggtgggcatgggtcagaaggattcctatgtgggcgacgagg

SEQ ID NO: 74260 - DNA, 101 bp, Homo sapiens
catggcctccgctatgaaggcggtggcttcccacacttctgactcggacgttccttccggtgtcactgaggtggtcgtgaagctctttgactctgatccca

SEQ ID NO: 74261 - DNA, 83 bp, Homo sapiens
ggaaaacctaaccatgaagacttgaacttaatacagcaagaaagaccatcaagtttaccagagtggagtcaacatatcaatgg

SEQ ID NO: 74262 - DNA, 100 bp, Homo sapiens
ggcgtccccggcgcgaagaggctggactcggattcgttgcctgaggacccagatgatgtggtaccagttggccaaagaagagcctggtgttggtgcatgt

SEQ ID NO: 74263 - DNA, 50 bp, Homo sapiens
gacaacaccgagtatgagaagtactactgagcgagtgtgcttgatccagg

SEQ ID NO: 74264 - DNA, 83 bp, Homo sapiens
cgccgaggcctccgcgctctacggccgcgcgctgcgggtgctgcaggcgcaagcaatctgcagagcgctgtgtaagcacattg

SEQ ID NO: 74265 - DNA, 90 bp, Homo sapiens
tggaacccgaagaagaaaggattcgttacagccagagattgaccacctggtggcccatggtagaatggcagaaaaggaggcacgtcggaa

SEQ ID NO: 74266 - DNA, 100 bp, Homo sapiens
gaggatctttgctcttccatccgcctttgatcgtcttcctcttcagccatccaggaggcctgaactctcaaactccgaatctgatttccactctcccagg

SEQ ID NO: 74267 - DNA, 75 bp, Homo sapiens
gatgaagcttatgcaattgccaaaaaattaggcaacttcagttcatttatgcagaaggaaatatttgagcagcca

SEQ ID NO: 74268 - DNA, 98 bp, Homo sapiens
cgagtctgtttatccgttgcagcctcccttccccacgacggggcgcctctgcaactcacaatgatcgttgccagcccaacagaaaatggacaggtact

SEQ ID NO: 74269 - DNA, 98 bp, Homo sapiens
cagaaggggtgaaagagactcggtgacagatacaggcctggcagctgcgattcagccacctcgtggggtatggtgctagatattactcttacctcatg

SEQ ID NO: 74270 - DNA, 101 bp, Homo sapiens
attatggctcattgtagcctcaaactcccaggctcaagcagtcctaccatgtcagccttcccagtagctgggaccacagatgagagtccggagtgttgtca

SEQ ID NO: 74271 - DNA, 75 bp, Homo sapiens
ctgagcagctttgcgatccttatggctcattatgacgtggagagctcccccatccaggaatccactgctcccgag

SEQ ID NO: 74272 - DNA, 98 bp, Homo sapiens
acatctcatggctttgacaataccaaagagggtgttattgaagcaggagcatttcaagcaagtaactggcagaagttttggtgataaagattttcgga

SEQ ID NO: 74273 - DNA, 80 bp, Homo sapiens
cactcatcagtggttgtcccaatatccaagaagcagtagagggtgccatgcacattcagatggagtctccctctgtcgcc

SEQ ID NO: 74274 - DNA, 83 bp, Homo sapiens
acgcgggcaagcaggactacaaccgcgaggaggacgccgcgctcttcaagtgcccctctcagctgaggaggaaccgagagcgg

SEQ ID NO: 74275 - DNA, 75 bp, Homo sapiens
cgggatgaaggcggagcttccccctgggcctggggaactgtggctgcaccatctgtcttcatcttcccgccatct

SEQ ID NO: 74276 - DNA, 75 bp, Homo sapiens
ctctggctgtgctgcgcggcccccgcgcatgggtctggaacagaatctgacagtgatgaatcagtaccagagctt

SEQ ID NO: 74277 - DNA, 100 bp, Homo sapiens
ggacacggcaggccaggagcggttccagagcatgcatgcctcctactaccacaaggcccatgcctgcatcatgggaaaccaggaacaactggtaactgtc

SEQ ID NO: 74278 - DNA, 101 bp, Homo sapiens
gctttcacagtttgcgggactcagtcccatcactccaaggagagaagattgtgcttcaagaagaccatagggaagaacgcattttcatcttgctgcaaaag

SEQ ID NO: 74279 - DNA, 83 bp, Homo sapiens
tgttgccatcgcgtctccgcctgcaggatgaaacgaggaggaagagatagtgaccgtaattcatcagaagaaggaactgcaga

SEQ ID NO: 74280 - DNA, 82 bp, Homo sapiens
cgcatcaaccggatcatgggctttcacaggcccgggagcggcgcgggtcagcccaaggccaaccccactgtcactctgttcc

SEQ ID NO: 74281 - DNA, 120 bp, Homo sapiens
aatgaaggggagaatcctgaagacactaaaacccaagtgattttgcagttacagcctgtgcaacaagggcacatctaacatgtcatttgaggagctgttggaattgcagagccaagtggg

SEQ ID NO: 74282 - DNA, 100 bp, Homo sapiens
gtatgtgtagaaagtgaaatcagaggagatgtaactatcggtaattaaccagaacaggatcgacacgtgttctctacagcccgtccatggatcctttccg

SEQ ID NO: 74283 - DNA, 100 bp, Homo sapiens
ggctgcgggacgcgaggtttccggactcggtgaaatacctggagtgctcagctctcacccagagaggcctgaaaaccgtgttcgacgaggccatccgggc

SEQ ID NO: 74284 - DNA, 101 bp, Homo sapiens
tggaggagccttctcaagaacagagggccggtgcataaacttctcccgagttccatctcagtaaaagggaagcaggaagaccaagaaggtacgaagatggc

SEQ ID NO: 74285 - DNA, 74 bp, Homo sapiens
accttccttgctttcagaatttcacccaggttctgacagcaaagagagcaggatgaatggacagtaccagcagc

SEQ ID NO: 74286 - DNA, 100 bp, Homo sapiens
ccgctcttctccctgcttaacgagaaccatagattcatgatgttgctatcaaaagttgagaaattgtcagaagaaatcatggagataatgcaaaatttaa

SEQ ID NO: 74287 - DNA, 75 bp, Homo sapiens
gagaattggaagctaaagctaccaaagacgtagaaagaaatcttagcagagataattgacgaccttgccaaccta

SEQ ID NO: 74288 - DNA, 75 bp, Homo sapiens
aaataatctagatattgatggctttgtgggtgaatttgtaagtgatgtcctgctagttccagaaaagtgccagtt

SEQ ID NO: 74289 - DNA, 100 bp, Homo sapiens
ctgcattggacccagctattgctgcagcatttgccaaggagacatccctcttaggtttgaagcagtattacaaagttgtcaattcataccctttggcaca

SEQ ID NO: 74290 - DNA, 99 bp, Homo sapiens
ccttcgtggggctcatcgtgatcccggcgacatactacctctggccccgagatcagaatgccgtgaacacctacctcttcatgatgcaagcccaaggca

SEQ ID NO: 74291 - DNA, 83 bp, Homo sapiens
cggcgggcaggcgtgcggaggacactcctgcgaccagctcaccatggatgatgatatcgccgcgctcgtcgtcgacaacggct

SEQ ID NO: 74292 - DNA, 98 bp, Homo sapiens
tgaggtcctaaagcaacaaaaagaaataatagaacaagggatagatttgtccttttggaataaatcatgggattgagcttcattcagatgtggtggaa

SEQ ID NO: 74293 - DNA, 82 bp, Homo sapiens
ctgccacggtctgcccacccaacgcgaagacggtaacccgtgtgactttgactggctgattgctgaggaaggggtggacagc

SEQ ID NO: 74294 - DNA, 90 bp, Homo sapiens
cgccaacatcacctacgccagtcgcaagcggcggaagccggtgcagaaaacgtgtcttctctttagggatggtgaggttggaaaaaggct

SEQ ID NO: 74295 - DNA, 75 bp, Homo sapiens
aggaaaagcaccaggcaaaccaccatcacatctcattttgcaaagggctttcaccaacaatcaccagtggtttac

SEQ ID NO: 74296 - DNA, 75 bp, Homo sapiens
atgagccgacccatcttgtacagcaactggctgtcaaagaattatatccagatcgagagacagaagattctgaaa

SEQ ID NO: 74297 - DNA, 89 bp, Homo sapiens
gttcttaattattcagaatgctgcggttttccaagctgatgttctaatcatgtcagataaagatgatattgagactccactgctaactg

SEQ ID NO: 74298 - DNA, 83 bp, Homo sapiens
aagcctccccctgctgccgaggacaggccttcagtatttggcatcacctttacatggagcacaaagatgatgatgatgatgat

SEQ ID NO: 74299 - DNA, 50 bp, Homo sapiens
gcgctgccgccgctctgaggagttaaaggaatgtatcctgtcaggtataa

SEQ ID NO: 74300 - DNA, 50 bp, Homo sapiens
actggttgaccaactggtggaacccctggtgtctagtgaactagaaaatc

SEQ ID NO: 74301 - DNA, 82 bp, Homo sapiens
tcagaaaaagcatccccgaggaggaagacgaatcgttaaacatctgaaagggtcaggtgaaatgacaatggatgctctgttg

SEQ ID NO: 74302 - DNA, 83 bp, Homo sapiens
cttcgccctttccacctcgcggcagttcgcaaaatgatgcttcaacacccaggccaggtctctgcctcggaagtgagtgcttc

SEQ ID NO: 74303 - DNA, 50 bp, Homo sapiens
ccctcgggcttgtggttctctcaaagaccagttacagaagtggatccgcg

SEQ ID NO: 74304 - DNA, 145 bp, Homo sapiens
gacccagtggcctcggcgattatggacccggccgaggcggtgctgcaagagaaggcactcaagtttatgacatccacgacagcgatggcagttccagcagcagccaccagagcctcaagagcacagccaaatgggcggcatccct

SEQ ID NO: 74305 - DNA, 83 bp, Homo sapiens
gtgcgaagaagctgcagccgcacctggccaagggtctcgaagtgctgcagctaaaactcatacaactgccttggctgggcgaa

SEQ ID NO: 74306 - DNA, 100 bp, Homo sapiens
aggaagtaatccctagtgtcagcagattcagcggtactggtgtataataggtgccgtgagcgatgtggagatgcaggaacactatgatgagttttttgag

SEQ ID NO: 74307 - DNA, 51 bp, Homo sapiens
gtgcctttcagctttaaagagaattgaagtttttgaaatcatgaatcctgt

SEQ ID NO: 74308 - DNA, 75 bp, Homo sapiens
agaggcagaactaatccgtggcatctgcgagatggaactgttggatggagattcacagagagacgagcccaggag

SEQ ID NO: 74309 - DNA, 100 bp, Homo sapiens
ccaagacgctgcggccaagcagaaagttgaacagaacgcggctcccagccacaccaagttcagtgaggtgctggcggaggagtccatagtatgtctgcag

SEQ ID NO: 74310 - DNA, 74 bp, Homo sapiens
acaagcaggtccaaagagagagagggcatcctggctgtttcacccgtggacttgaacttgccattggactgagc

SEQ ID NO: 74311 - DNA, 96 bp, Homo sapiens
gctcactgcaacctctacctcccaggaagccgctctgtgacccacctctgaatcccacaaaactgcaccagagagccgggcgcaagatgaaccagc

SEQ ID NO: 74312 - DNA, 75 bp, Homo sapiens
caccactgccacaaacgccgcaccaggtcttgtagcagcgcctcctcggctgaactcacgggaatcaaatggcgt

SEQ ID NO: 74313 - DNA, 82 bp, Homo sapiens
gaaactttggggcccgcgccgcgcgccggcggcaccatgaagtcagcggaggaagttggaatcgaagcctcttaaaatggca

SEQ ID NO: 74314 - DNA, 100 bp, Homo sapiens
gtttcccagaaaaaatgcccagcgcggcgcggggctgcggagtcgtccggagccgctgcgcgaactcccctgattgcagctggagtaattggtgggctct

SEQ ID NO: 74315 - DNA, 82 bp, Homo sapiens
gcctggaggccgagcgcgagcagttcgacaagacccagaaggatatggccctgaagccacatgagcggaaggagaagtggga

SEQ ID NO: 74316 - DNA, 75 bp, Homo sapiens
acggggttcgggtgtctcgtgtgtgaacatcacagggcctcggcttcacaggatggggctgccagtgtcctgggc

SEQ ID NO: 74317 - DNA, 100 bp, Homo sapiens
tggagattctggcaaaccagctcacggggctcatggacatgaagattttctacaaggggaagaacactgggctgaggcacatgtctgggtctgagctgac

SEQ ID NO: 74318 - DNA, 89 bp, Homo sapiens
gtcaccaagaaattactgtctcaagtgatacggtgccaggggagagcaagaaacagtggaaaccagccctggttgtgctgactgagaaa

SEQ ID NO: 74319 - DNA, 90 bp, Homo sapiens
ggccaggcgattcggtgaagcgattcctgcaggcgttggttcccctctttgacctgggatgacttgtcaagctcgaacatcatatactga

SEQ ID NO: 74320 - DNA, 99 bp, Homo sapiens
ctggataggcttaggaattttgtcttctgttgggcttggaacagggctgcacacctttctgctttatctggcaatgatagtaagaaatgctaaagatac

SEQ ID NO: 74321 - DNA, 87 bp, Homo sapiens
ccaaacaatcatgggaatttccaaggggattcaaacttcaacagaatgtggcaaccagcttacaacaggttgatgaacatagtaaac

SEQ ID NO: 74322 - DNA, 98 bp, Homo sapiens
gactcgtaaattatggccgcatctccgcacactctctcctcacgcctcctgacaggaatggaagttggatacactttgtgacttgtacgagacactga

SEQ ID NO: 74323 - DNA, 100 bp, Homo sapiens
ggcggcgaacgcggagagcacgccatgaaggcctcgggcacgaacctaaaggcagacccagaagagctttttacaaaactagagaaaattgggaagggct

SEQ ID NO: 74324 - DNA, 100 bp, Homo sapiens
tttctgttctctgttctgtttcccaatgcagaaaagaaggggtactttgaactcaagtaaacaaaagggaagattttctcgttgatactggagactgcac

SEQ ID NO: 74325 - DNA, 75 bp, Homo sapiens
accagcctgtccggacccgctgtggccacgttttctgtagaaaatgtttcctgactgcaatgagggaaagcggag

SEQ ID NO: 74326 - DNA, 50 bp, Homo sapiens
tggaggctgagcatttattcaggctgaagggtatgtgattggcagctgta

SEQ ID NO: 74327 - DNA, 50 bp, Homo sapiens
gctttgggggacccacctgtgagacaggctgaccccgcactacatctacc

SEQ ID NO: 74328 - DNA, 80 bp, Homo sapiens
aggagaggagcactttgaggacatggcctccgacgaggacatctgcatatctatgtgagactgaattttcctcttagact

SEQ ID NO: 74329 - DNA, 97 bp, Homo sapiens
aaccatctgaattggctcaatgatgagtctacaaataagaaacctcgaaaatctccaggtgagaagagcagaattgaagctggaattagaggagcag

SEQ ID NO: 74330 - DNA, 75 bp, Homo sapiens
cagagaagcattgggggaaccagtgggccccacgtgggtaaaaaggcatgaacaaccgggaggtgctggagcagg

SEQ ID NO: 74331 - DNA, 74 bp, Homo sapiens
tctagggctttgctcccaagggctgtggctgatgatgaattagactttcttgtacctaaggctggattcttctg

SEQ ID NO: 74332 - DNA, 100 bp, Homo sapiens
gataacaagttttgtgcagattgccagtctaaagtggaagcatcagttcacagcagtaatgcacactgtacagataagacaattgaagctgctgaagccc

SEQ ID NO: 74333 - DNA, 98 bp, Homo sapiens
cgacaagggtgttcccgaactagagtgggtcacactcagccggtaccagagggaagcagaacaaagtaatgtggcccttcagagagaggaggacagag

SEQ ID NO: 74334 - DNA, 74 bp, Homo sapiens
gaaccttgtgtcaaccatccattccaggagccagctatctgagttggatgaaaaatctgacaaacagtatgctg

SEQ ID NO: 74335 - DNA, 75 bp, Homo sapiens
actcctcggccgagctgagtgaggatcaactcactatcctgaaggtccattctcccaagaagaggggacagaaag

SEQ ID NO: 74336 - DNA, 96 bp, Homo sapiens
ctcatctcctactgtcccacggccaccgaagagtttggaccccaatgaccagaagtctctagaggggatgcagaagatggagaaggaggagagtcc

SEQ ID NO: 74337 - DNA, 82 bp, Homo sapiens
ttgcactttgttttcaatgacaccaagttggacgctatgctggaagaatttaagaaagatacaaggcagatccaaccatccc

SEQ ID NO: 74338 - DNA, 85 bp, Homo sapiens
gcgaaggaaatctggccgccgccgccgcgagcgctcccgcctagaacattccatattctgcttcacacacggtgactcactcact

SEQ ID NO: 74339 - DNA, 100 bp, Homo sapiens
gatggagtaagaggggttggctgtgaattgccggtggtggtgtgcacattgagccccggtatagacagttcccccagctgaccagatcccaggtgttcca

SEQ ID NO: 74340 - DNA, 75 bp, Homo sapiens
gatgttcctggggttactgtaaatgggaaggacaggcagagctaaacaaggcagtaacagagaagaattttgaaa

SEQ ID NO: 74341 - DNA, 87 bp, Homo sapiens
tatttctctagctattgccttattttttctcatggatgttcttcttcgagtatttgtagaagggctgaccccgcactacatctaccc

SEQ ID NO: 74342 - DNA, 96 bp, Homo sapiens
agcagaacgcccgccctggagcagttaggaccgaaggtctccggagagtcgccggcggtgccagagtgtgaacatggctacgcctcttcattcccg

SEQ ID NO: 74343 - DNA, 82 bp, Homo sapiens
cgcgagcggaattccggcggctgccgtgactccagtgcaagaactgtggctgcaccatctgtcttcatcttcccgccatctg

SEQ ID NO: 74344 - DNA, 100 bp, Homo sapiens
gagagcgtgaccgagagcgcgaatatcgtcatcgttagaaggtttaagtggaaaccctgcagatttagaaagaagagaagcagtgtttggaaagaatttt

SEQ ID NO: 74345 - DNA, 99 bp, Homo sapiens
gcagcagagcgagtacttcgttccaacatggacatcctgaagccaatcctgagctcttcagtatccccatcagccagtttccgaggtgctgagaagcac

SEQ ID NO: 74346 - DNA, 87 bp, Homo sapiens
actcgcggaccggcgtccccggcgcgaagaggctggactcggattcgttgcctgagccaccctgaagggtcccttcccaagccctta

SEQ ID NO: 74347 - DNA, 74 bp, Homo sapiens
caccaaggaagatgtatttgtacaccagctatttagctggtacctactgctatatcacctagtgtgacatttcg

SEQ ID NO: 74348 - DNA, 97 bp, Homo sapiens
tgcccgaaggccaggactgatctgttaaccttgcaccactggctgggaggccgctgcagctcatggccagaaatgtacacacaggagagctggctgc

SEQ ID NO: 74349 - DNA, 97 bp, Homo sapiens
ttgcaaatccttaaaagagtcttaacgggctactacaaagttctgggaaagggaaagctcccaaagcagcctgtcatcgtgaaggccaaattcttca

SEQ ID NO: 74350 - DNA, 85 bp, Homo sapiens
acttacggcagtgggggctgacaggacgcaatgagcccctgaagaaagagcggcttaagtggaagagcgactaccccatgactga

SEQ ID NO: 74351 - DNA, 101 bp, Homo sapiens
attttgatgaaggctctgatgtatttcagatgattagtgatgatgaaccaggttatgaccttgatttattttgcatacctaatcattatgctgaggatttg

SEQ ID NO: 74352 - DNA, 100 bp, Homo sapiens
accaggacgaccctaatgtgctggagatctggaaccttgtgttcatccagtataacaggggttggccggagacctacgacatgaatacctcggagcccaa

SEQ ID NO: 74353 - DNA, 80 bp, Homo sapiens
gcgtgggtgcctggagatgaagctggaaagtgtgtttcctgtaacaaatcgttcaagaaactctggtcccttcatgaaca

SEQ ID NO: 74354 - DNA, 75 bp, Homo sapiens
gtactcttatgcagtccccatgatcccggaaatttaacattctgggcacaaacacaaaagtgatgaacatggaag

SEQ ID NO: 74355 - DNA, 100 bp, Homo sapiens
gttcagttcgtcatggggctgtttggaaagacccaggagaagccgcccaaagaactggagtctgagggatttggagacaggctgttccttaagcagagaa

SEQ ID NO: 74356 - DNA, 88 bp, Homo sapiens
ccaggaaccattggataaggataaaggaataggaggccttcaagattttgtgctgaaatctgcaacactgtgtagcctgccatcctgc

SEQ ID NO: 74357 - DNA, 73 bp, Homo sapiens
gttgatggaattacactgtgatacgactgactgtgtcagctgtgatgcatgtttaaaaggaaattttcgaggt

SEQ ID NO: 74358 - DNA, 75 bp, Homo sapiens
tgaaatgcatttgccttatacagctaaagccatggaaaggtcagcccaaccccagggtgtatccgtgccctcatg

SEQ ID NO: 74359 - DNA, 89 bp, Homo sapiens
tgttaactttaccattgcagaacgggcacagagggtccttggtatagtagtgggagttctccttcaggatcatgatgttcgtcagagtg

SEQ ID NO: 74360 - DNA, 100 bp, Homo sapiens
gagcgcggtgctgccggtggagcttcagtctgcgctcctcagaccaccggcaggtgaacagcctgatgcagaccgaggagtgcccacctatgctagacgc

SEQ ID NO: 74361 - DNA, 100 bp, Homo sapiens
tgtttcgatggatcggcacaggcctgctctgcactgacttcgtgaagatgcatcaactgtaaaatctgcctgggatgctcaaattgctcaactatctaag

SEQ ID NO: 74362 - DNA, 78 bp, Homo sapiens
aagaatctccctctctggtttagacaacatgagaacctggaaagagctgaaatatgctaataccgtgatgcgctttga

SEQ ID NO: 74363 - DNA, 100 bp, Homo sapiens
gtcagaatggctgtatcctgggagatgagatgggcctggggaagacctgccagaaactaattctgaagcaagcccttatagttgtgctgcagtggtgttt

SEQ ID NO: 74364 - DNA, 100 bp, Homo sapiens
tattatagacaacaagcagcctattatgcccagacaagtccccagggaatgccacagcatcctccagcacctcagacgtgccaccttgcttagcgcccgt

SEQ ID NO: 74365 - DNA, 103 bp, Homo sapiens
aatgaactaaacatagttttggaactagcagatgctggcgacctatccagaatgatcaagggtgagcccatcactttctgtgaggagagttttgtaaagcacc

SEQ ID NO: 74366 - DNA, 100 bp, Homo sapiens
atgaggactttgtggaggtccctgagaaggaggggtatgagccacacatccccgaccacttgcggcctgagtatgttcatggcctcccacgggaacgacg

SEQ ID NO: 74367 - DNA, 75 bp, Homo sapiens
cgctaagttgctgatcgtggcgttacagaatgtctgaaggggacagtgtgggagaatccgtccatgggaaacctt

SEQ ID NO: 74368 - DNA, 50 bp, Homo sapiens
gcgggacctggcgccaccttgcagcatctactgccgaggatgttccaagc

SEQ ID NO: 74369 - DNA, 100 bp, Homo sapiens
gatatggcagtggacgtggatttggggatggctataatgggtatggaggaggacctggagatgttggagtccggggtgacctggtctcagtgaagaaatc

SEQ ID NO: 74370 - DNA, 98 bp, Homo sapiens
ggagggaccctggcccggaggaagaaagccaaggagggaagccgagatcccccgcgaggtgatcgagaggctggcccgcagtcagatccacagcatcc

SEQ ID NO: 74371 - DNA, 90 bp, Homo sapiens
caggcggcgacagcagagcgcccactgcctccagcagtctgcagcccctctttcctggagtaaatgaactggaccaaatctcaaaaatcc

SEQ ID NO: 74372 - DNA, 94 bp, Homo sapiens
ttgccttgagtcagtgcgccgctctccagcccgcttgaacgcaattctgtggtgttcttggtcacacatttatggagtttctgaagggcagtgg

SEQ ID NO: 74373 - DNA, 74 bp, Homo sapiens
cagggggactgcaaaggccaatgttggtgctggcaaaaagcaactgaccaaccacatccgggagtcgctgccgg

SEQ ID NO: 74374 - DNA, 83 bp, Homo sapiens
cacctgaggcagtccctgctgtgcacctgggggtacaggaaatccacactgatttgtacgtctgactgagagaaagatggtcg

SEQ ID NO: 74375 - DNA, 99 bp, Homo sapiens
agattcgcagtggtcgcttcttctccttgagtaaatattatcagtgtcactaacaagggactactgcactccttcgacctcctgaaggcagtttgcctt

SEQ ID NO: 74376 - DNA, 104 bp, Homo sapiens
aaggcagacagcgagtggcgacgattctatgactttgaaagaagccatcaagtcttcactcatcatcctcaaacaagtaatggaggagaagctgaatgcaacaa

SEQ ID NO: 74377 - DNA, 97 bp, Homo sapiens
tcactcgctgggctgctcttcctgaggttttcctaagccatcccctggcggaaccgcccccagaaactatccaactctggccaatattgaaaggaag

SEQ ID NO: 74378 - DNA, 100 bp, Homo sapiens
gtacctcggggttctctcctgcccccaagctgggatgaagcctgctgggagcgtgaatgacatggccctggatgccttcgacttggaccggatgaagcag

SEQ ID NO: 74379 - DNA, 98 bp, Homo sapiens
cgagaaattgaggccgttgtacaaccatccagcagcatgttggcagataaattgaacatgactccagaagaagctgaaaggtggattgtaaatttgat

SEQ ID NO: 74380 - DNA, 100 bp, Homo sapiens
aggaaagtctttgtttgtactgccgcacactgaccaccttgtgggttatattataagatcacaaaggagaacttcctcgaggctggaactgggttgatgt

SEQ ID NO: 74381 - DNA, 98 bp, Homo sapiens
tttagttttagttgaagttctaaagcagggagtaactattcccagtcagaggcgctatgtgtattattatagctacctgttaaagaatcatctggatt

SEQ ID NO: 74382 - DNA, 75 bp, Homo sapiens
ccttggagaaggacagcagagaataagctggacaccaaatacccgtacgccacaatggtgcgcatgaatgtcctg

SEQ ID NO: 74383 - DNA, 98 bp, Homo sapiens
ggaacccggcggatcggatcccgcagatcggagacggggcctggagggaatctttaaccagtttcagtgtagtagtgaaaaagtgcttccatctgaca

SEQ ID NO: 74384 - DNA, 89 bp, Homo sapiens
cattcgagtctccattgcacaatggccagccctggctttggaggagaagatacggaccacggagacacaggtgcttgtggcatctgcac

SEQ ID NO: 74385 - DNA, 51 bp, Homo sapiens
tgctgatcctgacaccacctggacatggatttgattgacatactttggagg

SEQ ID NO: 74386 - DNA, 74 bp, Homo sapiens
aggaagtaggggtgcacctcagcactatcccaagactgctggcaacagatatgagaacggccgaggcagctccc

SEQ ID NO: 74387 - DNA, 83 bp, Homo sapiens
tcaatatctgtcttcggtggactccttcggcagtccacccaccgccgccgcctcccaggtacccagactcatggtatcgtgat

SEQ ID NO: 74388 - DNA, 97 bp, Homo sapiens
ggcactcaagtcctggctcagcaagactctcgagcccataattgctttagatttccaaagagggaatgatgttgccttccactttaacccacgcttc

SEQ ID NO: 74389 - DNA, 75 bp, Homo sapiens
tatgaaccaagggttataaatcaaatgttggaatttgctttccgatttaagcgagagcctcactggttcccagga

SEQ ID NO: 74390 - DNA, 100 bp, Homo sapiens
cttatgtttggtctactattgcatttagaagctgcttcgagagctgtgcccaggagtgaacaaccagccctacctctgtgagagtggtcactgctgcggg

SEQ ID NO: 74391 - DNA, 50 bp, Homo sapiens
ctccctgctgcgggacagcagctggacccattccaacaatctcgtaaaac

SEQ ID NO: 74392 - DNA, 131 bp, Homo sapiens
gtgggagagaggctaggcctctgaggaggcgaatccggcgggtatcagagccatcagaaccgccaccatgggttctcatgtatcagccatcttctgtaagggtgcccagtgtgacttcggttgatcctgct

SEQ ID NO: 74393 - DNA, 100 bp, Homo sapiens
ggctccacgacttactctctacccttggcaggttttgcacactagggaccaagaagccctcggggacactgctgagaaaagactgccgaagggaagacca

SEQ ID NO: 74394 - DNA, 98 bp, Homo sapiens
cgcctgcgcctggagaggatggaccgcatcgagaaggagcgcaagcaccagaaggtggctgttgacatggaatttgctaagaatatgtatgaactgca

SEQ ID NO: 74395 - DNA, 90 bp, Homo sapiens
ggtaaagtggaattgcatgggaaaatcatggaagttgattactcagtctctaaaaagctaagaaaaccgtgaggacatactgaatgccgg

SEQ ID NO: 74396 - DNA, 100 bp, Homo sapiens
tccatcctgcagcaaagactttggtagacattgccaaatcccaagatgctgaggtgggccttaatgtcctggttcagaaagccaacaagttcaccccagc

SEQ ID NO: 74397 - DNA, 75 bp, Homo sapiens
ctgcgggagacggacagaggaatgtcagctgagtacagtgactctgatatgttggcttgtcataactattggcac

SEQ ID NO: 74398 - DNA, 80 bp, Homo sapiens
ggaagaaaacgagccagtgatttacaatagagcaaggttataccttattggtgtggacgttgtctaaatttcggtagcca

SEQ ID NO: 74399 - DNA, 100 bp, Homo sapiens
tgaataagtgttttaagaaagtggacaaagagaggagtcagggaggcgccacatccaccacctggggaaccagctgcagctgaaccagcactgcctggac

SEQ ID NO: 74400 - DNA, 75 bp, Homo sapiens
ccagcatcatgattacctcccaggtctaaagacattgccctcacagagtgaaatgatggcagaaatatctaaagc

SEQ ID NO: 74401 - DNA, 101 bp, Homo sapiens
gtcctatgaataccgcttcctggagttcacgactctgagtgctggagctagagttaatgccaaagacagcaaatggttgacacctttacacagagcagttg

SEQ ID NO: 74402 - DNA, 96 bp, Homo sapiens
tggctcccttcacctcatttgtctacaccatcaaggaggaaggcctggttcttcaagggccgttgctccagggagaactgcaaatatcttcatcca

SEQ ID NO: 74403 - DNA, 98 bp, Homo sapiens
tacaggcagtcaaccctaaacagtggactcaacttcaaagacgttctcaaggagaaggcagacctgggcgcggatcaagaagatcatgcagacggacg

SEQ ID NO: 74404 - DNA, 80 bp, Homo sapiens
acaaggttctggacaagatgaagtctttctgccagatcttcagtttagatcttggaggcatatcaactgtggttctaaat

SEQ ID NO: 74405 - DNA, 100 bp, Homo sapiens
gaacgccatcaaagaagggaaaaccagctgaggtgtccgtaaagattccagagaagcctgtgaacaaaacttcacagagaatgcagttgtcttgacttca

SEQ ID NO: 74406 - DNA, 100 bp, Homo sapiens
cctttttgcacacacacgaatacaaagagccatacgaccttcggaatagcctaacatggcagaccagagacagcgctcactgtctacctctggggagtca

SEQ ID NO: 74407 - DNA, 97 bp, Homo sapiens
tcagggaacttgctgagcaactattcaaaaatgatccaaactactggatacaggtgcatcgcttggaacatggagatggaggaatactagaccttga

SEQ ID NO: 74408 - DNA, 75 bp, Homo sapiens
gggccttttgggcagcttttccggcctgacaacttcatctttgatgccatggacaatattaccaggcagaaccaa

SEQ ID NO: 74409 - DNA, 73 bp, Homo sapiens
gggcctcccggtccgcaagcaggtggtgctggctagagtgtatacgtttggacccaagcttaacttttccaat

SEQ ID NO: 74410 - DNA, 100 bp, Homo sapiens
ctgagtgcggcatgatctccatcaccgaatggcagattactccacaggatccgctgaacataggatgttgccacaaaatctacctcgtgtatttttctct

SEQ ID NO: 74411 - DNA, 100 bp, Homo sapiens
gctggagagggagccagaacagggaagaacggattcacacaggatggcttgcagaagacgctatttagaacagcccatcttcaccacccgagcgcatgtc

SEQ ID NO: 74412 - DNA, 75 bp, Homo sapiens
gatcattccacttaccatgatttcgatgatgatgatcctgagccaggctatgatgaccttaatcctgattggagg

SEQ ID NO: 74413 - DNA, 74 bp, Homo sapiens
tcggcctatcgctaccctccgaagtccggccaacgaggtgacggacagcgcgtacatgggctccgagagcacct

SEQ ID NO: 74414 - DNA, 101 bp, Homo sapiens
atccagaagtccagagctgaggactgcctgtttgcaggatgtatttgagttccgttatgccaagatgccagatgaaccactagaaccagggcctttaccag

SEQ ID NO: 74415 - DNA, 100 bp, Homo sapiens
tggattttacagaggtctgatgcctactattttaggaatggctccatatgcagggtgattatcggcagctggtgcacgagctggatgaggcagagtaccg

SEQ ID NO: 74416 - DNA, 75 bp, Homo sapiens
tgctttggacctgtgtacccacccaaggctaaaggcagagccaggtaatagcctgcagctggtgttttgagaagc

SEQ ID NO: 74417 - DNA, 83 bp, Homo sapiens
ccaacatcctgctcctgctcatggacgacgtgaccctggcaaagatgagagtgcacatttcgtcctgcctgaaggtccaggag

SEQ ID NO: 74418 - DNA, 82 bp, Homo sapiens
ggacgagaggatgcggagcccgcagaacctccacagtcaagaggacggtgaatgactggcaggaggactgggtcgtgttcta

SEQ ID NO: 74419 - DNA, 101 bp, Homo sapiens
gtgagcctcagcctgcagttctatgactgcaaacagaaaggtggagcagctacaacaagaatacacggaaatgaaggctctcttggacgcctcagagacca

SEQ ID NO: 74420 - DNA, 52 bp, Homo sapiens
tcaggagtgaagctgcagaccttcgcgggaaaaccaagacccagacctggag

SEQ ID NO: 74421 - DNA, 118 bp, Homo sapiens
cctgtccccgctggcgggcttccctgtcgccgttcgctgcgctgccggacctgcctagagctggaacgttacctccagagcgagccctgctatgtttcagcctcagaaatcaaatttg

SEQ ID NO: 74422 - DNA, 101 bp, Homo sapiens
ctccatccccgaccgccctcttctgtcttgatggattaattgcctctgaaggagccataagtcccgatttcttcaatgattaccaccttcaaaatggagat

SEQ ID NO: 74423 - DNA, 102 bp, Homo sapiens
gagcaggtggctgaggccagggcagagctgaggagggcgagggctgagcacaaagcccaaggggatggcaagtccaggagctgcaagctttcttcctggtgg

SEQ ID NO: 74424 - DNA, 100 bp, Homo sapiens
gcacattcccagagtgttgccaaggccaaatatgaatttttatttggcagatctgaagggaaagctccagatactagcagacctgttatcctaaactagg

SEQ ID NO: 74425 - DNA, 75 bp, Homo sapiens
ctatggcgctgtcaataaagaacggcagtttgaatcggtgctgaacagacgacctcgtggagaagacgccgtgtg

SEQ ID NO: 74426 - DNA, 100 bp, Homo sapiens
ggcgacaagaggagctggccctctcccaagaaccgaagacttcacagagaatgcagttgtcttgacttcaggtctgtctgttctgttggcaagtaaatgc

SEQ ID NO: 74427 - DNA, 83 bp, Homo sapiens
gctcaacaagaatcactcggagggcggcggagtgatcgtcaataacaccgagagaatagcctaacatggcagaccagagacag

SEQ ID NO: 74428 - DNA, 100 bp, Homo sapiens
aaactcgtgtccatcaaaatccagatgctggatgacacccaggaggcatttgaagttccactgctaggggagctgatcctggaccgtcacaactttgcca

SEQ ID NO: 74429 - DNA, 90 bp, Homo sapiens
cctggcagcagcccccggggcaagagcaggagcccggcaccccccgccgacaaggagggagtggaaatgaagaagatcactgacacccac

SEQ ID NO: 74430 - DNA, 100 bp, Homo sapiens
atgacatcagtttctggaagaagaagaagagcatgatcggcatgtccaccaaggcaggtgatgtgtccaatctagatcccaacttctcatttgaaggcac

SEQ ID NO: 74431 - DNA, 88 bp, Homo sapiens
tctggcttttgaaaggctccttcttcagattttaggtgatgggcaagtcagaaagtcagatggatataactgatatcaacactccaaa

SEQ ID NO: 74432 - DNA, 90 bp, Homo sapiens
tatcaccttggcctgcgctgccatgactgtcatcttcttcatcgttagtcagcagcatggtgcattgtccaggtacctgttccgatgctg

SEQ ID NO: 74433 - DNA, 76 bp, Homo sapiens
gcaccctccttccacctggccaggaatcagtgctcaagtaaagctctttgtgacagggcttttcagcttaaatcaa

SEQ ID NO: 74434 - DNA, 75 bp, Homo sapiens
taaaaatcaccagttactttaatgaaatgtttctccatcccagagagatgaagtaattcaatggctggccaaact

SEQ ID NO: 74435 - DNA, 90 bp, Homo sapiens
cgtgactcagccttgtcctcagggaagctggggctggtgcaactttcagaagtggtcccagttcctccgtgtcacaaagcagtacctgcc

SEQ ID NO: 74436 - DNA, 100 bp, Homo sapiens
gtctttacctgttcacttaagaatgagctgcttcagaaagagcaaaactattcagatgacgtcttggccaacatgattagtgaaccaaggatcagttacg

SEQ ID NO: 74437 - DNA, 80 bp, Homo sapiens
aggaatttatggtcgcctttttgaatgagttaattggccttggtcctcacagctccaaaaagaaacaggatctcgataag

SEQ ID NO: 74438 - DNA, 100 bp, Homo sapiens
aggagcatgtgattgaggccctgcgcagggccaagttcaagtttcctggccgccagaaggtgttctgttcctgctcctacgatgccaccacacactttga

SEQ ID NO: 74439 - DNA, 75 bp, Homo sapiens
gaactccagctggaccagtggctgctgaccaaaggcagaagctctgcagatggagttccgtgttctcagaaccca

SEQ ID NO: 74440 - DNA, 74 bp, Homo sapiens
actggggccagggaaccctggtcaccgtctcctcagaacttccaggtcctgagtcagagacacctggtgagaga

SEQ ID NO: 74441 - DNA, 98 bp, Homo sapiens
gcagggcaaggaaactggccacaagtatcgatatcctgaagcttgtagcagcccaagtgggaagccagtggaaagatatctatcagtttctttgcaat

SEQ ID NO: 74442 - DNA, 100 bp, Homo sapiens
ttctgtcacgtttgtggaaggcaacatcaggctacaaaggccaacagagcacttatggcaaggcatctcgagggggtggcaatcaccaaaacaattacca

SEQ ID NO: 74443 - DNA, 99 bp, Homo sapiens
ccgacccctgccggccggtgtccccaccgccatccctgacccatggcgctgaagaggattcagaaagcagcagaagatgtcgttttcattggacctgac

SEQ ID NO: 74444 - DNA, 50 bp, Homo sapiens
aaagaaaagactaccgcactgaaaggagctcattttgcagctctcaagct

SEQ ID NO: 74445 - DNA, 76 bp, Homo sapiens
cctgaagaagggctccctcgtgaagaacctgaaggacacactaggtgtgaagatgccttaagaaaaaataagagct

SEQ ID NO: 74446 - DNA, 74 bp, Homo sapiens
ggcgcggggaccgctgtgctctcgccattcgttcctggttaactcggaaacacatccagaggctgcatgcagct

SEQ ID NO: 74447 - DNA, 100 bp, Homo sapiens
gcctggagtctgcgaaggccgggacccggttccccggcccacagtgggggtgtgcaaacccgagagaactggatcaatattgaactgtacagattgtttg

SEQ ID NO: 74448 - DNA, 101 bp, Homo sapiens
gcctgcggtgcctgagctgagtgaggccgaggccgggaggccgtgcccggagtagccatcctaatggatatgggttggttcctgttttctatttggaactt

SEQ ID NO: 74449 - DNA, 100 bp, Homo sapiens
tgttcctctctagtcacaagagccttggggaagacagttggaagctcagacatgaataagctttccgatttgttggcacccatctcagagcagatcaaag

SEQ ID NO: 74450 - DNA, 75 bp, Homo sapiens
gtggcggccactcagttttctctgccagtgtctgggccgttgctccagggagaactgcaaatatcttcatccacc

SEQ ID NO: 74451 - DNA, 89 bp, Homo sapiens
tacgtatatgaatatctgctccatgtaggagctcagaaatcagctcaaacatttttatcagaggaattgaatgatctggcacgggaccc

SEQ ID NO: 74452 - DNA, 82 bp, Homo sapiens
gctgtgctcgcgctactctctctttctggcctggaggctatccagcagaggaggttcagatgagcccctgctgacttgagag

SEQ ID NO: 74453 - DNA, 101 bp, Homo sapiens
cgacgtgtacctggacatcaccgcaatggctgccatccggaagaaactggtgattgttggtgatggagcctgtggaaagacatgcttgctcatagtcttca

SEQ ID NO: 74454 - DNA, 73 bp, Homo sapiens
atgtcattgaccagaaggtgtatgagatccaggacatctatgagaacagatttggagcaagaggtggtggtgg

SEQ ID NO: 74455 - DNA, 100 bp, Homo sapiens
tgaagctcaagttgctactcgggacgctgcacctcccgcgccgcacggtggacgaggccatcgaggagggcacgctggaggagatcgaagaggaggtccg

SEQ ID NO: 74456 - DNA, 102 bp, Homo sapiens
agcgtttgctgccaccttctgcatcgtagggctgccagaggaacccgaccagaacctgtccagccctgaggaggtgttccactctggccactcccgcaactc

SEQ ID NO: 74457 - DNA, 100 bp, Homo sapiens
gtggaattccctggatgaaggccgtcaccttaccttaaaccttttaagcaaggaaattgaactaagaaatggagaggttctgagatgcagtaaaatcgct

SEQ ID NO: 74458 - DNA, 101 bp, Homo sapiens
aaacaattatgttcagcatgttagaactcatacaggaatttgctgattcccttggaattccgtttttggaaaccagtgctaagaatgcaacgaatgtagaa

SEQ ID NO: 74459 - DNA, 100 bp, Homo sapiens
gttgaagattgtgaagcaatagcctaagttctttaaggaaaaacagtagtgctctgcatagtttactgaaacgagtggtcagcacatttagtaaggacac

SEQ ID NO: 74460 - DNA, 75 bp, Homo sapiens
cgggacaacatgctgcggggcacagccgggaagatttccagaggattccagaacttgccatcaacccactggggg

SEQ ID NO: 74461 - DNA, 97 bp, Homo sapiens
ctggttctggtgctggtattggaacagtctttggcagccttatcattggttatgccaggctgctggaaagtacagacaacaaggcagaaattatatt

SEQ ID NO: 74462 - DNA, 51 bp, Homo sapiens
gggggtgtgcaaacccgagagaactgggtttgttggcatccaaagctgttg

SEQ ID NO: 74463 - DNA, 82 bp, Homo sapiens
tcaccccgcggccgcaccttcccgccttctcaggccccagggagcgccatggcccgcgcacgccaggagggcagctccccgg

SEQ ID NO: 74464 - DNA, 75 bp, Homo sapiens
actacaaaactcccatcgcgtcgtggaggagtactttgtggcccccccagagccactggtggccgcagaagacag

SEQ ID NO: 74465 - DNA, 78 bp, Homo sapiens
cttggggaaacatcagcatatgcatgaccgagatgacctctatgctgagcagcgtccagaggaccagaggttaattta

SEQ ID NO: 74466 - DNA, 100 bp, Homo sapiens
ccctgcccaacagaatttatatagagatgtgatgttggagaactacagaaacctcgtctccctgggtatcgagaaccttccctgcgaacttcagaggaac

SEQ ID NO: 74467 - DNA, 100 bp, Homo sapiens
attagcagcagcagcttctctcaatgctgagtacagccccgggctcagctcctggttcccagtatggcacaatgaccaggcagatatctcgacacaactc

SEQ ID NO: 74468 - DNA, 82 bp, Homo sapiens
gacagacagtccgggagtgcagtcatcacgtttgtggagattggagctctggatgagggggatattgccttgttgaaaactt

SEQ ID NO: 74469 - DNA, 98 bp, Homo sapiens
gccgcccgggtgtccccgcggcgcaggaggcggtggagcgcagagcgggcgagcgcgaagtctggacagctgatcacctgaaagagaggagccaagaa

SEQ ID NO: 74470 - DNA, 83 bp, Homo sapiens
gaccctggagcctcagttggaagcagccgatccagcctgcggagcctgtggggcaggttctggaggacacgtgccggcggcag

SEQ ID NO: 74471 - DNA, 75 bp, Homo sapiens
caccactattctagcatccgtgaaggagcagattgtgcttcaagaagaccatagggaagaacgcattttcatctt

SEQ ID NO: 74472 - DNA, 98 bp, Homo sapiens
tccgacttatttctgtgggcagacattaacattcagattccaactccacagagtgaccagagagaggacgtggctgaagacaccaaagatgggggagg

SEQ ID NO: 74473 - DNA, 93 bp, Homo sapiens
aggaagcacaccctgtcctatgtggacgttggcactgggaaggattttttatcaagcagaaatgcatcgaacaacgagaatcaagatcactga

SEQ ID NO: 74474 - DNA, 100 bp, Homo sapiens
gagaagcgcaggagccgtgagagcctcaacgtggacgtggtcaagtacgagagtggccctgacggaggggaggaagtacatcaggaacgtctctatcaag

SEQ ID NO: 74475 - DNA, 100 bp, Homo sapiens
cgggcagatcacttgagatcaggagttcgagaccagcctgctgatggtgagaccattctaaaaggcctccagtccattttccaggagcaggggatggcgg

SEQ ID NO: 74476 - DNA, 49 bp, Homo sapiens
ccagcctgcggagcctgtggggcaggaatcaaagatcaactcccactga

SEQ ID NO: 74477 - DNA, 76 bp, Homo sapiens
gattggacccacagggcagatggtgtggccagactccactgatgatagctgccgaacaaggcaatctggaaatagt

SEQ ID NO: 74478 - DNA, 100 bp, Homo sapiens
tggagcacctgaagagatgccagcagttacagaatgtctgaaggggacagtgtgggagaatccgtccatgggaaaccttcggtggtgtacagatttttca

SEQ ID NO: 74479 - DNA, 101 bp, Homo sapiens
tccatcgtgtgcctgatgatcacgcagctggctggcttcagtggaccacagaaaaagtcctacctggagcgaagcgttaaggaagctgaggacaacatccg

SEQ ID NO: 74480 - DNA, 83 bp, Homo sapiens
ctcagagagggaagagattcagccagcacactcctcgcgagcaagctgaataccactagaaacatacctgtaaccagagacag

SEQ ID NO: 74481 - DNA, 107 bp, Homo sapiens
gtacctctccttttccctctccctttccctaagggcatatctcttgttggatggctggacccaccatggtagatggaggcttcagaattatctagaagtggtagaag

SEQ ID NO: 74482 - DNA, 109 bp, Homo sapiens
cagagactgaggacttaaatgaagccactgattagcaatttaaagatcctctccaaggattactacagcatcccatttcccacacccactactccgctgactgggaggg

SEQ ID NO: 74483 - DNA, 76 bp, Homo sapiens
gttagtcacccacctacatgttgagctgtgatgcagatccatccgccctagcaaaatatgttctggctttggtaaa

SEQ ID NO: 74484 - DNA, 90 bp, Homo sapiens
acctgccccggcttcaggatttacacagacgtggggcgatgcttgtgaccctgcagctcctcaaatgttttacctcaatcatatatccac

SEQ ID NO: 74485 - DNA, 82 bp, Homo sapiens
tcaactttctgggcgttcatgatcctggccagcctgctcatcgcctactgcaggtttccaggcctgaggtgcccgccctggc

SEQ ID NO: 74486 - DNA, 115 bp, Homo sapiens
aggcatcctcctatttttcatgagtggtttctgagaacattccctgatcctacatcatggtagaaaatctttatcctcaaattggctgggtagaaattgatcctgatgttctttg

SEQ ID NO: 74487 - DNA, 119 bp, Homo sapiens
tttcgcttttttacctgccaatcaaactgctacaagacaacaccctgatctggcatggacatgcagatcgggagcggtgccgagaaaaatttccttactagatgacatttcatcgcaat

SEQ ID NO: 74488 - DNA, 90 bp, Homo sapiens
cagattcgcagtggtcgcttcttctccttgtttcctagaggaagttctggcttctggactgcacagccgaagcaaggagagctctcaagt

SEQ ID NO: 74489 - DNA, 101 bp, Homo sapiens
cagatggatgataaaatcctcaagacaaccacacggggctgaaaatgatgagaatggacaagcagaaaacttttccatggacccacaattggagaggcaag

SEQ ID NO: 74490 - DNA, 95 bp, Homo sapiens
cgggaggggccgcgccgccaccgtctgaactaggatgtcccgacatgaaggatcttatggttggtgatgaggcaagtgaattacgatcaatgtta

SEQ ID NO: 74491 - DNA, 80 bp, Homo sapiens
tccggacacataacaagcagcagtgaggacaccaaagttgctgctgacacgccgaccgcctgctgcttcagctacacctc

SEQ ID NO: 74492 - DNA, 99 bp, Homo sapiens
aatattgtgaccacacagttctccatgagttggacagataccaaagaggatggcgttcaggaagtggcttatattcactcaaaccagaatgtaattgga

SEQ ID NO: 74493 - DNA, 89 bp, Homo sapiens
ggcccacatacagcaacttagcgaagctgccggtgaagatggtccggtttatcactaaaatatggcatcctaatattagttccgtcaca

SEQ ID NO: 74494 - DNA, 100 bp, Homo sapiens
gctaaagaagaaacaaaaaaagctatcaaatatcagagcaaggcaagaaggaatccgtctcttgctcaagtgaaaattgaagaagcaaagcgagaactag

SEQ ID NO: 74495 - DNA, 87 bp, Homo sapiens
gaaggccaataggacagcacttctggcccagcacactttcatttggacccgtggatacccattgaacagatgcttgaaacctgcaag

SEQ ID NO: 74496 - DNA, 114 bp, Homo sapiens
agaggatctggtgtaccaggcgaagctggccgagcaggctgagcgatacgacgccgcggcgagtcctttgcacatgttggcaacacacgcatccgcatcggcctccctgcccac

SEQ ID NO: 74497 - DNA, 101 bp, Homo sapiens
ctgaaaccactttgcagtcgacatactcggataccagcgctcagcccacctgtgattatgaggagcccaaggtgggcatcaagaccatcaaggtgtactgc

SEQ ID NO: 74498 - DNA, 75 bp, Homo sapiens
ctggaacttgccctgtctcctcgcagatgaggtacttggaaaaatggacaaggattgtgaaatgaaacgcaccac

SEQ ID NO: 74499 - DNA, 75 bp, Homo sapiens
agaaccactgccaggagccctattatcaggccgcggcagcaggacacagcattgttggttttgccatgtactatt

SEQ ID NO: 74500 - DNA, 100 bp, Homo sapiens
acaccagatagtggaaagaaaccatgtgctgaaatgtttgacgacactgatggtttgagtatgtatgtaactgctctgtggttggaagcctgaatgtgaa

SEQ ID NO: 74501 - DNA, 98 bp, Homo sapiens
ggcgcgcggccgagcggaggcggagtcggcgccgagaacatgttcgtgccctcgtgaggctggcatgcaggatggcaggacagcccggccacatgccc

SEQ ID NO: 74502 - DNA, 100 bp, Homo sapiens
cagcttcatcctcggcggcggtggccgctagctccaaggaagcggttaagaagattgtctaccaaatatagaacagaaaagatatatcccacagccactg

SEQ ID NO: 74503 - DNA, 97 bp, Homo sapiens
ctgctgccgccgctgcccgaatcggaaccgtcgggccgcagccgccggcaatgccgcgaaggaagagaatgtgatcaatgggcaggactacgaagtg

SEQ ID NO: 74504 - DNA, 117 bp, Homo sapiens
ccagaggaccttcgtgctggaagtgatgggccggcactgcggcaacaaatctgacacgctgcccctggccactcggtacaacgtcaagtgcgtggggctgtccccggatggccgcct

SEQ ID NO: 74505 - DNA, 124 bp, Homo sapiens
cagggaagcaccatcggcgtcgacttcaccatgaagacgctggagatccagggcaagcgggtcaagtatgccaccacgggctgttccctgaccctgcaccatacggagaaaccagaacatgaag

SEQ ID NO: 74506 - DNA, 51 bp, Homo sapiens
cgtccagcccagcgattctcagtcagcactgctcagcacgcaggcatgtga

SEQ ID NO: 74507 - DNA, 100 bp, Homo sapiens
gtttgtccactgagctgatctcctctctggagcaccggggccaccaggagggaggttatgatgtgattgctcaagcccaatctgggactgggaaaacggc

SEQ ID NO: 74508 - DNA, 75 bp, Homo sapiens
caagactctcttcgctctttgcatcttaactgcaggaacttagtgatttggcccgtgaccctccagcacaatgtt

SEQ ID NO: 74509 - DNA, 98 bp, Homo sapiens
cacggatcatggccgcagccgctctggggcagttactccacaggatccgctgaacataggatgttgccacaaaatctacctcgtgtatttttctcttt

SEQ ID NO: 74510 - DNA, 100 bp, Homo sapiens
cccgaggccggccgcctggtcatggcgcagccgggcccggcttcccagcctgacggtcgcccggctcatggagatgggattttccagaggtgatgctttg

SEQ ID NO: 74511 - DNA, 74 bp, Homo sapiens
gaagattctcatgcacagattgaaaccctctgagatatcaaccccctagttttaaccgtgattggagataccac

SEQ ID NO: 74512 - DNA, 74 bp, Homo sapiens
gaaattcgccccgattaaagactgtgttgcattatcaggaatcctgcaatatggcgaacataagagaatattat

SEQ ID NO: 74513 - DNA, 85 bp, Homo sapiens
aaggaccagatacaggatgtagaagggagatacatgcaggggcttaaagaactaaaggattctgctatgtagaattcgatgaagt

SEQ ID NO: 74514 - DNA, 100 bp, Homo sapiens
gtgaaactgaaggacaacgagaagaaccggaagctctttgaccttctggatgtccttgagttcaaccagtatcggttttatggagaacctgtaataaaag

SEQ ID NO: 74515 - DNA, 75 bp, Homo sapiens
caaggagaagctacctcatatggtggaatggaaacgatttgaacagcagcaaaaactcttagaagaagaaagaaa

SEQ ID NO: 74516 - DNA, 98 bp, Homo sapiens
ggataaacagtgtgaccgatgtcatatgctaggccactatacagatttcagggcgacagctcagtgaagtcttcattcagttaccttcaaggaaagaa

SEQ ID NO: 74517 - DNA, 82 bp, Homo sapiens
ccaaaaaacattttggcgaatttttcaaccttaaccaaactgttcagcatagcgaggaggtgctgaagagcgcaggtttgga

SEQ ID NO: 74518 - DNA, 88 bp, Homo sapiens
tgttttggaactgtcaggtacctcaaagcgtagtagccatggttatgtgggttccagtagtagaatatcaagaagaacacatttatgc

SEQ ID NO: 74519 - DNA, 75 bp, Homo sapiens
agagggatttccaatatggatacaaccaaattctttcatgattcaaccctatgaaaagataaaggccaggggctt

SEQ ID NO: 74520 - DNA, 97 bp, Homo sapiens
gaaaatggatgtagaaaatgagcagatactgaatgtaaaccctgcagatttaccatcatgtgactggaagatatgcagcttatcatgatcttccaat

SEQ ID NO: 74521 - DNA, 83 bp, Homo sapiens
atcaaccgcccgaaccagagccggaggcgggaggacgggctgccgcagcaaattgtggctactaatttgccccctgaagatca

SEQ ID NO: 74522 - DNA, 97 bp, Homo sapiens
cgcaatgaggagggcccttcacagaaccggggtacatgtaaagtgcattttcctgatccaaacaagcttcattgttttcagctaacagtaaccccag

SEQ ID NO: 74523 - DNA, 75 bp, Homo sapiens
actgcgaattactgtttatgagtttgggatatgagattgaaaatgacgactcggaattttcctgagagagaagta

SEQ ID NO: 74524 - DNA, 99 bp, Homo sapiens
agagaggagagtacttctgggagaagagggtcacaggctgcccaccctttgatgaacacaagtgtctggctgagggacagagagatgtgtgaccagcag

SEQ ID NO: 74525 - DNA, 96 bp, Homo sapiens
gctgggagcgacgcggggcgggccctgggggtcctcagcgtggtctgcctgctgcactgctttggtaagaatgattgatgttggctgatattggag

SEQ ID NO: 74526 - DNA, 100 bp, Homo sapiens
ggacatcctggaagctgggaaatgatgcacagttggataagatggggttcacaattatcagaaaatgcatcagtgccgttgaaacacgaggtaatatgat

SEQ ID NO: 74527 - DNA, 75 bp, Homo sapiens
acattgactattccattgtctagactttgtgttccaagatcagagaatcattattggaggtactaagaagtgaag

SEQ ID NO: 74528 - DNA, 75 bp, Homo sapiens
actggggagcagaatgtgttccctgtctacttgaaacacagtgtgtggattctcatgccatataacttgtgtaaa

SEQ ID NO: 74529 - DNA, 82 bp, Homo sapiens
gacaagatacctctcgcatgtccacctcacaggatgcagcagtctcggccctggctgctctatgcagtgaatattacatgaa

SEQ ID NO: 74530 - DNA, 110 bp, Homo sapiens
ggtgtttctcagaattgataagaccatggcacaaaactgtgacgattggctttggagtaaccctgtgtgcggttcctattgcacaggctggagtgcaatggcgagatctc

SEQ ID NO: 74531 - DNA, 50 bp, Homo sapiens
ctttgccgccaccatgcccaaaacgggttttgactctgggaggagggctg

SEQ ID NO: 74532 - DNA, 75 bp, Homo sapiens
gtactggctattggaaggaggagattctgaagataaggagttctgtggaagcaaatcattgaacgcaatggagga

SEQ ID NO: 74533 - DNA, 75 bp, Homo sapiens
tgaatttccatgtcaacatagtcctgcttattccactaagctcaacaaatttcctgtatttaatattaatgatga

SEQ ID NO: 74534 - DNA, 100 bp, Homo sapiens
gtctatacagtttgcattgaggcagaatttacatgaaatagggtctccgtctctccaccgggggcttcatccttccagggaggagaagagggactccaga

SEQ ID NO: 74535 - DNA, 51 bp, Homo sapiens
gtcatcgggtgtctctggaggtaaaccagcacttattttagaggagattgc

SEQ ID NO: 74536 - DNA, 113 bp, Homo sapiens
ctggtctgcgatcctgaatgggggcggcgtgcccgccggggggctagtggccacgctgcagagcctcggtctctgacccctcccaaggatcatgccgcagccccactgaccca

SEQ ID NO: 74537 - DNA, 75 bp, Homo sapiens
tggtgcgctctcgtgaggtctcggtggatgaaagtgttgtgaagagcgaagacttttcgctcccagcttatatgg

SEQ ID NO: 74538 - DNA, 82 bp, Homo sapiens
cgccgagtcctagcgcctggcctgcgcgccgctgcccgcgccacaggttttgggatttgagattgacgcggtgaactctgtc

SEQ ID NO: 74539 - DNA, 82 bp, Homo sapiens
gcgacccggtgtgtggcgcgcccagagccccgcgtttcagccctagggaagatgatatcatcaagttgaatcgaaaggaagg

SEQ ID NO: 74540 - DNA, 82 bp, Homo sapiens
cacaaactctgcaagatgccacaaggtcctcctttgacatccccaacaaagagattccatgcaagcatgttttttgctatga

SEQ ID NO: 74541 - DNA, 100 bp, Homo sapiens
tggatggtggagagagtggtgtctggaggcctgtgtccaggtctcctgcaagcgcaaaatcttctaacgcaactacctcagcaaagccaagccaacctcc

SEQ ID NO: 74542 - DNA, 83 bp, Homo sapiens
atttaccacctgggccagctcgcacttcttggtgaaatgacaatggatgctctgttggctcgattgaaacttctgaatccaga

SEQ ID NO: 74543 - DNA, 97 bp, Homo sapiens
gggcgtccctgagagaaattagtgcagctgaatgccggccagctgcagtatatccgcttagcccagcctgtatcaggcactcaagttgtgcagggac

SEQ ID NO: 74544 - DNA, 98 bp, Homo sapiens
aacagactagccactttgcattgactggaaacaatggcatttacagaaagagtcaacagcagtggcaacaggtcatggaaaatggaagatttgcaaaa

SEQ ID NO: 74545 - DNA, 100 bp, Homo sapiens
gtagtggaaataatccaggcgactacaattagcagctttccccaactgaagaggcacaaaggttctcctgaaaagaaagctgaacattcatctataaatc

SEQ ID NO: 74546 - DNA, 75 bp, Homo sapiens
cctcaggcctgcacggacggtgttggttgggcagatataatttctacagtagaatttaatcattctggagaatta

SEQ ID NO: 74547 - DNA, 96 bp, Homo sapiens
tttaccagagataattgataacaccctgtaacagctgagttgcttctagaactgctggagttactgtttgacaagtttaatgctgtagccgctgca

SEQ ID NO: 74548 - DNA, 75 bp, Homo sapiens
cggcgcgcggagaagtgcggcggagcggcgcctgcattagcagatctttaagatagagcgtgaaggcgaatgcca

SEQ ID NO: 74549 - DNA, 119 bp, Homo sapiens
agagccgtctctgggactctgcaggcacttcccgagcccccgcaagcctaaatgcgatggccaggtattactgacacaagtgtggaagcgtttaaacctggtagaatgtgactacttcg

SEQ ID NO: 74550 - DNA, 95 bp, Homo sapiens
cggcgtatccataccacccagctgttcgccgcgggaacccgccggcccgcaggtgctggagaatctggtaaaagcaccattgtgaagcagatgag

SEQ ID NO: 74551 - DNA, 90 bp, Homo sapiens
tgggaccccctcgcgtccgcagcaggtggaagcagggaaaggcctggagatgaggaagctggttctctcggggttcttggccagcgaaga

SEQ ID NO: 74552 - DNA, 90 bp, Homo sapiens
ggcggaggcggaaggggaaagcctggagtcctggctcaatctcagtcatagtggattggcagatcattatgaaaattcccactggggaca

SEQ ID NO: 74553 - DNA, 75 bp, Homo sapiens
gttggtgtgattagcttcgcagtctggaaagctttaggagttcacagtagtacaggggctcaggtccaggtggca

SEQ ID NO: 74554 - DNA, 92 bp, Homo sapiens
gccgcgtctccgcgttcccagcccgggtccccgcgttcacagccccagcgcagatgatatcatcaagttgaatcgaaaggaagggaagaagc

SEQ ID NO: 74555 - DNA, 83 bp, Homo sapiens
cttggagaggccgagggtttgatgaaggtggaggcagcgcggctctcagccctgggcgctgcctatggcacagccaagagcgg

SEQ ID NO: 74556 - DNA, 50 bp, Homo sapiens
caccttttccacagggaattgagttggtggcagtagagaagagcatcaca

SEQ ID NO: 74557 - DNA, 75 bp, Homo sapiens
tacaaggagggcaagtttgcttccaaggtgattgtgtccaggggggggcgctttctggaagcccccgtctcaggg

SEQ ID NO: 74558 - DNA, 75 bp, Homo sapiens
agcagagccgcccagccctgccagctgcgccgggacggtcatcatcagatttgaaatatttaaagtggatacaaa

SEQ ID NO: 74559 - DNA, 83 bp, Homo sapiens
ccgcaccttcagtcttttccagcagctcattcagagataaaccacataatcctatggtaaatgctggagcaattgttgtgact

SEQ ID NO: 74560 - DNA, 74 bp, Homo sapiens
gcagtggtcgcttcttctccttgggatctctcaatgctatttgccttcattagcttgctcgttatgcttcccac

SEQ ID NO: 74561 - DNA, 97 bp, Homo sapiens
ctgagagggaaaaggacgccgcggtcttcccaggcgtcgcggagagcagcccgtggccacccaggagcccgatgtgcaaggcaggtgtgagtgccag

SEQ ID NO: 74562 - DNA, 75 bp, Homo sapiens
ttcagaagctccaggaggaagaagatcgggaagtaaagaagctgatgcgcaagctcagctggaagctcagaaagc

SEQ ID NO: 74563 - DNA, 50 bp, Homo sapiens
gcgttggaggccaccgtttccagcattgcagtgtcgagatggctatgaac

SEQ ID NO: 74564 - DNA, 82 bp, Homo sapiens
ctgctagtcctggtggatctgcagtacgaagctgctctgttaaaagcgaaaatgaaacaattgcctgcggcaacagttcgac

SEQ ID NO: 74565 - DNA, 100 bp, Homo sapiens
taacaaggaaagcgggccgtgcaccggtggcgaggagctctacttgctctgcgacaaggtgcagaaagaggacattgaggtgtatttcacgggaccaggc

SEQ ID NO: 74566 - DNA, 83 bp, Homo sapiens
caccctcgtattctcctgcccttccccagaaatacactttcgggaaatggcctctaaatcctggctgaattttttaaccttcc

SEQ ID NO: 74567 - DNA, 100 bp, Homo sapiens
tcggcttcaaagagaaaaggcaacatcctgtcacaggccatgctctggcaaaaacgtcgtggttcaattccagaattctttcatattatgaaaagaaagt

SEQ ID NO: 74568 - DNA, 50 bp, Homo sapiens
tgaaattcttgtgcgtctaacatctgcggggtgataatgagaagcaatgg

SEQ ID NO: 74569 - DNA, 75 bp, Homo sapiens
ggtccctgttcccccatctgtctgtggatatggacaagagcggtgaagtacgacttatagaactggatgaatctt

SEQ ID NO: 74570 - DNA, 90 bp, Homo sapiens
gtggcacctgcgcgaagctggccaaagcctgcccagacggctcacctgtgcgggatggaacaaaaggttcgggtctggcggtacttgaag

SEQ ID NO: 74571 - DNA, 82 bp, Homo sapiens
agaattacaaggtgagatcagccgcccggccaagctatcttctcgctagcagcaaattgtggctactaatttgccccctgaa

SEQ ID NO: 74572 - DNA, 82 bp, Homo sapiens
gtgaaggaccagcatgggaatcctatactctgaggtgaatcaaacatcccttctggaacaatacagagtaggaaaggtttgc

SEQ ID NO: 74573 - DNA, 88 bp, Homo sapiens
agaacagaatttcttttggcacctcctctccgcgcgttcttgggggctgaagaagatgcagagcagcctgaagctggtggactgtatc

SEQ ID NO: 74574 - DNA, 75 bp, Homo sapiens
cacagacgcacctgacacggcgacaggaatgggtaccacagaccatgtcatcgtcctggcgtccacgaaccgagc

SEQ ID NO: 74575 - DNA, 75 bp, Homo sapiens
caaacatgtcaccagtgaatgtttggggtggatgaggcagcaaagggtccctgcactcctagaaaatcaagtgga

SEQ ID NO: 74576 - DNA, 101 bp, Homo sapiens
gttgggcctggatgtgtcggtgaccatctcgcaggatgccggcagtggtgtaaatttgatgacgacgtggtgtcaaggtgtactaaagaggaagcaattga

SEQ ID NO: 74577 - DNA, 100 bp, Homo sapiens
cggagctgatcgagcaggcggcgcagtacaccaacgcggtgcgcgaccgggagctggacctccgggaaactggcagacctttcacttcgtatccaacaaa

SEQ ID NO: 74578 - DNA, 99 bp, Homo sapiens
ctgcaccgcaggccatcctctgtcacccttccctacagcctgaggagtacatggcctacgttcagaggcaagccggtcacttcatgggcaagaagagtc

SEQ ID NO: 74579 - DNA, 100 bp, Homo sapiens
ctcaaccgcttcgtgcaactctccgggcggccgcacctgccaggtttgaagaagaactgaccagcaagtggttatatctttttgaaggcagtggagtccc

SEQ ID NO: 74580 - DNA, 75 bp, Homo sapiens
ggggagaggcctggaggacaccaacatggctactgcagcactggggtgtcagttgttggtccgacccagaacgct

SEQ ID NO: 74581 - DNA, 100 bp, Homo sapiens
tagaccgtaagctccctggagcagggaccttatcccagcgtctaccgcggcgcccgtcacctaagacaaggtctcactatgttgcccaagcagattttga

SEQ ID NO: 74582 - DNA, 76 bp, Homo sapiens
ctgacctattcacctcctgcctcaccacccccatcaagatcgccctgcgctgcctccttccctggacacatcccgg

SEQ ID NO: 74583 - DNA, 80 bp, Homo sapiens
cctggcagagaagttccggcagaaggcctccatccacgaggcctggactgacggttactataacaacagtaccaaggtgg

SEQ ID NO: 74584 - DNA, 98 bp, Homo sapiens
cgaagttttcacaagtctcagaccttgcgattctacgattgcagcgcagtggaagtcaagagcaaggtttctgtcaggatgaattggcagagcttgac

SEQ ID NO: 74585 - DNA, 75 bp, Homo sapiens
gttcctcggggagctctggatggagaggccccaaggggcatctcctcaggaatagcgggttttgcagcaattgtt

SEQ ID NO: 74586 - DNA, 100 bp, Homo sapiens
ccgacatggaacagggactcactgggggctgtgctgcacatggagcagcggaagcagcagcagcagcagcagcaaggccacaaggccccggctgcccacc

SEQ ID NO: 74587 - DNA, 83 bp, Homo sapiens
gctgttcgaggccttgactgtaggagacagggtctggctatgttgcccaggttggagtgcagtgatgcagttatagctccctg

SEQ ID NO: 74588 - DNA, 101 bp, Homo sapiens
gcccgtgcctgtcttcagatcttcacagcacagttcctgggaaggtggagccaccagcctctccctgagagacaagagagacacctccaacttcgacaaag

SEQ ID NO: 74589 - DNA, 100 bp, Homo sapiens
aatttttccatctaattatgacctccttcgccacttacagtatgcaacacattttcctatacctctggtgacttaagagattaaaattaatttggttgct

SEQ ID NO: 74590 - DNA, 100 bp, Homo sapiens
tacttcaagcaggggctgatttagtggataatattaatgcagctgtgatggatttgaaaaaaaagaagatccgcagtctaagtgaagaggtcaaaatagg

SEQ ID NO: 74591 - DNA, 131 bp, Homo sapiens
gaagcgcaggagccgtgagagcctcaacgtggacgtggtcaagtacgagagtggccctgacggaggggaggaaagcacaatcattgtggagaagacagttcaagacctcctgaacctgatgcatgacttga

SEQ ID NO: 74592 - DNA, 105 bp, Homo sapiens
gccgagatgtctcgctccgtggccttagctgtgctcgcgctactctctctttctggcctggaggctatccagcggcacggccgagcagatgaggactgtgtggac

SEQ ID NO: 74593 - DNA, 75 bp, Homo sapiens
cgcagtggtcgcttcttctccttgacagaaagaatttactttcaggttttcttacctaaagggagcaaagagaag

SEQ ID NO: 74594 - DNA, 98 bp, Homo sapiens
gacttgagtaacagcaacatgattacctggctggtgtttgcttgttctggagtgatcttctgactggaaaagaactatgtcatggatcaaggaaggag

SEQ ID NO: 74595 - DNA, 80 bp, Homo sapiens
atcatgtctgcgagccaggattcccgcacatgattaagtaccggtacatcccgttcacacatgggaagagaaggtacaga

SEQ ID NO: 74596 - DNA, 100 bp, Homo sapiens
cgcgaagctggccaaagcctgcccagacggctcacctgtgcgggatggaacaaaaggatgagttccacccgttcatcgaggccctgctgcctcacgtccg

SEQ ID NO: 74597 - DNA, 101 bp, Homo sapiens
atacagcagcacccctggatcgcgaggctcgcgcctggcacaacctcactgtgctggctacagagctcggaccggccagccttgcagctgtatgatccagg

SEQ ID NO: 74598 - DNA, 82 bp, Homo sapiens
aaggagcggccgggagcccgccgcgctggtagcgctgagcgggctttggacaccatgaactttgatgtgattaagggaaagc

SEQ ID NO: 74599 - DNA, 95 bp, Homo sapiens
gaaccagcattgcttggaattctcctaaaccagaatatttccttggcagtgtggacaaaattcctgataaagtagagacggggtttcgccatgtt

SEQ ID NO: 74600 - DNA, 100 bp, Homo sapiens
gccaagtgcgacagccacatggagacattcttgcgctgcatcgaagcctcaggaacttgctactaccagcaccatgccctaccaatatccagcactgacc

SEQ ID NO: 74601 - DNA, 100 bp, Homo sapiens
gaattcactcggctggagcctgtctactcaccccctggcagccccccacctggggacccccgaatctttcaggtctggagcccggcactgtggtcataac

SEQ ID NO: 74602 - DNA, 99 bp, Homo sapiens
cagcccccccgcgaacgcccaaggcagtcgacaagtactttaagcttcctcatgcttccagtaaaccaccccggatttcaggaagccttgtggacactt

SEQ ID NO: 74603 - DNA, 75 bp, Homo sapiens
ccagaagcatttccagcacatccagtttacatgagctggtgaaacatgaagaaaatggcctggtctttgaggact

SEQ ID NO: 74604 - DNA, 97 bp, Homo sapiens
aactgcagctactctgatgaatgcatactctagctgccactgcagagccccgccatggaagacacgccgttggtgatatcgaagcagaagacggagg

SEQ ID NO: 74605 - DNA, 83 bp, Homo sapiens
caggagaagccgcccaaagaactggtttggtgcacctcgatttggaggaagtagggcagggcccttatctggaaagaagtttg

SEQ ID NO: 74606 - DNA, 100 bp, Homo sapiens
cagccgacacagatacagcagaccaagtcatggcttccttcaagatcctggctggggacaagcctatggaggctccagtcatgctgtgggatgagtccag

SEQ ID NO: 74607 - DNA, 75 bp, Homo sapiens
cgggccggaagtattgattagtgctggaaggtggaagagcaggtggtgaacatcccgtccttcattgtccgcctg

SEQ ID NO: 74608 - DNA, 100 bp, Homo sapiens
caagcggatactggtcttctcgtcggattgcccatgcacttgttgcagaaacagccaaggacactgcccatctctaagataagaacctggaaaggggact

SEQ ID NO: 74609 - DNA, 90 bp, Homo sapiens
gtttctaggaaaggccggacaccaggatcaccccttctgtgtcattctctgaggaaaacaagttcttctcaaggaggaaagtctgaactt

SEQ ID NO: 74610 - DNA, 101 bp, Homo sapiens
gtcccgattgctgcagccgcttgtcagtgtgatgaagattggcacccaggttttgggatttgagattgacgcggtgaactctgtccagttttcaaaccaca

SEQ ID NO: 74611 - DNA, 100 bp, Homo sapiens
cacgagggggcgcagggcgccttggacagcggagagcccccccagtgcaggagtcctgagggggagcaagaggacaggacacattggcgtgagacctggg

SEQ ID NO: 74612 - DNA, 83 bp, Homo sapiens
ccgaccatggcctccaaatgccccaagtgcgacaagaccgtgtacttcgacaatgcagatcttcgtgaagactctgactggta

SEQ ID NO: 74613 - DNA, 74 bp, Homo sapiens
taataaaaggcctgacatatctgagggagaagcacaagatcatgcacagagagcaggttgttgccctggatgcc

SEQ ID NO: 74614 - DNA, 100 bp, Homo sapiens
atgaagtgaagtgcaaatcttccaagtctaatagacctaaagccacagtcttcaagagcccacggacaccacctcaacgattgactatccaccatttgaa

SEQ ID NO: 74615 - DNA, 100 bp, Homo sapiens
gaccggagttagatgccagcgcagaagggacgtgagcccagccgaggtaccgctgaagaggaatcaattttggctctctatgagaacatgctggtggagc

SEQ ID NO: 74616 - DNA, 97 bp, Homo sapiens
cgcgctgtggcccctgcggcgcttctggaggagcacaggcttctgtctctgctttctatccgtcaagatgataaagtcgtgtgcccgagaaccaaag

SEQ ID NO: 74617 - DNA, 104 bp, Homo sapiens
ctactttgactactggggccagggaaccctggtcaccgtctcctcagcaattctgtggtgttcttggtcacacatttatggagtttctgaagggcagtggagat

SEQ ID NO: 74618 - DNA, 100 bp, Homo sapiens
ctttctgagacccaggttggggacagtgccggaggggcctcctctgctgcagacatctgtggacagaggactgcagaaaatcaacctatcctccttcagg

SEQ ID NO: 74619 - DNA, 98 bp, Homo sapiens
gggggattctcgacctgctaacagaactggaccttttcggtatctactgtgcgtttcagtcaacaatacagcttgtgttcgacaatattccttgatga

SEQ ID NO: 74620 - DNA, 50 bp, Homo sapiens
cagcagagaagccttcctggaaaaggggcagataagagtagccaagaggc

SEQ ID NO: 74621 - DNA, 75 bp, Homo sapiens
gcctcccaaattgctgggattacaggttcatgggacggctccagacattgcaggcaaggacatggcgaatcccac

SEQ ID NO: 74622 - DNA, 50 bp, Homo sapiens
ctggacgccctggacaagcagcaaaggcttcaacgtggaaaccgtggagt

SEQ ID NO: 74623 - DNA, 80 bp, Homo sapiens
gatagacctgaaaaccaagtcttgtagtggagtgggagcgctgacccagctgatccagctctatcatcgcttccaccggg

SEQ ID NO: 74624 - DNA, 90 bp, Homo sapiens
ggagccgcctccggaagaggggaccggagaccgcggggacctcggagggagcccggcggcttcggggtctacatcaactattacgacatg

SEQ ID NO: 74625 - DNA, 87 bp, Homo sapiens
ctcttggcctgtccctcacatccgatgcaccctttttgtcagattatcaggatgagggtaattgcagccacaaacagggtggacatc

SEQ ID NO: 74626 - DNA, 51 bp, Homo sapiens
aggagaggagggaactgcggagcggggacattccagctacatcacacacct

SEQ ID NO: 74627 - DNA, 87 bp, Homo sapiens
ctggatgaacgtttgtggaactggattgaattaaacaagacgtgcaaagcaagtggttcacgagatgggaacagcgagagctgccca

SEQ ID NO: 74628 - DNA, 82 bp, Homo sapiens
agccaggtgaggaagtggagatagctgagctcactacagaaactgccaagttttggaccttatctggaacagcgcaagaaaa

SEQ ID NO: 74629 - DNA, 100 bp, Homo sapiens
cgaatctctcaggctgcatcaggatgaatgatgacccaagtatggaagctggcagagaagtaccgagagtgcctatctaacaaggagaagattctcaagg

SEQ ID NO: 74630 - DNA, 74 bp, Homo sapiens
ccccacgcaaccccagatccatttacactttacaacccctctgccatgaaccagtccatcccagtggctcccac

SEQ ID NO: 74631 - DNA, 50 bp, Homo sapiens
ttgcagatgtggataccactcagatcaagaagctactctagaagtcggag

SEQ ID NO: 74632 - DNA, 75 bp, Homo sapiens
agattgggcaagagaagaattcagaagaaacaaaagtgccaccgaagagtggaagtatgcgagacttaagagctc

SEQ ID NO: 74633 - DNA, 89 bp, Homo sapiens
aaggattccaagtaactcttatttgatgctggagagcatgatcaagaagccccgccccactcgggctgaaggcagtgatgtggccaatg

SEQ ID NO: 74634 - DNA, 100 bp, Homo sapiens
atgccaatcagcatttcacattcctcatggttggttcaaagctaaaagatggcggcaaggcagcccaggcaaatgtaagaataggcgatgtggttctcag

SEQ ID NO: 74635 - DNA, 100 bp, Homo sapiens
tccaagagctgtggcccgggggcctcttctggaccaggaaactctccacaaccaccgggaggaactgggccattctaacacccgttgctaccatgctggc

SEQ ID NO: 74636 - DNA, 128 bp, Homo sapiens
gcggatctggacacccagcggtctgacatcgcgacgctgctcaaaacctcgctccggaaaggggacacctggatgtgatcttcgtggtggaaagctaaattttaaaaccaccccaatggatgcagaca

SEQ ID NO: 74637 - DNA, 75 bp, Homo sapiens
cggcgtcctgaccagcggcggcgacgcgcaagacattatacaacgtgaaggctgagatctttcccccttcgggaa

SEQ ID NO: 74638 - DNA, 90 bp, Homo sapiens
cgagtctacctggatgaaaactacaaatcccaggagcacttcacgttggcgtgcacagtgtcatgaagcacgatgccatcatggatggag

SEQ ID NO: 74639 - DNA, 83 bp, Homo sapiens
cgtggctcgacggagaccagctagggtgagaagccctaccactgcaactgggacggctgcggctggaagtttgcgcgctcaga

SEQ ID NO: 74640 - DNA, 100 bp, Homo sapiens
gaaaataatccagagatttccacagaaggactgggatgatacaccttttccacagggaattgagttgggtgcaaatagctatgggcaacttggcctcggc

SEQ ID NO: 74641 - DNA, 98 bp, Homo sapiens
ctgtgcagccgcgaggaggcgcgggaggtgttcgagaacgaccccgagacgattactacagcccggccatgctgggcctgaagaccgaccaggaggtc

SEQ ID NO: 74642 - DNA, 90 bp, Homo sapiens
cggggacctgctccgggacaacatgctgcggggcacagagtgatcagcagctggactgtgccttggacctaatgaggcgcctgcctcccc

SEQ ID NO: 74643 - DNA, 110 bp, Homo sapiens
gaattaaaggccatggatgaagatgggcttgaattacaacaagagccaaactcattttttgatgcaacagcctggagaacagctccctccagagatgactgtggcaagat

SEQ ID NO: 74644 - DNA, 100 bp, Homo sapiens
ctccaccaccggcagcatcctgaatcttaacctggggagctggcctaccagatcgcagagcagttccgggtcctggggaagcctctagggctgaaagact

SEQ ID NO: 74645 - DNA, 100 bp, Homo sapiens
ccgacagctgcccggtggtgctgcacagcttcacgcagctagaccccgacctgccgcgcccggaggaaaccacccctactcctaatcccccgactacaga

SEQ ID NO: 74646 - DNA, 100 bp, Homo sapiens
cccgcctcagcggccggaggacatgcgggagagagaatgagccagagggacacgctggtgcatctgtttgccggagggacctcccggacatattgtctac

SEQ ID NO: 74647 - DNA, 106 bp, Homo sapiens
gggaggagtacctgcctgggcagagactactaagcggaaaacatcttcagatgaatgcatgaactgcacccggctcagtgacatgagtgagcgactgaccacactg

SEQ ID NO: 74648 - DNA, 82 bp, Homo sapiens
ccaggatttcttgcgtgcagtttgtgaagaaaaaattagatggaaatcatattatgtagaatacttgggtgacatctgcctg

SEQ ID NO: 74649 - DNA, 50 bp, Homo sapiens
ccgctatccagaacctccactctttcggtggacgcggatctgtcaacatg

SEQ ID NO: 74650 - DNA, 75 bp, Homo sapiens
acaggacccggcgccgggcactgagcaccgccaccatggggaaggggttattcaagcggagaaatgttgctacag

SEQ ID NO: 74651 - DNA, 82 bp, Homo sapiens
agcacctcatcccctggatgggggaccacaagatcctcatcgacaggcataatcaccagcaacacccgggacaataatacgg

SEQ ID NO: 74652 - DNA, 95 bp, Homo sapiens
ccccgagctgctggagaactgaaggcggacagtctcctgcgaaaccaggcaatgggttcgagaacttgtcttggacaattgcaaatcaaatgatg

SEQ ID NO: 74653 - DNA, 74 bp, Homo sapiens
gtgagaacttgatcagtttgtgtcagccaccttgttctctaaagttcccattctgtgatggggctcacacaaaa

SEQ ID NO: 74654 - DNA, 100 bp, Homo sapiens
gacacagcttctagtgttgctttggatcttgtggaaagtcagatgatcttccattgtttgaagcactggacctttaatccactgtaggtatggacaggga

SEQ ID NO: 74655 - DNA, 98 bp, Homo sapiens
cgccatcctgcagctgggcaacatctgcttctcctcctcagagctaatgtgactgtgtccttgcctgtccggggctgtgtccaggatgaattctgcac

SEQ ID NO: 74656 - DNA, 74 bp, Homo sapiens
tttaaaacagatctgcgcttccagagcgcagctatcggtgctttgcagtggaagtatgcgagacttaagagctc

SEQ ID NO: 74657 - DNA, 98 bp, Homo sapiens
tggagaattataggaacctggtctccctgggtgagcggagaattagagtacatacactttgtttgccagtggtaagttcactagcagatgtatatgcg

SEQ ID NO: 74658 - DNA, 75 bp, Homo sapiens
gcaccctggctttcaacacctacgtccacttccaagttattgattctgcagaactgcaggcgtatccagcacttg

SEQ ID NO: 74659 - DNA, 75 bp, Homo sapiens
cctggagctcattgcctcagagatcatcagggctgctgccgacagggacagggagactgtgcgggcgaaatccat

SEQ ID NO: 74660 - DNA, 96 bp, Homo sapiens
cgcccagcgccgccccgtcgtcgtctgccttcgcttcacggcgccgagccgcggtccgaaatttggaatgatgggagatcatacaattaaaagtca

SEQ ID NO: 74661 - DNA, 75 bp, Homo sapiens
gaagatcctggtgtcgccatgggccgccgccccgcccgttggggacatcagcagccaccagcatggtggggtctt

SEQ ID NO: 74662 - DNA, 76 bp, Homo sapiens
ttttcttggcgattatgtggacagaggttattttagtatagagacgccttctggcaagaggggagagcctctggaa

SEQ ID NO: 74663 - DNA, 146 bp, Homo sapiens
attcagatgtggtggaatatgccaaggaaaaactggagagcttcatcaaaaatagtgatagctttgataagccatcatctctcagcaaggtgacatatttgtttttgacctggagacctcagctgtcgctccctttgtttggttgg

SEQ ID NO: 74664 - DNA, 87 bp, Homo sapiens
ggccatggcgaagcacgagcagatcctggtcctcgatccgcccacagacctcaaattcaaagatcgttaactgaagacaatatgcaa

SEQ ID NO: 74665 - DNA, 98 bp, Homo sapiens
gcggaaggggaaagcctggagtcctggctcactttatcttcaagccaggatgaagggagactgggcaagactcttacgccccacactgcaatttggtc

SEQ ID NO: 74666 - DNA, 100 bp, Homo sapiens
gatcatcggcggcgaccctaagggcaacaattttctgtacaccaatggaaagtgcgtcatcctaaggaacatcgacgaaaatgtttataggaggccttag

SEQ ID NO: 74667 - DNA, 101 bp, Homo sapiens
acccagctcagcgggacgcgccgctggagaatgaaggtgaggaaaatagcagctgaatactatgacaacctccctcactacaattcctggataaaagtact

SEQ ID NO: 74668 - DNA, 74 bp, Homo sapiens
gagaacgtgcgggaagagaagatcatcgagcatttcaaacggtaagaatgattgatgttggctgatattggagt

SEQ ID NO: 74669 - DNA, 80 bp, Homo sapiens
cgggtccgcgcgggcgacacgctgcagggcatcgcgctcaagtacggtgtcacgagccccacagtcttcgttataacctc

SEQ ID NO: 74670 - DNA, 100 bp, Homo sapiens
atatccacggtgttccttatgaaagtttcctacactactgaggtttaggggcactgtgaagcaaaagccacgcctcagaatcccaggcggagactccgac

SEQ ID NO: 74671 - DNA, 50 bp, Homo sapiens
acattgccaaatcccaagatgctgaggttgctccttgagggcaggacagt

SEQ ID NO: 74672 - DNA, 75 bp, Homo sapiens
gaaagaatcccggccagacgtgcgaacagctccagctgggctcttgggatgctcttctggcataaacataatatc

SEQ ID NO: 74673 - DNA, 98 bp, Homo sapiens
gaaacagtgtcttgtaaagagccctgagcagagggccacagccactcagctcctgcaggaaagaccacagcaagattctttcattcgtctcctcctag

SEQ ID NO: 74674 - DNA, 100 bp, Homo sapiens
ccgagaccccgtcggacccatggtttccagtgcagcgcggagtgggcgatgccagcgtgccagcagcgtcaccctttacaccagaaagctggcgggcact

SEQ ID NO: 74675 - DNA, 75 bp, Homo sapiens
tgcgagcgtggactgtgaccgccggatacttgctaaccacaccttcatcaagcggtccgaggtggaagaagtgga

SEQ ID NO: 74676 - DNA, 100 bp, Homo sapiens
gaacatacagatgaaatgacctgaaccctgcccaccatttaaccaaatggcctctgcccaagatgccaggtacggccagaaagactcctctgatcagaac

SEQ ID NO: 74677 - DNA, 100 bp, Homo sapiens
cacaaaaatttactattcttggaggtaaacttccaaaaggaaagtgatgaagcattgggcccaacaatgatgagttggaatgcagttgaaaagttatgcg

SEQ ID NO: 74678 - DNA, 75 bp, Homo sapiens
gcagttcccgggccagcctggggcggccggccaggaaccacccgttaagaatcatgtcaaccctgccatggactt

SEQ ID NO: 74679 - DNA, 90 bp, Homo sapiens
cagaccgtcatcctgacggctatttagccagacgctaatgaactgaagacgatccttcgagagctaaagtacagaattggcatccagtcg

SEQ ID NO: 74680 - DNA, 100 bp, Homo sapiens
cgcgccgcgtgggagccacgcacatcgtgacaggtgaggatgcagtgtccaaggcaccatcttgaactcatcatcgccaaatatgtgagcaccttgatgt

SEQ ID NO: 74681 - DNA, 75 bp, Homo sapiens
gcggctgccgtacgtggccctcgatgtgctctgcgtgttgctgggtttccacttgagcggcacagtgacagaacc

SEQ ID NO: 74682 - DNA, 83 bp, Homo sapiens
cggcggccgaacgatgtgcgagaactgcgcagacctggtggaggtgttaaatgaaaggcggcgactggcggcgcgatggacct

SEQ ID NO: 74683 - DNA, 121 bp, Homo sapiens
tcattcagatcgtcatcaaccgggacgacgtgcagggctacgcggccaagactgtgttcgagctcgggttcatgacgctctcgatattcctgtgcagaaacctggaccacgtctacaaccg

SEQ ID NO: 74684 - DNA, 83 bp, Homo sapiens
cgtccgttctctcaggctcccgttcagttgagccccatatgggggttggcaggcagcagagaggcccctttcaaggtgttcgg

SEQ ID NO: 74685 - DNA, 74 bp, Homo sapiens
ctggagaacgccaagcgcttcgccatcgacatagatgaatgatttcggaatcaagaatatggaccaggtagccc

SEQ ID NO: 74686 - DNA, 75 bp, Homo sapiens
aactccagcccacctctccaaccccaacctggcctgctgatggttgcagaaactctggatctgcatggaattctg

SEQ ID NO: 74687 - DNA, 90 bp, Homo sapiens
gagagaatttgtgatgatgagctgatcttaatcaaaaaaatggagatgtatgcatttcgattcttcatccgcctgtagatgacccacaga

SEQ ID NO: 74688 - DNA, 100 bp, Homo sapiens
cggaaattccccaaactcacaattataggggaagagattctgaaaaagagttccacgtcctcccttatcgagtctttgttccccttcctggatccactgt

SEQ ID NO: 74689 - DNA, 100 bp, Homo sapiens
ttgatgagtctcagaggttcctgtactgcgatgtgatgctggagaactttgcacatgtaacatccctgggtccagtgcacgtgccaacattacactgtca

SEQ ID NO: 74690 - DNA, 75 bp, Homo sapiens
cccgaatccgatgtccccagcacataataacttggggccacccgttcatcgtgcagttcaatgatggaaatgccg

SEQ ID NO: 74691 - DNA, 83 bp, Homo sapiens
tttcaagacaccaagtgagaggccaaccagctctttcagtctcacatggcaacgaaaacaacttgtatgtcttcacaaggatc

SEQ ID NO: 74692 - DNA, 140 bp, Homo sapiens
gctgaaccaagaaaaccttatcagcactatttgaaacttttatctcatctggcttggcgcctgaggttctcccattaggcatagaatgtcaagctaaccaggcgtccgctacttcagaagagtgtactgtcgcatgggga

SEQ ID NO: 74693 - DNA, 100 bp, Homo sapiens
ccactctgtttctgcctccaagaagaaaagcctaaaactcactttcttccggactctttcaaggacgcttccattgcacacagattccatgtgatgagag

SEQ ID NO: 74694 - DNA, 75 bp, Homo sapiens
cggaaactaggaagaggaaattaactatctgtacttataaggggccttggacaagttgttactgactatgttcat

SEQ ID NO: 74695 - DNA, 74 bp, Homo sapiens
aaggagagaatatgaactgtgtgtgttactgtaaagtcaaagattccgtcctatttcagtgttccgggaagcca

SEQ ID NO: 74696 - DNA, 75 bp, Homo sapiens
aacatggcggcggccgtaaggtgcatgggtagaggtagctacagcaagctgggtagcaggcagatccaaaggata

SEQ ID NO: 74697 - DNA, 100 bp, Homo sapiens
aagaagagtccttggaacaagcaactggctattgaaaagaatgttggctaccagggtatttagcctagttggcaagcgagcaatttccacctctgtgtgt

SEQ ID NO: 74698 - DNA, 101 bp, Homo sapiens
cggggcttgccctggtcttgctcggccgatgaagtgcagaggtttttttctgaataactgaagtgaagtgatggactccgatttggagagtagtaagacgt

SEQ ID NO: 74699 - DNA, 83 bp, Homo sapiens
cgtgggcaacaagagcgacctggtgcgctctcgtgaggtctcggtggatggcgggcagggctgggcagcggcctgagtctcag

SEQ ID NO: 74700 - DNA, 75 bp, Homo sapiens
gggggacgcctaaccccgcgagcttatgtccctgatgccaaaaatgcacctactctttcctctaactctggtgag

SEQ ID NO: 74701 - DNA, 100 bp, Homo sapiens
ctgggagagaggtacctctccttttccctctccctttccctaagatgtgatgctgatccttcagccttagccaactatgttgtagcactggtcaagaagg

SEQ ID NO: 74702 - DNA, 101 bp, Homo sapiens
ctgagtccaaacactcaagatgcttgcattcacaagagatgggctctgtggtctgtggaatgaaatggttaaagatggagaaattgtatacactggaacag

SEQ ID NO: 74703 - DNA, 50 bp, Homo sapiens
cctgtacagcctgcagaactgtccgcgggagagctgtggggcttggtgag

SEQ ID NO: 74704 - DNA, 100 bp, Homo sapiens
caggcagttacatggaaaccttgatagaaaagtggatgaattcattgtctcctgagaaagtggttgtagacactcctgggatcctggaccaccctctgga

SEQ ID NO: 74705 - DNA, 75 bp, Homo sapiens
gctcaagatggcgtgcttgttggagaccccaatccgcatgagcgtcctttcggtccatattcaagcctttcatct

SEQ ID NO: 74706 - DNA, 100 bp, Homo sapiens
aagacttcaagaaaaccttagaagagaagcatttagagagcatcagcaatagtgcagattcactttataggaacagcttcagcttcagtgatgaaaaact

SEQ ID NO: 74707 - DNA, 46 bp, Homo sapiens
gccgttcagcacccgtcgagcgggtagaaatatttctgtcatggct

SEQ ID NO: 74708 - DNA, 88 bp, Homo sapiens
atttacaagaagcacagagttcagtatgaaatgagaacactttacagatgtttagaggtctccctacaccaccacccgctatggaagc

SEQ ID NO: 74709 - DNA, 100 bp, Homo sapiens
ttggactaccgtgaggatggtgtgaccccatatatgattttctttaaggatggtttagaaatggaaaaatgtgttatggatgatgaatcagatgaaaaag

SEQ ID NO: 74710 - DNA, 82 bp, Homo sapiens
gctgaatgaaagaatgaactggttgtgcaggaaccaggatccgaacccgcctccccagaacccagcgggtgccgcttctcca

SEQ ID NO: 74711 - DNA, 118 bp, Homo sapiens
cccaagcagccgatgcccgcggccggagagctggaggagaggttcaaccgcgccctggtttggtgcacctcgatttggaggaagtagggcagggcccttatctggaaagaagtttgga

SEQ ID NO: 74712 - DNA, 83 bp, Homo sapiens
ttggacattcagacttcagaatgctgaggcaacttctcctagaatctcaatctcagctcgatgccgccaagagcgaagcccag

SEQ ID NO: 74713 - DNA, 100 bp, Homo sapiens
ttttgtttgactccagtgttaagagaagaaatgaggacatatcagtatcggctactgaaagcattaaaatgctggtgacattgtgtcaatctgatactga

SEQ ID NO: 74714 - DNA, 51 bp, Homo sapiens
ggccttccagctgtttgaccgaacagcctcagagtttgaagaccccttagt

SEQ ID NO: 74715 - DNA, 75 bp, Homo sapiens
ctgggtgccctgactgaagttcctgtgcccacaagcttgtggagagactccagagcaaatacgagcaccaagtgg

SEQ ID NO: 74716 - DNA, 50 bp, Homo sapiens
gagacagatcaaagcagctcattcgtgtgagggatgacaagatgcctttg

SEQ ID NO: 74717 - DNA, 131 bp, Homo sapiens
ccgccgccgccgccgcccctgttgcgatggcgcagaaaccccgttgacaaggcactgctttttcatgacggttttaaaatcaaagatgggaaaatcggagaaaattgcccttccccatggccagcttgttc

SEQ ID NO: 74718 - DNA, 82 bp, Homo sapiens
cttcgaccttggacttctcagcctccagaatgcttaaagcttttcaagccaggccaagaagctgtgaagtaccagggtcctc

SEQ ID NO: 74719 - DNA, 100 bp, Homo sapiens
ttcctcctcggctgctgctcttactttgacaagccaggctaacattgaaggtggtgaaattgcctctacctttgatcacccagaactggtgaagcttgga

SEQ ID NO: 74720 - DNA, 100 bp, Homo sapiens
caggaggagggctggttccggctgcagcccgaccagtccaagagccggcggcatgacgacttgaggagcgaggatggcagtcaacaaaggcctcaccttg

SEQ ID NO: 74721 - DNA, 100 bp, Homo sapiens
ctggaaacaaaatattcatgctggatattgagagttactgtgacaacaacatactttggccactctgaacagatatcccaggagaggtatcagtatgtcg

SEQ ID NO: 74722 - DNA, 100 bp, Homo sapiens
aaaaagctcaaaatgaggaaattctgtatgttcttcgccattatattcaggtgtcccagctgtatttcagctcctcagggaagctgtgttcctcgctgcc

SEQ ID NO: 74723 - DNA, 100 bp, Homo sapiens
ggattttggatgaagaagtttttgagacgcaaaatcgaatgaagctaatggccgacaactacgaggatgaccacttcaaatcctcccattccaatcaaac

SEQ ID NO: 74724 - DNA, 98 bp, Homo sapiens
aagactctaaagaagctgtcaagaagaaggcagctgagcaaacaggttgcacctgtctaactatgacagggatcatagcaggttgcttaatgatacag

SEQ ID NO: 74725 - DNA, 90 bp, Homo sapiens
taaaaaggctcagaaagatggatttttgcatgagacgcttctggacaggtttgtgtctggagaaaagagtcttctataagcttatatcgg

SEQ ID NO: 74726 - DNA, 82 bp, Homo sapiens
gccaggactaaggacaagcaggagctgggagccccagatacagatcacttggattcagtcgagtttgctttgctccgtggga

SEQ ID NO: 74727 - DNA, 100 bp, Homo sapiens
gaggcaacaaagttcttctgctctcaattcagaatccgctttatccaattacagtggtccaggggcaagttcatcctactctcgagtctaatgatgatgc

SEQ ID NO: 74728 - DNA, 100 bp, Homo sapiens
gacacccctgcaccagaaacatgctgcgccaccagcccctcgggttccaagatgcagctactggagacagagttctcacacaccgtgggcgagctcatcg

SEQ ID NO: 74729 - DNA, 75 bp, Homo sapiens
tttgaagagaagattgtcagcagttcggagtgggaggagcggcgcaggcagaacattgagaagatgaatgaggag

SEQ ID NO: 74730 - DNA, 98 bp, Homo sapiens
tacagtggagaaatggaagggaaacattcccagatcctcaaactatcgaagtacctgtttgaaaatggtagaatagataacatttttactgagcccta

SEQ ID NO: 74731 - DNA, 50 bp, Homo sapiens
ctgaaaacacaatcttctaaataattggaatggtcctcgtccgaagtgag

SEQ ID NO: 74732 - DNA, 90 bp, Homo sapiens
ctttccggaaagactttcctctatctggctatgttgagtccctagagcgtccaagatttttggtttcaaaccaatttcctgctgaccaga

SEQ ID NO: 74733 - DNA, 100 bp, Homo sapiens
cgttataatcagattttgaccaagcattttgtaaggtcctatggcagcgtatacaaagctattcataaagagaccggccagattgttgctattaagcaag

SEQ ID NO: 74734 - DNA, 100 bp, Homo sapiens
tgctgccgccgccgccaccgcagcaggtcacagcccctcgaggcgacagcggccccgccgcaccagagcagcctacttctgcttcctcctggccgctctg

SEQ ID NO: 74735 - DNA, 83 bp, Homo sapiens
gcgggtgtgtgctgcgttcacaggtgtttctgcggcagatagcagaccccacgttagctgaaatgggaaaaaacttgaaggag

SEQ ID NO: 74736 - DNA, 50 bp, Homo sapiens
cgcttgagttggtcgggggcagcggcaggcatcccgggcccaaatcctag

SEQ ID NO: 74737 - DNA, 85 bp, Homo sapiens
tttaataaatttatgctgtcgacatgataaagtagaagatgccttgaacttgaaagaagaattgagcacgtttgccgtggacggg

SEQ ID NO: 74738 - DNA, 74 bp, Homo sapiens
cgtcgctgttgctgccgccatacgcgctctccctgtttaggagttgtaagacgttcatcgccgtgttatccttg

SEQ ID NO: 74739 - DNA, 75 bp, Homo sapiens
aagactatgcccaattcttcaactcctaccagccagatcaacacaattgatatgatatcagtatcaagataaaag

SEQ ID NO: 74740 - DNA, 100 bp, Homo sapiens
catggcagtgggcaggacatggtacctatccttaccagggtggtgatcatgaactcgatcctggagcgcatgtgtgccgacgtgctgcagcagacagcca

SEQ ID NO: 74741 - DNA, 100 bp, Homo sapiens
cttgggcccgtaatctcacgacctccgcctgcggcctcctcgcaaaacaaggtctcactgtctgtaagccaggcctgatcacctgcctggagcaacgaaa

SEQ ID NO: 74742 - DNA, 100 bp, Homo sapiens
gctgctggaggaggataacaagttttgtgcagattgccagtctaaagtgcactggtgattgctgcggtgtttgaccgagacataaactgcagaagagcag

SEQ ID NO: 74743 - DNA, 100 bp, Homo sapiens
accagaggtggaagtccaagtcaaacgcagaaggactgcctcactgagcaaccaagagtggtgaaggtgggtctggttgaagactctccctccacagcag

SEQ ID NO: 74744 - DNA, 100 bp, Homo sapiens
cagaggtgaaaccaacagccagtgatatgctatacatgttaattggccttggtcctcacagctccaaaaagaaacaggatctcgataagctctatgagct

SEQ ID NO: 74745 - DNA, 101 bp, Homo sapiens
ggaaatccttgggtttgaagatgatgttgtgattgagtttatattcaaccagctggaagtgaaggccttagattttagtgatgatgaaaaagagaaggaag

SEQ ID NO: 74746 - DNA, 75 bp, Homo sapiens
aaatgaaagactcctctatggaaagcaggggaaatgctgtctgtagctgagcacttcctggagcagcagatgcac

SEQ ID NO: 74747 - DNA, 90 bp, Homo sapiens
gctttgcccaaatccaaatggatgaatgtagaccatcccattcatctaggagttattgccttgtctgtcaagatccgcagttatgaagaa

SEQ ID NO: 74748 - DNA, 82 bp, Homo sapiens
aaaatacgtggttggagagctcatctggaattttgccgatttcatgactaaccagtgtgtaacttggacccatttctcttgc

SEQ ID NO: 74749 - DNA, 78 bp, Homo sapiens
ggcgcccaagtccagaatccgcgcgcaccgcgctcgcccgtgcttcgtgggggaatggagcccctggagtggttgtgc

SEQ ID NO: 74750 - DNA, 96 bp, Homo sapiens
ggggactgcacgtagcccggcgctcggcatggctctcctggtgctcgcagcccctgtcaaagggaacaggaagcagtccacggagggtgacgccct

SEQ ID NO: 74751 - DNA, 100 bp, Homo sapiens
ggttcagctcatacaacagcttcttaggtagcaatgaagtgatgaggatactgatctctagaagcctgcttcaggagtagaacccacacttgttctggcc

SEQ ID NO: 74752 - DNA, 90 bp, Homo sapiens
gcggcgcagcggcggcagcggagagcgagagaggggagcagcccatcacctcttcatgaccactgcctgccaggaggctaactacggtgc

SEQ ID NO: 74753 - DNA, 101 bp, Homo sapiens
acaagaggtatatcaggtgccaccatcagtgcagagaagcattgggggaaccagtgggccccacgtgggtaaaaaggaagatgtatcattacatggatata

SEQ ID NO: 74754 - DNA, 83 bp, Homo sapiens
caccaaagactacattatgaacccaccactgggcaaagaaagtatccctttgtgacagagctgaatgaacctctctccaatga

SEQ ID NO: 74755 - DNA, 83 bp, Homo sapiens
cagcctgctcatcgcctactgcacacttgcacctcctgcgccgccgccccccatccaaggatatgccttcaagcctccaccta

SEQ ID NO: 74756 - DNA, 82 bp, Homo sapiens
tattcttttaagaggtctgcctggttctgggaaaacaacattgtctcgtttcagatgcttcatcaagatgaatcaaataaaa

SEQ ID NO: 74757 - DNA, 85 bp, Homo sapiens
ctgctcatccttgggacctccctggaggatgggatcttaaaccctcacgctgcctcttgcacctgtgctgcctgctgcgacgaca

SEQ ID NO: 74758 - DNA, 100 bp, Homo sapiens
tgtgcagagaagggtatctgaaaaggaaaaggagagtattgccagagcaagagctggatctcgtctttctgaatggaagttggatacactttgtgacttg

SEQ ID NO: 74759 - DNA, 83 bp, Homo sapiens
aaatgacattcttcggctgtttgtggctctgcagggctgtatggagtcccccaaactccccagtggggcttatgagggtgggg

SEQ ID NO: 74760 - DNA, 87 bp, Homo sapiens
ataatctacatcatcaagctgaggttcaaatctgaacatcaatgatgtactagggaactactcattgactcttgttgatgcattgga

SEQ ID NO: 74761 - DNA, 82 bp, Homo sapiens
gtcttcccgcgtccgccgattcctcctccttggtcgccgcgtccttggctggcgtgattatatctgtccaagatgcgagtct

SEQ ID NO: 74762 - DNA, 87 bp, Homo sapiens
ttgcttatatttttacttatgccattgagaaagtccgtgaggctgataatcggaagagatataaagaagaaaataatgatcatctcg

SEQ ID NO: 74763 - DNA, 86 bp, Homo sapiens
aggggtttggaaccttagcacccaagtctaagtcaacttcatggggatatgagactttctactcggaatatcctgagtgttgcgtg

SEQ ID NO: 74764 - DNA, 82 bp, Homo sapiens
cccggaccgggcatggtgttgggcgccgggcccgcctcgcctgtctcggggagcccagacaatgcagatcttcgtgaagact

SEQ ID NO: 74765 - DNA, 75 bp, Homo sapiens
gccgatccagcctgcggagcctgtggggcagcccgtgttcccaagaaaatcctcaagtgcaaggcagtgtctcga

SEQ ID NO: 74766 - DNA, 74 bp, Homo sapiens
ttttgcccttatcagtaacacctgaggactcaaaagcttattaccacctgcttgagcaggtggctccaaaagga

SEQ ID NO: 74767 - DNA, 100 bp, Homo sapiens
cctgttcaccggggagtccctcgccacctgcaagagcctgcagcagtcgcttctccgcagggcgaagctgtgctcaggcccgggctggacgcagagccag

SEQ ID NO: 74768 - DNA, 83 bp, Homo sapiens
tgtcttcagatcttcacagcacagttcctgggaaggtggagccaccagcctctccctggaaataatgcaaaaggtgtcccaag

SEQ ID NO: 74769 - DNA, 73 bp, Homo sapiens
gaagagattggactgggagggcaacgagcacaacaggagctacgaggagttgatgcggaaaacgccatgcggt

SEQ ID NO: 74770 - DNA, 90 bp, Homo sapiens
gcgaccgacgcgccacccgccgacgcctcagccgcttggggcccgcacggaccctctacttcaatgacatagacactaggtttttacagc

SEQ ID NO: 74771 - DNA, 100 bp, Homo sapiens
ccctagaaaggttggagctgccgccgcctgcagtcggtgaccgcgcgactcggcgcccgcccgcgaactcccccactggaaaggattctgaaagaaatga

SEQ ID NO: 74772 - DNA, 100 bp, Homo sapiens
ccgcccggcccgggccatgtcggtgggcgagctctacagccaggtgtcatggagaaactccagctgggcccagagattctgcagcgggaaaatccaaggc

SEQ ID NO: 74773 - DNA, 85 bp, Homo sapiens
cggttctccatcgcgcgcacggcagcctagcgcaatgaggcgggcagcactgcgggcctggagagaaccatccgggacaactttg

SEQ ID NO: 74774 - DNA, 100 bp, Homo sapiens
gaagtagatgataaagatgatgatatccttctcaaccttgtgggatgtgaaaactctgttactgaagattgttaaaggaaatgggctggcaggaagacag

SEQ ID NO: 74775 - DNA, 97 bp, Homo sapiens
ctcggagcttatactcctcccagtgacgggtctggagtgcgtgggggaccggctgttggcgggataaggaagcctgtgtgggtaccaacaatcaaag

SEQ ID NO: 74776 - DNA, 100 bp, Homo sapiens
gtaagagtcagccagccgcggatggggagcgtgagtggcgagaatatgcttttaaggctattaaccagggtggccttacatcagtagctgtcagagggaa

SEQ ID NO: 74777 - DNA, 100 bp, Homo sapiens
gagcagtactttatacaacaaggaggagggggtaaaggaagtggtatctttgacgaatcaacccccgtgcagactcgacagcacctgaacccacctggag

SEQ ID NO: 74778 - DNA, 75 bp, Homo sapiens
ggggggtcagagtgccggaccccagcacacagaagccgagacggttttgcgtgtgaagctgtgtggaaatgtgaa

SEQ ID NO: 74779 - DNA, 95 bp, Homo sapiens
catcgtgcctgaaggagtacatgccctttatgaagatattcttgagggtcacagtgctgtcgatatcaccaaggtggctagaagacatcgcatgt

SEQ ID NO: 74780 - DNA, 97 bp, Homo sapiens
ggagaatcgcttgaaccccggaggtggaggctacactaaaaaaatagaggttcctgcacagctgaaagaattagtttcggatttatcttctcagttt

SEQ ID NO: 74781 - DNA, 100 bp, Homo sapiens
aggaggacgactgggaccgggacctgctgctggacccggcctgggagaagcagcagcgcaagatggcccactgcgtgaccttggttcagctgtccatttc

SEQ ID NO: 74782 - DNA, 75 bp, Homo sapiens
ctaaggcggaggaactgagacgtttcgaattccaggttcattgtcggatcctccaaatattgctggcttaagtca

SEQ ID NO: 74783 - DNA, 100 bp, Homo sapiens
cccacgtcgcctgtcacccaatatctccagccgcgcagtcccgaagagtgaaagaaccggaggctgaagcaggccaaagaagaagctcaggctgaaattg

SEQ ID NO: 74784 - DNA, 100 bp, Homo sapiens
cggacagaagatggtgcagaagaaaccagccgaacttcagggtttccaccgttcgttcaaggtcgccatgggctactcacactccttggtgatagcaaga

SEQ ID NO: 74785 - DNA, 75 bp, Homo sapiens
ctctcttggcagccttcctgatttctgcagctctgtgtgaaggttgcagtattttacagagctagcccaaggcac

SEQ ID NO: 74786 - DNA, 101 bp, Homo sapiens
ccgcggggcccgaccccctggacccgactgatctgaacggggcgcacttcgacccggaagtttacctagacaaggcgaaggaggtggaggagaccatcgag

SEQ ID NO: 74787 - DNA, 100 bp, Homo sapiens
caagccggaaagagcgaaagaaagaagtggtggagggccacatctgccagagcctggagtctgcgaaggccgggacccggttccccggcccacagtgggg

SEQ ID NO: 74788 - DNA, 87 bp, Homo sapiens
attggcggtgaccggatattcagttgcacatccccacatcaatgcactgccaatgcttcaaaagcagtggactgtcttttggattca

SEQ ID NO: 74789 - DNA, 51 bp, Homo sapiens
gttcgggccggctgtcctggcgcgcccactgtttgtaacatggaagattgg

SEQ ID NO: 74790 - DNA, 98 bp, Homo sapiens
gtcgccgcccagatggcctccaggctgaccctgctgaccctcctgctgctgctgctggctggggatcagttcttaagagcagccccggtaactggagg

SEQ ID NO: 74791 - DNA, 100 bp, Homo sapiens
ggattctcgctgtgacagagacaacaccgagtatgagaagactccagaagacctttccagattcgtggttgagctgcagcagagggagcttgccttgaag

SEQ ID NO: 74792 - DNA, 97 bp, Homo sapiens
taaaggaggaactctccatgcagatgctcagctttcctactttggggataaaggattatttggtcttctggatttggaggcaatcagcggacagcat

SEQ ID NO: 74793 - DNA, 90 bp, Homo sapiens
gtgatgtgaagaggttcagctgtcctaatcctcactgccgaaaggaggctgaaccgtctgagcccagaagtgctgaggtgacgaggaagc

SEQ ID NO: 74794 - DNA, 100 bp, Homo sapiens
tggtcctgactgtagctgccttgcccatgctgaagcagagcaatggaagcattgttgtcgtctcctctctggctgaccctgtattcagtggatcagctgg

SEQ ID NO: 74795 - DNA, 100 bp, Homo sapiens
gccaactctgaggagtccactgcagcagctgagatgccgcggcagtttcccaagctgaacatctctgaagtggatgagcaagtccggctcctggcggaga

SEQ ID NO: 74796 - DNA, 82 bp, Homo sapiens
accaccgcactgtcgctgcccgcctgccctgaggagtccccgctgcttggattttttatcaagcagaaatgcatcgaacaac

SEQ ID NO: 74797 - DNA, 100 bp, Homo sapiens
cttgctcctctctccttggcctctcctgggatcggcccaaggccagttctccgcagataccatgtttgtgtggaagtgccccgtgtttgctatgccgatg

SEQ ID NO: 74798 - DNA, 76 bp, Homo sapiens
gctgccagggtccctgaagagggaagacacgcggaaacagatcctcctggccaacttcttggcccagacagaggcc

SEQ ID NO: 74799 - DNA, 100 bp, Homo sapiens
aagatggtttaaaaaatacatctcatgagactgcagcaaaccacaaagttgctaaggggacaattcatctctttcgaaaaccacaaagatccttttttgg

SEQ ID NO: 74800 - DNA, 88 bp, Homo sapiens
acatattgaagttggtaatcgagtaaacaacaatgttttaacaatagatcaagctagtgacttgaaatgcactcggtgatggaaagag

SEQ ID NO: 74801 - DNA, 100 bp, Homo sapiens
ctgtgactgccacccctccccccacccgggctcggcgggggagcgactcatggagctgccgtaagaaataggaaggttgttgattactcacagtttcagg

SEQ ID NO: 74802 - DNA, 101 bp, Homo sapiens
cagcctgagcgggaggcagggggacgacaaggagggcatgatcaacctcgtcatgtcctacgcggagcatcagatccatgctgctgctgactcggagcccc

SEQ ID NO: 74803 - DNA, 100 bp, Homo sapiens
ctggagttcattctttaccacattttaagccagttccaggcgaaccctgactatcaaatgagtggagatgacacccagcatatccagcaattctatgatc

SEQ ID NO: 74804 - DNA, 50 bp, Homo sapiens
cctgattggaacccagtccacaggttggcatggatcctattagctgtgta

SEQ ID NO: 74805 - DNA, 80 bp, Homo sapiens
aagtgccagcagattcagtgtcatgtgaggacgtgcttcctgcttcatagataagagggtctcactctgctcactctgtc

SEQ ID NO: 74806 - DNA, 97 bp, Homo sapiens
tgtctggacaccatgattcaaaccgccaggttaccatgaggaggatttctggccttcgagactgagcacggaaggcatctaccgggtcagcgggaac

SEQ ID NO: 74807 - DNA, 80 bp, Homo sapiens
tcccagctgcgcaaagcttgcgaggtggcgttagatgtatccagagctacagatcacaaatgtgatggaggcaaaccagc

SEQ ID NO: 74808 - DNA, 75 bp, Homo sapiens
cggcgccggagacgatgccgtttcatgcggaggaatccctttggtgtggacatctgctgccggaaggggtcccga

SEQ ID NO: 74809 - DNA, 90 bp, Homo sapiens
ctgcttctctgaaaagcgtgtggctttctggacttggtgttgacagctcttctaccacaagcagtgcttctccaatgcccaacagttatg

SEQ ID NO: 74810 - DNA, 88 bp, Homo sapiens
agaaacaggagaacgggaagcctcctgccgagataaagccaccacgtctgtacctggagtagaacagaaaaattattatgtctgtgtt

SEQ ID NO: 74811 - DNA, 100 bp, Homo sapiens
gagaacgccgtggagaaggtgaacatcaagccgcaggctgactgtgctgtcctgattgttgctgctggtgttggtgaatttgaagctggtatctccaaga

SEQ ID NO: 74812 - DNA, 100 bp, Homo sapiens
cgagctgcacgtcttcaccttcggcagccggctgtacgcacacaccatcgcagcttatgttcctgaggaagaattgaaggcagcagaaatagatgaagag

SEQ ID NO: 74813 - DNA, 100 bp, Homo sapiens
gagcggttgcggcggcctgggctgctgactgcgcacttggaatagtagcaggcggcggcggcggaacgccaggcagctttaccgatttgttacaactcaa

SEQ ID NO: 74814 - DNA, 80 bp, Homo sapiens
ccagtcggcccaggcgccgcggcgaggagcgagcgctgcgaggtggcggcctgagcttgccttgcgccatggactggcag

SEQ ID NO: 74815 - DNA, 89 bp, Homo sapiens
agtgcagctgcctcagttcttagcgcagggggccttgtgtgccgggctctgctttctgtcatggatgatcacaacgtggattctttcat

SEQ ID NO: 74816 - DNA, 100 bp, Homo sapiens
tgtctcctcagcagacgcggaagatttatcagcaagactgttgaacgcataactgcccaagatgcctgtccctccccctccagcacccccgccgcccccg

SEQ ID NO: 74817 - DNA, 98 bp, Homo sapiens
ttatgtcagaggaagtggctttcttattgcagcaaaaattcccgtaccaatgtcagtgctagggcagagacatttgtttgggtgaacaatgcatctgc

SEQ ID NO: 74818 - DNA, 90 bp, Homo sapiens
cgtggtagcaccttcaaagaaatccccgtgactgtctataaggaagaatacaagcgattgagtgaagcactagcagaggatgggagctac

SEQ ID NO: 74819 - DNA, 76 bp, Homo sapiens
gggtgccgtggcatgtcgatttgtccttcactacagtggccccagatgagccagtcccgagcatgtggtggatcag

SEQ ID NO: 74820 - DNA, 82 bp, Homo sapiens
aagagttgtcccagctcggcccgcgggggagccccgggagccgcacgacgccatttggaatgaacaggaaaaggctgaactt

SEQ ID NO: 74821 - DNA, 83 bp, Homo sapiens
ttgtctttggcaaaggattccaagcaaagatcttccctgagacaacacagtcactcctggcggcaaaccaaacaaaaccagag

SEQ ID NO: 74822 - DNA, 98 bp, Homo sapiens
gacaaggaagatggggagccaaagaccaagcatctcagagaagaggaggaagaaggcgagaagcacagggctggctgctggcgggatggacaccctgg

SEQ ID NO: 74823 - DNA, 75 bp, Homo sapiens
cacacctgttgccattatagagctggaattaggcaaatatggacagattcaaccctatgaaaagataaaggccag

SEQ ID NO: 74824 - DNA, 96 bp, Homo sapiens
ccggttccgggctcagggctcgttctggtctgcctagtcctggccttagtatcacaggcagaagctctgaaggaagaaaatgacagcctccgttgg

SEQ ID NO: 74825 - DNA, 149 bp, Homo sapiens
gtcggggacggctgcgcgggacggctctgtaggaaggaacttggttccccctccctcagcttccgccccaaaagaaaaggattatagcagtctttgtgacaagcaaccgataggaagacgtctcttcaggcagttctgtgataccaaac

SEQ ID NO: 74826 - DNA, 83 bp, Homo sapiens
gtgcagccaccctcgctccctctgctcttcctcccttcgctcgcaccatggatagaccctttttccggtaactaaacttcttg

SEQ ID NO: 74827 - DNA, 98 bp, Homo sapiens
ccactttgcagtcgacatactcggataccagcgctcagcccacctgtgattatggattcactccttctccagttgcacagccacacccttcagctggc

SEQ ID NO: 74828 - DNA, 74 bp, Homo sapiens
tcagctgtgcatgagcctgggcaaggatacactgctccggtgaaagacccctgacaaaagacaatcatcttctg

SEQ ID NO: 74829 - DNA, 82 bp, Homo sapiens
ccgcctcagcttcccaaagtgttgggattataggcgtgagccactgcacctggcacaggcaggggaaatggaaggtgatgca

SEQ ID NO: 74830 - DNA, 90 bp, Homo sapiens
acgctggactggatttattcagtgggaaagggtgccacactgggaatgcaagctgtccttgcttctgaaccaagactactattgtgccag

SEQ ID NO: 74831 - DNA, 82 bp, Homo sapiens
gttatcaagctttagagcctggctactcacagttgaagcctgattgcaggtgctggagaatctggtaaaagcaccattgtga

SEQ ID NO: 74832 - DNA, 98 bp, Homo sapiens
gacatgagccccctgaggccccagaactatcttttcggtttacccaaggtccagcctagcccctaggcaccatgtcggacagtgatctaggtgaggac

SEQ ID NO: 74833 - DNA, 100 bp, Homo sapiens
gggagccccgggagccgcacgctcaccacgcgcagcgccatgaccagcaagggtcccgaggaggagcacccatcggtgacgctcttccgccagtacctgc

SEQ ID NO: 74834 - DNA, 83 bp, Homo sapiens
tggcagactctgctccatgagaggtctatcagccacagtctctgcaagtttccaagagcagcagaaaatgaacacattgcagg

SEQ ID NO: 74835 - DNA, 88 bp, Homo sapiens
cgagcgtgccatgacaaaggataacaacctgcttggcaagtttgaactcacaggcacactctggctcccccacttatctccagctccc

SEQ ID NO: 74836 - DNA, 100 bp, Homo sapiens
agaagatagaagagtttctttctagctttgaggagaagattgagaacctcactgaagaggcattcaacacccaggtcctgaatgaggtggtgattgacag

SEQ ID NO: 74837 - DNA, 100 bp, Homo sapiens
ggcctctggaggatctgctgcctggaagaccaacatcgccttcctgcagaatgtgctcaacaaccagcagttcctggcaggcactgtggacacccagttc

SEQ ID NO: 74838 - DNA, 90 bp, Homo sapiens
cagcaatctcctcctccactgccactacagggaagtgcatcacatgtcagatgaagaggaagatgatgatgtagtggctcctaaaccacc

SEQ ID NO: 74839 - DNA, 74 bp, Homo sapiens
gggaactgactgctgtagttcagaagaggagagaaggatattcctggactgactgatactacagtgcctcgccg

SEQ ID NO: 74840 - DNA, 100 bp, Homo sapiens
cacgcatcacaagtcgcctgcagccgcccgaagagccaagagtcagtattccggccagcttcacgaagtcagagaggttgccatgtcaaatcttagcgag

SEQ ID NO: 74841 - DNA, 90 bp, Homo sapiens
cgggacctgtgacagggctggtagcagcgcagaggaaaggcggcttttagccagaagcaaaacggacaagtcggtttttaagtggcatta

SEQ ID NO: 74842 - DNA, 82 bp, Homo sapiens
acagctgctcccttcgccttcgccctttccacctcgcggcagttcgacctcctgccccccgaggtctgcagtctcctgaacc

SEQ ID NO: 74843 - DNA, 82 bp, Homo sapiens
tttagaactgaatgatgtggttatcaccatcccactcccgttttacctcacaaaaactactacaagcaccaagctccctgat

SEQ ID NO: 74844 - DNA, 90 bp, Homo sapiens
gggccgcctcgtctccgctcctgggggaccgcaggtcatcgagctggttaagaagtatggcacaaagcagtggacactgattgccaagca

SEQ ID NO: 74845 - DNA, 82 bp, Homo sapiens
tggcatttagcaaacagaatgaagccagcagccacatccagttgatcatggccttgccaggttggtgacagtatattgtgag

SEQ ID NO: 74846 - DNA, 83 bp, Homo sapiens
ggaggaagcacaccctgtcctatgtggacgttggcactgggaaggaatgtatcctgtcaggtataatgtcagtgaatggcaag

SEQ ID NO: 74847 - DNA, 75 bp, Homo sapiens
cgagggtcaacgagaaagagatcggctaagaaatggcatttcaaaaggcagtgaaagggacgattcttgttggag

SEQ ID NO: 74848 - DNA, 98 bp, Homo sapiens
agattcgggcccatagagggctgcgtcacttctgggggggactcgggcaagggtgccgaagatagacaagaggcacacagagacagaccaactggcag

SEQ ID NO: 74849 - DNA, 90 bp, Homo sapiens
tcaattaaaaaatttattaaaggaagcacacctaagagaagaagttcgtgccccaattcctcaaaagcaggaaatactggtggaaccaga

SEQ ID NO: 74850 - DNA, 100 bp, Homo sapiens
ctcctgtgagcagtgggaaaaatggaccaacttctttggcaagtggacattttactggctcaaacttatctaaaaacagactggttgaagttccaatgga

SEQ ID NO: 74851 - DNA, 51 bp, Homo sapiens
agcagctcattcacatacagcacatggcaaatatgtacgtcttactccgtg

SEQ ID NO: 74852 - DNA, 105 bp, Homo sapiens
ccctcacggagctgggcgacgagctgaccctgggagacatcgacgttgtcgccgtgatcctgaaggcgctgacctacgacgagaagcggggtgcctgcagcgtgg

SEQ ID NO: 74853 - DNA, 100 bp, Homo sapiens
gaaagatggaacattggcaagcaaaatgggcaaagcacttatcaaaactcataactactcaatggttccaagaccaaagattaaattaagagaaggtaaa

SEQ ID NO: 74854 - DNA, 75 bp, Homo sapiens
caggtttcggcacatggagattgatttcacacaaaagatgttggacaatttctacaattttgcttcatcatttgc

SEQ ID NO: 74855 - DNA, 73 bp, Homo sapiens
gcgccgaccggggccctaggcccgacgacggcaggtggctatggaggcttttacaacagtgatggatatggag

SEQ ID NO: 74856 - DNA, 75 bp, Homo sapiens
caagttttcacttatcatctattccaccgtgttctggatgccttcaattaagttgcagagttctgatggagagat

SEQ ID NO: 74857 - DNA, 99 bp, Homo sapiens
ttcaccagagatctcccacctcagtgtgggttccatcttacttgtcacgtgtgtgggctgtgaggtcgtgctgtcaggcattgaggagcaggtgagccg

SEQ ID NO: 74858 - DNA, 74 bp, Homo sapiens
gttctggtaccagctatcatgaacagtgatcagcctttgagcctttcccacattgaagatggtgaaactagata

SEQ ID NO: 74859 - DNA, 95 bp, Homo sapiens
agtcaggcaggagcccgcgtgacgatcatggactatgaagatccaaaaggtaattctggcacttggagactatatgggagccacttgtcatgcct

SEQ ID NO: 74860 - DNA, 101 bp, Homo sapiens
aggatcatctatgaagcacataagcggttgggaaatcgttgggcagaaattgccaaactacttccaggaaggtatcaaacagctactgaaacaagggtcag

SEQ ID NO: 74861 - DNA, 90 bp, Homo sapiens
cgcacggagcttgtctgcgccggccagggaacacaacagatttgagaagcctcggattaaggaataatttatgaagctccgttgactacc

SEQ ID NO: 74862 - DNA, 97 bp, Homo sapiens
atcagacatcaaagagttcacactgaagagcaaccctgaaaaattactgaatgtgaagaaatgagcccaagaagaggccgaaaccgagaccatgcca

SEQ ID NO: 74863 - DNA, 82 bp, Homo sapiens
caaaaccaacgcctggctcggagcagcagcctctgaggtagcatctccgcccccacttactgatactcctgacactacagca

SEQ ID NO: 74864 - DNA, 100 bp, Homo sapiens
gcgcgctcaagcgccggttctatgtaacaacctgcgtgggcaagagtttccacacctatgacgacattctgagcatgtgagacctgaggactgcaaacag

SEQ ID NO: 74865 - DNA, 119 bp, Homo sapiens
agagacgggagtcgggtgggatcccaggctgggccccgcggcgggttttaaaatcaaagatgggaaaatcggagaaaattgcccttccccatggccagcttgttcatggtatacacttg

SEQ ID NO: 74866 - DNA, 100 bp, Homo sapiens
cttggggatggagtgcctccaaaggttgctgagccactgaggcggctcccagctgcgttggcgacatggccgacacccccagagatgccgggctcaagca

SEQ ID NO: 74867 - DNA, 100 bp, Homo sapiens
cagagcagcaactcacccagcacacaaaatggatctcttacgacccctcaccagtccacaaagatgggcagaatgaggccgacagtgcaccagaagacct

SEQ ID NO: 74868 - DNA, 100 bp, Homo sapiens
tataaccggagattctcagggcaacccagatctgagtgagctgagtcgacagaaacttcatacccaagagctgctttctcagctggaaatggcaaatgaa

SEQ ID NO: 74869 - DNA, 75 bp, Homo sapiens
cctgacgatcctgacctggtacgagcccggaacattcttcacaagaaaggattttcagtcaatgcatcatcggag

SEQ ID NO: 74870 - DNA, 49 bp, Homo sapiens
ggaggcagctgggaagaaacccgcagtccgctgcctggcccggaagcgg

SEQ ID NO: 74871 - DNA, 90 bp, Homo sapiens
cctgcagcgagtgccaggaactcttctggggagaccccgacgtggagtgccgagggcagagcggcttgggtaaatccaccttaatcaaca

SEQ ID NO: 74872 - DNA, 108 bp, Homo sapiens
ccagaaaacctgcagaagaactggcttcgggaattttaccaggaatcgacaaggagaacgttgaactctcccctaccactggccactgtaacagtggacgaactcgcc

SEQ ID NO: 74873 - DNA, 50 bp, Homo sapiens
tcgtcctcaaggccaaagacatcagttctttccaaatggcaatgcatttg

SEQ ID NO: 74874 - DNA, 98 bp, Homo sapiens
gaactgctggggaaggcgattggcatcgatctctccatcccttccgaggcccgacttcggaacttttcacacctgagtgcaaattcaaagaatcagtg

SEQ ID NO: 74875 - DNA, 90 bp, Homo sapiens
ggatctggtgtaccaggcgaagctggccgagcaggctgagcgatacgacgttcctacaacagcagccagtacccctgatgccgttgacaa

SEQ ID NO: 74876 - DNA, 80 bp, Homo sapiens
ccggagcaaaggccggaggtatccagatatggacactgagtgtgacaacatctggggtgatggaaagtatgaagaaagtc

SEQ ID NO: 74877 - DNA, 82 bp, Homo sapiens
atcaacacaaggcagccacaggccaaaatcattgtattggatgagttccacccgttcatcgaggccctgctgcctcacgtcc

SEQ ID NO: 74878 - DNA, 76 bp, Homo sapiens
atggtggcgtcggccgaacagccccgcgggaatgtcgacgaggagctgaggatgaccagtgtcccagtgaaggaac

SEQ ID NO: 74879 - DNA, 83 bp, Homo sapiens
ctgtgctccatggcgagctggcaggaaccgaatattgtatctgacgcatcctgtaatactgaagagcaactgaagacagttga

SEQ ID NO: 74880 - DNA, 100 bp, Homo sapiens
gcccgcttcctggaatggcaagcgcagcaacaacagagagcacgtgaggctgggaggcggcagaatgcagccagaggagggcacaggctggctgctggag

SEQ ID NO: 74881 - DNA, 100 bp, Homo sapiens
tttttctcaggtgaaaggagcagtagatgatgatgtagcagaagctgtgccgaagcgagtgccacttgtctgcagggccgtaccgcggaaccctctttgc

SEQ ID NO: 74882 - DNA, 50 bp, Homo sapiens
ctgcaaggactggttccacggcagccttcaaacttttccagccgtagctt

SEQ ID NO: 74883 - DNA, 83 bp, Homo sapiens
aggccaaggctgcagaagccaaagccacggtgtccccaggtgtcattgccaacccctttgcggcaggcatcggccaccggaac

SEQ ID NO: 74884 - DNA, 100 bp, Homo sapiens
ggactagtggaccagctggtgaaggcagacagcgagtggcgacgatgaagatgatccctatgatcttgaagatgtttctgcacagaaatgagggaaatac

SEQ ID NO: 74885 - DNA, 97 bp, Homo sapiens
cttcgcgtctgcccggccaagaggcaaaggggaggttacgcagcaaaccatccagaaggaagctcttcgtgggcggtcttgactggagcacgaccca

SEQ ID NO: 74886 - DNA, 50 bp, Homo sapiens
ggccgatgccacggagcaagtgggccagagctatttatgaagaaattgat

SEQ ID NO: 74887 - DNA, 105 bp, Homo sapiens
ggcgccgctctccgagctcgatccgctgctcgcacgggagccagctgggtgacaatgcagatcttcgtgaagactctgactggtaagaccatcaccctcgaggtt

SEQ ID NO: 74888 - DNA, 50 bp, Homo sapiens
cttcaactctgaaccagaaaccctgtatatgggacaggttgctcatcaac

SEQ ID NO: 74889 - DNA, 75 bp, Homo sapiens
gcgtgagccaccgtgcctggctgaagcatgtgcagtctttgccaacaaaaaaaattaccaagaaacctattccag

SEQ ID NO: 74890 - DNA, 98 bp, Homo sapiens
cgcgccgtggacacagacggggtggagcccatggaatcggtcctggaggacagatatgtgcagcgggggctacagcgagtggggctagatccccagct

SEQ ID NO: 74891 - DNA, 90 bp, Homo sapiens
attttaccggaacaacattttgtgttgcagttgactccctcaatggattggtttacataggtcaaaggactacactgaaacattcaaatg

SEQ ID NO: 74892 - DNA, 100 bp, Homo sapiens
tggaatatgccaaggaaaaactggagagcttcatcaaaaatagtgatagctttgataagcagaactggggctcccttgcatcttccagttacaaattcag

SEQ ID NO: 74893 - DNA, 50 bp, Homo sapiens
ccggattattctgcctttgaagctaccaagcagtttctcgaagagattaa

SEQ ID NO: 74894 - DNA, 101 bp, Homo sapiens
aaagaagaagctgttcagactttcaattatctgtgtgacctgattgaaagggacgatgatgacattaatgatgttgcatcgatggctggagtaaacttgtc

SEQ ID NO: 74895 - DNA, 96 bp, Homo sapiens
gactaccctggttacctcatattggcctggtttgctttcgaccctggctcggcgcactcggacatcatcctctccaatgacaacctgacagtgacc

SEQ ID NO: 74896 - DNA, 100 bp, Homo sapiens
ctgtcacccgttgtgccagtgccccaagtgtgccccagctcagaaggaagaaggtagataatgactataatgcccttcgagaaagactcagcaccttgcc

SEQ ID NO: 74897 - DNA, 110 bp, Homo sapiens
tgccacagcccaaaccatcatttaccctatggaggcctcagaagtttctagaaacagaggagcctctttactggccaggccaggacacagcttagtagctgctattcgaa

SEQ ID NO: 74898 - DNA, 95 bp, Homo sapiens
tctccagcctttcaaggacaaactagaggagttcttccaaaaagtgtaaggagaggatgaggcccgtgaaaaaggcactgaaacagctcgacaaa

SEQ ID NO: 74899 - DNA, 75 bp, Homo sapiens
ttgcaacatccttcttctggataacactgtacaagctttcaaagtcaatcatccaccagctgaggaacaaagtat

SEQ ID NO: 74900 - DNA, 83 bp, Homo sapiens
tcaactatctcgctgacacgcagatcatggaagggaagtggttgctgtgtatgttactggtgcttggaactgctattgttgag

SEQ ID NO: 74901 - DNA, 75 bp, Homo sapiens
cagctcatcatgatggacttggagctgccgccgccgggactcccgtcccagcagcctcccaaagtgaaatgcctg

SEQ ID NO: 74902 - DNA, 98 bp, Homo sapiens
atgtgatttgcttgaagatatgaggacaactgtcatctgggaagtaacaacgcaggatgccccctggggtggactgccccatggaattctggaccaag

SEQ ID NO: 74903 - DNA, 74 bp, Homo sapiens
ccgactgcaactgctggattgctgcaaggctgagggacgagaacgaggtctctgagcggcccctgatgttcctg

SEQ ID NO: 74904 - DNA, 96 bp, Homo sapiens
tctgggtccagccccttacttaaaggggaagcctgtgggaacaccagatgctggcgcttatttccgtgtgcttgcagagcatggagtagctgcctt

SEQ ID NO: 74905 - DNA, 100 bp, Homo sapiens
aaaacacgatcagctcttagacagatggatagtggctataatacgcagaattgtggaagcaatattatggatacagttggggcagaaagttactgcaaag

SEQ ID NO: 74906 - DNA, 97 bp, Homo sapiens
gaggcggatagccgcctccacggcccgggagatagagtgcttttggtcgaatattgaacaggttatggaaacaaaggacatgctttacatcgtcact

SEQ ID NO: 74907 - DNA, 98 bp, Homo sapiens
gtgcatgaaccaaacccacttcgttcaagacaggtgtttaagcactccacaggcaaatactggacggtgggcagtgactccgcggtcaccagcagcgg

SEQ ID NO: 74908 - DNA, 100 bp, Homo sapiens
agacgccattatcctctgtttctctgctgcaccgacctcgacgtcttgcctgtgtcccacttgttcgcggcctatagcctgtgcacgtcgggcgtagttc

SEQ ID NO: 74909 - DNA, 98 bp, Homo sapiens
tttcctgataaggacgatgggaaccagaccacattgtgcaacacatcattggacaacccaacccagagaaacaaggatcagctgatccgggcagccgt

SEQ ID NO: 74910 - DNA, 98 bp, Homo sapiens
acaaccatctcctgaacctgtgcaagaaaatgctaacagtggttactatgaagctcaccctgtgacattccccacagatgaaaacatcaaaaggaaat

SEQ ID NO: 74911 - DNA, 74 bp, Homo sapiens
ccttgggccgcgtctcctttgaggtcagacttgagggactggtatttctagaagcctcacatggaagagacaga

SEQ ID NO: 74912 - DNA, 50 bp, Homo sapiens
gcgtgcgcggacggtgtgcgggtttgtaaccccagatcagaagtactcca

SEQ ID NO: 74913 - DNA, 99 bp, Homo sapiens
tctgtccgggcgctgcaggagatgctggctaacaccgtggagaaatcagaagggctcggggacctgcttcacaagttacagttcgtcctgacatatgtg

SEQ ID NO: 74914 - DNA, 74 bp, Homo sapiens
cgtcatccaccactacgctggcaaggtcccagcatttgagggtgatgatggattctgtgtgtttgagagcaacg

SEQ ID NO: 74915 - DNA, 90 bp, Homo sapiens
ctgctgcccgcccgctgcctgcctgcctggcatctctctctcccgttttgaaacaaagttatgtcagatattttcagacctcaatgccac

SEQ ID NO: 74916 - DNA, 74 bp, Homo sapiens
tctttgggaatgggccaccagttaactacaagggtggttctcttcccaaagtggaagccaaattcatcaattat

SEQ ID NO: 74917 - DNA, 80 bp, Homo sapiens
gagtaggagactcagaatcgaatctcttctccctccccttcttggactttctgcagggcgactgcaccaaagcgaaacag

SEQ ID NO: 74918 - DNA, 50 bp, Homo sapiens
tggcttccgaggagctgtacgaggtctaggcgttttacactgagattctc

SEQ ID NO: 74919 - DNA, 98 bp, Homo sapiens
ggaagatcaagaagctcattaagagcttggaggcggcccgcggagaacggagaccaacctgggctgaagaaagaagattaaatgctgaaacatttgga

SEQ ID NO: 74920 - DNA, 100 bp, Homo sapiens
agaaaacagggaatatactgctgaaataatgtttgagtccttcaatgttccaggcttgtacattgctgtgcaggtcatgatgatgggcagcgcccgagtg

SEQ ID NO: 74921 - DNA, 93 bp, Homo sapiens
gtcccgcgctggagccctcagaggcgggcccgtcaggctgaccccgcactacatctacccaccagccatcgtgcagcccagcgtggtgatccc

SEQ ID NO: 74922 - DNA, 97 bp, Homo sapiens
gaacaacgtggaagccactttggccctgctcaaaaatggagccaataaggacatgcaggatagcaaggctgaaggtgatgtggccgccctcaaccga

SEQ ID NO: 74923 - DNA, 96 bp, Homo sapiens
aggcgaggtggtcatcaaaatagctacaaaccatactaaattattccatttgcaacttatccccaacagagacttccagtgtcctactattgaagc

SEQ ID NO: 74924 - DNA, 100 bp, Homo sapiens
tggcttatgcagcacctgagttaatacaaggcaaatcatatcttggatcagagtgccggtggtggtgtgcacattgagccccggtatagacagttccccc

SEQ ID NO: 74925 - DNA, 50 bp, Homo sapiens
gttacgtggcagaaatgatcaaggacccttgaacatctgtgaagaaatga

SEQ ID NO: 74926 - DNA, 82 bp, Homo sapiens
tcatggcggatggccccaggtgtaagcgcagaaagcaggcgaacccgcggcgcaataacgacggccaatgggaacgtggagg

SEQ ID NO: 74927 - DNA, 96 bp, Homo sapiens
tccgccgcggcactgatccccacaggaacgagtggaatatctctttctcataatttttacggtggaagcgtttttaaaagtaatcgcctatggact

SEQ ID NO: 74928 - DNA, 75 bp, Homo sapiens
gccgccgtcgcacgagtctttccttagtaacctgggcgatagctgtgcagctgtctgcttcagaaagtgagggct

SEQ ID NO: 74929 - DNA, 74 bp, Homo sapiens
cagtccggaggtgaggcggaactctgagttgtcgagatgtccacagaaggaggatttggtggtactagcagcag

SEQ ID NO: 74930 - DNA, 73 bp, Homo sapiens
gagacgcgaaggagaggccctagaaccctacctctgacttttgaggatgttgctatttatttctccgagcaag

SEQ ID NO: 74931 - DNA, 75 bp, Homo sapiens
gggagaggatatgtagcgaggaggaacgcgctaaggcaaagcacctggtcctgagaagtatttctcgttttcatt

SEQ ID NO: 74932 - DNA, 82 bp, Homo sapiens
cggccgtcccgggccgggggacccgcccgccatggccaccaagaccaagccaccctggtagaacaagtaaaaagagtaaaag

SEQ ID NO: 74933 - DNA, 96 bp, Homo sapiens
ccacgtgagccacggccacggccgcatagtttaattggttggggtcagataagaagaggagtgacaatcaagccaacagtagatgatgactgaaga

SEQ ID NO: 74934 - DNA, 82 bp, Homo sapiens
cagtacctgcagaaggtctctggagacatcttcagcaggtgtccccaggtgtcattgccaacccctttgcggcaggcatcgg

SEQ ID NO: 74935 - DNA, 87 bp, Homo sapiens
ctactcgcgcttttcgccgtcgccgctctccatcaaacaattcctggacttcgaagctttgcatcgtccctatggttgtgatgttga

SEQ ID NO: 74936 - DNA, 100 bp, Homo sapiens
atggctgacaactcacagcctgaaaatgaaaaggaagcttcaggtggagacagcccgaagatcttggagtctctgtggatcgttatgagccggaatgtga

SEQ ID NO: 74937 - DNA, 74 bp, Homo sapiens
taaattctgtggatgatgttttctcacccagtcatgaaaactcttctacagaaattactctcaaagaaacctga

SEQ ID NO: 74938 - DNA, 80 bp, Homo sapiens
acgccgcgatcgtggggcccgcgaggcgggcagccggggcgtccagaatcatgtcaaccctgccatggacttcacgcaga

SEQ ID NO: 74939 - DNA, 100 bp, Homo sapiens
cggtctagatcacattctcgatccagaggaaggcgatactctcgctcacgcagcaggagcaggggacgaaggtgattgtagagaaggctccaaaagccag

SEQ ID NO: 74940 - DNA, 119 bp, Homo sapiens
ctgtgaagaggtgcacctggagaggaactgaggcctcccaccaaaaccaagcactgacatgccactcatgggaggaacgatgatgaatgtcgggcatttgtgaagagagtcataatgag

SEQ ID NO: 74941 - DNA, 96 bp, Homo sapiens
ctcctcgctcccgccaccgccggacttcaatgcccagtccccagctcgccagcgattgtaagtggaaaatgtatatggagatggatggggatgaaa

SEQ ID NO: 74942 - DNA, 100 bp, Homo sapiens
tatcgtaatccccaaaacagtgcacagacggctgacggctcacactgtggtggaggtggatacagcagtcggagaacatctggcagagacaaatacggac

SEQ ID NO: 74943 - DNA, 101 bp, Homo sapiens
gggcgcagccctttgcgcagccgccgggaccctggcccctgtcgaggaggaagagcaagcaggccctgagggactataagaaggttcagatccagctggag

SEQ ID NO: 74944 - DNA, 74 bp, Homo sapiens
tcgagagctaccgcgccagacaggaatgtatcctgtcaggtataatgtcagtgaatggcaagaaagttcttcat

SEQ ID NO: 74945 - DNA, 100 bp, Homo sapiens
ccaggcagccggtggcagatgacacctgtttggagaagctcctggactggtttaaaacggtcactgaaggaggacagaactgtaccgctctctttttggc

SEQ ID NO: 74946 - DNA, 100 bp, Homo sapiens
tgcaggagaaaattgctgcctttgatagctgtactttcacgaagaaattctttgttacaagtcagcccaaggccaaccccactgtcactctgttcccgcc

SEQ ID NO: 74947 - DNA, 75 bp, Homo sapiens
tcatcccgccttttgaggacggcactccccggagaaaatgatgcatcctgttgccagcagtaatccagctttctg

SEQ ID NO: 74948 - DNA, 75 bp, Homo sapiens
ttctgatgttccactgaaatcacaatggaaagtcttgacttgactgttaaagccttccatctgaagtatgatgaa

SEQ ID NO: 74949 - DNA, 74 bp, Homo sapiens
cgccagatcaacctggagctctacgcctcctacgtttacctgtccatgatggactctcgtcctgtcacccaggc

SEQ ID NO: 74950 - DNA, 100 bp, Homo sapiens
agaaaatccaagtccggctagtacgcgaattggagaaaaagttcagtgggaagcatgtcgtctttatcgctcagcctgcctcagcctcccaaagtgctgg

SEQ ID NO: 74951 - DNA, 100 bp, Homo sapiens
tgctcagccgggatacctatgagtgcacctgtcaagtcgggtttacaggttgggggccgtcccgctcctaaggcaggaagatggtggccgcaaagaagac

SEQ ID NO: 74952 - DNA, 96 bp, Homo sapiens
agcgagtgcctgagcaacatccgcgagttcctgcgcggctgcggggcttccctgcggctggagaatgcaggctcaacagtaccagcagcagcgtcg

SEQ ID NO: 74953 - DNA, 95 bp, Homo sapiens
tagcacagaaaatctctgtcagaactgatgggaatttcttagccataggctcacatgacaactgcatctatatatatggcgttagtgacaacggg

SEQ ID NO: 74954 - DNA, 74 bp, Homo sapiens
ttgtggatgccgttaactctgcctttacaggccgacggtcgcaaggtcctacggtcaagcatccgggagtttct

SEQ ID NO: 74955 - DNA, 75 bp, Homo sapiens
gaagaagggaaggcgcgagtgaggaaaggaggtactgtaggctacagcatgctggccatagggattggaaccctg

SEQ ID NO: 74956 - DNA, 83 bp, Homo sapiens
agaggaaagcgatggaggagctgagcgctgatgagattcgggaactggagcctctcctctgtcacagtgacaatccatctcag

SEQ ID NO: 74957 - DNA, 96 bp, Homo sapiens
atgcagattccagaaaaattacagcacatctcagtgaatttgcaagtggttccatcaggcttgttcatccccagcatggccattggagcgatcgca

SEQ ID NO: 74958 - DNA, 90 bp, Homo sapiens
acctgttttctgggagcttcgaagcctccatccctgtgagatcactgccctgagccaatccctacagcccttacggaagctgccttttag

SEQ ID NO: 74959 - DNA, 74 bp, Homo sapiens
gcctgttgcaggggacccctggctgaaagacaaaaattttgctgatggccgccaaagttggagttcgtatgttg

SEQ ID NO: 74960 - DNA, 87 bp, Homo sapiens
ggggagttgcggagcccgcccgccggcagcgccgctccccagggagggagtccgcagcctgagaacactctgctccagccaaggtgg

SEQ ID NO: 74961 - DNA, 51 bp, Homo sapiens
ttttcacggccatagcttccaatacaaggttcaaaccttgtactactcagc

SEQ ID NO: 74962 - DNA, 82 bp, Homo sapiens
tgagctcggccggcaaccgagggacccgcgtccaggatgccgaggaatgtgacagggctgggagtgtggccacctgccaggc

SEQ ID NO: 74963 - DNA, 83 bp, Homo sapiens
cgagggccagctgacggagatggtgcagaagatggaggaggtgagaagccctaccactgcaactgggacggctgcggctggaa

SEQ ID NO: 74964 - DNA, 74 bp, Homo sapiens
tgcgttacaagctttgtctccttcgacttggagtctttgtccaggacggttcatctgcagaagccagcggacgc

SEQ ID NO: 74965 - DNA, 75 bp, Homo sapiens
tggtgatgaacttagcagcagctccactgaacagataagggtggttgctgtatatggaactttatctgatttgct

SEQ ID NO: 74966 - DNA, 100 bp, Homo sapiens
ctgaggctcattttgcagttgttgaaattgtccccgcagttttcaatcatgccctccagaatacccatcatatagcccctgaggtggcatggtgatgtct

SEQ ID NO: 74967 - DNA, 83 bp, Homo sapiens
ccagctctgcagccacatactatccgtttgttcaggaaccaccagtgacagaagagaaaaggaacagttccgtaagctcttta

SEQ ID NO: 74968 - DNA, 100 bp, Homo sapiens
atttgcaacttatatcgccagtccagcagctaaggatattttgtgcaggccagaagcggactcctagaagaggggagcagcaaggatggaatgacagccg

SEQ ID NO: 74969 - DNA, 90 bp, Homo sapiens
atgccattcaaggaattgatgatgatgctacaagccagcttgcaagaaattggggatcggctgaccaactgactgaagagcagattgcag

SEQ ID NO: 74970 - DNA, 82 bp, Homo sapiens
gccctcagctccgagtccagggcgagcctgacatttaccccggtaactgctgggcatttaaaggctcccaggggtacctggt

SEQ ID NO: 74971 - DNA, 101 bp, Homo sapiens
cttcagccaccctcgaccctgaactggaataattaggtgcaatggatgagcttcatagtctggatccaagaaggcaagagttattggaagctagatttact

SEQ ID NO: 74972 - DNA, 98 bp, Homo sapiens
tcatcatcccgtcagagctgaggtacttcgtgaagcgcctggccggagcaaccctcctcatctttgctaataagcaggacctgcctggagcactgtcc

SEQ ID NO: 74973 - DNA, 100 bp, Homo sapiens
caacgttcaaccatgctcggtcatctgtggcagtatatcaaggttcaaaaaggcatttgaatctgagccaacactacagtcaggaattaattatgcggtc

SEQ ID NO: 74974 - DNA, 82 bp, Homo sapiens
cctgacgcccccctcccgcccggaaagctgcccagccaccagcaaccccccaggaagctcttcgtgggcggtcttgactgga

SEQ ID NO: 74975 - DNA, 100 bp, Homo sapiens
cacgatagtgccaggcctatgttggaggaagacctggaagcgctcatagcccatttccagacactcgatgccaagaggactcagactgtggaacttccgt

SEQ ID NO: 74976 - DNA, 100 bp, Homo sapiens
agtacaagtgcctggtgatcaagtatgccaaagacactcgctacagcagcagcttctgcacacatgaccggttcctaggagaatgttaacagtccagacc

SEQ ID NO: 74977 - DNA, 75 bp, Homo sapiens
cgtgcgggacgcgggcgccaggaccggccgaacgcagagtcaccttcaggccattcagaggaggaaagagagggg

SEQ ID NO: 74978 - DNA, 111 bp, Homo sapiens
gacatcgacgaagccaaactttctgtcttctcaaccgtagatgctcctgtcgctccttcagacaaaggaagcagtcaattatagatttcttcaaaccagcttcaaaacaag

SEQ ID NO: 74979 - DNA, 82 bp, Homo sapiens
gtactccaactcttgtggtgccacatcgtactgatggatttgctgaagcaattcaaacctgtcactatggacaaagttcatt

SEQ ID NO: 74980 - DNA, 100 bp, Homo sapiens
cagattcgcagtggtcgcttcttctccttgggagcccacctagctgtcattgatgccctcatggctgcctttgccttcgagtggacaaagaccctgccag

SEQ ID NO: 74981 - DNA, 50 bp, Homo sapiens
tctttctcaacctcatcttctgggtgagaagccctaccactgcaactggg

SEQ ID NO: 74982 - DNA, 75 bp, Homo sapiens
ggagggtatggatatggatatggacgttccagagactataatggcagaattcaaagaagctttttcactatttga

SEQ ID NO: 74983 - DNA, 50 bp, Homo sapiens
gcggaagcccaggaaacacaggcagcggatggagtctcgcactgtcgccc

SEQ ID NO: 74984 - DNA, 83 bp, Homo sapiens
tttccagtctgatccttttgttggcagtcaagagcaatctgaatccaaatgcaaaggagtttgttcctggggtgaagtacgga

SEQ ID NO: 74985 - DNA, 75 bp, Homo sapiens
attctgacaatcacagttcaaggcagtgctaaagccacctactaaacaagcattgaggaagcagcaaacaaaggc

SEQ ID NO: 74986 - DNA, 100 bp, Homo sapiens
aaaaaatcaaggtatttggtcccggaacaaagcttatcattacaggtgctggagaatctggtaaaagcaccattgtgaagcagatgaggatcctgcatgt

SEQ ID NO: 74987 - DNA, 95 bp, Homo sapiens
atttaatttcggaatacattcgaggccctgtgctaagttagataacgaaggaggcccaacttcattcaataaggagcctgacggatttatcccag

SEQ ID NO: 74988 - DNA, 75 bp, Homo sapiens
ggccgagcaggaggcgccatcatgataagatttgtgaccaaatcagtgatgctgtccttgatgcccaccttcagc

SEQ ID NO: 74989 - DNA, 82 bp, Homo sapiens
gcagagaccgcggccggagtgggccgcttcaagaccaagagcaggccgggctctcgccatgggtcactgtcgcctctgccac

SEQ ID NO: 74990 - DNA, 74 bp, Homo sapiens
cgatgaagatgctactttagaattaagagttaaaactgtgaaatactttaaagttttgattacgaagatgcagg

SEQ ID NO: 74991 - DNA, 100 bp, Homo sapiens
ctcgatggcagcgacacaattgtctgtgacagtaacagtacttgggatcccccagttccaaagtgtcttaaagggccggatcgtggcacccagaggctgc

SEQ ID NO: 74992 - DNA, 96 bp, Homo sapiens
ctccattaagaaaatgaaacaagcctttgctgaattggagagctgatggagtggtttaataattataaaagatctcttgctacttatatgaggtca

SEQ ID NO: 74993 - DNA, 83 bp, Homo sapiens
gtgaagatggcggcagccgaggccgcgaactgcatcatggagagagcgcctgctcgctgtgcccccgggttatgacgaccccc

SEQ ID NO: 74994 - DNA, 100 bp, Homo sapiens
gagctgaaaccagtgggtagatgtcgttctgaaacgcaggtggttctgctgggcatggacatcctgtccgccctggtgacccggctgcaggatcggttca

SEQ ID NO: 74995 - DNA, 75 bp, Homo sapiens
agaggccgtgcgggacgcgggcgccaggaccggccgaacgcagagttggtgtaatacggtgcccagtatgccgcc

SEQ ID NO: 74996 - DNA, 82 bp, Homo sapiens
gtgaagagctgtcctgaccaagaggaccagactttgttaatgaagattaagacatcagttatttgggcaactccgaatgttt

SEQ ID NO: 74997 - DNA, 100 bp, Homo sapiens
cgggaaatgagaagacggctcgagcccgcggttcccttcaaaaagcggctgcaagatctggaggtgcgggagaaggagtcggccacgttcctatgtgagg

SEQ ID NO: 74998 - DNA, 118 bp, Homo sapiens
tatgaagaagtgctacataatttggaatttgccaaggagcttcaaaaaaccttttctgggttgagcctagataaccgagctgaagctgccatggaattcttacaagaattaaatagcg

SEQ ID NO: 74999 - DNA, 74 bp, Homo sapiens
tcatgaagcatgtcggccaccagcgtggacacccaggtgtattgtacgagcattgaaagatccaaatgcatttc

SEQ ID NO: 75000 - DNA, 75 bp, Homo sapiens
cccaggcagcgtgtgtcggtcgcctagtctggagaactagtcctcgactcacgggaagtaccactgcccagtgct

SEQ ID NO: 75001 - DNA, 97 bp, Homo sapiens
accctctacgaaggcggctacttcaagcggttcaagctctacgttcgtgacatcaaacctcctgttgggccatttccgagaactcccatcagtttct

SEQ ID NO: 75002 - DNA, 100 bp, Homo sapiens
ttgcggacagtatgaggcaagcgcagggggacggggaccagcagctgtcgccgccgctctcagactcagcccacctgcacccaggtgaaataaacagctt

SEQ ID NO: 75003 - DNA, 108 bp, Homo sapiens
ctcgaatcattctttgtacagaaattgaaaggcttcaaagctagcagggcactgtaaattggtctgttgatgacattgtcaaaggcataaatagcagcaatgtggaaa

SEQ ID NO: 75004 - DNA, 88 bp, Homo sapiens
caagcagtacctacgctatgttgctagtgcggtctttggcgttatcggcagccaaaaagaaaccaagcagcaacagcccttggaaaga

SEQ ID NO: 75005 - DNA, 75 bp, Homo sapiens
cgcacgggcgccacgcgcggcgcatcacggtgcgcgtggccggggaacgcccttttgcttgtgactggcagggct

SEQ ID NO: 75006 - DNA, 100 bp, Homo sapiens
aacctgagaacttcctgatctctctcgctgtgagacatgtctgagactcctgctcagtgtagcattaagagaaagcatgggattatggcaaccacagaat

SEQ ID NO: 75007 - DNA, 100 bp, Homo sapiens
aatattatggatcctatctgaagaaggacagaataacgggctcccagattcacaagccccaccaagaggatcaccccaggaacgcttggaggctgaggag

SEQ ID NO: 75008 - DNA, 74 bp, Homo sapiens
gggcggaagaaaatacaaatcacacgcataatggatgaaaggaaccgacagggaatgactctactaatgatggg

SEQ ID NO: 75009 - DNA, 75 bp, Homo sapiens
ttcagcagccccgagcgggcgcgcatggtcaccctgcacggctacattgagatctgcgctcctcagaccaccggc

SEQ ID NO: 75010 - DNA, 101 bp, Homo sapiens
gtagctgccctttccgtttccagggttccgaccagctgtcacgggaagtctttttaggataaacgtaggcctgcgtggcctggtggctggtggcataattg

SEQ ID NO: 75011 - DNA, 75 bp, Homo sapiens
gctattagagattgtgaagaagaatttcgatctccgccctggggtcattgtcagccatcagagggttctcgcttc

SEQ ID NO: 75012 - DNA, 101 bp, Homo sapiens
gaaatatgtcatgtatcccatagctgtgagtggcgatcacgagaacaataaggagttcatgatcaagtgttgcccacaccaaatgcttcatccagagtcat

SEQ ID NO: 75013 - DNA, 75 bp, Homo sapiens
cggagtaacttggccaggctggccccgagcggaactggagaaagctgagggatagtaatgatgacactgaagatg

SEQ ID NO: 75014 - DNA, 88 bp, Homo sapiens
caaccgctccagctatgacgtcttccagctggagttcaacgatggcgcctacaacatcaaagctcaccatggatgatgatatcgccgc

SEQ ID NO: 75015 - DNA, 100 bp, Homo sapiens
ctttatgaaccagtgtatcccaagactcagcccaaaaccatgtttgcccaagttgaatctgatgatgaggaagcaaagaatgagccagaatggaaaaaac

SEQ ID NO: 75016 - DNA, 82 bp, Homo sapiens
gctcggcccgcgggggagccccgggagccgcacgcggagcgtgctttggacaccatgaattttgatgttataaagggcaagc

SEQ ID NO: 75017 - DNA, 75 bp, Homo sapiens
acccacctagaagaggtgatgatagctttggagacagtggacccaagtggagagattgtggaactggcgaaaggt

SEQ ID NO: 75018 - DNA, 100 bp, Homo sapiens
tcacagcattgaggaaggactgaagatacaggccatgaacagcttttcaggatgtccagcaaagaatcctgtgggaaaaaagagacatctcagaggaaag

SEQ ID NO: 75019 - DNA, 98 bp, Homo sapiens
ctgcagcctgccagctgttcaagtggtctgcaagaagaatctggacagtaccactgtggccgtgcatggtgaggagatttactgcaagtcctgctacg

SEQ ID NO: 75020 - DNA, 75 bp, Homo sapiens
aatttatggcattcagaacagccctggccaacgtcaacattgggagcctcatctgcaatgtaggggccggtggac

SEQ ID NO: 75021 - DNA, 100 bp, Homo sapiens
ctgacatgcaagaacagggtccagaaagacctggtggaagaggaggctgaggaggctggagtggctttgagaagcacccagagcacactgcaagcaggtc

SEQ ID NO: 75022 - DNA, 87 bp, Homo sapiens
aggtggcacagatgaatgccgggcagaggagcctgcagagctcctgaaattattcttgggttaccattttgtgaagctattgatatg

SEQ ID NO: 75023 - DNA, 100 bp, Homo sapiens
aaacaaaatgtcaacaaattgatggatgggtgttcctgataaagaagggttaccaagacgtcgacacctccctgcagagtgctgtcatcaccaaagtcaa

SEQ ID NO: 75024 - DNA, 90 bp, Homo sapiens
ccggatgggcgctgcgggccggggcgcggaccgcggagcggccacaaagatcattccactcagcctgggacgatggggaggaaaaaaatc

SEQ ID NO: 75025 - DNA, 75 bp, Homo sapiens
aacagtgcaaggaagcctggttcagcaggtggccctaaggttggagagtcagcgtgggagaaattgtaacgagaa

SEQ ID NO: 75026 - DNA, 100 bp, Homo sapiens
gcgaggagtcagaaactcagccactggttgccttggtaggcaataaaaatggagactgagggcagaggagagtgcagcttatccaagatctcaaggctag

SEQ ID NO: 75027 - DNA, 90 bp, Homo sapiens
ggagggtggaacgcgggcgcctgaaggagttgttgtctcggcagcgcccgcggagacgtgaagagcatttaaatcaaacggtattgagat

SEQ ID NO: 75028 - DNA, 50 bp, Homo sapiens
ggtggcgttgctgctgctgctctcaggccctcgggaccaaggatcacgtc

SEQ ID NO: 75029 - DNA, 100 bp, Homo sapiens
gtggtcagagcgttactggaaaattggagtatggatgtgtccaacagccaaaaactcaagaaagtaaattgaaaattggtggtgtgtcttcagttaatga

SEQ ID NO: 75030 - DNA, 95 bp, Homo sapiens
gcttctcctccgggcggcattccagagtctgctggacgcccaggcggacgaggccgtgttaggctgacaaaccaagaggatttgccagaggtctt

SEQ ID NO: 75031 - DNA, 75 bp, Homo sapiens
ctgaggacacacccaggaaaagactcaggacggacaagcacagtcttcggaaggcaaagggtggaggttatgaaa

SEQ ID NO: 75032 - DNA, 82 bp, Homo sapiens
cagctttaaatagtggaggcggaaaactggatacacgtctgtttaactacgcaaaaggtaatgctggcatggcttactggga

SEQ ID NO: 75033 - DNA, 82 bp, Homo sapiens
cgggtctgtgctggactgcttcagaagcagcgctatgcaaacaagcactgaagaggaatcggagtagaatgcgtcagttgga

SEQ ID NO: 75034 - DNA, 95 bp, Homo sapiens
gtgacagcaatcagctggcctggtttgatactgacctgtaaatcatcctttaggaggaataaacatggtgtgtctcgaaagaagattgctcagat

SEQ ID NO: 75035 - DNA, 100 bp, Homo sapiens
gttttaaagcaacctataaacatcagctctcaacaggtggggagcattaagcgggaaatgaccttcacatttcagtcagaggacttaaaacgtgactgtg

SEQ ID NO: 75036 - DNA, 96 bp, Homo sapiens
cgtttgcacctccgtggtctggggcttcgcgctcttcttcttcttccagggactcagcacctggcagctatcatggtgaacttacttcagattgtg

SEQ ID NO: 75037 - DNA, 84 bp, Homo sapiens
cgtggaggagctgtgcagccgcgaggaggcgcgggaggtgttcgagaacgaccccgagacgtgcctccggagccagcgtggtgg

SEQ ID NO: 75038 - DNA, 100 bp, Homo sapiens
tatgcctacccctacagctactactatcccatgaggctcggggtggtctgggggcccctccgctgcagtctgcccgatccctgccgggccccgccccctg

SEQ ID NO: 75039 - DNA, 98 bp, Homo sapiens
gacggggaatcaagagacccggtttctaatccctgctctgtcactaacaagctgcgtgatcttcgagatcaactgtggcaaccctccagaaatgcggc

SEQ ID NO: 75040 - DNA, 101 bp, Homo sapiens
ggagaagccctcgagcatccccacagtctcccttgagaatgttttgctggatgtcaaggagctccagaggggaatggacttgaccaagagagagtacacca

SEQ ID NO: 75041 - DNA, 83 bp, Homo sapiens
gtttctgtgtgatttacctcaactggatagagtactgctcttcccgaagagcaaaggtatcatgaactgatcactaaatatgg

SEQ ID NO: 75042 - DNA, 75 bp, Homo sapiens
ctgccagtcccctgccccgggcaaagcccatctggtccgccgagcaggatttcaaatatgcgtgcattagagaat

SEQ ID NO: 75043 - DNA, 99 bp, Homo sapiens
aagtgtggagaggttccttcaggaggatcaggcgggcgctaatattgacacctgctcagaagaccagaggaccccgttgatggaagcagccgaaaacaa

SEQ ID NO: 75044 - DNA, 144 bp, Homo sapiens
gaaagctacgctatgtggcgaatatcttcccttacaagggttatatatggaattatggtaccctccctcagtttgcagctcaccttgtgaagatgaaatatccaagaatctgtattctagatggtggcattaataaaataaagc

SEQ ID NO: 75045 - DNA, 100 bp, Homo sapiens
atgctgccctgtggtggggttggggcagtttctatggagctttcgcctacccggagaggcccagaaaattgaccggatgatggaggccttcgcccagcga

SEQ ID NO: 75046 - DNA, 100 bp, Homo sapiens
gagaggcaccgggatcgtgaccgagaccgtgaccgagagcgtgaccgagagcgcgaatatcgtcatcgttagaagcccctcatatggaaaatttgaaatg

SEQ ID NO: 75047 - DNA, 98 bp, Homo sapiens
gggaattgctgaattagaactgcagaggttcctctacagcaagggaggcatgcatctccccatgtgctatgatgctggctctggtgtacattgaacgg

SEQ ID NO: 75048 - DNA, 98 bp, Homo sapiens
aggagagtccggccgcgacaggacggacatgtattcctctgagaaaccttggacagcagattttggtttaatatctgattgggacaacattcagaccc

SEQ ID NO: 75049 - DNA, 90 bp, Homo sapiens
ccgcagtgggtcccggacaaggaggaatggtcctcgtccgaagtgagaatgggcagttgttaatgattcctcagcaggccttggcccaga

SEQ ID NO: 75050 - DNA, 100 bp, Homo sapiens
ccccctggatcttcacacagctgcttccattggccagtatgaagtggtgaaggagtgtgtgcagcggttttgcggctagttggctattcaagaaacctcg

SEQ ID NO: 75051 - DNA, 95 bp, Homo sapiens
ggggatgaagcgagactgcgggggtgctgcggccgtcctgggggccttcagagccgcaatcaagcagctctccagtgaagaagccaagtcttcta

SEQ ID NO: 75052 - DNA, 100 bp, Homo sapiens
gtatgctgtacgaacgccggatactcatcatttgcagcaaactcagcactgcaatggtcgagacagttaacaacctccttcagccacaagctttgaatgc

SEQ ID NO: 75053 - DNA, 90 bp, Homo sapiens
atcatcaagccagacaacttctggcagaaacagaggactaattttggcagttctaaatttgaatttgagagcaatggtggaacaaagcgg

SEQ ID NO: 75054 - DNA, 100 bp, Homo sapiens
cttcctgctggccgtgctgctgcaggttatacattggctcttcaaagacgttcacctcatcagagaaatccctgactcctttgcagtggtgtagacatgt

SEQ ID NO: 75055 - DNA, 90 bp, Homo sapiens
atcagattgactgagattgtggagatgttaatctctgtggccctaggccaggtgttatccctccttatttgtggaattggcttgactagc

SEQ ID NO: 75056 - DNA, 88 bp, Homo sapiens
cagaacggacaggggccgcgccgctgccgctgctgctggtgttagcgctcagtcaaggtcacgactgctgaatatgagacgatctgca

SEQ ID NO: 75057 - DNA, 100 bp, Homo sapiens
tcggattctcgtagctgtgccggaatgaactctggaagcccagccagggacaatgcaccttcacagagattctgcactaatctgagtgaaggtctaaggt

SEQ ID NO: 75058 - DNA, 100 bp, Homo sapiens
tggacatggagtggctttacggggccagtgaaagcagcaacatggaggtggacatcggctacataccccagcttcatcgtctttccgatcttccgacaag

SEQ ID NO: 75059 - DNA, 51 bp, Homo sapiens
tgaatatagagcatctgaaattgattcgcctttgccagtctcatctcgtgt

SEQ ID NO: 75060 - DNA, 83 bp, Homo sapiens
taattatctccactttggagagcccaagtcttgtgtaatcgctcaaattcctcttctcctgttgacaaacttaatcagcagcc

SEQ ID NO: 75061 - DNA, 120 bp, Homo sapiens
gcttcttgcagcagtttctgaagttgcagaaggcacagaccagcacagacaaagatcattccactcagcctgggacgatggggaggaaaaaaatccagatctcccgcatcctggaccaaa

SEQ ID NO: 75062 - DNA, 100 bp, Homo sapiens
ggacgacctcggcgaggtgcccaccatcgagtccctgataggatggtgccatgacaatggtgtgaactacaagattggagagaagtgggaccgtcaggga

SEQ ID NO: 75063 - DNA, 75 bp, Homo sapiens
tcaaccggaacaaactccggatcaacatcggcaaagtagacaagggcgtggtccccctggcagggacaaatggcg

SEQ ID NO: 75064 - DNA, 83 bp, Homo sapiens
ctgaagattgcttctcttctctcctccaagaataccctctaccatctgctttggtcagggtgccgctcgaggatttaaaagca

SEQ ID NO: 75065 - DNA, 100 bp, Homo sapiens
cgaggcagctgtactaggactgggaacggcccccaaatacatcaagatgtttgtactggatgaagctgacgaaatgttaagccgtggattcaaggaccag

SEQ ID NO: 75066 - DNA, 90 bp, Homo sapiens
gacagcttccctgagggaatccacacttcaattggggagcagggtggtcaagacgttaaaaagaaagttcacctaagtgaaaaaattcac

SEQ ID NO: 75067 - DNA, 90 bp, Homo sapiens
gaaacacaaagccggctacgcgctgcgagacttggagatcacggtcccaattcggcactcacagcacctgcctgcaaaagtggagtttgg

SEQ ID NO: 75068 - DNA, 75 bp, Homo sapiens
ctcgagcaaccagaaccggagcatggaggcgcacaacatcctcaggcttctcgtcagtgcctcgcaggatggtaa

SEQ ID NO: 75069 - DNA, 101 bp, Homo sapiens
cccgcgtccctgagccaggccagcgccgacctggaggatgaagatttgataaagtggaaggcactgtttgaggaagtccctgagttactcactgaggcaga

SEQ ID NO: 75070 - DNA, 155 bp, Homo sapiens
cggtgaagccctgagggatttcatcgctgaggtggatggagaagcagctgggggccttggctgtaaggacccctaaggattcaccaaggcctgaaaagagggagaccaagtgcccgatccctggatgtgatggcacgggacacgtgacagggctc

SEQ ID NO: 75071 - DNA, 90 bp, Homo sapiens
cagcccggcctacctcttcctctggcccgaagccttcctttatcgctttcaggtccagcaccatgtgctaggtcactcccagcgcgaggc

SEQ ID NO: 75072 - DNA, 58 bp, Homo sapiens
ccccgcccgcgccggaagagccacgccgacacagagattgactggaaggcctacatgg

SEQ ID NO: 75073 - DNA, 75 bp, Homo sapiens
cggaaggggtcccgaagccccctgcaggaactctacaacccaatccagccaccagctgaacaggccaaagccaga

SEQ ID NO: 75074 - DNA, 100 bp, Homo sapiens
atttgaatttgctagtaacgtcatggaggatgaacgacaggatatgacagcgcgtgatctgctacagcagagatacacccttccaaatggagacactgcc

SEQ ID NO: 75075 - DNA, 75 bp, Homo sapiens
caagagaggcatcctccttgaagtatttggctgaggagttttcaatcccagacgccaggaaagcatgtgcagatg

SEQ ID NO: 75076 - DNA, 82 bp, Homo sapiens
cttggcgaagcgctgcgctcgcgcccggatccctcagaagtccattggaatattaagcccaggagttgctttggggatggct

SEQ ID NO: 75077 - DNA, 82 bp, Homo sapiens
ggatgtacagcgttgaccgtgtgtctggaggccccgtgtgggccgcggcccggccctcaccatggagtccatgttcgaggac

SEQ ID NO: 75078 - DNA, 75 bp, Homo sapiens
cttccagcctgatgctaccaaaggtggaaagtcctgaagaaatccagtgggcaaagccaaagctaattgagccac

SEQ ID NO: 75079 - DNA, 100 bp, Homo sapiens
cgcacgtctgccgctgccaccggcgcgcccgagttcgagaacttgtcttggacaattgcaaatcaaatgatggaaaaattgagggcttaacagctgaatt

SEQ ID NO: 75080 - DNA, 98 bp, Homo sapiens
ctgtactgtgtctgaaattttccatttttgttgggtgctttttatatatgcaaaagcttttctccatggaatccttctgtacatgatgaagccagaga

SEQ ID NO: 75081 - DNA, 82 bp, Homo sapiens
cttcgcttggtgtcctcctggcctcagcaacctgacaattctgtcgtgtcccgtcccattgttaggcatgcggcaactgctc

SEQ ID NO: 75082 - DNA, 75 bp, Homo sapiens
gggccccggacgccgcgcggaaaaggaaacttggatttaactggccagaagcaggtattcaaagcagagaacaat

SEQ ID NO: 75083 - DNA, 100 bp, Homo sapiens
ctttcatagcaagtgtgatcggcacccgagggcttgcggctgaaggggccgcatcagccacgcgggctccgtgaagttgtctgtctacatgaccctgtac

SEQ ID NO: 75084 - DNA, 88 bp, Homo sapiens
tggcatttcagtcactggtttgcagagtccaggaatctctgaaggaagaagatgaatcagatgatgataatatgtaacatttactcca

SEQ ID NO: 75085 - DNA, 98 bp, Homo sapiens
cacgtttaatttttctaaagagtcttgttatttcttctttgagaaaaacctgaaagatgtctcagatcaggagcgtctgggcaagcagctcaagttac

SEQ ID NO: 75086 - DNA, 82 bp, Homo sapiens
gcgaggagcccgcgggcggccggtcgggcggggcggcggcgctgacagacctgcctagagctggaacgttacctccagagcg

SEQ ID NO: 75087 - DNA, 100 bp, Homo sapiens
ccagcctgccatgggatgtggagtaagtgggcaccacctttggagagaagccgactggccacaacctctttttgtggtaactataactacccaatattgc

SEQ ID NO: 75088 - DNA, 120 bp, Homo sapiens
cggctgcaatatggcggaggcggaaggggaaagcctggagtcctggctcaatgttgtgactgtgacagactcactggggtttgtacatgctggggaggagccttcctttcaggggtgacc

SEQ ID NO: 75089 - DNA, 100 bp, Homo sapiens
aagaagcccagcttttccatcctggagatctacaggatttatcaaatcgagtcactgtcaagtactaccatggcatggaatatgagacggacctcactcc

SEQ ID NO: 75090 - DNA, 75 bp, Homo sapiens
aatatcctcggaagagcgctcccaggagaaacaagaaagtcgagatggtcgtgtggacagctggcgaaacttcca

SEQ ID NO: 75091 - DNA, 75 bp, Homo sapiens
gaagacattcagcatgacctcacatacaacctccgagaaggtcatgagagtgataccagcatctcagacatgtcg

SEQ ID NO: 75092 - DNA, 127 bp, Homo sapiens
ctcgcgggaagacttcgagtgggtctacaccgaccagccgcacgccgaccggcgccgggagatcctgggtttgtaaaagaatggacttggtctgccagagaatgttgaatcagggatttctgaaagt

SEQ ID NO: 75093 - DNA, 82 bp, Homo sapiens
ttccgttgccggtgccggcctagcgtcctggaattacttcaatcaaccgagcctcttgaagccattcttacagatgatgaac

SEQ ID NO: 75094 - DNA, 91 bp, Homo sapiens
gaatctggattgtcacctttgctgcaaaaaattacggtctttccaaggttgtaccacctgattccagatggtgaaattaccagcatcaaga

SEQ ID NO: 75095 - DNA, 75 bp, Homo sapiens
ctttgcggactctcaaccagctgccaagccagcccttcactggcttgggcactgtttaaaggaaagttccgagaa

SEQ ID NO: 75096 - DNA, 100 bp, Homo sapiens
aaacaacaaaaggaagaaaaaacaaaacaagaagcttatgcccaaaacagagcaagggcaaaagaattccataaggtgaattttgaagtcttcatcagta

SEQ ID NO: 75097 - DNA, 119 bp, Homo sapiens
ctcgaggggctcagttgggtggactacggggagcgcgccgagctggatgactcggacggttcgtgctggccgtgggcagcgccgtctttgatgccatgttcaacgggggaatggccaca

SEQ ID NO: 75098 - DNA, 55 bp, Homo sapiens
cctgggaggcggaggttgtggtgagccaagcctgcctcagcctcccaaagtgctg

SEQ ID NO: 75099 - DNA, 75 bp, Homo sapiens
gacccccaggagtactgagtgaacaagcaaggtgaaagaactcttttcttctttgggagtcgaatgtaatgtctt

SEQ ID NO: 75100 - DNA, 97 bp, Homo sapiens
tggatcgctgtgatcgtcacttgatggactcaccctgtcacccaggttggactgcactggcctcaacctcctgagttcaagtgatcgtcccacctca

SEQ ID NO: 75101 - DNA, 74 bp, Homo sapiens
gctgcggcaaggacgagccggggcgctgaaggttcctggtagagttacacagttgtgccgccagtatagcgaca

SEQ ID NO: 75102 - DNA, 83 bp, Homo sapiens
tggaaaactgggtcgagcggtttcttttggctcacaattatcctagagtgaggacttaataagacctggaagtttgttgaagg

SEQ ID NO: 75103 - DNA, 100 bp, Homo sapiens
gcgacagcgggtagcacaggcctttcgggagggagagaatacccagccatctgtgagaaagacacactgcagtggaaggaaacacaaagagaatgtgaaa

SEQ ID NO: 75104 - DNA, 101 bp, Homo sapiens
ccatgtcgggttattcgagtgaccgagaccgcggccgggaccgagggattctcagtaagttaagtcaggaaatcaacaagaacgaagagaggaggagcatc

SEQ ID NO: 75105 - DNA, 100 bp, Homo sapiens
tccagtctctccagacactgggtctgactatttctgaacaacaagcagagttgattcttcaaagctataaggaagaccagatggatgagaaactaatgga

SEQ ID NO: 75106 - DNA, 74 bp, Homo sapiens
cattcaagtgaagcaaaagcctttcatgattattgtactaatggtcacttgatgtgcgctggctgttttatcca

SEQ ID NO: 75107 - DNA, 83 bp, Homo sapiens
cctcctactccggcagctcccggcggagagcggcagacggcagcctaggtgagaagccctaccactgcaactgggacggctgc

SEQ ID NO: 75108 - DNA, 100 bp, Homo sapiens
cacagcttctgtcctactcgatgtgcagcccaagtcaagatcgggtggtctccgtttccgcagtaatctcaggggcgatataatcaatgaggtggtccta

SEQ ID NO: 75109 - DNA, 118 bp, Homo sapiens
ggacacggccaccgcctcagcgggagaggagtctccaccaggactgaccgctgccgcccagcacgtccaggggccacctacagatgctcctgcagtggacacagcagaacaagtctat

SEQ ID NO: 75110 - DNA, 96 bp, Homo sapiens
gaggagactaacaattcctgttttcgccaggtgtcatggagaaactccagctgggcccagagattctgcagcgggaaaatccaaggcttatttatg

SEQ ID NO: 75111 - DNA, 71 bp, Homo sapiens
cctgggcccgttcctggtcttctcccccagatattaacctggctgcagagccaaaagtgaaccgaggaaaa

SEQ ID NO: 75112 - DNA, 50 bp, Homo sapiens
ggaagacttgtaacctggagaagagcatcaaggcatgccatgggttgcct

SEQ ID NO: 75113 - DNA, 100 bp, Homo sapiens
ggaacttcctgtggttcgtgagcatggacctggtgcagcgatcaccagaatataccaattgtcggtatctatgcaaactttgcttaattcacattgaaaa

SEQ ID NO: 75114 - DNA, 98 bp, Homo sapiens
tggaaaccctgcattttgggaaactcgactttggagaaaccaccgtgctggaccgcttttacaatgcagctgcaagagaaatagtgtggttagaaaga

SEQ ID NO: 75115 - DNA, 100 bp, Homo sapiens
ctggcgacccggtggactcggcccgcggcggcgcgctcacccgccccgttcagtgccctgcaggagtcattaaatcaaaacttcatgctgatcatcaccc

SEQ ID NO: 75116 - DNA, 75 bp, Homo sapiens
cagtatatacatcaagtcactgagccatcactggtgcaagctatatttaacggagatcctgatgaagttcgagca

SEQ ID NO: 75117 - DNA, 88 bp, Homo sapiens
gagggcatggatatctctactcgctccaaaggtcaaaatcctagaccctgatggtgtgctggcggaggccttggccatgttcaggaag

SEQ ID NO: 75118 - DNA, 78 bp, Homo sapiens
tgtctccttagctgctcacatatggatactttcacagttcaggactcctcctattttgaggacttctccaacatctcc

SEQ ID NO: 75119 - DNA, 75 bp, Homo sapiens
gtcctcatgtggggggtaaaccactcgtttgcctgagaatacagatcaacccacagaacaaagcggatttccaag

SEQ ID NO: 75120 - DNA, 73 bp, Homo sapiens
tgttgttgcctccatgcgccaatccaaaccgaaagccagaagggcaaatttattcggatcaactttgatgtaa

SEQ ID NO: 75121 - DNA, 83 bp, Homo sapiens
caaatatttgcggtttcagcctcaacccagaggaatcgttactctttcagttcctctgtgacgagggtgcaggtatctctggg

SEQ ID NO: 75122 - DNA, 75 bp, Homo sapiens
ggcttcaaagagaaaaggcaacatcctgtcacaggccatgctctggcaaaaacttctaaggacatatggaattgg

SEQ ID NO: 75123 - DNA, 100 bp, Homo sapiens
atcttgaatcatgaagctactaaccagagccggctctttctcgaagttcaccatgtctattctcaagatccatgccagggagatctttgactctcgcggg

SEQ ID NO: 75124 - DNA, 82 bp, Homo sapiens
cggagatggtgcagaagatggaggagtttcagaagaggagccccgccgaggcatgagggccgtgctccccccagaggaaggg

SEQ ID NO: 75125 - DNA, 100 bp, Homo sapiens
tgggttaaccaaagtcttgccacaagacaaagaatactataaagtaaaagaacctggtgaaagtcccatattctggatagaatttttgcggcatttgaag

SEQ ID NO: 75126 - DNA, 101 bp, Homo sapiens
tgaaatctaatgaaccgaaactttgggtatcgtcagatcctggaaaaagccattcagttatctggagcagaacaactagaagctttgaaagcttttgtgga

SEQ ID NO: 75127 - DNA, 106 bp, Homo sapiens
gcccggtcccagagaggagagcgaggaggaagaggacgaggacgacgaggaggaggaggaggaggaaaaaggtcactctgtgagactgctgggtcagaaaaaggat

SEQ ID NO: 75128 - DNA, 74 bp, Homo sapiens
ccagaagtgcctggccatgggcatgaagcgggaagttgaaaacaccacacactgtgagtttgcctacctgcggg

SEQ ID NO: 75129 - DNA, 74 bp, Homo sapiens
ggaaggagccaggggggagcagggctcactccaggaccgtataatagacgctggccccaaaggaaactactctc

SEQ ID NO: 75130 - DNA, 75 bp, Homo sapiens
gtgaccctgcagctcctcaaagttaaacccatccagagtaatggctgcggccttacccaggaccctgggggagtt

SEQ ID NO: 75131 - DNA, 82 bp, Homo sapiens
tgcagcgcccaccctgcgccagagaccagataaagtgtcccgacccaggctaagcttgagcatggctgagcaggagcccaca

SEQ ID NO: 75132 - DNA, 90 bp, Homo sapiens
acaaagtcaagagacagcgattggacagaatttgtgaagcttcgtagatcagaagtcggttgtcggtctcactggactacaatcaaggtg

SEQ ID NO: 75133 - DNA, 75 bp, Homo sapiens
gatttgctccccctcgtgcagcaacccccacacccagcaccagttctcctgtgcctcctgttggctctctttgca

SEQ ID NO: 75134 - DNA, 90 bp, Homo sapiens
ctgcaatctggcctggctggtggccaaagcctttgggacaggactcctgagagcagcctccatgaggccctggaccagtgcatgaccgcc

SEQ ID NO: 75135 - DNA, 100 bp, Homo sapiens
gcggccgagaccgcgcagccggcggattgagaggatccagaatccagatctctggaatagctaccaggcaaagaaaaaaactatggatgccaagaatggc

SEQ ID NO: 75136 - DNA, 74 bp, Homo sapiens
gcgtctcggcccttgcctgcgcgcctaccaggctcgaccccaggtaattggtacgcctcagagaccggcagcgt

SEQ ID NO: 75137 - DNA, 100 bp, Homo sapiens
gggatcccagcctcaggcgtgcgcggacggtgtgcgggaccagttacagaagtggatccgcggtaatgtgagtgcatgtgcgaactctgttttcatattt

SEQ ID NO: 75138 - DNA, 106 bp, Homo sapiens
gaagactattcagaaaaagatgattgacgctacccgggaaaaggagaagatgaaggaagccaaggatgcccgctataccaatgggcacctcttcaccaccatttca

SEQ ID NO: 75139 - DNA, 95 bp, Homo sapiens
tgcagaggctgccataaacattttgaaagccaatgcaagtatttgactgacttccttttggtagtactgcgtgatgttgttcaggcttatcctga

SEQ ID NO: 75140 - DNA, 100 bp, Homo sapiens
tgacggcgtccaagacccacatcatgaagtcggcggatgtggagaagtaagcagaattttgtacagtttctgtacagcattcaaacgttcttccagacaa

SEQ ID NO: 75141 - DNA, 100 bp, Homo sapiens
ctgggcaagagtggctatgaatagacaacttcttgatcatatggattcatggacagctaaatttagaaatactggtattgctcgagttccacttgctgga

SEQ ID NO: 75142 - DNA, 100 bp, Homo sapiens
gcggcggcaagacctctccccctcggaggcggcgggcggaggcggcggacaatgcagatcttcgtgaagactctgactggtaagaccatcaccctcgagg

SEQ ID NO: 75143 - DNA, 96 bp, Homo sapiens
cccaatccccggctcttaccaaatgcagtgagacggtttaagcggaagcatcttactgccattgactgccagcatttggctcggagtcacttggct

SEQ ID NO: 75144 - DNA, 98 bp, Homo sapiens
caggctcgcctcgactccaaatggttgaaaacagatatacagaaatggcttcagacatacctggatctgtgacgttgcccgttgcccccatggcggcc

SEQ ID NO: 75145 - DNA, 50 bp, Homo sapiens
aacggagcagtatttcaatgtggaggcatcctgtacacgtcaaagaagag

SEQ ID NO: 75146 - DNA, 122 bp, Homo sapiens
ctttaagccaggtgtatatgcggtgtcagtcactggtcgcctgccccaagatgaacacagtatagagcatgaatttttttcatcttctctggcgacagttttccttctcatctgtgattccc

SEQ ID NO: 75147 - DNA, 88 bp, Homo sapiens
cgcgctccctgcccggcagcgactcggagtgatggctgggctgacaggtatgatgtgacagatggatatcagcgagaagctgttggtg

SEQ ID NO: 75148 - DNA, 90 bp, Homo sapiens
cggaggtcgataagctggaactgatgattttatttggagagaagcaagcatctttgcctctttggagtaggaaattcagacttgaaaaag

SEQ ID NO: 75149 - DNA, 111 bp, Homo sapiens
ggcgccgagaggccgtgcgggacgcgggcgccaggaccggccgaacgcagaggtgagaagccctaccactgcaactgggacggctgcggctggaagtttgcgcgctcagac

SEQ ID NO: 75150 - DNA, 100 bp, Homo sapiens
caccagccgggatgccgcccgcttccccatcatcgccagctgcacactcttggggctctacctctttttcaaatcaagtatatgaaggacgtctcaccgt

SEQ ID NO: 75151 - DNA, 100 bp, Homo sapiens
aaataggagtgaagctgttatcgcccagttctaccacagccctgcggacaacaagcggaagtctcaggggatccagaactgcagccagtccttgctgggc

SEQ ID NO: 75152 - DNA, 76 bp, Homo sapiens
agcagttgtctgatgaagagaagaaagaagatgctgatatgctacaacacggatgaacctggaggacgtggtgcag

SEQ ID NO: 75153 - DNA, 100 bp, Homo sapiens
tgggcacattgtgtcccatgttccttgcaagaagcagacactgtgttgctgaggacaacgtgattcgggccaaaatctccagtgagaaggtagttccggc

SEQ ID NO: 75154 - DNA, 75 bp, Homo sapiens
ctcagctctcggcgcacggcccaggttttaaaatcaaagatgggaaaatcggagaaaattgcccttccccatggc

SEQ ID NO: 75155 - DNA, 113 bp, Homo sapiens
ggactagttcgaactatgtggaggagatgtactgtgcttggctggaaaaccccaaaagtgtacataaggaagcagtcaattatagatttcttcaaaccagcttcaaaacaagg

SEQ ID NO: 75156 - DNA, 74 bp, Homo sapiens
ccggtgacatgtctgtgagctgcggaggctgcggcccccagaatgtttcatccatttgtggaccaaaagatgga

SEQ ID NO: 75157 - DNA, 74 bp, Homo sapiens
gctgaagatggctactctggagttgaggatcgatcatggggctttgtaagtgccccaagagaaaggtgaccaac

SEQ ID NO: 75158 - DNA, 100 bp, Homo sapiens
cgctgctgtgatgtgtaggaggaagagttcaggtgttaaagggggatattagacctgctattgaaactcatgaaatgttatatcaggtgattaaaaaaca

SEQ ID NO: 75159 - DNA, 83 bp, Homo sapiens
aggtgaatggcagcaaggtgggcccggacggcacaccctacgttaccgtgctcaagatctgggcggaccccggcaaatacgcc

SEQ ID NO: 75160 - DNA, 122 bp, Homo sapiens
ttccttgtggagccggagctgggcgcggattcgccgaggcaccgaggcactcagaggagaataccctctaccatctgctttggtcagggtgccgctcgaggatttaaaagcaacaagaagaa

SEQ ID NO: 75161 - DNA, 141 bp, Homo sapiens
acatacagcactttgtggagaaagtcgtcttccacttgcacgaaagctttcctaggccaaaaagagcattactctactgactggcagagacaggagaggtagatgtccacgcccacagaccctggtgcgatgccccaccca

SEQ ID NO: 75162 - DNA, 82 bp, Homo sapiens
cccttaatagtcatctacatagccctagggtggtcccaaccatgtgatgtctggagcataggatgcattcttattgaatact

SEQ ID NO: 75163 - DNA, 76 bp, Homo sapiens
gactacgcggccgcggagacctacctgcggcgtcggcagctgctgctccgagctcaccatggatgatgatatcgcc

SEQ ID NO: 75164 - DNA, 74 bp, Homo sapiens
cagaatttactacagcatgtgatttcaggttccagcaacagatagaaatgctttaagttcactctggggaaagc

SEQ ID NO: 75165 - DNA, 75 bp, Homo sapiens
tcttcgagtatttgtagaaggagcatgtcctttgcaacctgatcacacaaatgatgaaaaagaatagaactttct

SEQ ID NO: 75166 - DNA, 90 bp, Homo sapiens
ctggacacagcaatatctctgggctttcacaggttgttatcgtcaggagctgtgcaaactgatgtgtgaacggctaaaactcagcacgtg

SEQ ID NO: 75167 - DNA, 100 bp, Homo sapiens
aagtatttgacgaaaatagactggaaggcgcaatggcgaggaagttatctgtaatcttgatcctgacctttgccctctctgtcacaaatccccttcatga

SEQ ID NO: 75168 - DNA, 100 bp, Homo sapiens
atcacagtcacatacagagatggccgagtggcacagctggagcagacctgcctagagctggaacgttacctccagagcgagccctgctatgtttcagcct

SEQ ID NO: 75169 - DNA, 75 bp, Homo sapiens
caaggagaaggtgggcaccggaacgtggccgcagcgcttatctgtgaacttcgatgtttttgaagcaggcatttg

SEQ ID NO: 75170 - DNA, 82 bp, Homo sapiens
ctgaagcgactgagtccgcgatggagctttcaccaacaatcaccagtggtttacacaacattgcaaggagcattgaaactcg

SEQ ID NO: 75171 - DNA, 88 bp, Homo sapiens
tcgtgaccaccggcctggtattgggatggtccagacatcatctggtctccctgaacctgaaatcacaccatggatgattttgagcgtc

SEQ ID NO: 75172 - DNA, 101 bp, Homo sapiens
gagaaccgtcagtttgagccagatggccaaacgtaccaagaaagtcgggatcgtcggtaaatacgggacccgctatggggcctccctccggaaaatggtga

SEQ ID NO: 75173 - DNA, 88 bp, Homo sapiens
gcagacgttagcgtgagtgatcactctcaatcccggatcatgatgacaccgaacatgcaaggtattatcatggcgataggtaaatcca

SEQ ID NO: 75174 - DNA, 75 bp, Homo sapiens
tggctgggacaactacgagtttgacatcaatgaaggttttaaaatcaaagatgggaaaatcggagaaaattgccc

SEQ ID NO: 75175 - DNA, 100 bp, Homo sapiens
ggagcctcccctgcagcgactcggaagattcgaggcggcgggggacaagtcggcgccccagagcggacgagctctggggagaacaggacaaccatgcaca

SEQ ID NO: 75176 - DNA, 98 bp, Homo sapiens
cgacatcctgcggacctactcgggcgccttcgtctgcctggagattttttcagataactattatcgtgcagaaatgattgatgccctggccaactctg

SEQ ID NO: 75177 - DNA, 75 bp, Homo sapiens
cctaccagcactggtcatgtctaaaggtcatccctgagctgaacgggaagctcactggcatggccttccgtgtcc

SEQ ID NO: 75178 - DNA, 100 bp, Homo sapiens
agccgcgcggcttcctccagacctctcggcgcggtcatgcggaggaatccctttggtgtggacatctgctgccggaaggggtcccgaagccccctgcagg

SEQ ID NO: 75179 - DNA, 97 bp, Homo sapiens
agggaaaggatgacatatttttggacctgaaacagaaattctggaacacctatatggtgtcatggagaaactccagctgggcccagagattctgcag

SEQ ID NO: 75180 - DNA, 100 bp, Homo sapiens
cagtttactaaaacacatcatgaaggcctgttttgaagagaaggggaataagactgcatctgttcatatgagtgggacaattgatgactgtgagttggtg

SEQ ID NO: 75181 - DNA, 76 bp, Homo sapiens
gaccagtggccacctctgcagtgtcttccacaacctggcacacgtcacatggagatgggcgtcaagaagttacctc

SEQ ID NO: 75182 - DNA, 100 bp, Homo sapiens
ctctatcataagtcgccaaaaacaaatggggcaggaaattgggaatgaattggatgaacaaaatggtggctttctagaagatgaccatagaggaccttcc

SEQ ID NO: 75183 - DNA, 75 bp, Homo sapiens
atttggctttgcctttctggacacagaagtatttgtgacaggagtctccccaggacagtgctatcacccgggata

SEQ ID NO: 75184 - DNA, 73 bp, Homo sapiens
tccaggacagcatccaggcctcattggacagcattcgagccactgaggcggctcccagctgcgttggcgacat

SEQ ID NO: 75185 - DNA, 100 bp, Homo sapiens
agcccgggccctcggcagggaggatgacggagctgcagtcggcactgctactgcgaagacagctggcaggacaggaagatgtcacccaagcgcatagcta

SEQ ID NO: 75186 - DNA, 80 bp, Homo sapiens
gaattggtggaaaggttgaagttcaagagctcagaccctaaaggaattggctcgggaaaaggtaatgcgagaagttaaag

SEQ ID NO: 75187 - DNA, 100 bp, Homo sapiens
tagaaaacggcgagagtgggcgagaacgtccactgcgggccggcgaaagctgaatcccgtcacggggctgctgtcagccagccatgagcagaaggatgcc

SEQ ID NO: 75188 - DNA, 98 bp, Homo sapiens
ctcagcccccacccgccggggacggtggacaagaagatggtggagaagtgctggaagctcatggacaaggtttctaccatgaatgaaatgaagagtta

SEQ ID NO: 75189 - DNA, 126 bp, Homo sapiens
aatgcgaaaggttgtatgtgatcagaagctgcgtcccaacatccccaactggtggcagagttatgagagatgccctgtatccaagcccaatatgggacaccagcaccgagtccgggaccccgtgac

SEQ ID NO: 75190 - DNA, 97 bp, Homo sapiens
tcggaaaccggtagcgcttgcagcatgtgaataaccctataccttccaatttgaaatcagaagcaaaaaaggctgccaaaatattaagagaattcac

SEQ ID NO: 75191 - DNA, 105 bp, Homo sapiens
ctccatgttgtcccctcagcgagtggcagcagctgcctcaagaggagcaggtgctgatgtatggacagccgtatcgtgttaccttagagcttgagctgccagagt

SEQ ID NO: 75192 - DNA, 87 bp, Homo sapiens
acttttcgaggcatttgacttgtttgatgttcgtgactttggaaagagagacaagagagacacctccaacttcgacaaagagttcac

SEQ ID NO: 75193 - DNA, 100 bp, Homo sapiens
atcgagaccgggcccttcctcgaggcggtgtcccacctgccgcccttcttcggcgaggcggtggccagcgccatgcattcctcccgctacccgagcccag

SEQ ID NO: 75194 - DNA, 82 bp, Homo sapiens
aggaagcaagcagttcagaagagccaaggaataaacatgcaatgaacccaaaaggggaaaaagaccttgatgaagttctgca

SEQ ID NO: 75195 - DNA, 75 bp, Homo sapiens
gtcattaaacccatcgacaagaaggcacctgcagcctggcatcctcgctacaacctcattgttgtgggccgatac

SEQ ID NO: 75196 - DNA, 74 bp, Homo sapiens
cacgcaggaggtcatcgtggtgccacactgttatgatgtgattgctcaagcccaatctgggactgggaaaacgg

SEQ ID NO: 75197 - DNA, 82 bp, Homo sapiens
cgcttaccgcatctggctggagccctgcattcgcggcgtgtgcagagtcctgccaaatatcacaaaacctagatattatgaa

SEQ ID NO: 75198 - DNA, 83 bp, Homo sapiens
cttggtgagaaacattaagacctactaccaggggggtcctgtggagatccttcccttcctctacctcggcagtgcctaccatg

SEQ ID NO: 75199 - DNA, 75 bp, Homo sapiens
caggagtgtgccgtgtgtggctgggccctgccccacaaccggatgaagtgtcctgatggaggagacaatgcagat

SEQ ID NO: 75200 - DNA, 101 bp, Homo sapiens
aaaagtttagagggagatttggaggatctgaaggatcagattgcccaggttatgcgaatgacactgtcaaccttaaattggcgacggcgggagatggtgag

SEQ ID NO: 75201 - DNA, 100 bp, Homo sapiens
gaaatctcctggatcatttaccctttgtcagggtggatgctgcaggacaaggaagatggggagccaaagaccaagcatctcagagaagaggaggaagaag

SEQ ID NO: 75202 - DNA, 100 bp, Homo sapiens
tacctgatcttcagggccgcctccgagtcagatggacttcctcgttctgcccatcttcctaacaaggctatggctgataacagcagtgatgagtgtgaag

SEQ ID NO: 75203 - DNA, 88 bp, Homo sapiens
cctttcgccgtggacgccgaccgtccgggacgaggtttcctgggagaaggtggcttaaggctgagacacttatgccctgggccagcca

SEQ ID NO: 75204 - DNA, 75 bp, Homo sapiens
gtttgatcttcctctgacttggtactattctctctcccagtggattgtattacacagagcatgaatatacttctt

SEQ ID NO: 75205 - DNA, 150 bp, Homo sapiens
agactgcttgctggaactcacaggaggcacacttgagcttggggagccaacttccatgatggaagaagagggagttgacaatgacacaccagttactctgggagtatatcttaccaagaaggaacagaaaaaacttcggagacaaacaag

SEQ ID NO: 75206 - DNA, 98 bp, Homo sapiens
gcagaagcaggtgcagatcaagaccctggagggcgagttctcggtcaccatgtggtcctcaggtggagttggcatgaacttaacagcagcagatactg

SEQ ID NO: 75207 - DNA, 100 bp, Homo sapiens
cagcaacaacagagagcacgtgtaatctatgccagcaattatgacaatgttagcagaccatgcagctcgtcagctgcttgatttcagccaaaaactggat

SEQ ID NO: 75208 - DNA, 100 bp, Homo sapiens
tggtcgaggaagcggagtgtgccatgagcgagagggaggctgccccaaatgaggaagcagaattttcagagctcaacctggtggcccatgcagatggcac

SEQ ID NO: 75209 - DNA, 84 bp, Homo sapiens
gacaagccgctggcagccgcggatctcaccgccgctcaggcgtcgagggcgaggcccccagcagtgagactggcacatccctgg

SEQ ID NO: 75210 - DNA, 100 bp, Homo sapiens
ctggtccgctgcatccgccatatattgtacaatgaacagaggttggtccgagaagccaacaatgcagcctggcatcctcgctacaacctcattgttgtgg

SEQ ID NO: 75211 - DNA, 50 bp, Homo sapiens
tcagcctcccgagtatctgggattacagctaccgagtctattgcttgctg

SEQ ID NO: 75212 - DNA, 100 bp, Homo sapiens
gatcctatctgttcaattcttatagccattcttatagttgtaagatggaggagatgtataagaaagctcatgctgctatacgagagaatccagtctatga

SEQ ID NO: 75213 - DNA, 78 bp, Homo sapiens
gaagacgggtgatttctgcatttccatctgagctttgaagatactgctataatttgaaaatttgaaattagtgtttca

SEQ ID NO: 75214 - DNA, 75 bp, Homo sapiens
actaagggtgcggcagtgcctggtacatggaaggtgggagtcaatcattttgacaagtctcctgaaaggaacagc

SEQ ID NO: 75215 - DNA, 51 bp, Homo sapiens
ccggttctcagggacagtgcacgcagcaacatctgaatgaattgatgacga

SEQ ID NO: 75216 - DNA, 100 bp, Homo sapiens
tccaccgtttcctccaggacagcacctagtcgtggccggaggagtctcagagctgtcagaaaggtttgagcacaaaatgaacataattagggaaaataag

SEQ ID NO: 75217 - DNA, 100 bp, Homo sapiens
ggataagcatgccctgaaaaagtatcgtcgagaagcctatcatcgcagacggttgatgatgaagcgccggccgtgtaaatgaagatcgggtgaggagcag

SEQ ID NO: 75218 - DNA, 74 bp, Homo sapiens
ctcggatacgatagaaaatgtaaaggccaagatccaggataaggaaggtgtgatgttagctgttgatgctgtaa

SEQ ID NO: 75219 - DNA, 75 bp, Homo sapiens
ctcggttctgccccctcgagggctcctgctccagcccagcccccagagagcagaccccaggtgctggccccgggg

SEQ ID NO: 75220 - DNA, 100 bp, Homo sapiens
caaaaatgtgcatactcacagagttagagagagggatggtggccttctccacagtaggcactcctgactacattgctcctgaggtgttcatgcagaccgg

SEQ ID NO: 75221 - DNA, 74 bp, Homo sapiens
tttccttaatctatttaatcacaccctgacctgctttgaacataaccttcagcttcacgaggctgacattgtgg

SEQ ID NO: 75222 - DNA, 90 bp, Homo sapiens
gaaattccccccgaagaagactcccccacatctgggtcgcaatggaagaagagatcgccgcgctggtcattgacaatggctccggcatgt

SEQ ID NO: 75223 - DNA, 82 bp, Homo sapiens
ggcacgcagcctggggactctgcctcgtgccgctgagcctggcgcagatcgggatatcttctaaccataccgatgattctcc

SEQ ID NO: 75224 - DNA, 137 bp, Homo sapiens
tttctgtgcctggcttatttcagttaacatcgtgacctccagttccatccatgttgctgcaaatgataaccacctgcctcaaagataatctgctcaaaagacttccatttcattctccaccccaagaagctttagaa

SEQ ID NO: 75225 - DNA, 75 bp, Homo sapiens
tcaccggattgatagaactgcaagctatgaggaggtctgagtgtacggtttgcagatatgcctggaaaatcaagg

SEQ ID NO: 75226 - DNA, 99 bp, Homo sapiens
cccgggtgctgctggttagtgtgctctgagggagggtccgagccagccgctgttttgccggaggagcccctcaggcccccattgcagatgcaaaggctc

SEQ ID NO: 75227 - DNA, 73 bp, Homo sapiens
tatcgtctccacccacctggacactcgtaatgtggcctttgagaggactctgcctgccctggtgtggcaccga

SEQ ID NO: 75228 - DNA, 75 bp, Homo sapiens
ggacaagccccgatatctgatgggggttgggaggtgggctaccacagggacctgagccgcaacactgccgtcctc

SEQ ID NO: 75229 - DNA, 110 bp, Homo sapiens
ggaattgaagcctgctattgcaacatgggattttcaggaaatggtgtcacaatttgtgaagtctcagaccagtatccttcaggggttctcttactctgatttgcggaaat

SEQ ID NO: 75230 - DNA, 50 bp, Homo sapiens
cgcgcggaggcggaggcttggggaatgcagtttattctactccaagagat

SEQ ID NO: 75231 - DNA, 137 bp, Homo sapiens
cggtccctctggcccggcctgacccggtctggcttgttcgggctcagcggccgcgaggccgcagctcccgaccctgtattcagtggatcagctggcaccacccaaatagataaattggcccatctggtcttgtggcc

SEQ ID NO: 75232 - DNA, 100 bp, Homo sapiens
caatcctaccatgtcagccttcccagtagctggaactacagtttcggagcaacatcccctgtcacctggttgatatctcttgcggattaccctgcagtgc

SEQ ID NO: 75233 - DNA, 90 bp, Homo sapiens
ctcattttcacatctctcctgaatggatcacagcgtcgcagatgtctttggtacatcgaggaggccattgagaaactaagcaagcggcac

SEQ ID NO: 75234 - DNA, 50 bp, Homo sapiens
aaatcaatggccggacgaaaaactgttttgagctctacaatcccagccac

SEQ ID NO: 75235 - DNA, 76 bp, Homo sapiens
tctccctctgcccccccttccccacgcaaccccagatccatttacactttacatttctgtttgagcgtgtggaggg

SEQ ID NO: 75236 - DNA, 83 bp, Homo sapiens
cctacggggagcggtacctcgcctcggtgcagggctccgccccgtcgcctggaaagggtgagaaggactggcagaaatacgag

SEQ ID NO: 75237 - DNA, 100 bp, Homo sapiens
gacaaaatgtggccacagcttttgagttcttggagtctctgcggagtccctgggccagatctcacagtgaaagctgcaggatcttccttctgaccccagc

SEQ ID NO: 75238 - DNA, 140 bp, Homo sapiens
tgcgaaggccgggacccggttccccggcccacagtgggggtgtgcaaacccgagagaactgggtcgcacggggcaggcggttgcagttcgagccaaggcctttggattcagcgtcatattttatgacccctacttgcagg

SEQ ID NO: 75239 - DNA, 100 bp, Homo sapiens
tttttcttctctgggaaggtgaacatttgtagcattgatttcccggatctggtaacatggcaaaagatgagaaatccagcggtcgcaccgcccattacaa

SEQ ID NO: 75240 - DNA, 83 bp, Homo sapiens
tccgtggccttagctgtgctcgcgctactctctctttctggcctggaggctatccagcgtgtgagttcttgatacgaatgaaa

SEQ ID NO: 75241 - DNA, 90 bp, Homo sapiens
gtggaaggagtacagggaagtctataagctttgcaacagaattacagagtatgattgattcgcctttgccagtctcatctcgtgtctgct

SEQ ID NO: 75242 - DNA, 100 bp, Homo sapiens
cagatatcgaggtggatggaaagcagagggctgtgctgaagtttgctgctgccactggagccactccaattgctggccgcttcactcctggaaccttcac

SEQ ID NO: 75243 - DNA, 89 bp, Homo sapiens
ccgcgtgtcctcggagcgcggtccctgtattggtctcctgctcctagaggcgtccgacctccgatcatgaacgggcccctgcacccgcg

SEQ ID NO: 75244 - DNA, 96 bp, Homo sapiens
gtcggtcgccgccatgacagcgagcgaggcggagagctaaagttgcagacaagatccagctcatcaataatatgctggacaaagtcaatgagatga

SEQ ID NO: 75245 - DNA, 75 bp, Homo sapiens
gtccgccagagcgccgacttcatgccccgctggcagatgctgattgggaaaatgaggtacgttagtgttcgcgat

SEQ ID NO: 75246 - DNA, 75 bp, Homo sapiens
catgcaagaaacatatactgcttacctcattgaaacaaggcggctgagccagaggccaactgcagaggaactgga

SEQ ID NO: 75247 - DNA, 100 bp, Homo sapiens
gcagccaggagccggggcccgagccccgcccggcccgggccatgtcggtgggcgagctctacagccagggtgataaaagaaaatgtggctgaagttaccc

SEQ ID NO: 75248 - DNA, 100 bp, Homo sapiens
ctacactaaaacagagttagcagagtgctgctggttccttcggtgtgatccctcacatccacaaatctctgattggaaagaagggacagcagaaaactgc

SEQ ID NO: 75249 - DNA, 50 bp, Homo sapiens
cggcagtcgcgaagcagcaaccatgaacctgaatggcgtgatggtggcag

SEQ ID NO: 75250 - DNA, 90 bp, Homo sapiens
ttcaatgtccgcatcgcaaccaccgccctggccatctaccatgtgtttggtaactctcattcgacatccatctgaactaatgaatgttcc

SEQ ID NO: 75251 - DNA, 75 bp, Homo sapiens
aaagccttcaaaagccccttatcctctccccaacaaacacaggctggagtgcagtaacaccactgaagctcactg

SEQ ID NO: 75252 - DNA, 100 bp, Homo sapiens
cggtagcaaactgatgacttttccgtgctgatttctttcaacctcgggtcctgatgaagaagctgttgtggatcttggcaaaactagctcaactgtgaac

SEQ ID NO: 75253 - DNA, 50 bp, Homo sapiens
acaccagctccgaaatcaccaccaagacccctttgctgatgcaagtaagg

SEQ ID NO: 75254 - DNA, 58 bp, Homo sapiens
caaaacttaaattcaagaaggagccctgtcccaggtggagccgccaccaaaatgcaga

SEQ ID NO: 75255 - DNA, 75 bp, Homo sapiens
aagctggctgtcctgaaatattataagggtatttgaagtataccatacaactgttttgaaaatccagcgtggaca

SEQ ID NO: 75256 - DNA, 100 bp, Homo sapiens
ggcacagcgtttcttgcaagaatgggaggtgaaaaggggaccgggaaatcaactcagaaaccattacattataagagttgtctctttcacagagttgtca

SEQ ID NO: 75257 - DNA, 110 bp, Homo sapiens
gcctgatcgagtccctccggaactcacactccagtattaaaggtggaagaaggtccatatctttttctgtgggtgcttcaagtgttgttggaagtggaggcagcagtgac

SEQ ID NO: 75258 - DNA, 98 bp, Homo sapiens
agcgtgcaaatgccagaaagaggatttggccagagcgttttgtattttgaacacagcacgaaaacattttggagctggtggaaatcagcggattcgct

SEQ ID NO: 75259 - DNA, 100 bp, Homo sapiens
caacacagctggctgccagcccgggccttggtggaagaggcccttgcccagcgattccagcaatcaaggagaccgcgaaggcgtacattcccgggtgttg

SEQ ID NO: 75260 - DNA, 82 bp, Homo sapiens
gagagcccacaggtgctaaagagagcagtaccctgatggagtcccttgcaggtcactatcatatgacaaaggctttgccgca

SEQ ID NO: 75261 - DNA, 75 bp, Homo sapiens
aactcagagaggtcccagaccaccctgcagctgtggagctcctgggtgacattgtgcagaactgtagtctggaag

SEQ ID NO: 75262 - DNA, 83 bp, Homo sapiens
attctccgggagccgtccgtgtcaccgccggaacctggcgcaggtgagaagccctaccactgcaactgggacggctgcggctg

SEQ ID NO: 75263 - DNA, 117 bp, Homo sapiens
ctgcctcagaagaagtgtatgcaaagagtattctttgtcagtatcctgcttcacttccaggtattcttcagcggaaataaggaaacagtttactctcccaccaaaccttggccagta

SEQ ID NO: 75264 - DNA, 83 bp, Homo sapiens
acggagcgcatgatggcctactgcgaccagatcttccaggacgagacgggcaagaaccgacgttggacctctcgaacaaccag

SEQ ID NO: 75265 - DNA, 100 bp, Homo sapiens
ctgctcaagaactgcagcattgcagccgccaagacgggttttggccaaattgggcgagggcacaaaataaccacttaccccttctcaccgaggaagagcg

SEQ ID NO: 75266 - DNA, 76 bp, Homo sapiens
ctgcaaagctgtacaagagatcatgcagaatgtgacagtgatgataacatgggtgccaaaaatacttcaataggag

SEQ ID NO: 75267 - DNA, 83 bp, Homo sapiens
gaccacttttggaccaaaggcctgtgtgctgcagaacccccagaccatcatgtctgtgcagacttttgcagacaaatcaaaac

SEQ ID NO: 75268 - DNA, 82 bp, Homo sapiens
ccagtgttcaccatcctggccccggaagaatgattacggacctgaagccaaagaacaagatgcgctagtggacagattgctg

SEQ ID NO: 75269 - DNA, 101 bp, Homo sapiens
cgccggaggagacgcacgcagctgactttgtcttctccgcacgactgttacagaggtctccagagccttctctctcctgctggagctctcaaacactgctg

SEQ ID NO: 75270 - DNA, 100 bp, Homo sapiens
ccgccctcaccacccctatccagacggctgcccttcaagtaccagaggagataagcaaggacctcagagccacactgaacgccttcctgtaccacatggg

SEQ ID NO: 75271 - DNA, 100 bp, Homo sapiens
aacactacagattaaagactttctgaatggaccagaatgcactgaaggcccaattgacctggtctttgtgatcgatggatccaagagtcttggagaagag

SEQ ID NO: 75272 - DNA, 101 bp, Homo sapiens
cgacggcacctcgggggccacactgcaggcctccgcgctcagtgaaactggcgatggaatatgagaggagccctctggaaagaaaaggacagaccctgtgc

SEQ ID NO: 75273 - DNA, 100 bp, Homo sapiens
gccaactagaggcagggtcatccttgcccttgtcctcccctttcatccctatgtggaaaacgctgcaattctcattgcaagatcatcgcctccctggttt

SEQ ID NO: 75274 - DNA, 75 bp, Homo sapiens
tgctgcacggcaacatgaccagcagtgacatcctcctgtgctacaccacgtctccaacctgtcccagtatttcag

SEQ ID NO: 75275 - DNA, 76 bp, Homo sapiens
gtctctgtccgggggcctggctaaggaaaccctattacctccaggaccaggaagaaacaggctcctgccagcaccg

SEQ ID NO: 75276 - DNA, 100 bp, Homo sapiens
cgctctctcaccagaactcagagtcttcctaatattaccaggtgcactttacaggtccccgatgaaccaagagaaccctccaccatatccaggccctggt

SEQ ID NO: 75277 - DNA, 100 bp, Homo sapiens
gacgcgcggcgtttacccagcgcagcgttccaccgctcgggtttggctgggagaggagttcattacttcggaagtggtacaatttaatgatacaaaataa

SEQ ID NO: 75278 - DNA, 75 bp, Homo sapiens
gcagtggtcgcttcttctccttgcagccagactgccttccgggtcactgccatggaggagccgcagtcagatcct

SEQ ID NO: 75279 - DNA, 100 bp, Homo sapiens
ccagcccgaactgactcagtcatcattgcagaacaggacgcaggccttgatgccctttcctctatcataagtcgccaaaaacaaatggggcaggaaattg

SEQ ID NO: 75280 - DNA, 88 bp, Homo sapiens
ggcctgcgagggttgaagattgtgaagcaatagcctaaggttatgatgtgattgctcaagcccaatctgggactgggaaaacggccac

SEQ ID NO: 75281 - DNA, 76 bp, Homo sapiens
aactgcaccggaaatgtgcctaccagtaagagatgctaaaaaccttgtacctatggaccccaatggcctgtcagat

SEQ ID NO: 75282 - DNA, 100 bp, Homo sapiens
gctgcttccttcggccttgtccgagcaaacagaggcgctcatccacagagccacatctgttaggctcagtttatgaacctcttaaaagcattaatcttcc

SEQ ID NO: 75283 - DNA, 100 bp, Homo sapiens
cgagaggagggaggaggaggaggaggaggtggaggaggtggaggaggtggaggaggcgccggaccggggggggatgatcatggtgattttactgctgctt

SEQ ID NO: 75284 - DNA, 100 bp, Homo sapiens
ccacagcaacagaggcacagcttcaagggggaggagtgtccagcagggatagctgggagtatggccaccctgctccacgatgcggtaatgaatccagcag

SEQ ID NO: 75285 - DNA, 75 bp, Homo sapiens
acaccagaaggaggttttgacgccatgcttcaggcagctgtctgtgaacacgatgaccaggaagatatcagtcct

SEQ ID NO: 75286 - DNA, 75 bp, Homo sapiens
agacgtggtactcagcaagctcgagttaaagttggatgtgctggaacagctatgctaagaaggaatctgatctta

SEQ ID NO: 75287 - DNA, 99 bp, Homo sapiens
gcatgtactgggggattcgcagggaggatgtcgggacaccccggaagctgggaaatggaccaagaatcgccttcagccctgtctggtgcatccttggca

SEQ ID NO: 75288 - DNA, 83 bp, Homo sapiens
cctgggctgccggcacttcgcggcaggaggctactcacagtcgaactacaactccccggggtccggccagaactacagtggcc

SEQ ID NO: 75289 - DNA, 83 bp, Homo sapiens
ccaaaagcgtcaaactcaccaaaaacaacatctttccagaaagaggtgctggagaatctggtaaaagcaccattgtgaagcag

SEQ ID NO: 75290 - DNA, 134 bp, Homo sapiens
tggaggaggcctacagcctcctcaacgaatacggcgacgacatgtatgggccagaaaaggtgggaatggaagtggccccacatctcaaagaaaccctaaataagaacttttttgacttcctccttacgttcaaa

SEQ ID NO: 75291 - DNA, 75 bp, Homo sapiens
cgcccctcaccagacagatcgctgtcaaaaccctaggtggagccgccaccaaaatgcagattttcgtgaaaaccc

SEQ ID NO: 75292 - DNA, 100 bp, Homo sapiens
gttcgtactgggcagaacgcgacgggtctgcggcttagggaattgaatgatctggcacgggaccctccagcacagtgttcagcaggtcctgttggagatg

SEQ ID NO: 75293 - DNA, 124 bp, Homo sapiens
agcatacaccgagagagtgaggagccagacgacaagcacacactatggcgctgaaacggattaataaggctgcctgctgtttcccggggagatcatgaaacgaggtcgccttcccagcagcagt

SEQ ID NO: 75294 - DNA, 100 bp, Homo sapiens
caagaaagagaaagcgacatgctattgaaggaagagagaagggcacagttacctaagtatcaacgtaatcttcctcggccaggacaggcccccatcggta

SEQ ID NO: 75295 - DNA, 83 bp, Homo sapiens
cctcgttggagctgcacaccctgggcaatcagcaggtgcagcggaactgctgcctgacgctctgcaacttcagcatccccgag

SEQ ID NO: 75296 - DNA, 75 bp, Homo sapiens
cccgagtggatcggggacggagagaacacgagcccatcaggtgatctgtgaaaatggttcgctattcacttgacc

SEQ ID NO: 75297 - DNA, 100 bp, Homo sapiens
gtggacgccgctttgttgcctgagccttggcaaatgcaacattatgtattcttgaacctattatggctgtggaagttgtagctccaaatgaatttcaggg

SEQ ID NO: 75298 - DNA, 108 bp, Homo sapiens
gaccccaagaagaccattcagatgggatctttccggatcaatccagatggcagccagtcagtggtggagtaccatgcggagaccatcaagaatgtgcgcacagccacg

SEQ ID NO: 75299 - DNA, 96 bp, Homo sapiens
gcccgcgccaccatcttcggctgaagggtgagcttgtcggccacagactgctacattgtgcatgagatctacaatggggagaatgcccaagaccag

SEQ ID NO: 75300 - DNA, 100 bp, Homo sapiens
cggcggtggggactgcacgtagcccggcgctcggcatggctctcctggtgctcggatgatttccttctgatacactacgataagggaccctgccggaaca

SEQ ID NO: 75301 - DNA, 99 bp, Homo sapiens
agaagattagcaaaggtgctaatccagtggaaatcaggagaggtgctattcgagcacataatggtagtcttcagcaccttacttggcttggcttacagt

SEQ ID NO: 75302 - DNA, 82 bp, Homo sapiens
ttcgaatctcccaacatcctgcgtatatttgggatttgcattgatgaaacagcatccggtgaaagacagagatcacatttca

SEQ ID NO: 75303 - DNA, 101 bp, Homo sapiens
ctcttccatctctacgtgagcacctccccctgtggagacgcaagactccactctccctacgagatcaccacagaccttaccttatcccatatcacacaact

SEQ ID NO: 75304 - DNA, 50 bp, Homo sapiens
agcattgaatgtgcaggttctttcagtaagaagacatgttggataacaag

SEQ ID NO: 75305 - DNA, 75 bp, Homo sapiens
actcagcgtcgctggcagccgctgtacttgatcatcagaaaagcccttactgaggaaaaacgtgtctcaacaaaa

SEQ ID NO: 75306 - DNA, 100 bp, Homo sapiens
tgcctgttcagtactgtgggtgatatttgcctttagtgcactcttctccttcacagtaaagtggctggtaactttcgaccgactttccccaagagaaaat

SEQ ID NO: 75307 - DNA, 76 bp, Homo sapiens
ttgcagctcatctctattgatggttggtcaaagaaaaagtgatgtatgaaaaagaggcaaaacaacaagaagaaaa

SEQ ID NO: 75308 - DNA, 82 bp, Homo sapiens
ggtcacccctcagcacatggtgggggccacaccatttgccgtggccaggctagagtttggtgccctggttgtcagatgttgg

SEQ ID NO: 75309 - DNA, 50 bp, Homo sapiens
tagcagaagccattccgacaatgatagcaatctgaagaggatgtaagtca

SEQ ID NO: 75310 - DNA, 98 bp, Homo sapiens
ttactcacacatcagtctatcagtgttcggctccagcctgtgaagaagttaactggtgctggagaatctggtaaaagcaccattgtgaagcagatgag

SEQ ID NO: 75311 - DNA, 100 bp, Homo sapiens
attattgctgcaattaagaaaggcatgtcgggccccaggcctgtggtgctgagcgggccttcgggagctgggaagagcaccctgctgaagaggctgctcc

SEQ ID NO: 75312 - DNA, 100 bp, Homo sapiens
ctgaacttgaagcatcagatcttgcctaaagagcagtggaccaaatatgaagagggtaaaaggacaaacttgcgtaaaactggctcagagcgtatcgctc

SEQ ID NO: 75313 - DNA, 74 bp, Homo sapiens
ccgccggctccgcggcgatggcgctctataacccctaccgccacgaccatggcaaaagttataaccaccgtact

SEQ ID NO: 75314 - DNA, 98 bp, Homo sapiens
gaggatgccagtttttagggccagttatggctgattgtcctcacacaattggtgttgaatttggtacaagaataatcgaagttagtggccaaaaaata

SEQ ID NO: 75315 - DNA, 82 bp, Homo sapiens
gaaaatcggcagctgagacggccttggccgtctggcttcagccttgtcatgaaccacccagcctgtgtcaatgagattgctc

SEQ ID NO: 75316 - DNA, 82 bp, Homo sapiens
gccgtttgagggaagaaggaggaaaattacccggtatcgttagagaattcaattcgtcataatctgtccctacacagcaagt

SEQ ID NO: 75317 - DNA, 90 bp, Homo sapiens
atactttaccaggcaatggatattataagatacgtaggtaacctttccagagatgtgacagaagtccttatacttcagttgttcagtcag

SEQ ID NO: 75318 - DNA, 100 bp, Homo sapiens
acatgcccgctcacctgcgctgtgatgcctgcagagctgtggcttaccaggtgggccagggttacccgcatgatccccccaaggtgaagtgtgagacaat

SEQ ID NO: 75319 - DNA, 82 bp, Homo sapiens
gcgcggattcgccgaggcaccgaggcactcagaggagtgtaggaagaatgatgatggagacacagttgttgtggttgagaaa

SEQ ID NO: 75320 - DNA, 50 bp, Homo sapiens
ggaaaatgtagcttcccggttaagccaggcccagacatgtccgtccttgt

SEQ ID NO: 75321 - DNA, 96 bp, Homo sapiens
ctcatcaacttcggaaggtttgactcggaggaacgagttgaagcagttaatatggctgaaggaatcattcacgacacagaaaccaagatggaagaa

SEQ ID NO: 75322 - DNA, 98 bp, Homo sapiens
ttaagaggcatacaccacttagtaaactaatgaaagcctattgtgaacgacagaaacacatttactccccaataattgtacgggaggtgatcgaggaa

SEQ ID NO: 75323 - DNA, 75 bp, Homo sapiens
gccgatccagcctgcggagcctgtggggcagttgttcaggggatgaaggaagctcaggaaaggctgacgggtgat

SEQ ID NO: 75324 - DNA, 75 bp, Homo sapiens
agaaatgaacctgcccacggtgtccgcgctcagggtggtgttcccactgatgaagagcaggcgactgggttggag

SEQ ID NO: 75325 - DNA, 75 bp, Homo sapiens
caagaactaagtaacgatctggatgcccagtgtactaatggtcacttgatgtgcgctggctgttttatccaccta

SEQ ID NO: 75326 - DNA, 100 bp, Homo sapiens
ctgagttcaagttcatgccaccaccgacttatactgaggagggagccatggatttgctgcgggagctgaaggccatgcctatcacgctgcacctgctcca

SEQ ID NO: 75327 - DNA, 98 bp, Homo sapiens
cccagcaccacagtccttctgcagtccctcgtccagccacccccaggttctgtccatgagacctaggattcatgggagtgcagcccgggaagaagacg

SEQ ID NO: 75328 - DNA, 98 bp, Homo sapiens
tgaccgagagcgcgaatatcgtcatcgttagaaggctgagggtaaaaagctgggattggtaggctgggtccagaacactgaccggggcacagtgcaag

SEQ ID NO: 75329 - DNA, 99 bp, Homo sapiens
cctcagcctcccgagtatctgggattacagggggttttgtgctgctggatggggagacgttcgaggtgaaggggacatgggagagacctgggggtgctg

SEQ ID NO: 75330 - DNA, 100 bp, Homo sapiens
cctgaggaggcgagctagccgggagttacaccgccaccgccaggtattgttgcagcatctggcagtgagactgaggatgaggacagcatggacattccct

SEQ ID NO: 75331 - DNA, 100 bp, Homo sapiens
ggagaacaaagaggtgaaggagtattgtttctaagcatgaattgaggaacagaagaagcagagcagatgatcggagcagcatttgtttctccccaaatct

SEQ ID NO: 75332 - DNA, 90 bp, Homo sapiens
ctttaatgttgccattccccgattccatatggcatgtccaacattcagggtgtctatagcccgattggggctgcgatttatccagttgaa

SEQ ID NO: 75333 - DNA, 73 bp, Homo sapiens
tcagaacggcctcccgggactctctgtcacccagcaggattttttatcaagcagaaatgcatcgaacaacgag

SEQ ID NO: 75334 - DNA, 82 bp, Homo sapiens
gcagatgtaccctcagtacgccacctactattacccccagtatctgcaagccaaggacggggaggtttactgcatcgacgcg

SEQ ID NO: 75335 - DNA, 76 bp, Homo sapiens
acaagttcaccccgaagtctgccgagccctatgagtttgtctctctggaatggctgcaaaagtggttggatgaatc

SEQ ID NO: 75336 - DNA, 100 bp, Homo sapiens
gcgcggagcccggctcccgcaccatggaggaggacgacagctacggttgggagccacgtgtaccagtgtgtgttgatcttggcttgattcagtctgcctt

SEQ ID NO: 75337 - DNA, 83 bp, Homo sapiens
tgatggacataccattcaggttatcctgaagtcaaaatcagactgggctggcttagatgaagatgaagatgcacatgtctggg

SEQ ID NO: 75338 - DNA, 120 bp, Homo sapiens
agagaggcaccgggatcgtgaccgagaccgtgaccgagagcgtgaccgagagcgcgaatatcgtcatcgttagaagtgattcgcctttgccagtctcatctcgtgtctgctttgttaagt

SEQ ID NO: 75339 - DNA, 50 bp, Homo sapiens
gccaggaccacctggaagcctagaaatgctcaccatggatgatgatatcg

SEQ ID NO: 75340 - DNA, 100 bp, Homo sapiens
gcatgccccgctacgagctggctttaatcctgaaagccatgcagcgggtcactgatatgatgcttcaggacaaaccctatcctgactggggaaaatcagc

SEQ ID NO: 75341 - DNA, 100 bp, Homo sapiens
gtcacccaagtgcattgcctttggaaacgaggttatgaagacagtatggagtttccagaccatagtagacatttgctacagtgtctgagcgagcagagac

SEQ ID NO: 75342 - DNA, 100 bp, Homo sapiens
tcaaagcgggcgccatccgggaccggcggttgtctgtggccggaggctgatcagagttgctggagaatgtaaccctaatccataaaccagtgtcgttgca

SEQ ID NO: 75343 - DNA, 100 bp, Homo sapiens
taactacctcatcttcagtcaaaagcctgaatttcaggatctttcaggattttgatggacgaccgtgtatagtttgcccctggcataaatacaaaattac

SEQ ID NO: 75344 - DNA, 100 bp, Homo sapiens
gatggccccaggtgtaagcgcagaaagcaggcgaacccgcggcgcaataacgatgccactgccgccaggagccctgtaacatcagccatcgtcaacccca

SEQ ID NO: 75345 - DNA, 100 bp, Homo sapiens
gaaagctagaaatttatttgaaagaaatgatttaaggacctactaacgatcctcgtcacgtgttcaatatgctaaagaagtatgtccgcgcagaacagaa

SEQ ID NO: 75346 - DNA, 75 bp, Homo sapiens
ccgcctttgatcgtcttcctcttcagccatccaggacaaggacacactcagcattcactacctcatgctgccccg

SEQ ID NO: 75347 - DNA, 83 bp, Homo sapiens
tctgaactcaagtcaccgtggagctccgccgccccgaaactttcaccgcgagcggaaaccaaggtgtatgttggtaacctggg

SEQ ID NO: 75348 - DNA, 80 bp, Homo sapiens
gcggagccctgggctggggcaggagccggttggctgttgaaggcacgaatggaatagataatcatgtacctacaagcact

SEQ ID NO: 75349 - DNA, 107 bp, Homo sapiens
ccggcttggatatcttcggggacctgaagaagatgaacaagcgccaggtcaaaatgcagatcttcgtgaaaacccttaccggcaagaccatcacccttgaggtggag

SEQ ID NO: 75350 - DNA, 90 bp, Homo sapiens
cgaggacctgagccaggaatgcaggatggcggcggtgaagaaggaagggggtgctctgagcttggatatataagcagagtgacagcagga

SEQ ID NO: 75351 - DNA, 95 bp, Homo sapiens
gttagaagccaccagcaagaagtcagccaagagatgtgttaaagtcctgaggctttctaccaatgcaggccagtggaaggaagcagctagcaagg

SEQ ID NO: 75352 - DNA, 100 bp, Homo sapiens
cgatgatcagagtagaacagcagccagattatcgcaggcaagaaagcaggcggagtttcgctgttgttgcccaggctggagtgcaatggcgcaatctcgg

SEQ ID NO: 75353 - DNA, 100 bp, Homo sapiens
acaatgatctctaccgatgggaagtccttattattggccctccagatacactttacttcctggacaagatcgacgtgatcaagcaggctgactatgtgcc

SEQ ID NO: 75354 - DNA, 100 bp, Homo sapiens
caggcagctgaagagctgcatgaagccggtgaggcgcagaggcctttgaaattgttgttcgccatgccaagaactacaccaatgccatgttcaagaacaa

SEQ ID NO: 75355 - DNA, 114 bp, Homo sapiens
atttaagagagctctggacaagctggaatgcatccaagagaatccctcaacatgctggtttttagaacttcagccataaaaatgggcagaattttccttgatcatatcggtggt

SEQ ID NO: 75356 - DNA, 82 bp, Homo sapiens
cgacttccttgcagcctcttctccgggacttgaaagaggagattgatattcgactctccagggttcaggatatcaagtatga

SEQ ID NO: 75357 - DNA, 75 bp, Homo sapiens
cgagggaaacaagaaaacatcaaagaggtctagcaaagacaatgtggagctcatactgaaaaccatcaataacca

SEQ ID NO: 75358 - DNA, 75 bp, Homo sapiens
cgcctccatctgggccatggatggccgcggcgagtcctttgcacatgttggcaacacacgcatccgcatcggcct

SEQ ID NO: 75359 - DNA, 89 bp, Homo sapiens
gaccatggctgactacctgctgtacaccctcaacaaacaccagcgctttggtgtctatgaaccagatagaaatgcattacggaggaaag

SEQ ID NO: 75360 - DNA, 80 bp, Homo sapiens
ggcgctgaaacggattaataaggtattctttaggtgatgctagaaggcctcttcatgaaacagcagttttggtagaagat

SEQ ID NO: 75361 - DNA, 96 bp, Homo sapiens
cttgggagtatctccgtattctggagcagtatttcatgaatttgaatcagaaactgcaactggaacaggagaagcttagttctgattataacaagc

SEQ ID NO: 75362 - DNA, 50 bp, Homo sapiens
agcgcctgtaatgtttggcgagtctggcacgcgctcatcaagaagctgaa

SEQ ID NO: 75363 - DNA, 76 bp, Homo sapiens
cctagcaccccgagaaccgtcagtttgagccagatggtatggacctgtctgccaatcaggacgaggagaccgacca

SEQ ID NO: 75364 - DNA, 100 bp, Homo sapiens
aaatggttaaagatggagaaattgtatacactggaacagaatcaacccagaacggagagctccctcctagaaaagatgtgtcttgctgaatcagggctct

SEQ ID NO: 75365 - DNA, 75 bp, Homo sapiens
aggcacgggcagccggaaggacaccaagatgcggatccgggcctttccggagatctattgggaaactgattataa

SEQ ID NO: 75366 - DNA, 100 bp, Homo sapiens
aggtgccggtgcctgtccccgggggcgccatggcgaccggagcgaacgccacgccgttggcaacgaaggttttgggaacagtaaaatggttcaatgtaag

SEQ ID NO: 75367 - DNA, 75 bp, Homo sapiens
gcccgggaggggccgcgccgccaccgtctgaactaggatgtcccgacatgaagggaactctaatgatccaggaca

SEQ ID NO: 75368 - DNA, 75 bp, Homo sapiens
agagcgtgaccgagagcgcgaatatcgtcatcgttagaagaaacgcttcgttaagggactcaggcagtacgggaa

SEQ ID NO: 75369 - DNA, 97 bp, Homo sapiens
ctccagccaaattcaaaaaggataaggagatcatagcagagtacgatactcaggtcaaaggaatctggtggacagtaacaaactttggtgaaatttc

SEQ ID NO: 75370 - DNA, 80 bp, Homo sapiens
gaaagaagcggggcgaataagcacggttgagctacagaaaatgattttaacattatggcagggaggcatcagaatcgtag

SEQ ID NO: 75371 - DNA, 100 bp, Homo sapiens
gtttctttcaccgcagtgggctaccataaacacatcaccttgatttttaatcccacggacaaattgatggccaggagatcactgccaccgccgtgctggc

SEQ ID NO: 75372 - DNA, 96 bp, Homo sapiens
aagctcgcgccggatgcggagcgcggtgctgccggtggagcttcagcaagagcctcctgatctagcagccaagactccccctgacctttggccatg

SEQ ID NO: 75373 - DNA, 90 bp, Homo sapiens
ctggatctaattttcttccagaatccaaaatcatttttcttgaaaaaggacaagatcacacgcgctgcaacgtgtggattctggatggag

SEQ ID NO: 75374 - DNA, 97 bp, Homo sapiens
atcagaagcttaaaggaagcagaaaatgtgtggcggattactgggacagatggtgaccaagaatatggcccaggtgaccaaagccctggacaaggcc

SEQ ID NO: 75375 - DNA, 98 bp, Homo sapiens
ctccataaaaaatgtggtcagtgaacctatcgaaggacatgaagactaccacatgatgatgatcgacttgggactgctgcttcaccctggagcctatt

SEQ ID NO: 75376 - DNA, 75 bp, Homo sapiens
ggcttttaaggagcacgggaagatcacatcctgctgtattccgggttagtttgaccgcttacaaacacgcagatg

SEQ ID NO: 75377 - DNA, 93 bp, Homo sapiens
ccggcgtctcggcccttgcctgcgcgcctaccaggctcgaccccaggggcactatggcagacaaagttaggaggcagaggccgaggaggcgag

SEQ ID NO: 75378 - DNA, 100 bp, Homo sapiens
aaagaaaaccactgactacatctggatttcaccactcagaggatcagttcgacagcttagacaagcatacacaatggggaattgacttcttggaaagata

SEQ ID NO: 75379 - DNA, 74 bp, Homo sapiens
gccgcgcactcgcctcagctgagcctgggtgcatggaggactgcaacagaggagtgggggactgaagattggaa

SEQ ID NO: 75380 - DNA, 95 bp, Homo sapiens
agctcaccgacagtgccctgagggccttcgagagctaccgcgccagacagttcagaatgaccgaagaagcatgccgaacacggagtcagaaacga

SEQ ID NO: 75381 - DNA, 80 bp, Homo sapiens
ttatactcctcccagtgacgggtctggagtgcgtgggggaccggctgttggcggtgactgggccaactccaaatgtggac

SEQ ID NO: 75382 - DNA, 74 bp, Homo sapiens
gaatatttgtcccggcactggctcttcagtcccttcaagacagagcgggatgccaccagcttgtccaaagggaa

SEQ ID NO: 75383 - DNA, 90 bp, Homo sapiens
cccgactcctccgacgccgatccggacagcggcacagaggagggaggataacctttttgaatggcacttcacggttagagggcccccaga

SEQ ID NO: 75384 - DNA, 75 bp, Homo sapiens
atggcttccagtggaggcattttggggcagaatacagagatatggaatcagactctaaaatagagctcaagcttg

SEQ ID NO: 75385 - DNA, 96 bp, Homo sapiens
tccaccgtgattgtgagtttcctgaggccttccctagccatgcttcctgtatagtctgtggaacggctggttacatgtctgggatgctggtgcctg

SEQ ID NO: 75386 - DNA, 83 bp, Homo sapiens
acatttagagactgaaatcactgcaccttaaaaacaaaagattgagctgcactgtattcctacggaagtgaaaatgtgacagg

SEQ ID NO: 75387 - DNA, 83 bp, Homo sapiens
aaagattctgggaaatcagggctccttcttaactaaagttccaggagatgcctacaccgattatgtagctacgagatggtacc

SEQ ID NO: 75388 - DNA, 90 bp, Homo sapiens
tttgttacatttgcagatgatcagcccttgaaggtagtggacccagatcatcccctcgcagcacttgttcgtaaggcacaggctgacagt

SEQ ID NO: 75389 - DNA, 98 bp, Homo sapiens
ccttactggagcaagggaaagagtcctgcatggtttcaagggacgtaccaggaggatggtgcccaggtatggctttcccaacgaaaggctaagaattc

SEQ ID NO: 75390 - DNA, 75 bp, Homo sapiens
ccaaatttgaagagaatgcgcccgcacagtccatcggcatacggagacagggacagaagatgagcctgtcggtcc

SEQ ID NO: 75391 - DNA, 75 bp, Homo sapiens
gggaggggaaacacaaagccggctacgcgctgcgagtcctaccctggtccaagcctggaaagtgaagacttcaac

SEQ ID NO: 75392 - DNA, 100 bp, Homo sapiens
attattcaccttggtgctacttcttgctatgttggagacaatactggctgttttgctgcagcttctgaagtgttaaagcacttgaaggaacgatttccgc

SEQ ID NO: 75393 - DNA, 74 bp, Homo sapiens
tgcaacccgaagagagagtgaggagacttgaatgaaaattctgtggagaatcttcagcagaaaacacttcagga

SEQ ID NO: 75394 - DNA, 102 bp, Homo sapiens
agaatctctcaaagaagcttatcatatggagcatcccagccatcactcttccacctgctccttagagaagggaagatgagtgagtcgagctcgaagtccagc

SEQ ID NO: 75395 - DNA, 100 bp, Homo sapiens
gccggtgatatgatctgtcctgaatgtggcttggttgtaggaataagacgagttggaagaagacctgatcaacaacttcagggtgaagggaaaataattg

SEQ ID NO: 75396 - DNA, 98 bp, Homo sapiens
gaagccattgcccactgctgccgcccagtgtttgtccactggctccgtgacgcaggtgtcctcggtgagcacggattcggccggctcgtcgtactcca

SEQ ID NO: 75397 - DNA, 51 bp, Homo sapiens
ctatgactcccaacagtatgacaggtccaagggatgtccttcattgcagca

SEQ ID NO: 75398 - DNA, 75 bp, Homo sapiens
catcctgctgggcttcgtccagatcgggaagggtgtggatgtggaagcagccaagcgggcagaagaggaattgct

SEQ ID NO: 75399 - DNA, 82 bp, Homo sapiens
ccttgaccagcacacactgcaaggagatcagaataatgatctcctttgggaagactacgaggagaaactggctgaccaggct

SEQ ID NO: 75400 - DNA, 75 bp, Homo sapiens
acaacaccgcggaggaggacatggaggatggtaagaatgattgatgttggctgatattggagtgctcattcacat

SEQ ID NO: 75401 - DNA, 98 bp, Homo sapiens
tccggatctcttcgtctttgcagcgtagcccgagtcggtcagcgccggagattaactgctgaagtactgatcgagttctgcatttcttcaatgaggaa

SEQ ID NO: 75402 - DNA, 95 bp, Homo sapiens
gagactggagcagagccgctgggcgccggagccgaggcgagcgccgcgcgcaccactggcatttgtaaaggatgttcatgaagattcaataacag

SEQ ID NO: 75403 - DNA, 98 bp, Homo sapiens
ctcagctacgtcagctccaagatatgcaagatgtggggaaggtggatgctgcctgggagccatccaaaaacacgatgctgcagttggagaagaaactt

SEQ ID NO: 75404 - DNA, 100 bp, Homo sapiens
tgaatccgcctgccccagcagcggcctgatctgggttccgctgattcctttcgtaaccgcaccacacccgaggttttgtgatctctaacccagacctggt

SEQ ID NO: 75405 - DNA, 90 bp, Homo sapiens
acgcttctgagctaaaagcttccatgaagtctcaacagatcaccccccaacttgcccttcaagttctacttcagtttgataaggctataa

SEQ ID NO: 75406 - DNA, 98 bp, Homo sapiens
tatgctgactacgaatctgtgaatgaatgcatggaaggccgaagataccaagatgcaagagataatgaggttggctcatgaatttttgcagaatttct

SEQ ID NO: 75407 - DNA, 110 bp, Homo sapiens
ggttataccttattggtgtggacgttgtctaaatttcggtagccatggcacaagaatatagaggaaggctgaacaaggacctgcgacattttctcaatcagcgattccag

SEQ ID NO: 75408 - DNA, 100 bp, Homo sapiens
ccagcatatacaaaggcatggaagtatgaaaatgatggcccactgcgtgaccttggttcagctgtccatttcctgtgaccatctcattgacaaggacatc

SEQ ID NO: 75409 - DNA, 98 bp, Homo sapiens
ctaagaaggagcatgaaggcgcagtgcggctgctagaggaatgtatcctgtcaggtataatgtcagtgaatggcaagaaagttcttcatatggatcga

SEQ ID NO: 75410 - DNA, 83 bp, Homo sapiens
agccgagatgccgggggagcggggccttccacaccccctccgtgggtgtgtgggcagcgggtggcatgagacgtgggaacatg

SEQ ID NO: 75411 - DNA, 82 bp, Homo sapiens
cgaagatgtcagcctcccctgtcccgaacgcagtgtgtggaaaggtttccaatacttatctacaggaatcgccatgacccca

SEQ ID NO: 75412 - DNA, 98 bp, Homo sapiens
tctgcccagaacaatctgacaaaggcagtagatgcttttaggagaaaactggttgtcctggatgtttgaaaagttggtcgttgtcatggtgtgttact

SEQ ID NO: 75413 - DNA, 50 bp, Homo sapiens
ctaaaagaggcaatcaccgttcaggatgctgatatgctaactggtgatga

SEQ ID NO: 75414 - DNA, 92 bp, Homo sapiens
ctaataatgctggcaaagtggaaaaatgtgcgagctcttcagtatccccatcagccagtttccgaggtgctgagaagcacagaaactccgca

SEQ ID NO: 75415 - DNA, 96 bp, Homo sapiens
ggatggtttctaaaatgatcattgaaaacttcgaggcactcaagtcctggctcagcaagactctcgagcccatgcttgtaatgagccagtgctgcg

SEQ ID NO: 75416 - DNA, 101 bp, Homo sapiens
cttgagccacgtgcatgaaccaaacccacttcgttcaagacaggtgtttaagccatttgaaataccatacacaaatacatgtccgatctactagagggcgc

SEQ ID NO: 75417 - DNA, 100 bp, Homo sapiens
cttcgtctatgtggcgcccggcataggctccatggtccccttctcgatgcgcatcttgcacgcggagcttcagcagtacctggggaacccacaggagtcg

SEQ ID NO: 75418 - DNA, 100 bp, Homo sapiens
caggcgttgaggaagaagccacccgagcggactcccgagtaatagttatgcacgagtgcgagctgtggtgatgacccgagatgactcaagtggtggatgg

SEQ ID NO: 75419 - DNA, 100 bp, Homo sapiens
ggaggccctgcctatgaccagcaagaggatggggccctggatgagggggaagggcctcaaagccagaagataggtgaaaatggtgatcccaaagccttct

SEQ ID NO: 75420 - DNA, 75 bp, Homo sapiens
tattaactcatttaacttcacaacaaccctataaggacaagaagaggtatttacgcctcctggagattcacaaaa

SEQ ID NO: 75421 - DNA, 75 bp, Homo sapiens
ctcatcttgggaatctgcgtcagaagtcactcgcagtcccgtcagcccaggagaatgcagttgaaactaattttg

SEQ ID NO: 75422 - DNA, 75 bp, Homo sapiens
ggcggctgctgctgctgctgcccgcgtccgaggctcgcgggcggcgggcccggaggcggatgccccaaaccttcc

SEQ ID NO: 75423 - DNA, 100 bp, Homo sapiens
ccactgcacagttcgaggggccaaggcagaagaaatcttggagaagggtctaaaggttacccatgcagttgttactgtaccagcctattttaatgatgcc

SEQ ID NO: 75424 - DNA, 85 bp, Homo sapiens
agtgatatattcatgtggaactatgaggatgggcatggattccgtgaaggaacaacacctaaacccaagagggcagctgttgcag

SEQ ID NO: 75425 - DNA, 51 bp, Homo sapiens
cctcccagggccaggcgccgctcagaacggcccgggtcctttttgtgctga

SEQ ID NO: 75426 - DNA, 75 bp, Homo sapiens
ccctggagtaaccctcactggagaatccagagtttttggctttcacccccaaccagtgaccaaagacttgaccac

SEQ ID NO: 75427 - DNA, 50 bp, Homo sapiens
gcgatgatgccacattacctgttttttgaggaacaggcgttattttgttt

SEQ ID NO: 75428 - DNA, 82 bp, Homo sapiens
tttgggatcccgctgtggtacttctcgcagtccccgcgcgtggtcatccaggtactccaaagattcaggtttactcacgtca

SEQ ID NO: 75429 - DNA, 80 bp, Homo sapiens
gtcgattggcctggctgctgcctactacagcggaggctgggacagccccatctgcacagagggggtagtctctgtgtctt

SEQ ID NO: 75430 - DNA, 74 bp, Homo sapiens
acctacgtcccgctgccgtcgccgccgccaccatgcccaagagaaaggtttggaccttatgagtcttacgactc

SEQ ID NO: 75431 - DNA, 97 bp, Homo sapiens
gcgcttgtcatcatggcgacgcggggccatgtgcaggaccctaacgacaggcgcctccggcccatttacggcctccccatggccacccatggaccag

SEQ ID NO: 75432 - DNA, 51 bp, Homo sapiens
cggtttgctatcgggactcggcgaggacggctttcttagaaatggcttctg

SEQ ID NO: 75433 - DNA, 78 bp, Homo sapiens
caagtagctgggactacaagcccgtgccaccatgcccagaagaagttggattccatgggttccaagagaagaagagct

SEQ ID NO: 75434 - DNA, 100 bp, Homo sapiens
tttgaaacttttatctcatctggcttggcgcctgaggttctcccattagggatcgcttacacctgagacgaactacagaacagcacgtaccagaggtgga

SEQ ID NO: 75435 - DNA, 76 bp, Homo sapiens
caggatggaggagagtgtgtcttaatcaaaacccacagaaagctgtatgtgatggcttctgtgtttgtctgtctac

SEQ ID NO: 75436 - DNA, 74 bp, Homo sapiens
ggcagctctcactcaggcaaagtgatgcagccaacacgaacggttgtcatgtgtaacacaactttcgatcaccg

SEQ ID NO: 75437 - DNA, 74 bp, Homo sapiens
ctgcagccacatactatccgtttgttcaggaaccaccagtgacagattcttggagaagctgaatatcttctctt

SEQ ID NO: 75438 - DNA, 100 bp, Homo sapiens
ctgggcccagctgccggctacctgattggaggtgccctgctgaatatctacacggaaatgggccgacggtttggtgcacctcgatttggaggaagtaggg

SEQ ID NO: 75439 - DNA, 75 bp, Homo sapiens
ctcctctccaccagcgccaagagtattggtaaaggttttcaaggtgtcatgaaaagatggggatttaaaggccag

SEQ ID NO: 75440 - DNA, 98 bp, Homo sapiens
ctcgagacttaccagagccacaaggtcccagtagggatggcacaatcagcgaggacaccatccgagcctctctcatctctgcggtcagtgacaaactg

SEQ ID NO: 75441 - DNA, 101 bp, Homo sapiens
ttttctctacaaagctgggggaggctcatatattgctgcaggaatgggtaccacagaccatgtcatcgtcctggcgtccacgaaccgagctgacattttgg

SEQ ID NO: 75442 - DNA, 75 bp, Homo sapiens
ctgctgacccagggctgggcggagatcctggtccggaggcccacagaccatgctcgacagctgaccaaggccatg

SEQ ID NO: 75443 - DNA, 82 bp, Homo sapiens
aggcgggcgcggaggcggctagaaggtgaccgcggatcccagcttcctgcagccagccctggactttgtctcacaagatgaa

SEQ ID NO: 75444 - DNA, 90 bp, Homo sapiens
ccaggtggtcactggatgcaaggcattgacagatggatcccatcgatacccccactgcaaaaccatgtccacaaggcgattacaatttcc

SEQ ID NO: 75445 - DNA, 51 bp, Homo sapiens
cagaaacatgctgagcctttgacagtgaatctacagacctattttctcagg

SEQ ID NO: 75446 - DNA, 100 bp, Homo sapiens
cttttgcctcagatactattttgaaggaggaagattatccaggagctattcagttgtgccttgaatgtcaaaaagctgccagcacttttaaacattacag

SEQ ID NO: 75447 - DNA, 97 bp, Homo sapiens
agaagttaatccacaaatgcttcaagacttgcaagctgctggatttgatgagctaaacccacagttcagccctccccttctacaacttccaagacag

SEQ ID NO: 75448 - DNA, 100 bp, Homo sapiens
gatgaaagatttgggcttgaagacccagaagatgacatatgcaatcagcagtcagcagaggaccttgcccgagtacctgccaactccactagcaatatct

SEQ ID NO: 75449 - DNA, 100 bp, Homo sapiens
ggcggagcagacacagactatgcagatgggagtgatcagggccaaagcggtcagtgagaaggaagtggactctggaaacgacatttatggcaaccctatc

SEQ ID NO: 75450 - DNA, 100 bp, Homo sapiens
caaagacattcacaacatggatgggtcccactccattgcccaagctgaagttcagtggcacgaacatgtttcactgcagcctcaacctcctgggctcaag

SEQ ID NO: 75451 - DNA, 74 bp, Homo sapiens
cgcaggaggatgaagctgctgctgggcatcgccttgctggcctacgtcgcctatattgaagcacagattcgaga

SEQ ID NO: 75452 - DNA, 90 bp, Homo sapiens
ccgagagcgcgaatatcgtcatcgttagaagggtttgctgaactaactccaagctggtgtgcctagcgtccgcgcggctgccggcccaag

SEQ ID NO: 75453 - DNA, 75 bp, Homo sapiens
gcactggactcatggaggctgagcatttattcagaacctaaggaaattagtggtcatacttctggtataaaaaaa

SEQ ID NO: 75454 - DNA, 109 bp, Homo sapiens
cgcaagctgagcgagctgtcagagcccggggacggcgaggccctcatgtaccacacgacaatgcagatcttcgtgaagactctgactggtaagaccatcaccctcgagg

SEQ ID NO: 75455 - DNA, 100 bp, Homo sapiens
attggtgtggggctgggcctgccatcattcaaaccaggggtactgggcctaatcgctacgtgcctctttggctatgatgcctatgtcaccttccccgttc

SEQ ID NO: 75456 - DNA, 104 bp, Homo sapiens
gtaacaagaatccaaagaaaacaaaatggtggtatcatgatggagaggagaaaacctatggtggctgtgaaggacctgatgccatgtatgtcaaattgatatca

SEQ ID NO: 75457 - DNA, 100 bp, Homo sapiens
cctcattgaatttctgctgcaccgggcctactcggagcttatggtgttgacggacctgccagttggacaaatgcgagtaaaaagcaacgtgaaaagctac

SEQ ID NO: 75458 - DNA, 74 bp, Homo sapiens
gggagccggagagccggaaccggagtcgcagcggcgagatcgagatggtgatcatggagcgtagcaagctctca

SEQ ID NO: 75459 - DNA, 50 bp, Homo sapiens
cctacagcagcttcggcggcggcagaggtgtactaatggtcacttgatgt

SEQ ID NO: 75460 - DNA, 75 bp, Homo sapiens
gacagttttgacaacacctatcaggcctgtagtggtggagacacgcccagtggatgatcctactgctcccagcaa

SEQ ID NO: 75461 - DNA, 100 bp, Homo sapiens
ccctcacccaggcccctgtcaagaaggtgccggtggtgcgagtcttcggagcgaccccggcagcactattcctgatcagagaactccagttgcttcaaca

SEQ ID NO: 75462 - DNA, 100 bp, Homo sapiens
cttgttcttggactgggccaaggtgacctgatggccaaaagaaaggaagaaaatttttcctctcctaaaaatgccaaaaggccaagacaagaagaattgg

SEQ ID NO: 75463 - DNA, 74 bp, Homo sapiens
ggtaacaaacgagggttcccgggattggaccgacgcagccatgttgaggagctcaagcttgggaaaatggtgtg

SEQ ID NO: 75464 - DNA, 50 bp, Homo sapiens
gaagaggagcgtgctcaatgggagattttaggtgatgggcaagtcagaaa

SEQ ID NO: 75465 - DNA, 99 bp, Homo sapiens
agcctgatctaacccctagaaacagatcagcatcttcatgacgcacctgtccaactatgggaatgaccgcctgggcctgtacaccttcaagcacctggt

SEQ ID NO: 75466 - DNA, 76 bp, Homo sapiens
aaaggccccatcttcccttcacacctgttccaatttgagccgctgtgaaaaaggcctccaccagcctctcaccaga

SEQ ID NO: 75467 - DNA, 119 bp, Homo sapiens
caggctgatggcggaggcttcgagtgacccgggtgccgaggagcgggaagagttgctgggacaatgcagatcttcgtgaagactctgactggtaagaccatcaccctcgaggttgagcc

SEQ ID NO: 75468 - DNA, 83 bp, Homo sapiens
gggacaatggtcaccgtctcttcagacttcccaagtaagaagcggaagaggagccgctggaaccaagacacaatggaacagaa

SEQ ID NO: 75469 - DNA, 100 bp, Homo sapiens
acagaatggtccgagcatgcattgccattatctgtgaactaggtctggtgagctgtaccttctttctggcagtgaatggtctgtattcctctagtgatga

SEQ ID NO: 75470 - DNA, 90 bp, Homo sapiens
agtgaaactgatcagacgaactacgaacccctggacgggagagtctgccggcggagaatataagatgtgccaggtgcagagattaaggag

SEQ ID NO: 75471 - DNA, 83 bp, Homo sapiens
cggcgcccgcagccgcagccccctgctccggaggctggtgcagagttgatctctctaatgtattagatcttcatgcctttgat

SEQ ID NO: 75472 - DNA, 99 bp, Homo sapiens
tactccatgtttgcagctaaacttctgactcacatgatggcagccagcttaggtacacaggagtgctcctttccatggggtttggatttgtggaataca

SEQ ID NO: 75473 - DNA, 82 bp, Homo sapiens
ccgccttctctgtcagctctttccccgtcagcatcccagccgtgctcacggtggtgcggttgtgtcagaacccaaagctggc

SEQ ID NO: 75474 - DNA, 100 bp, Homo sapiens
ggcgtaggaccctccgagccagtttgaaattggcacaatggaagaagctggaatttgtgggctaggggtgaaagcagatatgttgtgtaactctcaatca

SEQ ID NO: 75475 - DNA, 80 bp, Homo sapiens
atctcagagctgggtgccaggctgaaggatcactgaggaaggggaagtgggcaaagcagttaagggaagaaagtcggagg

SEQ ID NO: 75476 - DNA, 78 bp, Homo sapiens
gagctccccactggctttggctggggacacccgacctctttcgacgtgtagcagcagctttgccgggaatggaaagca

SEQ ID NO: 75477 - DNA, 90 bp, Homo sapiens
cttggaattacatagctggaaaggatcttacaggagaataaaggcagccccgttgatgactgaaaatgacaaagcatccacctaacagac

SEQ ID NO: 75478 - DNA, 100 bp, Homo sapiens
aatctgagggtgccctcaatgagcacatgaccagcttagcttctgtcctaaagtcattggagaaatcgatgaagaaacagattctgcgcttgatttgggg

SEQ ID NO: 75479 - DNA, 118 bp, Homo sapiens
aaatgagtgctgaaattaatgagataattcgtgtgttacaactcacctcttgggatgaagatgcctgggccagcaagccatcttctctacgaagagtgactattgcctctttacccag

SEQ ID NO: 75480 - DNA, 83 bp, Homo sapiens
caacaaagccctcccagcccccatcgagaaaaccatctccaaagccaaagggttgatggtgcatgttgataaaagaattactc

SEQ ID NO: 75481 - DNA, 122 bp, Homo sapiens
acatgcctgaggtcctcaagtccctgctggagcactctctgccttggccagagaagagaacagggtatcgggtgctgcttcggtatgaaggctttgaaaatgacgccagccatgacttctgg

SEQ ID NO: 75482 - DNA, 120 bp, Homo sapiens
cagacgggcgtcttctacctgacgctcgtcctcatcctggtcactagcggactcttcttcgccttcgagacatgtctcaggaaggctatggaactagatctcaacctcctctggcccccg

SEQ ID NO: 75483 - DNA, 87 bp, Homo sapiens
gcgagagagcgcggccctcaggagcaaggcgttgaggctgtgaagctgggcagggtttcagctgagctgaggttggaagtccctgac

SEQ ID NO: 75484 - DNA, 75 bp, Homo sapiens
acaactcagagctgttgctcatgctggagtctccagaatccctccatgccaagcctgccctcctatacctggtcc

SEQ ID NO: 75485 - DNA, 96 bp, Homo sapiens
agaagtcttgaatgactggaaactgattggaaactctttgggaaagccactcgaaaagagtaccttcaagtttaaatctgagagtgatattcattt

SEQ ID NO: 75486 - DNA, 95 bp, Homo sapiens
tatagcaatctggttttcttgggtaaggtactcaactgtgtggggtactacataaatcctgaaagactacaataaagtggtgatgtctcgggaac

SEQ ID NO: 75487 - DNA, 82 bp, Homo sapiens
gttccattggcaagctacaataatggggccattgctctaggtcgtaaccagcctttgaaaaaggagaaaccaaaatggaaaa

SEQ ID NO: 75488 - DNA, 100 bp, Homo sapiens
ccggaccaaggaggaggccctggagctgatcaacgaaatgactgctgtccatgcaggcaacataaacttcaagtgggatcctaaaagtctagagatcagg

SEQ ID NO: 75489 - DNA, 50 bp, Homo sapiens
ctggattgggaaagaccatggcagactctttggcagttgcactgggtact

SEQ ID NO: 75490 - DNA, 99 bp, Homo sapiens
tgttgccatgaggcgaggctagggaggacctcacttccccggggtgtaataatgttaactgaggtgtgaaatctaagaatcccctgccaactcttgagg

SEQ ID NO: 75491 - DNA, 98 bp, Homo sapiens
ttctggagttcgaatttcggccggacgttatctgaaaaactgcaagacacagagaatgaagccatgtccaagattgtggaactggaaaagcaactcat

SEQ ID NO: 75492 - DNA, 74 bp, Homo sapiens
gaagtgtctcttagcagcgcgcggagaagaacggggagccagcctcccgcgacgatgcccctcaacgttagctt

SEQ ID NO: 75493 - DNA, 50 bp, Homo sapiens
aaagtgttacatgacagatgtatgaggatttgacgggatctgaactatac

SEQ ID NO: 75494 - DNA, 50 bp, Homo sapiens
gccaaggttattctgggccggtaccagattccagtgctgaatattcaaat

SEQ ID NO: 75495 - DNA, 100 bp, Homo sapiens
gccggcggcggctcggccgcccagcgtggactccttgtccaggtggctcatccacaataagcttaaactctaaccaggctttggcaaacccagtttcaac

SEQ ID NO: 75496 - DNA, 98 bp, Homo sapiens
gggtggcggcggtcgacatgttccaggtcccggatagcgagggcggccgcgccggctccaggaggtgcttcccaaggaccgtagatgcctctctagag

SEQ ID NO: 75497 - DNA, 75 bp, Homo sapiens
ccgagatgacttggatctgcagaacctcattgattttggccagaaaaaggttgactgggcagagtgacgatgagc

SEQ ID NO: 75498 - DNA, 100 bp, Homo sapiens
aaaaagtatcgtcgagaagcctatcatcgtgccggtggtggtgtgcacattgagccccggtatagacagttcccccagctgaccagatcccaggtgttcc

SEQ ID NO: 75499 - DNA, 100 bp, Homo sapiens
agaggcgcagcctcaaggaggaggagtgtccagcagtgccggtggtggtgtgcacattgagccccggtatagacagttcccccagctgaccagatcccag

SEQ ID NO: 75500 - DNA, 99 bp, Homo sapiens
catgggaaaatcatggaagttgattactcagtctctaaaaagctaagctggagaatgctggaggagaccttaaggatggccaccaccactatgaaggag

SEQ ID NO: 75501 - DNA, 78 bp, Homo sapiens
tggagaatggcatgctggtgacggacagtgcagggaagcaactgcagagcaacacggaggtagtcacgtttcccggaa

SEQ ID NO: 75502 - DNA, 90 bp, Homo sapiens
agtgcagcgcggagtgggcgatgccagcgtgccagttctttggggtgactttcaagatggactctactctaacagcaagtgaaatccggc

SEQ ID NO: 75503 - DNA, 95 bp, Homo sapiens
ctgaagagtaactttgccctcctcctaaaggaagccattaatttgctagaaccaatgacaaacgaccccgtgaactacgtgaggcaaggggcact

SEQ ID NO: 75504 - DNA, 98 bp, Homo sapiens
acagaggaagaggaaggaaaagacaatcattgcttcaagaatgctgacccttgtagaatacactcagaagaagccttgtttttactggcaacctgtta

SEQ ID NO: 75505 - DNA, 83 bp, Homo sapiens
ggtcttcctgctggggctcatgtttgagagttgttagcggttctcgagatgccactcttagggtttgggatattgagacaggc

SEQ ID NO: 75506 - DNA, 82 bp, Homo sapiens
aaccccgatcagaatgccaaatgtgtttgcatgctggataccatgtttgtgtggaagtgccccgtgtttgctatgccgatgc

SEQ ID NO: 75507 - DNA, 76 bp, Homo sapiens
attggaaactctgtttacgttattatcaacacaggaccaggtgaccattgtgaggtagatattttgttctaatttt

SEQ ID NO: 75508 - DNA, 75 bp, Homo sapiens
ccctcatggggaaaatctccccggtgactttcaggggctactgttcccgtagacaaagacgtcttcgaaaaacac

SEQ ID NO: 75509 - DNA, 75 bp, Homo sapiens
ggggactattgacagcacccaccttggtgaatgtagtctaagagcactgaatcgagtactacatgatgaaattct

SEQ ID NO: 75510 - DNA, 90 bp, Homo sapiens
ggaaagggccttcttcctcttcgacaaccttctcgtctactgcaagcggaaatccaggatacttttgtggaactctatgggaacaatgca

SEQ ID NO: 75511 - DNA, 97 bp, Homo sapiens
atgcaaaggaaaagaggactggagtggtttgtctgtgatggctggaagttcctctgtaccagaacactatggctatgcatcctccaacgtcagcccc

SEQ ID NO: 75512 - DNA, 100 bp, Homo sapiens
agatctgcgaacatgatgcacgtgaataattttccctttagaaggcattcctggatatgaatggctattcaagtggacaagttcaactttgagagtttcc

SEQ ID NO: 75513 - DNA, 75 bp, Homo sapiens
tgatccgcctcttccaggagtgggagaagatggctgtgccacccacgtatgccgatcttggcaaatctgccaggg

SEQ ID NO: 75514 - DNA, 100 bp, Homo sapiens
tgagtgccattacttcatctgtgatgtgggcaaccgggaggaggtgtaccagacggccaaggccgtccgggagaagacatccaacacgctgacatgggcc

SEQ ID NO: 75515 - DNA, 75 bp, Homo sapiens
cagcgggacgcgccgctggagaatgaagagttcacccagggcatgatcttacctacaatgaatggagagtcagta

SEQ ID NO: 75516 - DNA, 100 bp, Homo sapiens
acagcagagttatggagcttttcttcacagttataaacaacttgtgaaatgagtgatttggaagatgatgagacaccccagctttctgcccatgccttag

SEQ ID NO: 75517 - DNA, 82 bp, Homo sapiens
gaggtcctgccgtccatgcggaagatcgtcgccacctggatgctggagtaagactttgaccccgacgcaggcttcagtgatt

SEQ ID NO: 75518 - DNA, 75 bp, Homo sapiens
aagctggccggggcctgggcctgagcatcgttgggaaacgcacttgaaaagtcttatgacacgtccttctggcct

SEQ ID NO: 75519 - DNA, 100 bp, Homo sapiens
aggtcactgatcaagcaaaaatggatgtgaaaattgcggttttgcctctggttgtcttcttgcctgccctgtgtcgtaaaatgggggtcccttactgcat

SEQ ID NO: 75520 - DNA, 74 bp, Homo sapiens
tggaagtcacctatgaagccatcgtggacggagggatttgtatcgttgtgcccgtgtcagctcctggggagatc

SEQ ID NO: 75521 - DNA, 98 bp, Homo sapiens
caggagccgcggagccggcgctgagaggggctgcggccggagcgggcggctgagacaaaggcgacgatcggcgcctacttcggggcctccctctgctc

SEQ ID NO: 75522 - DNA, 75 bp, Homo sapiens
gatcggcggagaccctcgaagtgcgcaaacttgacactcaccctgaccgcaaactgaaaccgtgtcagttcagtc

SEQ ID NO: 75523 - DNA, 89 bp, Homo sapiens
gcttcagttctcccggtgtggccacgagtcggttgacttcaagcctcgagccagcatggatactgtccatcacatgttactttttggat

SEQ ID NO: 75524 - DNA, 90 bp, Homo sapiens
ggaaagacgaggaaagaggaggaaaacaaaagctgctacttatggaagatacaaaggatactgtggcctcatgaataggaatgtctgccc

SEQ ID NO: 75525 - DNA, 90 bp, Homo sapiens
caggttgcaagatttaatgacctcaggtttgtcggtcgaagtggaagagacttgtgcaccatggacaattttgctgagggagatttcact

SEQ ID NO: 75526 - DNA, 100 bp, Homo sapiens
gttccagtctctgcagtctttatggacaaacctgaagagtttatatctgaaatggacgctgctctttggcgtaaattgcaatcgattagggatcgtttct

SEQ ID NO: 75527 - DNA, 100 bp, Homo sapiens
ggggagccctggttccatgggaagctgagccggcgggaggctgaggcactgctgcagctcaatggggacttcctgctctcctgccacagctcctcacccc

SEQ ID NO: 75528 - DNA, 74 bp, Homo sapiens
gtttaaccccaagaccttcttcatactgcatggtggcaagtgcaggcagctgtcccggttatgccggaatcgtt

SEQ ID NO: 75529 - DNA, 134 bp, Homo sapiens
gggaagcgtctccgttgggtccggccgctctgcgggactctgaggaaaagctcgcaccagacaatgcagatcttcgtgaagactctgactggtaagaccatcaccctcgaggttgagcccagtgacaccatcga

SEQ ID NO: 75530 - DNA, 100 bp, Homo sapiens
caccaagtccgctccttcttccagagactgcagcccggactcaagtgggtgccagaaactcccgtgccaggcatcagagcggagacttcagggagaccag

SEQ ID NO: 75531 - DNA, 51 bp, Homo sapiens
ggacccgaaagccgctgggaaaataagactttgaccccgacgcaggcttca

SEQ ID NO: 75532 - DNA, 100 bp, Homo sapiens
gttggggccctcttgataaaaagagatgtggggggattctcgacctgctaacagaactggaccttttcggtgtcatggagaaactccagctgggcccaga

SEQ ID NO: 75533 - DNA, 109 bp, Homo sapiens
ggcgctctcctggctcccttctgccccagctccgtctcggcggcggcgggtacctgcacatgttgttctttgtcagtgctgtcaagtgtgtgccagggtgatccatggt

SEQ ID NO: 75534 - DNA, 101 bp, Homo sapiens
ggggaggtctgcagcgctgaagacttcaaggtgtacctggagtagaacagaaaaattattatgtctgtgttcccttgggactcattggaaattgtacagtg

SEQ ID NO: 75535 - DNA, 83 bp, Homo sapiens
ccaggacctccaggggaacaatgaggcctacgcagagctcatcgtccttgaaaccatcatagcctttgcctgggaaccaaatg

SEQ ID NO: 75536 - DNA, 100 bp, Homo sapiens
ggacccaggaggggccaacatgtgatgggactcctctcccagagccggggacatcagagctgagagggtatgttagagcccaccaaggaaccactgaaac

SEQ ID NO: 75537 - DNA, 97 bp, Homo sapiens
gaagatcttttggatcagcttgtgaaatacggagtgaatcctggtcctattgtgggtctcctttacagaaaggggcttggataaggaggaaagacca

SEQ ID NO: 75538 - DNA, 90 bp, Homo sapiens
agaagatccttcaaaattaaaagaggagcagcatggcatttcagtcactggtttgcagagtccagatttgttcccgacaaggagttttct

SEQ ID NO: 75539 - DNA, 100 bp, Homo sapiens
ggatcgtggcctctcgagagcaaggttttctgtctcaactggtctctgacaagcctctgactgaatgtatccgtgctggccactatgcagcaagcatcat

SEQ ID NO: 75540 - DNA, 87 bp, Homo sapiens
cctgaagaagcctcctgcctccaaatgcccccatcgctatacaaaagaagagagaagggcacagttacctaagtatcaacgtaatct

SEQ ID NO: 75541 - DNA, 75 bp, Homo sapiens
tccacgaggaacaaattgtacatttgcccattctcaggaagagcttgaaaagagccatgaccctctgcattacaa

SEQ ID NO: 75542 - DNA, 100 bp, Homo sapiens
ctttatacagggacgtgatgctggagaattataggaacctcgtctccctggactgccactctccgcccctacctgagtgccgtgcgggccacattgcagg

SEQ ID NO: 75543 - DNA, 76 bp, Homo sapiens
ccaacagcccagtgcttctgtctcgactgcactttgagaagcacaggagaaaacgacgctccacacctttaacttc

SEQ ID NO: 75544 - DNA, 100 bp, Homo sapiens
ccaaatcgtggccccttcgacctgcgctccgcgctctggcgctacggtctggccgtcggctgcggcgccatcggtctctcaggcagctgcagagcttcaa

SEQ ID NO: 75545 - DNA, 100 bp, Homo sapiens
atcctggttcttccaaagtgcccggacccaaaacaggaaacgtgaagccctccaatatgctagtaaacacaagaggacaggttaagctgtgtgattttgg

SEQ ID NO: 75546 - DNA, 143 bp, Homo sapiens
caaagacccattacagatgaacacctatgttgccttgtacaaatttgtaccacaggagaatgaagatttggaaatgagtgcccaccagaagtatgtccgacaagcctggcagaaggcagacatcaatacaaaatgggcagcca

SEQ ID NO: 75547 - DNA, 75 bp, Homo sapiens
gagctgattcagcgcatcggcagcggcacctacggcgacgtctacaaggagatacaactcgtcaacgaatcaaat

SEQ ID NO: 75548 - DNA, 100 bp, Homo sapiens
tccaagataaagcaccaacacctgaggacagcaggcgccttctgcggcaggcggacagatcctcggcgcggcagggccggggcaagctggacgcagcatg

SEQ ID NO: 75549 - DNA, 83 bp, Homo sapiens
ctcgtttcagagcccgaatcctcatctttaatattgaaattcctatcactaaaggatttcctactgtattatgaagaaagcag

SEQ ID NO: 75550 - DNA, 96 bp, Homo sapiens
aaatccaaaggtgaatcttttggttggtgattttgatgatagccacaaagcaagcagggttatcaatactctggctgaccatcatcatcgtgggac

SEQ ID NO: 75551 - DNA, 100 bp, Homo sapiens
tggtgcacccccagtgggtcctcacagctgcccactgcatcaggaagatttgatcaaagatctgaaatctgaactgtcaggaaactttgagaagacaatc

SEQ ID NO: 75552 - DNA, 100 bp, Homo sapiens
accggctcgtggtggtcggcgggggcggcgtgggcaagtcggcgctcaccatccagttcatccaggtggtgctggctagagtgtatacgtttggacccaa

SEQ ID NO: 75553 - DNA, 100 bp, Homo sapiens
gcccccccttccccacgcaaccccagatccatttacactttacagaccagtcctgcctctgttgtagaagacatgtggtgtatataaagtttgtgatcgt

SEQ ID NO: 75554 - DNA, 75 bp, Homo sapiens
ttctcagcctcctgtgaccactgttgcaatggtgaactagacccctggtcaggaggtggagtaactaaggatatc

SEQ ID NO: 75555 - DNA, 75 bp, Homo sapiens
ctggaaagaagatgctaattaaagtgaaggcggctgccgagtgatagagcagaaggaggttcccaatgggctcag

SEQ ID NO: 75556 - DNA, 100 bp, Homo sapiens
atggatcctactggtaaaactaggcagaagctcctcctggggtagagacagatcttattgatgttggattcacagatgatgtgaagaaaggaggccctgg

SEQ ID NO: 75557 - DNA, 95 bp, Homo sapiens
tcatacgtgacttgactggttcgaggacagcacccgccaacctcctggaaggtgcatattggcgttcctgtgctatgatgatgggctgtgtgata

SEQ ID NO: 75558 - DNA, 83 bp, Homo sapiens
tggggagtctgaggccaatgtcagagaaatctttgacaaggttatcaatactctggctgaccatcatcatcgtgggactgact

SEQ ID NO: 75559 - DNA, 95 bp, Homo sapiens
ccgggccccgcgagtgccatggcggccgccctgggagcgagcggaggagcaggcgccggaggaggaaaaggcttctcttttacatcgtactcagg

SEQ ID NO: 75560 - DNA, 75 bp, Homo sapiens
tgtcggccattgagaaattgttgaggcaggaagatgatccctatgatcttgaagatgtttctgcacagaaatgag

SEQ ID NO: 75561 - DNA, 83 bp, Homo sapiens
ggcgtccgagtcaacaaccgcttcgagctgggctgggttacgacccctacaaccctgagctgcccaagccccccgcgcagagg

SEQ ID NO: 75562 - DNA, 100 bp, Homo sapiens
acaacaactagaggaagttaaagcaattaacatagagatgtatcaaaagttgcagatttcagaagaaagtggtagcttcctttccaagaacagttctgag

SEQ ID NO: 75563 - DNA, 104 bp, Homo sapiens
cagagagctgcggcgggagctgtatggccgccgtcgcaagaagttcccgtgtcagtggctatgatgacacctcaagttatcactccccagcaaatgcagcagat

SEQ ID NO: 75564 - DNA, 51 bp, Homo sapiens
ctctgtgtgctacgccaagaacgggcaggttgattcttcaccacactgaaa

SEQ ID NO: 75565 - DNA, 100 bp, Homo sapiens
gaggctttagcccgcttcgagcgcccgggggcgttcttctcaccactaaatccaatacgagttcatattgatattggagctgatggcagagccacaggag

SEQ ID NO: 75566 - DNA, 100 bp, Homo sapiens
taatgttcaggccatggaagaaatgatgatggaaatgaagtataataccaagaaagccccacttgttgacttgctggtgaaggtgggggaggttgtggac

SEQ ID NO: 75567 - DNA, 48 bp, Homo sapiens
cccagcgtccctcccggaacggtgaacctggccacccttgactccgag

SEQ ID NO: 75568 - DNA, 75 bp, Homo sapiens
tattcgcggagctggaatgactggcaacccaggtatgtgacgcattcccagactcttcagccaactgagcatcag

SEQ ID NO: 75569 - DNA, 100 bp, Homo sapiens
aaagatctagttgcgcaaactgcacagccagaccaacccaattatgatgtacttgaaggatataatggaacaatatttgcatatggacaaacatcctctg

SEQ ID NO: 75570 - DNA, 82 bp, Homo sapiens
tgtactgctccccaagaagactgagagtcaccacaaggccaagggagcccttcagactcggactcccaagagcccacctatc

SEQ ID NO: 75571 - DNA, 74 bp, Homo sapiens
agagaccatttttcccaatactttatgtaataaggtatttgtggaaacattagacaaatgttttgaaaatgtct

SEQ ID NO: 75572 - DNA, 75 bp, Homo sapiens
ggggatcttcgcactatcccaagagcactacaaacaccactggtttcccgaaaagccgtccaagggctccggcta

SEQ ID NO: 75573 - DNA, 96 bp, Homo sapiens
gccaggcgccggccggctgcgaagacgcggtgggccgcccctccgctttgccctttcggatgaagcatacagatccctacgagatcaagataagga

SEQ ID NO: 75574 - DNA, 100 bp, Homo sapiens
gaagctgcaggccttgaaggacacggccaaccgcctacgtatcagctccatccaggccaccactgcggcgggctctggacgaagggaacgtcatcgtttg

SEQ ID NO: 75575 - DNA, 100 bp, Homo sapiens
ctgaattgaaacaacttcagctgtttgcttttaggatgtctcgccgcaagcaagcgaaaccgagatccctcaaaggtgctaaagagattgatatcgcagc

SEQ ID NO: 75576 - DNA, 100 bp, Homo sapiens
ctacaattggcatgcttcgagaatcaaggcttcttgctcatttgccaaaggaaatgacgtgaccaagaatatggcccaggtgaccaaagccctggacaag

SEQ ID NO: 75577 - DNA, 100 bp, Homo sapiens
gggccgcagaccgtctggaaatgcgaatcctaaagcgtttcctcgcttgcattcagctcctctgtgtttgccgcctggacggagtctcgctttgtcgccc

SEQ ID NO: 75578 - DNA, 75 bp, Homo sapiens
tagaagacatgtggtgtatataaagtttgtgatcgttggcggacattttggggctccatgggccttaccccttcg

SEQ ID NO: 75579 - DNA, 100 bp, Homo sapiens
ccagctcctggcgataatgtgtgtctcctgtatttgttggagcccatttctgtgccagggcaggggcccttggagtgacttggctggggtctgtggcccg

SEQ ID NO: 75580 - DNA, 80 bp, Homo sapiens
aacccgcgaaatgatgggatagcgttgcaaatccttaaaagagtcttaacgacagcccacctgaggatattgaccataag

SEQ ID NO: 75581 - DNA, 100 bp, Homo sapiens
ttatgctgtagacatttctttgtggtttatctaaaaaccaaagattggtggaacgagaatgcctacacgcagccacaggaatccagtttccatggaaacc

SEQ ID NO: 75582 - DNA, 75 bp, Homo sapiens
tggacgtctggggcaaagggaccacggtcaccgtctcctcagagaccatcatgcagacatcagagactgggtcgg

SEQ ID NO: 75583 - DNA, 75 bp, Homo sapiens
gaattccactgagtggtaatggatgatgcagttcaaataactaaggtagctttggatatgttaaatcctcatgtt

SEQ ID NO: 75584 - DNA, 82 bp, Homo sapiens
gcctgggctgccggcacttcgcggcaggggctttgaccacgacctttgaagagcttcattttgagatcaagccccacgatga

SEQ ID NO: 75585 - DNA, 49 bp, Homo sapiens
tcctgtacagcctgcagaactgagtctaccatggctcaagaatctccca

SEQ ID NO: 75586 - DNA, 98 bp, Homo sapiens
cccacccccaccgccaagcagccacgagaaaggtacagagccagatggactccttcggacaaactacagttctgtgttaacaaatgttggtgctgctc

SEQ ID NO: 75587 - DNA, 98 bp, Homo sapiens
gtgcatccttggcagaaagtgaggaggaaaacacccccattgattatcgagattgcagcctgtcactccacacacacgtctgcggccaagacgcaggg

SEQ ID NO: 75588 - DNA, 74 bp, Homo sapiens
ggaagatgaccagaggactagacctgaagtttcaaagataagccaatggacacgtcagtgttatctgaagaagg

SEQ ID NO: 75589 - DNA, 83 bp, Homo sapiens
gcatcttcccttttgcacctccgggagctgctgctgggggatatgagactttctactcggaatatcctgagtgttgcgtggat

SEQ ID NO: 75590 - DNA, 74 bp, Homo sapiens
aacattggctcaatagcaagaatgtgtgcccttaatgaaaaaatcctttgagtttgaggatgcatccagtctcc

SEQ ID NO: 75591 - DNA, 74 bp, Homo sapiens
ccgggccccggacgccgcgcggaaaaggtcatcagaagattgagagaaagaggagaaccaatcagactatttgg

SEQ ID NO: 75592 - DNA, 101 bp, Homo sapiens
aagagattcagccagcacactcctcgcgagcaaggcataatcaccagcaacacccgggacaataatacgggggccacctacccccacctgaacttcagcat

SEQ ID NO: 75593 - DNA, 96 bp, Homo sapiens
caggctccgggctgaagattgcttctcttctctcctccaaggtcatcatcagatttgaaatatttaaagtggatacaaaactatttcagcaatgca

SEQ ID NO: 75594 - DNA, 50 bp, Homo sapiens
gaagaatatgtctgccagtgaggagtccttcaataatgttaaacagtggc

SEQ ID NO: 75595 - DNA, 100 bp, Homo sapiens
ttatgcaaacggtgaccctcatgttggacatgctttaaataagcatgaagagctaatgctaggggatccctgccttaaggatttgaaaaaaggagatatt

SEQ ID NO: 75596 - DNA, 78 bp, Homo sapiens
atccttttgctcctggtggaacagttgttgcagcaagcgattcaggaataagacgagttggaagaagacctgatcaac

SEQ ID NO: 75597 - DNA, 100 bp, Homo sapiens
gtgtttgccttccatcatgctaacttcccaccccgagctacactggaaatcctcatccctgactttgttaaacagacctctgaagagaagcccaaagaca

SEQ ID NO: 75598 - DNA, 75 bp, Homo sapiens
ttttgtggcacctatctatggtgcagatattaatgggagcatatatgatgagcaatcccacagagtattgatgag

SEQ ID NO: 75599 - DNA, 100 bp, Homo sapiens
gttcatggccccgcgatgaagtcgagatctcaaatactgatacactgcctctaggactgggacagatagccactgagtacctgcttcaaatcaccctgca

SEQ ID NO: 75600 - DNA, 99 bp, Homo sapiens
cggagtcggagggcttggagttccaggtgttgggggccttggagctgccactgcagagccccgccatggaagacacgccgttggtgatatcgaagcaga

SEQ ID NO: 75601 - DNA, 82 bp, Homo sapiens
gcttactgcaacctagccaatgctctcaaagagaagggcagtaggaaggaacagagccacagagaaaaatgacttgctcaca

SEQ ID NO: 75602 - DNA, 82 bp, Homo sapiens
cggggggagcgcggggcgacgctggctgcagggacccggtgacagcgtgagagggaatgacgttggccggagctcctatggc

SEQ ID NO: 75603 - DNA, 89 bp, Homo sapiens
gaaacacaaagccggctacgcgctgcgaggtgaattatgtaacctcattacgctggatgtagctcacaatcaacttgaacaccttccaa

SEQ ID NO: 75604 - DNA, 126 bp, Homo sapiens
ggtgttaccggaacggcggcgacaagggtgttcccgaactagagtgggagaagaaaacctcctggcaattttacgacgaagatggtggaagtacatgattttgggactcatagacctggaagcaaa

SEQ ID NO: 75605 - DNA, 82 bp, Homo sapiens
agctggacggcgagcgcgagcggcgcgagaaaaacatggtccaagacaattcctgggaaagttcagttcttctcaagtgagg

SEQ ID NO: 75606 - DNA, 101 bp, Homo sapiens
agagtgacctttgcatctgcctgtccagccagcatggaaccaaagcggatcagagagggctaccttgtgaagaagagaaagcaaccagcgagatgaatact

SEQ ID NO: 75607 - DNA, 99 bp, Homo sapiens
tcctttggccacatatatgcgaatctataagaaaggtgatattgtagacatcaaggttgacaagggtgtggtgcctctagctgggactgatggagaaac

SEQ ID NO: 75608 - DNA, 82 bp, Homo sapiens
tcaaggccagcagtaccagcgaatcctcaaacagtcaaaatctgtacagtgccgaaaatggtgtgaatggaacattaacttc

SEQ ID NO: 75609 - DNA, 80 bp, Homo sapiens
ggcacgatggtcatggcgtatttcgtcgagaatttttggctaatcttccagtaccaacaattgcagcaatagatggactc

SEQ ID NO: 75610 - DNA, 100 bp, Homo sapiens
cacggagcgctgcggagcgaacctcacctttccagggcgcaaggccaagaagcttgagagaagaaaaatttcagaaaaattgtctcaatttgactagaat

SEQ ID NO: 75611 - DNA, 75 bp, Homo sapiens
aatggatttgcatcttgtaatgtgtttaacaaagccacgaataacctataatgatcagacctattgtgaccgcct

SEQ ID NO: 75612 - DNA, 50 bp, Homo sapiens
ggaatcctactcagaatgtgagtgtttcatcattacgattagcctataag

SEQ ID NO: 75613 - DNA, 100 bp, Homo sapiens
gaacgactgtggggacaacagtgacgaagagaactgtctcctggtgaccgagcacccgcctccgggcatcttcaacttcgtggcattcctggtggctttc

SEQ ID NO: 75614 - DNA, 100 bp, Homo sapiens
caggagcgggtccagcttcaggagtactggcggaggggctggacgttccacgccaaagagcagccatcagcagggaccctttctacgaaatgctcgcagc

SEQ ID NO: 75615 - DNA, 83 bp, Homo sapiens
agaggccttctctagaccttgccaagatggcacagattgtcctgggtcacataatgccagctgagcgtaaaaagccagcaagt

SEQ ID NO: 75616 - DNA, 75 bp, Homo sapiens
ctggtttcgtggcctgaccaaggacctccaagggtcctgaggacaccgtgagccagccaggcctggccgctgggc

SEQ ID NO: 75617 - DNA, 100 bp, Homo sapiens
cacaggtgagaggctcatccgagtgctgcaagtaccttctccaggcaaattccgttcccctgcagcaccatctcctttggctcttcggcaaccagtgaaa

SEQ ID NO: 75618 - DNA, 85 bp, Homo sapiens
ccaacagaatttatatagagatgtgatgttggagaactacagaaacctcgtctccctgggggccctggcctccagtctgagtgct

SEQ ID NO: 75619 - DNA, 101 bp, Homo sapiens
cttggcccatggacctgaaggagaagcacctggctgtgggtgagcgtggaggatgctcagatgcacaccgtcaccatctggctcacagtgcgccctgatat

SEQ ID NO: 75620 - DNA, 98 bp, Homo sapiens
gctgctgcctcagggatgaaagcctgtgtagagtggtcatctccatcagaggcaactgaaagtttcttatcaaaagaaatttggttgccacccccaca

SEQ ID NO: 75621 - DNA, 73 bp, Homo sapiens
gctgctggccctcctggtcatcccgcctgccatcacccccggctctggattaatcgaattacagctgctagcc

SEQ ID NO: 75622 - DNA, 100 bp, Homo sapiens
ataagctgcactgcatggttgctgctggatgtgttgtgttcctggcttccctctggatgctgacagaaacaaggccaccacaagggcccgggccaccagg

SEQ ID NO: 75623 - DNA, 76 bp, Homo sapiens
agaatatagaatggaacccttttgatcaagatgcggtgaacatgaaatatggctacacacacctttctgcaggaga

SEQ ID NO: 75624 - DNA, 50 bp, Homo sapiens
tactacatggcaaaatgggaaaggttgtcttttggaaatgcaggtttaag

SEQ ID NO: 75625 - DNA, 50 bp, Homo sapiens
ttcaaatcctagcactctgggagaggtaaaaatgtctccatcgtatcatc

SEQ ID NO: 75626 - DNA, 50 bp, Homo sapiens
gaggatgatgtttttggtgaagaggaactgacaccattgattttggcaac

SEQ ID NO: 75627 - DNA, 94 bp, Homo sapiens
ggcgggcggtgagcgcccatatgggggttctggagagcggggtgtggggttatgaagacagtatggagtttccagaccatagtagacatttgct

SEQ ID NO: 75628 - DNA, 100 bp, Homo sapiens
gttgcccgccaccatgagctacacagtgccagcgccacagcccttcaatcattttggttgctatccagcttctccacatcaagtccaacttcagaaaccc

SEQ ID NO: 75629 - DNA, 82 bp, Homo sapiens
gagggtgttcgactgctagagccgagcgaagcattaactgctgaagtactgatcgagttctgcatttcttcaatgaggaact

SEQ ID NO: 75630 - DNA, 98 bp, Homo sapiens
ctggcatcaactacccagtcctgaccccaaatttgaaaggcttcgaggcagcggtggacaagagcaaggaccaagtgtggaaggtcttaatgtaccaa

SEQ ID NO: 75631 - DNA, 83 bp, Homo sapiens
tttggaatggctcaaaccactacaatgcagatcttcgtgaagactctgactggtaagaccatcaccctcgaggttgagcccag

SEQ ID NO: 75632 - DNA, 75 bp, Homo sapiens
aaagagaggtgcctttatctgatgatgatgaaagttacacaggccgccagatcccacccttggacccccatgaaa

SEQ ID NO: 75633 - DNA, 83 bp, Homo sapiens
gcggctttcggcaagaactggattcgtggcgccacaagctcattcactgtgtagttgcagagtgggcaggatcttaagacccg

SEQ ID NO: 75634 - DNA, 100 bp, Homo sapiens
gtgcaattgttgccattgaaaaccctgctgatgtcagtgttatatcctccaggaatactggccaggtggctttcctgggggaatgcctggtaattttccc

SEQ ID NO: 75635 - DNA, 101 bp, Homo sapiens
ttccagcagtggtcttgctcttactccttttggttgaacaagcaggagatctataaggacaggcagaaattctcagaacaggttttcaaagtggcctcctc

SEQ ID NO: 75636 - DNA, 75 bp, Homo sapiens
tgagtacctacgctatcaggaggccctgagtgagctggccactgcacggtatccaactgttgaaaaacgagccag

SEQ ID NO: 75637 - DNA, 74 bp, Homo sapiens
aaattattgatgagctcaaggctggcaaaatcccaaaaccagggccaaggagttcaaagaaggacgcagagcca

SEQ ID NO: 75638 - DNA, 100 bp, Homo sapiens
ctccaggccggggataccgttgaacttctgaaaggagatgcacacagtctgttttggcagatcaaattttctccggtggctaaaaagttgtttgtggtaa

SEQ ID NO: 75639 - DNA, 82 bp, Homo sapiens
cagccggctgcctcttcgacggctttgactgccagcgtgcggaaggccagtgcaaatgaggcctgcctgtgttaatacacct

SEQ ID NO: 75640 - DNA, 82 bp, Homo sapiens
gttgggctcgcggcgagcggacggggtcgagtcagtgcgttcgcgcgaggtatcgagaaccttccctgcgaacttcagagga

SEQ ID NO: 75641 - DNA, 82 bp, Homo sapiens
ctgcactgcactctgctactgttcctacctaatggcttccagactaagatgcttggtgaagcagctggaaagaggtgatgtt

SEQ ID NO: 75642 - DNA, 97 bp, Homo sapiens
agggacaggcagaagttcttcagcgatgttcagtatctgcgggacatgcagcataaggtggactctgagtatcagctttcttggactccgtactgtt

SEQ ID NO: 75643 - DNA, 82 bp, Homo sapiens
gttcgactgctagagccgagcgaagcatggtcagtaggacagaaggtaacattgatgactcgctcattggtggaaatgcctc

SEQ ID NO: 75644 - DNA, 100 bp, Homo sapiens
ggcatcctgtcggctcacaagataatagccagctccccagaaatgaacctgcccacggtgtccgcgctcagggccttggacaagattcgctatgagagcc

SEQ ID NO: 75645 - DNA, 82 bp, Homo sapiens
cgctatggagaattacgttttaattgactatgacaccaaaagcccgtggaccgggagcccgtggaccgggagccggtggtgt

SEQ ID NO: 75646 - DNA, 98 bp, Homo sapiens
tgaatagttctactccttctacaggtgtgtatggagaatgaagtttctagattagaagacataatgcagcatttaaaatcaaagaagcgggaagaaag

SEQ ID NO: 75647 - DNA, 83 bp, Homo sapiens
ggtctgggccgccgaatctccggccgaagagcggcggcggcagcggcgaaagagctcttggaggaagttggccagaatggcag

SEQ ID NO: 75648 - DNA, 83 bp, Homo sapiens
tactacgccaaggaggtcacccgcgtgctaatggtggaaacccacaacgatcatggaagggaagtggttgctgtgtatgttac

SEQ ID NO: 75649 - DNA, 100 bp, Homo sapiens
gactcccggctttgggctggcaggctttcttgttgccaaaccagcactgatctccctattggagcaaggagaggagccgggggccttgattctgcaggtg

SEQ ID NO: 75650 - DNA, 80 bp, Homo sapiens
agcacagagcctcgcctttgccgatccgccgcccgtccacacccgccgccagattcttcgctgctgctgccttaccgccg

SEQ ID NO: 75651 - DNA, 100 bp, Homo sapiens
cacccacctcggcctcccaaaatgctgggattacaggtataagccactgtgcctggccaaaacttctaggccactgggaagaagcagcccatgatcttgc

SEQ ID NO: 75652 - DNA, 50 bp, Homo sapiens
ctggtttttctgctctccgagttaacacagaaatctgcctcctgggccat

SEQ ID NO: 75653 - DNA, 75 bp, Homo sapiens
ggacaccgcggaagtcgggaaatgaaaagccaggactctatttgaaaaaaatgctgccccgattttacatttatc

SEQ ID NO: 75654 - DNA, 75 bp, Homo sapiens
gtcgcctgctgcagtactcagatgccttggagcacttgctgaccacaggccctcgggaccaaggatcacgtcatg

SEQ ID NO: 75655 - DNA, 110 bp, Homo sapiens
cagcagctgagtgcgcatcaaatctgaagaaaatctacacagtacagacagtacaggatggaaaggcagatgtaaagtccctcatggcgaaatataacacggggggcaac

SEQ ID NO: 75656 - DNA, 75 bp, Homo sapiens
ggagagcaaccgccaagcttggtgggagtcaaggtgcaagaaagcctttgaggtgaaggtgtatgaaagtcatca

SEQ ID NO: 75657 - DNA, 100 bp, Homo sapiens
taatagcccttgaacagctatgcatgctgcttttgatgtctgacaacgtggatcgttgttttgaaacgccaccaccacctatcatgacagatggtgaaga

SEQ ID NO: 75658 - DNA, 110 bp, Homo sapiens
agaacatggaggtggagtgcaactaccactgctaccacgagaaggacccggacggtttgtgttgctagttaagctagcttgtattgttgtggcttccttcgttctctgct

SEQ ID NO: 75659 - DNA, 100 bp, Homo sapiens
cctatcggacggtgctggtcagctctggcctccgtgagcccagggctctggtggtggatgtgcagaatgggccgcaatgtttaccgaatgctttttaaga

SEQ ID NO: 75660 - DNA, 74 bp, Homo sapiens
tttagaagatggccagaccttggggaccaagaaaagcagcagtcagtgtgagaagaagattgtttctgagcttg

SEQ ID NO: 75661 - DNA, 90 bp, Homo sapiens
cttgcctcagaatgaacaaccatattctaccttggtgaataacagcgagtgtgttgcaaacatgaaaggcgcatattaaatttcctattg

SEQ ID NO: 75662 - DNA, 100 bp, Homo sapiens
cgcttgttaaacagatttttgaacaagcaggcaccacagactatccatctgccttctggggaaatcggtctaaaattcccaggactccacagctttgcac

SEQ ID NO: 75663 - DNA, 103 bp, Homo sapiens
gttgcttctggcggccatggtgttgctgctgtactccttctccggtactccaaagattcaggtttactcacgtcatccagcagagaatggaaagtcaaatttc

SEQ ID NO: 75664 - DNA, 50 bp, Homo sapiens
aaattaggcagttcttttacgaagtgcctggctctctggctatgaaaatc

SEQ ID NO: 75665 - DNA, 100 bp, Homo sapiens
tatattctcctttcgtactgtttaaatcacaggaagaagcggctttaagacaaaaagagaagccagattgctccaaggcccgctgtgaagtccagttctc

SEQ ID NO: 75666 - DNA, 90 bp, Homo sapiens
ccaccttcaccctcaacgttgccctcaaccacaagggcctggactatgagggaggagtagaagatgaagtgaccctctccgcctatatca

SEQ ID NO: 75667 - DNA, 100 bp, Homo sapiens
agtcccagtggagtctgaccccaggcatccccgggcagcagcccaagagctcagacacaaagcccaggtacgcaaagagaaccagtggtgtgaagagaag

SEQ ID NO: 75668 - DNA, 96 bp, Homo sapiens
gagtgagagagagctattagagattgtgaagaagaatttcgatctccgccctggggtcattgtcaggttatggaggttttgatgactatggtggct

SEQ ID NO: 75669 - DNA, 82 bp, Homo sapiens
agagatgtattcagtggaggaagctggaactgtggctgcaccatctgtcttcatcttcccgccatctgatgagcagttgaaa

SEQ ID NO: 75670 - DNA, 75 bp, Homo sapiens
tatcgacgtcgtgatccagaagtccagagctgagaaggactgcctgtttgcagttgcagagtgggcaggatctta

SEQ ID NO: 75671 - DNA, 100 bp, Homo sapiens
caatcgtttggggcttagctttccaggggggagccaaaagggtcatcatctctgccccctctgctgatgcccccatgttcgtcatgggtgtgaaccatga

SEQ ID NO: 75672 - DNA, 75 bp, Homo sapiens
gaggctgccgctctgctgagtgaaagaaacgcagatggcttcttggacacttaatgattgttggcaagaaatgtg

SEQ ID NO: 75673 - DNA, 82 bp, Homo sapiens
ggggccacaccatttgccgtggccaggctagaggactcctcctattttgaggacttctccaacatctccatcttctcctcgt

SEQ ID NO: 75674 - DNA, 75 bp, Homo sapiens
tgacaccggagtttgacgaagaggtggtttttgaggacctctttgtttttagacatgaattggccataatgagac

SEQ ID NO: 75675 - DNA, 100 bp, Homo sapiens
caatgatcctgaaaacagaaggaaattgaaggaacttggagttaatggtctaatttatgataggactaccgaccagactcccggaaatcatgttggtagg

SEQ ID NO: 75676 - DNA, 74 bp, Homo sapiens
tccacatgaatattctgttttgctgcccgaagcttgaaaatatttacaccagcagctccagttcataccaataa

SEQ ID NO: 75677 - DNA, 101 bp, Homo sapiens
atcattttcacctcgcgtcgcgcccgggaggaaggaacgaggcaaggagctaaagcagcgtgcgttcagccctggggtcttattagtaggtaagaaacagc

SEQ ID NO: 75678 - DNA, 100 bp, Homo sapiens
agcctgcagcctgccccgcggccaacatgagcttcttgttgaggcaagtgaggcctatctggttggcctttttgaagacaccaacctgtgtgctatccat

SEQ ID NO: 75679 - DNA, 100 bp, Homo sapiens
ttttggagaaccagaccatggacaaccatatgcagctgggcatgatctgctacaatccagaatttacctctacagatgccagccttgtgggaaagaagag

SEQ ID NO: 75680 - DNA, 83 bp, Homo sapiens
aaaattgactactttttatggagcatttggaccagaaaaattcagagacctcatggcctatgacagaagagggagacctggag

SEQ ID NO: 75681 - DNA, 75 bp, Homo sapiens
aggaggagctgctggcgcccgcagatgggcgaccattgacgaggtggagacggacgtggtggagattgaggccaa

SEQ ID NO: 75682 - DNA, 75 bp, Homo sapiens
ggatgcggccagggctggagacaaggagctacagctaaaatttctcgaatgctggcagccaaaaccgttttggct

SEQ ID NO: 75683 - DNA, 83 bp, Homo sapiens
cgccagccgcaccatgccgctcctaagcctgcacagccgcggcggcagcagcagtgagaggttcgagaacatcatcgaaaatt

SEQ ID NO: 75684 - DNA, 100 bp, Homo sapiens
cgactgaatgagatcaaaggtcacctggaaattgccttattggaaaaacatttcttacatatgagccccagactgacatcccgcctgacgtggatactga

SEQ ID NO: 75685 - DNA, 98 bp, Homo sapiens
tccgaactgatataacctaccctgctggattcatgggtgaccctggcagcaaccccaacaaacgccagaggcagccccctctcctgggagatcacccc

SEQ ID NO: 75686 - DNA, 100 bp, Homo sapiens
ctaaatggcttctaagaagttgggtgcagattttcatgtgctagttgccgcagaccaatcaaaggggctgcaggccggccattagaactcagtgatttca

SEQ ID NO: 75687 - DNA, 100 bp, Homo sapiens
cctgtttgaccaggcccagaggtccgtgcggcagcagctccagagctttgtcaaagaatctccacaatggaagttcgaagcaagcaaaagccacgcaaac

SEQ ID NO: 75688 - DNA, 49 bp, Homo sapiens
gtcaaagacattcacaacatggatgataccccagaatcttccatgctcc

SEQ ID NO: 75689 - DNA, 75 bp, Homo sapiens
ggaaccggtagagacctggacccccggaaagctctcaaaggtctatggccctgtgttcactctgtattttggcct

SEQ ID NO: 75690 - DNA, 95 bp, Homo sapiens
ctccgtgctcatcttcatcgccctggctctgaatggctttggtgggatgtgtatgaccttcacctcattaacagcactgggctccctctgctccc

SEQ ID NO: 75691 - DNA, 99 bp, Homo sapiens
cacaaccgtctccagccttggtctgagtggactgtcctgcaggaggtatctttaaaatagcttcctgggcagatctagtaaatgctcacgtggtgccag

SEQ ID NO: 75692 - DNA, 90 bp, Homo sapiens
ctcgcaaataaggtggccctggtaacggcctccaccgacggacgaaagtaggcggtacgaaccctaatggaggcagttttgaggaggtcc

SEQ ID NO: 75693 - DNA, 74 bp, Homo sapiens
agaactgtctcctggaattacattgaatatacagttgggatgaatgggttccggagagcagagtactcaaatac

SEQ ID NO: 75694 - DNA, 82 bp, Homo sapiens
tacttcatattttggaaagcagtttttaagacaacctgaaagaatagacccaagcgcatcacgacaaggatatgatgtccgc

SEQ ID NO: 75695 - DNA, 75 bp, Homo sapiens
cggtgcacagaggcttgtttcacatctgtaacaacagcagaagctgttgggatgtagtccagctctgaagaggag

SEQ ID NO: 75696 - DNA, 80 bp, Homo sapiens
cgtgtatggagcataacctgaggtaattgctctagcagatgcagtggaggaaaaccaaggcaatctgttccagtcattca

SEQ ID NO: 75697 - DNA, 78 bp, Homo sapiens
tcagattctcatggcctctgggtccaccaccttcaccaaggtgcataagctggagcctgaggcgtggaaacacgtgga

SEQ ID NO: 75698 - DNA, 89 bp, Homo sapiens
caggcatacatttggcagaataaatgaaccaggttaaaaatctgtaagagcctgattttagaattcaccagctcctcagaagtttggcg

SEQ ID NO: 75699 - DNA, 83 bp, Homo sapiens
agtccctgatcagatcagaggagcaaggtgaagtaagactcaaatgtcttactgctctacaagggctttattataacaaagag

SEQ ID NO: 75700 - DNA, 75 bp, Homo sapiens
ggcccgtgctggaaaagtgagaggtcagactcctaaggcctccggtgtggctgtctctgatggtgtcatcaaggt

SEQ ID NO: 75701 - DNA, 100 bp, Homo sapiens
gtgaatattttaatcatgttcctgcacatgacaaaaaggaggaggcgtctgacacagtatgatgatgaagatcccatggggcagcatcccagtactgatg

SEQ ID NO: 75702 - DNA, 75 bp, Homo sapiens
ctctcgcgcgggtgtcgctgggctgtcggcctggaccttgcagccgcaatggtccggcctctttggcctaccccc

SEQ ID NO: 75703 - DNA, 75 bp, Homo sapiens
ccctgccggagatccctcagccctggctggtaaggaaactgaggcataaagaagttaaaatgcctgaacaaaagc

SEQ ID NO: 75704 - DNA, 100 bp, Homo sapiens
gctgaacagcacagagcccctcgtgaaggagtatgctgcgtttgtgctgggcgctgccttttccaggctgaccggttccctgatgtgttacctgcttctg

SEQ ID NO: 75705 - DNA, 75 bp, Homo sapiens
tttcccatatcagagcatcacttttcctgagttaagcaataaagtggataagattgtggaccagctgcagcagtt

SEQ ID NO: 75706 - DNA, 83 bp, Homo sapiens
gatttatagctaagactccaggacacccctgaagccgagaaatgaacctaaaggcagacccagaagagctttttacaaaacta

SEQ ID NO: 75707 - DNA, 87 bp, Homo sapiens
tggacacaaatatatctgttattttacctactgttcatgaggtggatattttcagaataatcatgggccagactgggaagaaatctg

SEQ ID NO: 75708 - DNA, 122 bp, Homo sapiens
ctgacttacacattgaggatggagactccatccgcttcgggcgcttctttgtcccgctggctggaagcctggcagtgacacgattaagcccaacgtggatgacagcaaggaatatttctcca

SEQ ID NO: 75709 - DNA, 100 bp, Homo sapiens
cctttgagcctcttgagcctgtgaaggacactgacattcagattacaccaggaagcaaggcggcagctgccaacctgtgtcctggagatgtcatcctggc

SEQ ID NO: 75710 - DNA, 83 bp, Homo sapiens
ctgcgcaggataaaaggcaaactcttcacctgctgagaaacaatggtccaagttcattcagcaaggcaatgctccatcttcag

SEQ ID NO: 75711 - DNA, 76 bp, Homo sapiens
tgaagttcgagcactaatatttaagaaagaagatgttaactttcaggaatgtatcctgtcaggtataatgtcagtg

SEQ ID NO: 75712 - DNA, 50 bp, Homo sapiens
caacaccacaataatccacagccaagctccaactaccgtgaatgtaacac

SEQ ID NO: 75713 - DNA, 100 bp, Homo sapiens
ccgcgcgccgctgcatcccgcgtccagcacctacgtcccgctgccgtcgccgccgccaccatgcccaagagaaagttgatattcactgatggactccaaa

SEQ ID NO: 75714 - DNA, 75 bp, Homo sapiens
ctttgtctgactacaatattcaaaaggagcctacaagaaagtacgagatttagtcaacttgttgaagagctattg

SEQ ID NO: 75715 - DNA, 75 bp, Homo sapiens
agattcttctcaacatttctgcagactgcctcaacagagtgatagatttgtcaaagatgaaagtgaccttatcag

SEQ ID NO: 75716 - DNA, 96 bp, Homo sapiens
cgaggctgaaggaagatggcggacggcgtggaccacatagacatttacgcggatgtcggcgaagagttcaaccagaacctaaaggcagacccagaa

SEQ ID NO: 75717 - DNA, 100 bp, Homo sapiens
atattgctgttgtcccaggacagaaaccatgttgttttctgcatggaccgtgccctagaatttgcccctgcctgccatcgcttcaaaatcctcaaggcag

SEQ ID NO: 75718 - DNA, 89 bp, Homo sapiens
aggcagatcagattccgatttgacgggcaaccaatcaatgaaacagacacacctgcacagattatttctcaagatgaagctgacagaag

SEQ ID NO: 75719 - DNA, 74 bp, Homo sapiens
ttcactttgacgccagcttcttttctgtggtgaagcagtattttccaatttgaagattcatttgaaggtggctc

SEQ ID NO: 75720 - DNA, 101 bp, Homo sapiens
cggcgaaggagaggccaaagggcaaagtgatcaaggacagcgtcaccctcctgccctgcttttatttcgtcgagcctgagaatttgcttttagctagcaaa

SEQ ID NO: 75721 - DNA, 100 bp, Homo sapiens
cgctcgtggtggacccgcggcgccccttccgcaagctcaacgcgtttggcaacgctttcctcaacaggtggacgccctgcttcatctggcccgccagaat

SEQ ID NO: 75722 - DNA, 82 bp, Homo sapiens
ttaaaggaaaccgggcttccaaagtgtgtactttctggacctccacaactgatgaagaactgccagcatgcgaatgctgaac

SEQ ID NO: 75723 - DNA, 102 bp, Homo sapiens
caggggcatgttggaaagaactgagagaaagagcaacaaagcggcgagtggtgtgagagggcagcacgcgctgtggacaaatttacatgtattggagaccag

SEQ ID NO: 75724 - DNA, 76 bp, Homo sapiens
caactcatcggggaatacaaacacagacccaccagctgagggcattgaatgccccagaggagcccgaaacctccca

SEQ ID NO: 75725 - DNA, 100 bp, Homo sapiens
ggtttgccaaatggaatggatgccgattgcaaagattttaactccaagaagcccaagaaacatcccaaagtggccgtgaaagccaagccctcgccccggc

SEQ ID NO: 75726 - DNA, 100 bp, Homo sapiens
tgaaaattcacccttgtagagtcattcctgcctttgagcggactcccttttaagaagaagctgggaccactctgaagagttacctagaagcaccttcaac

SEQ ID NO: 75727 - DNA, 122 bp, Homo sapiens
ggacccctggggagagggccccgctgggctggccctgcagggaccatggaatccagagctgacttcttggacacttaatgattgttggcaagaaatgtgctgctgatctgggcctgaataag

SEQ ID NO: 75728 - DNA, 100 bp, Homo sapiens
catggagctacgtgtggggaacaagtaccgcctgggacggaagatcgggagcgggtccttcggagatatctacctgggtctgcagcccagagggcacctt

SEQ ID NO: 75729 - DNA, 97 bp, Homo sapiens
ttgaagagtcttgtccacagctggcaaattcagtgcagatcagtgctcgccagaaacccagagctaattatttagaagaccgaaaaaatgggtcaaa

SEQ ID NO: 75730 - DNA, 75 bp, Homo sapiens
tgtgctccactgacctgggttccagaactgcacagtgaatccaaaagaaagtatactgaaaagagtgaaggatat

SEQ ID NO: 75731 - DNA, 75 bp, Homo sapiens
gaggcagcgcgggatcccagcctcaggcgtgcgcggacggtgtgcgggtcctatctgactcctgtacgggatgag

SEQ ID NO: 75732 - DNA, 82 bp, Homo sapiens
gtactctcaacaaggcccgggcctcccgctcctccgtacagtgggcctttggagtgacgctgtgggaactcatgactctggg

SEQ ID NO: 75733 - DNA, 90 bp, Homo sapiens
ctggactgaccactattggagcctttttcggctttgtgagaaaccttaccatcaaacacgatggccagcaacgttaccaacaagacagat

SEQ ID NO: 75734 - DNA, 90 bp, Homo sapiens
aatagcgatccggggagaagcaggtgtctgtggggcccaagagaagtaccatctcggaatattaccagaagctagagaagaagcaggcag

SEQ ID NO: 75735 - DNA, 90 bp, Homo sapiens
taaaaagaaagagtccatcagatttgtggaaagaagacttggctacatttattgaagaattggaggctctgtgactggggcaacctgcaa

SEQ ID NO: 75736 - DNA, 75 bp, Homo sapiens
tggattccatgtagagacccctggaggatgtttggaccaggaagagagtacaacttcactcggcccaatgagaag

SEQ ID NO: 75737 - DNA, 99 bp, Homo sapiens
gatatccagggctgccgatgggaaatcccaggctgccgcggctcctgtgtgctttgaagacaatgcagatcttcgtgaagactctgactggtaagacca

SEQ ID NO: 75738 - DNA, 82 bp, Homo sapiens
gcgctccagcctcgctctccgccgcccgcaccgccgcccgcgccctcaccaggacaaggtgctgcggatgctgtacgtgtgg

SEQ ID NO: 75739 - DNA, 75 bp, Homo sapiens
cgacggcagccggcacctgacggcgtgaccgacccgagccgagatcctctttgtgctgtcgatggaaaagattgt

SEQ ID NO: 75740 - DNA, 76 bp, Homo sapiens
gtcctacctgaagtatgccattagttcccaggtactgaggatggaggacaaggggtcagtggagacccagctttga

SEQ ID NO: 75741 - DNA, 75 bp, Homo sapiens
ggcgcagtggaagtcagctgtccagggcctcctgaactacatatccacatctcaaagaagtggggcttcaccaag

SEQ ID NO: 75742 - DNA, 74 bp, Homo sapiens
aaacccgcagaggaaaattcaggcaacgcctcgcgttgaactattatggagctgctaagatgatattttctgac

SEQ ID NO: 75743 - DNA, 49 bp, Homo sapiens
caacattgactgcacatggaacattgagaagcggatgcagcagatcatg

SEQ ID NO: 75744 - DNA, 95 bp, Homo sapiens
acatttccaatttgctggaaaaaatgacatccagcgacaaggactttaggcctggtctccaagtcctctcctaagaagcctcgtggacgtaacat

SEQ ID NO: 75745 - DNA, 100 bp, Homo sapiens
agagaaaaagcagaaagtagatgaagatgagattcagaagatgcagtgtcctccacacatctgtagtcctcctcacagaaatgtgtgagcgaagcccaga

SEQ ID NO: 75746 - DNA, 82 bp, Homo sapiens
tcctccacaccccccgccgcagcagcaccggcgacaggactgatcctttgaaatactccagccatgactaaaagagaagcag

SEQ ID NO: 75747 - DNA, 73 bp, Homo sapiens
tgaaaattctggataatggtgaatgggtgtgggcccatcgctggatggatctgtcagaacacggctttgggct

SEQ ID NO: 75748 - DNA, 80 bp, Homo sapiens
ccctctgaggagatggtcatgacaggggtcgggccccggctcagtggtcccaggcagctcgggtgtcggaacccccagac

SEQ ID NO: 75749 - DNA, 50 bp, Homo sapiens
cgcggatctcaccgccgctcaggatggtcatcatgggccagtgctactac

SEQ ID NO: 75750 - DNA, 75 bp, Homo sapiens
aatcatgactctcaatgttgaagaatgggctactgcatggaaggtgtgaatgacagaggtggtgccatccagcgc

SEQ ID NO: 75751 - DNA, 87 bp, Homo sapiens
gcaatcctcacattcaagctgataggctgcgctaccggaatgtcatccagcgagtgattaggaaaaatatctccctggacggggcgt

SEQ ID NO: 75752 - DNA, 75 bp, Homo sapiens
acacaatgagccattattatgagcagatcaatatcaccctggaccaccgctgccgtatcttccagaacctggatg

SEQ ID NO: 75753 - DNA, 83 bp, Homo sapiens
gaaggaaggattcaccacctccaggaaaagcttttcctaaaaggattgtacaccttagaagtgcttaaggaagagtgatgaag

SEQ ID NO: 75754 - DNA, 75 bp, Homo sapiens
ccctgaagagggaagacacgcggaaacaggctgtgggtgagcgtggaggatgctcagatgcacaccgtcaccatc

SEQ ID NO: 75755 - DNA, 100 bp, Homo sapiens
gtcccctatccaagtagcctgctgtcgcccagccgcgcttcgcagaatcaagaacggctatgtgcgtttaaagatccgtatcagcaagaccttgggatag

SEQ ID NO: 75756 - DNA, 100 bp, Homo sapiens
gttttggctgaggactgaagagatggccttggaagaaatggtgcagagattaaatgcggtttccaagcacacgggctgtggaaaatctctgttctcacaa

SEQ ID NO: 75757 - DNA, 74 bp, Homo sapiens
gaaggagccatggatggaggaggaagagataaggacgtggagcttcccagggagtgcatccgccccaacccttt

SEQ ID NO: 75758 - DNA, 101 bp, Homo sapiens
tttccaggaacagctgaatcaatgtgctgagctgctggagaaattggaaaagctatttctcaacggttcatatccagctttcagagtggcaccgtgcaatt

SEQ ID NO: 75759 - DNA, 74 bp, Homo sapiens
agctgtaatcaattgtgctgacaacacagctttaaggaagcctcctatttcagtttctcaacatgaaagtcatc

SEQ ID NO: 75760 - DNA, 90 bp, Homo sapiens
caagattcaggcgatcgacgccaccgactcttgtatcatgagcattggatttgatcacatggcacattcaggggttgtgctttcagtgga

SEQ ID NO: 75761 - DNA, 98 bp, Homo sapiens
gtggttctgggaactcggcgggtatgacccaggcttggagatctggggaggggagcagtatgaaatctccttcaaggacttaaccaccaccatgtcga

SEQ ID NO: 75762 - DNA, 100 bp, Homo sapiens
gacagattcgcagtggtcgcttcttctccttgaatatgcttttaaggctattaaccagggtggccttacatcagtagctgtcagagggaaagactgtgca

SEQ ID NO: 75763 - DNA, 83 bp, Homo sapiens
ccacaacatactcaaaggaacggagagaaccgggacccccctgcggggacccggaactggaaaaattgatgggacacttgggt

SEQ ID NO: 75764 - DNA, 80 bp, Homo sapiens
caagccgctggcagccgcggatctcaccgccgctcagggtctctaattaacagaagatggcaaagcccagccacagcagc

SEQ ID NO: 75765 - DNA, 100 bp, Homo sapiens
gaggaacatagctttgcgttcaagtttagagtggaattcgtgtgttgtacagacccttaaggtggaagcagggaaaggcctggagatgaggaagctggtt

SEQ ID NO: 75766 - DNA, 90 bp, Homo sapiens
gagtctctacagccatttgaactgcctatgaattttccagctttccagagtgttgaatcttccaccagaaaacttgatcacatcaatatc

SEQ ID NO: 75767 - DNA, 100 bp, Homo sapiens
gttcgctacgaggattgagcgtctccacccaacacaatgaggcatatacatggacaaatcccacctgctgtgtgcataatatcattgtgggtaaactgtg

SEQ ID NO: 75768 - DNA, 75 bp, Homo sapiens
tcgacgtgtccttccagcagtcgagcaccgccaagtcggccacctggacgccctacctgaacccatccttccatc

SEQ ID NO: 75769 - DNA, 98 bp, Homo sapiens
cgggcggtggcgcgggccgaagcgcccggagcgggagcgagcggcgcggcccggtttatgaactgacgttacatcatacacagcaccaagaccacaat

SEQ ID NO: 75770 - DNA, 83 bp, Homo sapiens
actatcttctccagcggagatggccaatggagttctgggaaatcgttcattcatttacagatgaacagaaaagactcttcttg

SEQ ID NO: 75771 - DNA, 75 bp, Homo sapiens
ttctgcgattgtccaggaatctgatggaacccctgaaaacaaccctctggcagaccacggtgtgaacacatgaac

SEQ ID NO: 75772 - DNA, 75 bp, Homo sapiens
tgtttgtggatcgctgtgatcgtcacttgctccagtggctgttggataattatgaaacagcggaaggtgtgagtc

SEQ ID NO: 75773 - DNA, 75 bp, Homo sapiens
aaaagcgcactaaatcgtctccaagggtatttgaagtataccatacaactgttttgaaaatccagcgtggacaat

SEQ ID NO: 75774 - DNA, 100 bp, Homo sapiens
agacgatctgcacttcgcattttggcattgacatttaattttagggtcctttatatagaagggagagtagagctgaaaccaccaatgggtgaggtcgtca

SEQ ID NO: 75775 - DNA, 100 bp, Homo sapiens
tggcgggaagtgtgaagcggccaatggcacggaggcctgcgtgattttttatcaagcagaaatgcatcgaacaacgagaatcaagatcactgagctaaat

SEQ ID NO: 75776 - DNA, 75 bp, Homo sapiens
atctccctgtttgacctcagcgcggatgctccggtctttcagggcctgagcctgctcttagcttctgccagctat

SEQ ID NO: 75777 - DNA, 50 bp, Homo sapiens
tgtcactgagattgcttgtggacgtgattacagtggcgagatcttgaaca

SEQ ID NO: 75778 - DNA, 75 bp, Homo sapiens
gttcgcgtctctctgctgcggcgcggggaccgctgtgctctcgtcccgtggagtctccatctgagccctttccta

SEQ ID NO: 75779 - DNA, 78 bp, Homo sapiens
gcagagcaaacatctttcaaaggtatataatgtttacatggcagggaggcagctgtgttctaagcggtaccgggagtt

SEQ ID NO: 75780 - DNA, 75 bp, Homo sapiens
ctccatgttatggacacggtctttcttattcaggtgttctccagggaagagctggagctggtggccagcctttgc

SEQ ID NO: 75781 - DNA, 100 bp, Homo sapiens
gctgtcttcgcccgttcactgaagatgatgctgctgatccaaatgattctgacatagacccaggtgtaatcctgagagattcacatggtgttgcacaagt

SEQ ID NO: 75782 - DNA, 75 bp, Homo sapiens
ggtcatggccgtgtgctccctgcctctcacgttttaacaacctgggcatccagtgtgtgaggaagaaggagattg

SEQ ID NO: 75783 - DNA, 100 bp, Homo sapiens
catcagagagcattttactactgagctgcaaaggttttgatacttatagaggactcccttcaatttccaatggaaattatagccagctgcagttccaagc

SEQ ID NO: 75784 - DNA, 129 bp, Homo sapiens
gagtcagagacattacatcaggaagatactgcagagatattctactccatctcattcattgtacaggctatggagttactagtagagaaagcaatcagcagtgcttctagccctcagagccctggggat

SEQ ID NO: 75785 - DNA, 97 bp, Homo sapiens
tagccattggggcccttggatcaattaaggggtttgttaaagttgttaagaataaggcctactttaagagataccaagtgaaatttagaagacgacg

SEQ ID NO: 75786 - DNA, 90 bp, Homo sapiens
cggaggaccaggcgcggcgcggctgcggctgagggagtaccctgacttctaccggaagctctacggcctcttggacccctctgtctttca

SEQ ID NO: 75787 - DNA, 75 bp, Homo sapiens
gcgtctctctgctgcggcgcggggaccgctgtgctctcgggtgagttctgcatcctggtacttcctcaatgtatt

SEQ ID NO: 75788 - DNA, 74 bp, Homo sapiens
ggaaggtggcaagatggtgttggaaagcactatggtgtggacaccatgtaaaattgaacctagtataaaccaca

SEQ ID NO: 75789 - DNA, 82 bp, Homo sapiens
gattttttgcctttgttgattaactggacaaattcaggagtccaaaactacttacctggaagaccttccaccaccccctgag

SEQ ID NO: 75790 - DNA, 95 bp, Homo sapiens
tctccgccctggggtcattgtcaggtggatagatacttctcaagacatcacacagcgtgagtcaatcaaggagggaagccacaagcagactgaca

SEQ ID NO: 75791 - DNA, 73 bp, Homo sapiens
ttttatttatggaccatcccaaccctccagtcgtccactccgctttgcttgagacccggtgagcctccattga

SEQ ID NO: 75792 - DNA, 83 bp, Homo sapiens
ggacaatattcgcacccggctgaaggtgagaagccctaccactgcaactgggacggctgcggctggaagtttgcgcgctcaga

SEQ ID NO: 75793 - DNA, 100 bp, Homo sapiens
ggggctgaaagggaagagaacttagatttgacctgtgcaaggacctcagcagcttggacacagcccactgcagaggtgatcaacaagtatggagatctct

SEQ ID NO: 75794 - DNA, 51 bp, Homo sapiens
cattcctgttcattcaaaacaagtcttcaggaaccagtattactgtggaca

SEQ ID NO: 75795 - DNA, 75 bp, Homo sapiens
ccagagctgaggactgcctgtttgcagagccaaatctcctcagccacctgttgaagaagaagatgaacacttcga

SEQ ID NO: 75796 - DNA, 90 bp, Homo sapiens
aacatgcatgggcaagaactattcacacttttcagaataatccagaatggctactctgatctatgttgataaggaaaatggagaaccagg

SEQ ID NO: 75797 - DNA, 96 bp, Homo sapiens
ccgagcgcttgatgtgcgcggagagcaatcgccgggacagctgcaaggacttgaaagaggagattgatattcgactctccagggttcaggatatca

SEQ ID NO: 75798 - DNA, 80 bp, Homo sapiens
actttcttgcattgctgaatctttaaaattctatcacaaagggattgcttccttaacagagagtgaatgcaaagcatata

SEQ ID NO: 75799 - DNA, 75 bp, Homo sapiens
ccttgttcccccaaatgtctgactctgactctcggactgagaaacgcaagccttcatcccgcgtggagtctaccc

SEQ ID NO: 75800 - DNA, 83 bp, Homo sapiens
gcacgggcaaggcggagagtgacggagtcggcgagcccccgcggcgacaggtcagcccaagactaccccgtcggtcattctgt

SEQ ID NO: 75801 - DNA, 88 bp, Homo sapiens
tcttgctctggcggacgctcaagtacctgtggaccgtgtgctgccactgcgggggcaagacgaaggtctcagcagcttgaaaaaccat

SEQ ID NO: 75802 - DNA, 88 bp, Homo sapiens
cgtacgggcggccgtgcgcgaggcgagtgaaggagaacgacctgctcagaatgagaagaggaaggagaaaaacataaaaagaggaggc

SEQ ID NO: 75803 - DNA, 50 bp, Homo sapiens
gcgtataccatgcaatgccttgcatttcctgcagatcaccctgtgcgtgt

SEQ ID NO: 75804 - DNA, 75 bp, Homo sapiens
atttaaccaagaaaaattaccgagccagccagcaggaaatacagcatgaacatgagagaatttcaagaatccatg

SEQ ID NO: 75805 - DNA, 75 bp, Homo sapiens
gattttaccataaatacaaatggaggattacgtaatcgggtatatgagtttaagtgctgtggggctgctaactac

SEQ ID NO: 75806 - DNA, 82 bp, Homo sapiens
ggcagagtggaccacggggagccccacgagtatgccgagattttgctgtcctggaggaccacaccctggctcacagcctgca

SEQ ID NO: 75807 - DNA, 100 bp, Homo sapiens
cagtgtttgaaggagaagagagcaaggtaacaggagttgttggaagagcagaacttttgtcatctatcttttttctagcagcttttttgtcatataccag

SEQ ID NO: 75808 - DNA, 100 bp, Homo sapiens
cccgcagtgacagctggagtctggctaacttgtcttccactaaagagttggacctgtcaggtacggttgacatttagggatgtggccatagaattctctc

SEQ ID NO: 75809 - DNA, 75 bp, Homo sapiens
agctcctcaagaatctcgtgctcaccggtttctcccacatcgacctgttttttgctccactcaagcctgttagaa

SEQ ID NO: 75810 - DNA, 75 bp, Homo sapiens
tatcaactgctttccacttagattcagacctggtcgttccaggggtagaggaggcatgaaggatgaccgtcggga

SEQ ID NO: 75811 - DNA, 75 bp, Homo sapiens
gcggtcttcccatctcaaccttccaagtagctggaactacagagaattctgcttggtcagaatcgtgatggcatt

SEQ ID NO: 75812 - DNA, 83 bp, Homo sapiens
ccccgcccaggaagcccctctgaagcctcctcgccgccgtttctgagaaggaaattgagaggctgactgagcgactagaagaa

SEQ ID NO: 75813 - DNA, 83 bp, Homo sapiens
caaaaacctatcgttagagtcttcctgcccaacaaacagaggacagtggttatacattggctcttcaaagacgttcacctcat

SEQ ID NO: 75814 - DNA, 100 bp, Homo sapiens
gcatgtggatggtctgctggcctgtcaactaccgaaaaagcttgtggtgaaggggggcaaaaaaaagaagcaagttctgaagttcactcttgattgcacc

SEQ ID NO: 75815 - DNA, 50 bp, Homo sapiens
agctctacaatcaacccatgtgggcaccatgccggtggaaaggatgcgca

SEQ ID NO: 75816 - DNA, 100 bp, Homo sapiens
gggtaaccaagaggaagttggaggtgccgacgggacctgaagtgcagacccctaagccccgactatctgagatcggccaagatgactgaggtgatgatga

SEQ ID NO: 75817 - DNA, 83 bp, Homo sapiens
agcggggcccggtatggaggtgggctagaggccgacgccagccagagagcggtttgtccagaggggttgcgtttatccggttt

SEQ ID NO: 75818 - DNA, 76 bp, Homo sapiens
tctgctacttcaagtaccaggtcctggcgatcagcaccaagaacccactgcaggccctgtctctgcccctggtggt

SEQ ID NO: 75819 - DNA, 75 bp, Homo sapiens
ctgcggccggagcgggcggctgagacaaaggcgacgaccccaagactgcttctgagacagaaacagatatctgtg

SEQ ID NO: 75820 - DNA, 98 bp, Homo sapiens
gcggaagcaggactcggggcacttggtgcctttcttcctgacgtggagtgtggtgaactcagtgcattgggccaatggttcgacacaggctctgccag

SEQ ID NO: 75821 - DNA, 86 bp, Homo sapiens
gagaaaaccagctgagacagggcgccacttactaggtgacagagctgaatgaacctctctccaatgaagatcgaaatctcctctct

SEQ ID NO: 75822 - DNA, 75 bp, Homo sapiens
cgcggagacggcggaagcggagagcaacagcgcgccgcattcccatggtttggcatggacatcggtggaacgctg

SEQ ID NO: 75823 - DNA, 101 bp, Homo sapiens
ctgttctcggtactatagggcaccagagttgatctttggagccactgattatacctctagtatagatgtagccatagctgtaacgtataaccatgatgggt

SEQ ID NO: 75824 - DNA, 100 bp, Homo sapiens
tgcccactcatttaactgcacgccaatagaagggatcgataaagtttcactgcagaaagtctccactgcggtatgctgacatctgccctgaaccttcacc

SEQ ID NO: 75825 - DNA, 97 bp, Homo sapiens
gaggtgaagcccaacccgctgcaggacgcgaacctctgctcacgcgtgttcttctggtatacgtttgtaaatctggaagactgactgctattccatt

SEQ ID NO: 75826 - DNA, 100 bp, Homo sapiens
acgttcttcgtttctccgctagttgtgcgcttggccgcgagacactctggcagttataggaacacaaagcattaaagactgtaaatggcaagaaaaaaac

SEQ ID NO: 75827 - DNA, 90 bp, Homo sapiens
agagcacaaccatcgcagttggaagcccatggggcagataaaataccatgaggagtttgagaagagccgcatgggccctagcgggggcga

SEQ ID NO: 75828 - DNA, 83 bp, Homo sapiens
ggcggggctggcgcggctcctgttgctcctcgggctctcggccggcgccaaaacagagtggagtacgagaaaagggtccgagc

SEQ ID NO: 75829 - DNA, 83 bp, Homo sapiens
cgagcccggacggcgcctctcgaacgagtgtgggcgcgaggcagttggaatcgaagcctcttaaaatggcagatgacttggac

SEQ ID NO: 75830 - DNA, 100 bp, Homo sapiens
cagacacctgaaagtcttcctcaaaataacaatccagaagatgaattgaatcttctggttattgtagttgatgccaacccaatttggtggggaaagcaag

SEQ ID NO: 75831 - DNA, 50 bp, Homo sapiens
gtagtggattttctgaaagagaaaatgctatcttctttgagaagtcaaat

SEQ ID NO: 75832 - DNA, 98 bp, Homo sapiens
ggatctggaggagcagttgtctgatgaagagaaggaccccgccatcctcaggtcccctccgcctgccagatcttttctcggatccccgctctcccacc

SEQ ID NO: 75833 - DNA, 98 bp, Homo sapiens
cgagcccaaggcaattgatcccaagttgtcgacgaccgacagggtggtgaaaggagtgtggccatctggggccgtgtggtatttgccactcaggagac

SEQ ID NO: 75834 - DNA, 82 bp, Homo sapiens
cgtggagatatggcgcaactgcggcgcgtctcctccgggctggggctgagcaagccctcggagtgaccgtgggtgacagcgg

SEQ ID NO: 75835 - DNA, 80 bp, Homo sapiens
gaaaaatgtagccagtccaagcaggatccttggtgtttggctagcaatgagatttcggaatcagaaggatcctagagcca

SEQ ID NO: 75836 - DNA, 96 bp, Homo sapiens
aaagcctgcccagacggctcacctgtgcgggatggaacaaaaggagtctcttgcatggctcaggactgtccactccgtacaccagaggactttgtg

SEQ ID NO: 75837 - DNA, 50 bp, Homo sapiens
cttcagcaacatttccgccgccaaaggttgatagaagtccagatcctgag

SEQ ID NO: 75838 - DNA, 76 bp, Homo sapiens
gcaaagtctttgactccttgctgaatctgagcaaaatgggacgtcggtcatcagatactgaagaagaaagcagaag

SEQ ID NO: 75839 - DNA, 75 bp, Homo sapiens
tttccctcccgtgagttctggcacagatcaatgtccgagttaccaccatggatgcagagctggagtttgcaatcc

SEQ ID NO: 75840 - DNA, 75 bp, Homo sapiens
caaatctactactgttcatggcagttcagagaagccgaactgggattaccatgcagaaatacaagcttttggaca

SEQ ID NO: 75841 - DNA, 75 bp, Homo sapiens
tgtttgaacaaactcgaagaacagctgtggaaagaagttgcaaaacactgggacagcacaattacctatgtgctg

SEQ ID NO: 75842 - DNA, 82 bp, Homo sapiens
cgcggcggtcggtgaccgcggccggggctgcaggcggcggagcggctgggaagatgttaccgagtacttcagtgaattcctt

SEQ ID NO: 75843 - DNA, 75 bp, Homo sapiens
catcaatcaggaccccttgggcaagcaagggtaccagcttagacagagaagaggtgaagagtccagtgaaatgga

SEQ ID NO: 75844 - DNA, 90 bp, Homo sapiens
gctgctgcttccttcggccttgtccgagcaaacagaggcgctcatccacagagccacatctgttaggacagaatgaccgagaacatgaag

SEQ ID NO: 75845 - DNA, 75 bp, Homo sapiens
acttccctggtcgaacagttttttctaatggctattcaagtgagaaagatcagtctaaagaaaaggagaagaaag

SEQ ID NO: 75846 - DNA, 97 bp, Homo sapiens
gttctctaggccttttagaaaacatgacacctacactccgggagaagtccattttgcttgtgaagatgatgacttacatagaaaaacgctttccgga

SEQ ID NO: 75847 - DNA, 129 bp, Homo sapiens
tgtcctgagatcaaatggcacttcattggccacctacagaaacaaaatgtcaacaaattgatggctgcacgctatgaagagggagagtcagaagcagaaagcatcacttcctttatggatgtttcaaat

SEQ ID NO: 75848 - DNA, 100 bp, Homo sapiens
gacaccggctacttctcagctttaccatccctggaggagacctggcagcagctgccgggccgcaagtacagccctgggtacaacaccgaggtgggagaca

SEQ ID NO: 75849 - DNA, 90 bp, Homo sapiens
tcaagatttaacattccaacacataaaaattatttatccaacagctcctcccagtcttgcctccagcaaatccatcctccaatcctgatg

SEQ ID NO: 75850 - DNA, 87 bp, Homo sapiens
tgggattacaggcacgcgccaccactcccagtttaccaagtactggacagaatcaaatggggtggaatctaaatcattaactccagc

SEQ ID NO: 75851 - DNA, 75 bp, Homo sapiens
tctgagacggcggcagcagcggcattcagtaagagatgctaaaaaccttgtacctatggaccccaatggcctgtc

SEQ ID NO: 75852 - DNA, 90 bp, Homo sapiens
cgcccagtggcggtgtgaactgtgaggagttcgccgagttccagggacacggccaacacggtgaaggaaaagttcgggaggaagctttat

SEQ ID NO: 75853 - DNA, 74 bp, Homo sapiens
tttgactactggggccagggaaccctggtcaccgtctcctcaggtaatagcctgcagctggtgttttgagaagc

SEQ ID NO: 75854 - DNA, 98 bp, Homo sapiens
cgtggctccaggcagaatgtcagcatctccacaggtgtggatgtggaagcagccaagcgggcagaagaggaattgctccttcatgacacgaggtgctg

SEQ ID NO: 75855 - DNA, 97 bp, Homo sapiens
tggcggatggaagggaggagactcctgaccctcagaatgcaatggctgccatccggaagaaactggtgattgttggtgatggagcctgtggaaagac

SEQ ID NO: 75856 - DNA, 100 bp, Homo sapiens
ggagcggggccttccacaccccctccgtgggtgtgtggtatcattgcccagtgcctaagatcttttatgttcagctcactgtaggaaataatgaattttt

SEQ ID NO: 75857 - DNA, 80 bp, Homo sapiens
ggtgacagcgtgagaggttcgcagaacgcaggaggagggagacgcactgatgacatcgggccgctcctgcagctcgggcg

SEQ ID NO: 75858 - DNA, 75 bp, Homo sapiens
caggcactctggcagaaactggccaaggacattcagactgagcgtgcctaccaaaagcagccgaccatctttcaa

SEQ ID NO: 75859 - DNA, 90 bp, Homo sapiens
cccactcggcgtcgcgcggcgtgccctgcttgtcacaggtgggaggctggaactatcagtacgaggatgtcgtccaggaaagattgtgca

SEQ ID NO: 75860 - DNA, 90 bp, Homo sapiens
aaatcaacctgctcaccggggagtctgatacacaggttcctaaaagtaaagctctagaggccgtcaaattggcaatagaagccgggttcc

SEQ ID NO: 75861 - DNA, 100 bp, Homo sapiens
caatggcgaaatgcaggcgaaatgtggaaaatttcctagaagcttgcagaaaaattggtgtacctcaggctcttgcagccaatgccggaacaggatttgc

SEQ ID NO: 75862 - DNA, 76 bp, Homo sapiens
tattgctgacatatttgaatatacagcaaagcatctattgctggcaccatctgacgtggcaggctgggggattttt

SEQ ID NO: 75863 - DNA, 98 bp, Homo sapiens
ggagcagaaccccaggactgcgcccccgggagcgggcgcccagagaggacagagctgcccagtccttactcaacaagctgatcagaagcaaccttgtt

SEQ ID NO: 75864 - DNA, 101 bp, Homo sapiens
ggacacagcggggcaggagcgcttccgcaccatcacctccacggctgaaatctctttaatgatggagggaagcaggcagacgcgagtgtctcggccataca

SEQ ID NO: 75865 - DNA, 100 bp, Homo sapiens
agtgttctgctttcatggagttcacagaagagtcgaggagattcctcacctattcctacctcttggccttcaatgtgtggcttctgcttgcacccgtgac

SEQ ID NO: 75866 - DNA, 101 bp, Homo sapiens
gccggtactgttgaaagcgacaagtggaggcgccgctctagcggccgggactctgaactatggcgtctttcccagggaactccgatgaagtgttccaacaa

SEQ ID NO: 75867 - DNA, 98 bp, Homo sapiens
gaaccagacgagctccagctcccaggctagcccgtgctttgaagaagaggagcacttcaaggtgctggtgaagatgaccgcccaggagctcgccaatg

SEQ ID NO: 75868 - DNA, 90 bp, Homo sapiens
gaacgggtaacagtggcctttatacgaacaatccaggtacaactccaaaaggagacattggagaagaaccaagctgggtctataaggaat

SEQ ID NO: 75869 - DNA, 80 bp, Homo sapiens
caaggaatccatgtttcttccaagaagcaggcatggaagaggagatggttcgtgttacgcagtggccgtttaactggaga

SEQ ID NO: 75870 - DNA, 100 bp, Homo sapiens
cgaggaacagaagaagaagaaccggaagaaactgtccgagaagcccaaagtaaaataccatgaagattttgaaaaaacaaaggggagaggctttactccc

SEQ ID NO: 75871 - DNA, 76 bp, Homo sapiens
ctgactttgcagccacggagaggtgaatttgacaggcaagaagatgacattcacttagtgacattatgtgtgacag

SEQ ID NO: 75872 - DNA, 100 bp, Homo sapiens
ccaggattgtcttttcttaacctgggaagtggaaccggatatttaagtacaatggtgggcttaattttagcttatagtgatttaggatactacattatca

SEQ ID NO: 75873 - DNA, 124 bp, Homo sapiens
ttcctcggagctttcgtcacctgtccttctacattttcgatagagacgttttccggagggattccatcatagatcgcccaggaccacaccgcagcgtaactgcaggcctctcagcgaaaaaggg

SEQ ID NO: 75874 - DNA, 82 bp, Homo sapiens
ctgccttccggggacagccagccctcgctggaccagaccatggccgcggccttcgtgtaaactggagttgctggtgggcagc

SEQ ID NO: 75875 - DNA, 82 bp, Homo sapiens
gacctggttggagacagaaccccgacctcagagaagatggatgaggagaagaaggaagttgtggaagaggcagaaaatggaa

SEQ ID NO: 75876 - DNA, 75 bp, Homo sapiens
tgtgatgccagaggtcaacaaggttctggacaagatgaagtctttctgccagtttcattgtactgacaacctcag

SEQ ID NO: 75877 - DNA, 100 bp, Homo sapiens
cttttacatggagcaccaaaaacttgcagtcctgacatttcaggagaatctgaaatgtcagccatcttggaatgtcacaggaactggttgaacacctgaa

SEQ ID NO: 75878 - DNA, 75 bp, Homo sapiens
ccctccccgccaaggcccgtgcgagcggtggagacacagagcaccagctcagaggagatggtgcccagctcgccc

SEQ ID NO: 75879 - DNA, 75 bp, Homo sapiens
ctgctcccggagggagacgcgctgccgaggagaacccagcgggcgccaagcccatctttgtgtgcttgcatccaa

SEQ ID NO: 75880 - DNA, 82 bp, Homo sapiens
ggaaaagcaaagaatgggcatggctcgtatgttttatcataagggcactatgaacgaagaggagcagtttgtaaacattgat

SEQ ID NO: 75881 - DNA, 82 bp, Homo sapiens
gcctacccccatctccgcatcaggaccaagtcccagaaatcctggatagaaagcactttgaccaagagggaatgtgtatata

SEQ ID NO: 75882 - DNA, 98 bp, Homo sapiens
tggaggaagaagaaaagcgaaaagttcaaacacacgtcagcaggtcctcgatgggcttcctggaatattggtgtgtttatttgcatcagatgtgctgg

SEQ ID NO: 75883 - DNA, 100 bp, Homo sapiens
actcatatgcaagattgctgacttcggattggcccgattgatagaagacaatgagtacacagcaagacaaggtcagaagacatgtcttcatctacatggc

SEQ ID NO: 75884 - DNA, 75 bp, Homo sapiens
aaatagaacttccaactactgagcgacctgcgggttgggctgagtctgtccttgaggaagatgcatcggagcttg

SEQ ID NO: 75885 - DNA, 100 bp, Homo sapiens
catgttgggaacaggctgtctaccccgtacaggaccttgcagattcagtgctcaagagtgaagaaaattctactgtctttagccacttaatgaagtaccc

SEQ ID NO: 75886 - DNA, 82 bp, Homo sapiens
tggagccgcagcctctcggcgctgctgctgctgctgcaggtggtataagttgaaatccaaaccaggaaagaaggacaaggag

SEQ ID NO: 75887 - DNA, 50 bp, Homo sapiens
ttagagacatactaatgtacatgtcatatttgatcagaaattggatgaac

SEQ ID NO: 75888 - DNA, 50 bp, Homo sapiens
ctgctcccatcattgatgtggtgcgatcgtggtcatctccatcagaggca

SEQ ID NO: 75889 - DNA, 100 bp, Homo sapiens
gaaataaaacaaaggatgatggaaatggaaacacaggctcgcttctcatatgtgcggatgaaatatcttttcttttcctggttagtggtttttgttggaa

SEQ ID NO: 75890 - DNA, 71 bp, Homo sapiens
agctgcctcagttcttagcgcaggtaaaataccatgaagattttgaaaaaacaaaggggagaggctttact

SEQ ID NO: 75891 - DNA, 100 bp, Homo sapiens
ccagccctccccgcctctgcgtctttgctcccggagcgcttgaaggagctgcgggggccacctacagatgctcctgcagtggacacagcagaacaagtct

SEQ ID NO: 75892 - DNA, 100 bp, Homo sapiens
tcggtgttccacgtgaagctcaccgacagtgccctgagggccttcgagagctaccgcgccagacaggtctacaactcgaacaaagacagccagagtgaag

SEQ ID NO: 75893 - DNA, 83 bp, Homo sapiens
ctgatctcggctgtcggagtgggtgtcctcaagaaagctgtcagctgctagtgtgggtaactgtcccaccaaaaaatatatgc

SEQ ID NO: 75894 - DNA, 100 bp, Homo sapiens
ccggatggaaatcctaatgacagtctccaaattcgcctccatctgtaccatgggtggcaatgaccatgagatcttcacagaccccagaaccatgggctac

SEQ ID NO: 75895 - DNA, 75 bp, Homo sapiens
gattcgatggacatggacatgagccccctgaggccccagaactatcttttcgccatcatcgtctacagactgccg

SEQ ID NO: 75896 - DNA, 100 bp, Homo sapiens
cacaggatacttcgtcctgtgttgtagctggagtttcagacgtctgagcctcagctgttgaagaacgctctgcagagagcagtagagaggggccagttag

SEQ ID NO: 75897 - DNA, 83 bp, Homo sapiens
actcatcatggggctcctgtacaagatgagcagcaccagcagtaagagggctccgaccacggcaacccagaggctgaagcagg

SEQ ID NO: 75898 - DNA, 74 bp, Homo sapiens
gcaaaggggatgtcctgcacatgcactacacggtgaaaggtgtagcagtcactcggcctacacccacagcatcg

SEQ ID NO: 75899 - DNA, 82 bp, Homo sapiens
agagttgtacaggaggaaaaccagatggcagttgaattcctgcatgaactgaatgttccatttttcaaagttggatctggag

SEQ ID NO: 75900 - DNA, 75 bp, Homo sapiens
tctgttccaaatgctttgctgagtgatagattcgtgtggcctttcaaatgattgtgaagtggtggaaatggatcc

SEQ ID NO: 75901 - DNA, 90 bp, Homo sapiens
gaagttcttccttgaagaaatacagcttggtgaagagttactagctcaagatgtggaagatgtcaagtttgtgatcaactatgactatcc

SEQ ID NO: 75902 - DNA, 98 bp, Homo sapiens
gcggtcacctacccccagcaccacctccagcccctgcgcctcgggacagagggtctcacggatggccccgctgccaggagcagaactggttcggaggc

SEQ ID NO: 75903 - DNA, 97 bp, Homo sapiens
ggcttgctcttctctactctggagaccatcacaggccagcatcctgccgcatattccgttcagggccaaagtgttatgatgataagtccatcaagtg

SEQ ID NO: 75904 - DNA, 100 bp, Homo sapiens
tacttgcctaaatgaggaatgtctttcctaccatctaaaatacgaaggtttctggctgggtcagaagagatcaattctacagaaatttccagtggttctg

SEQ ID NO: 75905 - DNA, 143 bp, Homo sapiens
atccccgccactttccccggagctgggccgcgaacacctcactattgatggtgtagcgctttaggggaagaaaaggggccttgctgttcaacaacatattttctatcgtgcctgcgatcttaatgggatgcagcagagtcgcc

SEQ ID NO: 75906 - DNA, 50 bp, Homo sapiens
cgaagcggatttccgattgaatgtaccttgcagaagccggctggacagct

SEQ ID NO: 75907 - DNA, 100 bp, Homo sapiens
gtgaattgatttggttggaatgctcttttaccgatgctttaacatacagccactagtgtatccctggatatcgggctgaggaagcagtggaaatgttaaa

SEQ ID NO: 75908 - DNA, 75 bp, Homo sapiens
cgccaccgagtccggaccggagactttggggcctaactaggagatctataaggacaggcagaaattctcagaaca

SEQ ID NO: 75909 - DNA, 98 bp, Homo sapiens
caacatcatgcgagcctggttgttccagcacctctcgctcgccctcccctacctgcggaagagtcaagggaatgtcatcaacatctccagcctggtgg

SEQ ID NO: 75910 - DNA, 80 bp, Homo sapiens
caaggcacaccgcaggaacaagaaggacgtcaacctcagcaagactgagaagatgccgcggcgagtcctttgcacatgtt

SEQ ID NO: 75911 - DNA, 109 bp, Homo sapiens
cgcccagagactgctgagcccgtccgtccgccgccaccacccactccggacacagggagagatgacatgctggacgtggagaccgatgcctacatccactgcgtcagtg

SEQ ID NO: 75912 - DNA, 95 bp, Homo sapiens
ggagaagtttgacaggtcaaaactgaagaaaactaatactgaagaaaaaaatactcttccctcaaaggaaacttcatcagcaatggaagtggctg

SEQ ID NO: 75913 - DNA, 83 bp, Homo sapiens
ctcacctgaggtgaaccttcgaccttggacttctcagcctccagaatgggatttcttccagaaagcatgtatgaacgtattct

SEQ ID NO: 75914 - DNA, 100 bp, Homo sapiens
cgccagtcaataggaagtacgagttgggaaagtaaaactgtcctgcgcaatgagcctttggttttagagggaggctatgaaaactggctcctttgttatc

SEQ ID NO: 75915 - DNA, 82 bp, Homo sapiens
gcaaagggaaggtggtggacctgctggcgcaggacgccgacatcgtgtgccgctgccagatgctgctagagaaactgaacgg

SEQ ID NO: 75916 - DNA, 89 bp, Homo sapiens
ggacggagaggaaagcggtgcgtgaggcgggcggccagggcacgttgaaacattgtagtcggtatatacatgacttatttccttcactc

SEQ ID NO: 75917 - DNA, 98 bp, Homo sapiens
gccagatccgctgatctagtgcttctcgaaaaaaaccttcaggcggcccatggcaaaaagaagctctttatgatctatggcaaatggacggaatgttt

SEQ ID NO: 75918 - DNA, 87 bp, Homo sapiens
gccgccgagctggacccggaccggttttggggctctacggcctgccccggcggtccggcaagctgaaggacctgtctaggtttgatg

SEQ ID NO: 75919 - DNA, 101 bp, Homo sapiens
actgagtgacagctcacccatagaccatctgaattttcacaaacctggaatggaagttggatacactttgtgacttgtacgagacactgaccattacacag

SEQ ID NO: 75920 - DNA, 80 bp, Homo sapiens
ggctgctcccatcattgatgtggtgcgatcggatgaacgtgaagccagagaaaatgtgaagagagagcaagatgaggcct

SEQ ID NO: 75921 - DNA, 90 bp, Homo sapiens
gtggactacgtctgtgcggctgcgtggggctcggccgcgcggactgaaggagactgaaggtgtgtgcagtggcctcagggatccggaaag

SEQ ID NO: 75922 - DNA, 82 bp, Homo sapiens
ctccgggttccccggctcgcggggcccggcgaagggcagagcctggaaacctggccggcgtcaggcacatcatcctggtcct

SEQ ID NO: 75923 - DNA, 98 bp, Homo sapiens
aagcccaagtggcacaaatgcagaaactccctctggtgatgatttcaggtgtgatgaatgcagactctgctaccattttggctgtttggatcctcctt

SEQ ID NO: 75924 - DNA, 83 bp, Homo sapiens
ggcagtgtgtgcaaaaaagcgccccccaggtcagtttgctgagaacgaaaccaatgaggtcaattttagagagataccttcac

SEQ ID NO: 75925 - DNA, 96 bp, Homo sapiens
gccagcctgaatgagaaaacaccgaagggacattctgtcttcatggacatttttgaacttgtgcacaccacacaaatgagtgatgaggaagaggat

SEQ ID NO: 75926 - DNA, 90 bp, Homo sapiens
acaatgagcaactgcccatgctgggccggcgccctggggccccggagagtaatcactggccagcatcgaaatggtgtaatttcagcccga

SEQ ID NO: 75927 - DNA, 75 bp, Homo sapiens
caaggcctaccacctgtcctgcctgggccttggcaagcggcccttcggggcaagattcttgccaagagaattaat

SEQ ID NO: 75928 - DNA, 83 bp, Homo sapiens
tatggaagtaatggaaggacccctcaacctggtgtttcccattaaacactaccaggacaaaatcaggccttacatccagctgc

SEQ ID NO: 75929 - DNA, 97 bp, Homo sapiens
gtgggcaggctgacgtgcagacgctggccatcatgcttcaggagcagctggaggccatcaacaaggagatcaaaattatatccagatcgagagacag

SEQ ID NO: 75930 - DNA, 94 bp, Homo sapiens
tccggcgcgggcactgctttccactcggctcctgtcgtccgttctctcaggctcccgttcagccctgggcgctgcctatggcacagccaagagc

SEQ ID NO: 75931 - DNA, 100 bp, Homo sapiens
gttgtaacttcatagactcccaaagggaaattcttgacttgtaccgaagagatgagaccatccaggtgaaaggaaacggctacgtgcagagtcctagatt

SEQ ID NO: 75932 - DNA, 73 bp, Homo sapiens
atatctaacatactatccgagcttcggtcatttggaatccctggagatagagaaagtcaggctgtggttgacc

SEQ ID NO: 75933 - DNA, 75 bp, Homo sapiens
ggatcacaagctcaggagttcgagaccagcctgactaacatgaagccctgcagtccatttgatgtagacaagcca

SEQ ID NO: 75934 - DNA, 50 bp, Homo sapiens
gttcgccagcagcccaagagcctcaaagtgcatgagctggaacgagcctg

SEQ ID NO: 75935 - DNA, 75 bp, Homo sapiens
ccgaggctcaatagtgaaaaggtggagatggcgttagaaggcgctattcgtgtgagggatgacaagatgcctttg

SEQ ID NO: 75936 - DNA, 98 bp, Homo sapiens
atgaaagtaaacctggtgactcacagaaccttggtttattcttcagtccaaggaagcaattcacagtcagctgttagagaagcagaaaatagcagaag

SEQ ID NO: 75937 - DNA, 50 bp, Homo sapiens
agctctacatctctgagaaggaggttctgcggggagtgtctccagccctg

SEQ ID NO: 75938 - DNA, 74 bp, Homo sapiens
ctcacagtatcagaatacaactgtttccttttctccggctgctagcttgtataagctagaagaagaaaaccatg

SEQ ID NO: 75939 - DNA, 83 bp, Homo sapiens
catgggaaccacagatagtgggccttattttgagaaggctgctggaaagtacagacaacaaggcagaaattatattgttgaag

SEQ ID NO: 75940 - DNA, 83 bp, Homo sapiens
aaggggcttacgcagaaggacctggccacgacatgcaagaaagcacttcagccaagcagaagggagccagctggacgaggtgc

SEQ ID NO: 75941 - DNA, 89 bp, Homo sapiens
gctggcagcacttccctgagccactctccaggctgctccagtactcaagggaacgggatacattaattgtttggtcagaagcagagaac

SEQ ID NO: 75942 - DNA, 99 bp, Homo sapiens
ctagaaccttggaagcattatgttccaattaaaagaaatctgagtgatttattagagaaagttaaatgggctaagcatgccaatgaagatgtggaaaga

SEQ ID NO: 75943 - DNA, 75 bp, Homo sapiens
ccgacatcagtgagaaggaggctggctgcagagaccatggaactttatattgctgttggaatatctggagccatc

SEQ ID NO: 75944 - DNA, 100 bp, Homo sapiens
tctgactggttgtcatgatgaattgagctctctgttacctgcgcatcacaaccggcctagttccccgagagcgttcagacagtgggggctcaagctcaga

SEQ ID NO: 75945 - DNA, 50 bp, Homo sapiens
gccactcagagtcgcccgagaagaacgtgttgtgggctttcacgtactgg

SEQ ID NO: 75946 - DNA, 74 bp, Homo sapiens
gtagcggcagcagccccagcctcaaggccaggccgaatccacatatgtcgaagcaagacagaaaccaaagaccg

SEQ ID NO: 75947 - DNA, 83 bp, Homo sapiens
cttactactgctagtcgctgcaacactcctctacagtttgaggctattttggcattctgctggatatatgttcgtaaatacca

SEQ ID NO: 75948 - DNA, 75 bp, Homo sapiens
gggcttgccctggtcttgctcggccgatgaagtgcagaggtttttttctgcaggttacgggcaggacttgagtgg

SEQ ID NO: 75949 - DNA, 82 bp, Homo sapiens
ctgggtcctgcatttggccaccaagacctgggaacaagtcaataagactttgaccccgacgcaggcttcagtgattgccgcg

SEQ ID NO: 75950 - DNA, 100 bp, Homo sapiens
ggatttacgtggagatcaagcgcagcgatgttaagtgggcagaccaacatccacctcagcaaaaacttcttcctgacgaatcgcgccagggagcgctcag

SEQ ID NO: 75951 - DNA, 99 bp, Homo sapiens
cacagtgtctgatggagctttcctaccagaccctgaaattcacgcatcaggcgcgggaagcgggcctactgcagtgcatgaaggtggtatggactcaga

SEQ ID NO: 75952 - DNA, 74 bp, Homo sapiens
agctggaggaaacctgtagcctaggggattgtggtccatcaggagtctgtgtgtgccacctatggaagtggctt

SEQ ID NO: 75953 - DNA, 83 bp, Homo sapiens
cccggagtgggccttggagtcggcgcgcaggcggctcgcggttggggtgactcagtgggaacgccatctgagcggggcatgac

SEQ ID NO: 75954 - DNA, 96 bp, Homo sapiens
tacagcatcaactacctgcactttggggagcctaagtcctgagtccctgcaggaagcatcacccaggctggcagatcatggtagcagcagcggggg

SEQ ID NO: 75955 - DNA, 97 bp, Homo sapiens
tattattcaccggattgatagaactgcaagctatgaggagcccacatatgacagtggacatagaggacaacgcagatatagaacatttcttttatca

SEQ ID NO: 75956 - DNA, 82 bp, Homo sapiens
cacaagacatttcctgctcggaaccttgtttactaattgtcagaatggcggcagcggagcatcgtcattcttcaggattgcc

SEQ ID NO: 75957 - DNA, 75 bp, Homo sapiens
gggggtgaagcctcctgcgccggccttgcctcggagagaagtggagatcctgatgtttctcagtgccattgtgat

SEQ ID NO: 75958 - DNA, 90 bp, Homo sapiens
cactggctggattgaggagtagaaggctcaaacaacccaagagtcaagggtccagagaaggaggagaagttgagacaggcggtcaagcag

SEQ ID NO: 75959 - DNA, 97 bp, Homo sapiens
ttctcagaagacagagggttttcttttgaggtgctggagaatctggtaaaagcaccattgtgaagcagatgaggatcctgcatgttaatgggtttaa

SEQ ID NO: 75960 - DNA, 96 bp, Homo sapiens
caacgaggacctgcaggtggaagtgatgaagattccagttcttcagacaaacaatggtccaagtctaacaggattgactactatagcagctcatct

SEQ ID NO: 75961 - DNA, 50 bp, Homo sapiens
tcgtgatatccaagaacaagcactgcagtggacgtgatgctgaatccagg

SEQ ID NO: 75962 - DNA, 51 bp, Homo sapiens
ctcttctctaaaaatgatggtgaattatatccagatcgagagacagaagat

SEQ ID NO: 75963 - DNA, 96 bp, Homo sapiens
ggctaatggcacaactgtccacgtaggcattcaccccagcaagctgtcggaaaaggtaacagaagatggaactcgaaatcccaatgaaaaacctac

SEQ ID NO: 75964 - DNA, 88 bp, Homo sapiens
ctactagtactgagcttgatgaaagcagagataagagttgctcagagatcgagatggtgatcatggagcgtagcaagctctcagagct

SEQ ID NO: 75965 - DNA, 100 bp, Homo sapiens
cgccaagctgccggccagaccgcaatgagccccaccgaatccaacaaatcctcaactacatcaaagggcaattgaaggaacagactaaaaatcgtgtcct

SEQ ID NO: 75966 - DNA, 122 bp, Homo sapiens
tgctgcctgtggcatttattactttgaagtgaagattgtcagcaaaggaagagatggccaaggccacctttgatgccatttctaagacctacagctacctgacccccgacctctggaaggag

SEQ ID NO: 75967 - DNA, 90 bp, Homo sapiens
tgtcagccttcccagtagctgggaccacaggccgccaggctaccccaatatgaatcaagggggcatgatgggaactggacctccttatgg

SEQ ID NO: 75968 - DNA, 50 bp, Homo sapiens
ccaacctcctccagggctggcagaacagatttaagtaagtcttccccaac

SEQ ID NO: 75969 - DNA, 85 bp, Homo sapiens
gactccaagcaaaatccacatgcaggaaatggaacttaaaagaactggcagcggatgagatgaacacttttaacaagagaacagg

SEQ ID NO: 75970 - DNA, 100 bp, Homo sapiens
tgacgtcctgtgcaccatcaccaagaccatggactacctccattcccagggggaggaacgatgatgaatgtcgggcatttgtgaagagagtcataatgag

SEQ ID NO: 75971 - DNA, 97 bp, Homo sapiens
aggaggaggcgaggaggagagactcctccagtctgtggactttgaagctgtggcaatcacagtgaaagagctagttcgatatacactcagtataaat

SEQ ID NO: 75972 - DNA, 100 bp, Homo sapiens
ccggtcgccatgatggctgtgggcggtaaacgcggttagtgcaagcatctgggccatcttcaataagaaattgcttcagagaattcagattgcatctttc

SEQ ID NO: 75973 - DNA, 83 bp, Homo sapiens
ccggcaccgcgcctgctgccgggttgcgctccgtgcacctcttgcggacaatgcagatcttcgtgaagactctgactggtaag

SEQ ID NO: 75974 - DNA, 100 bp, Homo sapiens
ttatcatctattccaccgtgttctgggtaaagcttcagcgactgaaggagtgtggactttttgaatttcaagaacagtaaagttggaacacagcagaggg

SEQ ID NO: 75975 - DNA, 100 bp, Homo sapiens
gccttttccgttgccggtgccggcctagcgtcctggaattacttcaatcaacaaaaaatggccccatttatgatgtagtttggaattctagttctactga

SEQ ID NO: 75976 - DNA, 100 bp, Homo sapiens
gggatctcaggtcctcgggggcggcggccacgccaaggacggtttgcgtgtgaacttggacatgggcaaagcggtgtatggatggatgatgatgaaagat

SEQ ID NO: 75977 - DNA, 100 bp, Homo sapiens
ccctggagaaaaagctgaaccaggcccttttggatcttcatgccctgggttctgcccgcacggacccccatggacaagctgtggggggtctgtgtctcca

SEQ ID NO: 75978 - DNA, 100 bp, Homo sapiens
attccatcggacatggtgtttcttaggacttcagaaaaagcagtggctgtgtggagtggtgtgaatgtggcaggtgtttctctccaggaattgaatccag

SEQ ID NO: 75979 - DNA, 51 bp, Homo sapiens
tggacaccacacacatcatcagtctggacgtgttcctcatgatccggcgcc

SEQ ID NO: 75980 - DNA, 83 bp, Homo sapiens
cgtccctggagcggccgccttccagctcactcacctgtggcgcccttggccgctcagtcaaggctctgaatatcctgagactg

SEQ ID NO: 75981 - DNA, 75 bp, Homo sapiens
agacattgacctgctgaaatccaggatagagagtgaggtacaatcattggtttgatgggatggcgctgcttcacc

SEQ ID NO: 75982 - DNA, 100 bp, Homo sapiens
ccttggagtaaatcacattcacaagaaacgtgtgctacacagagatatcaagtccaaggatcgtggctattttgaagagctgatcaccatgttggaagca

SEQ ID NO: 75983 - DNA, 75 bp, Homo sapiens
aaaaataccacgacaaaaccaccctacagcagccgctcttctaaaacattcaaaccaaagaagaatatccctgaa

SEQ ID NO: 75984 - DNA, 80 bp, Homo sapiens
ttagcaggaatactttagcctggaaggtggatgaaaatactaggaaaagtttatttaagttacgttctacatgggatgaa

SEQ ID NO: 75985 - DNA, 98 bp, Homo sapiens
aggtcgccagggtcattgtcgtggatttgcacagtcggctgggcggtgcaatggcggagaagaaaacctcctggcaattttacgacgaagatggtgga

SEQ ID NO: 75986 - DNA, 90 bp, Homo sapiens
agatcgccggggaggcagcgcgggatcccagcctcaggcgtgcgcggacggtgtgcgggttctaaatggcttctaagaagttgggtgcag

SEQ ID NO: 75987 - DNA, 50 bp, Homo sapiens
cggcgatcctgggctgcgggcaaggcggtttattcttcagtccaaggaag

SEQ ID NO: 75988 - DNA, 100 bp, Homo sapiens
gacctggaccagccagaggacgcgggctctgaggatgagctggaggagggggacggcggctccctggaccaggtgctgaaagaggccaagaggattcccg

SEQ ID NO: 75989 - DNA, 100 bp, Homo sapiens
gtcccgtccgacagccaggcccgggagaagaactgtggctgcaccatctgtcttcatcttcccgccatctgatgagcagttgaaatctggaactgcctct

SEQ ID NO: 75990 - DNA, 89 bp, Homo sapiens
cacgctacatgacccccgcctttgtcaccatgaccagcccctgccacttcaccctggtcaccgatttcgaacaagtggagatgataaga

SEQ ID NO: 75991 - DNA, 75 bp, Homo sapiens
atcctcaatttaagcctgatctaacccctagaaacagcgcgttccttcacctcgggcagaataactttgcagaag

SEQ ID NO: 75992 - DNA, 90 bp, Homo sapiens
cgcagaaaatcttcaaagccaaccaccccatggacgcagaagttactaaggccaagggtatgcctggctttagcacctctaagaagctgg

SEQ ID NO: 75993 - DNA, 74 bp, Homo sapiens
cagcttctctagctggccttgctgttgacatatctgaagagatggattaagaatgctttggattaaggattgtg

SEQ ID NO: 75994 - DNA, 90 bp, Homo sapiens
atagccgagcagactggcatctgtaaggtgcggccgccgccggctttcaaggatatgctgtattcagctcaggaccaggcaccttctgtg

SEQ ID NO: 75995 - DNA, 90 bp, Homo sapiens
tgcaattctggatttcctgccaggaaaattgcctaagaattatgacccaaaagttaccccagatccagaaagatggctgccaatgcgaga

SEQ ID NO: 75996 - DNA, 97 bp, Homo sapiens
tccagtttagaccacagacataaacagaaagtcttacatgacacaatggatctgaatcatctcttgaaaggttatcctgaatacatgtctaacaatt

SEQ ID NO: 75997 - DNA, 80 bp, Homo sapiens
ctctaagtactctgaaatgagtgaggaaaaacgagccaaacttcgtgaaattgagacactgtgcatcttagccaacatag

SEQ ID NO: 75998 - DNA, 90 bp, Homo sapiens
cagcgtatccaaaagctcagttttggagaggataactcccctgtgatactctcaggaccacctcagggctgacaggacaactggatcagt

SEQ ID NO: 75999 - DNA, 50 bp, Homo sapiens
cacaaaccgctgccagaaaaactttgtgtggacagtaatgacctcacgtt

SEQ ID NO: 76000 - DNA, 98 bp, Homo sapiens
caaaattgacatctatcattatgaattggatatcaagccagagaagtgcccgaggagagttaacaggtttatgatgataaagactacaggagaattcg

SEQ ID NO: 76001 - DNA, 100 bp, Homo sapiens
ccgcggtcccgtctcctgggcctgtcccgcccgcgccctccgccggccctcagctcttgggttgatagcttatggcagtgatagtcaagtgtatcacgcc

SEQ ID NO: 76002 - DNA, 80 bp, Homo sapiens
cacaacctccccctttccaatctggcaatcccagagaccatcatgcagacatcagagactgggtcggacacaggctcgac

SEQ ID NO: 76003 - DNA, 138 bp, Homo sapiens
tgtgtttctccattctgttggttttatgcatctttatccaatcaagtgcccttggacaaagcctgaaaccaggtgtcatggagaaactccagctgggcccagagattctgcagcgggaaaatccaaggcttatttatg

SEQ ID NO: 76004 - DNA, 50 bp, Homo sapiens
cagcacctggaggatacctgctacctagtctcgctccgttgcccaggctg

SEQ ID NO: 76005 - DNA, 90 bp, Homo sapiens
gacaagttcaaggccaagttcctgacagcctggaacaacgtcaagtacgatctgcgtggaaaaatgccccgaccgctacctcacgtacct

SEQ ID NO: 76006 - DNA, 82 bp, Homo sapiens
tggaatagtagcaggcggcggcggcggaacgccaggcaggtgacttaagagattaaaattaatttggttgctgttggttctg

SEQ ID NO: 76007 - DNA, 99 bp, Homo sapiens
agtccccagggaatgccacagcatcctccagcacctcagatggacaatctaaaatatgtaaatcagttgaagaaggaaaatgaacgtgcccaggggaaa

SEQ ID NO: 76008 - DNA, 75 bp, Homo sapiens
ggcctcttctgtgtcttcactttctgggagtgacgttgccatcaagccctgtcgtcctatgaccaacaatgctgg

SEQ ID NO: 76009 - DNA, 101 bp, Homo sapiens
ctgggcaagggcaacttcgctgtggtgaagctggggcggcaccggatcaccaagacggagaactttgtcagcgagcaagaacaatgccaggaggtctggag

SEQ ID NO: 76010 - DNA, 100 bp, Homo sapiens
tatacaactttctaaagagacagaaggcaccaagatcaaaattgataagtgtgcttaaggctcttgcagccaatgccggaacaggatttgctgttgctga

SEQ ID NO: 76011 - DNA, 100 bp, Homo sapiens
ctaacttctactgacgaagcttggaagttgcagaagaggtcctgctgtactagccaccaaagcagctgctggtactaagaaatatgatcttagtaaatgg

SEQ ID NO: 76012 - DNA, 100 bp, Homo sapiens
tcatgaaggacctgagcctgacgcgggccgcgcgggacctcctcgctgcggtggaactcgggcgccaaagagcgcatgctcatcaaggtcgctgatcggg

SEQ ID NO: 76013 - DNA, 100 bp, Homo sapiens
ggcagcgtccctgtgacctggccgatgaggaagtactgagcctgttggaggaactggcccggaaacaggaggacatgcggttcatgctattattcagccg

SEQ ID NO: 76014 - DNA, 100 bp, Homo sapiens
tacagagcccctgaggtcatcctggggatgggctacaaggagaacgattgtggtggtgccatgcagcaagaatcagagagatgcagagttagagccagaa

SEQ ID NO: 76015 - DNA, 100 bp, Homo sapiens
gtgacctctgtcgaagattataaagcccttcagaaatacgaaaaggagaaatttgaagagatgattcaacaagctcgtttctggcgctggagacatcaaa

SEQ ID NO: 76016 - DNA, 101 bp, Homo sapiens
tgagcccgtgcctgtcttcagatcttcacagcacagttcctgggaaggtggagccaccagcctctccttgtggcactaaggaaaacagatcatctctccct

SEQ ID NO: 76017 - DNA, 88 bp, Homo sapiens
ttaaacacaagaagttctcgaaatgggagtttgaagacctggaatgggggaggatgaaggtttaaggctcagaaaggtagcacattcg

SEQ ID NO: 76018 - DNA, 51 bp, Homo sapiens
aaaatagtgatagctttgataagttacaggaaatacaggaggcagaggaac

SEQ ID NO: 76019 - DNA, 82 bp, Homo sapiens
ctggctgttagaagaattcatgctcatccgggacagattgattcactttggagctgtaagtactgatgtattagggtgcagc

SEQ ID NO: 76020 - DNA, 51 bp, Homo sapiens
ctcttcctcaatgcttgtgtggagctggaagtcgagtgtgctactcaactc

SEQ ID NO: 76021 - DNA, 50 bp, Homo sapiens
gtactgtggagctgttgggactgggcagatcaagactggtgccccttgcc

SEQ ID NO: 76022 - DNA, 98 bp, Homo sapiens
aggcctcctgaattgcaagatgccacctgctgagaaggcttccaggatcagagctgctgagaaggtttccaggctgccactgcagagccccgccatgg

SEQ ID NO: 76023 - DNA, 51 bp, Homo sapiens
cacctatagcatcaacttcttctccaagctatcagttgagggatttgcagt

SEQ ID NO: 76024 - DNA, 75 bp, Homo sapiens
aggatcacattccaagggaaactgatatgaagggcaaagtatgtttagtccagcaagtatcggtcagccacgaaa

SEQ ID NO: 76025 - DNA, 90 bp, Homo sapiens
gtttctcttcattgacagacagcacttgcaggtcatgaagaaggatatttcacagctataatgttgaagaaatcaagagtgaaattaaaa

SEQ ID NO: 76026 - DNA, 75 bp, Homo sapiens
ccttcgccgccgcgcacaaccgcacgtgcaggaaggttgtgcaggaccagcgttccctgtgcaggcgccactgcg

SEQ ID NO: 76027 - DNA, 75 bp, Homo sapiens
acagagattgaaatgttccttagaaaggagcagcagaaagctgatgtcctgaccactggagctggtaacccagta

SEQ ID NO: 76028 - DNA, 80 bp, Homo sapiens
agatcatcgagcatttcaaacggacttgaaaatactggaaatctgtccggatccaaattattttgcaagccagatgagta

SEQ ID NO: 76029 - DNA, 100 bp, Homo sapiens
aaaaccgcgaagtcatggggctctgtcgggaagctatgtcaccttcacctgcgtcgggattgagcaagggtgagagagagagagaaatcaattccacgaa

SEQ ID NO: 76030 - DNA, 100 bp, Homo sapiens
aaaagacccaataggataactcaagttactggtgtaaagatttctctctgtgttactggaatccctattggatgctgccctctgatgtttgtggaatgaa

SEQ ID NO: 76031 - DNA, 97 bp, Homo sapiens
gtttctatcgggacgtcctggggatgaagaacctccagtgggcccgcgacgtgttgctaggcagcagtatcccgtggcaacaactgcagcacatgcc

SEQ ID NO: 76032 - DNA, 82 bp, Homo sapiens
gggagcaaggtgcaagagtccacaaagggacctgatgaagcgaagatcaaggaattgaatgatctggcacgggaccctccag

SEQ ID NO: 76033 - DNA, 100 bp, Homo sapiens
ttccttgaagaccataagcactagtgatccagccgaagtactcgtcaaaaatagccagttgagagaatatcagcagaggaatagccctggtgttcctaca

SEQ ID NO: 76034 - DNA, 75 bp, Homo sapiens
gtcgctggtcgtgcgacccaagcccctgcattcctgtacggatgagaagaggacagctgacatgtgctgctcggg

SEQ ID NO: 76035 - DNA, 101 bp, Homo sapiens
gaacacagtagtggaagatgtaaagcaatatttcgagcagtttggcaagacaaaagctgaccgtatgtcctatcatcaatggggaagaccaccttcgtttg

SEQ ID NO: 76036 - DNA, 98 bp, Homo sapiens
tccaagtgcgcgccctggcgggtccggaccaagtgaagctgtggtctaccaatctagacaactcagtggcaagcattgaggcaaaggctaatgtgtgc

SEQ ID NO: 76037 - DNA, 100 bp, Homo sapiens
tttttggcctaccctccaaagaaaagggagagtcccgtattctcagagtaaaagttgtttctggaattgatctcgccaaaaaggacatctttggagccag

SEQ ID NO: 76038 - DNA, 82 bp, Homo sapiens
ggagaggtgctgtgctgtgtatgaagaggcagtgaagactctgccaacaggtgggcccatctggggcagggaagagcacaat

SEQ ID NO: 76039 - DNA, 83 bp, Homo sapiens
ccaagaccgcaggaaggactggggccacgtggagctgctggagggagcaggccgggctctcgccatgggtcactgtcgcctct

SEQ ID NO: 76040 - DNA, 100 bp, Homo sapiens
agaatcaaaacacaaatcgcctaagaaaaagactggaaaggattctgagtggaagctggacacactatgtgacttgtatgaaaccctgaccatcacccag

SEQ ID NO: 76041 - DNA, 101 bp, Homo sapiens
gagtttcggggaccgcacgggaccgagggcaggaaagaacatggcctgtgtgcagcggacgctgatgaatctgggtgggctggcagtagcccgagatgatg

SEQ ID NO: 76042 - DNA, 100 bp, Homo sapiens
tacggcgacgacatgtatgggccagaaaagattaatgatgttttgcagcagttttctacgtctgaaattttttatgtctctggaacccagaatttgctaa

SEQ ID NO: 76043 - DNA, 100 bp, Homo sapiens
ctgacaccaaacaacattatgttgggggataaggacaaagtaaccgttacggttgtggaacaggaaatgaaaaaggactggctttttgcccctcattatc

SEQ ID NO: 76044 - DNA, 75 bp, Homo sapiens
tttccctcctcaaactgactttgcagccacggagagatgcgagccacccctctggctgctcctgcgggttccctg

SEQ ID NO: 76045 - DNA, 100 bp, Homo sapiens
ccttgtctcgctcgggagcggaaacagcggcagccagagatttggagcaagaggtggtggtggccttcccccgaagaaatttggtaatcctggggagcgt

SEQ ID NO: 76046 - DNA, 72 bp, Homo sapiens
cctggatgccctgaagatcagcatccgccagctcaagtggaaggagagtgatcagcagctggactgtgcctt

SEQ ID NO: 76047 - DNA, 100 bp, Homo sapiens
gcttttcacgtcacctggagagatgcacagatctgatctactgtggtcggaagctaaaagatgaccagacacttgacttctatggcattcaacctgggtc

SEQ ID NO: 76048 - DNA, 50 bp, Homo sapiens
ctggaattaggcaaatatggacagatcatcacgggggaattctaccggat

SEQ ID NO: 76049 - DNA, 100 bp, Homo sapiens
cacggaccagtttcagttcgccgatgggaaacccggagaccaaatccttgctcatggaatgctgtgtaaatgccctggtgacatcatttaaagagactat

SEQ ID NO: 76050 - DNA, 83 bp, Homo sapiens
ccgccatcattatgaaaaaagactctgaggacatgggtgtcgtcgtcagcttgggaacagtttttggtgttgagccagacttg

SEQ ID NO: 76051 - DNA, 100 bp, Homo sapiens
agaaccaccagcattgccaccaccaccaccaccaccacagagtctgtggaagaggtggttcgaggatgccaggccaaggtggagcaagcggtggagacag

SEQ ID NO: 76052 - DNA, 90 bp, Homo sapiens
gactgtctacccgcgacagttcgcaagttgcggtggcggggcggctgtgcggagcgcgcgtgcagggcagagcggcttgggtaaatccac

SEQ ID NO: 76053 - DNA, 98 bp, Homo sapiens
cggaccgcgcccgccgggcacacaagaatggtcactatctcacattcttgaaggtggcattgaagagcactaagatcggaagatgagtgagcttgacc

SEQ ID NO: 76054 - DNA, 100 bp, Homo sapiens
ggtggattcagaggaggtcgtgggggccgggagtttgcggattttgaatataggagattaaatgccctagctgcaatagttcaaggcagtcttcctaaat

SEQ ID NO: 76055 - DNA, 100 bp, Homo sapiens
cagaagaggagctgaggatcctccacatctcagtcatggaaatgagtggcttatactctcctgtcagtgaggatagcacagtgcctcaatttgaagctcc

SEQ ID NO: 76056 - DNA, 100 bp, Homo sapiens
cccgctgcccaaaatgtcggcgcccagagggaggtgtggggtcccggtcagtgggccctcagcctccgatccctggacaccggccccggccttctcagat

SEQ ID NO: 76057 - DNA, 109 bp, Homo sapiens
tcctcaccctctgccgagtctcaatatctgtcttcggtggactccttcggcagtccacccaccgccgccgcctcccaggctgatcagctgaccgaagaacagattgctg

SEQ ID NO: 76058 - DNA, 90 bp, Homo sapiens
gcagtggtggctatgaacccagaggtcgtggaggtggccgtggaggcagaggtggcatgggtccaacatgtttaccgtggctgatgtgtt

SEQ ID NO: 76059 - DNA, 95 bp, Homo sapiens
tagtggtgactgtatatggccagattccacttcctgcgtttaactgggtgaaggccagtcaaactgagaaattcctgatgagaaggaagaggcca

SEQ ID NO: 76060 - DNA, 83 bp, Homo sapiens
tgatgaggatgtagatttaccagaagtagatggagcagatgatctgaaccacaatctctacgaggtgatgagcaaactggaga

SEQ ID NO: 76061 - DNA, 100 bp, Homo sapiens
ggacagcaggccccgcgccggagcgcatcagcgaggaggtggggctgctgcagctccttggggaccccccgccccagcaggtcacccagacggatgaccc

SEQ ID NO: 76062 - DNA, 101 bp, Homo sapiens
gcctccttcgcaggcttcagcagtgcacagagccggaggatcgcgtttttcgttggaatatacgttgcacatttatggcgattctgagtgtgagggcagac

SEQ ID NO: 76063 - DNA, 75 bp, Homo sapiens
aagagcactagaaaaaaatgaatcaagttttgcatctcataaggaaactcaggttgaataattcatcaaattaca

SEQ ID NO: 76064 - DNA, 83 bp, Homo sapiens
gtagttgaagattataattcagtggataaaactaccacagacaatgcagatcttcgtgaagactctgactggtaagaccatca

SEQ ID NO: 76065 - DNA, 51 bp, Homo sapiens
atacagatgtattcaaatggatcttcaaagaatgtagaagcgaggcctgga

SEQ ID NO: 76066 - DNA, 100 bp, Homo sapiens
gccaagcgtcctgcccggcccgtatctggtgcaggccgtgagagcagcgggcaagtgcgatgcggtcttcaagggcttttcggactgtttgctcaagctg

SEQ ID NO: 76067 - DNA, 75 bp, Homo sapiens
tcatgcaggacatcgtgtataagctggtgcctggcttgcaagacaaaactgttcaggttccattatcaaaacgag

SEQ ID NO: 76068 - DNA, 98 bp, Homo sapiens
ttagatgaatttaccactaagcttttggcatcgtgttgcaaaatgacagatcttctagaagaaggttgggggccgtcccgctcctaaggcaggaagat

SEQ ID NO: 76069 - DNA, 123 bp, Homo sapiens
cggggagcgaccgggagcggcggcagcggcggcgcggaggcggctgaggtgcgagccggagaatggggtactaagagaaaagcacgaagctgtggatcatagttcccagcatgaggaaaatga

SEQ ID NO: 76070 - DNA, 83 bp, Homo sapiens
ggaaaaaatgacatccagcgacaaggactttagggggatatgagactttctactcggaatatcctgagtgttgcgtggatgta

SEQ ID NO: 76071 - DNA, 100 bp, Homo sapiens
cggacaaaaaagaacaggagaagtctgaacacgttgcctgtgatttgcttcggaggattattcgtatcttgaatctcagtaagagactccaaggacaact

SEQ ID NO: 76072 - DNA, 104 bp, Homo sapiens
tggcaaacatgaagcatccaaatattgtccagtatagagaatcatttgaagccagacgaggacagccggctgctgcccctgctggtctgcctgcggttcctgtt

SEQ ID NO: 76073 - DNA, 75 bp, Homo sapiens
agaaaagaagaggagaatgctaagcagagcacagatgaggagagcatcctgactctgttgacatcccgaagtaat

SEQ ID NO: 76074 - DNA, 82 bp, Homo sapiens
gggggctcggctgcagacttggccaaatggacgggactattaaggtactccaaagattcaggtttactcacgtcatccagca

SEQ ID NO: 76075 - DNA, 75 bp, Homo sapiens
ctgctagccacccgtccgacaacttccggactcccaggtggctgcaatattaaaggtgaagatgagagctgggac

SEQ ID NO: 76076 - DNA, 75 bp, Homo sapiens
gctgatgtttcaaggaacagtttacaagcacatgataatttcttactgaaactgttgaggagcccatggaggaag

SEQ ID NO: 76077 - DNA, 75 bp, Homo sapiens
agggtgttcgactgctagagccgagcgaagcgtgaatgaaaactttgccattgatttgatagcagagcagcccgt

SEQ ID NO: 76078 - DNA, 100 bp, Homo sapiens
gaagataatgaagaggaagttgtatattccaataaacagtcactactaggaaaactcaaatctttggcaaccaaggtagcagaaggtcaagaaatttgtg

SEQ ID NO: 76079 - DNA, 74 bp, Homo sapiens
caaaaatagtgatagctttgataagccagagatcctcagcaggagcctatggaagagatagaaaatttgaagaa

SEQ ID NO: 76080 - DNA, 75 bp, Homo sapiens
ggggagcacatcttcacactggacactctcgtgcaggctatagaaagcgcaattggtggtaacgcttatcaacac

SEQ ID NO: 76081 - DNA, 101 bp, Homo sapiens
gggctggggcacgtcaccgccgaatggcagcctccagaaagccaccgcgagtaagcttagaccatgctcagcctccaagcagccttgtcatcgacaaagaa

SEQ ID NO: 76082 - DNA, 97 bp, Homo sapiens
tccgggatgatcgataagaacgagctgaagcaggccctctcaggtttcgcgggagatacagatgacccaccaagaattactcagaaccctgtgatca

SEQ ID NO: 76083 - DNA, 51 bp, Homo sapiens
gctcaccggtttctcccacatcgacctgagatgcttcctgggaattagagg

SEQ ID NO: 76084 - DNA, 83 bp, Homo sapiens
gcaagagtaacagcagcgccgtcccgtccgacagccaggcccgggagaagtctggcgtgctcctgatcagagttactctgatc

SEQ ID NO: 76085 - DNA, 90 bp, Homo sapiens
ttacagaaagcagcaagaggacgtgaggaacatggtgacgagtagcaagagaccaaagagagatggaaccatgtaaccaccacgaccaag

SEQ ID NO: 76086 - DNA, 100 bp, Homo sapiens
ctcagaaaacattttgcagctgattacctcagcagatgaaatacatgaaggagacctagtggaagtggttctttcagagagtggatctttcctacaattg

SEQ ID NO: 76087 - DNA, 75 bp, Homo sapiens
aatgcattgaagtcagtcattaatgaccctgtttctttcagaatggaaagtatacataataagatgagaggtgct

SEQ ID NO: 76088 - DNA, 50 bp, Homo sapiens
cagcctcctgagcagctgggattacagaaaagaagagtcggggacctcct

SEQ ID NO: 76089 - DNA, 80 bp, Homo sapiens
ttactccattcgatttgaagactgcagtagtgcaaaaaccattcttaaagttatagatagtagtatgaaaaacttcaaag

SEQ ID NO: 76090 - DNA, 75 bp, Homo sapiens
caagcgcagggggacggggaccagcagctgtcgccgccgctctcagacaggggcaagtgtccgagtggtgaatca

SEQ ID NO: 76091 - DNA, 95 bp, Homo sapiens
ttcaggatgtggaggcccaggccgccacctgcaaccacactgtggttcaagaattccaccagttggaatccaatctgcaagtatgtcagtttctt

SEQ ID NO: 76092 - DNA, 100 bp, Homo sapiens
ggaaacaatggcatttacagaaagagtcaacagcagtggcaacaggtgacggccctgctcgggaggccctccagtctctgagccagcggcttcgggtgca

SEQ ID NO: 76093 - DNA, 100 bp, Homo sapiens
agaggagcatgtctgcaactcgagccaagaaagtgaagatggccaccaaatcatgccccgagtgcgaccaacaggctggaaagaaaccttcaaatccagc

SEQ ID NO: 76094 - DNA, 50 bp, Homo sapiens
gggccaggcgccgctcagaacggtcatcatcagatttgaaatatttaaag

SEQ ID NO: 76095 - DNA, 75 bp, Homo sapiens
ttgactgctctgctcctctatgctggacatcaaatttccagtgcagaatacagaaactgcagccatgaccacgca

SEQ ID NO: 76096 - DNA, 100 bp, Homo sapiens
gtgagcagcgctgtgtttgcgagcgggagcgaggggcgccggctggggtgtgtgctcctgcttcgttccagagcccagcatgaatggatacgcggaattt

SEQ ID NO: 76097 - DNA, 101 bp, Homo sapiens
aaggcaccagtttctgatggagctgaagcaggaagccctcacctttgccaggaactggggggccgactatatcctgagtccagatgcctgtccagcctcca

SEQ ID NO: 76098 - DNA, 98 bp, Homo sapiens
gtggttgcaacggagataaattcccggaaccgcgattcggcgtgtcaggtgagaagccctaccactgcaactgggacggctgcggctggaagtttgcg

SEQ ID NO: 76099 - DNA, 100 bp, Homo sapiens
taatcaagttgataaggaaagtactgtccaaatgaattatgtcagcaacgtatccaagatttgcttggaacggtagaagaaatccttccaagcctctcag

SEQ ID NO: 76100 - DNA, 83 bp, Homo sapiens
cgcctccctggccggggcgcagttcggaggttcagatggtcatcatgggccagtgctactacaacgagaccatcggcttcttc

SEQ ID NO: 76101 - DNA, 101 bp, Homo sapiens
gacagcaatcagctggcctggtttgatactgacctgtaaatcatcctttaggttggaaaagagactgttcaaaccactgaggatcagattttgaagagaga

SEQ ID NO: 76102 - DNA, 50 bp, Homo sapiens
aaggacatgagcaaatccttaaccaattggagacagggtttcaccatctt

SEQ ID NO: 76103 - DNA, 100 bp, Homo sapiens
accgaagcttccggacgacgaggaaccgcccaacatggcctcggagctcacggatgattgatatccagaccaggatggctgggcgagcattggagcttct

SEQ ID NO: 76104 - DNA, 75 bp, Homo sapiens
ctggcatgccctgccacagccactgagttttatggacgaggagccccctacaatgccttgacggggaaggactcc

SEQ ID NO: 76105 - DNA, 87 bp, Homo sapiens
ccaaaaacccaccaattctggacacattgggattaaaggttgtttttcaccattcagaacattgcctgaagcaggtccaccatgccg

SEQ ID NO: 76106 - DNA, 60 bp, Homo sapiens
gtatcgccagcacgatcccaccgcacgttcagaagtcggactctttttgatcagaacaat

SEQ ID NO: 76107 - DNA, 50 bp, Homo sapiens
ggggagccccgggagccgcacggtgaagccaaaaaccttccctcttaccc

SEQ ID NO: 76108 - DNA, 98 bp, Homo sapiens
gagattgtattgctgttttggaaagaattagcagattggccgatgattcagatccagtctcccactttcatgcctctgatcatgtgcccaagccagga

SEQ ID NO: 76109 - DNA, 98 bp, Homo sapiens
gcagagtggacctgcaggtacttggatctccagtgggagctgccctctcgaaggcaggacagcggtggcggcagtgccacaccagaggaatataatac

SEQ ID NO: 76110 - DNA, 97 bp, Homo sapiens
ccaacaccagcatccagttcaacctgcgcaacctctaccgcctctccaaggccctcttcccgccggagcccctgtagagacggggttttaccgtgtt

SEQ ID NO: 76111 - DNA, 100 bp, Homo sapiens
gaagatccctgtggtagagagaaaaatcctggatctgtatgctttgagcaagggcttccgagtggacctgccaatcaagtcggcccgctaccgtggccag

SEQ ID NO: 76112 - DNA, 51 bp, Homo sapiens
aaggtgcaagatactatataaattttctggatatgccgcagaaggatccgt

SEQ ID NO: 76113 - DNA, 74 bp, Homo sapiens
gaagatcggcagcggctccttcggagacatctatctcggttttaaaatcaaagatgggaaaatcggagaaaatt

SEQ ID NO: 76114 - DNA, 108 bp, Homo sapiens
aaggtactcgcagcacttggagcgcagaaccggccgcgcccggtctcggcgcggaagatggccggcggcgtggacggccccatcgggatcccgttccccgaccacagc

SEQ ID NO: 76115 - DNA, 114 bp, Homo sapiens
tgttatttccaagatggtgacttctacgaaaaagccctggtggagctgaaggttgcaggtgctggagaatctggtaaaagcaccattgtgaagcagatgaggatcctgcatgtt

SEQ ID NO: 76116 - DNA, 74 bp, Homo sapiens
ttcaaatgaccaccatgttgcaaaaggtagctacagcaagctgggtagcaggcagatccaaaggatatcatgaa

SEQ ID NO: 76117 - DNA, 98 bp, Homo sapiens
tcgagttctcggaggggagggggcgttagccccgcgcagccgccggcgtcgccgccatggacctagggccgcctgggcagaatgtcacgatggacgag

SEQ ID NO: 76118 - DNA, 48 bp, Homo sapiens
ggacatggagggaaggcttcctaagcaacacagtcactcctggcggca

SEQ ID NO: 76119 - DNA, 83 bp, Homo sapiens
gccctctccttttcgtttccggaaacatggaggctactcacagtcgaactacaactccccggggtccggccagaactacagtg

SEQ ID NO: 76120 - DNA, 83 bp, Homo sapiens
atgttcttaacccagaagtagctgaatgtgttactccattgctgaggagtggcaccatgactcctgtgaggatgcagcactcc

SEQ ID NO: 76121 - DNA, 100 bp, Homo sapiens
gatgcatttatggaaggcacattacagaggtgagtgccgggctcggcgctctgctcctggagctcccgcgggactgcctggggacagggactgctgtggc

SEQ ID NO: 76122 - DNA, 83 bp, Homo sapiens
gtgaggacgcggcagcccgtggagtcggctgagggaaaagcgaggcaaggcaggcggtgtaaacaggaacatcgataagtagt

SEQ ID NO: 76123 - DNA, 90 bp, Homo sapiens
cagagctcagtgcaggcactggcaacttctatttgagagaagtggagatcctgatgtttctcagtgccattgtgatgatgaagaaccgca

SEQ ID NO: 76124 - DNA, 90 bp, Homo sapiens
tgctgaagcaaacaaaaacgccagcattttgttagaggagttagacttggaaaaggcagccttaagtgccttgaaacaattttctgaaca

SEQ ID NO: 76125 - DNA, 99 bp, Homo sapiens
cctggcccggcccctcttccccagcacagctgagctgcccctcctggacctgatgaagctgtacgaaggcgccttcctgccgagttctcagtggccccg

SEQ ID NO: 76126 - DNA, 98 bp, Homo sapiens
ttgttttgaggtgaccagagaggccatgctccatttgggcattgacacccctacccagaacaacatctttaaggaaccacaccctccaagattatcag

SEQ ID NO: 76127 - DNA, 97 bp, Homo sapiens
tggagattctccggggacccttccgtatctgcctaggcattttgctgtctcctcctaatacgaatacatccagcctgtgtgcctcccagctgccggc

SEQ ID NO: 76128 - DNA, 100 bp, Homo sapiens
gtctccgccggctactgccgcttcagttctcccggtgtggccacgagtcgggtaccagcaactaaggtttcagagctgaaccctaatgcagaagtgtggg

SEQ ID NO: 76129 - DNA, 89 bp, Homo sapiens
ggcaaactcaagcactgcatcaaaggcttctattagagcggttaagaagattgtctaccaaatatagaacagaaaagatatatcccaca

SEQ ID NO: 76130 - DNA, 74 bp, Homo sapiens
acttcttacagattgcaaccctgccaaaatgaagtttaatccctttgtgacttccgaccgaagcaagaatcgca

SEQ ID NO: 76131 - DNA, 75 bp, Homo sapiens
atcaaccttattgtggcattgcgccgtacattcgagagtttgagagtccaccctgcacctggtgttgcgcctgcg

SEQ ID NO: 76132 - DNA, 75 bp, Homo sapiens
tggacaagatgaagtctttctgccagtgaagtgcgccacaagcaaaccagctttctttgcagagaagcttcatca

SEQ ID NO: 76133 - DNA, 100 bp, Homo sapiens
aggtccggggcttgccctggtcttgctcggccgatgaagtgcagaggtttttttctgattgctgctaaaattgattcaattcctcacttgaataattcca

SEQ ID NO: 76134 - DNA, 50 bp, Homo sapiens
tgttctgccggaatttgaaaagtgcctgttggaaaagagactgttcaaac

SEQ ID NO: 76135 - DNA, 111 bp, Homo sapiens
ggatataaaagatctggttaaacaatttcatcagattaaaggtggttccatcaaggtcctaatccctacaatggagcacaggactggatttactctggcagctactgggac

SEQ ID NO: 76136 - DNA, 98 bp, Homo sapiens
actacctggtgcagggcctgattgaggactgccagctggcgctgcagatcgtaaagctgaaaattgaaatcatgaaagtagacaggactaaactgaag

SEQ ID NO: 76137 - DNA, 100 bp, Homo sapiens
caacatctcctgctattccttgggctgcctttcctgcaggttagtggatgacagatgtgtggtgcacccagaggccggggaccttgccaaccctcccaag

SEQ ID NO: 76138 - DNA, 95 bp, Homo sapiens
gtgcaagtagtgattggagaacaaagaggtgaaggagtattgtgggagagttcagagcacacgctgctgagtggacagccaacgtcacagccgaa

SEQ ID NO: 76139 - DNA, 100 bp, Homo sapiens
tgctgtatagtgaggatcaggagatctgatcctgattgcagaaccttccctgattacagaatcttggcaaccccacaaacggtgtctgtcccaaataaag

SEQ ID NO: 76140 - DNA, 102 bp, Homo sapiens
caagatctcgttcctacagcccaataccattgtttgttgcaatgaccaaaacccatgtgatagcagcctcgaaagaagcattttatacctggcaatatcgtg

SEQ ID NO: 76141 - DNA, 120 bp, Homo sapiens
catgattttcactccttgcaaactttgccatctttgttgcagagaatcgggaaacatgacgatgaccggaggtttacctgccctgtcgagggctgtgggaaatcattcaccagagcagag

SEQ ID NO: 76142 - DNA, 100 bp, Homo sapiens
tgaaggaagctcggacttctcctggggatatggtggtggtgaagtttattaagaaggagaaggtcttggaggattgttggattgaggatcccaaacttgg

SEQ ID NO: 76143 - DNA, 75 bp, Homo sapiens
caagtttcagagctgccactcagttcgatatctcaatgcctatactggaatagtgctacttcgatgcagaaaaga

SEQ ID NO: 76144 - DNA, 76 bp, Homo sapiens
ccggggaccaggacagtcgcgaggtgattttacaacgagatgctgctctccatagggatgctcatgctgtcagcca

SEQ ID NO: 76145 - DNA, 75 bp, Homo sapiens
gcacaattactccagtatcttttgatgaaacacttactgctctccaggatttgttaaggattccaagtaactctt

SEQ ID NO: 76146 - DNA, 98 bp, Homo sapiens
ggagcaacagctccccacactgcaccatgagctcagttggctgcaggagcagctagcacagaaacgcttcgttaagggactcaggcagtacgggaaga

SEQ ID NO: 76147 - DNA, 99 bp, Homo sapiens
gtcagaccaacagaggggcaaatcagagtgaagaggaagccagaagatgggagagacatttttgaaatccttccgctgaggaattgagaaaactaatga

SEQ ID NO: 76148 - DNA, 98 bp, Homo sapiens
tttctaagcaggttcatgccagcccagaacagagaatcagccaccattggttcaggcaatcttcagcggtgatccagaggagatccggatgctcatcc

SEQ ID NO: 76149 - DNA, 75 bp, Homo sapiens
ggcaaaggtcatggagatgtccgtaagtcagaaattggctttggaaaaatggaaacctacatcaaattggaaaag

SEQ ID NO: 76150 - DNA, 103 bp, Homo sapiens
gctcgcgctactctctctttctggcctggaggctatccagcaaatgagccgtcagactgctacagcattacctaccggtacctcgaagtgtccaccatcccag

SEQ ID NO: 76151 - DNA, 100 bp, Homo sapiens
ttatccgtgtgcagccccaaactggaaagaagatgctaattaaagtgaagctcactccatcactcgatgagataatatgagatttctacttcggagaggc

SEQ ID NO: 76152 - DNA, 100 bp, Homo sapiens
ctcccgccggctctgggtctggagtaataactgagccagcaggcccagatttggggaccccattcaccagccgcctacccccagaacttcaggtcctaaa

SEQ ID NO: 76153 - DNA, 80 bp, Homo sapiens
gcagcccccgaaggccctatcaggacatggagtatgaaagacgcatagttgttgcccaaatctcttggtacagaatgttt

SEQ ID NO: 76154 - DNA, 83 bp, Homo sapiens
gatttggaagaaatactttatactcttggactacatctttctcgggctcagatcctgataacttaagtgactctctcttttcc

SEQ ID NO: 76155 - DNA, 96 bp, Homo sapiens
gtggcagatatcgaggtggatggaaagcagagagctagcaatctagagaatagtacctatgacctgtacaccatccctaaagatgctgactcccag

SEQ ID NO: 76156 - DNA, 74 bp, Homo sapiens
ctggtcaccggggtctgcctgggtggtggaggtggatacagcagtcggagaacatctggcagagacaaatacgg

SEQ ID NO: 76157 - DNA, 96 bp, Homo sapiens
gtagccatgatgccccacttggtgaatggagatgcagctcagcagagtgtgaacatggctacgcctcttcattcccgtccatgccgagcccccgac

SEQ ID NO: 76158 - DNA, 100 bp, Homo sapiens
tgtgtggatcagcagacccccaccatccctaaccggctggctgcagacccgtgtttgattgcatcgaggtctatgcccctggcttcaaggactctgtggt

SEQ ID NO: 76159 - DNA, 90 bp, Homo sapiens
gatttacaacccctgctagcctggcttaaggtcatggagaaagcccacatcaacctggtgagttacgttatgatgatgaagtgaagcggg

SEQ ID NO: 76160 - DNA, 100 bp, Homo sapiens
tgaaggcctgttttgaagagaaggggaataagactgcatctgttcatatgaggttgtctgcattcaaaagagcattctattaaagctaccttaatttggc

SEQ ID NO: 76161 - DNA, 96 bp, Homo sapiens
cttttctccctctcccagctactccctcagcggaacggaatgctatcttctttgagaagtcaaattgtcaggatcaggaatgtatgttttcttcca

SEQ ID NO: 76162 - DNA, 75 bp, Homo sapiens
tccctcgtccagccacccccagagaggacatgtactcccaggattccatagatctccttgctaactcaggactac

SEQ ID NO: 76163 - DNA, 95 bp, Homo sapiens
aaatatggagaaccaggagaagtttttatcaacaaaggcaaaggattcggatttattaagcttgtggatcagtacaagggaaagcgggatttgga

SEQ ID NO: 76164 - DNA, 59 bp, Homo sapiens
gtgttagtaatgacattggaacagtggtctcacgtgtgaaacatggctacagattggct

SEQ ID NO: 76165 - DNA, 97 bp, Homo sapiens
aaagatgctgatgaggggctgcagcatgcaattcacttcaccagcagtcactaagtggacatttgggagcaataaaaataagaagaaaggaaaagcc

SEQ ID NO: 76166 - DNA, 75 bp, Homo sapiens
cgagagcactaaagaagctcagaatgaattatttgaagcacaaggaagaggatcacctagcccgggtagaagagg

SEQ ID NO: 76167 - DNA, 76 bp, Homo sapiens
gacccggaaacttaggggccacgtgagccacggccacggccgcataggtgctggaaacgtgcgtagcaacagtagg

SEQ ID NO: 76168 - DNA, 51 bp, Homo sapiens
ggagaagaatatgatgtggaagcacatgagtatctggaccttcttcattga

SEQ ID NO: 76169 - DNA, 73 bp, Homo sapiens
ctggttctggaatcctcagttcaagcttctacagatgacagtgcagctgagaagaaagggggaaccctccacg

SEQ ID NO: 76170 - DNA, 100 bp, Homo sapiens
ctgttcatgagtggaatccatgtttctggacgcggatttttggcctcatactctgttatagataaacaaggtgagactgctgctcctcgggccattttga

SEQ ID NO: 76171 - DNA, 100 bp, Homo sapiens
gcttctgaaacgtcagctgcgctcccctaggagtgctgagcccgcggaaccgcagccatgatgcacaagtctggcgttctgaggaaggccattgattaca

SEQ ID NO: 76172 - DNA, 100 bp, Homo sapiens
agtagaaaaacactatctcttctatgacggagaatccgtttcaggaaagggtggctgtgctggctctggctgtggcaaatgtgactgccatggagtgaag

SEQ ID NO: 76173 - DNA, 100 bp, Homo sapiens
tggaatcagttcttcttattggaagagtacacaggtactgacacacaatatgtaggcaagttggcaaacatgaattgactgggcataaagtagctgtgaa

SEQ ID NO: 76174 - DNA, 75 bp, Homo sapiens
catggcggtgtcggagagccagctcaagaaaatggtgtccaaggtaaaagtttcatttgatctgaatagtattaa

SEQ ID NO: 76175 - DNA, 95 bp, Homo sapiens
ctcggctgtacttcgcagccgtgacctgcagctggcggtctccataacccctcggacaaacgccgccctgggctttgctcagatgctccccagag

SEQ ID NO: 76176 - DNA, 80 bp, Homo sapiens
cgctccaggacccgctgcagcagggctgtgtgagctcagtgttgcaatctggttcctaaggaggaagaggaaggcagccc

SEQ ID NO: 76177 - DNA, 98 bp, Homo sapiens
actcattagaaagatctatagcactctggctggcaccaggaaagatgttgaagtgactaagggtggtttcctagaaacatgattgtttattggcattg

SEQ ID NO: 76178 - DNA, 111 bp, Homo sapiens
ataaaactccagcgagatccgggccgtgaacgaaagcagtgacggaggagcttgtaccaccgggggaagcgagtagcattatctgatgatgagacaaaggaaactgaaaac

SEQ ID NO: 76179 - DNA, 75 bp, Homo sapiens
ccatttggggaaatccttcggatggtgaactcattagaagactttttttatgaagacatggagtccttgacgcag

SEQ ID NO: 76180 - DNA, 101 bp, Homo sapiens
tggcatctcaatgcatctgggaagctacctgcattaagtcaggactgaggcatagaatgtcaagctaaccaggcgtccgctacttcagaagagtgtactgt

SEQ ID NO: 76181 - DNA, 140 bp, Homo sapiens
cctaccaccaactcgtccaactgacaagcccttgcgcctgcctctccaggatgtctacaaaattggtggtacaccaggggttggaaaaaccacactaggcaaagaacttgcgtcaaaatcaggactgaaatacattaatg

SEQ ID NO: 76182 - DNA, 87 bp, Homo sapiens
aagggccccttacacaccagacaggtaccttgtggtctataatcctttagaacaagaccgaatctcgttggtctcagtctatgtgag

SEQ ID NO: 76183 - DNA, 101 bp, Homo sapiens
agcacggcgagcagtctcaggcctttagtgatgatggatccacctctgatgttcagtgaagactaccagaaaagtctgctagagcagtaccatctgggtct

SEQ ID NO: 76184 - DNA, 101 bp, Homo sapiens
aggagttgcagaaaagtatccagattttaaagggtttaatgaagaaattcattcgatgttctacacgtgtaactgtgggaactattaaaaaatttctaagt

SEQ ID NO: 76185 - DNA, 75 bp, Homo sapiens
ggagcttcggagggttcgttctggagtcatgagtgaaaagagacgagttgtactgctgtcacaggaaatggacgc

SEQ ID NO: 76186 - DNA, 99 bp, Homo sapiens
attctggactgcacccctacgggaacccacgaccattatatgctggaatggttccttgatctcaaagatttcatgagacaagctggggaagtaacgttt

SEQ ID NO: 76187 - DNA, 100 bp, Homo sapiens
tttcaacttcacctcggcaacaattacttacctggcccaggaggatgggcccgttgtgtttgctggaacattatcagatggcttagggaagacgatggac

SEQ ID NO: 76188 - DNA, 108 bp, Homo sapiens
agatccttcaaaattaaaagaggagcagcatggcatttcagtcactggtttgcagagtccagagaaaatacggtacatgtccccatggaggatatggcttgggcttgg

SEQ ID NO: 76189 - DNA, 94 bp, Homo sapiens
tgcagtgtcaccgacgcagttgcagaacagggccatctaccaccgtgattcgcctttgccagtctcatctcgtgtctgctttgttaagttccat

SEQ ID NO: 76190 - DNA, 100 bp, Homo sapiens
gtcacaagacaagggtcctaaaacaggatcagtaaagaaggaaaaagcagtaaagccagaggaagtatttgagaacacagtggctacggtgatggctctg

SEQ ID NO: 76191 - DNA, 100 bp, Homo sapiens
ttcagtggtgtttttctcaggtgaaaggagcagtagatgatgatgtagcagaaggttccaactgtgcacctgcagaaaagaggtcaaccgactcctgaag

SEQ ID NO: 76192 - DNA, 98 bp, Homo sapiens
actcagctgcagagagaccactcggccctgagctgcccccaccagacccggctctgcaggacctatctctgaccctcatagcctctcctccttcctca

SEQ ID NO: 76193 - DNA, 73 bp, Homo sapiens
tcctcgtgtgtactgtgagaaccagccaatgcttcccattggtggtggaggtggatacagcagtcggagaaca

SEQ ID NO: 76194 - DNA, 97 bp, Homo sapiens
agaacctgagcctgttaaagaagaaaaactttcgcctgagcctattttgggaactgctcgcagaaagaagaaggtggttcatagaacagccacagca

SEQ ID NO: 76195 - DNA, 90 bp, Homo sapiens
ctggaggttttggctctgcgtgagtgtggtctacgagctgtttctcatctttatactcttccaggtgtcccgacccaggctaagcttgag

SEQ ID NO: 76196 - DNA, 98 bp, Homo sapiens
ttcggggaaagaattgaaccttcaccatataaggaccttatggattttctgaacccaaacggtagtgactgtactctagtcctgttttacaccccgtg

SEQ ID NO: 76197 - DNA, 103 bp, Homo sapiens
gaaaaagtcaaaacgggcaataagactctttaaagaaggcaaggagagaatgtatgaagaacagtcacaggacaggactgcatcaaaacatgtaaacaaggac

SEQ ID NO: 76198 - DNA, 102 bp, Homo sapiens
agtacctgaaccggcacctgcacacctggatccaggataacggaggctggcatcctggtggggaagaagttttaagggaacaagctggaggtgacgctactg

SEQ ID NO: 76199 - DNA, 74 bp, Homo sapiens
atcgcaacgaacgaaataaaccagaacatcgttcttcaaggctgttgaagctcaaatccgaagttttggacaga

SEQ ID NO: 76200 - DNA, 90 bp, Homo sapiens
cagcacagttcctgggaaggtggagccaccagcctctccctgagcctccattatggcatgctgaatttaccaaagaagaattggttcaga

SEQ ID NO: 76201 - DNA, 75 bp, Homo sapiens
gtcactgtacttagagtggatcaggttacagtctctagcttcgccatgtacatggcccttccgtgtacatggatg

SEQ ID NO: 76202 - DNA, 100 bp, Homo sapiens
ggatggcggagtcggggctcctgacgtcaggatggctaaaggtgaccccaagaaaccaaagggcaagatgtccgcttatgccttctttgtgcagacatgc

SEQ ID NO: 76203 - DNA, 99 bp, Homo sapiens
caaaagatgactaaagaaatacaagttaaggtatctggcactgcattgatctcttcttagatttcattactgtcttcagaaaactcatgatgatcctgg

SEQ ID NO: 76204 - DNA, 100 bp, Homo sapiens
cccccggagtccgactcgctacgcgggtcttgcgagatatctggccgcctctgccgcagctggagggtttgaagaagatctctgcctacatgaagtccag

SEQ ID NO: 76205 - DNA, 101 bp, Homo sapiens
tgaagatggctaacatggattttgtatttgatcgcatgttcacaaatccgcgggactcttatggggacctctttgtttttagacatgaattggccataatg

SEQ ID NO: 76206 - DNA, 83 bp, Homo sapiens
gtcgtggcagagaaaaccagctgagacagggcgccacttactaggattatatctgtccaagatgcgagtctggttttatcgag

SEQ ID NO: 76207 - DNA, 100 bp, Homo sapiens
ttggctcttcctcaatgcttgtgtggatcagaccaaacattgtctggcttgcactgtaaaactagttagctgaagacgacttctcaggtttcttcaggat

SEQ ID NO: 76208 - DNA, 75 bp, Homo sapiens
tccaactgctcctgcacccgggaggactatgagtggaccgtgtttcttcgcctcgcctccctggtggtcctgctc

SEQ ID NO: 76209 - DNA, 100 bp, Homo sapiens
ctgccgcatcccagggggccacacgccccccctccttcacgccacacacacgtgctgcagggtgcacagctgatcgccgtggcctcctcggaccccgcgg

SEQ ID NO: 76210 - DNA, 74 bp, Homo sapiens
cggcgaaaggagctggtgcctgtgcaagttgttgaggttattctggtacaagttaacccaggagaagcatttac

SEQ ID NO: 76211 - DNA, 50 bp, Homo sapiens
aagagtatccagaaagtgcaaagggcagaaatttagcatctggagaggtt

SEQ ID NO: 76212 - DNA, 82 bp, Homo sapiens
gttttgtccctgtggaacagatggggaaactgaagctccagaggcagctcctttgggacccagatcatcgggggccgggagg

SEQ ID NO: 76213 - DNA, 100 bp, Homo sapiens
gtcgtttcccagcgctgcgcaggacttctcctggcggcgctgcggatccagggggtcggctgccaggtacaggaattccagagacgctgtaacactctga

SEQ ID NO: 76214 - DNA, 75 bp, Homo sapiens
cgtggtataccgcgacatcaagactctgtccctacctgtggttgtcatcgtccacggcagccaggaccacaatgc

SEQ ID NO: 76215 - DNA, 100 bp, Homo sapiens
gaatttcaacacttcgagatgaaactggtgctgcccttgatgagcctccctatttgacagtgggcactgatgtgagtgctaaatacagaggagccttttg

SEQ ID NO: 76216 - DNA, 100 bp, Homo sapiens
gttataacgctacacgaagaactaagaatattattagcacaagagcaccatactttgaggattgattataccggaacagagccttccagtccctgtaata

SEQ ID NO: 76217 - DNA, 90 bp, Homo sapiens
ccttttcattgatgctgctgaggggattacaattagactggggagagcacttaaaaaaggagaatacagagttaaagtataccagctttt

SEQ ID NO: 76218 - DNA, 100 bp, Homo sapiens
agatttcttctctcagtgcctccatgaggagtataggagcaagggcgtctttgtgcagcataaagatgcctatcaagtgatattggatggtgtgaaaggt

SEQ ID NO: 76219 - DNA, 75 bp, Homo sapiens
tcacctgtgcgggatggaacaaaaggccgacgcctccccccagggtcagctgcgggctcccaggcctaggcgccc

SEQ ID NO: 76220 - DNA, 90 bp, Homo sapiens
aagaatgattccagcgtggggacagaggctgacatttcttgcatttctcacattggcaaactgagagattttcttctggaacacaggaaa

SEQ ID NO: 76221 - DNA, 100 bp, Homo sapiens
ctgttaactacattctgcaggtattggttggaagagaatctgagtacaaacaggcaaagcactggcatattgaaaactgccttttccttcctaaaagaga

SEQ ID NO: 76222 - DNA, 98 bp, Homo sapiens
atttcttcgagacactcatataaaggtgctggagaatctggtaaaagcaccattgtgaagcagatgaggatcctgcatgttaatgggtttaatggaga

SEQ ID NO: 76223 - DNA, 100 bp, Homo sapiens
tagttcttttgtaaatctctttcgttttaacaaagaaggaaaacgacagattcctttaaatgagcaattcctcagcaagtgccctaatgcagatcttaag

SEQ ID NO: 76224 - DNA, 97 bp, Homo sapiens
agagagctcaccagattactgatgaggtggccaatatgttctacattgtagtgattatggctcttgtattacttagttttggtgttcccagaaaggc

SEQ ID NO: 76225 - DNA, 99 bp, Homo sapiens
ctcggaggacatcgtggtgggctgcggtggcttcgtcaagtcggacgtggagatcaactactcgctcatcgagccaaaacagagtggagtacgagaaaa

SEQ ID NO: 76226 - DNA, 97 bp, Homo sapiens
gaggagagaagatggcggaagcggagcttttaaagaagcagttttttcaccgagccctaaaagtaatgaaaatgaaatatgataaagacataaagaa

SEQ ID NO: 76227 - DNA, 83 bp, Homo sapiens
cccgcctgcagctggagctgagcaaagtgcgtgaggagtttaaggagctgaaagcgcgccatcactggtgcaagctatattta

SEQ ID NO: 76228 - DNA, 100 bp, Homo sapiens
ggctgaggctacctgtgaacagtacgcagtgaatgttagggtgtttgtgagatatggttgaccagtgaagacacgggggcttatggcagagatattggca

SEQ ID NO: 76229 - DNA, 51 bp, Homo sapiens
agcctccggagtagctgggactacaggtgcccgccaccatgcccggctaat

SEQ ID NO: 76230 - DNA, 98 bp, Homo sapiens
cctgacccggcctcaccatgttggtgctgtttgaaacgtctgtgggttacgccatctttaagtcagcagataagcagagagccctagaagaaaccaaa

SEQ ID NO: 76231 - DNA, 75 bp, Homo sapiens
gagcccggcgcctggctgagtacctacaacacagcagtcccctcaggatgagcaggaaaagctcttggatgaagc

SEQ ID NO: 76232 - DNA, 76 bp, Homo sapiens
tttcaagtggaatatgccattgaggctatcaagcccttgtgggaacacatttttcagctgaatctttgttctcaag

SEQ ID NO: 76233 - DNA, 82 bp, Homo sapiens
ccagaagaatattataatgtcacagttcactgtgaaaattaagaagccaatcaagacgaagttcagaatgccagtgtttaac

SEQ ID NO: 76234 - DNA, 100 bp, Homo sapiens
gcaagaccgaattcagaaggatatcgacgtcgtgatccagaagtccagagctgaggactgcctgtttgcagatgacgtccggttgtttgccttcgtgcgc

SEQ ID NO: 76235 - DNA, 90 bp, Homo sapiens
catgctgggttctgctgagttagctgaggaggtcaatttaaatggttctggcaaactgctcaagttccatgccattgcagtgtcaactag

SEQ ID NO: 76236 - DNA, 87 bp, Homo sapiens
tatggcctcgaagcatgctttcttggcattatgcaacaagattgacctggctgaaaggagagaggtttcccagcagcgagctgaaga

SEQ ID NO: 76237 - DNA, 98 bp, Homo sapiens
cgctcatctgcctctgcgcgctgcagttgagaatggaggtgttgtccaagttggagaattgttaccttgcaagatttgtggaagaacattctttccag

SEQ ID NO: 76238 - DNA, 75 bp, Homo sapiens
gttttataaactgcctggccgaatcagccttttcacgctcaagttcttcctgtccaagatccggtcccacgtggc

SEQ ID NO: 76239 - DNA, 75 bp, Homo sapiens
ggcggcctggacccccccatgggagacgctgagtacttggcggccttcaggtctcaccaacggctttgggggtgc

SEQ ID NO: 76240 - DNA, 50 bp, Homo sapiens
gaagctattaatggcagtggaaacgcaggatctgaagaagatgatgaagt

SEQ ID NO: 76241 - DNA, 98 bp, Homo sapiens
tggtagacggcaaggatgtgatgccagaggtcaacaaggttctggacaagatgaagtctttctgccagatgaggagcgggaaggcctcctgcaccctg

SEQ ID NO: 76242 - DNA, 90 bp, Homo sapiens
aagtgaccaagaacgtgagcaagcccaggcacagccgacgccgcgggggttttggccaaattgggcgagggcacaaaataaccacttacc

SEQ ID NO: 76243 - DNA, 50 bp, Homo sapiens
gtcctagaggcatcatcagagttgacttggagaatgaggttgaaaataag

SEQ ID NO: 76244 - DNA, 75 bp, Homo sapiens
cggaaaggaggcatgctggtgaacgcagtcttctaccttggaatagtgaatggccctcgggaccaaggatcacgt

SEQ ID NO: 76245 - DNA, 98 bp, Homo sapiens
ctgcggcggagactgcatcaggctctcggttccccctaaaggactcaaaacgtctaatccaatggttaaaagctgttcagagggataactggactccc

SEQ ID NO: 76246 - DNA, 107 bp, Homo sapiens
ggagagacgagccccgagcccggctggacgccgctgcctcaggcagcctgcttctgcaaagtggtacgatcgaagggactatgtcttcattgaattttgtgttgaag

SEQ ID NO: 76247 - DNA, 100 bp, Homo sapiens
gaactcagggccggttgtggccatgaccccaccaacaactgaacgctttggtcaggctgctacaatggaaggaattggggcaattggtggaactcctcct

SEQ ID NO: 76248 - DNA, 75 bp, Homo sapiens
gtcagaagaggcctgccatactacattcgcttaaattttgcagagaaagggatgaattgtaaaagcaacatcagc

SEQ ID NO: 76249 - DNA, 75 bp, Homo sapiens
caaaggttttgaagagggtgcagcccagaataaccgacggagcccgggcagggacatcaacgtgacgggtgtgtg

SEQ ID NO: 76250 - DNA, 75 bp, Homo sapiens
tttctggcctggaggctatccagcggtggctgttgcaccacgccctccctcctgcccctgaggcccggaagccag

SEQ ID NO: 76251 - DNA, 101 bp, Homo sapiens
gctcgatcttgggacccaccgctgccctcagctccgagtccagggcgagcaattctgtggtgttcttggtcacacatttatggagtttctgaagggcagtg

SEQ ID NO: 76252 - DNA, 100 bp, Homo sapiens
caaggggctggtgtactccagcaacttccaggcagaggaacgaggacgcctgaaggaagagctggaagaggctcgggacatagcccggcggcgctcttta

SEQ ID NO: 76253 - DNA, 75 bp, Homo sapiens
tggttgaaccatgggaaggaacactgcttgatggcccactgcgtgaccttggttcagctgtccatttcctgtgac

SEQ ID NO: 76254 - DNA, 100 bp, Homo sapiens
tgttagtgctcaagagcctcattatctaccacccgagatgccccaagtgggaagatgtaaatgctgctgcctgtgacctcgccagggaagtggctggcaa

SEQ ID NO: 76255 - DNA, 83 bp, Homo sapiens
aagaaaagcatttattgatgccaatgggatgaaaattctgtataatacttcgcaagaaacgtaaatattttcaccacgatcga

SEQ ID NO: 76256 - DNA, 90 bp, Homo sapiens
gaatccttgcagggccaagatctcttcaacagggcttcaccactggaacaagcacaagtactcccttccggtacctacttacaccttcca

SEQ ID NO: 76257 - DNA, 98 bp, Homo sapiens
caaagccaggttactgcggcagtatgataatgagaaaaaatgggaactgatttgtgatcaggttttgacacaagggcgcatatcttcaaagcacctag

SEQ ID NO: 76258 - DNA, 75 bp, Homo sapiens
aagtatacaggaatattgttattaggtttgtgaaatggctgctgacatttctgaatccagcggggctgactgcaa

SEQ ID NO: 76259 - DNA, 126 bp, Homo sapiens
ctgtcagcatcccactccggaaatgtcactcccaccgccccaccgtacttgcaagaaagcagccccagagattactgatctctcattacccaactatctgatggcatcttcggttggactgcttcc

SEQ ID NO: 76260 - DNA, 130 bp, Homo sapiens
actttcccctcggattcctctctaggactgaaccaagacttacccgaagttgccgcggggccttccgatcccctatcgcctcaggcatggcgtacgtggagcggatgaactacgtccaccgggaccttcg

SEQ ID NO: 76261 - DNA, 50 bp, Homo sapiens
taccgctcccctcactgctatttcagctcctggcatcagctctattcaaa

SEQ ID NO: 76262 - DNA, 74 bp, Homo sapiens
acccctggaagcctagaaatggttgaaatcacaaagattagacacctttttagataggtgttcttcagcaccac

SEQ ID NO: 76263 - DNA, 74 bp, Homo sapiens
ttggcacctcctctccgcgcgttcttgggatgccatggacaatattaccaggcagaaccaattctacgataccc

SEQ ID NO: 76264 - DNA, 100 bp, Homo sapiens
acacctttccttccaccagggcatggtgtttctggaagagtttgaagctagatcctgttttcggctttgtgagaaaccttaccatcaaacacgatggcca

SEQ ID NO: 76265 - DNA, 50 bp, Homo sapiens
ccctggccgttggaggagcagttgtcatggaatatcagcctggaggggac

SEQ ID NO: 76266 - DNA, 82 bp, Homo sapiens
aatatctgtcttcggtggactccttcggcagtccacccaccgccgccgcctcccagtttccctgaaacctgggctcttgaag

SEQ ID NO: 76267 - DNA, 83 bp, Homo sapiens
ccaccacccactccggacacaggtgaaatgacaatggatgctctgttggctcgattgaaacttctgaatccagatgaccttag

SEQ ID NO: 76268 - DNA, 100 bp, Homo sapiens
caaaggcaggggaggaagccacctcgagatgttggggatcagccaggtgaggtaggttattcaggctctcctgctgaagctcctccaagcaagtcaccat

SEQ ID NO: 76269 - DNA, 75 bp, Homo sapiens
ggagattcacttgcagaccaatgccgagaaaggcaccatcaccatccaggttcctagatagaacagaagagcttg

SEQ ID NO: 76270 - DNA, 73 bp, Homo sapiens
acaaggccacgccctacaactacccagctgatgatgggagaaccagttactaccttctctaacacaggctcca

SEQ ID NO: 76271 - DNA, 100 bp, Homo sapiens
gtctgataactgactctgatctcaacattttggctgaagtgaatgaaaactttgccattgatttgatagcagagcagcccgtgagcgaggtggagactcg

SEQ ID NO: 76272 - DNA, 88 bp, Homo sapiens
agaccattccaaaagcccagcagatgcacactgggcctgtgcttgatgtctgctggagtgacaaactggcgatggaatatgagaggag

SEQ ID NO: 76273 - DNA, 75 bp, Homo sapiens
gagcataatttggcaataattggattaacacagattcctcagatccagaagactgaaatttcctttcgtcctaat

SEQ ID NO: 76274 - DNA, 100 bp, Homo sapiens
agtgtaggaaaacggctcaacccaccgctgccgaaatgaagtataagatcccagattacaggaatgcagtaatcgtggccaagtctccagcctcggcgaa

SEQ ID NO: 76275 - DNA, 99 bp, Homo sapiens
gaaaaacctgtatgtggaaccacctactgcttttggcttctggatgccctcctccagtacacatcgtatggggtgacaccgcctagcctcagtcactct

SEQ ID NO: 76276 - DNA, 71 bp, Homo sapiens
cgacctgggggagccgcccccgacacggcccacgggggaagtttgttgccctggagaacatcagctgcaag

SEQ ID NO: 76277 - DNA, 75 bp, Homo sapiens
ggctctgacgactgggataccagggtgtgattgctgccatgagagatggttttggtttcatcaagtgtgtggatc

SEQ ID NO: 76278 - DNA, 75 bp, Homo sapiens
cagcaactggtctattatatcatttaaaccacatggctatctaaagagcattagtgccagcagtagttcccaagg

SEQ ID NO: 76279 - DNA, 74 bp, Homo sapiens
ttgtttatgctagtgcaactgggaagctgccaaagaatgtcgacgtcgaaagaaagaatatgtaaaatgtctgg

SEQ ID NO: 76280 - DNA, 80 bp, Homo sapiens
ctcctgagtggctgggactacagatatggggagattgttaacattaatctcgtgcgggacaagaaaactgggaaatccaa

SEQ ID NO: 76281 - DNA, 76 bp, Homo sapiens
cggggaggtgaagccgctgccccgagatagcaacttcatccttgccaatgcccaggtggctaagggtttccccata

SEQ ID NO: 76282 - DNA, 100 bp, Homo sapiens
cttataaaggaccagacaaatcaaattagtggttttggtatcgtcagatcctggaaaaagccattcagttatctggagcagaacaactagaagctttgaa

SEQ ID NO: 76283 - DNA, 98 bp, Homo sapiens
gcagctccaggaagcgagatgtcgaagccgccacccaaaccagtcaaaccaggttatgaagacagtatggagtttccagaccatagtagacatttgct

SEQ ID NO: 76284 - DNA, 75 bp, Homo sapiens
gagagcagttgaagaagtgaagaaattattggtacctgcagacactgcccatctctaagataagaacctggaaag

SEQ ID NO: 76285 - DNA, 100 bp, Homo sapiens
gtgtctcgtgtgtgaacatcacagggaggttcccctgaaggatgctaaggaatacgctgaatccataggtgccatcgtggttgagacaagtgcaaaaaat

SEQ ID NO: 76286 - DNA, 98 bp, Homo sapiens
ctggcgctagtctgaccctccgccaggcaaaaggaaggcaccatacaggaagattacttgagagagctgctgacaaccatgggggatcggtttacaga

SEQ ID NO: 76287 - DNA, 100 bp, Homo sapiens
tagtgcgcgaggcttctcggcagatcgtggccggtggttctgcagcatcaacaacagcaacttgtgattggcggtgaccggatattcagttgcacatccc

SEQ ID NO: 76288 - DNA, 90 bp, Homo sapiens
ccgcggcgccgagtcgaacggggagccgagctggagctgccgcggcgcagccagagatcctgaaggagctagacgagtgctacgagcgct

SEQ ID NO: 76289 - DNA, 100 bp, Homo sapiens
ctcgcgatgagtggtctcggcaggctcttcgggaagggtttggaattacaagcttcggcgctgtcttttcacattgcttgggcacttagattatattcgc

SEQ ID NO: 76290 - DNA, 97 bp, Homo sapiens
ctgaacctttgcttactttggaaagccctactgccaataaagggaaaataagagatgctcatcgacgaattatgcttttaaatcatcctgacaaagg

SEQ ID NO: 76291 - DNA, 80 bp, Homo sapiens
gtagccgcctccgagcccgccgccacatcctctgagacctcctgccccccgaggtctgcagtctcctgaacccagcagcc

SEQ ID NO: 76292 - DNA, 104 bp, Homo sapiens
gtctccctcgggagccggcgtgcccacccggacttgtccttctacctcaccacctttgggtgataaaagaaaatgtggctgaagttacccgaagttcagcttgc

SEQ ID NO: 76293 - DNA, 100 bp, Homo sapiens
atgatcagaaaacagctctggaaaatgacagccttcatttctctgaacatactgccttatgggacagatcaatttcaccagtgatcattaaagaatgggc

SEQ ID NO: 76294 - DNA, 101 bp, Homo sapiens
tcctagaaaggcagcccctgctggaagcatgcgacaccctgcgccggggcctgactgcccacggcatcaacatcaaggctggagtgcaatggcgggatctc

SEQ ID NO: 76295 - DNA, 75 bp, Homo sapiens
gtgactacccacctcttccttcagatcactattcagaagaacaaatatcttgacagtgatcatcctctcccagct

SEQ ID NO: 76296 - DNA, 100 bp, Homo sapiens
tctagccccgctaccggactacatgtcggaggagaagctgcaggagaaaggtggaacggcacatgtgtgatggggacattgttatcttcaaccggcagcc

SEQ ID NO: 76297 - DNA, 82 bp, Homo sapiens
caaaactaaaagaatgtcatgatagagaagtacaaggtagcaaaagatatggcagcggcagcagttagatgcatcagaaagg

SEQ ID NO: 76298 - DNA, 82 bp, Homo sapiens
cccggctggacgccgctgcctcaggagtgttgaagcctggaaatcccctccccttccccctcccccctttacagtatccccc

SEQ ID NO: 76299 - DNA, 100 bp, Homo sapiens
attgatggcatccgcgtggcaacaggctcctacagactgctgcctcatatccgggggaatgtgggctttgtgttcaccaaggaggacctcactgagatca

SEQ ID NO: 76300 - DNA, 82 bp, Homo sapiens
aagaactggattcgtggcgccacaagctcattcactgtgtagctcaccatggatgatgatatcgccgcgctcgtcgtcgaca

SEQ ID NO: 76301 - DNA, 75 bp, Homo sapiens
gggcaagagcaggagcccggcaccccccgccgacaaggagggcacaggtaacagcatcatggtcatgaaaatgaa

SEQ ID NO: 76302 - DNA, 75 bp, Homo sapiens
atttgcgccttgcagcactgctggaccagattactgtggcatgatcctccaccattcacactctaccctggactc

SEQ ID NO: 76303 - DNA, 100 bp, Homo sapiens
cggacgaagtggacaagttcaaggccaagttcctgacagcctggaacaacgtcaagtacgttcaaatctgaacatcaatgatgtactagggaactactca

SEQ ID NO: 76304 - DNA, 74 bp, Homo sapiens
cttgctggtcggtcctgaaagccaagaggaggctgctgatggatgccggctccaggagcagcagtggaggtcgg

SEQ ID NO: 76305 - DNA, 95 bp, Homo sapiens
accacggctaatttgatggagaaggttcgaggcctacagaacctagcctatcagctggggctggatgagtacataacagctgggagccggaggag

SEQ ID NO: 76306 - DNA, 83 bp, Homo sapiens
ctgggccctgggccagaggcagaaaacggacggaagaaaaggtctggccggttttaaaatcaaagatgggaaaatcggagaaa

SEQ ID NO: 76307 - DNA, 83 bp, Homo sapiens
ggagttcgaagagttggatactcagcgtcgctggcagccgctgtacttgggcgaactttctgaccaagtatacaactacccag

SEQ ID NO: 76308 - DNA, 75 bp, Homo sapiens
tgcctcagccttccaagcagctgggattacagaccactatgatcccgactatgaattcctccagcaagacctctc

SEQ ID NO: 76309 - DNA, 100 bp, Homo sapiens
agataccagatcatgtcagagagagagcttggttaacttgggagaaagtttcatctgtggatggagtattgctcctctggtgcaagtgtggtagctattg

SEQ ID NO: 76310 - DNA, 100 bp, Homo sapiens
ttgaaagataaagtcttttgtgaattatttcctgaagtcgtggagggcgaccattgacgaggtggagacggacgtggtggagattgaggccaaactggac

SEQ ID NO: 76311 - DNA, 90 bp, Homo sapiens
caggtggaacagattcagaaggagcaggattaccaaaggtcttacacagtgtgggccatgtggtgaatgtgtacctgttctccatcagcc

SEQ ID NO: 76312 - DNA, 100 bp, Homo sapiens
tgccccatagatggccagctttcccccgagggtcaacgagaaagagatcgtcggctacagtcgcaatacaagcagcgtgtccccgcgaggctacgtcccc

SEQ ID NO: 76313 - DNA, 83 bp, Homo sapiens
ctcatcatcgtcttcaggaagccagacagattcaagtattgaaggagcgtgaggatcatccccggagaggacgggaggatcgg

SEQ ID NO: 76314 - DNA, 83 bp, Homo sapiens
tattggaggaaaacacaccaagggctgcccctgatggggcctggcaatgactgagcaggcccagccccagaggacaaggaaga

SEQ ID NO: 76315 - DNA, 90 bp, Homo sapiens
cagcgaacatgtcgcggcctgtcaggcccttgatgagcctccctatttgacagtgggcactgatgtgagtgctaaatacagaggagcctt

SEQ ID NO: 76316 - DNA, 96 bp, Homo sapiens
ctgccccgagcagtgggtgggggccacctgccagctgggcacattgtggtctgcggacacatcactctggagagtgtttccaacttcctgaaggac

SEQ ID NO: 76317 - DNA, 100 bp, Homo sapiens
cacagcccaggcaagatgtgctgaatgaagtgcattttcagctgagcacctcaaacttcaactccagaaggaatccctaaatgagctgaggaaggagtgc

SEQ ID NO: 76318 - DNA, 90 bp, Homo sapiens
ggcggagtagagcggagcctggcgggcgtgggaacccaggccccgccgaggcggccagctgccactgcagagccccgccatggaagacac

SEQ ID NO: 76319 - DNA, 90 bp, Homo sapiens
acctggaccacggcgcagacgcgggcgagctgcggctcggacgccagcggacacgcgggcgagtttcaccagtgatcattaaagaatggg

SEQ ID NO: 76320 - DNA, 100 bp, Homo sapiens
catttccatcaaaccctgagagctttattaccagacatgatctttcagtgataaaaagttgattgcagaaggacctggggaaacagtattggttgcagaa

SEQ ID NO: 76321 - DNA, 100 bp, Homo sapiens
cgaggtcgagtaccttccctgtcccatcgcaaacccaaagatccccgttcctggagattctgattgaggcttcattgaggaccctgagaggaagtatcac

SEQ ID NO: 76322 - DNA, 82 bp, Homo sapiens
aaggatcatgtctgcgagccaggattcccgatgtacggagcgcaagaggacggcagcgtcggcgaaggtgacctgtcctgca

SEQ ID NO: 76323 - DNA, 83 bp, Homo sapiens
gcggatgaagcagctggtggggctctactgcgacaaggattttttatcaagcagaaatgcatcgaacaacgagaatcaagatc

SEQ ID NO: 76324 - DNA, 100 bp, Homo sapiens
tggaaccgttgattggagatatgcccttagttggagctttgtctatcttcttccttaggaaaccagtgaggcaggcgactaatcagattgtgatgaattg

SEQ ID NO: 76325 - DNA, 75 bp, Homo sapiens
ggcggccttcgaggaggtcatgaaggacctgagcctgacgcgggccgcgcggcctacaacacagcagtcccctca

SEQ ID NO: 76326 - DNA, 97 bp, Homo sapiens
gcctttgcctgatcatgcagacatctccaactgtgggaactctttccagcttgtgtctgagacagaagagatgggtgatgaagaagttttctcctgg

SEQ ID NO: 76327 - DNA, 100 bp, Homo sapiens
gtgatgttggagaactacagaaacctggtctccctaggcatcatctctttcaacgtataaaatagcagaacaagatttttcttatttcttccctgatgat

SEQ ID NO: 76328 - DNA, 100 bp, Homo sapiens
ctccggatgattgacagtgtggagagccgtgatatgttccagttgcacatttcctgcaaggactccaaagtggtgagggcccagtcatatatgcacagtt

SEQ ID NO: 76329 - DNA, 88 bp, Homo sapiens
cgagctccgcgcggggcaaacctcccggcgcggccatgcggggagagtgcctggtgaagaatgtgatgggatcactagcatgtctgcg

SEQ ID NO: 76330 - DNA, 83 bp, Homo sapiens
agcatttttttatgaaccttaccagttggctggatctattattggcaaaggtggtcagcggattaaacaaatccgtcatgagt

SEQ ID NO: 76331 - DNA, 100 bp, Homo sapiens
acttggctcactgcagcctcaacttcttgtcctcaagtgatcctcccaccttagcctcctaagtagctgggaccacagacctgcttttttaaaggctgca

SEQ ID NO: 76332 - DNA, 89 bp, Homo sapiens
tgcagaactagaacaggagcttatgggtcaaagaattgactgtagatccaactgctgctggtgatgttcgtccaataatgcaccatcca

SEQ ID NO: 76333 - DNA, 97 bp, Homo sapiens
ccaatgccctgcgcttcatcttcagtgccccgggggtcacttcctggcagtacaccctcctccagctccagtctgactacctgcttcaagattaccc

SEQ ID NO: 76334 - DNA, 74 bp, Homo sapiens
gaggctgaggaggcggcggcggagatctgggtactccaaagattcaggtttactcacgtcatccagcagagaat

SEQ ID NO: 76335 - DNA, 100 bp, Homo sapiens
tggtcgtgtccttcgtcgtcgggggcctcggcaacgccctgctgcggcggctggtccgcattggggtgctggatgagggcaagatgaagctggattacat

SEQ ID NO: 76336 - DNA, 75 bp, Homo sapiens
ctccttcatggccaccgtcaccaaggcgcccaagaaggtccctgaatgagaaggagctgacagcagctgaattcc

SEQ ID NO: 76337 - DNA, 75 bp, Homo sapiens
gcggcgttggaggccaccgtttccaggaccccgcagggatctttgaattggtggaacttgttggaaatggaacat

SEQ ID NO: 76338 - DNA, 114 bp, Homo sapiens
ggagaacacagttggagaaaatcggcagctgagacggccttggccggtatgacttgctcttcatgccaccgtcctttccatttggaggaatggagaacccttgtctgacctttg

SEQ ID NO: 76339 - DNA, 90 bp, Homo sapiens
ggacaatatcctctgtggagaacacccccccatggaggcgaggtagagttggggtcgcagagttcacccagggcatgatcttacctacaa

SEQ ID NO: 76340 - DNA, 50 bp, Homo sapiens
gccgcgcaggagcctcccggagctggtagcacaggcggagtgcagcggag

SEQ ID NO: 76341 - DNA, 100 bp, Homo sapiens
ccgcgcaccaccaccaccgttaggaccatccagagcagcacggagcttactcacatagcatattggtatatcaaaatgaaatgcaaggaaccaaaaataa

SEQ ID NO: 76342 - DNA, 100 bp, Homo sapiens
caagaatccttttggcttagagatcactaatccatcttcagcttcaattacaagtgatctgcaactctttcaccatctgtaatgcggagatgcaggaagt

SEQ ID NO: 76343 - DNA, 75 bp, Homo sapiens
gagcaaataaccgttttgaaattgtttgtccgatatgtgcctcgatgccctggggagaccccaactaccgcagcg

SEQ ID NO: 76344 - DNA, 90 bp, Homo sapiens
ccagtgttcaccatcctggccccggaagcgtcactggtgtaccgcctgccccagtcgtgggtggggcccaaactgccctggaaactcctc

SEQ ID NO: 76345 - DNA, 75 bp, Homo sapiens
ggtcttcagcggggcgctccaggaggcactcacagcgtctgttcctcacacaccccgcccaaggacgtgcctggc

SEQ ID NO: 76346 - DNA, 74 bp, Homo sapiens
tagatacatggagcccatcagaatggcagatggcttatgaaccacaggaatccagatcttacataagatggaag

SEQ ID NO: 76347 - DNA, 83 bp, Homo sapiens
cgcccagttccctgcatcctaagactcgaaggcagcacaggacctggaaaaattacatcatgctacaagtgaaaactgatgag

SEQ ID NO: 76348 - DNA, 90 bp, Homo sapiens
ctgaggggcgggggcgctgcggcacagctggtttgagcaactgaactggaaacaagatgcagatgcctgaaaacttcatgcctcctgttc

SEQ ID NO: 76349 - DNA, 100 bp, Homo sapiens
tgacaccacagccacccttggtgatgagcctcggaaagtgctcctgcggctgtatggagcgattttgcagatggcatacacatccctgtgatcatgagtc

SEQ ID NO: 76350 - DNA, 75 bp, Homo sapiens
tgtgtgcaatgccccgggctgtggacagcctgcctagggtagttaaaagacgagtgaatgctctcaaaaacctgc

SEQ ID NO: 76351 - DNA, 100 bp, Homo sapiens
gcgtactggcgacccggagtgatgagcccgcccgagctgataggaagatgtcttcaggaaatgctaaaattgggcaccctgcccccaacttcaaagccac

SEQ ID NO: 76352 - DNA, 97 bp, Homo sapiens
cagcccagcgcctcggccgaacccctccgcagcagagccccccaagatgaacccagtggtggagccactgtcctggatgctgggcacctggctgtcg

SEQ ID NO: 76353 - DNA, 75 bp, Homo sapiens
gaccccgcggctgggcgttcatctaccacgctttcgtttaccctgaagaatgctgctatgctactggaatttgca

SEQ ID NO: 76354 - DNA, 74 bp, Homo sapiens
attggtcaactatcctggttttaatatatctactcccagaggaattccagacccaatcctgaggcaaaagaaac

SEQ ID NO: 76355 - DNA, 100 bp, Homo sapiens
gtgggaagtgaagtcagtgcctcagttgctgatcacaaaatttgtccaggatagacatagagctagaagaaacagacttcgtaaagatcaacttaagaaa

SEQ ID NO: 76356 - DNA, 100 bp, Homo sapiens
gtgagggagatcgcgcaggatttcaaaaccgacctgaggtttcagagcgcagccatcggtgcgctgcaggtttgtcgcccattggaatattgccaagtct

SEQ ID NO: 76357 - DNA, 98 bp, Homo sapiens
cgaacgatgtgcgagaactgcgcagacctggtggaggtgttaaatgaaaatgccttcaattaagttgcagagttctgatggagagatatttgaagttg

SEQ ID NO: 76358 - DNA, 51 bp, Homo sapiens
gacctaaaatcctttacaaactattcagagacggggtttcgccatgttggc

SEQ ID NO: 76359 - DNA, 90 bp, Homo sapiens
aaggagacccgactgcaactgctggattgctgcaaggctgagggacgagaacgaggtagcagaaggtcaagaaatttgtgtgattgaagc

SEQ ID NO: 76360 - DNA, 100 bp, Homo sapiens
tgccggtggaggaatttgtggctggctggatctctggtcatcatcctgaaccacccggggcagattagcgccggctactccccggtcatcgactgccaca

SEQ ID NO: 76361 - DNA, 75 bp, Homo sapiens
tgtcgtcgctgctggcacttcaggctctgagaatggatcttggagaatgtctgaaagtccatgacctggctttaa

SEQ ID NO: 76362 - DNA, 74 bp, Homo sapiens
cgtgtctaccttgcaccacgttctgcagaggaccatccagtgtgcaaaaggtattaatctctggagaagacaca

SEQ ID NO: 76363 - DNA, 83 bp, Homo sapiens
cagcccccggccgcagcgcaggcagcccagcaggtgatgtgtccaatctagatcccaacttctcatttgaaggcaccaaactg

SEQ ID NO: 76364 - DNA, 80 bp, Homo sapiens
cccgacagcgccatggcccagattctgccaattcgttttcaggagcatctccagtactatactggcaattgctggagaag

SEQ ID NO: 76365 - DNA, 80 bp, Homo sapiens
cagttgtccatgaccctgaaggtccaggagtacccgaccctcaagttatgcaaagggtgacctggacatatcttacatca

SEQ ID NO: 76366 - DNA, 100 bp, Homo sapiens
gggaccgcaggaacatccgccccaacatcatcctggtgctgacggacgaccaggatgtggagctgggaaaggttgtcaatatagatacaaattcactgag

SEQ ID NO: 76367 - DNA, 130 bp, Homo sapiens
ggcaattgccttttcaaaaggaaaacccttcaggcaaccttgctacaaaaatttggtgaactatgacaatgtagtggacacaggttctgaaacagatgaggaagacaagcttcatattgctgaggatgac

SEQ ID NO: 76368 - DNA, 100 bp, Homo sapiens
aagcaatgcaggaatatatcgcagtagttaaaaaactagatccaggttggaatcctcaggcctactactactgtgccataatagaggatgtgattctgcg

SEQ ID NO: 76369 - DNA, 100 bp, Homo sapiens
gccaaatgccagactgattgtcatgctcagggaccctgtggagagcaaattatgcgcacagccatgaagtataacctgggattggacctgagaacagctg

SEQ ID NO: 76370 - DNA, 100 bp, Homo sapiens
cataatgacattgtggacagtgacagcgatgctgaggatcgaggaacgttgtctgggactttgaacatgtcggggatcgccctcagcagactcgcccagg

SEQ ID NO: 76371 - DNA, 100 bp, Homo sapiens
ggtgttggagcagctcacagggcagacccctgtgttttccaaagatttggagtcagcatatgaaaataagagtttacctacagaaaaaaacattcatgaa

SEQ ID NO: 76372 - DNA, 100 bp, Homo sapiens
gaaggaaaacatgacgtctccagccaaattcaaaaaggataaggagatcatagcagagtacgatactcaggtcaaaggccttagaaaatttacgtgtata

SEQ ID NO: 76373 - DNA, 51 bp, Homo sapiens
ccagaattcaattaaagtggctcagaaggaagaatcctgctcaaaaatgag

SEQ ID NO: 76374 - DNA, 89 bp, Homo sapiens
cggcacaaacaaagaaatccaatggatgtgtggcacaactctgcaaataaatgtgcatttgcaggaagaggcagaggaagaggaagagg

SEQ ID NO: 76375 - DNA, 100 bp, Homo sapiens
catgcacttgaacagactagaaattgcaccacagatatatgggtttgtggtttattgacaatcatttacaatgccgaagagtgctgtagtgagccagcac

SEQ ID NO: 76376 - DNA, 100 bp, Homo sapiens
tgttccacattgctgcatttgttctgcctgacttggaccctggaaaacctggccctcttcaatttctgacaaaagcattgtcccagatatagccgttggt

SEQ ID NO: 76377 - DNA, 108 bp, Homo sapiens
cgccgagaagtactccttcatggccaccgtcaccaaggcgcccaagaaggtgattggcaaaggcagtgaaaagtctgatgacaactcctatgatgagaagtacctgat

SEQ ID NO: 76378 - DNA, 75 bp, Homo sapiens
aaagttgatgatcttccccctgggccgcgatgggcctcttggaacattggtgtgttcatctgcattcgatgtgct

SEQ ID NO: 76379 - DNA, 111 bp, Homo sapiens
ccacgctgcgggcccgggccatggccgccgccgatgccgagttgcagtaccatgcaggactagcatctggccttttaaatcagcagtcattgaagcgttccgctaatcaga

SEQ ID NO: 76380 - DNA, 96 bp, Homo sapiens
gtggtggtgtcttcctgtctcaacgatacctattttctagtgctgagatcctgagacaatggttcgttttaaaaatttagcatccagaccgtattc

SEQ ID NO: 76381 - DNA, 100 bp, Homo sapiens
ctggaagtacgcagacgccggccatgtgtgccacctgtgccatccaaactgcacctacggacagtgatctgacacaaacacagctgaagcaaacagaggt

SEQ ID NO: 76382 - DNA, 74 bp, Homo sapiens
atgctatacatgcgtttggacacaatgaacactacctgtgtagacagagactttagaagacagctttccatcga

SEQ ID NO: 76383 - DNA, 98 bp, Homo sapiens
ccacgtacctacagtggatgtcctacatctcctatgtcaggtactggtgtggcatactcggacagagaagcccaagatgaagcaggaggagcagctgc

SEQ ID NO: 76384 - DNA, 98 bp, Homo sapiens
tcattatgaccaacagacagcagctttggcaatggagagtggagactgctgcacggactctggaaccatgaacatatttgatcgaaagatcaactttg

SEQ ID NO: 76385 - DNA, 75 bp, Homo sapiens
aaaaaatagtcaatagtgctcagactggtagcttcaaacagctcacagttaaggactttgcctcccgggccaaac

SEQ ID NO: 76386 - DNA, 75 bp, Homo sapiens
tgctgccttcagcttcctttgccgctctgcatcatgttgatgagacaccaattattgcggtgatggtggccctgt

SEQ ID NO: 76387 - DNA, 75 bp, Homo sapiens
gaggaagcttaaatctgtcgtttgaatttaggaccacctcgcactgatagccattgggcgatacagcatgacaat

SEQ ID NO: 76388 - DNA, 100 bp, Homo sapiens
ttccgctaatcagatgggagtatctgccaaacgtagaccaaaggctcagcccacaactcttgtcctaccacctcaatataattggtgattacaactttcc

SEQ ID NO: 76389 - DNA, 76 bp, Homo sapiens
caaagctattctgggggcaacagagctgtcagctgctagtgtgggtaactgtcccaccaaaaaatatatgccagct

SEQ ID NO: 76390 - DNA, 75 bp, Homo sapiens
gactatgagctgctgcagattctctcagatgaccggatgtggtcccggaacagcaagcccgtgcacaccaccatc

SEQ ID NO: 76391 - DNA, 82 bp, Homo sapiens
agagccgagccaagcgtgcccgcgtgtgtccctgcgtgtccgcgaggatgcgtgttcgcggacaatgcagatcttcgtgaag

SEQ ID NO: 76392 - DNA, 80 bp, Homo sapiens
tgggccctgcaggaaggacggacttcaggggcaggatgccttcgtgaagatcgtgaggcacgagggcaccaggaccctct

SEQ ID NO: 76393 - DNA, 90 bp, Homo sapiens
caaggaaaagaaccttggaatgtgaagagacatgagatggtagctgaacccccaggtgaccaagaatatggcccaggtgaccaaagccct

SEQ ID NO: 76394 - DNA, 73 bp, Homo sapiens
ggcggcggagaagcagctcgccagccagcagcccgccagccgccgggagtcccggcccaggcccctgagctgg

SEQ ID NO: 76395 - DNA, 82 bp, Homo sapiens
accgcagtatcatgctggccaagaagatcatcattaaggacggaggcacgaggcagaggaggtggacacggtggacgtctcc

SEQ ID NO: 76396 - DNA, 83 bp, Homo sapiens
cttgcggagaggtgtctgcggctcagacaatgcagatcttcgtgaagactctgactggtaagaccatcaccctcgaggttgag

SEQ ID NO: 76397 - DNA, 74 bp, Homo sapiens
ggctgcagaatatgctaaacttttggccaagagaatgaaggaggtcctgcacataggaagcgcccacaaccgaa

SEQ ID NO: 76398 - DNA, 75 bp, Homo sapiens
ggtccctgaagagggaagacacgcggaaacagagtcatgtgctgttcctggggcttggatgatgtaggggaagca

SEQ ID NO: 76399 - DNA, 100 bp, Homo sapiens
ccacagtcaccagtacagctggcgctctcacaaatccccacagacaagttggatggcttgaggactggtactaaaaggaaacgtgactgggaggccattg

SEQ ID NO: 76400 - DNA, 100 bp, Homo sapiens
gcaccgacaccgcctgtgtggggcccaccctccgtgcctttgttccattgaatgttcccaataacaaaaattctacagagtgggaaaaagtgaagtccct

SEQ ID NO: 76401 - DNA, 82 bp, Homo sapiens
ccaaacccggggcaggcgggcagctgtgcccgggcggcacggccagggggatatgagactttctactcggaatatcctgagt

SEQ ID NO: 76402 - DNA, 73 bp, Homo sapiens
gtaactggtggcatttgtcccgggaccagatcccgcccaatgacccccgcatcaagaaccaagccgactgcat

SEQ ID NO: 76403 - DNA, 98 bp, Homo sapiens
tgcatgttcaagaagtggccggagagttctgcatgttgattcaggtatgaaggttattgaaaaccgggccttaaaagatgaagaaaagatggaactcc

SEQ ID NO: 76404 - DNA, 75 bp, Homo sapiens
gcgggagcagcacttccacagccaagtgcgggagtccacggagccaaaaacctgtatatcatctccgtgaagggg

SEQ ID NO: 76405 - DNA, 80 bp, Homo sapiens
tgctctcccagccgcgccagcctcctcactggcctgccccagacaatgcagatcttcgtgaagactctgactggtaagac

SEQ ID NO: 76406 - DNA, 74 bp, Homo sapiens
ggaagctgcagccacaatgtgcctttgcaggggagcctgagagccacagtgttctaagaacggaagcatctggg

SEQ ID NO: 76407 - DNA, 100 bp, Homo sapiens
tgactgtgaaacctcagggccccagcgccgacggcgacgtcggggccgagctaacccggcctctggacaagagaagcagtcaattatagatttcttcaaa

SEQ ID NO: 76408 - DNA, 74 bp, Homo sapiens
taaaacctggaacagcagcatcattgtcaaagctaccactctgaaacaaacattgtccggtacatgaagaaact

SEQ ID NO: 76409 - DNA, 74 bp, Homo sapiens
gcaccgccgcacgccccgcctggcgctggctgtcagcctcagcatctgggtagcctcctgacaaggtgatccgg

SEQ ID NO: 76410 - DNA, 82 bp, Homo sapiens
gagctgcaagccggtgcagcagccttcagcttttggcagcatgaaagttagcacatgagattttgtatgattggatcaaccc

SEQ ID NO: 76411 - DNA, 75 bp, Homo sapiens
aagaaacaagccgtggaataggtgtatcaagtaatggtgcaaagcctgaagagaatggtgttgaacgcgtgtgtc

SEQ ID NO: 76412 - DNA, 83 bp, Homo sapiens
gggagttctctgtgtctgtgaagacagacccacgaagtcaagcatgcggagtgcagccaagccctggaacccagccatcagag

SEQ ID NO: 76413 - DNA, 100 bp, Homo sapiens
cgggagcggatggagaagcagcaggttcgagtctccacgccgtcagctgagaagagtgaggctcggctttggatcgttccttggaatcattggatcaaac

SEQ ID NO: 76414 - DNA, 50 bp, Homo sapiens
cgcggaggcggctgaggtgcgagccgcgagtaaccagctcataaatcaca

SEQ ID NO: 76415 - DNA, 90 bp, Homo sapiens
ccgtgttgcagatatatctgggtcaagtccatcatctccagaaccagctagtcttcctgcagaagatattagtgcaaactccaatggccc

SEQ ID NO: 76416 - DNA, 83 bp, Homo sapiens
gcccaagtcgccctcggggtggcagttcccgttaaccttagccacaaagtcaaaggttcagcagctggacatggagaaccaac

SEQ ID NO: 76417 - DNA, 100 bp, Homo sapiens
acacaactgaaaacagattctgaggagattgctgcgatgattgacactgagtttgccaagcagacctccctggacgcagtggcccaggccgtcgtggacc

SEQ ID NO: 76418 - DNA, 89 bp, Homo sapiens
agcagaggctgcaaagaatgctttgaatgctggagcattggatttgctaaaggagcttaagaatattcctatgaccctggaattactgc

SEQ ID NO: 76419 - DNA, 82 bp, Homo sapiens
cctggtgctggtctccgccatcaacgtctcggcgcggaagatggccggcggcgtggacggccccatcgggatcccgttcccc

SEQ ID NO: 76420 - DNA, 92 bp, Homo sapiens
gtgcgcacgttgtaatcagctgaggccatgtcaggagacggagccacggagcaggtcagtcatatgaaattcggatgctggataatcggaaa

SEQ ID NO: 76421 - DNA, 50 bp, Homo sapiens
ggaaatatcagttctgttgtggaagcgtgagtgcatctccatccacgttg

SEQ ID NO: 76422 - DNA, 75 bp, Homo sapiens
caattactgatgggagcaagttgactaccaccagtggagtccaggatgaggatgtgatggagctgcttgaagaag

SEQ ID NO: 76423 - DNA, 75 bp, Homo sapiens
gagtgcgtgggggaccggctgttggcggtgtgctggaattgatgttcgtctgtgtgatgttggtgaggccatcca

SEQ ID NO: 76424 - DNA, 98 bp, Homo sapiens
cgcaggcgggcctcgcgggtccgggagcgcggcggagacgatgcctgagatcagagtcacgcccttggtctctgctggatgaaccgaatcctaacagt

SEQ ID NO: 76425 - DNA, 50 bp, Homo sapiens
tgggacgtccggttgaccgcgatgtggaaactaaagcccagagagaaagt

SEQ ID NO: 76426 - DNA, 82 bp, Homo sapiens
acaaaatggagccaaaatagttgcaacaaaagagtggacagagcgggatgccaccagcttgtccaaagggaagttccaggag

SEQ ID NO: 76427 - DNA, 74 bp, Homo sapiens
ccccgtcaaaatccgaaagattcgggccagagacgacaacccgggcctccgagcctagtgtgttaattgtaacc

SEQ ID NO: 76428 - DNA, 90 bp, Homo sapiens
gaaaattgctggaataatgaccttgaatagaggaaatgggatatcatctggaccttctaccgctttgaggctgtgtgggatagctctctg

SEQ ID NO: 76429 - DNA, 90 bp, Homo sapiens
catctctgtggcctgccattccgatggcccctgatatgtcaggagaggttggacacgagttgccgctggttgtccaaatcaacaaccagg

SEQ ID NO: 76430 - DNA, 100 bp, Homo sapiens
gcggcggcacctgccggccgagggcgccctgcgtccggcagaggaggcgagcatcccgctcaggtgatgaggaacccctcgcgcacccagcgcagaaggc

SEQ ID NO: 76431 - DNA, 83 bp, Homo sapiens
agctcacagagcgtgagtgggcagaagagtggaagcacctcaacaacagatctaccgcatcgtgtcacagaaacagatcgcag

SEQ ID NO: 76432 - DNA, 90 bp, Homo sapiens
ctcggtgctgtggtgcagagctagttcctctccagctcagccgcgtaggatgcttctagatctgcagaccaagtcagcactaaaggaaac

SEQ ID NO: 76433 - DNA, 100 bp, Homo sapiens
cagccgtgtgacagtaactgaacattggtctaaagtctttccaaaaggtcaaggttcacaaggaccctgagtggcctcagccagacccacccttcccagc

SEQ ID NO: 76434 - DNA, 54 bp, Homo sapiens
gctcaagggactgtgtccaccctcaggggtcctggaggaagccgagttctacaa

SEQ ID NO: 76435 - DNA, 100 bp, Homo sapiens
ggaaagctgacaatcaaaaacttcctcgaatttcagcgtaaactgcagcatgatgttctgaagcttgagtggatgaggatcgcagtacggaacctgaccg

SEQ ID NO: 76436 - DNA, 75 bp, Homo sapiens
cagtggacacacagcatggagaaatccttcgcaatgtcaccatcctacgagttaattcatctgcctacactattt

SEQ ID NO: 76437 - DNA, 75 bp, Homo sapiens
ttggggcctagcggcgaggcgacccgcacagtgctacacacgcagggccctgtcgatggcagcctttacgcgaag

SEQ ID NO: 76438 - DNA, 100 bp, Homo sapiens
gaggaggattcggaggctggaacaggagaagctggagctgagcaggaagctgcaaggttatgatgtgattgctcaagcccaatctgggactgggaaaacg

SEQ ID NO: 76439 - DNA, 76 bp, Homo sapiens
atttaccttatcccctcaacaacttttcagtggcaagttatgaagacagtatggagtttccagaccatagtagaca

SEQ ID NO: 76440 - DNA, 100 bp, Homo sapiens
gacggtggcgccgcccggggcgaggcagggccagcagcaggcgggagggtgaggtggctttgaccccgggttgcccggccagcacgaccgaggaggtggc

SEQ ID NO: 76441 - DNA, 100 bp, Homo sapiens
ccgggacatctgaaagccaggaaatgacaatgcagatcttcgtgaagactctgactggtaagaccatcaccctcgaggttgagcccagtgacaccatcga

SEQ ID NO: 76442 - DNA, 83 bp, Homo sapiens
ctttcccagatgtttataatgagggcacacagaggcaccaagtctgaaggaggcagaagggaaagaacctgagctcttcctaa

SEQ ID NO: 76443 - DNA, 75 bp, Homo sapiens
aggatctggaggcacagctgcagtctgacgagagggggaatgagaggcctggagggaactgctggcctgcctgga

SEQ ID NO: 76444 - DNA, 99 bp, Homo sapiens
gctggcgcctcatgcactgagcaggtttccaccgtgcacattatgaagaaaagaaatggaggtgggagtttaaataactattcctcctccattccatcg

SEQ ID NO: 76445 - DNA, 99 bp, Homo sapiens
cagacagaaggatgtaaaggatggaaaatacagccaggtcctcagtctcctccaacccctctggctcccggccaagaaaaaggtggaactaaatacaac

SEQ ID NO: 76446 - DNA, 76 bp, Homo sapiens
tggacggggccaccggctggagcggatcccacacctccggaccgagggacgcggggctgccacacttgtgtatccc

SEQ ID NO: 76447 - DNA, 82 bp, Homo sapiens
gcagtggtcgcttcttctccttgatcgctggcctccccaacgacacactgtcagtggagaacggggtcatcaaccagttttc

SEQ ID NO: 76448 - DNA, 100 bp, Homo sapiens
ggacaagctatgtacttcgagtccaagctgattccctggaagtggtccttgccaatctccgagttccttcaaaaaactttttaaaactgtggacttaaat

SEQ ID NO: 76449 - DNA, 87 bp, Homo sapiens
ccgggaccgaaacctagccccggacgagaagcgcagcaacgtgcggtgggaccacgagagcatctttgatgatgcgtacaaatccca

SEQ ID NO: 76450 - DNA, 90 bp, Homo sapiens
gcttttccggcctgacaacttcatctttggcagcatggtgattcatttgatgcttccagaaaccagagaaatctatgaattagagaaatt

SEQ ID NO: 76451 - DNA, 100 bp, Homo sapiens
ggtaagggaggcgtcgctgattccagagagctaaagccgatgaatggagctggtttgtcaaaatccaaaggaagccgaattggatttgatagcacacagt

SEQ ID NO: 76452 - DNA, 100 bp, Homo sapiens
ttgtacatcgatttttgggccctagaaatgctcaaagggtgctcctaggattatcagagcctatctttcagaccatattttacatccttccacgcctttc

SEQ ID NO: 76453 - DNA, 49 bp, Homo sapiens
aaacattcagtcttctgccattagatctcccttgagtttagaaatctgg

SEQ ID NO: 76454 - DNA, 98 bp, Homo sapiens
gaatcaataagccatggcatctaagaaatttgctgttaaagttactcaaatgagtcgtccagacttgattctctttctgatgaaatacctgatggctc

SEQ ID NO: 76455 - DNA, 90 bp, Homo sapiens
ccggttccccggcccacagtgggggtgtgcaaacccgagagaactggtgatggaatggggagaagatattaaagcagtttcaaaagatga

SEQ ID NO: 76456 - DNA, 75 bp, Homo sapiens
ctgaagattcttcaatagtagataatgaggggaactgtgtcaatctgacagaagcactgtcgctctatgaagaac

SEQ ID NO: 76457 - DNA, 83 bp, Homo sapiens
cggacgcccgctgagcttggcgcacgggccgaccaggtttggtgcacctcgatttggaggaagtagggcagggcccttatctg

SEQ ID NO: 76458 - DNA, 73 bp, Homo sapiens
ggaggaagaggaggaggaagaagaaggtgatggtaaagaattctccggaaatcctatcaaggtctcatttgct

SEQ ID NO: 76459 - DNA, 96 bp, Homo sapiens
agttctttaagcccccatatctaagcaaaggaactggagtatattagaaacttgcatttacaaatggaagaagaaagaacaagatttaaagaccaa

SEQ ID NO: 76460 - DNA, 83 bp, Homo sapiens
aacagcgagctgtttgacccctttgacctcttcgatgtgcgagactttggaaagcgggctgacgcacgaggcacacaggaagg

SEQ ID NO: 76461 - DNA, 50 bp, Homo sapiens
caaaattcagagagattgcagaagatttgcagatatatgctgtgactccc

SEQ ID NO: 76462 - DNA, 100 bp, Homo sapiens
aaaattattgaaaacactcgaaggtgtattgagagtgagaacacttggagagatttaatgaagacagctttagaaaacctaattgtacttttgaaggatg

SEQ ID NO: 76463 - DNA, 82 bp, Homo sapiens
ctcgggtcgccggagccgcgccccaccccgccagctccagagccacgtacgggtcggcactcttcaccctcccgagccctgc

SEQ ID NO: 76464 - DNA, 51 bp, Homo sapiens
aattacgcatttccacttctaatgcttcccaagctcttccttcagtcccac

SEQ ID NO: 76465 - DNA, 100 bp, Homo sapiens
gcgatgctgcccggtttggcactgctcctgctggccgcctggacggctcgggcgctggagacctgaaggaaaagattatgcccttcattggctagtgctg

SEQ ID NO: 76466 - DNA, 75 bp, Homo sapiens
cgcgcacacacggccatggcggaggagcatcagatccatgctgctgctgactcggagccccacagcttggcacag

SEQ ID NO: 76467 - DNA, 90 bp, Homo sapiens
tcgggccagacccaggactctgcgactttactgccaccatggcaactgcaccatacaactactcttacatctttaaatatattattattg

SEQ ID NO: 76468 - DNA, 82 bp, Homo sapiens
cccaaaatgaactgagtgcctggaagtttacgcctgataggactgcatcaaaacatgtaaacaaggacctcggtaatatgga

SEQ ID NO: 76469 - DNA, 101 bp, Homo sapiens
ctcaggggttccccaggaatatcgatacaacaccaacagatgagctgcttcagaaagagcaaaactattcagatgacgtcttggccaacatgattagtgaa

SEQ ID NO: 76470 - DNA, 100 bp, Homo sapiens
gcattgaccactacaagtaaaatgcgaattccacattctcatgcatttattgatctgactgaagattttacagcaggcttgcacagaaatctggaggcag

SEQ ID NO: 76471 - DNA, 76 bp, Homo sapiens
gggctgggcgcccccagaagcccgggaacaaacaatgttgtaccatctttgggtaggcagacttccctgacgacat

SEQ ID NO: 76472 - DNA, 51 bp, Homo sapiens
attgcaatccatctgtcatgcttgctgcagtctcgaagatatgactccagg

SEQ ID NO: 76473 - DNA, 100 bp, Homo sapiens
gagctccgatccctgcgcgggctcgagagctcgccccgaacgggggtcttcctcctccgccgttgacaggattctccttttacaaatgcaggaatgggat

SEQ ID NO: 76474 - DNA, 90 bp, Homo sapiens
aaggaaaaccactgcgtctccttatctggacacgtgcaggctgagtggttcgcctccagcacacagagctacatccttcgggacctggac

SEQ ID NO: 76475 - DNA, 95 bp, Homo sapiens
ccagcccaccagcacaatgtcagagggcctttctggttctctagttcaggaaccttttcagctggctactgagaagagagccaaagagcggcagg

SEQ ID NO: 76476 - DNA, 101 bp, Homo sapiens
gttatgttgcctgagggagaggatctcaatgaatggattgctgtgaacaaacctcccaccttctgttgtggctactgttggtggtaaaattttcacatttg

SEQ ID NO: 76477 - DNA, 100 bp, Homo sapiens
agtttgaggtacctcccataattttaagggggctctgccagcagacagccttggcacacaggcacaagggctggagcccagagatgagagtgcccaaggg

SEQ ID NO: 76478 - DNA, 125 bp, Homo sapiens
tctgacgacgtgaaggagcagatttacaaactggccaagaagggccttactccttcacagatcgatataggcatggaccaccaagctcttctaaaacaatttgatcacctaaaccacctgaatcc

SEQ ID NO: 76479 - DNA, 83 bp, Homo sapiens
ctgcagaaggagctggcagagcagaagtctgtggagaccgcaaaaagattgacgtgagtgaattcagatataactcaagcttg

SEQ ID NO: 76480 - DNA, 76 bp, Homo sapiens
ccgccgccgccttgctgctgctcaaagctgctgccgccccttgggctaaaagaatcacagaactgattggttacca

SEQ ID NO: 76481 - DNA, 97 bp, Homo sapiens
gctaaaatgatagtcagtgacattatgcagcaggctcagtatgatcaaccgttagagaaatctacaaagtttggatttaggtggcgagtagaaaaag

SEQ ID NO: 76482 - DNA, 50 bp, Homo sapiens
cctgtggatgaaaccctgattcctacaggcatctccttggaaacaatgcc

SEQ ID NO: 76483 - DNA, 100 bp, Homo sapiens
caggcagaagaaggggaactcctgctgcccactcaggtacttggcaaataggtccaaaagacatacactggccatgaccaaccctacagctgagatccca

SEQ ID NO: 76484 - DNA, 100 bp, Homo sapiens
ccaaaatatggcaaagaaacctattctgagattgtccagaacatcgtgggcacagctctgatgattttagtggccattggttttaaaaccaagctggctg

SEQ ID NO: 76485 - DNA, 100 bp, Homo sapiens
cggacctgcacgagctgtctgatgaggacggggacttggttgccttttccagtgacgaggaattgacaatggccatgtcctacgtgaaggatgacatctt

SEQ ID NO: 76486 - DNA, 74 bp, Homo sapiens
gtgatagttggagcggagactgaggatacgaagcgttttcggcttcctgcccggagctgtgcagcaaacagtcg

SEQ ID NO: 76487 - DNA, 88 bp, Homo sapiens
ggcaactcaaatctctgcaagagaaagtctccaagaaggagatggggaagggatccttcaagtatgcctgggtgctggacaagctgaa

SEQ ID NO: 76488 - DNA, 49 bp, Homo sapiens
attcatgtggaactatgaggatgggctaggaattatctgtgaatgtagg

SEQ ID NO: 76489 - DNA, 100 bp, Homo sapiens
ggagccagggaaccaggggtccgggctagagctggagtcgtgagcgcgcgcccgccccgctctgggaggaccgcgagacttaaaccattggatattgagt

SEQ ID NO: 76490 - DNA, 75 bp, Homo sapiens
tctacttagctcagcaattcttaccttatgcggaaaacgccatgcggtacataaatgggacgcgtctggatgacc

SEQ ID NO: 76491 - DNA, 100 bp, Homo sapiens
tgatggtgccgtcgctcatcaagcagcaggtccttaaggtccgagcctccgtactgggtgcaatgaaagctccacgcaggccttaccatggaaggctgtg

SEQ ID NO: 76492 - DNA, 100 bp, Homo sapiens
cacagtttgctctgctcttccaacaccagtggaagatgatcacatcccaggcacgtctgagaatggtggatgtggtggagaaagaagatgtgaatgaagc

SEQ ID NO: 76493 - DNA, 82 bp, Homo sapiens
cagaatcgactcaagagttacatgcatcagacaccagagactctaccaggacataccaaagcaaaacaaccgtatagagaag

SEQ ID NO: 76494 - DNA, 50 bp, Homo sapiens
cttagctcagcaattcttaccttgccaccccagcagacatgtttgccaag

SEQ ID NO: 76495 - DNA, 75 bp, Homo sapiens
ggcggcctgagtgccgtagccgagccggggctggagcgcgcggtgctggagaatctggtaaaagcaccattgtga

SEQ ID NO: 76496 - DNA, 50 bp, Homo sapiens
ccgtgggcagccagggtcggtgaagttaaatccagatgtgaatgttttcc

SEQ ID NO: 76497 - DNA, 100 bp, Homo sapiens
gaaaacttggtgactatactggggaccagcctcttaatcggatgtatcttgtattcatgtgaatctaacattataagcatttggaataatgggaaaggca

SEQ ID NO: 76498 - DNA, 74 bp, Homo sapiens
gctgctgatgtcagttaactctgagaagtcgtcctcttcagaaaggattcaggagcagttccagaaaaatcccg

SEQ ID NO: 76499 - DNA, 88 bp, Homo sapiens
gtcccacttcaaacattcgtctcggaaaccccgcctcttacagtcacgaggtatttcagttactaactgatctgaaagagcagcgtaa

SEQ ID NO: 76500 - DNA, 100 bp, Homo sapiens
ttcccatcgaagctctagaaatgaatgtttccatctcttcagagatgaaccaggtataatctgcagatgttggaagctgagggcagcatgaagcaggccc

SEQ ID NO: 76501 - DNA, 101 bp, Homo sapiens
ctgccacctgggggaacctgacagggctgggcggactgaccccacagtatctggcgcttagaccatgctcagcctccaagcagccttgtcatcgacaaaga

SEQ ID NO: 76502 - DNA, 97 bp, Homo sapiens
actaaggccccctgcccccttttcctggtgcatgtgaagttatcaaaaacaggtaagaatgattgatgttggctgatattggagtgctcattcacat

SEQ ID NO: 76503 - DNA, 75 bp, Homo sapiens
ggaagccttgttctatggtactcggaccatggagccatacaggactcaaatggatgctaaaaagccaaggaaatg

SEQ ID NO: 76504 - DNA, 75 bp, Homo sapiens
ccttgtcactggagtgcaagaagaaattcccacctgtcaaagaggtgtcattccacacatccacaaatctctgat

SEQ ID NO: 76505 - DNA, 96 bp, Homo sapiens
cgcagatgctggagaagtccccttatgaccaggtgaaatctgtgactgttgctgaaggactcatagaagaccattttgatgtcactgtgaagatga

SEQ ID NO: 76506 - DNA, 97 bp, Homo sapiens
aaggattctgcctggccctgggaagagaagcctagatatctggtgtcatggagaaactccagctgggcccagagattctgcagcgggaaaatccaag

SEQ ID NO: 76507 - DNA, 100 bp, Homo sapiens
cccctaactccaccgaacgatacacacgttggatcaaccagctgacgccggagcagctcctaacccagcttcacggtgatgatatggcatctgccagctc

SEQ ID NO: 76508 - DNA, 90 bp, Homo sapiens
ctgaagtttgccataaaagttgatggagattacctttggggagtgcatccgccccaacccttttccccctcgtctcctgtgagaattccc

SEQ ID NO: 76509 - DNA, 51 bp, Homo sapiens
gccaagatgacccaactccctcgaggtgctggagaatctggtaaaagcacc

SEQ ID NO: 76510 - DNA, 100 bp, Homo sapiens
atttctttctcgctgatcgcctaacttctactgacgaagcttggaagttgcagaaggcatggagggatttttgaaatcagatgagaggcagagattggcc

SEQ ID NO: 76511 - DNA, 78 bp, Homo sapiens
ttcaaatagagctgcagcaaggatgaaacagatcagaggcttcgaaactgcttactgcattgatagcatgggaaaaac

SEQ ID NO: 76512 - DNA, 100 bp, Homo sapiens
gcagctggagcctgcccagaaggacctgtacagggatgtcatgctggagaactacaggaacctggtctcactgggaggaagagggtaatctggaagagtt

SEQ ID NO: 76513 - DNA, 74 bp, Homo sapiens
ggctgcaatagcaagaaagcctattttctgtatatgtattccagatatctgaccggacaggaacatgagcttat

SEQ ID NO: 76514 - DNA, 51 bp, Homo sapiens
aaaaggacaagcagtttgttgccaaggttgttttccgaggaggtgaagggg

SEQ ID NO: 76515 - DNA, 75 bp, Homo sapiens
gaaactccgtgtagacaaagccccactgactcccactggcattccttctgcagcacttgatttattggaccacat

SEQ ID NO: 76516 - DNA, 75 bp, Homo sapiens
gaggacctcttccccaccaacgttgatcactaaggaggaagagcgagagaagaagttttctagaaggctaaatca

SEQ ID NO: 76517 - DNA, 95 bp, Homo sapiens
gatgatgtaaccctggacgacctgatcatggctaaagatgacctctctggtgctgacatcaaggcgctcccactgccctcctagaccctcggagc

SEQ ID NO: 76518 - DNA, 50 bp, Homo sapiens
ctgagtggatggggacctgcctgctggcatggagaatggtggaaagcaaa

SEQ ID NO: 76519 - DNA, 82 bp, Homo sapiens
ccaacttcaaaacctccactctgagcgttagcagctttttcaagcagggcttccgagtggacctgccaatcaagtcggcccg

SEQ ID NO: 76520 - DNA, 90 bp, Homo sapiens
ggcctcattttggatatctgtgataaagttggtcagtctcgcactgggatgttgacaatgcgtctctggcacgtcttgaccttgaacgca

SEQ ID NO: 76521 - DNA, 51 bp, Homo sapiens
cagtttaaaagccttggcagtcaagctccagagaaagagacacattggaaa

SEQ ID NO: 76522 - DNA, 100 bp, Homo sapiens
gaaaagcctcctgctgaacgtcatatgatttcttcctgggaacaaggagaagatgtcaaccggacactagaaggtggaaggaaacctcttcattatgcag

SEQ ID NO: 76523 - DNA, 101 bp, Homo sapiens
gagtggaagagctcggggatctggctcaggcccacatacagcaacttagcgaagctgccggtgaagatggagttcaaagaaggacgcagagccagccacac

SEQ ID NO: 76524 - DNA, 98 bp, Homo sapiens
ttcagactcttggagccagaagctacatgacccctaaacgacttctgcctggtgtcgaaggtggtgggcagatgccgggcctccatgcctaggtggtg

SEQ ID NO: 76525 - DNA, 100 bp, Homo sapiens
tcaaggcctgcctcatcagcctgggctacgacgtggagaacgaccggcagcctggtccgacccccagtggcactaacgtgggatcctcagggcgctctcc

SEQ ID NO: 76526 - DNA, 80 bp, Homo sapiens
acaacaaaacagccagttaatgtggaaacaaggtcgacaactactcagacagggcttcaagaagcgtgcacctcgggcac

SEQ ID NO: 76527 - DNA, 83 bp, Homo sapiens
caacaaatggcaactttctgagttgcctgttcactctgatcgtagtattggaagttctggccaaggcaatcagacaagaggaa

SEQ ID NO: 76528 - DNA, 51 bp, Homo sapiens
cggtggtcccagatcctgataatacttttcaggagctccaggtaatgaggc

SEQ ID NO: 76529 - DNA, 75 bp, Homo sapiens
cccggatctcctggaagtgttggcggaggaaggtattacaagtggataaataatgtgcactgctctgagcccaaa

SEQ ID NO: 76530 - DNA, 104 bp, Homo sapiens
gtagcgacccggggggagcgcggggcgacgctggctgcagggacccggtgacagcgtgagaggtactccaaagattcaggtttactcacgtcatccagcagaga

SEQ ID NO: 76531 - DNA, 88 bp, Homo sapiens
agaagctgggattggagattccacccaaacttgctggtcactgggaggcgccccagcgggatcccagagaaggatctgcacagtgtta

SEQ ID NO: 76532 - DNA, 102 bp, Homo sapiens
ctgcgcctggtgaaacactggtaccagcagcttgtagagaactgtgtttgccttcttcggaacttatcatatcaagttcaccgggagatcccacaggcagag

SEQ ID NO: 76533 - DNA, 100 bp, Homo sapiens
gtagcggcggcgggagtcctggcgctctgcagagtaaagccaatcccagctgaaggaatcaagtcaaatccttccaagcggcatagagaccgacttaata

SEQ ID NO: 76534 - DNA, 131 bp, Homo sapiens
ctgggctcagcacggagggagcgacggggccttcggccgacacctccgggtcggagctggacgggaggctaagtgctatttatggaggtacctatatgctgaataaacccattgaagaaatcattgtacag

SEQ ID NO: 76535 - DNA, 98 bp, Homo sapiens
tcgccgaggcaccgaggcactcagaggagacacaagatggtgaaggagacccagtactatgacatcctgggcgtgaagcccagcgcgtccccggagga

SEQ ID NO: 76536 - DNA, 82 bp, Homo sapiens
agcttatcagagctctacttgggaaagaccagtccatgggcaattggcagatcaagcgccagaatggagatgatcccttgct

SEQ ID NO: 76537 - DNA, 82 bp, Homo sapiens
cctgggcgctccggtggcggcggagttaccggtattgtaagaacaagccgtacccaaagtctcgcttctgccgaggtgtccc

SEQ ID NO: 76538 - DNA, 100 bp, Homo sapiens
gctttccccaagtagtccgatggctgcggctgcgccgaggcgccctactcaggtgtgggcaagagcagtttactgttgcgttttgcagacaacactttct

SEQ ID NO: 76539 - DNA, 80 bp, Homo sapiens
ctcaacgacgaggacctgacgcagggccctcctccccagttcagaatgcagcccacagccaccatggccacagccgccac

SEQ ID NO: 76540 - DNA, 88 bp, Homo sapiens
tgtttcccattgcagcccaggtggataaggaacatctcttcccagcggctcagatgcgtctgttactagagtggagagtctaccttcg

SEQ ID NO: 76541 - DNA, 101 bp, Homo sapiens
gccggtgccgcagctgcgatggccgtggccgtggggagaccgtctgtggattctccacagttttcctcgtgcgtactcacggtggaatccgatgtgcattg

SEQ ID NO: 76542 - DNA, 97 bp, Homo sapiens
atcttcatgtgtctcttctaagctgaataaagctgttttggaactgtcaggtacctcaaagcaattaaacaaccaccatgtcgagcaaaaaggcaaa

SEQ ID NO: 76543 - DNA, 100 bp, Homo sapiens
ttgaacaagagggagtatgaaatcccatccaacctgactcctgcagatgtctttttcagggaggcacagaaagctgaaggtgctggagatgccaagtgaa

SEQ ID NO: 76544 - DNA, 90 bp, Homo sapiens
gatatgcatgcatgtaccgaccttctgaacaaggccaacacctatgcaggaagaggatcacctagcccgggtagaagaggcaatcacccg

SEQ ID NO: 76545 - DNA, 73 bp, Homo sapiens
ttcaatatcaaaaatgactttactgaagaggaggaagcccagactatacttgtagcaagcagaaacatcgatc

SEQ ID NO: 76546 - DNA, 100 bp, Homo sapiens
caagcccaagctcaaggccgggggttctgtagaaagtcttcgcagttctctcagtgggcagagctccatgagtgtaggtggagcttttgctggaatccca

SEQ ID NO: 76547 - DNA, 80 bp, Homo sapiens
ttctggatccgtttaactaaagagaggagagattgaatttgaagtagtttatgtggctcctgaagtggattctgatgatg

SEQ ID NO: 76548 - DNA, 120 bp, Homo sapiens
tataaaagcagcaaatctacttttgggttacaaaaatccagaccagattcaaccctatgaaaagataaaggccaggggcttgcctgataatatatcttccgtgttgaacaaactagtggt

SEQ ID NO: 76549 - DNA, 83 bp, Homo sapiens
atcgtatgtccgctatccagaacctccactctttcgtgttctaagaacggaagcatctgggctggatggaatttagcatcaag

SEQ ID NO: 76550 - DNA, 100 bp, Homo sapiens
ctcctgatgcagtccagcaaagaactttcacatgtggacctccctgaagattttctaaggagcaaaggtgacagagctgaatgaacctctctccaatgaa

SEQ ID NO: 76551 - DNA, 100 bp, Homo sapiens
cccgggatgaacggattgaaaggagagaaaggggagccgggagatgccagccttggatttggcatgaggacctatgacatgtttccagacaccattcact

SEQ ID NO: 76552 - DNA, 98 bp, Homo sapiens
actccagcgtgtctccagccgtgatgagcagcaccagcagtaagagggctccgaccacggcaacccagaggctgaagcaggactaccttcgcattaag

SEQ ID NO: 76553 - DNA, 82 bp, Homo sapiens
atgagaagagcggcagtttcgtgagcgacctcagcaggtctcagcggcggtggcagccgaggtgcaggatgcaagaaggcgc

SEQ ID NO: 76554 - DNA, 90 bp, Homo sapiens
ttgaacaaactcgaagaacagctgtggaaagaagttgcaaaacactggagtgggaataaggtgtcaatcactactaccccatttgaaaac

SEQ ID NO: 76555 - DNA, 100 bp, Homo sapiens
ttctggccagtttgatgttgagttccggcttgccgcggcctgccgcaatggaaacatctatattctgagaaggacagagcgggatgccaccagcttgtcc

SEQ ID NO: 76556 - DNA, 100 bp, Homo sapiens
accaatcctcacgattgagtgtcaaagaagatttgaatataacctgccgctttgcaggtgtattccacgtggagaaaaatggtcgctacagcatctctcg

SEQ ID NO: 76557 - DNA, 90 bp, Homo sapiens
tgcatggacagctgatttctgttgaaaaatccatcaataaagccatggagaaagaccatgaagaatacaacattggcgtcctagacatct

SEQ ID NO: 76558 - DNA, 50 bp, Homo sapiens
aatggaaacatctatattctgagaaggtacaggtttgcagattccgccag

SEQ ID NO: 76559 - DNA, 80 bp, Homo sapiens
ctcagttggaagcagccgatccagcctgcggagcctgtggggcaggcgcatcccggggaaatggtgggggctctggctgc

SEQ ID NO: 76560 - DNA, 80 bp, Homo sapiens
gggagagcaagaccatcatgctgcgcggccttcccatcaccatcacagagagcgatatttgaggcttaagcaacttcttc

SEQ ID NO: 76561 - DNA, 98 bp, Homo sapiens
aggggagcccgggacccccgggggcgcaggtggaggaactgcaatgtctggtggagaacagaaaccagagaggtactatgtgggtgtggacgttggaa

SEQ ID NO: 76562 - DNA, 101 bp, Homo sapiens
cagccctgctctgggacacacctccattggatttaaaagacagtcctcgtcagcactgactttcagctatggaatcgggggcagtacccaaaggaaacgct

SEQ ID NO: 76563 - DNA, 100 bp, Homo sapiens
gtctcagcagccatgtataagtccctagaactggcgattggacgatttgaaagtgaagatttgacctccatagtttttgcaggcctttcagatatatcca

SEQ ID NO: 76564 - DNA, 100 bp, Homo sapiens
ctgggaccggcctggggtagctgcgcagcagtcattgaaattatgagactatcattcaaatggaagcattatagttcttcggaaccattatgatctcaaa

SEQ ID NO: 76565 - DNA, 100 bp, Homo sapiens
gaagaagtacgaggcggacatgtgcgtgagcactgagattatgaggctctggcctccactggccactcactcgtgaccctttccaccacggcggagcctt

SEQ ID NO: 76566 - DNA, 90 bp, Homo sapiens
tcctaggggacataaaattagtgattactttgaggaacttgcatcagcactgaagtcagccttatctggccacctggagacggtgatttt

SEQ ID NO: 76567 - DNA, 90 bp, Homo sapiens
gagaggaggaggccggggctctccgggcctcccgccgcttagcctgatgctggaaggacgaagggccaattcctgtccccccagcagcat

SEQ ID NO: 76568 - DNA, 100 bp, Homo sapiens
tggtcactaatgtacaggcagaaaacgagaggctcaccgcagtcgtgcaggatctgaaggaggtcgtagatgtatccaaaggaattgttaatgcagttaa

SEQ ID NO: 76569 - DNA, 83 bp, Homo sapiens
catcttttagctatggcgactttgacttcctgccaaaatcctgttaccctagcaacagatatcttaatgcaattcagacaatg

SEQ ID NO: 76570 - DNA, 82 bp, Homo sapiens
ttgaaaatagtccccaggattttgctcttcacattatttttgcaacaggagcttccttcaaaatgtctactgttcacgaaat

SEQ ID NO: 76571 - DNA, 75 bp, Homo sapiens
gcgcgtccggcagtacctcgaccaggtggaaaacgaagctcattcccaacgtgcaaagccaaggcagcgacccca

SEQ ID NO: 76572 - DNA, 101 bp, Homo sapiens
tccgccgattcctcctccttggtcgccgcgtccttggctggcgtgattgtcagtggcttcgccccgaggagagctgactgccctgggctgctgcctccggc

SEQ ID NO: 76573 - DNA, 76 bp, Homo sapiens
agacagtagctggaaccctgaccccaggtgctcctggagagaccccaggtcgctcaagccctcagttagacccttt

SEQ ID NO: 76574 - DNA, 96 bp, Homo sapiens
ggcagagagaaggaaacacttagaggaagttctggagatgaaagacgtgattggcagcagatggctgattaaggaggaactagaagaaatgttagt

SEQ ID NO: 76575 - DNA, 100 bp, Homo sapiens
aaaaagttacagcacagccagacgttctagaagtgcaagcaggtaccttctcaaaccagatttcatgaggcggcctgatcgaacatttgaccccttctct

SEQ ID NO: 76576 - DNA, 73 bp, Homo sapiens
gtcaacaaggttctggacaagatgaagtctttctgccagccagacctggtcacctgtctggagcaaaggaaaa

SEQ ID NO: 76577 - DNA, 73 bp, Homo sapiens
ggaggttcaggctacggtgagccgaaggtggaggaagacctgggccgtgctctacccggccagtccccacggc

SEQ ID NO: 76578 - DNA, 90 bp, Homo sapiens
gcaagaggcgtttctataagaattgatggaggtgcagcgccggccctggttagtgaagtacggggacagcggggagcagattgccggctt

SEQ ID NO: 76579 - DNA, 83 bp, Homo sapiens
aaacctcctctccatgctcaaggccgacgtcaacctgtcccacagcgaaagatctttaatctcatgaagtacgacagctacag

SEQ ID NO: 76580 - DNA, 96 bp, Homo sapiens
tgcaaaatattcaggagaccgtcgttgccttgtatttccagagaacagagatcgagatggtgatcatggagcgtagcaagctctcagagctggccg

SEQ ID NO: 76581 - DNA, 82 bp, Homo sapiens
gccggactacaaggtcgcctacgtgcagctgtgccctctggtggtcagaagatgctgtgctgtctcgttaggatgaatggat

SEQ ID NO: 76582 - DNA, 50 bp, Homo sapiens
gaactacagaaacctggtctccctaggtagtgggcagcagtcagtgacag

SEQ ID NO: 76583 - DNA, 100 bp, Homo sapiens
gcaccgcatgatggtacccaaagtcaggttattcagcttctcaaggctggaaaagcgaaggaagtttcctacaatgcactagcctcacacataatctcag

SEQ ID NO: 76584 - DNA, 100 bp, Homo sapiens
tcgactgcccagagtccgcgaatcctccgctccgagcccgtccggactcccccgatcccagggagtggctttacttgctgtgccatgaaatgctgaatcc

SEQ ID NO: 76585 - DNA, 101 bp, Homo sapiens
ttcaactcttttctctcgggcttcatctcttgtgtggggagtttcatcctagcggattttccgcagatttccagtggccccactgatcccttatccactca

SEQ ID NO: 76586 - DNA, 82 bp, Homo sapiens
tctgttgatcaaaccagtgcagagaatcatgaagtatcagctgttactgaagtgtgacagctatgaaattcgccctggtaaa

SEQ ID NO: 76587 - DNA, 51 bp, Homo sapiens
catatgcaccagcacgcctggctaagtagctttgcagtttggggagggctg

SEQ ID NO: 76588 - DNA, 89 bp, Homo sapiens
ccatcaccggcagaacacagcagggcggaggaaagtgcaggaccaagaatcgccttcagccctgtctggtgcatccttggcagaaagtg

SEQ ID NO: 76589 - DNA, 51 bp, Homo sapiens
ccgttaaccttagccacaaagtcaaagatctcccttgagtttagaaatctg

SEQ ID NO: 76590 - DNA, 98 bp, Homo sapiens
gaagagtcatccctcagaaagtcttgacacagatagtcttcttattgctggattaacctccatttcagctaatcatgggagagattaaagtctctcct

SEQ ID NO: 76591 - DNA, 100 bp, Homo sapiens
caccatcccaccaaagggggctgctgaccgagagagctcactcagccaggtgctcctgacctctgataaagctgcagccaatttctcagatcgttctttg

SEQ ID NO: 76592 - DNA, 101 bp, Homo sapiens
tcaggctcctggaaaggaccgtccacccctccgcgctggcggtgtggacgcggaactcagcggagaaacgcgattgaggagaccagtatgatgtctgtgcc

SEQ ID NO: 76593 - DNA, 99 bp, Homo sapiens
ggatgccacagcgggcccgaagcggatcagccttgtgggaaaaggtcacggatcgcctacagtgacgaagtacggaatgagctcctgggggatgatggg

SEQ ID NO: 76594 - DNA, 75 bp, Homo sapiens
tggcatttggctttgcctttctggacacagaagtatttgtgacaggtggcattgccaggacttacacagatcaat

SEQ ID NO: 76595 - DNA, 100 bp, Homo sapiens
gctgggaccgcgaggtgactgtgactgaggaagagtgcaatggccaatgtacatggtggactatgccggcctgaacgtgcagctcccgggacctcttaat

SEQ ID NO: 76596 - DNA, 101 bp, Homo sapiens
actgaccccgggggagcggcagcagggaatgtttaattcagccttggaagtggccaaatttgaaggtgctgtgattcgaactgtcagtgggataagggggc

SEQ ID NO: 76597 - DNA, 100 bp, Homo sapiens
attggctgcattcacaaaactctatgaaagccttttaccctttgctactggagaacatggatctatggaggactcagaattcatgattgaagaaatgcag

SEQ ID NO: 76598 - DNA, 83 bp, Homo sapiens
caggcgactgcctcatcttcaaggtgagaagccctaccactgcaactgggacggctgcggctggaagtttgcgcgctcagacg

SEQ ID NO: 76599 - DNA, 82 bp, Homo sapiens
agggaaccctggtcaccgtctcctcagacatgggaaagcggaaccaccaaaaggagtgatgatcaacgatctcatgataaat

SEQ ID NO: 76600 - DNA, 89 bp, Homo sapiens
caaactttcacagactgaaggagactataattaaatgcgatatggtacccaaactggattatgaattacatgaacgacagccttcgcac

SEQ ID NO: 76601 - DNA, 100 bp, Homo sapiens
tcgccttgtatctcaacaccctgagtgcggatttctgctatgatgacagaacgtactcaggaaaagtggggatttccaatgtgccactatttaaaggaag

SEQ ID NO: 76602 - DNA, 98 bp, Homo sapiens
ctttgcgaagattcagctggaacatcacatctcccctggggactttcctgattgccagaaaatgcagatcttgagccagatgattgtgcatccattta

SEQ ID NO: 76603 - DNA, 75 bp, Homo sapiens
gcgcggtcgacgcgggcctgagctccctccagacgagatcatcagatgttcattcatctggatcttcagatgcac

SEQ ID NO: 76604 - DNA, 75 bp, Homo sapiens
ccatattctacggggctttcagcaaatcaaagccagatgagtgtgggtcagagagccaaactgactatatctcca

SEQ ID NO: 76605 - DNA, 99 bp, Homo sapiens
ccaagcttaaagagacttcagaaaatgctttgaagaaaccagtggctgactgtgtgatttcagctatgtggttcatctgcaagttttttcaaattgttg

SEQ ID NO: 76606 - DNA, 76 bp, Homo sapiens
cagaaattcttcgtaaggcaatgaagggttttggttgcccccaagtttcctggcagtgtgtgatactgaggaggtg

SEQ ID NO: 76607 - DNA, 119 bp, Homo sapiens
gcaagaacagagagagaggtggacagatctgagagatactgagacagaccccgtgcggctgacacagctgtatgagcaggcccggtgggacctgctgctggaggagattgactgcaccg

SEQ ID NO: 76608 - DNA, 87 bp, Homo sapiens
gtaacagcagcaatgaccttccctcgggaattccacctctgcgtttttccctccagaccaagctgtacaccctgcctgcaagccacg

SEQ ID NO: 76609 - DNA, 50 bp, Homo sapiens
gacatctgaaagccaggaaatgggagtggtacgggtatcactttccggag

SEQ ID NO: 76610 - DNA, 100 bp, Homo sapiens
gatctcttcacccgcaccatgatcgttatgaatgatcagggtccaccaatgagctgtgtacgattggctgaaagagttgtagctctcatttgctgtgaga

SEQ ID NO: 76611 - DNA, 90 bp, Homo sapiens
gccagaggcctttgactggtccccagtggtgacctatgtgtgtgatcttgaagggaacaggaatggtagtgctattggccttccagtccc

SEQ ID NO: 76612 - DNA, 82 bp, Homo sapiens
tgactacctgctgtacaccctcaacaaacaccagcgctttggggccaattcctgtccccccagcagcatggcatcgtgtgct

SEQ ID NO: 76613 - DNA, 102 bp, Homo sapiens
cgccgtgcaggcggccgtcagcaacctcgtccggactaaagagaacgaggagctgaccaggatctgcgacgacctcatctccaagatggagaagatctgacc

SEQ ID NO: 76614 - DNA, 75 bp, Homo sapiens
aaaggagcagccatgagggccgggcccagtcaccgaccgagctgacatggatgtgtgccttacaaactatggtca

SEQ ID NO: 76615 - DNA, 100 bp, Homo sapiens
caagaggtcttagaggtggaagaggaggaagtggaggaaccaggggacctccctcacggggaggacacatgggttcacaatctatacagttgcataaaag

SEQ ID NO: 76616 - DNA, 82 bp, Homo sapiens
tgactgtgccataaacaattcatatctcatggtgattcaagacattactgctatgatgatgccaccagtccccatttctcaa

SEQ ID NO: 76617 - DNA, 90 bp, Homo sapiens
agaagttataaagttattgctaagtgtgggaattttagctaagctgaccggttccctgatgtgttacctgcttctgctactgatccaaac

SEQ ID NO: 76618 - DNA, 75 bp, Homo sapiens
gctgtgaaagggtcaaagtctttgaggaatgctcgtgaggagtaagaggagcaggctcctgcacagtgactacat

SEQ ID NO: 76619 - DNA, 82 bp, Homo sapiens
gtcatccaccgtgatctcaagtccaacaacaatcctggtggctttgagacaccttcacttcaagaacattgtccactgtgac

SEQ ID NO: 76620 - DNA, 75 bp, Homo sapiens
ccgagactgacaacgcggtcccacagagaccgtccaggctggacttgaactccttcctcggctgaagtgatcctc

SEQ ID NO: 76621 - DNA, 75 bp, Homo sapiens
actgacagaaatgcgtggcatctatgccaaagtggaccggctagagagggagaaccgaagattacaggaggccag

SEQ ID NO: 76622 - DNA, 75 bp, Homo sapiens
cgcgggctccgcgcccggccggacccgggcccgaggtggccatggctaccgggcaggtgttgttccagcggttct

SEQ ID NO: 76623 - DNA, 100 bp, Homo sapiens
cttccatagggctgagtctgggaccgaggtccagccctgctgggagttttctgccacacagatttgcggaagaacctgaccgtggacgagggcaccatga

SEQ ID NO: 76624 - DNA, 100 bp, Homo sapiens
agattaagaaatctgccccaaagtcttagaactgatttgttggacgatttaagtctcgtaaagaacgagaagctgaacttggagctagggcaaaagaatt

SEQ ID NO: 76625 - DNA, 90 bp, Homo sapiens
ggacccgcagcagagacgacgcctgcagcaaggagaccaggaaggggtgagacaaggaagagaacctggagctggttgaaaaaggcttca

SEQ ID NO: 76626 - DNA, 89 bp, Homo sapiens
aaagaaatctactcaagaacggtttgcgctgaaaattcttcttgatcgtccaaaagctagaaatgagctgagatctgtatctgtggacc

SEQ ID NO: 76627 - DNA, 142 bp, Homo sapiens
ggcagctggagatgtccgagcccaaggcaattgatcccaagttgtcgacgaccgacagggtggtgaaagggcaccatgccggtggaaaggatgcgcatgcgcccgtggctggaggagcagataaactccaacacgatcccgg

SEQ ID NO: 76628 - DNA, 95 bp, Homo sapiens
tcagtacgccacctactattacccccagtatctgcaagccaagcggcaacctttggcactgcatccatgagcatgcccacaggattcggcactcc

SEQ ID NO: 76629 - DNA, 90 bp, Homo sapiens
cattgaattttgctactcagataaaagggagactcatgcatctgtatgccgtgtgcgtggactgcctggaaggggttcacaagatcatct

SEQ ID NO: 76630 - DNA, 98 bp, Homo sapiens
gatggtgctggccacttgcttgggatcctttatcctggtcatcttctatttccaaatgccctctggtggtcagaagatgctgtgctgtctcgttagga

SEQ ID NO: 76631 - DNA, 75 bp, Homo sapiens
cccagacctgcagggttcgtggataataaactcaagcagcgagtcatccaggtgattatcctgaaccatccaggc

SEQ ID NO: 76632 - DNA, 98 bp, Homo sapiens
accgtgctgatcttcgatgagctctcggattccttatgcagagtggccgacttggaggccatgctctaccacaaccagaccgccgagctgcgggagct

SEQ ID NO: 76633 - DNA, 90 bp, Homo sapiens
gaccacctcctgctctgggaccggaggagacatcggcctctgcaggcttgccgaagaagggagaccagtatgatgtctgtgccatttgcc

SEQ ID NO: 76634 - DNA, 113 bp, Homo sapiens
gaatgatctggcacgggaccctccagcacagtgttcagcaggtcctgttggagatgatactcctacctcctctttagaatcttccagtagcatagaacaagagaaatacttgc

SEQ ID NO: 76635 - DNA, 74 bp, Homo sapiens
gaccattccccggttttattatagggtcctgaggcacgtgaatggccaggatcagattgtgcccggcctgtacg

SEQ ID NO: 76636 - DNA, 75 bp, Homo sapiens
ggcagcaaaatgagctcttcagaagagggtgtgtccgcagccggccaggtggtatccctgaaggtgtggctgatt

SEQ ID NO: 76637 - DNA, 75 bp, Homo sapiens
agcctgttccagaactgctggaagctgaggttgcctgcggacacgctgggcctctgtcctgatgctgctgagctc

SEQ ID NO: 76638 - DNA, 100 bp, Homo sapiens
gccagaatgtactactgattcttcatccagcaaagagcacacatcatcatctgctattccaggaggtgtggatattatgatctaccgctaccagtctcat

SEQ ID NO: 76639 - DNA, 100 bp, Homo sapiens
gagccgccagcgcgtttggctgtgacctgacggagtatctggaaagctcgggacaggatgacttaattcagtgcacaaatgagatgaatgtgaacatccc

SEQ ID NO: 76640 - DNA, 98 bp, Homo sapiens
taaaacgcggtagctaaactgcagccaactttggttgtgtgtggaaaaggctttagccatggacaggctcagatgaagttgaagcatgctcaacagga

SEQ ID NO: 76641 - DNA, 100 bp, Homo sapiens
gtggtggtccaccccctggtgctgctcagtgtggtggatcatttcaaccggtaaatgaaattgcctttataaatacccttgaagcccagaataaacgtca

SEQ ID NO: 76642 - DNA, 103 bp, Homo sapiens
acaagtttgcagatcgggagcgcaaggtcgccctcaaggccatgatcaaaaccgtccgtctccaagagagtatgaagagagtgcgtctgtagggcagggaaga

SEQ ID NO: 76643 - DNA, 98 bp, Homo sapiens
cccccgggaggagcagaactttgagggcgaaggggccttgtggcggggagacaaccccttccccaagaatgctgatgggactatatgctacgactcca

SEQ ID NO: 76644 - DNA, 50 bp, Homo sapiens
tgtgctttctgtcccagaactccaggtcgttccaggggtagaggaggcat

SEQ ID NO: 76645 - DNA, 75 bp, Homo sapiens
aaacaagctatgtactctagcactgacacgtttacccacttgaaacagtgtttggtgtataaaacagaccaagct

SEQ ID NO: 76646 - DNA, 82 bp, Homo sapiens
tttctcacgacgggccgagcctgccactttaccggtattgtaagaacaagccgtacccaaagtctcgcttctgccgaggtgt

SEQ ID NO: 76647 - DNA, 76 bp, Homo sapiens
cacgggatccagagcgccgcgcacttcgtcatgttcttcgcgccctggatttttagactctgaggagcagttggag

SEQ ID NO: 76648 - DNA, 75 bp, Homo sapiens
gccaagtatccgccagtcaataggaagtacgagttctatcaggtgtttgaaagtgtggctaagaagtatgatgtg

SEQ ID NO: 76649 - DNA, 83 bp, Homo sapiens
gggtttccaccgttcgttcaagaatccacattcatctcaatggaaggatcctgccttaagtcaacttatttgtttttgccggg

SEQ ID NO: 76650 - DNA, 82 bp, Homo sapiens
catgaacttaggggcacttctgttttcctgagggctacaccgttttcttttgaaagaggtgttggagcgggccggagagaag

SEQ ID NO: 76651 - DNA, 74 bp, Homo sapiens
gccaattgagattcggagttaaaacagagtgtgaacatggctacgcctcttcattcccgtccatgccgagcccc

SEQ ID NO: 76652 - DNA, 97 bp, Homo sapiens
gccggggaacgcgcgctgcgcggactgcggcgccccggttaaacacagtgggaatatcacttttgatgagattgtcaacattgctcgacagatgcgg

SEQ ID NO: 76653 - DNA, 100 bp, Homo sapiens
cctgaacctggaagttgtgctttttaaggttcagtctgcagccctggatgagatgtttcagcagaccgaagatattgtttatcgctatcataaggcagcc

SEQ ID NO: 76654 - DNA, 78 bp, Homo sapiens
atggaatcccttgcatggctctcaggacactccggacgcaggcccggccaggagagttcgtctgcatcgagtgcggaa

SEQ ID NO: 76655 - DNA, 83 bp, Homo sapiens
aagactctgaggctgatatgcaatgtcacttacaacattaatcagatactgcatttaaggttatgaagacagtatggagtttc

SEQ ID NO: 76656 - DNA, 98 bp, Homo sapiens
cctactacttcgtcccagcaccctggctctcggtgaagctcctgcggctgctgcagtgctacccgcctccagaaaccagcctggacaccaagtctgtg

SEQ ID NO: 76657 - DNA, 97 bp, Homo sapiens
gtggctctggccatagcagggaataatttcaatttgaaaacaagtggaatagtgctgtcttccttgctaattatagagatttcttccgtgtcaccag

SEQ ID NO: 76658 - DNA, 82 bp, Homo sapiens
gacttttaaagatgcagaggatgctttgcagaaacttcataaatatatgcagctgactcttcgaggcatgagtgaagcgtta

SEQ ID NO: 76659 - DNA, 100 bp, Homo sapiens
tcctgcacgaaaggctctggaaagatgtggtgatggggcattcttgctaacaacgaacgagctagagcgacagtttcttgaattgctgcagttcaacatc

SEQ ID NO: 76660 - DNA, 100 bp, Homo sapiens
taagcctgatctaacccctagaaacaggagtggaagctggacacactatgtgacttgtatgaaaccctgaccatcacccaggcagtcatcttcatcaaca

SEQ ID NO: 76661 - DNA, 101 bp, Homo sapiens
gaagatggcagttttaaatgtatttgcaaacctggattccagctggcatcagatggacgttattgcaaaggtcctcttcctgatggatgggaacaagccat

SEQ ID NO: 76662 - DNA, 100 bp, Homo sapiens
atgtagcatatatcctaaaggagatggaagtgatgtaccatcatgggtagcctttgataaacagccttggaatggatggctttggccaaccagttggcat

SEQ ID NO: 76663 - DNA, 80 bp, Homo sapiens
ggaagaaaatacaaatcacacgcataatggatgaaaggaaccgacagcaagtaactggcagaagttttggtgataaagat

SEQ ID NO: 76664 - DNA, 75 bp, Homo sapiens
tttgtggggctgaatccgcccgggctacgctcctccatcacgtgaagcctggaatggtcccccctccgccgggag

SEQ ID NO: 76665 - DNA, 73 bp, Homo sapiens
agagttcaaggaggccttccagctgtttgaccgaacaggtgggaaagcagtgccactctccgcttcacagatg

SEQ ID NO: 76666 - DNA, 100 bp, Homo sapiens
cggagggaggaggcaggcgcggctgccggcggctgggactgaagagggacgggtcccgcggcgagcgagctcctgaggaaaaccagtagattcccagaca

SEQ ID NO: 76667 - DNA, 97 bp, Homo sapiens
gatgacttgtcatgcaatcaaaatgaagttgaagcatcaggtgaagaagaattttcttatgggtattctctaaaaggaataaaaacatgcaactgtg

SEQ ID NO: 76668 - DNA, 126 bp, Homo sapiens
aatgaggtagacgaagaagaggaagaaggtggggaggaagaggaggaggaagaagaaggtgatggaattactctgcttaatgtaagcaagctgaacattttgaagcttgctcctggtgggcatgtg

SEQ ID NO: 76669 - DNA, 74 bp, Homo sapiens
gaaggtctctggagacatcttcagcagtgctgccgggccaccactctcggaggacgacaagctgcagggtgcag

SEQ ID NO: 76670 - DNA, 83 bp, Homo sapiens
tcagagctctcaagcatgaacttgcctttaagctgcagatccgccgtcactggggtggcaatgtcctgggtcctaagtctgtg

SEQ ID NO: 76671 - DNA, 100 bp, Homo sapiens
ctttccaggaggctttggagcggctaaaaacctaacccttaggagaaatcttgagagtggacagcaattgtgaagatcgccagagagttctgtgtttcat

SEQ ID NO: 76672 - DNA, 100 bp, Homo sapiens
tgaggccgcggagcgccagctcaatgaaatcattggatttggttctgcacttcttgaagaagttgatcctaatcctgcgaatttcgtgggagctggaatc

SEQ ID NO: 76673 - DNA, 90 bp, Homo sapiens
gtgtgtgcctcatgcctgtttcaatattgggttttggagacattattgtaccaggtggaaccgtcccaaaatgtcccttgctcagaagaa

SEQ ID NO: 76674 - DNA, 100 bp, Homo sapiens
cagcctgccatggcaagggctaaagtgctgtccccggcataggtccatctctgcagaagccatttcaggagtacctggaggctcaacggcagaagcttca

SEQ ID NO: 76675 - DNA, 91 bp, Homo sapiens
gccgagatgccgggggagcggggccttccacaccccctccgtgggtgtgtggaagctcttcgtgggcggtcttgactggagcacgacccaa

SEQ ID NO: 76676 - DNA, 90 bp, Homo sapiens
ggacaagtttgatggatcgccaggctcgtaaactagctaatagacataatcagggtgacagatggagtttcactcttgtcacccaggctg

SEQ ID NO: 76677 - DNA, 74 bp, Homo sapiens
agtggaagcgaagccgaaaaaggcagcagcgaagcacttggattcagcttcttcatttccaacatggaagaaac

SEQ ID NO: 76678 - DNA, 50 bp, Homo sapiens
cagcctcccaagtagctgggatcacaggtgcccgccaccatgcccggcta

SEQ ID NO: 76679 - DNA, 100 bp, Homo sapiens
catgctacaggacacggtgctggccgccggttgcaagcagatactggtgccttgggcaagttacggaagcaatggctaaaggaaagtatctctgatgtcg

SEQ ID NO: 76680 - DNA, 100 bp, Homo sapiens
ccgcccgactgccatcgcccggcccggccgcgcccgcggaaccagaccagacccagtcatggcagcctccagcatcagttcaccatggggaaagcatgtg

SEQ ID NO: 76681 - DNA, 75 bp, Homo sapiens
tttcttcatctacaacccgcgcttctggccgcgggaaggagagctgactggaaataccggcatgcaggattgatg

SEQ ID NO: 76682 - DNA, 78 bp, Homo sapiens
gagaaaccatgagtgtaaggttaccccagagtatagacaggtacaggtttgcagattccgccagcagcacagcaagct

SEQ ID NO: 76683 - DNA, 75 bp, Homo sapiens
cgctgcggagccggaggaggaggggagaggcctggaggacaccaacatggtatattcaagagcaaatgaccaaga

SEQ ID NO: 76684 - DNA, 100 bp, Homo sapiens
agcttgacccgtccatcgctgtggcgggcaaggatgactatgtgaaggcactgcccgggcaactgaagccttttgagaccctgctgtcccagaaccaggg

SEQ ID NO: 76685 - DNA, 75 bp, Homo sapiens
tctccgccatgcaaggctggcgcgtctccatggaggactttgtgttttatgccccacgtctgagaatcaacaagc

SEQ ID NO: 76686 - DNA, 98 bp, Homo sapiens
ttgcctaacgatatctcacctctactcccatgaattcacctttgattccagtgtgaactgtcaatcataaggcatcttcatcccgagctgcgacgagg

SEQ ID NO: 76687 - DNA, 100 bp, Homo sapiens
ggattctcgacctgctaacagaactggaccttttcgaatttacatagtacatgacgaagttaaggataaagcttttgaactagaactcagctgggttggt

SEQ ID NO: 76688 - DNA, 116 bp, Homo sapiens
gatcatggcggatggccccaggtgtaagcgcagaaagcaggcgaacccgcggcgcaataacgacagcccacctgaggatattgaccataaggactcatatctcattacaagaagca

SEQ ID NO: 76689 - DNA, 89 bp, Homo sapiens
ggcgaaggtctcagagctttacgatgtcacttgggaaggtgggaaatacaccaagagtgatttcaaggagtatgaaaaagaacaggata

SEQ ID NO: 76690 - DNA, 97 bp, Homo sapiens
cccactaccatcttccaagatccatctgccttctgcataggccaaacaggaggactgacaaatggtagtggtcgatatatctctgcagcacctggag

SEQ ID NO: 76691 - DNA, 90 bp, Homo sapiens
actatatcagataagcttgacattacagccaagatggtgctgtcccagagacaacgagatgaactgagtctgcactatggaaacaacctg

SEQ ID NO: 76692 - DNA, 75 bp, Homo sapiens
cggcatcttctcctccgactacaagcggaactttatattgctgttggaatatctggagccatccaacatttagct

SEQ ID NO: 76693 - DNA, 98 bp, Homo sapiens
ccgctcttccccacctgcccggtgcccgaggaggcagccaagctcgtagcctgccactccgtgcgactgagcacggaaggcatctaccgggtcagcgg

SEQ ID NO: 76694 - DNA, 100 bp, Homo sapiens
agtgacatgcccatgcgagtacctgaggaagattttgaaatcggaagtagcatcaaggaggatccaacacagatagtatataaggacatggaacagcata

SEQ ID NO: 76695 - DNA, 100 bp, Homo sapiens
tttaccgcaattatggcatcctggccgatgccacggagcaagtgggccaggatcactactcttggaatcaaagataaatccaaatactgcatatcagaaa

SEQ ID NO: 76696 - DNA, 100 bp, Homo sapiens
ctggccagctgccgcgactgggaggagcgccggaacgccgaggcccaggtgcccctgggcgctgggattgctctagcctgtaagtataatggaaaagatg

SEQ ID NO: 76697 - DNA, 100 bp, Homo sapiens
ccgctgctgccgccgccgccgcccagagactgctgagcccgtccgtccgccgccaccacccactccggacacagatgggggctccggaggtggcgcccag

SEQ ID NO: 76698 - DNA, 100 bp, Homo sapiens
ttgtaattaatgcagtaaaacgcttccatatttatccagagaaacctctgtagaggagcaggatgcaaccgacaggctgtggccggacagctgctgccca

SEQ ID NO: 76699 - DNA, 115 bp, Homo sapiens
cggcgggtgtccctaaactagcagtttagggtgtcagagccattttgttctaatagctgtgatgatccaatcaagaaagatgaaatggaagacagtgagatgtcaaggattgaat

SEQ ID NO: 76700 - DNA, 100 bp, Homo sapiens
gcctctacccatctcgggaagagttcagagagcatctggagctaattgtgaaaaatagtgcaacctacaatgggagatgcgctggaacaagggcaccatc

SEQ ID NO: 76701 - DNA, 75 bp, Homo sapiens
tctgttccgcacaggcctgctgaactgggtgctttatataggattcatgatgttgctatcaaaagttgagaaatt

SEQ ID NO: 76702 - DNA, 88 bp, Homo sapiens
ggtttggttttgagcggctgaaggagcctggtgagaagacaggctggctcattaacatgcatcctagttcctatcagactgagattgg

SEQ ID NO: 76703 - DNA, 100 bp, Homo sapiens
gaaaggctggcacgaacatgtcactcaggacctgcggagccatctagtgcataaactaaccactcacgaattcttgtttggtgcccttgctgaactggtt

SEQ ID NO: 76704 - DNA, 74 bp, Homo sapiens
aggcgcagacccacccgccatgaagccccccgcaggcaacagcattattgagaaaagcccttacagaagagtgt

SEQ ID NO: 76705 - DNA, 75 bp, Homo sapiens
acgtctgctcactggagatgacacgtgcgtggggtgttgggccaccagcttgggctccccacggagggcagcaag

SEQ ID NO: 76706 - DNA, 100 bp, Homo sapiens
tcacagagtgcaccgtatcctgtcacttctggatgtgaggagggaattgtcgagaatcttttcaaatgggcccgagaggccgatcaaccattgaggacat

SEQ ID NO: 76707 - DNA, 82 bp, Homo sapiens
ctgcctccgggcacacccggctccccggacgcctcgcttgttctaaagacgaaggggaactccctagtgctacaggctgttt

SEQ ID NO: 76708 - DNA, 101 bp, Homo sapiens
cagggaaaggggaaatgagttcaccagaaaccaacaggcagcacaggaggaactgtggctgcaccatctgtcttcatcttcccgccatctgatgagcagtt

SEQ ID NO: 76709 - DNA, 90 bp, Homo sapiens
gagccagaggtgatccctgggcctccatcagagagccctggcatgctgactaagctccaggtatttgactggaatggttgacaaaaggac

SEQ ID NO: 76710 - DNA, 101 bp, Homo sapiens
gcggggcgcgtttaagagctgcgggccgggtgcggacggcggaggcggcgggactggtccctgcaacatggccaacgccctggccagcgccacttgcgagc

SEQ ID NO: 76711 - DNA, 75 bp, Homo sapiens
gaaagtttgaagaaagtgaattacatcaaaatcttggttttaaaatcaaagatgggaaaatcggagaaaattgcc

SEQ ID NO: 76712 - DNA, 100 bp, Homo sapiens
agaaactccctctggtgatgatttcaggttcaagggcagcaggaaagacgagatcctgggcatcgccaacaaccgactgatccgcatcgacttggccgtg

SEQ ID NO: 76713 - DNA, 88 bp, Homo sapiens
cccgaggaggcagccaagctcatggcctgccactgcgtgcacaatgcagatcttcgtgaagactctgactggtaagaccatcaccctc

SEQ ID NO: 76714 - DNA, 100 bp, Homo sapiens
taacagttttacgatttaaaacttcgccagaatttattgcccccgaggaattagcacttgttcacaacttgaggaaaatgatgaaaaatgattgggtaag

SEQ ID NO: 76715 - DNA, 50 bp, Homo sapiens
gttcaaagtactcaagatgaatttgaggttggtcaaagaaaaagtgatgt

SEQ ID NO: 76716 - DNA, 96 bp, Homo sapiens
cagagctttacgatgtcacttgggaaggcggatggtgctacaagtgatgaccttgatttgcatgatgatcgtctgtcctacctgtcagctccaggt

SEQ ID NO: 76717 - DNA, 98 bp, Homo sapiens
agccggtctatggactttccgaagacgaggtgccttatgtggatttggaacaccaaggaacctactggtgtcatgtatataatgatcgagacagtcaa

SEQ ID NO: 76718 - DNA, 100 bp, Homo sapiens
atggaaaagttaaagtctgggatgagattcaatgaagtggccgcacagtatagtgaagataaagccaggcaaggggtaccaatgaacaagccattcagag

SEQ ID NO: 76719 - DNA, 50 bp, Homo sapiens
tgctgaagatggccagatccccttgtctgtatgagtttaaagccaagaac

SEQ ID NO: 76720 - DNA, 82 bp, Homo sapiens
caaccgcaacatcgaccagaccatgctctccatcctgctcttcttccacagagaggaagaagctattcagttggatggatta

SEQ ID NO: 76721 - DNA, 83 bp, Homo sapiens
gctccggatggctccgcaagtcccccccggagaaaaagttgaagcgttatctgacatagcccagagatacaggataagcaaat

SEQ ID NO: 76722 - DNA, 101 bp, Homo sapiens
tattcttggacaagtacactggtgacatgtagctgtattcagaggtcttaaagaaagtgcagaagagatggtcaaaaacaaattggaaggaaaggataaac

SEQ ID NO: 76723 - DNA, 75 bp, Homo sapiens
cgagatcatcttcgttagtgcagacaggtgccgtgagcgatgtggagatgcaggaacactatgatgagttttttg

SEQ ID NO: 76724 - DNA, 75 bp, Homo sapiens
gctttgaagtgggagcccagttggaagcccgggaccgtttaaaaaactgcgtggagattggtgaaagcgtgagag

SEQ ID NO: 76725 - DNA, 100 bp, Homo sapiens
catcctctcggtgttcccgctggcggcgggcatcttcttcgtgaggctgctcttcgagcggttgattcttcaccacactgaaaccattaggaaaaatcct

SEQ ID NO: 76726 - DNA, 75 bp, Homo sapiens
cagggagtgctctgttcacggctccatcgctgttaatgtgttttcgcattataacaaggacctgttgacagagca

SEQ ID NO: 76727 - DNA, 76 bp, Homo sapiens
ggaagtgcctatccaccgtgttgcagatatatctgggacatggaaggtctttaatgtaactttaaatggttcacca

SEQ ID NO: 76728 - DNA, 82 bp, Homo sapiens
gatgatggaaatgaagtataataccaagaaagccccacttggcattaagggatcattgcaagagcagcgtgactgacattat

SEQ ID NO: 76729 - DNA, 74 bp, Homo sapiens
gtcctcttgttggagttacatctactcctggaacagggcctgctttcttccccgggcgatgtgcagagatcttt

SEQ ID NO: 76730 - DNA, 50 bp, Homo sapiens
cccgtttttgctgaggatacaccagggcgtgatggtgggcatgggtcaga

SEQ ID NO: 76731 - DNA, 100 bp, Homo sapiens
cctgaggctgctggtggagctgaacaagatccctaccgtgcgcgccttccttttgctctactgagatgaagaaagaaaaagaatacctgctcagctccag

SEQ ID NO: 76732 - DNA, 74 bp, Homo sapiens
gttggcggcctcctcgtggagcggagcaaggattgggagtatgtatttaaaaacagtgaattttcatcaaagca

SEQ ID NO: 76733 - DNA, 75 bp, Homo sapiens
gtcagcaagggcacctgcgagcaagaggatggggaggcacgtgagagggatgaaatccggcatgacaggcgaaaa

SEQ ID NO: 76734 - DNA, 75 bp, Homo sapiens
gtgcgctgctcaaggacacggtctacaccgacttcgacggttcgtgctggccgtgggcagcgccgtctttgatgc

SEQ ID NO: 76735 - DNA, 100 bp, Homo sapiens
tccaaaagccatgaagagattaatggcagagtgcctcaaaaagaaaagagatgagagaccactctttccccaaaacgatgccaacgggactgcaaagccg

SEQ ID NO: 76736 - DNA, 49 bp, Homo sapiens
ctcaaggccatgatcaaaacactcaaagtcctctggctcacagcctctc

SEQ ID NO: 76737 - DNA, 100 bp, Homo sapiens
tcggctttggatctttcttaggaattattggcatcaacttggtggagaatagaaggcaaatggcacaggcccaggctgaagaggaaagacaagagccgcc

SEQ ID NO: 76738 - DNA, 100 bp, Homo sapiens
aagagccctcccaaaggatttgatacgactgccataaacaaaagctattacaatgtggtatagctgtggaccaactgtatatgatcatgcgcaccttggc

SEQ ID NO: 76739 - DNA, 137 bp, Homo sapiens
ttaaaccatttcttccctttcctcttgacactgcagctgcagtcaacctcttccccaatttcaatgcgctgcttttctaacccaaactgtatgtcttgatgacactacagtaaagtttgaaatatgggatacagctg

SEQ ID NO: 76740 - DNA, 82 bp, Homo sapiens
gtacaaaaattcttcaagaaatctaaggccgccaggctaccccaatatgaatcaagggggcatgatgggaactggacctcct

SEQ ID NO: 76741 - DNA, 100 bp, Homo sapiens
ccacactatttatatcaacaacctcaatgagaagatcaagaaggatggtttaagaattgtttaagctgcatcaatggagcacatacagggagcttggaag

SEQ ID NO: 76742 - DNA, 101 bp, Homo sapiens
gttgtccaacagaacgacctagtatttgaatttgctagtaacgtcatggaggatgaacgacagctcctctggtgcaagtgtggtagctattgacaacaaaa

SEQ ID NO: 76743 - DNA, 73 bp, Homo sapiens
cggttcctgggcccacgctaccgggagctggtcaagaactgccatgaagctcatgactgctctggtgaatgtt

SEQ ID NO: 76744 - DNA, 129 bp, Homo sapiens
cgtccccgctgcgggtggcggtggtgtgctcgagcaaccagaaccggagcatggaggcgcacaacatcctcaggtctcctctgagcctccggcctccataagacccaaaacagatgacacctcttccca

SEQ ID NO: 76745 - DNA, 75 bp, Homo sapiens
ccggccaccagcaattgtccggtgaaaggtgtagcagtcactcggcctacacccacagcatcgaccttgtgaacc

SEQ ID NO: 76746 - DNA, 100 bp, Homo sapiens
ctagtatcggacatgatcctcatcttttatacactcttagtgctgtccaggatctcttatacagacgcaccaaagccctcattgactatgagaactcaaa

SEQ ID NO: 76747 - DNA, 95 bp, Homo sapiens
cggcttggagaggccgagggtttgatgaaggtggaggcagcgcggctctcagcccccaaatacatcaagatgtttgtactggatgaagctgacga

SEQ ID NO: 76748 - DNA, 83 bp, Homo sapiens
cggattcgccgaggcaccgaggcactcagaggagactcggagccgtgggtcccgactgaacatcatcatcatcgctgagggtg

SEQ ID NO: 76749 - DNA, 74 bp, Homo sapiens
tggaactgtgtttgggagcctcatcattggttatgccagccagcagaaaactgagcttccggtcacagagaacg

SEQ ID NO: 76750 - DNA, 75 bp, Homo sapiens
tccccacatcaatgcactgccaatgattttatttggagagaagcaagcatctttgcctctttggagtaggaaatt

SEQ ID NO: 76751 - DNA, 98 bp, Homo sapiens
gacacagtgatgaagaaagtgttagaaacagtagtggagaatcaagacattagaccagctcccactcaccaaccctgagcattttggcactccagtca

SEQ ID NO: 76752 - DNA, 74 bp, Homo sapiens
gctatgaagactgagaattgtgtggccaaagtttacggggtgaaaatagacttttaaaaattctcttaccttag

SEQ ID NO: 76753 - DNA, 90 bp, Homo sapiens
cagacagtgagtgctaaaggcccccctgaaaaacggatgagacttcagtttgcccaaaggaccagccaaaacctcacctcaagccacgca

SEQ ID NO: 76754 - DNA, 75 bp, Homo sapiens
caggtggcgacggcagaggaataggcatgaagccttcgtctcacagctgcatgcgtagtcactgttgaagcaaat

SEQ ID NO: 76755 - DNA, 75 bp, Homo sapiens
gaagaaaacctttgaccatgaagagaaatgagatgatagccaaaccctcagatgccggtggccgtgggtccctac

SEQ ID NO: 76756 - DNA, 74 bp, Homo sapiens
ccacgtctgtctggtgataccaggggcagagggaccactctgacaggttattttgtccacaaatattgctgaaa

SEQ ID NO: 76757 - DNA, 51 bp, Homo sapiens
cctgaaccgcgcggccgaaccctccgaacacagatatgtagaactcttctt

SEQ ID NO: 76758 - DNA, 50 bp, Homo sapiens
ccctcctccccggcgcctcccaggtcccacgacagtgatgtccgagggcg

SEQ ID NO: 76759 - DNA, 75 bp, Homo sapiens
gtgagagatggaacccgaagaagaaaggattcgttacagccagagattgcgcaagcaccaggaaatccgagccat

SEQ ID NO: 76760 - DNA, 97 bp, Homo sapiens
ctatgatatccataccctgcggcaggttcgaagggaagtaagaaacagatggaagtgcatcttagaagatttaggtgtgattgctgctgtggccatc

SEQ ID NO: 76761 - DNA, 111 bp, Homo sapiens
cctgttccctgtgagctgcctggtcctgctgcaggtggcaagctctggttttgccagatcgaagtcatcctaaactgctgatgagtggaggtgggggttatcttctctccg

SEQ ID NO: 76762 - DNA, 96 bp, Homo sapiens
gccctgtcctgcgcgagtggagctctgaagaagctctgagcggagttgtgttcttccccaggttgaaatcacaaagattagacacctttttagata

SEQ ID NO: 76763 - DNA, 101 bp, Homo sapiens
atgaattgtgaaagagagcagctaaggctgtctgaaaacgtggtgaaccgcatgaaggagcccagctctccaccccctgctcccacatcttctacctttgg

SEQ ID NO: 76764 - DNA, 48 bp, Homo sapiens
agagctgaggactgcctgtttgcagtgatccgggccaaggtggtgggg

SEQ ID NO: 76765 - DNA, 75 bp, Homo sapiens
aaataatgaaaatgttagaccaccctcacataatcaaactttatcaggaggtgaagtgaaatctgcaagagtcct

SEQ ID NO: 76766 - DNA, 93 bp, Homo sapiens
gaccggcgtccccggcgcgaagaggctggactcggattcgttgcctgaggaattgaatgatctggcacgggaccctccagcacagtgttcagc

SEQ ID NO: 76767 - DNA, 100 bp, Homo sapiens
attggccagtatgaagtggtgaaggagtgtgtgcagcgatcgggcccgggacacccagacagatgagattgtcgcactgaagaaggtgcggatggacaag

SEQ ID NO: 76768 - DNA, 82 bp, Homo sapiens
gcgacccggtgtgtggcgcgcccagagccccgcgtttcagccctagggaagcgtgagtgcatctccatccacgttggccagg

SEQ ID NO: 76769 - DNA, 51 bp, Homo sapiens
cacagacccccagcccgcccaactcgtggtgggagcacccctggaggtggt

SEQ ID NO: 76770 - DNA, 82 bp, Homo sapiens
ctgtcctctggtgagaaggtggtgaggcttcccgtcatattccagcactattcctgatcagagaactccagttgcttcaaca

SEQ ID NO: 76771 - DNA, 85 bp, Homo sapiens
ttcccgtccgttccgatgaaggaagaggttctgaacctgttaagcagattggttaaggtgtttgatttcaccaccatagacttga

SEQ ID NO: 76772 - DNA, 90 bp, Homo sapiens
ggaaagtctggactggctccccgtgtggatcaggagaagtgggcccagcgttcattcagcatcggcgtgtcataagatccatcacagctg

SEQ ID NO: 76773 - DNA, 100 bp, Homo sapiens
caactgttcatcctcacctatgcaaagaaagggaagctattgctgggattttgaggagcggagctccctgggtcctcagcagtgaggctggcctccctgc

SEQ ID NO: 76774 - DNA, 100 bp, Homo sapiens
aggttctgaatcccatgctgggcaggtactaaagaccagactggctataggtaaaactggagagtattcagggattattgattgtggcaagaagcttcta

SEQ ID NO: 76775 - DNA, 100 bp, Homo sapiens
cagaagctcctcacagagtatgtgtcaggtagctacagcaagctgggtagcaggcagatccaaaggatatcatgaagtttccagggcctttggaaaacca

SEQ ID NO: 76776 - DNA, 100 bp, Homo sapiens
ataatttctttctcgctgatcgcctaacttctactgacgaagcttggaagttgcagaagatgatgtgatgccagccacttactgtgaaattgatttagat

SEQ ID NO: 76777 - DNA, 100 bp, Homo sapiens
tttaaaccagattagccagatctccatgaagtcgccacagctgattttggtgaatatggccagcttcccagagattgaaaaggctgtggtgtctcagcgc

SEQ ID NO: 76778 - DNA, 50 bp, Homo sapiens
accagcatggacgctcgccgcgtgccgaccatggtgaatccgggcagcag

SEQ ID NO: 76779 - DNA, 100 bp, Homo sapiens
gatatcctgacggccatcgccgccgacctgtgcaaggcaatgcggtgtgcagagggtgcttggtggttctctcctgatggccccgcagggtctgcagcct

SEQ ID NO: 76780 - DNA, 75 bp, Homo sapiens
agagagaccagacctgcaagctctttgacacacagcagttcttgtcaggtgtgtgccctcttcctgattctggag

SEQ ID NO: 76781 - DNA, 82 bp, Homo sapiens
gcggcgcccggatgggcagctgaggactttccttatcccagttgattgtgcagaatacactgcctgtcgcttgtcttctatt

SEQ ID NO: 76782 - DNA, 75 bp, Homo sapiens
cacagaaactatatgccaccatggagaagcataaagaggaaattttaagacttcaagaagagaatgagaaattga

SEQ ID NO: 76783 - DNA, 100 bp, Homo sapiens
tggcagccaaaagattgaaggaaggtgatacaatgatggggcagcaagtggccaaaatcctcactatggatgggctcattgaggacattaagcatcggcg

SEQ ID NO: 76784 - DNA, 98 bp, Homo sapiens
aagatccttcaggtgctggaaaggaatgaggagttacagagggccgagaaggacaggatcagacccaacatgagtgaagtttcctgcaagaaacggga

SEQ ID NO: 76785 - DNA, 96 bp, Homo sapiens
actgctagctgagcaaggttcgaaggaaggacctcagaaatgttctgccagcgcaaaggtgtggttacagaggaggctacatggaggtgatcaacc

SEQ ID NO: 76786 - DNA, 100 bp, Homo sapiens
ttcgtctccgagtttgcgactcgcggaccggcgtccccggcgcgaagaggctggactcggattcgttgcctgaggaattgccccccactgcctggatgag

SEQ ID NO: 76787 - DNA, 108 bp, Homo sapiens
cctgtaaatgtggtgtttctcctagctgtgaactgtgtcctaatcaggatggaattttcaaggagacagatgctggaagaaacatgattcccgtgacagaattccggc

SEQ ID NO: 76788 - DNA, 90 bp, Homo sapiens
gagatatcatgctctggaattttggcatcaaggacaaacccaccttcatcaaagggctgaggagccaaaggagaagtcctctcggaaggt

SEQ ID NO: 76789 - DNA, 82 bp, Homo sapiens
tgatggccgctttctcggtcggcaccgccatggtgttggtaaatcatgcttattgctacagtttacagacaagaggtttcag

SEQ ID NO: 76790 - DNA, 80 bp, Homo sapiens
tgagctgcctggtcctgctgcaggtggcaagctctgataccacttgaaagatgtcattgtagggaagatatacttcctgc

SEQ ID NO: 76791 - DNA, 50 bp, Homo sapiens
tcccgagcagcgtcatgtacccctctacagcctccgcttggcgtcccgat

SEQ ID NO: 76792 - DNA, 82 bp, Homo sapiens
ctttgactactggggccagggaaccctggtcaccgtctcctcagtcaggatggctaaaggtgaccccaagaaaccaaagggc

SEQ ID NO: 76793 - DNA, 99 bp, Homo sapiens
aacctgggctggaaccttgcccagcacaggtctgtcagtttgtcgtctctgtcaacgggctcaatgtcctgcatgtagactaccggaccgtgagcaatc

SEQ ID NO: 76794 - DNA, 80 bp, Homo sapiens
aggaaccggcggagggagctgaccgaccgactccaggcgagcactacaaacaccactggtttcccgaaaagccgtccaag

SEQ ID NO: 76795 - DNA, 90 bp, Homo sapiens
gtcatatatccttcatatgatccatcttagtgaagaattaggatacaggtgtccttgtagacttgggtctggaggaaaatgggacagccc

SEQ ID NO: 76796 - DNA, 83 bp, Homo sapiens
gccgtgccctggggctgagccctcaggggccaaaccagtgctcctgccacctctctggctgccccctagagcctgcccatccc

SEQ ID NO: 76797 - DNA, 75 bp, Homo sapiens
gaaaaaagtggagccatggaaagaacaattctttgaaagctactatgggcagagatgctgtcattttttcagggg

SEQ ID NO: 76798 - DNA, 100 bp, Homo sapiens
aacaagggagctacaagttggcctgaattctacattgatcagctcaattccatggctgctgtggaacgagaactttgttcagccacagctgaatttgagg

SEQ ID NO: 76799 - DNA, 83 bp, Homo sapiens
gggcctcgccgccgcggcctctgccagagccaggttggggtgactcagtgggaacgccatctgagcggggcatgacctatgac

SEQ ID NO: 76800 - DNA, 75 bp, Homo sapiens
ctaaactgtgtggggcgcggatgggatccagctgttagtcgggttccaccccgatgcaggtggtcacgtgcttga

SEQ ID NO: 76801 - DNA, 103 bp, Homo sapiens
ttcgtctcttacgtctgcggaagtgcagctgcctcagttcttagcgcaggccaggaatagttgctgaacaccccaggcctgctgaggtccctccttgagtctc

SEQ ID NO: 76802 - DNA, 90 bp, Homo sapiens
caaccactgtgtgttttcagcaaatgaagatcatgaaaccatccgaaactatgctcagctattcctctacacagccgactagttatgatc

SEQ ID NO: 76803 - DNA, 75 bp, Homo sapiens
atctgctcagacaagactggtacacttacaacaaaccagatgtcagtctgcaggtgagttattctccccacctca

SEQ ID NO: 76804 - DNA, 98 bp, Homo sapiens
gaagatcttgctagtgccatagggtctttaaaggaaatctaaagagaaaaattacttcgtcaccgtagtacatccgctgagacacctgaggcgtggaa

SEQ ID NO: 76805 - DNA, 74 bp, Homo sapiens
tgagaaacaggacatacctttcgtagagctgtgattgggttattatacccctgcattgacagacatctaggaga

SEQ ID NO: 76806 - DNA, 99 bp, Homo sapiens
tcctgctgccttcccgtcgccgctcccgaagcttttccaggtgctggagaatctggtaaaagcaccattgtgaagcagatgaggatcctgcatgttaat

SEQ ID NO: 76807 - DNA, 90 bp, Homo sapiens
cgcggcgagacggagacggaccgagccacgggcccccgcggccgcagcatctcggaggaagagcatcagtgatgtcacgtttggagcagg

SEQ ID NO: 76808 - DNA, 82 bp, Homo sapiens
tcgggcggtggtgatctctggtgcaggaaaaatgttcactgcagatgtggcaaaatctggcaaaggcagagaccaaacttca

SEQ ID NO: 76809 - DNA, 50 bp, Homo sapiens
tttcaaaagtgatggttattacaattctttaaggaaaaacagtagtgctc

SEQ ID NO: 76810 - DNA, 73 bp, Homo sapiens
cgacggcaccctcgtctccttcaccgccgacttcaagaagattgtaaaccatggctgtgtggatacaagctca

SEQ ID NO: 76811 - DNA, 94 bp, Homo sapiens
ccattcatgcttcccagtttggcagatgtgagcaaactatgtataggaattccaaaggtgaaagtgggagatacattggatcttctcattggag

SEQ ID NO: 76812 - DNA, 98 bp, Homo sapiens
gggggttccatctcccaacttgtccattttctttcaagatggcttgaaaacagctgataagttgaaacagtacattgaaaaactggctgctgatttat

SEQ ID NO: 76813 - DNA, 74 bp, Homo sapiens
ccaaagactgtggaacttttaagtggagtggtggatcagaccaaagatggatgaattccctctgctgacaacca

SEQ ID NO: 76814 - DNA, 117 bp, Homo sapiens
atggaagcaggtggaattatgccctgttggttccaatgctgggattggctgcttttctggccaacagtgttgcaaacaggaacccgaggttttcacttcactgttgatgggaacaag

SEQ ID NO: 76815 - DNA, 99 bp, Homo sapiens
cccaccccaggacagctgagatatgtgtttgaaagatgtatggtgatcttgaaacctccagacacaagaaaacttctagcaaattcaggggaagtttgt

SEQ ID NO: 76816 - DNA, 75 bp, Homo sapiens
gcagcacccgccaccgtcgccggccgcccgcacgtccgtccggaatctgcaagcagaatatgaccgtctaaagca

SEQ ID NO: 76817 - DNA, 100 bp, Homo sapiens
agaggccaaccatccagcagcaatgctgggaacaaaaggagcctgttgcctctttctggctgggaaagtagaagaaacaccaaaaaaatgtaaagatatc

SEQ ID NO: 76818 - DNA, 111 bp, Homo sapiens
cccggccgctctgggcgactgtgctggcgctgggggcgctggcgggcgttggcgtaggagactgtacaatttgttcaaggaatttttgtagaaaaatacgatcctacgata

SEQ ID NO: 76819 - DNA, 98 bp, Homo sapiens
gagagggggcgagcgaccgagcgccgcgacgcggaagtgaggtcaaaatgcagatcttcgtgaaaacccttaccggcaagaccatcacccttgaggtg

SEQ ID NO: 76820 - DNA, 95 bp, Homo sapiens
ctttcgacattggagtgcttcattaccacgagataggcaatacgaaaggctcgcatgtcttgggatagagagtcgacagaaattcggtaccgtag

SEQ ID NO: 76821 - DNA, 76 bp, Homo sapiens
atcttctccctggacctcgtgcatacgatggccgccctgctcccccaatgaaaggccagcttcgaagaaaagctga

SEQ ID NO: 76822 - DNA, 100 bp, Homo sapiens
agatcacccagctggcccggcccctgcctgtggagtatctcatcatagacgtcgcaatggaagaagagatcgccgcgctggtcattgacaatggctccgg

SEQ ID NO: 76823 - DNA, 90 bp, Homo sapiens
ctaaagcagtactacattggtgatatccatccggtccggtttatcactaaaatatggcatcctaatattagttccgtcacaggggctatt

SEQ ID NO: 76824 - DNA, 75 bp, Homo sapiens
gatggaatccgtagcgcccagctcattgcctcagctaagacagtcattttgtttactcattcagccctgttgcag

SEQ ID NO: 76825 - DNA, 100 bp, Homo sapiens
aatgtgcccttcaagcgcctgtctggtcccctctgagccctctcaccttgtcctgtggaagaagcacaggctcctgtcctcagatcccgggaacctcagc

SEQ ID NO: 76826 - DNA, 98 bp, Homo sapiens
actgggcttcctgctggccaccaccatggtgcccactgctgcgcttgccaagcctcatgggccccgtggagacctttggcgacttggcctttggcgac

SEQ ID NO: 76827 - DNA, 95 bp, Homo sapiens
ctttaagaaaggaatgaacatgtatttaaccaagttccaacaaaagaatgctgccgcagagttgatctctctaatgtattagatcttcatgcctt

SEQ ID NO: 76828 - DNA, 83 bp, Homo sapiens
aggcgagattgcctgacccaggcctgctcggccctcacaggcttattgcaggagtgaccaggacactacctcctagaagtaat

SEQ ID NO: 76829 - DNA, 51 bp, Homo sapiens
ggagcccccagcgcagcggccgcggtgaagattttactgaagtacatcaga

SEQ ID NO: 76830 - DNA, 87 bp, Homo sapiens
cgcaagctgagcgagctgtcagagcccggggacggcgaggccctcatgtaccacacggtgctggtgaatctggtaaaagtacaattg

SEQ ID NO: 76831 - DNA, 89 bp, Homo sapiens
cccagccctctgttgaaaaagagaacttggcaatagaaagtcaatcgtatgtgtgtaaagcacttcaagagttatacggtgttaattgc

SEQ ID NO: 76832 - DNA, 100 bp, Homo sapiens
aaaaacaagagtccctctaaagcagctcaaaaggcagaagctcctcctggggtagagacagatcttattgatgttggattcacagatgatgtgaagaaag

SEQ ID NO: 76833 - DNA, 83 bp, Homo sapiens
cagaggtgtgctgacgacctgctacaacagaaaagctccaccatgaggcgaggtggatggaggaagcgagctgaaaatgatgg

SEQ ID NO: 76834 - DNA, 75 bp, Homo sapiens
tcggtcaaggtggccgtgagggtccggcccatgaatcgcagaactgataaatttcaaacggaagagagtggcagc

SEQ ID NO: 76835 - DNA, 100 bp, Homo sapiens
ccaaatcgtggccccttcgacctgcgctccgcgctctggcgctacggtctggccgtcggctgcggcgccatcggccaaacgtaccaagaaagtcgggatc

SEQ ID NO: 76836 - DNA, 82 bp, Homo sapiens
agattcgcagtggtcgcttcttctccttggtggccttaatttgagccccttaaaatttctggtttttgactggaactggaga

SEQ ID NO: 76837 - DNA, 50 bp, Homo sapiens
gacatcagccacgcatctgaccttgttggcccaggtgaccaagctcggcg

SEQ ID NO: 76838 - DNA, 75 bp, Homo sapiens
tcaaatcgagtcactgtcaagttatacattggctcttcaaagacgttcacctcatcagagaaatccctgactcct

SEQ ID NO: 76839 - DNA, 75 bp, Homo sapiens
gatgctgatagtctccagcgggcctggactgtgggctggtgtgtggaactggaattgaatgatctggcacgggac

SEQ ID NO: 76840 - DNA, 96 bp, Homo sapiens
cagctgatccccaccttgctgtccccccaggacctggggccccccgggggctcagccccaggccctacacggaagattccaagaaaggtggtgtat

SEQ ID NO: 76841 - DNA, 100 bp, Homo sapiens
caaaagcaagcttgctgaaggggaggaagaaaagccaggtgatctcttcagcgtcctggacttcccattcctgtacttctacagattccatggtagctgc

SEQ ID NO: 76842 - DNA, 75 bp, Homo sapiens
aggggtgccccattgcagaaagccactctgggtctgaggtcaccaagcctcctccttgcttggagaactcctcgc

SEQ ID NO: 76843 - DNA, 51 bp, Homo sapiens
tgctgggcacccacggagcctccggggctgaccacctcctccaccctgaag

SEQ ID NO: 76844 - DNA, 75 bp, Homo sapiens
gtctgggcttcatagcattcgcctactccgtgaagaattatacccatctaccaaaagcagatatttttgcgcttg

SEQ ID NO: 76845 - DNA, 50 bp, Homo sapiens
ctctaactatgcagcagacaagggggctggagtgtggtgacactaccttg

SEQ ID NO: 76846 - DNA, 73 bp, Homo sapiens
ggggcgctgctgctggcgctgctgctggctcgggctggactcaggaagccggctttacatggtgagaaccatg

SEQ ID NO: 76847 - DNA, 100 bp, Homo sapiens
acatccgagtgcccaacagacattttgctgctgctacaaaggttcagcggattcctacacaagcaggccgtctgactccgatgtctctttggaagaggac

SEQ ID NO: 76848 - DNA, 75 bp, Homo sapiens
gtcgccgctggagaggggctcggcgcccggcggggactgcagatggtcatcatgggccagtgctactacaacgag

SEQ ID NO: 76849 - DNA, 75 bp, Homo sapiens
ttttaaatcagcttatagttcttttgtaaatctctttcgttttaacaaaggttgctgcagcaactggtcacacag

SEQ ID NO: 76850 - DNA, 90 bp, Homo sapiens
cgcggtagtgccagggggcgaaggcggcggtggtgaggaagggaacaacctatcttcagcactcgagctcatgtcttccaaattgaccca

SEQ ID NO: 76851 - DNA, 75 bp, Homo sapiens
caggcaagctacaaagcctagacctttcagccgctgccgaaatggagaaagttactgttatgagcaccattaatc

SEQ ID NO: 76852 - DNA, 88 bp, Homo sapiens
aagcaagagaaaaagaacattactgtcttgataatcaaatgggctactgatgacatcaaatctcaacttcatttactttggatatata

SEQ ID NO: 76853 - DNA, 75 bp, Homo sapiens
tttttggggaagatttacctagctgccaggaatgcatcctgtcgggcatcatgtctgtgaacgggaagaaggtgc

SEQ ID NO: 76854 - DNA, 50 bp, Homo sapiens
ggtgcctggagatgaagctggaaaggtactgtgactgctttgccagtggg

SEQ ID NO: 76855 - DNA, 100 bp, Homo sapiens
ggacaacctcagaggacaacgaagtgttcggttctaagctggtctatgtccatcaccttcttggagaaggagcctttgcccaggtgtacgaagctaccca

SEQ ID NO: 76856 - DNA, 74 bp, Homo sapiens
ttgccctcatcctggttctggaatcctcagttcaagagccagagcccagaggtggagcagttagggagggttgt

SEQ ID NO: 76857 - DNA, 101 bp, Homo sapiens
ctgacgcctgccttccatttcaacatcctgaagccctatatgaagattttcaatgagagtgtgaacatcatgcatatgatgaacaatggcctcctccaaca

SEQ ID NO: 76858 - DNA, 75 bp, Homo sapiens
ggtccccagcgcagtgaagtggtgagcctttttgtcactggcgatatgaaaggtgaggtctatccatttggcatc

SEQ ID NO: 76859 - DNA, 51 bp, Homo sapiens
cgaagaagctgcagccgcacctggccaaggcttgcattcacaagagatggg

SEQ ID NO: 76860 - DNA, 82 bp, Homo sapiens
taccaagtctcccaacaacagagacagctcatggaatgctgtgtaaatgccctggtgacatcatttaaagagactatcttag

SEQ ID NO: 76861 - DNA, 138 bp, Homo sapiens
ttgaatgtctgccgaaatgttcaagtttaccaaaagagaggcaccgctggaacactaatgaggtgacagagctgaatgaacctctctccaatgaagatcgaaatctcctctctgtggcctacaagaatgtggttggtg

SEQ ID NO: 76862 - DNA, 90 bp, Homo sapiens
cggatctcagcggacacaggcaggagcgccccatcatttgacgggggtccactggacggggcctgagctacaacttcacccacctggacg

SEQ ID NO: 76863 - DNA, 74 bp, Homo sapiens
ggacctgggactgctcacagccaggtgctgtgattctcttgggaagaaccaatatgtttcgctttaaccatcca

SEQ ID NO: 76864 - DNA, 100 bp, Homo sapiens
cgccgcctccgccgctgcctcaggagcggaacaacgtcggcgagcggggaatactcccccagttgcaagaggcgcaggaccgtggaagacttcaacaaat

SEQ ID NO: 76865 - DNA, 100 bp, Homo sapiens
atcagcttcttcaaagagagagaggttgttgactcgttttgacaggagccattcaagtagcagacaaagtttcttcagggaagagttcagtgcttgtgca

SEQ ID NO: 76866 - DNA, 96 bp, Homo sapiens
tacacgcgagattataagaagcttgggttcattgttgccaacttggcctgttccatctcaaataatgaagaaggtgtaaagcttgttcgaatgtct

SEQ ID NO: 76867 - DNA, 87 bp, Homo sapiens
gagtcatgagcgacagcggcgagcagaactacggcgagcggcctctgaagagccaatccattcaggatgggaaaccacgcaggcaaa

SEQ ID NO: 76868 - DNA, 100 bp, Homo sapiens
acctctgcctccccgcagggcgccttctccctgagtggctataaccggtttgaaacttcaaggggccacgtgcaacaacaacaagctgtcactgtccaat

SEQ ID NO: 76869 - DNA, 75 bp, Homo sapiens
atcaggagcaggacacagaactgggcagtacccacacagcaggaagatgatccctatgatcttgaagatgtttct

SEQ ID NO: 76870 - DNA, 75 bp, Homo sapiens
gaattaacattaaataaagtggatgaagaatttgtgcatgattatgatatgagggtggatgatttccttcgtcgc

SEQ ID NO: 76871 - DNA, 83 bp, Homo sapiens
cggcgggacaacgcctcctcacttgctcctctacggttagctttatacgtctacgaatatttactgcacgtaggagcacagaa

SEQ ID NO: 76872 - DNA, 97 bp, Homo sapiens
gcgcagcaaggctgacgtggagcggtacatcgcctcggtgcagggctccaccccgtcgcctcgacaggtggtcttcaagctgacagagaagctgacg

SEQ ID NO: 76873 - DNA, 101 bp, Homo sapiens
acatggagatgaagaagaagattaacctggagttaaggaacagatccccggaggagaggcagaagaggcctggaccttggcgcacacagacccaggaacag

SEQ ID NO: 76874 - DNA, 82 bp, Homo sapiens
tcggtgccccctgcccgggccctcctgaagaggcggcgctcagacagcgttttgctgctgacatcatctccgttttggccat

SEQ ID NO: 76875 - DNA, 90 bp, Homo sapiens
ttggcgtcatcacgccctaccggaagcaggccaacgtggaacctgttgtgccgtcagaggcttcagagccggtgcccagggtgctttctg

SEQ ID NO: 76876 - DNA, 98 bp, Homo sapiens
acagaaggaggtgcagcctcccccacgtcaccaaaatgctatagttatccatgaagtctatgaagaaggggcagcagccagagatggaagactttggg

SEQ ID NO: 76877 - DNA, 50 bp, Homo sapiens
acagcaggttggacagttcacaggtatcaatataagtgatgaggattttc

SEQ ID NO: 76878 - DNA, 96 bp, Homo sapiens
ccaaccgcgagaagatgacccaggatgcagcagtctcggccctggctgctctatgcagtgaatattacatgaaggagccgggggaggcagatcccg

SEQ ID NO: 76879 - DNA, 98 bp, Homo sapiens
ccatggcgtacgcctatctcttcaagtacatcataatcggcgacacaggaggaagacaatggtcctataatgcccttggataagaaaaggaaactttt

SEQ ID NO: 76880 - DNA, 100 bp, Homo sapiens
gtgaacttaggttccatgatgtgctattctatacttggaccgtttttccccaaagaggtgaccttggagaaggtgctgggaattacagtgtctggaggca

SEQ ID NO: 76881 - DNA, 80 bp, Homo sapiens
gccaaatccaggggaagtagcaggcttgcaatcttcaggacacattcagctaacgtattttagcaggtggagtgaggttg

SEQ ID NO: 76882 - DNA, 99 bp, Homo sapiens
acaggtccatggaacaatcacagatgccacaccacatgaagcccttgccatattacagctatgaccagcctgtgatcgggtactgccaggcccaccagc

SEQ ID NO: 76883 - DNA, 100 bp, Homo sapiens
tgcagacatgatggtgataaggagcctgagcatccagtcagaagtgtcctttgagggagcctatgggaacctcaagcggctgtatgacaaggcagccaaa

SEQ ID NO: 76884 - DNA, 121 bp, Homo sapiens
tggaacgatgccaaagaattgagctgaagcagggctacacatttttcatcccttccgacgtgaacgatcaagagagagggaccatagtagatcacgagaaaagagtcgacgtcataaatcc

SEQ ID NO: 76885 - DNA, 75 bp, Homo sapiens
gagatgatggccgatatgtacaacagatgcatcaccctatacagatgaaacctgctgacagtgagaagaacaatg

SEQ ID NO: 76886 - DNA, 73 bp, Homo sapiens
gtctggagtgaagattttttatggttctcagactggaacagcgaagaggtcctgggcctatgtcaagaagtgc

SEQ ID NO: 76887 - DNA, 97 bp, Homo sapiens
ttagagtctgaagttgttaccaatggtgaaactacatgttcagaaagtgatctgtgaaaatggttcgctattcacttgacccggagaaccccacgaa

SEQ ID NO: 76888 - DNA, 96 bp, Homo sapiens
tttgccattttcttatggagaactgtccttgtttttaatcccatggaatcaatcaaattaaatcatcatgactacattgattccccatcgctgaag

SEQ ID NO: 76889 - DNA, 100 bp, Homo sapiens
aagttcacatcaagtccagggttaagtacagaagcttcctgtgcttcccagaattccatcatctgactgccatcctagaaggcattctcatgaggaccaa

SEQ ID NO: 76890 - DNA, 74 bp, Homo sapiens
tcacccaacataactttcaagaggactcagcccaggagagtgttattactcgagatattcatcgtacatttccc

SEQ ID NO: 76891 - DNA, 75 bp, Homo sapiens
ctgcgaacacagtagtggaagatgtaaagcaatatttcgagcagtttggcaagcgctggctgacagagcagagag

SEQ ID NO: 76892 - DNA, 82 bp, Homo sapiens
ggagtagcaagtggccatggggagcctcagcggtctgcgcctggcagcagggcctgacacatttagggaagggcacccttac

SEQ ID NO: 76893 - DNA, 97 bp, Homo sapiens
tgcaagaatatttgtcctcctaaagataccttcgaaaggactcttttacatactcatggtgcttttgaagatgatgatatcacgcacgttgaaggaa

SEQ ID NO: 76894 - DNA, 82 bp, Homo sapiens
tcaatatctgtcttcggtggactccttcggcagtccacccaccgccgccgcctcccaggctttccatctgatggtcccctgg

SEQ ID NO: 76895 - DNA, 100 bp, Homo sapiens
gatttcctgcccggggccctcatggacggttggatcagggccgaagaagacgtgaacgatcaagagagagggaccatagtagatcacgagaaaagagtcg

SEQ ID NO: 76896 - DNA, 75 bp, Homo sapiens
ctacatttagcgcatcatgtgatccggacaattgcagcatgactttcccagggccctgattttcagcacggatga

SEQ ID NO: 76897 - DNA, 100 bp, Homo sapiens
gcgcttccgcaccatcacctccacatgaaggtcaccgtgtccaaagggggcgaccgggacagtgacgacgacagcgtcctcgaagccaccagctcccggg

SEQ ID NO: 76898 - DNA, 75 bp, Homo sapiens
cgagccagccagcaggaaatacagcatctgctcctgtttttcacatccaaggtttctcctccatggcactactga

SEQ ID NO: 76899 - DNA, 89 bp, Homo sapiens
cgggagcttccgggagggcggctcgcaggttagcatggcctcattgaaagaactagatcaaagactctttgaaaattacatcgagttga

SEQ ID NO: 76900 - DNA, 98 bp, Homo sapiens
gctaaagatcctccgacagcgatgtggtctggacaacacaaaggagttaggacctggaaatgtacagaaagaagtctcatcttcctttgaccacgtta

SEQ ID NO: 76901 - DNA, 75 bp, Homo sapiens
gcagaatttactacagcatgtgatttcaggcaatttgaatcaacccatagaagtgacagcgctgtattcatttga

SEQ ID NO: 76902 - DNA, 117 bp, Homo sapiens
tcaaattttcaagtgccaaacggaggaatacctcgtatgcaacctcaggcttcagccaaatactgggatcttcagtggcaggaggagtaatcagaagacggagatgaattttaacac

SEQ ID NO: 76903 - DNA, 100 bp, Homo sapiens
ccgagcgcaccgacatctgcctgctcaaagggggacttgatctcatcttcatgccaggccttgggtttgacaaacatggcaaccgactggggaggggcaa

SEQ ID NO: 76904 - DNA, 75 bp, Homo sapiens
aagccgaaagaggaggtccctacctgccacggataccagtcagatctccagtctggctcagctgccagtggtggg

SEQ ID NO: 76905 - DNA, 88 bp, Homo sapiens
cgagtgggagcaccaggatctcgggctcggaacgagactgcacggagccggcgcacgtgcaggagccaccagtggtgcaggagcagtt

SEQ ID NO: 76906 - DNA, 50 bp, Homo sapiens
catccattgtgggacgtcccagacatcagttccaccaggtgagaagagtg

SEQ ID NO: 76907 - DNA, 75 bp, Homo sapiens
agattctaagtgggaatcatttcagtgttgaagggctccatgccattgttgtgtcagatagagatggagtacctg

SEQ ID NO: 76908 - DNA, 75 bp, Homo sapiens
caaaagtatgttgtaccttgtgacagaatatgccaaaaatggagaaatttttgtgtggattctttaaacgctcta

SEQ ID NO: 76909 - DNA, 98 bp, Homo sapiens
cccagatgataggaatcccatctcatttaggaaccaaccggtgagccctctcctaagagacccaggggaagacccaaaggcagcaaaaacaagagtcc

SEQ ID NO: 76910 - DNA, 75 bp, Homo sapiens
tggcggcgctaggggaacccgtgcggctggagagaggaaccttatgcaaaaatccagatgtaatgaggtggctcc

SEQ ID NO: 76911 - DNA, 100 bp, Homo sapiens
ctgaggattctgtggcagtgcccagaaatgtccagaaggaagaccgcactcctatggctgaagaatacagtgaatataagcacataaaggcgaaactgag

SEQ ID NO: 76912 - DNA, 83 bp, Homo sapiens
tgcacgtcttcaccttcggcagccggctgtacgcacacaccatcgcaggtttggtgcacctcgatttggaggaagtagggcag

SEQ ID NO: 76913 - DNA, 50 bp, Homo sapiens
ctttgggccttccatgtcgtcagcatttttgaaacgttggggttgttgga

SEQ ID NO: 76914 - DNA, 82 bp, Homo sapiens
aggagggttggctgcacaaacgaggaccaagaatcgccttcagccctgtctggtgcatccttggcagaaagtgaggaggaaa

SEQ ID NO: 76915 - DNA, 75 bp, Homo sapiens
aagaaacataaggatcttcattgtgctaaggtgtgatccctcacatccacaaatctctgattggaaagaagggac

SEQ ID NO: 76916 - DNA, 90 bp, Homo sapiens
ccgcgggacctggcgctgcagcgaggtctcctctgagcctccggcctccataagacccaaaacagatgacacctcttcccagtcccccgc

SEQ ID NO: 76917 - DNA, 74 bp, Homo sapiens
ctgtatcttccctgacaagacgacctacccgatagatgagaccatggtcgcaatggaagaagagatcgccgcgc

SEQ ID NO: 76918 - DNA, 75 bp, Homo sapiens
ttttgcttcagcgttctgtggttgtcaacaggagtgaaacacaaatcttttctaacggctgaggactgctttgag

SEQ ID NO: 76919 - DNA, 75 bp, Homo sapiens
cgcagagtggataaagaactgggagaaatcagggagaggcgaattgtttggctccagcagctgctgttgccacca

SEQ ID NO: 76920 - DNA, 75 bp, Homo sapiens
ttttgtcaccgttatgtgggaagcgaatccaggggtgaagccagccagttttgacaaagtagcaattcctgaagt

SEQ ID NO: 76921 - DNA, 100 bp, Homo sapiens
cctcaggcgtgcgcggacggtgtgcgggacctgggaggaaggcaaggtgctcatctttgatgactcctttgagcacgaggtatggcaggatgcctcatct

SEQ ID NO: 76922 - DNA, 99 bp, Homo sapiens
atacctctcactcaaggggaccaaaagggacccccccgtgttcatcccttgtaagggctgttgccaaggcggggcaacgaggaggggctcgcttccggg

SEQ ID NO: 76923 - DNA, 89 bp, Homo sapiens
gggcaacctgcagatcgactttgccgacccctccagagcgatacttggcatatcgaaattttatgattgacacgtatcgtctaaacccc

SEQ ID NO: 76924 - DNA, 100 bp, Homo sapiens
gttcaggaaccaccagtgacagaaactctatggctttgacgtgctcatagattctactctgaagccatggttgttggaagtgaatctctctccttctttg

SEQ ID NO: 76925 - DNA, 74 bp, Homo sapiens
cctcgatccgcccacagacctcaaattcaaaggtttgaaatatctccattcagctggcattttacatcgagaca

SEQ ID NO: 76926 - DNA, 84 bp, Homo sapiens
gcctgcctggccattgcgagcggcatctacctactgggaattgcaacccagtgaagaagttacctggaagtaaagactggctag

SEQ ID NO: 76927 - DNA, 100 bp, Homo sapiens
ggtttgctgagctggttggccctgtgatccctcaagactggtccacggagtgtatgaccacaaacagccatcaagatcagcaattcatgctaaaaaagtg

SEQ ID NO: 76928 - DNA, 82 bp, Homo sapiens
cccgcggccgcaccttcccgccttctcaggaaccacgtgaatgttgagggggcgacacacaagcaggtggtggacctgattc

SEQ ID NO: 76929 - DNA, 100 bp, Homo sapiens
ggtgccagcgcctgcctgcgcgctgctgctgctgtttcccctcacggcccagaactttgaggtggaggctgatgacttggtgaccatctcagaactgggc

SEQ ID NO: 76930 - DNA, 83 bp, Homo sapiens
ttaacattgttaagtttcacaaatattgggctgacattaaagagaacaaggccagggatcataaaaggattcctctgtactag

SEQ ID NO: 76931 - DNA, 75 bp, Homo sapiens
tggaacgagttataggaagatgtagtccaacccacatcagcagggatcgtgggactttaccagatcggtttgtaa

SEQ ID NO: 76932 - DNA, 100 bp, Homo sapiens
ctctcccggccctctcgcgctgcactgtctctccgacgcaagactgtcccggcccgggattctgctggaagaagtaagagtgttcaccacatattttctg

SEQ ID NO: 76933 - DNA, 90 bp, Homo sapiens
taaatgttgagcctttttggcctggcttgtttgcaaaggattaacctccatttcagctaatcatgggagagattaaagtctctcctgatt

SEQ ID NO: 76934 - DNA, 100 bp, Homo sapiens
tggagatgtagtctacgctgacatcaaaactgttcggacttccccgttagaactcgcgtttccacttcagagatctggtgctggagaatctggtaaaagc

SEQ ID NO: 76935 - DNA, 82 bp, Homo sapiens
aaggcgctgtggagttattcttgaagggggaaatttgcagtggtgagaaaatgtataaagaaagattctgggaaagaatttg

SEQ ID NO: 76936 - DNA, 90 bp, Homo sapiens
aagctggaggtggagcagcagaacaagaggcagctggaacggcggttctcttaccacaatttcgaccggagccggcacgacgacgacgac

SEQ ID NO: 76937 - DNA, 75 bp, Homo sapiens
aagcccaggaaacacaggcagcgggatctcaccatcccggagtctagtaccgtgaaggggatgatggccggaccg

SEQ ID NO: 76938 - DNA, 101 bp, Homo sapiens
atggcagtgccctttgtggaagactgggacttggtgcaaaccctgggagaaggtgcctatggagagtgactcccgcggccctccaaaccatcacatgggcc

SEQ ID NO: 76939 - DNA, 82 bp, Homo sapiens
acaggacctgcctaattaccttcaaacctgaagtcttctgggagagagagttgatgaaaatacagaagaaaatcattgtgga

SEQ ID NO: 76940 - DNA, 82 bp, Homo sapiens
tgccaaggaaaaactggagagcttcatcaaaaatagtgatagctttgataaatgaaacgactacaaagtgccatgacagaag

SEQ ID NO: 76941 - DNA, 100 bp, Homo sapiens
ggcctacccgggatacggaggagggcaaatgcagccctgaggatttggctactgcatataacaacagggggcaaatcaagtacttcagggttgattttta

SEQ ID NO: 76942 - DNA, 98 bp, Homo sapiens
aggccaaagaagcagaaatgagcagaaaggagttggggcttgatgaaggcgtggatagcctgaaggcagccattcagatgatgagagtaatgttgcag

SEQ ID NO: 76943 - DNA, 101 bp, Homo sapiens
ttcaagctctggtacacgctggacagagcccctgaagaaagaagcttccggttctgaggtcctggaggtgccatttccctctctgttgaagcaaaggccgg

SEQ ID NO: 76944 - DNA, 100 bp, Homo sapiens
aagtcaagtggcaactccgtcagctcgttagaaaggtggttaatacatacactccaggaaagaagatttggcttgaaggtgtggtgaccacctcagctgg

SEQ ID NO: 76945 - DNA, 75 bp, Homo sapiens
cagcgccttgtccacggggcagatccgattctattgctctggccatgagccgggatggctcaagcgggggtgtca

SEQ ID NO: 76946 - DNA, 100 bp, Homo sapiens
ccgtccgaagtcggcgacagcggccggggcgcaggcgcccgtgcggaatggcaggtgtttggagaagagggattgaccctgaatcttgaagacgttcagc

SEQ ID NO: 76947 - DNA, 106 bp, Homo sapiens
cagcggggacgcggggtctcgcggcgcctggcagcagagaccaccagaaggaaaccaaggtgtatgttggtaacctgggaactggcgctggcaaaggagagttaga

SEQ ID NO: 76948 - DNA, 82 bp, Homo sapiens
gagttctcacgtgcccatcagtgacagcaagtccattcagaatacctgatggagggcagctacaacaaagtgttcctggcca

SEQ ID NO: 76949 - DNA, 83 bp, Homo sapiens
gaaatttacatgatgccttatcaggacatacttccaacaatatttacgaggcagtcaaatttggagcaagaggtggtggtggc

SEQ ID NO: 76950 - DNA, 76 bp, Homo sapiens
ggccgggccaacccggccgcccgacaccccaatctcgggtctcactcttgcccgggctggccttgaactcctgggc

SEQ ID NO: 76951 - DNA, 90 bp, Homo sapiens
agaaaatggcagacgatattgatattgaagcaatgcttgaggctccttacaagaagccctctctgggagatggttcaggatggcattgac

SEQ ID NO: 76952 - DNA, 100 bp, Homo sapiens
actgcaatctactgcactcgagccccccaggttcgcctaatagtcttggctacttccctacagctgctaatcttagcggtgtccctccacagcctggcac

SEQ ID NO: 76953 - DNA, 75 bp, Homo sapiens
acgggaatttagacttgtagcagctgaccgaagggcagcctggcatcctcgctacaacctcattgttgtgggccg

SEQ ID NO: 76954 - DNA, 75 bp, Homo sapiens
ttccttttctgtaaaatgaggagcttggagagtccttcaataatgttaaacagtggctgcaggaaatagatcgtt

SEQ ID NO: 76955 - DNA, 82 bp, Homo sapiens
gtgctgcttatggcggcgctggagagggggcgctgagctgttgggcagaagatggctgtgccacccacgtatgccgatcttg

SEQ ID NO: 76956 - DNA, 75 bp, Homo sapiens
cgacgctgctgggtccgctgagcggggcgacccgagatatcttaatgcaattcagacaatgtgtccacacattct

SEQ ID NO: 76957 - DNA, 75 bp, Homo sapiens
tgccattccagatggtccccgaggattctgtgtgagctgtgcccgtctggctgagatgaggcaaaaagaaatccc

SEQ ID NO: 76958 - DNA, 100 bp, Homo sapiens
actcagagaagtccctccaccggctctgtggtcctggacccaagccagaagcctctgcaaagcttccttccagacctgcagataactatgacaactttgt

SEQ ID NO: 76959 - DNA, 100 bp, Homo sapiens
aaggagacacagcgcagcatccctgccctgctgctgggcaacaagctggacatggctcagtacagaaggaagaggcccagcagaagggactcgctgagcc

SEQ ID NO: 76960 - DNA, 74 bp, Homo sapiens
cggcggcaccgggaggccgggccgagcggcaccagaatttcctgagtttgccactaaagtccaggaagctatca

SEQ ID NO: 76961 - DNA, 100 bp, Homo sapiens
agcatgtcggtggcggggctgaagaagcagttctacaaggcgagccagcggggatctgacgagcttttctctacttgtgtcactaacggaccgtttatca

SEQ ID NO: 76962 - DNA, 75 bp, Homo sapiens
agaaagagacccaggcccctggcgagcaggacagcatgctgcctgagccacccctttgctgtgaagttgcttgcg

SEQ ID NO: 76963 - DNA, 100 bp, Homo sapiens
aagaaatcaaaaatctggtgaaattgccggcaagagggagttaaggacattccaggcagaggcaagatttgagttttgtcaccggctcccacgtcggaga

SEQ ID NO: 76964 - DNA, 83 bp, Homo sapiens
ctcagcctcatctgtaaaatgtgatcataaataccgggtacctggaagtgctcgggtagtatttagtttcacaatgtttgggg

SEQ ID NO: 76965 - DNA, 99 bp, Homo sapiens
gcgagtgaggaaaggaggtactgtagagccatcatgaagctgaatggccaccagttggagaaccatgccctgaaggtctcctacatccccgatgagcag

SEQ ID NO: 76966 - DNA, 75 bp, Homo sapiens
ctgagaggggctgcggccggagcgggcggctgagacaaaggcgacggcagagaaagctgatggatttgtcaacct

SEQ ID NO: 76967 - DNA, 82 bp, Homo sapiens
ggaacgaagcttaagtagctacaggggaaaatattctgagcgctggccgcgcgccgaacccgagtccggcggcaccgacgac

SEQ ID NO: 76968 - DNA, 100 bp, Homo sapiens
gaagttaaggagtatgcccaagttttccgtgaacatgccaacaaattgattgagaagaagctaggaaagctcatctggcctcctgttccagtgcttccag

SEQ ID NO: 76969 - DNA, 85 bp, Homo sapiens
gcgccatggccgtgctgctcaccaaaggtgctggagaatctggtaaaagcaccattgtgaagcagatgaggatcctgcatgttaa

SEQ ID NO: 76970 - DNA, 90 bp, Homo sapiens
ctgcccgcaagccccgctgccttgctacggctactacccctgcttggtgaatctgtaaaatatttcctggataacttggataaacttgga

SEQ ID NO: 76971 - DNA, 83 bp, Homo sapiens
cgggccacggagaggagcagcccccggagacagcggcacagaggtgcttctgccaggttcaagcactgtcttcctgttggccc

SEQ ID NO: 76972 - DNA, 97 bp, Homo sapiens
gttctctgtgctgagcggcgggactgagctgttgagttagagccaacatgagtgaggtccggggatcccgagctgtcctgcagctgtaccctgagaa

SEQ ID NO: 76973 - DNA, 100 bp, Homo sapiens
gttgcggcgaaaggaacggctgaaggccctacgggagaaaaccgggcgcaaggtcaccctgctgattgccttcatctgtgtgcggagctccctgtggacc

SEQ ID NO: 76974 - DNA, 100 bp, Homo sapiens
gtaatcagctgaggccatgtcaggagacggagccacggagcagaagaaggctgaagctgcacatcggattctggaaggcctggggccccaggtggagctg

SEQ ID NO: 76975 - DNA, 50 bp, Homo sapiens
caagttccaaggttacgtttcatacacctgaagcggcacttcatgttccg

SEQ ID NO: 76976 - DNA, 75 bp, Homo sapiens
ccgggacaacatggcgccgtccacgccgctcttgacaggttttaaatgcacagagagcaggatacaaggcagcca

SEQ ID NO: 76977 - DNA, 50 bp, Homo sapiens
cgaatcgttaaacatctgaaagggtcagcggccctccaggcactgaagcg

SEQ ID NO: 76978 - DNA, 75 bp, Homo sapiens
ccagaacctgagcctgttaaagaagaaaaactttcgcctgagcctattttggatctgaaaccaaacaacttgttg

SEQ ID NO: 76979 - DNA, 87 bp, Homo sapiens
ttcctatggacagacgcacagacacctgcaggatgttgcttcagagtgtgaagtcaaatgcatgccaacattccagttttttaagaa

SEQ ID NO: 76980 - DNA, 100 bp, Homo sapiens
ggtttccccagcagtagcctctgcgaccaggtgcggcttcagaatgagtccctggaacgccagatgcgtgaaatggaagagaactttgccgttgaagctg

SEQ ID NO: 76981 - DNA, 114 bp, Homo sapiens
atatccagtacccaaactactgttccttcaaaagccagcagtgtctgatgagaaaccgcaatcggaagattggcacttctctgtttgatgaagagggagccaagattgtcaaag

SEQ ID NO: 76982 - DNA, 82 bp, Homo sapiens
ggggctctggctggcgttgctgcgctccgtggccggggagcaagcgccaggaaactactttgcttcgcactttttcatggga

SEQ ID NO: 76983 - DNA, 97 bp, Homo sapiens
cctgagctcccattaggagccgctggctgcggcagcaggggactagcgtgagagatattatgccttagaagtctcatatttcaaatcctctttggat

SEQ ID NO: 76984 - DNA, 100 bp, Homo sapiens
ccgcagtgtcctaagcctggaaaggtggccgacatgaaaaagaagatggaggacagtgtggggtgcctggaaactgctgaggaggtgaagaggaagctcc

SEQ ID NO: 76985 - DNA, 82 bp, Homo sapiens
ctgcagcgctctcgtcttctgcggctctcggtgccctctccttttcgtttccggaaacatgcaaattgtggctactaatttg

SEQ ID NO: 76986 - DNA, 87 bp, Homo sapiens
ctataaagctttggaagatgcagatgagaaggttcagttggcaaaccagatatatgacttgatatgaaagctttcaaaatccaaaga

SEQ ID NO: 76987 - DNA, 83 bp, Homo sapiens
gcaagatcctgtgcactgactgcggtcaaaatgcagatcttcgtgaaaacccttaccggcaagaccatcacccttgaggtgga

SEQ ID NO: 76988 - DNA, 100 bp, Homo sapiens
cgagtgatgatccctgtgcctgcagggaagtgctcagcggctgcactggacgtcctcgccaatgtcttccgggaggaactgctgccccacctactcccac

SEQ ID NO: 76989 - DNA, 88 bp, Homo sapiens
cgcgatatggctcaaggactgccgacatcgctattgcggttccgaggcagtgggaagagatgcggcccctggacatcgtcgagctggc

SEQ ID NO: 76990 - DNA, 132 bp, Homo sapiens
gtgaattctggctcaatgaaggtttcaccatgtacgcccagaggaggatctccaccatcctctttggtagctttgcagtttggggagggctgttttccatgattgactgtagtatggttcaagtcagaggaa

SEQ ID NO: 76991 - DNA, 83 bp, Homo sapiens
ctttctgctgctgaagtaatgcaatggtctcaatctctggaaaaacttcttgccaaccaaagattttctgccgtctcttggca

SEQ ID NO: 76992 - DNA, 83 bp, Homo sapiens
ctcgcgtccggagtccccgtggccaggaacaagatcactcaaggtgaaggataatctactaataccagcactttgaatgaaaa

SEQ ID NO: 76993 - DNA, 88 bp, Homo sapiens
ttccacctggagggcatgactacatctgtcatggaatactcccccagttgcaagaggcgcaggaccgtggaagacttcaacaaattct

SEQ ID NO: 76994 - DNA, 90 bp, Homo sapiens
cattgacgccatgtcgggttattcgagtgaccgagaccgcggccgggaccgaggaactacacgcagtacatccctctgtccatatatgac

SEQ ID NO: 76995 - DNA, 96 bp, Homo sapiens
aacatccaggctgtactgctccccaagaagactgagagtcaccacaaggccaagggcgtggtgtccctcgtggccgttcacccctccaccgtcaac

SEQ ID NO: 76996 - DNA, 49 bp, Homo sapiens
cgagttcaaagagaccctcggaacatacccagaaagcggtactctagaa

SEQ ID NO: 76997 - DNA, 75 bp, Homo sapiens
agcactccattctgcctgggtgacaatgccttggtttcaacactatcggaatgacatccagctctgtcacccaag

SEQ ID NO: 76998 - DNA, 75 bp, Homo sapiens
tgatgtggatctgcctgaggatgcacctcttgaaaatgcttgaacagatggatttggaagtccgagagataccac

SEQ ID NO: 76999 - DNA, 88 bp, Homo sapiens
cctcagttggaagcagccgatccagcctgcggagcctgtggggcagctgaaccttagccggccgatcgaggagcagggccccctggac

SEQ ID NO: 77000 - DNA, 98 bp, Homo sapiens
agttttactggaacagtcatgggccatggcaagcatgcagtaaaccctgccaaggctccccactgcacaaacagtcatctggaccctcctcctccccg

SEQ ID NO: 77001 - DNA, 100 bp, Homo sapiens
gctccccagctggtggctggagcgaccccttgttctttggtggcgctggctaaactgctcttttcagatggagaaaaagtaatacccagattgacccatg

SEQ ID NO: 77002 - DNA, 96 bp, Homo sapiens
gccccttcccaggacagcggaggtggaacttcgtcgcgctgcaacccccggctcggactccccgtggaacagagttgttgttcagcagaaataatc

SEQ ID NO: 77003 - DNA, 75 bp, Homo sapiens
gaaagaagtcattccttttttgaaggagaccaagacacattccaccccagtggggggtcccataccactcatgga

SEQ ID NO: 77004 - DNA, 89 bp, Homo sapiens
gttttgctcctgggactggacgtccgagaggactggagtccagagttgccaccagatgggatattcaaaaatacgccagagaggcctac

SEQ ID NO: 77005 - DNA, 50 bp, Homo sapiens
ttctggcctggaggctatccagcgcagtagcagaatcccatggtagccag

SEQ ID NO: 77006 - DNA, 75 bp, Homo sapiens
caatattgctgtttgatgcgatcctgaccagtgcaaccacgggatggtatgaccccaaaacaaaccagtggagca

SEQ ID NO: 77007 - DNA, 98 bp, Homo sapiens
acggcacctgctggaccacctcgccttctccatcgaagcagggaagtgggagcctcgagccctcgggtgccccctgataagtgccgatgtgccgtggg

SEQ ID NO: 77008 - DNA, 100 bp, Homo sapiens
acgaggcggacatgtgcgtgagggaatctgaagcatgtggtctagttgacagaaagagatcaggtttccagagctgaggagtggtgcctataatgaagac

SEQ ID NO: 77009 - DNA, 75 bp, Homo sapiens
gacagctctcagtccacactcccaaaagggaaagaaaacctcggatcaattctcagctggtggcacaacaagtgg

SEQ ID NO: 77010 - DNA, 100 bp, Homo sapiens
ccggctgtaaagatggcggcttcctagtgagtcggcggctgatttagaaggaggttcaggctacggtgagccgaagagtccggcagcgtcttctcttgag

SEQ ID NO: 77011 - DNA, 107 bp, Homo sapiens
gtctctttttcttggatggttgggagcagatcgattttaccttggataccctgctttggattcaagtcaatctgaaagtcccagccagccaagtgacgctgacatta

SEQ ID NO: 77012 - DNA, 90 bp, Homo sapiens
cgagctacctgaagatgcgcgccgtcttccccgaaggctgatgtttcagacaccgcaggaaatgggcttaatagtgatcgcggcccggca

SEQ ID NO: 77013 - DNA, 74 bp, Homo sapiens
ctggcaagctggccccggccaacggcatgcccacggggctgtaccttcacagtcctggtgcacacgagagaagc

SEQ ID NO: 77014 - DNA, 73 bp, Homo sapiens
gccaaggagatgtacagaatgggccaagctccactgttcagatgcaaagctcatctttgggtgaaaaattgtc

SEQ ID NO: 77015 - DNA, 75 bp, Homo sapiens
ggaaaatgcctatgatctggaagccaacctggctgtcctgaagctgttggtcaaagaaaaagtgatgtatgaaaa

SEQ ID NO: 77016 - DNA, 75 bp, Homo sapiens
ctcctgtaggaagtttcctcgcatttctcaggatgaagttgtgatatgtccatacgattccaatcatcacatgcc

SEQ ID NO: 77017 - DNA, 50 bp, Homo sapiens
aaggacgaggctgaggcgagaaacgagcagcaagatgaagagcgacgtcg

SEQ ID NO: 77018 - DNA, 90 bp, Homo sapiens
ctcctgagtagctggaattacagatcctgcagctccaccaaagaaaccgcctcgccctggagctcccggtcatctgggaagccttgccag

SEQ ID NO: 77019 - DNA, 75 bp, Homo sapiens
tggactaaacaggtcacctgcagaatgacagaagccacattcgatactctgcgactctggttaataatcctgctg

SEQ ID NO: 77020 - DNA, 100 bp, Homo sapiens
tctagctattgccttattttttctcatggatgttcttcttcgagtatttgtagaaggagatcgcggattcaggtgtggctctatgagcaagtgaatatgc

SEQ ID NO: 77021 - DNA, 100 bp, Homo sapiens
taggactcaatgcattgaccaagatgactgagaagactgttaaagcaaaaagctctgttcctgcctcagatgatgcctatccagaaatagaaaaattctt

SEQ ID NO: 77022 - DNA, 75 bp, Homo sapiens
agaaactcaatgatcgtgtcatgagagatgctttcattggatttggaggaaatgtgatcaggcaacaagtcaagg

SEQ ID NO: 77023 - DNA, 100 bp, Homo sapiens
aagtcttccaatgcctctttaggagagaggagaaggctatgattgtatctcatgctgggaacgggctgttgaggaagaagacgctggtcccagggccgcc

SEQ ID NO: 77024 - DNA, 82 bp, Homo sapiens
ctcgtgttcagcatctctctgtggatcattgctgcctggaccgtccgtgtctgtgaaaggttccaatactgtgttgcagtgg

SEQ ID NO: 77025 - DNA, 82 bp, Homo sapiens
agctggacggcgagcgcgagcggcgcgagaaagtgcctctgagcctcggaacatgatctacatgagccgcttgggtatctgg

SEQ ID NO: 77026 - DNA, 50 bp, Homo sapiens
ccaggaacttggttatggttgtctcaaggaaaacctatttgattctttga

SEQ ID NO: 77027 - DNA, 75 bp, Homo sapiens
catcctggttctggaatcctcagttcaagggcatacatcacagaaggaagccatggaagtaagccttgatataac

SEQ ID NO: 77028 - DNA, 100 bp, Homo sapiens
cttcaagcttaggaccacccaccatgcctatccagccaacagtgaactgggtggtgcccgtggcagacaagatgcgatttgatgagatattcctgaagac

SEQ ID NO: 77029 - DNA, 98 bp, Homo sapiens
gtggaaaaagcagggaggttatgaggcttaataaagaaggaaaaccagcattggaatcagctgattcaggatgctcagaagcgtggtgccattattaa

SEQ ID NO: 77030 - DNA, 75 bp, Homo sapiens
ggaggagttgtttgaagtgacatcctgttatttccctatcgattttaccccttgattcgcctttgccagtctcat

SEQ ID NO: 77031 - DNA, 82 bp, Homo sapiens
ctcggaggctgcagcaggaacggagtgcagagcagagcgggcggaggaccccgggcgcgggcgcggacggcacgcggggcat

SEQ ID NO: 77032 - DNA, 51 bp, Homo sapiens
gcggtggcattgagcccgaacacggcacttaagtattcatcgaagagtcac

SEQ ID NO: 77033 - DNA, 100 bp, Homo sapiens
tggacaggcataccttaatactgtggaggcttatgatccccagacaaatgagtggacccagttgccaaaacaaaggggatttggtgatggaggctttgtt

SEQ ID NO: 77034 - DNA, 90 bp, Homo sapiens
gactcgcctttgccctggcaaacactggaatcctactttttcttgccggtggtggtgtgcacattgagccccggtatagacagttccccc

SEQ ID NO: 77035 - DNA, 87 bp, Homo sapiens
tccacgggctccatcctgttggcaaggtgtccctgccttcactgtgctccaacctgaaggtcccctggcagtgctgagggaccgagc

SEQ ID NO: 77036 - DNA, 80 bp, Homo sapiens
caatcagaagactatacaacctcctaggaagatgattgaagaatcactgaagattaaaataaaaaaggaattagaaatgg

SEQ ID NO: 77037 - DNA, 83 bp, Homo sapiens
ggacgaagagctctcctccttcttcctcaactatctcgctgacacgcagcacatacccccggcctcatgagtacctgtcccca

SEQ ID NO: 77038 - DNA, 100 bp, Homo sapiens
aggggctccccgggtcctccaggccctatcattcggcatgaaccatgacggcgtgggaaacagctgtggggcccgtggtcaggacccagccaagctcatg

SEQ ID NO: 77039 - DNA, 98 bp, Homo sapiens
gctgactgtcgggcggtggtgatctctggtgcaggaaaaatgttcactgcagatgccatggacaatattaccaggcagaaccaattctacgataccca

SEQ ID NO: 77040 - DNA, 100 bp, Homo sapiens
ggatgccaccaccagttcccaccaccatctgtcccctctgcccatggctgagagcacccgggatgggacgccaacaaggagagcagcaagacctccaagc

SEQ ID NO: 77041 - DNA, 100 bp, Homo sapiens
aaggatcataggtggcactcatgtctcactgccccactcagattgcaaaagttgagaagctcaaaccattagaggtagagctgcgacgcctagaagacct

SEQ ID NO: 77042 - DNA, 100 bp, Homo sapiens
atgattttgaagtcatttcacatcgaagccatgatttaaatatcggcgttaagccccaggctccccctccaccgccaccgccgcctcagcagcagccgat

SEQ ID NO: 77043 - DNA, 75 bp, Homo sapiens
cagcattattaagagtcaagacttgaggccttaagaaatgtgtgctatactggccggaaaagagagggatatatg

SEQ ID NO: 77044 - DNA, 132 bp, Homo sapiens
cagcacatcccccaatactgcggctcctgctgggcccacgccagcaccagcgctatggcggaacactatggctatgcatcctccaacgtcagccccgccctgccgctccccacggcgcactccaccctgccg

SEQ ID NO: 77045 - DNA, 100 bp, Homo sapiens
gacctcatccgtttcttcaattccctcaacgaggcgacgatggtgctggtgtcctggattatgtggcaaaggaaggatgaactggagcagaggatgtcgg

SEQ ID NO: 77046 - DNA, 101 bp, Homo sapiens
aggaaaatgcaagaagactgatggagcaggcttgcaatattaaactgaagctgaagaagatggggacctgcagtgcctgtgtgtgaagaccacctcccagg

SEQ ID NO: 77047 - DNA, 100 bp, Homo sapiens
ccggggcgctcacggccacggcgctggtcaccggggtctgcctgggatctgtgccagttcagaagcaggcgagcctcttccctgatgaaaaagaagataa

SEQ ID NO: 77048 - DNA, 50 bp, Homo sapiens
caggcctacactctattcaaacagtgccaccatggcaactgcaccataca

SEQ ID NO: 77049 - DNA, 83 bp, Homo sapiens
gaaaagactcaggacggacaagcacagtcttcggaaggatgtgttcgaaatgcgctttgccaagatgccggacgagcctgagg

SEQ ID NO: 77050 - DNA, 100 bp, Homo sapiens
gaaaacaaaaactgatgaccaagagaatgtgtcagccgatgcaccgagtccagcccaggaaaatggagagttggatcatcatcgctgccacagtggtttc

SEQ ID NO: 77051 - DNA, 100 bp, Homo sapiens
ccggcctggcgcacctggactattaccacggcggcaagtcgtgagatggagaataaagaaactctcaaagggttgcacaagatggatgatcgtccagagg

SEQ ID NO: 77052 - DNA, 75 bp, Homo sapiens
aagggagccaacaaaaattgttttttctacctgttgacgtgtcaagcactaactttcctaatgtggatctaccac

SEQ ID NO: 77053 - DNA, 74 bp, Homo sapiens
ctttttccatgatcagagcacagctaccagccaagcaggtgagaatgagatggtgatcatgagacctggaaaca

SEQ ID NO: 77054 - DNA, 75 bp, Homo sapiens
tttccttacctgtttttccagctcacccactgccagcagaggaatgggtaccacagaccatgtcatcgtcctggc

SEQ ID NO: 77055 - DNA, 56 bp, Homo sapiens
caacaccggaggcgtcttcctcatggtgttgatatccctgaaagtacttaatagca

SEQ ID NO: 77056 - DNA, 83 bp, Homo sapiens
ccgctcctaagcctgcacagccgcggcggcagcagcagtgagaggccatcagcatcagcaaagccatcaacacccaggaggcc

SEQ ID NO: 77057 - DNA, 97 bp, Homo sapiens
gatggactgcagctcagaaaggaacatactctcaaaatatttacttatatcaattcctggacacagaggcaaccagataaactggtggtagtttgga

SEQ ID NO: 77058 - DNA, 100 bp, Homo sapiens
ggtgatttctgcatttccatctgagatcctggcgcccctgtgaaattgccttgtctgccagtgaaactgtcgcctccgctacctccaaagaaagtcatga

SEQ ID NO: 77059 - DNA, 75 bp, Homo sapiens
gcgcccgggacgcgcggcggcaccgggaggccgggccgagcgggtaatacctgcctggagaatggatctttctta

SEQ ID NO: 77060 - DNA, 98 bp, Homo sapiens
cactttgcagagctgcttatgacatcaggagtggttctctgtgacaatgtcaaatggctttcatttcatagtcttcccatgcacaagatgattaatac

SEQ ID NO: 77061 - DNA, 100 bp, Homo sapiens
cggctatggagcttaccgtgtctccaatgacaaacgagatgtaaaagtgtcactgtttaaacaggtgttcaaggagctggagtttctgggttggtatacc

SEQ ID NO: 77062 - DNA, 75 bp, Homo sapiens
cgccacctacagccgcttgctagaggttgaggacgctcactgagcgggctttggacaccatgaactttgatgtga

SEQ ID NO: 77063 - DNA, 82 bp, Homo sapiens
gtgcggggcctgggcctcccggtccgcaagcagcaaaatgatgcttcaacacccaggccaggtctctgcctcggaagtgagt

SEQ ID NO: 77064 - DNA, 74 bp, Homo sapiens
ggagaagtggctgttctgaagagagatgggcgatatatatattacttgagcccacctgaatgaccttgaaaata

SEQ ID NO: 77065 - DNA, 75 bp, Homo sapiens
ggaagctcgtgctgatttcctaagtcagcccctcctgtcctcttgacggagtcttgctgtgtcgcccaggctgga

SEQ ID NO: 77066 - DNA, 100 bp, Homo sapiens
ggcgcggtcgttgtcgcattgctctcggccgcactcgcgctgtacgggccgccactggacgcaggtctaccccgagccccggagcgagagcgagtgcctg

SEQ ID NO: 77067 - DNA, 50 bp, Homo sapiens
atcactcgctcccttgatgatcttgaggaaagaccacagcaagattcttt

SEQ ID NO: 77068 - DNA, 75 bp, Homo sapiens
ctcctttcctacactctgaagaccactttccagattgtgaagatggaaagggtccaacccctggaagagaatgtg

SEQ ID NO: 77069 - DNA, 100 bp, Homo sapiens
cttggagtgttcttgttgtggatgaagctcacaggttgaaaaaccaaagctccctgctgcataagaccttgtcagaggactttttttatgaagacatgga

SEQ ID NO: 77070 - DNA, 98 bp, Homo sapiens
gattccaacgccaccaattccaacctggaaaaatgctggcaggtggtgcaagcaaggacatctatgcatagaattctgacagcagctggaccctcaac

SEQ ID NO: 77071 - DNA, 95 bp, Homo sapiens
gcctcccgggtagctgggactacaggatggtggaacactgtctacacatgttcgaccggatggtcatctatttcttcatagcggcttcctacgca

SEQ ID NO: 77072 - DNA, 100 bp, Homo sapiens
gaatatttaatggaaaatcgcttggttaaaacctgacacttttaacaggtacaactccaaaaggagacattggagaagaaccaagctgggtctataagga

SEQ ID NO: 77073 - DNA, 100 bp, Homo sapiens
tgatggaaacaccatggctgcggcggcccagctctctctgacacaggtattgctattgattgacattcaagtctcttacatcaacaccaaccatgaagac

SEQ ID NO: 77074 - DNA, 100 bp, Homo sapiens
caggaggaggttttcaggaccaaaattgtggaaaagtcactctggtcaccagtgaaaagttgtgcagagcccaacatgagcttcatttccaagctgccac

SEQ ID NO: 77075 - DNA, 100 bp, Homo sapiens
gtcctggtgcacccccagtgggtgctcacagctgcccattgcctaaagaagaggatttgatgaagatgttaaagcgaaagtggagaaccttctcgggatt

SEQ ID NO: 77076 - DNA, 90 bp, Homo sapiens
aggacataaggaactagtcacagtgttgctgcaacatagagctgacattaactgtcaggcctccccatggccacccatggaccagtcggc

SEQ ID NO: 77077 - DNA, 51 bp, Homo sapiens
aagaaacatctcaccaatttcaaatctgaccaagatcactccatggatgaa

SEQ ID NO: 77078 - DNA, 100 bp, Homo sapiens
ctgcacctggagattgacgcagagtgggcggcggtggtggtgcgttgtagaagacaagaactcaaaggtggcctggttgaaccgttctggcatcattttt

SEQ ID NO: 77079 - DNA, 100 bp, Homo sapiens
ccgccgccgcccagagactgctgagcccgtccgtccgccgccaccacccactccggacacaggtccctgtgcgttttattgcgacctgccggtgggaact

SEQ ID NO: 77080 - DNA, 82 bp, Homo sapiens
gaataaacatgcaatgaacccaaaaggcacccagtcagcttgaagagtttcaaatggaccctaccactgagaaatcaagatg

SEQ ID NO: 77081 - DNA, 82 bp, Homo sapiens
tgtgtcaaacatccatatcataagtggaattttggagatattcaaaggcatgacagcaagcgctgtggcggctttgatcctc

SEQ ID NO: 77082 - DNA, 82 bp, Homo sapiens
tataccaaagaccaagtagatggagttctcagttgctgctgacacgccgaccgcctgctgcttcagctacacctcccggcag

SEQ ID NO: 77083 - DNA, 75 bp, Homo sapiens
cagtcccgggagaacctgcggcggccggagcgaaataaactatcaatcttgcccagactggagaaaggactgcag

SEQ ID NO: 77084 - DNA, 100 bp, Homo sapiens
tttataccatgaaatgattgaatctggtgttatcaacttaaaagatgccacctctaagaaactaattctgaagcaagcccttatagttgtgctgcagtgg

SEQ ID NO: 77085 - DNA, 99 bp, Homo sapiens
ttgtggccatattcccttcttttttcctacccaaggacatgactatgtacttgcagaaaaacaggttagcatggcctcattgaaagaactagatcaaag

SEQ ID NO: 77086 - DNA, 90 bp, Homo sapiens
ggtctttctgccgagcctcggtcccggcccccatcctccccgccccatcggttgttgtctgggcgggaatgaattcttccaaaacaaaac

SEQ ID NO: 77087 - DNA, 101 bp, Homo sapiens
agcaggagcctggagcgcgagtacagctgcaccgtgcggctgctggacgacagcgagtacacctgcaccatccaggaaatgtggctttagataatctacag

SEQ ID NO: 77088 - DNA, 51 bp, Homo sapiens
agagcaaagaatactattgttgccacagggcatatatggtgctggttgtct

SEQ ID NO: 77089 - DNA, 90 bp, Homo sapiens
tgcttttgacatggaggatttgggagataaagctgtgtactgccgttgttggaggtccaaaaagcagcagcacagcaagtggataaaagc

SEQ ID NO: 77090 - DNA, 78 bp, Homo sapiens
caggcgagccaggaaggaccagcgggcgaggtggagacctacaaattgccgcaccggctcatcgagaaaaagagacgt

SEQ ID NO: 77091 - DNA, 74 bp, Homo sapiens
catttcatggctatcatctacacctatggcattgctggttctaccaacgtgacaggtgatcaagttaagaagct

SEQ ID NO: 77092 - DNA, 75 bp, Homo sapiens
gaaattctcatgatagcttccaagggacaaggtgtcaacaatgtgccggtttttcgttggaatatacgttgcaca

SEQ ID NO: 77093 - DNA, 90 bp, Homo sapiens
cacctaactacggaaaacctgatcccaaaattattgaaaacactcgaaggaaagctctgggtgtgcggcagtaccatgtggcctcagtcc

SEQ ID NO: 77094 - DNA, 83 bp, Homo sapiens
cttcggcagtccacccaccgccgccgcctcccaggtggtggaggtggatacagcagtcggagaacatctggcagagacaaata

SEQ ID NO: 77095 - DNA, 75 bp, Homo sapiens
gttggttttggatgaagctgatgaaatgttgaataaagtacggcagctgctattgcttatggcctggataagagg

SEQ ID NO: 77096 - DNA, 100 bp, Homo sapiens
ttatcccaccatgaaagatttcaaccactcataccatgcctgtggtgttatagcaaccatagccttcctaatgaagccagcagacctgcagaacttggct

SEQ ID NO: 77097 - DNA, 73 bp, Homo sapiens
gggcagtctgggcagtggaggcagagggtgagcgagtgctgtgctttcatgggcctcttctttatgaagcaaa

SEQ ID NO: 77098 - DNA, 98 bp, Homo sapiens
gcgcccgccagttgcttgatcaggtggaacagattcagaaggagcaggattaccaaaggtgttctaagaacggaagcatctgggctggatggaattta

SEQ ID NO: 77099 - DNA, 75 bp, Homo sapiens
tgggaggccgaggcgggcggatcacgaggtgctgtaaactgcaaaccataatcctgtcttaatactgcaaacaaa

SEQ ID NO: 77100 - DNA, 87 bp, Homo sapiens
tcaccaacccggccttcaccaaactccctggatcgaaaattgtacaatttgggattaaaaggctattacatcagagacagtggcaac

SEQ ID NO: 77101 - DNA, 90 bp, Homo sapiens
ccccacccctcaaccagtctcaggcccagatgtatctacggggagccatggctgccacgtactccgcactcaacagctccaagcccaccc

SEQ ID NO: 77102 - DNA, 127 bp, Homo sapiens
gcgaaattaagggaaaatggatgtagaaaatgagcagatactgaatgtaaaccctgcagccatcgactacagtgacagcgccatgctccaagctcagcagctgctcctggggctgggctctttcctg

SEQ ID NO: 77103 - DNA, 51 bp, Homo sapiens
gagagacccaagtgatttcagtaatcaatattatcaatgctgcccaggaaa

SEQ ID NO: 77104 - DNA, 90 bp, Homo sapiens
tgatgcctgctagccaaaagggtgattaaggctgcagaagacagtgcgttgcagtatatgaacttcatgaatgtcatctttgcagcacag

SEQ ID NO: 77105 - DNA, 82 bp, Homo sapiens
ctcaacatgcacctagtcaagagccaccgcctgcagtgagaaagatcagtctaaagaaaaggagaagaaagtgaaaaaaaca

SEQ ID NO: 77106 - DNA, 90 bp, Homo sapiens
cgttggtcagaggagtcttcatgaaggtggtgaagcccaagagcaagatatgtgaattacatcaaaacatcagaggttgtcagactgccc

SEQ ID NO: 77107 - DNA, 100 bp, Homo sapiens
gcgaatttcatgctttgcacaaaaagtcaagtccatcatctccagaaccagctagtcttcctgcagaagatattagtgcaaactccaatggcccaaaacc

SEQ ID NO: 77108 - DNA, 100 bp, Homo sapiens
cggccgggactctgaactatggcgattcatgatgttgctatcaaaagttgagaaattgtcagaagaaatcatggagataatgcaaaatttaagtagtata

SEQ ID NO: 77109 - DNA, 74 bp, Homo sapiens
gaagaaagaaggtgggagcggagagcgcaggcgtgggcgcggatggcgtcggggcgccccgaggagctgtggga

SEQ ID NO: 77110 - DNA, 141 bp, Homo sapiens
tgggcatcgcctactacatgtactcggggggcggctctgcgctggccgggggcgcgggcggcggcgccggcaggaaggtaagtaaggaggtctctgtaccatggctcgtacaaagcagactgcccgcaaatcgaccggtgg

SEQ ID NO: 77111 - DNA, 90 bp, Homo sapiens
cttcagggatgccacctcccacctcagggcccccttcagccatgactcctccctacccgcagtttgagaagaagctcattcacacagaag

SEQ ID NO: 77112 - DNA, 82 bp, Homo sapiens
ccgggccctcgagacggggacggtatcgagaaccttccctgcgaacttcagaggaacttccagctgatgcgagagctggacc

SEQ ID NO: 77113 - DNA, 102 bp, Homo sapiens
tttgtcatggagctcactctcctgtccctggacctcatgcaccatattcacatgttggaccgtcctccttctaatatttggaagaaaatagatcaatccagg

SEQ ID NO: 77114 - DNA, 75 bp, Homo sapiens
agcgggagaaggcgctgcgcaagcacgctgaggagggtggcattgtgtgtcccagagtgccggagcgagtcccag

SEQ ID NO: 77115 - DNA, 82 bp, Homo sapiens
cgatgagctcaatcggcactgggttttcaacttgaccaacaatgtggatttggacaacaccaaaaagaaaatggagatatac

SEQ ID NO: 77116 - DNA, 101 bp, Homo sapiens
gtgaatctgggcttatgggatacagctggacaagaagattatgacagattacgccccctatcctatccgcaaacattctgcacggagctaaaccagccgac

SEQ ID NO: 77117 - DNA, 50 bp, Homo sapiens
ctgaatgcggtgcgggagaccatggacgttgaaaatgaagatgaggctga

SEQ ID NO: 77118 - DNA, 75 bp, Homo sapiens
caggctgtcatataactcctgagaatagtggttcttaactctcatcagaagagctaacaattgctggaatgacct

SEQ ID NO: 77119 - DNA, 100 bp, Homo sapiens
caggcccgttggaagtggttgtgaagccagttgagggaagttctccatgaatgtacgtcacaatgatgatgaccgaccaaatccctctggaactgccacc

SEQ ID NO: 77120 - DNA, 100 bp, Homo sapiens
ctacctgaccaccatcaccaagcagatcacgccctacgtccgctccattgccaaggtgaaggagcggctggagcccagccttcctacagcaacttcccac

SEQ ID NO: 77121 - DNA, 100 bp, Homo sapiens
ggaggcctacagcctcctcaacgaatacggcgacgacatgtatgggccagaaaagggtgacccagagaagacagctaaagtggaatgtggggacttctac

SEQ ID NO: 77122 - DNA, 102 bp, Homo sapiens
gaaaacgagcccctatcctaggattacctgaaggtgaaacagattgagccagaaggaagacaatgctggcttgcagatgggtcaagggttgtggagagtggt

SEQ ID NO: 77123 - DNA, 100 bp, Homo sapiens
tgtggcagtggaaaatgcgctcgggctggaccagcaggtaacgtgaagcacctggttctcttcctccatgaggctgtcctggtgcagtatgtggacacgc

SEQ ID NO: 77124 - DNA, 75 bp, Homo sapiens
ggaaaacgaacatatatactcagaaacaagagcctcctaagaaggtgactgcccaggatgtgcggaaggaaagcc

SEQ ID NO: 77125 - DNA, 88 bp, Homo sapiens
ggcgacgaggcgattgcgggggcctgggctagctgcaagctttcttcctggtggcagatgacatcatggattcatcccttacccgccg

SEQ ID NO: 77126 - DNA, 100 bp, Homo sapiens
cgccatgtggctgctggggccgctgtgcctgctgctgagcagcgccgcggataccggggagaccacgacgctgcctcctgggcgccatgagttcctgttc

SEQ ID NO: 77127 - DNA, 96 bp, Homo sapiens
ccggccgcgcccggtgcattgtgggagcggcccgcggcccgttttcgggaggaggcggagggcgcaaagcgagccgctcaaactggaggattataa

SEQ ID NO: 77128 - DNA, 82 bp, Homo sapiens
caccatgtcaccagatatgaacacatgtacatctgatcagttccaggtgatgaaatttattgagaaggcccagaacatgtcc

SEQ ID NO: 77129 - DNA, 82 bp, Homo sapiens
gagtccagccaacagcagaagagaaagccagttatccacggactggaagatcaaaagaggatgttgatcttgtctcagaata

SEQ ID NO: 77130 - DNA, 83 bp, Homo sapiens
agctcaccgagacggcgatccgggcgctcgagacttaccagagccacaaggttttgagcaaaattttggactgtgaagcaagg

SEQ ID NO: 77131 - DNA, 73 bp, Homo sapiens
ggagtgtgacagggatgatgaagaagacctgctggatgatcaggagaacctcagtctgacgacattgaagcta

SEQ ID NO: 77132 - DNA, 83 bp, Homo sapiens
ccccggctggtgtgacctgtgcggacgagaggtgctgcggcaggcgctgcgctgcactactattcaggattatgaaactgctc

SEQ ID NO: 77133 - DNA, 90 bp, Homo sapiens
aattcccagaggactttggagaccagctgtcacaagatgaaggtagaggcacattatacaaatacagacctgaagaagtagatattgatg

SEQ ID NO: 77134 - DNA, 96 bp, Homo sapiens
cgtagaagtctatctttctgatgctccatcccactactctcaagatacgccaatgcgctcaaaggcaaaaagggctatccctccctcatgcggagc

SEQ ID NO: 77135 - DNA, 90 bp, Homo sapiens
tgtgggatgatattttaccaaattccaagtgggttgacagcaatgttcctcaagtggacatcttcaataaggagctactgctaatcccca

SEQ ID NO: 77136 - DNA, 75 bp, Homo sapiens
acaccctgtcctatgtggacgtcggcactgggaagtttagtactgctaaactaaagtagattaatgagaagggag

SEQ ID NO: 77137 - DNA, 97 bp, Homo sapiens
ttcttccgaggcgttaccatcaagaggagccccagaaccaggactgggggatttggagctgggcagagacttaacccccacagcaccgggaagcagc

SEQ ID NO: 77138 - DNA, 100 bp, Homo sapiens
tgctggaccacctggtcggggaggagaccatggctgactacctgctgtacaccctcaacaaacaccagcgctttggaggacaagtcgtacaatggtggag

SEQ ID NO: 77139 - DNA, 49 bp, Homo sapiens
ctccgggaaaccctgagcagccagagtcctccctgctgctgtgtggacg

SEQ ID NO: 77140 - DNA, 74 bp, Homo sapiens
accgccaccatggggaagggggtttgatctgtggatgaaatgaatcatgattttcaagctcttgcattagaatc

SEQ ID NO: 77141 - DNA, 75 bp, Homo sapiens
gtaattacaacatgtattgtgctgtatatgaatgctgtatgcaggagctattcttgaagtttgtggatgaaaatt

SEQ ID NO: 77142 - DNA, 100 bp, Homo sapiens
tgcccattacttctgcctggactgcattgtcgaatggtccaaggcatcctgtacacgtcaaagaagagcccctcgatccagaggaagctgaagggcccct

SEQ ID NO: 77143 - DNA, 100 bp, Homo sapiens
tgaaggacagcggcaccgccagacggccagaaagttccgccatgagctggggcacggagctgtggagtgatcagcagctggactgtgccttggacctaat

SEQ ID NO: 77144 - DNA, 82 bp, Homo sapiens
ctttgctcaaggatcccagttttctctggatgacgtgtgatgaacggcagcagccactcaccaacagccatcaatggtgcac

SEQ ID NO: 77145 - DNA, 90 bp, Homo sapiens
gtctggagtgcgtgggggaccggctgttggcggccatcccaggcctcaggacctgagttctccgacgcccacatgacatggctgaacttt

SEQ ID NO: 77146 - DNA, 90 bp, Homo sapiens
aaatcctcaaaaaatcttcttggttctgctacaattgcagataataatgaagatgttgatggtgatggtgttcatgaaataacaagccga

SEQ ID NO: 77147 - DNA, 100 bp, Homo sapiens
agcatgtggcctccacctcggccgccctgcccagctgcctgcccccggaggtgcccacgcagctgcctggacaagactcacaccacccggcaagaactgc

SEQ ID NO: 77148 - DNA, 90 bp, Homo sapiens
tcaaggagcagtttctggacggagaggagaaggcagagcccccccaggctatgaatgccctgatgcggttgaaccagctgaagccagggc

SEQ ID NO: 77149 - DNA, 91 bp, Homo sapiens
actttctcctactccataaagacttcaaaccctacagcttggggcctgggctcctctgaccatcctcattgagaaaggaaagtgagtccag

SEQ ID NO: 77150 - DNA, 100 bp, Homo sapiens
caacaacaccacaataatccacagccaagactggatacacgtctgtttaactacgcaaaaggtaatgctggcatggcttactgggaccctaagtgtggcg

SEQ ID NO: 77151 - DNA, 74 bp, Homo sapiens
ctggcatctgccggctgctccgcaccccggggtcccaggaagggcggcccaggctggaatgagctgctcatcgc

SEQ ID NO: 77152 - DNA, 100 bp, Homo sapiens
cctcaccctctgccgagtctcaatatctgtcttcggtggactccttcggcagtccacccaccgccgccgcctcccaggcccggcctgcatgcctacgaaa

SEQ ID NO: 77153 - DNA, 75 bp, Homo sapiens
ggaagttcgtactgggcagaacgcgacgggtctgcggcttagggcaatgaatcgctccctggctaatgtgattct

SEQ ID NO: 77154 - DNA, 100 bp, Homo sapiens
catagcagtacccgagatggaagacgcgacaggccttgctgtctctaaccctgatctgatctcctgccttgagcaaataaaagagccctggaatgtgaag

SEQ ID NO: 77155 - DNA, 75 bp, Homo sapiens
aggcagaaggcctctctcctgatacagcaggcgctcaccatgttccctggagggctctctttacctatgaaggca

SEQ ID NO: 77156 - DNA, 100 bp, Homo sapiens
cctccaggccaagagggatccttcacccgtgtctgacttgcacacctacccctgtggagcgtgcaccctataagggagaagtcgccacactgaaatccag

SEQ ID NO: 77157 - DNA, 101 bp, Homo sapiens
ggagcctgcgggtcgccagcggccccgccgagagccggaggcaatggatgaacagagcgtggaggaggaggcaaaacagattcagaatctgcagaaagcag

SEQ ID NO: 77158 - DNA, 98 bp, Homo sapiens
gggaggaatggcaccccaggagagcagggcttcccagggcccaggaaagaagatgctgatatgctacaacacggatgaacctggaggacgtggtgcag

SEQ ID NO: 77159 - DNA, 100 bp, Homo sapiens
ctgccgtggccgcccggctgccgggagccgacagcttcgcgccggatggtttatgggagaaatattagccagtgtcttcacatgctcattgatgataact

SEQ ID NO: 77160 - DNA, 75 bp, Homo sapiens
ccgcaactccgccgcccaccatggcttccgaggagctgtacgagttagagatgtttatgattacttccgagctgt

SEQ ID NO: 77161 - DNA, 83 bp, Homo sapiens
gccagatgcggatccgggccaagcagtgggccgagcctggtccgacccccagtggcactaacgtgggatcctcagggcgctct

SEQ ID NO: 77162 - DNA, 83 bp, Homo sapiens
cgaggctcgcgggcggcgggcccggacaatgcagatcttcgtgaagactctgactggtaagaccatcaccctcgaggttgagc

SEQ ID NO: 77163 - DNA, 83 bp, Homo sapiens
cgcgggccggccccgcggggagcgcccccggcgcgatgcccttcaggaaaggagctgggatggtggtggactgggagcaggag

SEQ ID NO: 77164 - DNA, 96 bp, Homo sapiens
taaaaactgtaacacaaaacggcactcacgtggcatcagtccccactgcggtccacggccaggtgaacaatgaggtggggctggtgtccgagcact

SEQ ID NO: 77165 - DNA, 80 bp, Homo sapiens
cacccctccccccacccgggctcggcgggggagcgactcatggagctgccgtaaggtgctggagaatctggtaaaagcac

SEQ ID NO: 77166 - DNA, 98 bp, Homo sapiens
cctcctcagatgcccctgccggagatccctcagccctggctgatgactgtaattgcaaagaagagcttgctgtgatatctgatggcagaacaatagtg

SEQ ID NO: 77167 - DNA, 75 bp, Homo sapiens
tagaaacagccatgactcaaagaaaactgaggagtaaacatcagtctccaaagataactacatcccttcttccca

SEQ ID NO: 77168 - DNA, 82 bp, Homo sapiens
gactttaagaaaggaatgaacatgtatttaaccaagttccaacaaaagaatgctgccgcagatatttggagttcttacaaca

SEQ ID NO: 77169 - DNA, 50 bp, Homo sapiens
gggacagcaacgtgatgcgggagagcggagccagacataggcatgcctga

SEQ ID NO: 77170 - DNA, 98 bp, Homo sapiens
gcccccaacaaggacaagtgaagctcaccatggctcaacttactcagttaacacagggccacgaatcatattgacaggtcatgaaaatgagaccaaaa

SEQ ID NO: 77171 - DNA, 96 bp, Homo sapiens
ccgaccccaacggcaccagccctttgcacctcgcagctaaaaacggccacatcgacatcatcagatcgactgctagagagtatgctctgaaaatta

SEQ ID NO: 77172 - DNA, 80 bp, Homo sapiens
ttatgaggattatttcagcataccgtatcccctacccaaacaagacatccctttaaaagtagttggaatgttcccaagta

SEQ ID NO: 77173 - DNA, 75 bp, Homo sapiens
agacttaggtctgttagaggaagacgacgagtttgaagagttccctgccgaagattcgtcttctggatgtctaaa

SEQ ID NO: 77174 - DNA, 100 bp, Homo sapiens
tacatttctgtcttccttcctgggtcagtgattcccggaccctggaagagaagagggtggctaatgattaagaccatcatcaaagaggggatgctgacca

SEQ ID NO: 77175 - DNA, 84 bp, Homo sapiens
ccgcgcgcagggcctgcagcgggagctggacggcgagcgcgagcggcgcgagaaacattgtcccagatatagccgttggtacaa

SEQ ID NO: 77176 - DNA, 75 bp, Homo sapiens
gcgtggagtagaacagaatcatcagctaagggagaacattgagcaattcttcaccaaatttgtagatgaggggaa

SEQ ID NO: 77177 - DNA, 98 bp, Homo sapiens
cggaaagcggcggactatgtccgaagcaaggatttccgggactacctcatgagctgagtccacctcaggacgaggccagtgcctgaaacgcatccgct

SEQ ID NO: 77178 - DNA, 96 bp, Homo sapiens
gggaggtagaggtggcgctcatgcatatttgagacaacatctggatggttggggagaacgttttcatggagtgataatgaaaggagcagcagccgc

SEQ ID NO: 77179 - DNA, 82 bp, Homo sapiens
gaggcaaggagctaaagcagcgtgcgttcagccctgggattatgatgcatcattatcacagaagaaattcgtgtctatagct

SEQ ID NO: 77180 - DNA, 75 bp, Homo sapiens
gccatctgtgccatcatcgtggtagttattgtaatccgctgcctggcccggaagcggaggaactcacgggatggg

SEQ ID NO: 77181 - DNA, 142 bp, Homo sapiens
ttagtcactgtcaagtcatttgacacctccctcattaggaagacaaggactatccttgaggcaaaacaagcggaggagatgttaaagtaacccatcttgcaggacgacattgaagattggtcttctgttgatctaagatgat

SEQ ID NO: 77182 - DNA, 90 bp, Homo sapiens
cccccgaaggccctatcaggacatggagtatgaaagacggttcccgtgtcagtggctatgatgacacctcaagttatcactccccagcaa

SEQ ID NO: 77183 - DNA, 82 bp, Homo sapiens
ctactcagtttacagccactgcagtatcacagccagttcttctcaccactaaatccaatacgagttcatattgatattggag

SEQ ID NO: 77184 - DNA, 101 bp, Homo sapiens
gagcccagcgcctcggaggccgcccccgcggcggccgcgctcttcgcctgggtgctggagaatctggtaaaagcaccattgtgaagcagatgaggatcctg

SEQ ID NO: 77185 - DNA, 100 bp, Homo sapiens
tatccttacccgacctcagatgctcccttctgctcctggaagatgagaatgtgcctactgctcctgatcctccaagtcaacatttacgtgggcatgggac

SEQ ID NO: 77186 - DNA, 75 bp, Homo sapiens
gggcatcatcatcctgcgatcctgcaaggagtctcgctctcagtcaaaatctccaacgggaactcctgctcgtgt

SEQ ID NO: 77187 - DNA, 99 bp, Homo sapiens
ctggtgaagctgggccagacaacctgggctcctctgcagaggcaactgggagaagccggagacccagggccccctggactacctgcctactcccctcac

SEQ ID NO: 77188 - DNA, 75 bp, Homo sapiens
catgtactcgcagttgcctcatcacatcctagccgatgtctctctgaaggtgccgtgagcgatgtggagatgcag

SEQ ID NO: 77189 - DNA, 75 bp, Homo sapiens
ccgatcccgctctgcacattccaaaggcagaaaaactggcagggtgcaagctgaatgtggctgaggtgacacagt

SEQ ID NO: 77190 - DNA, 95 bp, Homo sapiens
ttttgcataaacatggagaaaagctctacactggactaagagaagttgttaccgaacatctcataaataagatgtaggtgcaaaaaactacagac

SEQ ID NO: 77191 - DNA, 100 bp, Homo sapiens
acgaggagaaactggctgaccaggctgtaaggaccatggaaatctatgttgcccagttcagtgaaattaaggcaagcacgaggagcggcaggacgagcat

SEQ ID NO: 77192 - DNA, 100 bp, Homo sapiens
gcactgcacctgcagacaagcctgccagccctttctgaggcagatacccaggaactaacccagcttgcattgaaaggctctagttacagtggacttcttg

SEQ ID NO: 77193 - DNA, 83 bp, Homo sapiens
ctggacagctagctgcttatggctataaaattacagataacaacgaacttgatgcaagtgataggtttgccaaggtcagacct

SEQ ID NO: 77194 - DNA, 100 bp, Homo sapiens
ccagagctgtcgccatttccaaagcccagacttgggaactcagtacctggagatctgcccaaggagaatccatatgaggatgtggacttaaagagccgaa

SEQ ID NO: 77195 - DNA, 90 bp, Homo sapiens
ggaagtactgagcctgttggaggaactggcccggaaacaggaggacgggagaagccgcaccagtgcgccgtgtgctggcgatccttctct

SEQ ID NO: 77196 - DNA, 75 bp, Homo sapiens
ggcggagaaggatgacaccggagtttgacgaagaggtggtttttgagctccccaggtgtgtcctggtagacaact

SEQ ID NO: 77197 - DNA, 90 bp, Homo sapiens
agtattaccaggtccctgaaaagctaccccccaaagtcctggagctgtgagctgcggtgcaaccctgggcagtttgcgtgtcgcagcggc

SEQ ID NO: 77198 - DNA, 75 bp, Homo sapiens
cttcatcaaaaatagtgatagctttgataagcaaccggtgaccaaaaacactttcaggcagtatcgagtgctagg

SEQ ID NO: 77199 - DNA, 100 bp, Homo sapiens
agacgcactgtgaaagcagcatggaaaatgtgacatcagttgcaaggggatgaccgagcgcattcacagcatcaaccttcacaacttcagcaattccgtg

SEQ ID NO: 77200 - DNA, 100 bp, Homo sapiens
tggacatatcgccctcccagcagcagccacacagtatcagatgatcataaacttagccttgatgaacttcatcgtaaatatggaacagacttgagccggg

SEQ ID NO: 77201 - DNA, 100 bp, Homo sapiens
gcgtcccccgggggcccgtactgcacatcgtggtggtcggatttcaccacaagaagggctgccagcaatgctggggtgaaaacaacacggctagaagctc

SEQ ID NO: 77202 - DNA, 75 bp, Homo sapiens
gagggacctcacatcaacttctaccagctggctgagcagtccaaagtcctgagcgccgtggaggaccgcatggac

SEQ ID NO: 77203 - DNA, 80 bp, Homo sapiens
aagcaactgccgccgccgcctctttcatctcttctggggcaggggccagggccagcatctgggctgatgggccgtaccct

SEQ ID NO: 77204 - DNA, 100 bp, Homo sapiens
tacactggacctgaaagttatgtggctcaaatgattgtgagctattctcaagctggaataactgagactgaatggacaagtggatcttcaaaaggcggac

SEQ ID NO: 77205 - DNA, 82 bp, Homo sapiens
ggctgcgcacagctcggcgctccttcccgctccctcacacaccggcctcagcccgcaccgaaacaggtgagaatgaccactt

SEQ ID NO: 77206 - DNA, 100 bp, Homo sapiens
acttgcgccccgtggccgcccccgccagcgccggcccccgctcctgctgctgacggcgcccagcatcacaggacatggccccctcagccacctagctggg

SEQ ID NO: 77207 - DNA, 82 bp, Homo sapiens
agggaccacggtcaccgtctcctcagattgagaggatccagaatccagatctctggaatagctaccaggcaaagaaaaaaac

SEQ ID NO: 77208 - DNA, 100 bp, Homo sapiens
ctcaattgcggggcttactgctgatgctagactgttatgatggactcaccctgtcacccaggttggactgcactggcctcaacctcctgagttcaagtga

SEQ ID NO: 77209 - DNA, 82 bp, Homo sapiens
atatttgtcccggcactggctcttcagtcccttcaagtggacccaagtggagagattgtggaactggcgaaaggtgcatgtc

SEQ ID NO: 77210 - DNA, 100 bp, Homo sapiens
agatcttcaatatgttaaccaaagaaacaccagagaccttctacattggcttcagcaaccaggagggattgactgagatcttaacaacagcagcaacgat

SEQ ID NO: 77211 - DNA, 100 bp, Homo sapiens
agtgcctcagagtgcagttcccaaggaggcttcaagacaaagggccccttacacaccagacagtccagcagggtgggataatgataagaaaataggaata

SEQ ID NO: 77212 - DNA, 100 bp, Homo sapiens
cattgtattgagaacaatatagatttgcagggccgttgctccagggagaactgcaaatatcttcatccacccccacatttaaaaacgcagttggagataa

SEQ ID NO: 77213 - DNA, 100 bp, Homo sapiens
gaagagaatattatttattccttccttggtttggctcctcctccagactcaaaggttatgatgtgattgctcaagcccaatctgggactgggaaaacggc

SEQ ID NO: 77214 - DNA, 75 bp, Homo sapiens
cctgcacacagccacgatttgcaaaggtgctgaccttaaggaaagagccaaaatgagttccagtgaagttggtcc

SEQ ID NO: 77215 - DNA, 97 bp, Homo sapiens
ggcacgccttcaccgcactcgaccaggaccacagcggcaaggtctccaagtcccagctcaagtgggtgaatttgtaagtgatgtcctgctagttcca

SEQ ID NO: 77216 - DNA, 113 bp, Homo sapiens
ctgggacgtgcttcattaacaactataacgtcagcccagtggagttgccctttggtggatataagaagtcaggctcccctggccacactggctctacatccatgagcccatca

SEQ ID NO: 77217 - DNA, 82 bp, Homo sapiens
tatactttgccgacacattccttcgagatgggtttggaaatcccttgtctccaggttgctgggattgacttcttgctcaatt

SEQ ID NO: 77218 - DNA, 100 bp, Homo sapiens
ctgtgagacatgtctgagactcctgctcagtgtagcattaagtttgaagaaaacaggtctgaaacaaggtcttacccccagctgcttctgaacacagtga

SEQ ID NO: 77219 - DNA, 100 bp, Homo sapiens
ggttatttcaacttcacctcggcaacaattacttacctggcccaggaggatgggcccgttgtgcaagcttgcgggttcgagtacacctctaaacttcagc

SEQ ID NO: 77220 - DNA, 90 bp, Homo sapiens
gccagatggaagaaccattgttagtgaacgtggacaaagctgttgtctcagggagcacagaaaaaccaatagagccatggcgactccctc

SEQ ID NO: 77221 - DNA, 97 bp, Homo sapiens
ccaaggaaggccaacgtggaggcctcacgcagctccacagacagccccagctcggtgttcctcagatggaaatcctgtatgaatgtggaagccatta

SEQ ID NO: 77222 - DNA, 90 bp, Homo sapiens
cggcatcaccagggtggctgtggacaaccagccccgagacatcggactgcagctcgatcaagtcatccgccaaagaagcctgtccagttt

SEQ ID NO: 77223 - DNA, 135 bp, Homo sapiens
ggcgatccgagttctgctacttcctagtaagggacgtctctggagagattctgaggtgtttgaggggcccatggacgatttatgccccagggggctggaggccacacccgggaggctcggatccagacactggag

SEQ ID NO: 77224 - DNA, 133 bp, Homo sapiens
gaagaagtcacaagacaagggtcctaaaacaggatcagtaaagaaggaaaaagcagtaaagccagaggaagtggtgcttcatgccccacctccaaccaagatcaaacgggagctgcacagcccctcctctgag

SEQ ID NO: 77225 - DNA, 85 bp, Homo sapiens
ggaaaaagacttccaaaaagtagcccactttattcacagaggctgcaaggtgtgactgttgtaaatctcaaggaactcttaaaga

SEQ ID NO: 77226 - DNA, 75 bp, Homo sapiens
cacggatcggattcctcagctacgaggaggcgctgaggagaggtgaaacctttgtcctggggaatagtctggccc

SEQ ID NO: 77227 - DNA, 83 bp, Homo sapiens
cgcgacaagtacgtggccgagttcctcgagtgggtttcaccagtgatcattaaagaatgggcagcttacaaaggaaagtctcc

SEQ ID NO: 77228 - DNA, 100 bp, Homo sapiens
gagagaccttggagtaattcgtcgacaggctgaatattctgaactggtcgaaacattactatcaagtcagcaagacccagttatttaccagagattagca

SEQ ID NO: 77229 - DNA, 98 bp, Homo sapiens
agatgttctcattgacttcttcaagatggggcattctcttctcccaccctcgggactttaccccagtgtgcaccacagagcttggcagagctgcaaag

SEQ ID NO: 77230 - DNA, 83 bp, Homo sapiens
tgattctccttcgctgtggcgggaagatggccggatttgaagcttgctggagtggctgcccgacgttcccgaggacatccggt

SEQ ID NO: 77231 - DNA, 100 bp, Homo sapiens
cggcggcgaccctaagggcaacaattttctgtacaccaatggaaagtgcgtcatcctaaggaacatcgacggggggccctcagcctcttggccttgaacg

SEQ ID NO: 77232 - DNA, 73 bp, Homo sapiens
gactacaagcatcactggcaaggtgactctcctattccatctgtttcttcgggatcatcttcacctctttcag

SEQ ID NO: 77233 - DNA, 76 bp, Homo sapiens
atcaacatcaactacgtccctctgaagacaaatgctgtgcttcatgaagttaaaagagaggggctccccgtggaac

SEQ ID NO: 77234 - DNA, 76 bp, Homo sapiens
tagacatttacgcggatgtcggcgaagagttcaaccaggactttccttatcccagttgattgtgcagaatacactg

SEQ ID NO: 77235 - DNA, 98 bp, Homo sapiens
acacgcccgacgaggagagcatcgactggaccaagatcgagcccagcgtcaacttcctcaagtcgcccaaagttcctgggcttcccgatggactcgag

SEQ ID NO: 77236 - DNA, 100 bp, Homo sapiens
tcccggccctgagcgcactctggagggattctggcatcagggaggctttcagccggagaagcgagtttcagctgatgaagacttccggggcaggcgtcag

SEQ ID NO: 77237 - DNA, 100 bp, Homo sapiens
gaaaaatcctacctaggtaatgtgtagttctcaatgcatcatgtcaggcagcttatgatgccaatttgtcccatggatggtgatgggaatctttgcaaat

SEQ ID NO: 77238 - DNA, 99 bp, Homo sapiens
gtactatcctcggtgctgtggtgcagagctagttcctctccagctcagccgcgtaggaggcaaaaccttcaactgaggacttgggggataagaaggaag

SEQ ID NO: 77239 - DNA, 75 bp, Homo sapiens
caactgtcaaagcaagaagcccgaacccaccagttgaacaggtagttaagcccccccaaaacaagacggaaagtg

SEQ ID NO: 77240 - DNA, 51 bp, Homo sapiens
tgcagatcgaagccaagtgctcagcaagactgttggtgaaattgcaagagc

SEQ ID NO: 77241 - DNA, 83 bp, Homo sapiens
accacgcaccgactatgtcgcctgccaccgagccgggcccacctccccaccaaggaagggactggtgattgcagctggaagtg

SEQ ID NO: 77242 - DNA, 100 bp, Homo sapiens
gagctggagggggagacagatcctctgctcattgccatgaaggaactcaactcaagaggtttggatatggaccttcttcaattcctggccttcctctttg

SEQ ID NO: 77243 - DNA, 100 bp, Homo sapiens
ctttgaaatggtgctggatgaaattagaaaggtgctggagaatctggtaaaagcaccattgtgaagcagatgaggatcctgcatgttaatgggtttaatg

SEQ ID NO: 77244 - DNA, 97 bp, Homo sapiens
ccttacgtcagttgtaaattacagagaacctaagtctgtttgcaaagcacctgaactggagttaaacatagatgtagctgatgtggagagcttgctg

SEQ ID NO: 77245 - DNA, 115 bp, Homo sapiens
aggtccctctttggggtggctctttgctaagtgctgctgttgcttcccgtgtagagtatcagatgtagaaggtggtgatggactgcagctcagaaaggaacatactctcaaaata

SEQ ID NO: 77246 - DNA, 90 bp, Homo sapiens
gttctgttcagactcaacatacacccagaacaatgcaggtgcatctaactgtgcaagcagctggcttgaggacacccctggcagtgcccg

SEQ ID NO: 77247 - DNA, 90 bp, Homo sapiens
ctggggccttgacaatttgcacttagtgaaagactggagaactgtgaatgaaggtgatgagacaaaccatgcttctgccacatcaacaca

SEQ ID NO: 77248 - DNA, 97 bp, Homo sapiens
actcatatgatctgccctggttcaggacgctcagctggtcgattcctcgggacccacagtctcaccacgtctcctccagaggacggcagagggtaca

SEQ ID NO: 77249 - DNA, 75 bp, Homo sapiens
aggcactgctttttcatgacgaattcagcggggtgccaagtcgttttctgtgtgggttgagagacaggctgtgca

SEQ ID NO: 77250 - DNA, 100 bp, Homo sapiens
gccagctcttcatcaaggagctgcggagccggacctttcccagtttacttctacaatttcggatggaaggattatggtgtagcgtctcttactactatcc

SEQ ID NO: 77251 - DNA, 100 bp, Homo sapiens
gcgcaggagggaaagttcagcgacggcggcagcggccggagccgggccgggcagctagcagggcgcttcggaatcttgacaaaacttttggaagtgtcag

SEQ ID NO: 77252 - DNA, 100 bp, Homo sapiens
gctattaaatttgctcgcctggtcaactataacaagatggtcttctgtccctactacgatgcaatcctgaactttatattcagagcaccaatcaaattaa

SEQ ID NO: 77253 - DNA, 50 bp, Homo sapiens
cgctgctgctcgttcgagtcgcagaatgtgtgctttatcacaccccagtt

SEQ ID NO: 77254 - DNA, 100 bp, Homo sapiens
cctgaaagcaaccaggaggcagtaaattcttcagctgctcggacagatgaagctccccaaggagctgcagacctccaatggaagtccgggcacatggcgg

SEQ ID NO: 77255 - DNA, 82 bp, Homo sapiens
tccacggtagattctcccgatcacaaaccattatccagagtggctggtggaggaagtgaaggagctgtgtgatggcctggag

SEQ ID NO: 77256 - DNA, 75 bp, Homo sapiens
ccagaaggctgacaagctccatgaggcagtataccttaaatggcaagaaggaaataaatcatctgacatcactca

SEQ ID NO: 77257 - DNA, 90 bp, Homo sapiens
cggccagatcggcttcatgctgtgcagcaagaacccggaactggcgacgccaaccccgctgtgtctgaagatgccttattcagggacaag

SEQ ID NO: 77258 - DNA, 75 bp, Homo sapiens
ctcagatactagagctggccacactgcaggacattgggaaggaatgggacgcgagagataaagattctatccgac

SEQ ID NO: 77259 - DNA, 80 bp, Homo sapiens
cctgcaagattgtggtgcacacgccctgcatcgagcagctggagaagttttaaagcccatctgggagcagttacctgtgc

SEQ ID NO: 77260 - DNA, 95 bp, Homo sapiens
ggagaaggaagcgagactcatacgcaacctcaatggtgctggagaatctggtaaaagcaccattgtgaagcagatgaggatcctgcatgttaatg

SEQ ID NO: 77261 - DNA, 74 bp, Homo sapiens
ggaaaaaggaatcattgacccaacaaaggtgtgatccctcacatccacaaatctctgattggaaagaagggaca

SEQ ID NO: 77262 - DNA, 100 bp, Homo sapiens
ccaaactcagccctccgttaagatcctggttccatgccgcagtaggacagcaggcccaagtctgcacatcccagtgatgatggccaaagagaagccaccg

SEQ ID NO: 77263 - DNA, 100 bp, Homo sapiens
ttagaagatattgacgaagaaggggatgaggatgaaggtgaagaagatgaagatgatgatgaaggggaggaaggagaggaggatgaagatgaagatgaag

SEQ ID NO: 77264 - DNA, 100 bp, Homo sapiens
aatgaagaacgagattcagacacagttgttgacctcctgtactggagagacattaagaagactggagtggtgtttggtgccagcctattcctgctgcttt

SEQ ID NO: 77265 - DNA, 83 bp, Homo sapiens
cgggcggcttcctggcctgggcgctccggtggcggcggagaaagtttcctacactactgaggtttaggggcactgtgaagcaa

SEQ ID NO: 77266 - DNA, 82 bp, Homo sapiens
ttcgacttagccctgctccaggaatgggacctcgagtcactgtgttgttgacctcctgtactggagagacattaagaagact

SEQ ID NO: 77267 - DNA, 75 bp, Homo sapiens
ggatgtcggtgggcctctgagatatgccgtttacggggtaaactagcgctcctttccgtaaccacgggaggcacg

SEQ ID NO: 77268 - DNA, 100 bp, Homo sapiens
tgacccaggttacggaccggaagtgctccagaactcaaggtacaggtttgcagattccgccagcagcacagcaagctctacagatgagtggctctttggc

SEQ ID NO: 77269 - DNA, 100 bp, Homo sapiens
tttctcttgctcctcctgttcttactcttcatttaaagagatttcagcagggtgaccggggtttcgacggcctggctgggttgccaggcgagaagggcca

SEQ ID NO: 77270 - DNA, 82 bp, Homo sapiens
ttgccggaggagcccctcaggccgtgtgaaagtccaaatacagtctcttaatggtgaacacctgcacatccgggagttccac

SEQ ID NO: 77271 - DNA, 83 bp, Homo sapiens
ccaggacacggtctgggccgccgaatctccggccgaagagcggcggcggcagcggcggtattgcaggcaatgggatatccaac

SEQ ID NO: 77272 - DNA, 71 bp, Homo sapiens
tctgtcctgcagggtttgaaggcacttgtggtctgtttttctggggggccaccaacacctcccgtgaatct

SEQ ID NO: 77273 - DNA, 100 bp, Homo sapiens
cgcatcgccacagctgaaggctgcgagggactaagagcagaagctttttagatgaggaatttcctcactatgattccctgtcctgcgcagatgcaattca

SEQ ID NO: 77274 - DNA, 96 bp, Homo sapiens
agctcaaagaggctgagaaggcgtcgtcacaggaagtggccataaaatgcagtaaaaacaaatccagttcccaagaagctgtacaaatgctttctt

SEQ ID NO: 77275 - DNA, 75 bp, Homo sapiens
aagagactggggaacagatgggcagaaatcgcaaagctactgcctggacgtggttctatagatggtaataaccaa

SEQ ID NO: 77276 - DNA, 98 bp, Homo sapiens
ggccaccaggaccagtggggccagcaggcatcaaaggggcgaaggccaaacgtaccaagaaagtcgggatcgtcggtaaatacgggacccgctatggg

SEQ ID NO: 77277 - DNA, 75 bp, Homo sapiens
cagaggagctcaaaatggagttgccggagagacagcccaggaagactatgaccgtctgaggcctttatcttaccc

SEQ ID NO: 77278 - DNA, 87 bp, Homo sapiens
cgcctacttaaatgctgtgcgctggcaccctcagaacaaacaagtaagaagtttgcgacagagcactattgccaagcgttcaaatgc

SEQ ID NO: 77279 - DNA, 82 bp, Homo sapiens
gacagtaaacagaatgtcccttcaggaggccccgtgccatcgccacagacctacagatgcagcagcttttttatgagaatta

SEQ ID NO: 77280 - DNA, 100 bp, Homo sapiens
ctgcccggactagcctcttactgctcaggctcaacgacgctgccctgcgggcgctgcaagagtgtcagcggcaacaggcatcaagcatgatggaaccatg

SEQ ID NO: 77281 - DNA, 74 bp, Homo sapiens
ataacacagccagtcagcaagcagcatcacaagctcagcctggacagcaacagattttcgacaatgaagccaaa

SEQ ID NO: 77282 - DNA, 101 bp, Homo sapiens
ggacttcgaaggagggctctcctgtctgccaccatcctgggttgacaattctacacaaggaggtgcaatggatgagcttcatagtctggatccaagaaggc

SEQ ID NO: 77283 - DNA, 100 bp, Homo sapiens
tttgacatgttctttggtggtggtggacggatggctagagagagaagagtgagtgacctgcaggaagaaggcaagaatgccatcaactcaccgatgtccc

SEQ ID NO: 77284 - DNA, 74 bp, Homo sapiens
ctacttgttccaaaggaaaatcctggcagaggacaattacagaagaattgtcttctctccttaaccaattccag

SEQ ID NO: 77285 - DNA, 150 bp, Homo sapiens
acccatgagttgtgacaaatcaacacaaaccccaagtcctccttgccaggccttcaaccactatctcagtgcaatgggaacagatgttgttattgtaaagaatggaagaagaatatgtggaacaggaggttgtttagccagcgcaccttt

SEQ ID NO: 77286 - DNA, 97 bp, Homo sapiens
cgtggccttagctgtgctcgcgctactctctctttctggcctggaggctatccagcggctccacgtgttccccacgtttgtggcgtacgagctcacg

SEQ ID NO: 77287 - DNA, 85 bp, Homo sapiens
cccaaatgtctgactctgactctcggactgagaaacgcaaggtgtggacactgccagcggctgcagccgacttggaatgacctgg

SEQ ID NO: 77288 - DNA, 90 bp, Homo sapiens
gaactgttctcaggactcattattttaacatttgggagaaacacagccagaagagtcgacttcaatgttcctatgaagaacaaccagata

SEQ ID NO: 77289 - DNA, 87 bp, Homo sapiens
tcacggcgtacgccctcatggggaaaatctccccggtgactttcagagaggcgtttccatcaaccagttttgcaaggagttcaatga

SEQ ID NO: 77290 - DNA, 50 bp, Homo sapiens
ggataagacagtcccacagtccagaaggagctgagtctccccagaagagg

SEQ ID NO: 77291 - DNA, 75 bp, Homo sapiens
cgatgggaagtccttattattggccctccagatacactttatcttcaggcagtgacagtggtgggagcagcagca

SEQ ID NO: 77292 - DNA, 82 bp, Homo sapiens
tgctcaaggacacggtctacaccgacttcgacgcgggagatacagatgacccaccaagaattactcagaaccctgtgatcaa

SEQ ID NO: 77293 - DNA, 82 bp, Homo sapiens
cttcacatgtaattcagaaattagggacagttttgaaacaaagttatgtcagatattttcagacctcaatgccacctatcgt

SEQ ID NO: 77294 - DNA, 100 bp, Homo sapiens
tggagattccacccaaatcctcttctccaagaagtctagggacaggaagatggttggcgacgtgaccggggcccaggcctatgcctccaccgccaagtgc

SEQ ID NO: 77295 - DNA, 74 bp, Homo sapiens
ggacgagcaggaagctgcggctgagtcggtgaccaagaatatggcccaggtgaccaaagccctggacaaggccc

SEQ ID NO: 77296 - DNA, 90 bp, Homo sapiens
gaaggcggcaaaatggcggaccgcttctcccgcttcaacgaagaccgagactttcagaaccactcacgaattcttgtttggtgcccttgc

SEQ ID NO: 77297 - DNA, 96 bp, Homo sapiens
ttggtatgtggccactttcatagcaagtgtgatcggcacccgagggcttgcggctgaagctgcaagctttcttcctggtggcagatgacatcatgg

SEQ ID NO: 77298 - DNA, 83 bp, Homo sapiens
ctcagctcctggggctgctaatgctctgggtctctggtcaaaatgcagatcttcgtgaaaacccttaccggcaagaccatcac

SEQ ID NO: 77299 - DNA, 75 bp, Homo sapiens
gagcggatggagttgctgcaggcagagggagccacaggtgacaccggaaactggtactcaagtgatgaggatgag

SEQ ID NO: 77300 - DNA, 100 bp, Homo sapiens
tacccattgagcaatgcctgccttcacttgaaaactccaagtactgccgtttcaaccaggacccagaagcaggtgacaaccaaagccaagcaactgaagg

SEQ ID NO: 77301 - DNA, 90 bp, Homo sapiens
tgccggcgctgctgagtttcttcatctacaacccgcgcttctggccgcgggaaggagaggtgggagacctacctgatgcagatattaaac

SEQ ID NO: 77302 - DNA, 82 bp, Homo sapiens
ggcggagcctctggaatcacccgggtcgctgttcctgagcaaatggttatgagccttagagtttctgaactccaagtactgt

SEQ ID NO: 77303 - DNA, 95 bp, Homo sapiens
aagaactaagaatattattagcacaagagcaccatactttgaggcaattcacagaagctgtgagtccttcagtgctacccccttcagctttgcca

SEQ ID NO: 77304 - DNA, 75 bp, Homo sapiens
cgcctcccgcctcctgccgcagcccggtgcgcaccctgtggcatgaccctcgtcacataggctggaaagatttca

SEQ ID NO: 77305 - DNA, 98 bp, Homo sapiens
cagaactggatgctcaaggccctgcccccagccctgcaggaccctgatgcttggtgtgacctgagtaaatttgacctccctgaggaaccatctgcaga

SEQ ID NO: 77306 - DNA, 100 bp, Homo sapiens
agcctggcccctccgcctcctctctcctctcccagttccgcagtccttcctggcaaacagatcctcagccacagaaagccaccctcaagtctggggatga

SEQ ID NO: 77307 - DNA, 75 bp, Homo sapiens
tgaaattaaataggaagatcatcagtcaaggaagacccactggagaacagggtcttgctttgtcacccaggctgg

SEQ ID NO: 77308 - DNA, 101 bp, Homo sapiens
caagaaaacctatgatcgagcaattaagctagaacaagaatttggagaatattttacagcaacgaaggttttgggaacagtaaaatggttcaatgtaagga

SEQ ID NO: 77309 - DNA, 101 bp, Homo sapiens
ctgggtgtgcagccggcagccgcagagcggggaggaggcggtggccctgctggaggagctctggtacaacagggtctggattcccgatcctgaagaagttt

SEQ ID NO: 77310 - DNA, 50 bp, Homo sapiens
tctacccactgccctcggcccgcgataatgatgaacctctcctgagtgga

SEQ ID NO: 77311 - DNA, 90 bp, Homo sapiens
gcacatcactcccgagtggaggaagcaatacatccagtatgaggattggcagccaccatttgcatgtgatgttgataaacttcattttac

SEQ ID NO: 77312 - DNA, 88 bp, Homo sapiens
cctgtgctgtgacccgcactggtcgtgggagtcacctgaaaggcaagaaatgggctccattggcctccagaggactgggagcctgccc

SEQ ID NO: 77313 - DNA, 75 bp, Homo sapiens
caagaccctcggcctcctcccccgccgccttcctgcaggttgcacgttttcaaaaaatacctaatggtgaaaatg

SEQ ID NO: 77314 - DNA, 100 bp, Homo sapiens
tgtgagcaagcaaaatcagtaattgtgtaggagagaagtttgctgaggaatgccttcaagcacaaagtgatgaatgactgccttcaagtctcaagaaaac

SEQ ID NO: 77315 - DNA, 75 bp, Homo sapiens
tgacacgtattgtctcaagattaaagatatggaatgtgcagatgtcccactattaactccaagcagcaaagaaat

SEQ ID NO: 77316 - DNA, 110 bp, Homo sapiens
tggtgctcaaaggccggccatgtaagatcgtcgagatgtctacttcgaagactggcaagcacggccacgccaaggaagtggggataaatggtcaaacaagcaactcttct

SEQ ID NO: 77317 - DNA, 84 bp, Homo sapiens
tccttccatctctgctgctctctcatttgctggccatcggattgggggctgatgtggagaatctcaacagtcagaatgaagctg

SEQ ID NO: 77318 - DNA, 74 bp, Homo sapiens
tggttggtggaggctgtggcaatggaacaggcttgagaaacagcaaagtgaaaaggagagcttgttgaaggaaa

SEQ ID NO: 77319 - DNA, 90 bp, Homo sapiens
ctgggccgcagcgggaccccagttcctccgccaagcgcggccgccgcccccgcctcaggtctcggcgcggaagatggccggcggcgtgga

SEQ ID NO: 77320 - DNA, 100 bp, Homo sapiens
tctcccggcccctccccttctttgtcttttgcagatgatcgccgggtgtcgatccttttccctccagtcaggaaacaaatggaagactgctgcgaccctg

SEQ ID NO: 77321 - DNA, 83 bp, Homo sapiens
ctgcctgtgtctcgtcttgtatctctaattggaagcaatatttttgccttagtgagatacaatcaacaaaatgacaattacag

SEQ ID NO: 77322 - DNA, 100 bp, Homo sapiens
ttttcatgcctgtagaaatgagaatgacagctgtgataaaaaaaaaattcatctgggcggtatctggaacttgggtcctggcggcagagaccacgtccca

SEQ ID NO: 77323 - DNA, 142 bp, Homo sapiens
agaggagcctttcgatatctggggaacttggcattcaacattaaaaagcggatccaaagacccaggaatgacaggtgacagagattggcaaagatgtgattggtttaaggatcagtcctctgcagtttcgctaaggccccct

SEQ ID NO: 77324 - DNA, 90 bp, Homo sapiens
tgggattactgactcataaccagttaactgaactaaaggcagactttcagtaccaagagtcaaatttgagaacaaaaatgaacagtatgg

SEQ ID NO: 77325 - DNA, 74 bp, Homo sapiens
caggtccgcccagcagccgcgcttcagccaggctgtattcatcaccaaagaaaaaacttacaccaatgcagaaa

SEQ ID NO: 77326 - DNA, 75 bp, Homo sapiens
cccagctcggcccgcgggggagccccgggagccgcacgagctgcctgagaactggacagacacgcgggagacgct

SEQ ID NO: 77327 - DNA, 87 bp, Homo sapiens
ggttgcaaaatttctccataagcatgatttggatcttatatgtagagcccatcaggttcgttccaccagtcataaaccagatgaaat

SEQ ID NO: 77328 - DNA, 50 bp, Homo sapiens
ggccatcgccgccgacctgtgcaagttgggagctgaaagtgccgacagca

SEQ ID NO: 77329 - DNA, 83 bp, Homo sapiens
gggcagaaagcagaagatgtccctgtgaggattagatcctgaaggagctagacgagtgctacgagcgcttcagtcgcgagaca

SEQ ID NO: 77330 - DNA, 82 bp, Homo sapiens
gcagctgctgcaggccgagaagcgggcagccgagaaggtgtccgaggcccgcaaaacaaaggaaggagtctgaaactcagtg

SEQ ID NO: 77331 - DNA, 82 bp, Homo sapiens
gccgctcgccctctgcctgctggctgcacccgcctccgcgctcgtcagaaaaatggctacaaacttcctagcacatgagaag

SEQ ID NO: 77332 - DNA, 100 bp, Homo sapiens
gggagggcgagatccggtagggggcagtggccagatgcctttgaagatgagaaacccccaaagaagagccttctctccaaagtttcacaaggaaagagga

SEQ ID NO: 77333 - DNA, 75 bp, Homo sapiens
cacgaccacatttgtcatgatgacagtgacaaggccgtgacttggcgagcacgaccctccccgggtaccctccac

SEQ ID NO: 77334 - DNA, 82 bp, Homo sapiens
gatagaatgcttgatatgggctttgaaccccaaataaggaagattgtggatcaaataagagagtccaatgtgctgattgctg

SEQ ID NO: 77335 - DNA, 90 bp, Homo sapiens
ctacagatattctaatgggtgttctgaaggaagttgtaagacagagatcagatttaaaggtttcaggtacgttcaccaactttctttcaa

SEQ ID NO: 77336 - DNA, 83 bp, Homo sapiens
caagaagtgccaggtggagcggcaggaaggccactcacagggcttcaacaagctagctgagccttcaacctggactactacac

SEQ ID NO: 77337 - DNA, 100 bp, Homo sapiens
ccggccgcggctgaaaggtaccagggcccctgatgccggagcccgtgtgctcggccctcttgcagacggccgaccaccctgcagtaccagaaagtgctgt

SEQ ID NO: 77338 - DNA, 75 bp, Homo sapiens
gcaaattgtggacactccaccgcatgtagcagctgggctgaagtggctatctccacgtccactgtcctgctgtgt

SEQ ID NO: 77339 - DNA, 96 bp, Homo sapiens
ggaggagcagacgctcaaccagcttctggtagaaatggatggtgtcatggagaaactccagctgggcccagagattctgcagcgggaaaatccaag

SEQ ID NO: 77340 - DNA, 100 bp, Homo sapiens
cctggcctccctcaccttggacacctcgcttggtgcaccgtccaggtgaggttagagctggggcatcgcgcccaactgcgcaagaagcccaccacggagg

SEQ ID NO: 77341 - DNA, 75 bp, Homo sapiens
aagagacacagtatggtagccacacccccagcccatctgctggcaaggctaagattagaacagctcataggagag

SEQ ID NO: 77342 - DNA, 83 bp, Homo sapiens
ggtcttcatcgaagatgctattcagccatgccagtgacggtaacccgcaccaccatcacaaccaccacgacgtcatcttcggg

SEQ ID NO: 77343 - DNA, 51 bp, Homo sapiens
attgatttcattcttatttcaatgcagggctgatctatgactcggtcatgc

SEQ ID NO: 77344 - DNA, 100 bp, Homo sapiens
ctggccccgggcaacgatcggaactcggacacgcgagaaccctctgcccacagtggagattgccatccggaacacgggcgatgcggaccagtggtgccca

SEQ ID NO: 77345 - DNA, 101 bp, Homo sapiens
gctcctcaatggcctgagcaagtaccagccagcgccagctgcagccctggccgcgcactcgcctcagctgagcctgggatggccgtataagaaaataaaca

SEQ ID NO: 77346 - DNA, 111 bp, Homo sapiens
acaagacgacaagatataagaaatggagacccactgactcactgttcagacttacaccatggtgaccaagaatatggcccaggtgaccaaagccctggacaaggccctgag

SEQ ID NO: 77347 - DNA, 82 bp, Homo sapiens
ccacactggcagcagcaggctcctcctgatccagaattactggaagaatttagtccagttgttgagagacttggatttgatg

SEQ ID NO: 77348 - DNA, 82 bp, Homo sapiens
gtcccctaccagatgtaccttggaagcaggagccatgacttttcagaacgtcaaggtcgtgggaaataaaaggcagttctac

SEQ ID NO: 77349 - DNA, 100 bp, Homo sapiens
tctcggacgtgcggggcctgggcctcccggtccgcaagcaggttgattcttcaccacactgaaaccattaggaaaaatccttgtggttaacagcagaggc

SEQ ID NO: 77350 - DNA, 82 bp, Homo sapiens
cggctcccctctcggggcaacccagacgtgcaacaaagtgcgatggtactccaaagattcaggtttactcacgtcatccagc

SEQ ID NO: 77351 - DNA, 100 bp, Homo sapiens
gatgcccctcctccaccagaggactgggaggagcatgtcaacagtatttgattttcatcaagcagctgatggtatccaggaacaacagagacaagaacaa

SEQ ID NO: 77352 - DNA, 74 bp, Homo sapiens
aaacttctaagagaagcaatgggaatttacatcagcaccctcaaaacaggacaaggagactggctttcacagag

SEQ ID NO: 77353 - DNA, 75 bp, Homo sapiens
ctgccctacggcttctccgccatgcaaggctggcgcgtctccatggaggatcactactcttggaatcaaagataa

SEQ ID NO: 77354 - DNA, 83 bp, Homo sapiens
attttctgatctggatcctgatgtagtgtatttgatgctttctgaatgtgatttcaaagggcagctgcaatgactctccgcac

SEQ ID NO: 77355 - DNA, 75 bp, Homo sapiens
gatcagtacaaaaattcttcaagaaatctaagagaaatggtcaatgcatggtttgctgagagagttcacaccatc

SEQ ID NO: 77356 - DNA, 87 bp, Homo sapiens
ctccattgactctgagccaggaagccctctattggatgatgcaaagcatctgccacctccactgcccagcaaaactccgcctcctcc

SEQ ID NO: 77357 - DNA, 50 bp, Homo sapiens
tgctagaccagcctggcagggagggtgctgttgggaacacagaggaagtg

SEQ ID NO: 77358 - DNA, 75 bp, Homo sapiens
tggattaaacgatgatgattttgaaccttacttgagtccacaggcaaggcccatctgaagaggaatgattatacg

SEQ ID NO: 77359 - DNA, 122 bp, Homo sapiens
agcagcccaggaagcactgagcatccagctccagcctaaggagacccagcctttcccaaagagtggaatgttcttaatgagtcgccagttcaattaccgcctctgccaccgaggaattggcc

SEQ ID NO: 77360 - DNA, 74 bp, Homo sapiens
caccgactctgagacatcccttggaagggacttgcaacaaagcattgccagagaacctagtgctccttcaattc

SEQ ID NO: 77361 - DNA, 87 bp, Homo sapiens
agtctcaagtgtccatcttgcagtccttgtttggagaggatgcagaaaatgcgattgtgcatatgggcggtcagtggttgggtggtc

SEQ ID NO: 77362 - DNA, 100 bp, Homo sapiens
cagaaacttattcacagttaccaaagctggattaacacagattcctcagatccagaagactgaaatttcctttcgtcctaatgatcccaagagctatgag

SEQ ID NO: 77363 - DNA, 83 bp, Homo sapiens
ccgatcacaaagatacgaatctcttaagggggtgggttttatcaacagcctcaagttctccagctctggggacttcctggtgg

SEQ ID NO: 77364 - DNA, 74 bp, Homo sapiens
ccggaccgctgggggtgcagggcgccttgggtgtagcacccagaacaagccagtcttggtgctctgtgttcacc

SEQ ID NO: 77365 - DNA, 75 bp, Homo sapiens
gtggcaatggtcgtggaggccgagggcgaggaggtttgatgaaatcctggaggccagtgatgggatcatggtggc

SEQ ID NO: 77366 - DNA, 75 bp, Homo sapiens
cgggaacggaggaagagcagtggagggggtccccacggagtctggaccatggaggagcgaggtctggcccccaag

SEQ ID NO: 77367 - DNA, 83 bp, Homo sapiens
aacccagcagtgccaacacggaggataaaatggaggtggacctgagtgaacatcctgtgaagccacctggcagctctttacaa

SEQ ID NO: 77368 - DNA, 100 bp, Homo sapiens
ggaagtcaacattttgatgttcctcccaggagacagctatatttgcccatgttattcaaggttgacctgacagttcaagaaaaggagaaatatcttaatg

SEQ ID NO: 77369 - DNA, 75 bp, Homo sapiens
ggaactgtgaccttcatctttcagatggtgcctcagttctccttctcccgcttggcgggtgctgacgtggtgttg

SEQ ID NO: 77370 - DNA, 90 bp, Homo sapiens
gatcccagcctcaggcgtgcgcggacggtgtgcgggaaaaccagtagattcccagacatcgcgaagtgaatctgaaattgtgccaaaagt

SEQ ID NO: 77371 - DNA, 102 bp, Homo sapiens
ctaaacagtggactcaacttcaaagacgttctcaaggagaaggcagacctggttgctgatagtccaactccaccgccaccacctccaccagatgacattccc

SEQ ID NO: 77372 - DNA, 71 bp, Homo sapiens
gctgtggataacgggaggtgaatttccatgtcaacatagtcctggttggatggcaagcatgtggtgtttgg

SEQ ID NO: 77373 - DNA, 100 bp, Homo sapiens
agaaaatgaaagtcctgctgaaacagatctgcagaagaaaaagtcagcactttttgaagtgtctgaggttataccagtcatgacaaataattatgaagaa

SEQ ID NO: 77374 - DNA, 75 bp, Homo sapiens
ccctgagcaagatttcctgggtcaacaggttacatttggccaaaatcggactccacggggtttcaccatctgctg

SEQ ID NO: 77375 - DNA, 100 bp, Homo sapiens
tcgtggtgtgttcttgactccgctgctcgccatgtcttactactttgaccgcgatgatgtggctttgaagaactttgccaaatactttcttcaccaatct

SEQ ID NO: 77376 - DNA, 100 bp, Homo sapiens
tggaatatctgctgtgctgctgctgctgctgctgctggctccaaacaggcatgcgaggtgcctttggaaagccccagggcactgtggccagggttcacat

SEQ ID NO: 77377 - DNA, 82 bp, Homo sapiens
cagaacccaagaagattccgataagaaacacgccctggtacctgacagtgtaaagaaggagctcctacaaagaataagaaca

SEQ ID NO: 77378 - DNA, 95 bp, Homo sapiens
gcggcccgagggcacccagagcacggccacactccgcatcctggccagcatgcccagccgcaccattgagtttgaacaactgactcttgatggac

SEQ ID NO: 77379 - DNA, 90 bp, Homo sapiens
aaaaatcccaaggtctgcaaaggtgcacattcaggttcccgagcacaaacatcaagataacgttcactgccctgtccagcgagaagagag

SEQ ID NO: 77380 - DNA, 75 bp, Homo sapiens
ccttgtcactggagtgcaagaagaaattcccacctgtcaaagagatgctgcacttaaaaggatgcttgttttgat

SEQ ID NO: 77381 - DNA, 96 bp, Homo sapiens
gctgagttgcaggccctgagggagagtgtggaagaagcaaccaaggaaccaagtgagaagaaggtacctctggacatgtcattgttccttaagctc

SEQ ID NO: 77382 - DNA, 90 bp, Homo sapiens
tgtgctgagttttcttttcatgtaccaagtcttgaagagcttgctggagctgagtcagtgctgattctctcaaatagagcttgaaggata

SEQ ID NO: 77383 - DNA, 83 bp, Homo sapiens
cgagctgtgcgggcgggcggtgagcgcccatatgggggttctggagagcggggtgtgggttctgggaggtgatcagtgatgaa

SEQ ID NO: 77384 - DNA, 100 bp, Homo sapiens
ggaggatgaagttgattgactatggtctctccggctaccagggaggtatggaaacattggaacttcaaaaggacatcaaagaagaatcagatgaagaaga

SEQ ID NO: 77385 - DNA, 100 bp, Homo sapiens
gtgaagcgcttgcagacgcactgctacaaggtccatgaccgtgccttggcatctcccaatggggtggctttgctctgggctcctgttccctgtgagctgc

SEQ ID NO: 77386 - DNA, 100 bp, Homo sapiens
cacaagagacaaccgtgcttctgagatacagcctttacagaggtttttcattagtcaatacagtgaaggctggcatgatcatcagcttcccatccaataa

SEQ ID NO: 77387 - DNA, 109 bp, Homo sapiens
gatctgtctgaatgtttaattaatcaggaatgtgaagaaattctacaggttgatgctatgaaactgggagtaaaggaaatgaagaaggcatacaagcaagtgaagatcg

SEQ ID NO: 77388 - DNA, 100 bp, Homo sapiens
taaagtctgagagagggaagtcgcctctgtgctcgtgagtgcatggggtataagggttcccagcaccatgagggcctggatcttctttctcctttgcctg

SEQ ID NO: 77389 - DNA, 100 bp, Homo sapiens
gatctcgccaaaaaggacatctttggagccagctacctctgacttttgaggatgttgctatttatttctccgagcaagaatggcaggatctagaggcatg

SEQ ID NO: 77390 - DNA, 75 bp, Homo sapiens
gggagcagcaatggatgcgcttgaaaaatgtggtaataagctgcagtcaacaggaaataaagcagaagacataaa

SEQ ID NO: 77391 - DNA, 85 bp, Homo sapiens
agaagacatgatgaaaaaagagaaaaagtctgaagctctgaatatcagagacttcccaagtaagaagcggaagaggagccgctgg

SEQ ID NO: 77392 - DNA, 82 bp, Homo sapiens
agcaaccaacactgtggggagtattcttagtagagaagctacactgcagtttgcctggaattggctcgggaaaaggtaatgc

SEQ ID NO: 77393 - DNA, 100 bp, Homo sapiens
aagtaatggtgcaaagcctgaagcacagtatgaaaacccaccacatatctatgcccttgcagataatatgtacagaaacatgatcattgacagagagaac

SEQ ID NO: 77394 - DNA, 100 bp, Homo sapiens
aaggccttgtgctgaccaagctgctcacctcggaatttatcatggcatccagcattgaccactacaagtaaaatgcgaattccacattctcatgcattta

SEQ ID NO: 77395 - DNA, 88 bp, Homo sapiens
tggggctgttactagtccaacctctacccttgaaagcagagatagtggcatcattggtctctaattaacagaagatggcaaagcccag

SEQ ID NO: 77396 - DNA, 74 bp, Homo sapiens
gtttaatgaccttgttatcagtgatggctcttctctggaagatcttgtgaaatgactgctgtccatgcaggcaa

SEQ ID NO: 77397 - DNA, 83 bp, Homo sapiens
aacgcccctccagccttcgagtcgttcttgctcttcgagggcgagaagggcgtggttgctctccagaccctacgaaaattagt

SEQ ID NO: 77398 - DNA, 123 bp, Homo sapiens
cccaagtcgtccccctctccgccccccaggaggggcgagagggagccgcagctgatgtcagggtgtgctgggtgcatcatgtaactggcatgtgggtgtaccctttcctggaacacattggcc

SEQ ID NO: 77399 - DNA, 50 bp, Homo sapiens
aaatgtgcccaacatcatcattgcgcttagcagtgtctgcaaaaacgaat

SEQ ID NO: 77400 - DNA, 74 bp, Homo sapiens
tctcagaccattcccatcagtgagcattacaggatagcactataatatgcagaaatctacaaattctgatactt

SEQ ID NO: 77401 - DNA, 50 bp, Homo sapiens
caaaggtgcagaaagcactctgacaaacagagtgcaagacgatgacttgc

SEQ ID NO: 77402 - DNA, 98 bp, Homo sapiens
aagcggtcagccgccctcagccagttcgtgattcacaggagcctctgtatcagcaccatgcagaggaactgtgagagtgacactgaggaggacatcgc

SEQ ID NO: 77403 - DNA, 75 bp, Homo sapiens
aactactcctttttacctttggttcacaacatcatcaaatgcactgacgtcttcatctgcacaagccccatcaag

SEQ ID NO: 77404 - DNA, 100 bp, Homo sapiens
cgccgcggcgctgtcgccggagagggagggcaccgctgtcgtcggttcctggacctgccctgggaagacgtgctgctcccacacgtcctgaaccgggtcc

SEQ ID NO: 77405 - DNA, 73 bp, Homo sapiens
atgacactgtggctggggcagacaagtttggcaacatatgtgtgcttagcagtgtctgcaaaaacgaatcttt

SEQ ID NO: 77406 - DNA, 51 bp, Homo sapiens
aaagacatggagattctcttaaaaagatgcccttggaaatcacccgtagct

SEQ ID NO: 77407 - DNA, 50 bp, Homo sapiens
tcctggccaaccacaacaggatcacccagaggactgattacggtgagcag

SEQ ID NO: 77408 - DNA, 99 bp, Homo sapiens
aggtgtcggcgcgggagcagcacttccacagccaagtgcgggagtccacgacaatgcagatcttcgtgaagactctgactggtaagaccatcaccctcg

SEQ ID NO: 77409 - DNA, 97 bp, Homo sapiens
gatcatccaccgagatctgaaagctggcaacgtgctgatgaccctcgagggagacatcaggctggccctggcctcccacgactacatcctgaagatt

SEQ ID NO: 77410 - DNA, 98 bp, Homo sapiens
gaattagatgagattactgatgcccaggttgctcctgcaactgaagagctggaaactgacaaactagctctcccgatgagccccagcccgcttagccc

SEQ ID NO: 77411 - DNA, 117 bp, Homo sapiens
ccggccctgcgcctcccgccgcgcccgggatgtattcgtccccgctctgcctcacccagagcacagcaatggaggaaacagctatatgggaacaacatacagtgacgcttcacaggg

SEQ ID NO: 77412 - DNA, 51 bp, Homo sapiens
gaggttgtcctgagggatggacgcggttattgcagccgaaggagaaatgaa

SEQ ID NO: 77413 - DNA, 75 bp, Homo sapiens
gaaggctggacttgcatatcacctgaggtcagagcatgggcctctaaaccaggtggacaggtgaaatgtcagtat

SEQ ID NO: 77414 - DNA, 83 bp, Homo sapiens
caggactgcctgagacaagccacaagctggcaccatgactcctgtgaggatgcagcactccctggcaggtcagacctatgccg

SEQ ID NO: 77415 - DNA, 100 bp, Homo sapiens
cagtagctatggcagtggcagaagattttaattaggacttctgcacggacctggccgtctccagtgccaacttcattcccacggtcactgccatctcgac

SEQ ID NO: 77416 - DNA, 100 bp, Homo sapiens
gaaccagtcagtaaagcaaaacagagtcggagtgaaaagaaggcacggaaggccctcgattgattaaatggtgcccagccacgctggatgaggcctgatc

SEQ ID NO: 77417 - DNA, 83 bp, Homo sapiens
atcttcagtgactttgtgttcctggaggcgatgtacaaccagggattcatccgaaagcagtccttatgccagcctggaccatc

SEQ ID NO: 77418 - DNA, 100 bp, Homo sapiens
aagaagctcattaagagcttggaggcggcccgcgggttgtggcagcactgcctgaaggtatgagaccagattctaatctttatggttttccatgggaatt

SEQ ID NO: 77419 - DNA, 80 bp, Homo sapiens
taatctgttggattctaatgcagttcatcacatcattcatgattttcagatgctgcaatgtacaacaactctgaagccct

SEQ ID NO: 77420 - DNA, 82 bp, Homo sapiens
gggcaaggagccacaaagaagaaaacatttcttttaatttttaaacttggtttgaaagatacgaccctatattttaaaatgc

SEQ ID NO: 77421 - DNA, 100 bp, Homo sapiens
ccgtcgccgcgggtcctggagaagcggccgcggccagggaacggggcatcgcggttccaacgggacaagaatccttcaagaaacaggaaaaaactcctaa

SEQ ID NO: 77422 - DNA, 100 bp, Homo sapiens
atcatccctccattcctggcctatggcgagaaaggctatggcaacacttccccagatcaaaaggagccaacacctttcatcatcgagtggatcccagata

SEQ ID NO: 77423 - DNA, 83 bp, Homo sapiens
gaggggctcggagaggtgctcggattctcgtagctgtgccggacctagaggatcaagacataatgggagcatttttagacaag

SEQ ID NO: 77424 - DNA, 75 bp, Homo sapiens
cattaaccacctgcctggatacttcacccagtgaggagacagaccaagcccccccccagctgtcttcgcttcgtc

SEQ ID NO: 77425 - DNA, 75 bp, Homo sapiens
gcttgttgtcttcaattaaaaaatttattaaaggaagcacacctaaggtgctccgaaccctgggttatgtggacg

SEQ ID NO: 77426 - DNA, 97 bp, Homo sapiens
tcgagcgctgttctcgctccggagccgctgcacatttcgtcctggaaggtgggaatgatctggagaccaggagtaagaagacctgagtttagatccc

SEQ ID NO: 77427 - DNA, 89 bp, Homo sapiens
tactgttgcaggagccaaagaacagaatcctgcactgggaaagagactgatggtgcatctgcaatgttaatcatggcggaggaaaaggc

SEQ ID NO: 77428 - DNA, 100 bp, Homo sapiens
gtgaatgagactgtgagaaacttggcttgttcagaagatactgtgcataagacatgagaattacctctggactacaaatttacaagattctcttcaagca

SEQ ID NO: 77429 - DNA, 100 bp, Homo sapiens
aacaggccctatggggcatacctatggctttattgacctcgactcccatgcggaggaccagtatgatcatttggatgctgctgacatgacaaaggtagaa

SEQ ID NO: 77430 - DNA, 100 bp, Homo sapiens
ccggaggaggatcttctgcggattgttggaatctaccatattaataaggcagcggaaagaagaaatatgaatacggctccatcaagacccagccccacac

SEQ ID NO: 77431 - DNA, 97 bp, Homo sapiens
tgtatttgcttgtttgtttctccaaataccatctgttgcagactggggtgcatgacattttaggcatcagcaatgcagaagcacggcagccagggaa

SEQ ID NO: 77432 - DNA, 100 bp, Homo sapiens
gtcggacctttcccgctggcgcgcagcctcagctaggctaatgtaatgcttgaatatgatattgatgaagctcaggcattgttggaaaagaatttatcga

SEQ ID NO: 77433 - DNA, 95 bp, Homo sapiens
ctggggccaagggacaatggtcaccgtctcttcagacaatgcagatcttcgtgaagactctgactggtaagaccatcaccctcgaggttgagccc

SEQ ID NO: 77434 - DNA, 89 bp, Homo sapiens
accgggcggagcggccaacatggcggaacgcaggagacacaagaagcggatccagcaagttaaggtgaactgcacagctgaagtacttt

SEQ ID NO: 77435 - DNA, 100 bp, Homo sapiens
gcctttgttacttgccccaacgagaaggtcgccaaggagatcgccagaccatggcaaaagttataaccaccgtactgaagttccctgatgatcagactca

SEQ ID NO: 77436 - DNA, 100 bp, Homo sapiens
gcacccgtgtggttgctaaggatgggctgaagctggggtctggaccttgtaatggcaccattgacttccccgaatttttgactatgatggctagaaaaat

SEQ ID NO: 77437 - DNA, 98 bp, Homo sapiens
ccaaaggctactttgacgccctggtgaagatgggggagctggccagcgagagccagggctccaaagaactcgagctcccagctcctccagcagccgac

SEQ ID NO: 77438 - DNA, 76 bp, Homo sapiens
cgacaccgcgagctatatctgcgcgtggagctgagtgacgtacaggtacaggtttgcagattccgccagcagcaca

SEQ ID NO: 77439 - DNA, 90 bp, Homo sapiens
taagtcccccaaagatgagatttacctgtgagatgtttcatcccaacagttgtccccccggcacgctccacagctggtgacccgacagtt

SEQ ID NO: 77440 - DNA, 100 bp, Homo sapiens
gccaaggcgggcggatcacgagatacacttgggtgactggtaaagagccacttacatactatgacatgaacctgtcagctcaggaccatcagaccttttt

SEQ ID NO: 77441 - DNA, 83 bp, Homo sapiens
agatgatccaccagcggttccatcctacacttgggttcctcaagccaggacctacgcacctgttgtgagtggtgttatagttc

SEQ ID NO: 77442 - DNA, 95 bp, Homo sapiens
cattagaacagtttgaaggtggcccctgtgctgttattgcacctgttcagatgattcacctccagcagaaagggaaccaggagaagttgtggaca

SEQ ID NO: 77443 - DNA, 101 bp, Homo sapiens
ctcgcctccggcagatcctggactggtgtggggaggccttcgagggcgtcatgtatgtccctgggaagctgcatgatgtggaacacgtgctcatcgatgtg

SEQ ID NO: 77444 - DNA, 100 bp, Homo sapiens
tgccggaaggggtcccgaagccccctgcaggaactctacaacccaatccaggggacctgtttcagaagcccgaggtgtccaccgtcaagttcctctttct

SEQ ID NO: 77445 - DNA, 90 bp, Homo sapiens
cacatttagcctcagtacaacatgtgaaaaatctgttacttgatgaacttcagaaggcttctccagggaaagtgaccgaggcagtgaaag

SEQ ID NO: 77446 - DNA, 83 bp, Homo sapiens
gcaaatttacatacgagaatggcttgtgaaatcatgcctctgcaaagacctgcctagagctggaacgttacctccagagcgag

SEQ ID NO: 77447 - DNA, 100 bp, Homo sapiens
agctgcttcccaataaggaaacacattgcagtgtcgagatggctatgaaccctgtgtaaatgaaggaatgtgtgttacctaccacaatggcacaggatac

SEQ ID NO: 77448 - DNA, 100 bp, Homo sapiens
cgccgcccccatcatcagctcggtccagaagctggttctgtatgagactagagctgtgtcatggagaaactccagctgggcccagagattctgcagcggg

SEQ ID NO: 77449 - DNA, 76 bp, Homo sapiens
ggaaaatagcctttgccatcactgccattaagatcaataagatggagtggtggagccgcttggtgtccagtgaccc

SEQ ID NO: 77450 - DNA, 49 bp, Homo sapiens
cgcctcttctaccggggcaagcagagacacctatggctgccgatgaagg

SEQ ID NO: 77451 - DNA, 100 bp, Homo sapiens
atgtggagcccaagcaggaactgaagatccggaccatcgccatcatagctgaaggcatccctgaggccctcacgagaaagctgatcaagaaggcggacca

SEQ ID NO: 77452 - DNA, 50 bp, Homo sapiens
gacatacacaccaaattgttgagagaagatgaagatcctgccaaaggtga

SEQ ID NO: 77453 - DNA, 100 bp, Homo sapiens
ccagtctgagaacaagaaagaagaacttctgtctcgagacaatgcagatcttcgtgaagactctgactggtaagaccatcaccctcgaggttgagcccag

SEQ ID NO: 77454 - DNA, 74 bp, Homo sapiens
tgtgacctgtggagacacggccagatctgccctccaggactaaataggaatagtttgccaactccacagctgag

SEQ ID NO: 77455 - DNA, 100 bp, Homo sapiens
acttcaactactcctaccccaccaagcaagctgctctgaaaaggtaatagcctgcagctggtgttttgagaagccctactgctgaaaacttaacaatttt

SEQ ID NO: 77456 - DNA, 75 bp, Homo sapiens
aaaaaaagaaagaaaactacaggcggggacggcttctcgcttcccttgccagacaattcctctgtcgggtgtggc

SEQ ID NO: 77457 - DNA, 153 bp, Homo sapiens
ctataagcgttatgcaatggggaaaaacgaactccgtccactaacaaaagatggctacgagggtaacatgttcgtgaagctgtggtctaccaatctagacaactcagtggcaagcattgaggcaaaggctaatgtgtgctgtgttaaattcag

SEQ ID NO: 77458 - DNA, 99 bp, Homo sapiens
gaaaatgaggtacttaaagtgctttccgaagctgctatttcagcggagtttaagagagctgtgaaagtagcaacaggacaagaactctcaaacaatatt

SEQ ID NO: 77459 - DNA, 75 bp, Homo sapiens
gccgccctgttccccgcgctgcggcctggcggcttccaggcgcactaccgcggtactatgcgcctgcaggaccta

SEQ ID NO: 77460 - DNA, 75 bp, Homo sapiens
taccgctgaagaggaatcaattttggtgctggagaatctggtaaaagcaccattgtgaagcagatgaggatcctg

SEQ ID NO: 77461 - DNA, 51 bp, Homo sapiens
cggataagcatcacatgtgctgtggaaaaggaccactggacagtgtaacgt

SEQ ID NO: 77462 - DNA, 95 bp, Homo sapiens
gactgcgccgcgtcttcctcaagggagtaactattcccagtcagaggcgctatgtgtattattatagctacctgttaaagaatcatctggattat

SEQ ID NO: 77463 - DNA, 99 bp, Homo sapiens
ctgggaacaacctcaaaaccaaaaccagacacagcacaagcagcggccacagactattgcagatatcatccgaacatgtttgggacccaagtccatgat

SEQ ID NO: 77464 - DNA, 75 bp, Homo sapiens
gcgagaagttgagggagaaaggcgggcccgggaacagttacaggcccaaaaactgcgactggcatacacaaggag

SEQ ID NO: 77465 - DNA, 87 bp, Homo sapiens
aattgtatacaggacctggcttagctattcattgcatgcagcttcgtagatcagaagtcggttgtcggtctcactggactacaatca

SEQ ID NO: 77466 - DNA, 105 bp, Homo sapiens
cagggcctgggccgccgctgctacctgcagcgccgtgtggcacgacacaaaaatcagaaagatccccagcaggccctcaaggagctggctaagatgtgtatcctg

SEQ ID NO: 77467 - DNA, 74 bp, Homo sapiens
acagccaaaggttctacaggaatggaaattctgctgtcaacattagagtctgaacaacccagtcctgccagctc

SEQ ID NO: 77468 - DNA, 104 bp, Homo sapiens
cgaacgacgcgggcgagcggggctttggacgccggtggagacgcaggcgagggcgtgatggtgggcatgggtcagaaggattcctatgtgggcgacgaggccca

SEQ ID NO: 77469 - DNA, 116 bp, Homo sapiens
aaatcatagattcctatggaatgaggaggacgaaatggacatgacttgggaacgtgctcagtcactttcaatgggcaccaggagaaaggttttggttcttggatctggctacatat

SEQ ID NO: 77470 - DNA, 82 bp, Homo sapiens
tttaatggaagatttcgatcagttagggggcggatgtccacgcgagggacccccgccgtgggatgtcgccgcaggagtgggc

SEQ ID NO: 77471 - DNA, 75 bp, Homo sapiens
tgctggcccaaagggatccggagcgagctagggcagatggtgaccctgataactatattgcttattatcggaggg

SEQ ID NO: 77472 - DNA, 95 bp, Homo sapiens
gcttcacgcagaagttggcaggagcatgggcttcggaggcctatagcccgcaggcccagattgccttcctgcagggagaaaggaagggccaagaa

SEQ ID NO: 77473 - DNA, 83 bp, Homo sapiens
ctctctctttctggcctggaggctatccagcggtgcagcccggaatcccgaggatgtggaccgggagcggcgagaacacgaac

SEQ ID NO: 77474 - DNA, 75 bp, Homo sapiens
gctgctgggcacccacggagcctccggggctggatcctcagtcttccacaatgaaccctgtttacagccccgtgc

SEQ ID NO: 77475 - DNA, 80 bp, Homo sapiens
gaagatgacgattcagagactgaaaaacctgaggctgatgacccaaagtgcggcatcgtcctgggggcgctgctcttggt

SEQ ID NO: 77476 - DNA, 83 bp, Homo sapiens
gttgtagagttccgtgactcccagctcccggagccctgcctgttccctgtccatccaggccagcagctgaaggagcctcacct

SEQ ID NO: 77477 - DNA, 90 bp, Homo sapiens
atgggacccccctcagcccctccctgcagattgcatgtcccctggaaggaggtcctgctcacagggtgaatcctggttctttcgttggct

SEQ ID NO: 77478 - DNA, 50 bp, Homo sapiens
ccttgctgcctcctccagcaacttggctggagtgcactggcatgatctcg

SEQ ID NO: 77479 - DNA, 100 bp, Homo sapiens
cgcatctccgccttcttccagcacttccagggctggttgatatgtgaagagccaacctgtcgcaatcgaactcgtcaccttccccttcaattctcccgaa

SEQ ID NO: 77480 - DNA, 83 bp, Homo sapiens
tggctcagcggggccggaacatggctgcgtccggtctggtagttgatgtcacttggcgatattcctgcaaacatgaagaggtg

SEQ ID NO: 77481 - DNA, 96 bp, Homo sapiens
tttccagtggtctcacggcagcacgatgaagactggaaagcgacgggtactagatgacaagaatgtgcgtcgtcgctttcgggcaagtaactacca

SEQ ID NO: 77482 - DNA, 75 bp, Homo sapiens
agaattcaggaaaatcaggccaagaggctaaagaattacctccaaagccattgtcaagaccacagcagtcatctg

SEQ ID NO: 77483 - DNA, 100 bp, Homo sapiens
ttcttcgtggagcctcatctcatcttacaggagcagactagatttgataatgggctgcattaaaagtaaagaaaacaaaagtccagccattaaatacaga

SEQ ID NO: 77484 - DNA, 75 bp, Homo sapiens
taccagaattcggccatgagccgctacatactcatcatggggctcctgtacaagatgtacggagcgcaagaggac

SEQ ID NO: 77485 - DNA, 94 bp, Homo sapiens
caagaagagggcggagcggagacgggagtattatgaaaagatcggagtgcatccgccccaacccttttccccctcgtctcctgtgagaattccc

SEQ ID NO: 77486 - DNA, 100 bp, Homo sapiens
tgcacctaatgctgtgaaaaccgcattttatttagcagagttttttgttaatgaagatactaatggaccatactaccaaggaccagtccacctgaaccac

SEQ ID NO: 77487 - DNA, 71 bp, Homo sapiens
actggatgctgttgctgtggaccagcagatgaagacttccggggcaggcgtcaggaggcacccaaggtgga

SEQ ID NO: 77488 - DNA, 76 bp, Homo sapiens
agccatggatcatggagccaagcattccagtaggtacctgtgcaggcctgggcagtttttaaagggaagtttaaag

SEQ ID NO: 77489 - DNA, 75 bp, Homo sapiens
tatggaggacttgcttttgttgaactggttaatccctatatcctgaagaagaacatgatcctcatgacaaatcat

SEQ ID NO: 77490 - DNA, 99 bp, Homo sapiens
ctaagaggccagatgcagatctgaagacctattttactgataagaaaacacatctttacacactaaatactattcgttacttgtccttgcatgacaaca

SEQ ID NO: 77491 - DNA, 82 bp, Homo sapiens
agctcctggaggccgtgctgaagctgctgcccctggacacctatgtggagagtccgaagatggctgtgccacccacgtatgc

SEQ ID NO: 77492 - DNA, 98 bp, Homo sapiens
tcacctgtctggagcaaggaagaaaacctttgaccatgaagagaaatgagatgatagccaaaccctcagtttgtcccgctggctggaagcctggcagt

SEQ ID NO: 77493 - DNA, 95 bp, Homo sapiens
tgttgatgaaggttttgggagcctgcaagttgttgctccgcttgttggactgctgctgcaaaacttttctctatgtttccagtgtcctctgggtg

SEQ ID NO: 77494 - DNA, 51 bp, Homo sapiens
ctcacagcacttcattatgcagctaagggtgtccgcaatgttgccagtgtc

SEQ ID NO: 77495 - DNA, 100 bp, Homo sapiens
gggtccaagaggggctcctggtgagcgaggacggccaggacttcctggggctgcaggtgctcgaggattgcccggaacagctggcctccctggaatgaag

SEQ ID NO: 77496 - DNA, 100 bp, Homo sapiens
agggaagggcgctgagaggcgagcgtgagcccagcgacaggagagtgaggaatgtggcctgctgcggaaggggacagtgctactggctgacaacgtgatc

SEQ ID NO: 77497 - DNA, 75 bp, Homo sapiens
gttgccatctccttgcccaagggtgtggtggaggtgacccatgacctgcagtctgtagatggacggcagatccga

SEQ ID NO: 77498 - DNA, 73 bp, Homo sapiens
tgtcacaagaccaatatttggtatactgggcacaatccatctggtggcaggtctcctcctccaggccgcgcgc

SEQ ID NO: 77499 - DNA, 100 bp, Homo sapiens
gccgtcccgtccgacagccaggcccgggagaagtcgtccttggtggaaggaaccatgaactggcatctccccctcttcctcttggcctctgtgacgctgc

SEQ ID NO: 77500 - DNA, 82 bp, Homo sapiens
tgggatccggagcaagcgggcgagggcagcgccctaagcaggaagctcttcgtgggcggtcttgactggagcacgacccaag

SEQ ID NO: 77501 - DNA, 85 bp, Homo sapiens
aggaacaaattgtacatttgcccattctcaggaagagcttgaaaaattaaagatttcttgagctacctctgtcctgtgaacgcat

SEQ ID NO: 77502 - DNA, 75 bp, Homo sapiens
gtggaatgaaaaggaagtattagaaatgagctgaagaccattcacaggtatttggaaactttgttacgacaagtc

SEQ ID NO: 77503 - DNA, 100 bp, Homo sapiens
ggagttcgactgcgagggcctgagacggctgcttggcaaggacaaggagactggctttcacagaggtttgggttgggttcagttttcttcagaagaagga

SEQ ID NO: 77504 - DNA, 75 bp, Homo sapiens
aaggcaactgtgaggactaccttatgatttcctcaggttcaggagaagtggcacctggtggaggacctgtcgcga

SEQ ID NO: 77505 - DNA, 74 bp, Homo sapiens
tctgcaagcgttagacttctttgggaatgggccaccagttaactacaaggtggatgaagactacatccaggaca

SEQ ID NO: 77506 - DNA, 51 bp, Homo sapiens
tgcaggactgctctcctactacacggacatagatctgattgacatcctttg

SEQ ID NO: 77507 - DNA, 94 bp, Homo sapiens
cccgcgctggtgcagccaccctcgctccctctgctcttcctcccttcgctcgcaccatgggtttccaggcctgaggtgcccgccctggccccag

SEQ ID NO: 77508 - DNA, 75 bp, Homo sapiens
gcgtcccggccttcatcgacatcagtgaagaagatcagttgcagatctgatctcttctgaacacctcatcgtgtc

SEQ ID NO: 77509 - DNA, 100 bp, Homo sapiens
tgtttttgccaccacactccagcttgggttctgactcctcaggagcaaaaaacataacctgaagagggaggaagtggatttggggttcaccatttcttgg

SEQ ID NO: 77510 - DNA, 100 bp, Homo sapiens
catatggaaatgtcagtccaatacagacctcagcttccccattatttcgaggaaggaaacagttaaatctcacacagaaacagatgagaaacaaacagag

SEQ ID NO: 77511 - DNA, 74 bp, Homo sapiens
ccaaaccagatttagataaagtcatcagtttgaaagaagctaatgtgaagacagcctctggagatcctgtgttg

SEQ ID NO: 77512 - DNA, 100 bp, Homo sapiens
attatatttcacctgggacatgctgacttcagtgccctgaacggttagagaaattaatgaaggagctccaccaggtgccttcacaactctgagtcatatc

SEQ ID NO: 77513 - DNA, 83 bp, Homo sapiens
ttccgccctaatggaggtctccagtttcgactagacgcttgaagcaaagctgccatcccagaagacgacatgctctcagcaac

SEQ ID NO: 77514 - DNA, 75 bp, Homo sapiens
gccacttttgcaagggcgaggtcagccccaaactaccgcttagaccatgctcagcctccaagcagccttgtcatc

SEQ ID NO: 77515 - DNA, 75 bp, Homo sapiens
cttccgtatctgcctaggcattttgctgtctcctcctaatacggcctggcagctgcgattcagccacctcgtggg

SEQ ID NO: 77516 - DNA, 82 bp, Homo sapiens
ttatacaacaatctggactaacaccagtacaagcccaagggagattacagatttaacccttagtggcttctgaagaaaatgg

SEQ ID NO: 77517 - DNA, 75 bp, Homo sapiens
gcccccgggcacgacctctcggacacggtgcaggcaggtattgttgcagcatctggcagtgagactgaggatgag

SEQ ID NO: 77518 - DNA, 80 bp, Homo sapiens
aaacgtgtgggtacgaccttggaatttatgcgtatgattggcaatgacaaacaaggacagatgatcgtgttccatttgat

SEQ ID NO: 77519 - DNA, 76 bp, Homo sapiens
aaagaagacagccatcatttgaaaggacatggatttgattgacatactttggaggcaagatatagatcttggagta

SEQ ID NO: 77520 - DNA, 96 bp, Homo sapiens
tgccagctgccgaggcgttcggtcctgctgttgcggccgctgccccagggctgcggggacgccacaatggtgcgcatgaatgtcctggcagatgct

SEQ ID NO: 77521 - DNA, 75 bp, Homo sapiens
gctgcctatagcatccgcagcatcggggagaggcctgtcctcaaagaaattgcaggtgctgcagtgtctgaaatt

SEQ ID NO: 77522 - DNA, 96 bp, Homo sapiens
accacaatctctcagtatgacaaggaagtcggacagtggaacaaattccgagacgaactcattatacaatgacaaatggaggcagcattaacagtt

SEQ ID NO: 77523 - DNA, 85 bp, Homo sapiens
cttcgcttggtgtcctcctggcctcagcaacctgacaattctgtcgtgtcccggtagcaaattatggagttggaggacagtatga

SEQ ID NO: 77524 - DNA, 83 bp, Homo sapiens
cttcctgtcgctgacggcgactgcgggaggccaggcgatcagtgggtgaccgcggctgcgagggactttgtcatccgtcctcc

SEQ ID NO: 77525 - DNA, 90 bp, Homo sapiens
actgggtgcggggacaggcatcgtggggatcttggcagcgctgcaggggccggaacgcatcggagcaggtgaagatgctgcagcggatag

SEQ ID NO: 77526 - DNA, 100 bp, Homo sapiens
ggacaacctcagaggacaacgaagtgttcgcatcaagatggtgctcatgtggaccagtggtgacgccttcaagacggcctacttcctgctgaagggtgcc

SEQ ID NO: 77527 - DNA, 90 bp, Homo sapiens
tgataaaaacaaggtggaagattcttccaaggaaccagtgcgaagaaaatgtgccagaggaacttcaagaaccattttacacagatcagt

SEQ ID NO: 77528 - DNA, 75 bp, Homo sapiens
ccctgggatccgcccttggagggtttggaacagcaggaacgtcaaggtcgtgggaaataaaaggcagttctacac

SEQ ID NO: 77529 - DNA, 75 bp, Homo sapiens
ccagaagaagattgtggttgaattcaggattctaaagctgaaagtggataaaaacaaaatggtagccacatccgg

SEQ ID NO: 77530 - DNA, 98 bp, Homo sapiens
gaatatgatcaagttctcgtggagtcagacaatgagagcatgaataatctttcatttagtgagctatgttgcctcttctgctgtccaccttgtccagg

SEQ ID NO: 77531 - DNA, 74 bp, Homo sapiens
agctgaatcttgacaagaccatagagagttgcaaagcacaattaggccccccggacagaccacccagccctgta

SEQ ID NO: 77532 - DNA, 80 bp, Homo sapiens
cacgcataatggatgaaaggaaccgacagggttggggcgtgagacacatcacatttgtggacaatgccaagatctcctac

SEQ ID NO: 77533 - DNA, 98 bp, Homo sapiens
cggcggtcgacatgttccaggtcccggatagcgagggcggccgcgccggctccagccagtttcaagcgcccggtagtgatcctgggacccgtggccga

SEQ ID NO: 77534 - DNA, 75 bp, Homo sapiens
gacggacgcgtttggcaacagcgagggcaaagagctggtggcctcaggtgaaaatgaatggtagtgtctagaaag

SEQ ID NO: 77535 - DNA, 83 bp, Homo sapiens
aggtcagaaggaagcaccacacagaggttctctacttaaaagacaatgactactgatgaaggtgccaagaacaatgaagaaag

SEQ ID NO: 77536 - DNA, 107 bp, Homo sapiens
ctgagccagagctccagcagccttgttagggcgtggcctgaggcttggataagtgggaacctaaaggcagacccagaagagctttttacaaaactagagaaaattgg

SEQ ID NO: 77537 - DNA, 98 bp, Homo sapiens
aaaaaaagatcccatagaaatgtttcattctggacagctggtaaaagtctgtgccccaatggttcgatattcaaagtgttcttcagatgatgcagacg

SEQ ID NO: 77538 - DNA, 50 bp, Homo sapiens
ctcctttaaagtgggcactgcaaaagtgtggtcatggtgaatggagacca

SEQ ID NO: 77539 - DNA, 100 bp, Homo sapiens
cacaacagtctaagttaaagcagtcaaacatgctgaccgctcaagagattctacatcagtttggtttcactcagaccggagttcatgatcaagtgttgcc

SEQ ID NO: 77540 - DNA, 82 bp, Homo sapiens
cttagagcgtctggccaagaatcagaggaagtgggacctgctgaagttcccatgatgtcacccaatggatccattcctccca

SEQ ID NO: 77541 - DNA, 75 bp, Homo sapiens
cgccagaaaggatttcatccacacagcaaggatccacctctgttctgtgtgctccagtccccagctcactcagcc

SEQ ID NO: 77542 - DNA, 89 bp, Homo sapiens
actgaggtacagccttcgtcagtacaattgtcctctcgcatggcagagcaagtgggaaggcccagaagatcccttacaatacctgagag

SEQ ID NO: 77543 - DNA, 75 bp, Homo sapiens
cgaggcgcaccagatgtaccggaccctgttcttcaggtagtatcacattgtttgcagtcattaccgtcatcctgg

SEQ ID NO: 77544 - DNA, 50 bp, Homo sapiens
ccaaaacagtttacctcttatctaacaggcatgccagatttcctggagaa

SEQ ID NO: 77545 - DNA, 90 bp, Homo sapiens
aaaaatgactggacggaacttgccaagaagtctgagaacctcagtatctgtacatttgatggaatggtctcctgatggtgaatattttgc

SEQ ID NO: 77546 - DNA, 75 bp, Homo sapiens
gatagcagaagtagctaatgaaattgaaaacctgggatccacagaggaaaggttactcactataaacaatatcca

SEQ ID NO: 77547 - DNA, 100 bp, Homo sapiens
agggcgccgtgtccagcgagcaaacgggcgccccggagccttgctgagaggcaggctttaatccagtgtgaccagttgaggaaggagctggagaggcagg

SEQ ID NO: 77548 - DNA, 75 bp, Homo sapiens
gcaacagatgtatgctcatcagtattatatgcagtagatcttagtaagagccctaagaccatgaaaaagctgctg

SEQ ID NO: 77549 - DNA, 50 bp, Homo sapiens
ggaaaggctattacttttgtcacacagcactttgaggtgaatgaccggaa

SEQ ID NO: 77550 - DNA, 100 bp, Homo sapiens
gaaacactggttgctcttggtgaagaacaaaacagtagcagggcgccaagcagtgacttctgaccaacagagtgtggggagaagggatgtgtattagccc

SEQ ID NO: 77551 - DNA, 83 bp, Homo sapiens
tgacaccggagtttgacgaagaggtggtttttgagcaaacggggattcagcgtccgatcctttggaacagggactcacgtgaa

SEQ ID NO: 77552 - DNA, 100 bp, Homo sapiens
ctcgctcatctcagcgcatgatcagttctcagaatcctcagacgttgcaattgatatctaaaaagaagtcacttgctggagcagcacaaatcttattgaa

SEQ ID NO: 77553 - DNA, 101 bp, Homo sapiens
caaccggcagcagcgctgccgccgcgtcctcagccaccgctccctcttcccacggtctgccatcatggatgttctcgcagaagcaaatggcacctttgcct

SEQ ID NO: 77554 - DNA, 75 bp, Homo sapiens
cttatctgggtccttcaacaactggagtaaacttcccctcaccagaagctgttaggcaattttcttcagtggtat

SEQ ID NO: 77555 - DNA, 100 bp, Homo sapiens
ctcctggtcatcccgcctgccatcacccccgggacccttgaacatctgtgaagaaatgactattctgcatggaggcttcttgctggccgagcagctgttc

SEQ ID NO: 77556 - DNA, 96 bp, Homo sapiens
gccaggggagagcttcatcaccccctacctcctggggcccgacaagaacttcacgcgggagcaggtggtggtgcccacccgcgtggggcagggcta

SEQ ID NO: 77557 - DNA, 98 bp, Homo sapiens
ccccacctacccaatggtgaagaaccccctttacagtacagttcctggtccagaactttacacagaaaaggtgctcaaaggatatttgtttaatgaat

SEQ ID NO: 77558 - DNA, 98 bp, Homo sapiens
aagacaaaaggagattctgatgaagaagttattcaagatggtcagcttttgccaactgttttcaaatcacatgcatgggggatcttacacacactcct

SEQ ID NO: 77559 - DNA, 100 bp, Homo sapiens
gtcctgaaggcagtggaccacatcaactccaccatcgcgccagccctcatcagctcaggactcggagatcatgcagcagaagcagaaaaaggcaaacgag

SEQ ID NO: 77560 - DNA, 101 bp, Homo sapiens
ctcgtcatgctctttgtagcgtggtgcttctgttgctcacaggttgtttgatgtgtgcacagtgtcacgaacagacagagaaaccaaactaactttagtgt

SEQ ID NO: 77561 - DNA, 100 bp, Homo sapiens
tgcgggccctgctggaccagctcatgggcacggctcgggacggtatctcagtcataacagaataaccttcctgaagccgggtgtttttgaagatcttcac

SEQ ID NO: 77562 - DNA, 98 bp, Homo sapiens
gctcttggctctcaacttattcccttcaattcaagtaacaggaagttggtgaaccatctaaagaagagaaggctgtggccaagtatcttcgattcaac

SEQ ID NO: 77563 - DNA, 90 bp, Homo sapiens
gcttgataataggaccatccaaagaaagggcactgaaggatagcacagaagtagaaattgtggatgagaaaatgagaaaaaagatagaac

SEQ ID NO: 77564 - DNA, 131 bp, Homo sapiens
gtccttgacacggatatcacctttgccactgacattgcagagctgtgggctgtgttccacaagttcaaagggtacaaggcggaggtgatggtcagccaggtgtactcaggcagtctgcgtgtactcaatcg

SEQ ID NO: 77565 - DNA, 97 bp, Homo sapiens
gatgttccactgaaatcacaatggaaagtcttgacttgactggtactactgagcgagtgtgcttgatccagggaacggttgaagcactgaatgcagt

SEQ ID NO: 77566 - DNA, 75 bp, Homo sapiens
agagacacttgtgaacattcaagtgaagcaaaagcctttcatgattatacctgcctagagctggaacgttacctc

SEQ ID NO: 77567 - DNA, 100 bp, Homo sapiens
ccaatgcactttgccactttcatattgcagccagcatcaacccagccacaggtgtcatggagaaactccagctgggcccagagattctgcagcgggaaaa

SEQ ID NO: 77568 - DNA, 75 bp, Homo sapiens
ctggtcactcagtgacacacacaactcgggcctccccagcgacaaggatcccagaccccagccacctccccttgg

SEQ ID NO: 77569 - DNA, 97 bp, Homo sapiens
gacaagatgtggggcctggctgagttccactgcccgaagtgtcggcacaacttccgaactacaggatctcatgcacatctcacgggcccggaagcca

SEQ ID NO: 77570 - DNA, 98 bp, Homo sapiens
gggacgggctgcaggcgggggtgctgcagaggacacgaggcggcgggctggagacatggaccgcggcgagcaagcatgttggcagataaattgaacat

SEQ ID NO: 77571 - DNA, 75 bp, Homo sapiens
gcaatttggagcggtaagcccccaatatgtgaaaatttgttcccgacaaggagttttctggttcagaccgtagac

SEQ ID NO: 77572 - DNA, 75 bp, Homo sapiens
gatgggtggtcttggtttggaaattggacacagcattgttggttttgccatgtactattttacctatgacccgtg

SEQ ID NO: 77573 - DNA, 104 bp, Homo sapiens
caaaaacaaaattctgaactcaggacttggcaaacccttcagagacttcctgttgctctgaggacactcatcccagccgaccaggcccaccaggcccccaacag

SEQ ID NO: 77574 - DNA, 98 bp, Homo sapiens
agttcatatagcatctggacagtcaacacgggcaccatgaagcacttcctgagagatgtggtcttgctatgttgcccaagctgatcttcaactcctgg

SEQ ID NO: 77575 - DNA, 75 bp, Homo sapiens
acaacaaaaacaactgcattgtgtacagcaaagggcacttcaggcaaccggggcctccagggggagaaaggcgag

SEQ ID NO: 77576 - DNA, 75 bp, Homo sapiens
aaaaactacctgtggtaggaattggaaagcatctgtgtggtatggcaacagtccacaagccctagccatgccgtg

SEQ ID NO: 77577 - DNA, 98 bp, Homo sapiens
gccctctacacagcggcctcttcaggtgcagggaggaaatggaagcacgttctatgctggttccaccccagtgctcaagtaaagctctttgtgacagg

SEQ ID NO: 77578 - DNA, 50 bp, Homo sapiens
tccgcgtgaccaccatcgcccgaaagcaatttcttgcaaccaccaccgag

SEQ ID NO: 77579 - DNA, 74 bp, Homo sapiens
ggccatgctctggcaaaaacgaacttgtaatagctggcatcgttgagaatgaatggaaaagaacgtgctccaga

SEQ ID NO: 77580 - DNA, 75 bp, Homo sapiens
ggcgcgcggaggggaaatggctgccgaaaacaagccggaagaatccagcaactatcacaagaatactccttagcc

SEQ ID NO: 77581 - DNA, 75 bp, Homo sapiens
caagattttaaaaaaatcccatgaggagaaggcattctaatttagtgtgcaaagatccaccttacaaagtagaag

SEQ ID NO: 77582 - DNA, 100 bp, Homo sapiens
ctccagcgctgcctggaggagaatcaagagctccgagcggggatctgacgagcttttctctacttgtgtcactaacggaccgtttatcatgagcagcaac

SEQ ID NO: 77583 - DNA, 90 bp, Homo sapiens
ctgagatcaaatggcacttcattggccacctacagaaacaaaatgtcaacaaattgatggtacaagccagctgccatgttgtgagcacat

SEQ ID NO: 77584 - DNA, 100 bp, Homo sapiens
ctgtcgctcttgtgccctagcaccccgagaaccgtcagtttgagccagatggtattagaaaactactcggatgctccaatgacaccaaaacagattctgc

SEQ ID NO: 77585 - DNA, 75 bp, Homo sapiens
agccaggcccccgcttcagtcaagacctgcctagaaaaaggttcttcttccgcagtgggaacatcgagcacccgg

SEQ ID NO: 77586 - DNA, 90 bp, Homo sapiens
ctattcagaatagtacttcaattaagtacaatttagaagaactctaccaggcacccgacaggaggatcctttattcgtccgaacaaggta

SEQ ID NO: 77587 - DNA, 80 bp, Homo sapiens
ggacggctctctgctcattggggcgttgaggagctctgacgcccgctctgcggcttcggtgtttgaacaggccacagtcc

SEQ ID NO: 77588 - DNA, 100 bp, Homo sapiens
ctgaactggatgctaaacttgaggtggtggaagatggatatgaattttttgctaaacgacagttggtaaccttattttcagccccaaattactgtggcga

SEQ ID NO: 77589 - DNA, 100 bp, Homo sapiens
gcatctcataatctatcctggggaattcagctgcctcccagggtgaatacaggctgtgggtgagcgtggaggatgctcagatgcacaccgtcaccatctg

SEQ ID NO: 77590 - DNA, 90 bp, Homo sapiens
cctcttctgttcttgtttatcagacatccttcgcttcatttattcagaatttaattccttttcgaccttcaatccagttccaaggactcc

SEQ ID NO: 77591 - DNA, 75 bp, Homo sapiens
ttgggtctggatcaatatataataaaacgctttgatggaaaggagcgtgaggatcatccccggagaggacgggag

SEQ ID NO: 77592 - DNA, 145 bp, Homo sapiens
aaagcttctcctttgggttgtactcatagattgtgtaggcgttggtcttctgatagcaactttaatgtggttactcctggatggagcacctctgatagcaatccacaaagccaggtattacaagaggaaagatggcttagccctg

SEQ ID NO: 77593 - DNA, 82 bp, Homo sapiens
acaattatcggcgctgtgtcagcagacctaatctgggagcctgcaagtgacaacagcctttgcggtccttagacagcttggc

SEQ ID NO: 77594 - DNA, 98 bp, Homo sapiens
ccagctctctaacccaacagatgacagctggaagggtagaccatacgcaagacgagattgaggagctgcgggccgagatgctggagatgcgggacgtc

SEQ ID NO: 77595 - DNA, 95 bp, Homo sapiens
gcaacacaacaatcagatggcaccagggactggcagctccactgccgtcaactcctgttctcctcagagcctgccagatgacgtgtactactgtg

SEQ ID NO: 77596 - DNA, 100 bp, Homo sapiens
ctgggttctattttccctcctcaaactgactttgcagccacggagagacaggggcaagtgtccgagtggtgaatcagctacttacagagatggatggtct

SEQ ID NO: 77597 - DNA, 75 bp, Homo sapiens
aattttagaagttcatattgacaaaggacattcactgaacaatgccagggatacaagtgccatggatactctacc

SEQ ID NO: 77598 - DNA, 99 bp, Homo sapiens
caaaaattttagaaaatggacctgctgacagagcagatggcctggagattcatgacaaaatcatggaggtacaacataagaggtatgatgcaattctta

SEQ ID NO: 77599 - DNA, 80 bp, Homo sapiens
ccaagcgacagctgtcagaggggcaggagcttctgggagccaccgtctgaaggatgatcggctgaatgtaacagaggaac

SEQ ID NO: 77600 - DNA, 83 bp, Homo sapiens
catcatgagtaagcaccgagaagtctgttccttatcacgtgtgtaaggggaaaaaggaacgtcaaggtcgtgggaaataaaag

SEQ ID NO: 77601 - DNA, 60 bp, Homo sapiens
gaacttaccaagcatcctctgcggctttcactgagagcagcaccaacaccacccaggatg

SEQ ID NO: 77602 - DNA, 88 bp, Homo sapiens
gctggctgccagcccgggccttggtggaagaggcccttgcccagcgattccagatcattgcctaccagccctatgggaagtctgtcga

SEQ ID NO: 77603 - DNA, 76 bp, Homo sapiens
attacacagtgttaacaatgcatccacagaggtggatgggcaggtggtagcactgctggtacagaatctggagcgc

SEQ ID NO: 77604 - DNA, 83 bp, Homo sapiens
tatggccgtgccctggggctgagccctcagctcttccgccctctctggatgagggaacagaagtggaggaaacaaaagaagca

SEQ ID NO: 77605 - DNA, 77 bp, Homo sapiens
ggataagatgaccttcagtgtgctgctcaaaaacaggcagccttaagtgccttgaaacaattttctgaacaaggact

SEQ ID NO: 77606 - DNA, 76 bp, Homo sapiens
attttttcagggatataaccgactgacctggatagtagttgttcttcagaaccagacataagttcagaggaatctg

SEQ ID NO: 77607 - DNA, 82 bp, Homo sapiens
gcaaggtcggcagagcaaggggcttacgcagaaggacctggccacgtccaggaaaagcgtgatggttgcagagataccctcc

SEQ ID NO: 77608 - DNA, 83 bp, Homo sapiens
ccccctctccgccccccaggaggggcgagagggagccgcagctgatgtcagatccctaaagaagtggctgacatctttaacgc

SEQ ID NO: 77609 - DNA, 50 bp, Homo sapiens
tgctgcactttgggttcaaggcgacagaaaatgtttataggaggccttag

SEQ ID NO: 77610 - DNA, 75 bp, Homo sapiens
gaatttacatcagcaccctcaaaacaggcagtaagctcctacaggacattttaaaactacataaatgtgccatcc

SEQ ID NO: 77611 - DNA, 93 bp, Homo sapiens
agttcttgtttgtggatcgctgtgatcgtcacttgaaaccaggcgatgcggaagaagctaatcttgtacttcaagaggaggaatcacgctcgg

SEQ ID NO: 77612 - DNA, 100 bp, Homo sapiens
tgggtgtctggtgccggcgtttgggctacggttgttgttggcgactgtgcttcaagcgatcatgcaacagatgagtgaccaccgctacgacaaactcact

SEQ ID NO: 77613 - DNA, 75 bp, Homo sapiens
agactgtctgccgagttctcacgtgcccatcagtgacagcaagtccattcagaactaggacttctctcaaacttg

SEQ ID NO: 77614 - DNA, 75 bp, Homo sapiens
agctggcctggtttgatactgacctgtaaatcatcctttagagctggctttatgtgctggggcagaagagatccg

SEQ ID NO: 77615 - DNA, 126 bp, Homo sapiens
aaggccgcccgggaactgctgacgcttgatgagaaggacccacggcgtctgttcgaagtcctggacaccgcgggccaggaagagttcggggccatgagagagcagtacatgcgtgctggccacggc

SEQ ID NO: 77616 - DNA, 75 bp, Homo sapiens
caatcttcctgccttggcctcccagagggttggaattgcagatgtgaggtaatactgcattgcatgattgtgcag

SEQ ID NO: 77617 - DNA, 96 bp, Homo sapiens
agcatccctgtcacttttacaaagtttattggtagtttgaaacagctcacatatttggatgtttctaaaaataatattgaaatggttgaagaagga

SEQ ID NO: 77618 - DNA, 51 bp, Homo sapiens
agatagtgcctttcagccctaccagatatttggagttcttacaacatggca

SEQ ID NO: 77619 - DNA, 74 bp, Homo sapiens
ggcctttctaagtctcctaaaggatgtggtttggtctgagattggaaaaggctttctagatgggtcacttgata

SEQ ID NO: 77620 - DNA, 103 bp, Homo sapiens
cacaactgtccgcctcagcccagagcgcccatcagatgaggactccaagagcacagagtccatcttcctgacccagggcgcccatgtgagttgttaccgcctc

SEQ ID NO: 77621 - DNA, 75 bp, Homo sapiens
ggatatctttgttaaattgacaacaatggccatgtatccgttgcctttttcctctacaatggggtgtcactaggt

SEQ ID NO: 77622 - DNA, 74 bp, Homo sapiens
acgaaccggagagcaaggttgaggaagagaattgagtttggtcggccctttcccaggactgaacatgaagagtt

SEQ ID NO: 77623 - DNA, 98 bp, Homo sapiens
tactttaggcggattcgcgaaggaacaggaaatatagtggtcattatgattagctatccaaaaggaagagaaattttggagctggtgcaaaaaggaat

SEQ ID NO: 77624 - DNA, 50 bp, Homo sapiens
agctcgccccccagcaggtgccaggttcgaagtcaacaataccattcttc

SEQ ID NO: 77625 - DNA, 75 bp, Homo sapiens
gaatttgagcctctgctgaattggatgaaagataaagcccttaaggacaagggctccgtaggcaccaactgcaag

SEQ ID NO: 77626 - DNA, 98 bp, Homo sapiens
tccaacttcgtggagacagagcagcacacttccaccctgggcagcgtgtttggggacgcgtactatgagcagcagatggcggccaggcaggccaatgc

SEQ ID NO: 77627 - DNA, 90 bp, Homo sapiens
aacaaggccaccattggtgtggggctgggcctgccatcattcaaaccaggggttgtctgcattcaaaagagcattctattaaagctacct

SEQ ID NO: 77628 - DNA, 98 bp, Homo sapiens
atattaatgattataaccggagattctcagggcaacccagatctccatattgaaggtggtatcatcggtcctgcagcttggaaatatcgtcttcaaga

SEQ ID NO: 77629 - DNA, 100 bp, Homo sapiens
aaatgtggcgacttgtgcacacatgtagagacctttgtatggaaatcctcattgacgattcaatttgttgaaggccaatttgtggactcctacgatccaa

SEQ ID NO: 77630 - DNA, 100 bp, Homo sapiens
gagtctcatgccacccaaacaccacatagagctggcgacccgactccatggtccagcacatggcacagagactgggagatggggtttcaccatgttagcc

SEQ ID NO: 77631 - DNA, 82 bp, Homo sapiens
tctgggaacaagcacaggcctgaaggggagcccaagggtgcacagcccctggctacggaagctcttcgtgggcggtcttgac

SEQ ID NO: 77632 - DNA, 100 bp, Homo sapiens
cttgacgggaacctcctcacccagcctgggcaagcacgaatgtccataatggaccgtattctccaaatagcagagaggttggaaagaaccatgactgtat

SEQ ID NO: 77633 - DNA, 100 bp, Homo sapiens
caaggccaggttcccaagagctcagaggccctgaagcttgagcgggatacaactggctatgcctatctgaatcatgaagtatccagagtggatggcatgg

SEQ ID NO: 77634 - DNA, 82 bp, Homo sapiens
ccgctcttgccttctccacacttgtttggagaacatattgtgatgttcgtgcctcagagctaaaactatgagtgaatttcgg

SEQ ID NO: 77635 - DNA, 96 bp, Homo sapiens
cttttaggcttgctggcccgcggggctgtccaggcacgcgaggcccctcaggaaaaccaattctgtgtcctcggaggaccacagcccagttgggcc

SEQ ID NO: 77636 - DNA, 100 bp, Homo sapiens
ctctacatgcgctctttgaaagcgccccggaatgacctgtcgcctgccagctctgacctgagtttgggaggtgtccttttatttcctgttgatgataaag

SEQ ID NO: 77637 - DNA, 75 bp, Homo sapiens
atggccccaggtgtaagcgcagaaagcaggcgaacccgcggcgcaataacgctacagagggccggagctggagat

SEQ ID NO: 77638 - DNA, 75 bp, Homo sapiens
actgatatctcaaaaggtgatctggacaaaggaacaggtatctcagggctacaatagaagtatctcccgaacaga

SEQ ID NO: 77639 - DNA, 82 bp, Homo sapiens
atgatcaacgtgcagcgtctgctggaggctgccgagtttttggagcgccgggagcgagatgatatcatcaagttgaatcgaa

SEQ ID NO: 77640 - DNA, 97 bp, Homo sapiens
gggatttggctgcagataagcagacactccagagtgaacagcctttacaggttgccaggttccgtgttccagagcagatgtctttaatagcaaacaa

SEQ ID NO: 77641 - DNA, 109 bp, Homo sapiens
ctcaatatctgtcttcggtggactccttcggcagtccacccaccgccgccgcctcccaggtgacttaagagattaaaattaatttggttgctgttggttctgaacaaat

SEQ ID NO: 77642 - DNA, 82 bp, Homo sapiens
gggaaccctggtcaccgtctcctcaggtctcggcgcggaagatggccggcggcgtggacggccccatcgggatcccgttccc

SEQ ID NO: 77643 - DNA, 100 bp, Homo sapiens
tgcaagaggcgtttctataagaattgtcctagaaaaggggtcagtcagacagggacgccagtgtgtgaggaggatggtgatgcaggccttggcatcagac

SEQ ID NO: 77644 - DNA, 95 bp, Homo sapiens
ggatcggtggaggaagatgctttgctctgtggacccgtgagcaagcataagctgccaaaccaagaagagtcaagtaccattggccaggatcaaac

SEQ ID NO: 77645 - DNA, 100 bp, Homo sapiens
atcaaattccagaacatagtggtggaaatactaatcgagcactttggcaagcgtttgctgccaattgatggggcaaatgatctcttttttcagccacctc

SEQ ID NO: 77646 - DNA, 80 bp, Homo sapiens
gacaccggggtcctgctgtgcgcgctgctcagctgtctgcttctcacaggttaaacccatccagagtaatggctgcggcc

SEQ ID NO: 77647 - DNA, 107 bp, Homo sapiens
aaacaaccgcagccgctgttcccaggatggtgatccgtgtatatattgcatcttcctctggctctacagcggtcattatccaacttttagaggtgatggatcatctg

SEQ ID NO: 77648 - DNA, 83 bp, Homo sapiens
tgagctcagacctgccaatttaccagagataattgataacaccctgtaacagctgagaagaggagatcccagaactggagatt

SEQ ID NO: 77649 - DNA, 90 bp, Homo sapiens
cagaaacaaactacatctcagggtatgatgaaatgagtattctcttcacagttttggttactgaaactactttggagaatggattaatac

SEQ ID NO: 77650 - DNA, 96 bp, Homo sapiens
tatgagaaggacaacacctacttagaggagaaggcagagcccccccaggctatgaatgccctgatgcggttgaaccagctgaagccagggctgcag

SEQ ID NO: 77651 - DNA, 83 bp, Homo sapiens
ctgggccatggaactggcggacgtgggggcggcagccagctcgcaggcacctgttccgcgagcctgagaagaggccccccacc

SEQ ID NO: 77652 - DNA, 100 bp, Homo sapiens
cggtaacccgtgtgactttgactgggaagatgaagtcctcagtacattctgaagaagatgattttgttccagagctacatagaaatgtacaccctcgaga

SEQ ID NO: 77653 - DNA, 75 bp, Homo sapiens
ttacaccttcgtatttcaaccgaccggagtacactgggaagcatcaaagaaggaatcttgaaaatcaaagaagaa

SEQ ID NO: 77654 - DNA, 83 bp, Homo sapiens
gggcatagacttcaaccagcctttggtcatcaccaggattctgaaaaagagttccacgtcctcccttatcgagtctttgttcc

SEQ ID NO: 77655 - DNA, 100 bp, Homo sapiens
agaaaatcttgtggacaaatccaggggaaggtagtgggcagcagtcagtgacaggtgtaacctctgtggatgacagcaacagttactggaggatacgggg

SEQ ID NO: 77656 - DNA, 100 bp, Homo sapiens
ccaccctctgccatctccctggtacatgtgaagattttttggcagcttagcgtggaaaccattgatcaccctgctctcatttctacctgttctgtgttgg

SEQ ID NO: 77657 - DNA, 100 bp, Homo sapiens
ggaaagggccggaaaacacacgttcctccgaaaccggtttgcaagtccttgtagagagccccccaggcatcatgagcgtcttggacgacgtgtgcgccac

SEQ ID NO: 77658 - DNA, 83 bp, Homo sapiens
cttcctacttcctttccgtgcataagaagccgaatgaataactctgtgtcaccctcggaaagcctccgggccagtgagaagca

SEQ ID NO: 77659 - DNA, 50 bp, Homo sapiens
tcttcaaaccggagtcgggtcggtgattgatatgcccgagcacaaccctg

SEQ ID NO: 77660 - DNA, 50 bp, Homo sapiens
aaaaagcagaggccagggcgccgaggatgtctacagttgctttcgcttcc

SEQ ID NO: 77661 - DNA, 80 bp, Homo sapiens
gtttataaagcatttacagttgacagtcctgttcagcagcttctcaaaagtgaaataagaagattggaaaggaatcaaga

SEQ ID NO: 77662 - DNA, 90 bp, Homo sapiens
ctgctcatgaagaaagagttaatgaagtgaaccagtttgctgccaaactcatacaggagcccaaccccgaggacccactgaacaaggagg

SEQ ID NO: 77663 - DNA, 50 bp, Homo sapiens
ataaatccccttggaggaaaatggttttgggatttgagattgacgcggtg

SEQ ID NO: 77664 - DNA, 119 bp, Homo sapiens
tcagatggctgataatggagaaagatcacagcagtgttccaagttctaaagaggacaatatttttaagctggagaactcacattttgaaaacggccgtgggaagagtccatatgaccct

SEQ ID NO: 77665 - DNA, 75 bp, Homo sapiens
tgacatcaatgtcacaaaagcggatgttgaaaaggaagaaaaaatgctgggcatcttggtgcagcacaaagtccg

SEQ ID NO: 77666 - DNA, 103 bp, Homo sapiens
gatgtttggaaatgatacaattacctgcacgacacatggaaattggactaaattaccagaatgcaggggatggtgccatgacaatggtgtgaactacaagatt

SEQ ID NO: 77667 - DNA, 82 bp, Homo sapiens
atgttgttgatgaagtaatacagaactgccccatcgatgtgcggcgtccgctgtataaggtgacttaagagattaaaattaa

SEQ ID NO: 77668 - DNA, 83 bp, Homo sapiens
tctgctgtgtactggagtgagtttgaagaagttcaggagtcagtggatcggtggggaaaatgctgcttaccctgggccctggg

SEQ ID NO: 77669 - DNA, 97 bp, Homo sapiens
ctacagctccgcgcccgccagttgcttgatcaggtggaacagattcagaaggagcaggattaccaaagggaatgttccggagaatcacagcagctgc

SEQ ID NO: 77670 - DNA, 73 bp, Homo sapiens
aaagcaattgaatatgtgcatggatacttttctagtgaacaggtcacatttctgggttttaatgaagagacag

SEQ ID NO: 77671 - DNA, 74 bp, Homo sapiens
tggaaggggccagtctggagacagtcaaggtgaaaacttttggcccgtttggaagcggcagccaggacaacctg

SEQ ID NO: 77672 - DNA, 119 bp, Homo sapiens
atgaaggggtctagatgtaaatgtcagtggaaaggagagctaccatcactaagactttgctaccaggacttgctggcccctctggggagatggttaaatccacaacaagtctgacctcg

SEQ ID NO: 77673 - DNA, 51 bp, Homo sapiens
cgggccgcgctgcgagactacgagacggtcccatgcagccctcgggagaga

SEQ ID NO: 77674 - DNA, 75 bp, Homo sapiens
gatgtccccagcacataataacttggacagatgtacagaagattttaagaaatgcaaggaaactacctgaaaaaa

SEQ ID NO: 77675 - DNA, 75 bp, Homo sapiens
gagatgaagaagaagattaacctggagttaaggaacagatccccggaggagcagcatctggaatcaagagaccca

SEQ ID NO: 77676 - DNA, 100 bp, Homo sapiens
ccttcgtccgtcccccgcggccggcagctcccggggcgtctggggaagaaggagaaagggccaacccctgaagaagcaatacagaaactgaaggagacag

SEQ ID NO: 77677 - DNA, 88 bp, Homo sapiens
gagatgaggaggcgtcgcgcgcgcctgtagctcgcgggcctcgcagattcatgatgttgctatcaaaagttgagaaattgtcagaaga

SEQ ID NO: 77678 - DNA, 87 bp, Homo sapiens
ccgctttgacattctttcttgggaaagatgaagatgaaaaacaggacagtgactccgaatctgagaacatgaacgattggatgccca

SEQ ID NO: 77679 - DNA, 87 bp, Homo sapiens
gcacttcattggccacctacagaaacaaaatgtcaacaaattgatggacaaaaaacttggactttcgccgaaagtgggacaaagatg

SEQ ID NO: 77680 - DNA, 100 bp, Homo sapiens
ccaggagcagttgctggtgctgctgaagtccctagggaaccaccaattcttcccaggcctcctgatcacttgccacgtggcacgcatccctctgccagcc

SEQ ID NO: 77681 - DNA, 100 bp, Homo sapiens
ttttcaagctgttattcctaaacaaatagagagaaaaacctgtgaccctaagtgtggcaaaggagcagagaactttgacaagttcttcacacgaggacag

SEQ ID NO: 77682 - DNA, 82 bp, Homo sapiens
cagatctctgcagttacaggaacatcgtctgcttcatgcccactttccctgtaggtcccgcgatagggacaaatacggctat

SEQ ID NO: 77683 - DNA, 74 bp, Homo sapiens
gcctggtgatcggctccttaccagctcacctctcaccgcgcatgtttggaggaatactcccccagttgcaagag

SEQ ID NO: 77684 - DNA, 75 bp, Homo sapiens
tcgcattttggcattgacatttaattttagggtcctttatatagaagggagagccttcccttcttcttggtggtg

SEQ ID NO: 77685 - DNA, 100 bp, Homo sapiens
ggaccttcgagcctagctgctcgcacaggactcggccacctgcccttcctgcaccgactggccaggacagtcattttgtttactcattcagccctgttgc

SEQ ID NO: 77686 - DNA, 100 bp, Homo sapiens
cagtcacccaagtgcattgcctttggaaacgaggatcactactcttggaatcaaagataaatccaaatactgcatatcagaaacaacaggcaagtagttg

SEQ ID NO: 77687 - DNA, 100 bp, Homo sapiens
ctctgatcgccgggaacccttgccgctgctgtcctgcgaccccaagcaggtaattgctctagcagatgcagtggaggaaaaccaaggcaatctgttccag

SEQ ID NO: 77688 - DNA, 97 bp, Homo sapiens
gccacaaacgccgcaccaggtcttgtagcagcgcctcctcggctgaagccgacgtagcttctctgaacagacgcatccagctggttgaggaagagtt

SEQ ID NO: 77689 - DNA, 110 bp, Homo sapiens
aaggtgcgcggagggactgcaccttctccatcaggtgcagaagcttggaactgcagttggctttttgctaccaccagttttagtacccaacacacagaatgacacaaatc

SEQ ID NO: 77690 - DNA, 75 bp, Homo sapiens
aaacccgttcgccgagcccagcgagcttgacaacccctttcaggtacggttcctggagcagcagaacaagatgct

SEQ ID NO: 77691 - DNA, 73 bp, Homo sapiens
ccagagaaaggacgagcagcaagtcagggagcttaagggtgtacaactatgagcctttgacacagctcaagaa

SEQ ID NO: 77692 - DNA, 90 bp, Homo sapiens
ccaagaagctggtgtgcggagatgaaggcgtccttcccgacatcgagcagttcttcaacatcggggacagtagctctgggctcatccaga

SEQ ID NO: 77693 - DNA, 102 bp, Homo sapiens
atcccctgaggcatttaggcagctatagcttcttcagtttcccagaactgcaggtgctggatttatccagccaaactgattatccaccagacactcagcgtc

SEQ ID NO: 77694 - DNA, 71 bp, Homo sapiens
gggaatcatgacttctgcagccgaaaaccgtgaggacatactgaatgccggtgacaaattaacagaggtcc

SEQ ID NO: 77695 - DNA, 80 bp, Homo sapiens
acaaggtgtacgatttgaccaaatttctggaagagacagcccacctgaggatattgaccataaggactcatatctcatta

SEQ ID NO: 77696 - DNA, 75 bp, Homo sapiens
gaaaactgtattcctaataaccagctaagcaaaccagacgcactggtcagggaacgcagctgttgttctccggag

SEQ ID NO: 77697 - DNA, 90 bp, Homo sapiens
cggactgcgccgcccgaggccgtcggccgccgtcagcgagggcgccgagcaacttcggaggagccgaggaaggtctgcttcacctacgac

SEQ ID NO: 77698 - DNA, 100 bp, Homo sapiens
caaagagggtctctgctgtcccagttcagccatcatcatgttgtagtgttcctgctcactttcttcaggagttgtatcccgcattttgtattcacaacgg

SEQ ID NO: 77699 - DNA, 128 bp, Homo sapiens
ctgaggaggagaggacagaggtgcctggggcaacctccaccttgacggttccagccaacaagtcccaaatttggaaaagctgactcatatgaaaagctggaaaaactaggggaaggatcttatgctac

SEQ ID NO: 77700 - DNA, 75 bp, Homo sapiens
gcccggattcaggattcagatgaaccagttcacatgagagatcctaataatcaacttcacgtaattaaaaatttg

SEQ ID NO: 77701 - DNA, 89 bp, Homo sapiens
ctcacactcttctgaaacgactcgggtagaggctgaggaaggccgtgttgtttgtctacctgggactaaacatctggagaacatcccag

SEQ ID NO: 77702 - DNA, 75 bp, Homo sapiens
cacccgagagcaacaaagcaggcgactacagccacgtgaagatcttctcactcagatatggcaacaagcagcctt

SEQ ID NO: 77703 - DNA, 82 bp, Homo sapiens
ctggagccacccgcgaaaattcggccagggttctcgctcttgggatccatatggctttggagacagtcgagattcaaggcgt

SEQ ID NO: 77704 - DNA, 76 bp, Homo sapiens
cgttaacagactatgatattcgattttacatgtatgagattctgaagttttaaccatgctgaccaacgaaactggc

SEQ ID NO: 77705 - DNA, 100 bp, Homo sapiens
gagccatgggtcctcgacctgcagggagcagaggggacagaggcaccaaggacctccaagacagcatcccagccatcactcttccacctgctccttagag

SEQ ID NO: 77706 - DNA, 100 bp, Homo sapiens
tgaagcggcttgaagaaaaacatgaagctttacttaaggaaaaagagaaatatggctacacacacctttctgcaggagagctgcttcgtgatgaaaggaa

SEQ ID NO: 77707 - DNA, 75 bp, Homo sapiens
gccaaaggcaaaggctcggcggtgccctcggatgggcaggctcgggaaaaatgcctgaggaagtgcaccatggag

SEQ ID NO: 77708 - DNA, 100 bp, Homo sapiens
tgtagttactgtggaatcaataagccatggcatctaagaaatttgctgttaaattaccttatcccatatcacacaactggtcctcagccataacaagcta

SEQ ID NO: 77709 - DNA, 98 bp, Homo sapiens
cgcaggaggccgtcaagaagggctcgaccgcggtctcggtccagctcgacttccagctcaggctccagcaccagcactggctcaagcagtggctccag

SEQ ID NO: 77710 - DNA, 100 bp, Homo sapiens
cgagtggcgaatgatcacagcaatgaacaccatccgaagcggggcagggatctacaagggcttctgtctggatgtgatcaggaataagtacgaatgtgag

SEQ ID NO: 77711 - DNA, 51 bp, Homo sapiens
ggagcctggggaaattctgcagtgagatccaggtgattgagaatgatagag

SEQ ID NO: 77712 - DNA, 100 bp, Homo sapiens
gcggcgagcagaactacggcgagcgggtgcagtagacattgttgcaatcatgatcggcaatctgaaaggcacaaaaattctgcaatctattcaaagaggc

SEQ ID NO: 77713 - DNA, 80 bp, Homo sapiens
ggcctgagctgccgcctcctccgccgcccgaaaacccggagtgccccgcacagaatatgaagagagtggattgttggaaa

SEQ ID NO: 77714 - DNA, 80 bp, Homo sapiens
agctcatcatgatggacttggagctgccgccgccgggactcccgtcccagcagcaagagtgagccatggagctacgtgtg

SEQ ID NO: 77715 - DNA, 100 bp, Homo sapiens
ctcttcgatgtgcgagactttggaaagattgttctctggggccggactgagaaatgcctgaaggagacgacggaggagatccggcagatgggcactgagt

SEQ ID NO: 77716 - DNA, 75 bp, Homo sapiens
ctaagattgcaggaatattgcattgttcttcagtgcacagcgaaaagcagtctaaaggagtcttcgcgaagtttt

SEQ ID NO: 77717 - DNA, 75 bp, Homo sapiens
tggaggtggatctgaagaacggatgctggcatcaccatctacatcaggtcagctgtctcagtttggggcaagttt

SEQ ID NO: 77718 - DNA, 100 bp, Homo sapiens
catcccagccatcacctggatttacctgttttctgggagcttcgaaggtgtcatggagaaactccagctgggcccagagattctgcagcgggaaaatcca

SEQ ID NO: 77719 - DNA, 83 bp, Homo sapiens
ggtgcccctgcgttgtaccatccgcctgtgggacacctaccaggttcgagaacttgtcttggacaattgcaaatcaaatgatg

SEQ ID NO: 77720 - DNA, 50 bp, Homo sapiens
tcgtggatttcctaatggaaaatggttagttgaatccatggacatgaaac

SEQ ID NO: 77721 - DNA, 100 bp, Homo sapiens
cagcgtggccctgctggaggcctcgctgaggaacgacgccgaggaagctcattgctatggacagtgctatcaccctgtggcagttccttcttcagctcct

SEQ ID NO: 77722 - DNA, 101 bp, Homo sapiens
gcgcgagcccacgaagaggtacgattccggagaatcgcgaggcagagcgggagcgcgcagccagcaagagtgagccatggagctacgtgtggggaacaagt

SEQ ID NO: 77723 - DNA, 89 bp, Homo sapiens
agagacacttgtgaacattcaagtgaagcaaaagcctttcatgattatgtacttggaaaaatggacaaggattgtgaaatgaaacgcac

SEQ ID NO: 77724 - DNA, 100 bp, Homo sapiens
ctgcaacaaggagaagagccatggaaacaggaggaagaattcccaagccaaagctttccagcgactgcatttgcctccagacttgtcagacacagtgagc

SEQ ID NO: 77725 - DNA, 75 bp, Homo sapiens
tccacaatgtctccaaggagcccgggggctggggacaacctgcagacagcggtgactgtggcccggggctgtggc

SEQ ID NO: 77726 - DNA, 75 bp, Homo sapiens
tgattaaacgctacaactctaccgctgctaccaatggttatcaagactctgattctgccccggctgcagcaggaa

SEQ ID NO: 77727 - DNA, 82 bp, Homo sapiens
gtgaatcctcgtccatgtcacctcatgcgggcttcgctggcgctgatacaatacaatgtttacctggccaaagagggttcga

SEQ ID NO: 77728 - DNA, 101 bp, Homo sapiens
gagaccccgcgccgacggctgctcaaacatcagggcatggaagaggagatggttcgtgttacgcagtggccgtttaactggagatccagatgttttggaat

SEQ ID NO: 77729 - DNA, 82 bp, Homo sapiens
cagagtccttgctgggggttcggggagcgcttggaccccggcttctgggacgcgtcagtcaaggagaagctgcgccttgatc

SEQ ID NO: 77730 - DNA, 101 bp, Homo sapiens
ggctgggcttcgtgtcctgcgttccgggagcgccaacccctccagagtgtgaacatggctacgcctcttcattcccgtccatgccgagcccccgactgcag

SEQ ID NO: 77731 - DNA, 83 bp, Homo sapiens
cccagaccctggagcctcagttggaagcagccgatccagcctgcggagcctgtggggcagccccattggatgagaatgaccta

SEQ ID NO: 77732 - DNA, 100 bp, Homo sapiens
ctttccaccattattatgaggcctcccagccctgtgtaactagagcagagctgacatctgataaagacatgtaccttgacaacagctccattgaagaagc

SEQ ID NO: 77733 - DNA, 73 bp, Homo sapiens
aaagcctacaaaagtgtggagaggttccttcaggaggatcagacaaatttacatgtattggagaccagaccag

SEQ ID NO: 77734 - DNA, 96 bp, Homo sapiens
ggatgatgccagagctctcctacagctgggatctagcaattgggaggcagcagacttgggtaatgaagagagaaaacaaaagttcttgagacttat

SEQ ID NO: 77735 - DNA, 74 bp, Homo sapiens
caaaatggccctatgcttagggtgtccaaagacaggaggtggtctgtaaaaggttggatgacaactccattgtc

SEQ ID NO: 77736 - DNA, 75 bp, Homo sapiens
agacccaatggaacatcagcaatgcttctggagggagcactggcagttgctgggtaatttgaagacgacggtgga

SEQ ID NO: 77737 - DNA, 76 bp, Homo sapiens
ggccagagagccaggagcatcctgaagctgacccaggtaagagagcaggagattcggatgggtcagatggctatgg

SEQ ID NO: 77738 - DNA, 87 bp, Homo sapiens
ggtcctgtatgttaactggaacacctgaatctgtccattagttgaatccatggacatgaaacccacagatatagagggttggcccgg

SEQ ID NO: 77739 - DNA, 50 bp, Homo sapiens
agaagaaaacactttgtgggccaggtggtcactaactgccaagagagaat

SEQ ID NO: 77740 - DNA, 74 bp, Homo sapiens
ggaaggcagattcaagcagctgcaaggtctgcaccctgaccaaggaagacaatcgctgcgtgggcaagattccc

SEQ ID NO: 77741 - DNA, 96 bp, Homo sapiens
aagaagcatggaccctgcaagagggatgggagtcccagcttctggagacggggttcctggggatcttcctgtgccctctgtggacgctgtcaaggc

SEQ ID NO: 77742 - DNA, 100 bp, Homo sapiens
tcagcaccttggcgaagccttgggtttctttcttaaaggactgatttttagaactccacatttgaggtattagaaaactactcggatgctccaatgacac

SEQ ID NO: 77743 - DNA, 75 bp, Homo sapiens
gcggcaccggatcaccaagacggagggggggccctcagcctcttggccttgaacgggctgttcatcttgattcac

SEQ ID NO: 77744 - DNA, 75 bp, Homo sapiens
tttcgatggtactgcagtggcaactaacaaagattcgggcaagtccaccactactggccatctgatctataaatg

SEQ ID NO: 77745 - DNA, 90 bp, Homo sapiens
gccaatccctcccagctcttcgggagctgcagtccatggctgaccaggagcaggtgtcaccagccgccatcaagaagaccatcctggaca

SEQ ID NO: 77746 - DNA, 100 bp, Homo sapiens
aaaaagaatgcggcaagagttgctttgttagaacaactggggacaaccctggatatgggggaactgagagatccaaatcacaggacagtacccaaacaca

SEQ ID NO: 77747 - DNA, 100 bp, Homo sapiens
atgggggtccacactgcaatgtttttgtggaacatgaaccaagcgcctccaggtctctacacgaagacccaggacccagccaaagcccccaacacccctg

SEQ ID NO: 77748 - DNA, 83 bp, Homo sapiens
gcccgaggaggcagccaagctcgtggcctgcctctgcgtgcatgagatccgaaatggcccataccgacagctcttccacccag

SEQ ID NO: 77749 - DNA, 100 bp, Homo sapiens
cggtggcaggggctgactgagagcgtctgcttggttacttcctcagaatgttggcctcctgtatgttggaggttatgaaagaccctttgcacaaatcaag

SEQ ID NO: 77750 - DNA, 89 bp, Homo sapiens
cgcagaggaggagcgcagcccggcctcgacgcaaacatgcagatctttgtgaagaccctcactggcaaaaccatcacccttgaggtcga

SEQ ID NO: 77751 - DNA, 98 bp, Homo sapiens
cgcagactccttctccagcatgggctcgcctgtcaacgcgcagaggagttgaagccaaacagccaaattctgccattaggaagtgtgtaagggtccag

SEQ ID NO: 77752 - DNA, 100 bp, Homo sapiens
ccacaggatgctgtagtagcaaatcaggtgaggctcccacctaacaccaatgatgaagtagatgaggatcctacaggaaacaaagccctgtgggaccgtg

SEQ ID NO: 77753 - DNA, 73 bp, Homo sapiens
ggcgcgatttgaggagctgctgctgcagacttaattcagtgcacaaatgagatgaatgtgaacatcccacagt

SEQ ID NO: 77754 - DNA, 119 bp, Homo sapiens
cacaggcttccagtacgagctggttaggaggcacagggcgtcggacctgcacgagctgtctgacaatgcagatcttcgtgaagactctgactggtaagaccatcaccctcgaggttgag

SEQ ID NO: 77755 - DNA, 76 bp, Homo sapiens
gcgaagtgaagggtggcccaggtggggccaggctgactgaaagaatttctctgctcctcctgatgtcactacaact

SEQ ID NO: 77756 - DNA, 100 bp, Homo sapiens
acgacctggcggtggggctgcggcgcctgggactgcaccgcaccgagggcgagctccagttctgggaaatgccagtgcaaagtgggtgtcattggctcta

SEQ ID NO: 77757 - DNA, 50 bp, Homo sapiens
atcctggatctgtatgctttgagcaagtttgtgtttaaggagaaactaac

SEQ ID NO: 77758 - DNA, 100 bp, Homo sapiens
gagaaataccatttcagacatgccaagcacgagtacacgagacaggattgagaaaggagagattcaaattgtgacttcagattcaaaggcaattaaagga

SEQ ID NO: 77759 - DNA, 74 bp, Homo sapiens
cggccttcatcgacatcagtgaagaagatcagtgggcatccccaccatcagatggtgcggggcagagggggact

SEQ ID NO: 77760 - DNA, 75 bp, Homo sapiens
gtgtgcggcaagcctctgccttgtggttccttaggtgcagtggcttctatgttttgggttgatgctgaattaggg

SEQ ID NO: 77761 - DNA, 75 bp, Homo sapiens
tcgcggaaccccgtggcttccccgacgcagcccagcggcacggagaaaggcaccgtctgcgtcctgctgtccttc

SEQ ID NO: 77762 - DNA, 100 bp, Homo sapiens
ctgctgaacaaataatttttcatggcgggtggcagaaagagcactctattattggaataatgaatacatcatgagtttgatagaagaaaactctaacgtc

SEQ ID NO: 77763 - DNA, 100 bp, Homo sapiens
caggggcctggtggtggcctgggcgctcagcctgtggccaggaagattttcagtcaatgacttatggatttaaaatggctaacagtgtgacagatcttcg

SEQ ID NO: 77764 - DNA, 51 bp, Homo sapiens
ggctaagagtgttcagtagaaatggagtttgtacaaatgatgacagcaaag

SEQ ID NO: 77765 - DNA, 100 bp, Homo sapiens
acatcccgcagtacaagaactggagagggctgatcccttatccaacatggttctaaccttcagtactaaagaagatgcagtttcctttgcagaaaaaaat

SEQ ID NO: 77766 - DNA, 96 bp, Homo sapiens
ctggcgactggcaggacgcggtgcagagagcggacttccgcgacgcggggtgaatcgaaacgcatcaccctggtcctccagcagccacagtctgga

SEQ ID NO: 77767 - DNA, 50 bp, Homo sapiens
tactcacagataggaattgaagatcttcgcaaatactgtggacaatgccc

SEQ ID NO: 77768 - DNA, 98 bp, Homo sapiens
ttcgagtgggtctacaccgaccagccgcacgccgaccggcgccgggagatcctgggtgattgatgagatttatcgtgtgttgagatatgtcaattcta

SEQ ID NO: 77769 - DNA, 82 bp, Homo sapiens
gcggccgcgtccgcctcaaggcgcattacgggggcatcatggcagaacaggatgtggaaaacgatcttttggattacgatga

SEQ ID NO: 77770 - DNA, 75 bp, Homo sapiens
gacagggacagcgacttccttgcagcctcttctccggggaggttttacataaatggagtcctaaacaaataggag

SEQ ID NO: 77771 - DNA, 100 bp, Homo sapiens
ccaagttgggggctcagaggggagtcatcatgagcgatgttaccattgtgaaagaaggttgggttcagaagagggaacatacatatgatagttgagaaag

SEQ ID NO: 77772 - DNA, 100 bp, Homo sapiens
gccacctatgagatccagtttgggcacctgcagcgacctacccactacaatacctcttgggactgggctcgatttgagattccgggaccccaaatcccag

SEQ ID NO: 77773 - DNA, 100 bp, Homo sapiens
gtccctgctcatccattctcctgccacccccagacctcctcagctccaggtgccagaaccctgtggagcatcatgaactgggaagagtagctgagcccca

SEQ ID NO: 77774 - DNA, 49 bp, Homo sapiens
agttcacacacaaacattgttttcagggctgatggagttatgagaacaa

SEQ ID NO: 77775 - DNA, 75 bp, Homo sapiens
caggaccggcgtgacagcctccagttgcaaccagtgtggcagagagtctaagcttttgtcaaaattttatgagct

SEQ ID NO: 77776 - DNA, 90 bp, Homo sapiens
atccgaggcaacggtggctcctcgaggtccacggtcccggggtctcactctgctcactctgtctcccaagctggagtgcagtggtacagt

SEQ ID NO: 77777 - DNA, 50 bp, Homo sapiens
gtgaggacttcaagcttggcaccatcaagtttgctcagggtgacgtccgc

SEQ ID NO: 77778 - DNA, 75 bp, Homo sapiens
aagtagcaggccgcatgcttggagtttcattgtactgacaacctcagctggcatcatggaccatgaagaagcaag

SEQ ID NO: 77779 - DNA, 100 bp, Homo sapiens
gaggtctgatgcctactattttaggaatggctccatatgcagcagcacagtcagcagcctccattcaagagttgattcattagaaaagtcaaatactaag

SEQ ID NO: 77780 - DNA, 100 bp, Homo sapiens
ctctgccgtgaatcattcctgcagatgaaaaagtgtgacttggcagctggtgtggatgaggtcaccattgtcaacattttgaccaaccgcagcaatgcac

SEQ ID NO: 77781 - DNA, 74 bp, Homo sapiens
aacgattgggctgagcagaggacgacatgttgcttttcgtggaggctgaccaactgactgaagagcagattgca

SEQ ID NO: 77782 - DNA, 75 bp, Homo sapiens
ttcacatctaaaccaaccactgccacaacctgcgcagcagacagaataatcatgggccagactgggaagaaatct

SEQ ID NO: 77783 - DNA, 74 bp, Homo sapiens
gtcagggacatttctgaagcgagcgtcttcgatgtggattttggggtgagtgctcagctggaccgcaccgtggg

SEQ ID NO: 77784 - DNA, 95 bp, Homo sapiens
aaaatttcagggcagatttacgggaagttgccggtgttgggagtaaaaatctggtttggtccacctgggcttgcgaaggcacagattccccgtcc

SEQ ID NO: 77785 - DNA, 50 bp, Homo sapiens
tggccggggacacccagtggtccagctcaccatggatgatgatatcgccg

SEQ ID NO: 77786 - DNA, 87 bp, Homo sapiens
caaggaggacggcgagagcacggacagactcatggggaagggccaggtccagacaggaacacagaggacgatcgccccccggacaca

SEQ ID NO: 77787 - DNA, 83 bp, Homo sapiens
agaaattgagcaagcagcaagtcggctttcagatcaggactattcttgataagaaagagctcttggagtttgctcaacttggc

SEQ ID NO: 77788 - DNA, 75 bp, Homo sapiens
caagaggaagaccccaccagtgagatccactgctccagcaatcccacagagtattgatgaggaaactgaagtttg

SEQ ID NO: 77789 - DNA, 98 bp, Homo sapiens
cagacaactaagcgaggggatcctcatgagttaagaaacatatttctacagggtcgtctactcaatttgagctgctccacagttcccacctttgttct

SEQ ID NO: 77790 - DNA, 82 bp, Homo sapiens
ctgacttcaagaatgaagccgcggaccctcgcattacagatgaatccattccctcttattctggaagtgatatgccaagaaa

SEQ ID NO: 77791 - DNA, 50 bp, Homo sapiens
acacagaaaccttgccatcaggttggccttggcagaattgtatgaagatg

SEQ ID NO: 77792 - DNA, 100 bp, Homo sapiens
tcaagaaatcctcctgcctcagcctcctgagaacttgggactacagttggccgtaaaccaaagacccagcaatcaccaatttccaatgggtctcctgagt

SEQ ID NO: 77793 - DNA, 98 bp, Homo sapiens
agaaggagggcagcctgcgggattggtatgacttcgtgtggaaccgcacgcgtggcatacggaagtaggagagaagtttgctgaggaatgccttcaag

SEQ ID NO: 77794 - DNA, 50 bp, Homo sapiens
cccatgtaagcacgccttccacagaaagccaacccatggccagcacagac

SEQ ID NO: 77795 - DNA, 99 bp, Homo sapiens
tcaccatcaacaaagaagaccacacactgggaaacatcattaaatcctccctgcacaagcagcactttcttttgccatagcaacatgtgcatcaataat

SEQ ID NO: 77796 - DNA, 87 bp, Homo sapiens
cgcggcagcccgtggagtcggctgagggaaaagcgaggcaaggcaggcggtacttgattctaaagctcgaaaggcctgctatagttc

SEQ ID NO: 77797 - DNA, 83 bp, Homo sapiens
ggagagcaaggcgcgcggcgactccgattctgaaagtcaagaagacatcatccggaatattgccaggcacctcgcccaggtcg

SEQ ID NO: 77798 - DNA, 75 bp, Homo sapiens
ctgcagacacaactacggggttggtgagagcttcacagtgcagcggcgaggttggtggttctgtcagatgaaagc

SEQ ID NO: 77799 - DNA, 100 bp, Homo sapiens
gtcagatggcggcggccgagctgacggccccggcccagctgatgtttgagccagcatgtcgcggaggaagcaagcgaagcctcaacatttccaatccgac

SEQ ID NO: 77800 - DNA, 98 bp, Homo sapiens
atttgcccagttcatgactcaagaagcagctcagaaatgccttctagctgcttctccagagaatgagcgctccattagcttccgcagtgagagccgcc

SEQ ID NO: 77801 - DNA, 95 bp, Homo sapiens
ctgtttcatgaggtgcaacgtcgaattcgtcggcacaagaactatctacgtgtggttggaaacatggaggccagatgaaacgactacaaagtgcc

SEQ ID NO: 77802 - DNA, 96 bp, Homo sapiens
gctaaccaacaggcacgacaagtttctggacactctccgagaggtgaaggaaatgctgtctatgatttcttcattggccgtgaattaaaccctcga

SEQ ID NO: 77803 - DNA, 75 bp, Homo sapiens
cacaggttgaaaaaccaaagctccctgctgcataagaccttgtcagagatgtccaacatcacagtcacatacaga

SEQ ID NO: 77804 - DNA, 100 bp, Homo sapiens
ctgaagggcaaggaaagcagcatagagaatgagatagccgtcctgagaaagtttgatgaacttgtgaaaaaattcaaagtcgaatatcatgctggtggct

SEQ ID NO: 77805 - DNA, 80 bp, Homo sapiens
cagggaaccctggtcaccgtctcctcaggcagaatccagagaccacatttgaagtatatgttgaagtggcctatcccagg

SEQ ID NO: 77806 - DNA, 131 bp, Homo sapiens
gccgcctgaagcagctgctgtcccgggcctaccccctggactccctggagaagcagatggaaaagtggactcccgaaaaattgaccaggaagggaaaatcccagatgaaactttggagaaattgaagagcc

SEQ ID NO: 77807 - DNA, 82 bp, Homo sapiens
tcaactacctgcactttggggagcctaagtcctgctgcatcttcctcccgtgaggctggccgagctccacgctgatctgaag

SEQ ID NO: 77808 - DNA, 87 bp, Homo sapiens
agaagactttaacagaactcaacaaatgctgtggcctttgtgtctgcccatgtaataggcatcttgacagcagtagcaatgagcgtc

SEQ ID NO: 77809 - DNA, 100 bp, Homo sapiens
cccgggtcaccttcctggcttggcagtatcggtttgtcattgagttggaccttagcccatctactggcattgtgtgcacagccagagaacaacacatcac

SEQ ID NO: 77810 - DNA, 50 bp, Homo sapiens
aatttgcaactcatcatagtcctggtatctctcctaaatgtgtgatcaag

SEQ ID NO: 77811 - DNA, 83 bp, Homo sapiens
tgtcagacgcagccgtagacaccagctccgaaatcaccaccaagcaaacggggattcagcgtccgatcctttggaacagggac

SEQ ID NO: 77812 - DNA, 100 bp, Homo sapiens
gctggatgtgttgtgttcctggcttccctctggatgctgacagaaacaagggctggccctgcataactcccgtttcctgagtctctgctctgagctggat

SEQ ID NO: 77813 - DNA, 73 bp, Homo sapiens
ccggccgcgggcgcgaccggaggcagataacatgcctggacatttccagcagaggaggtcttggtgtgtcttc

SEQ ID NO: 77814 - DNA, 99 bp, Homo sapiens
ccccgactcaacgtgagacgcaccgcccggactcaccatggggataagagcactgattatgctaatttttaccagggattgtgggattgtactggagct

SEQ ID NO: 77815 - DNA, 82 bp, Homo sapiens
agacgggtgaggaggatgtgattatggaagctctgcggtcatacaaccaggaggctatgtggttgatgttgcagaatgatga

SEQ ID NO: 77816 - DNA, 132 bp, Homo sapiens
ctttcaaatctacagcaaggtttactctgaatcccaatcctacaggagttcaaaacccacacataaggccaatgatgaggccaatcagagtgatacaagtgtctccttgtcagaacccaagagcaaaagcag

SEQ ID NO: 77817 - DNA, 82 bp, Homo sapiens
gggaaagatggtgcccaccacatggaggccagcctaggtcttgtatgaaacctgtgaggctgaagtcgcccagctgcaagaa

SEQ ID NO: 77818 - DNA, 80 bp, Homo sapiens
cagccccaaacaggacgaaggcgtgctgaaggtcaaaatgcagatcttcgtgaaaacccttaccggcaagaccatcaccc

SEQ ID NO: 77819 - DNA, 82 bp, Homo sapiens
ccgctgtgtggttgcaacggagataaattcccggaaccgcgattcggcgtgtcaggtccagtggtttacgtcttggatcttg

SEQ ID NO: 77820 - DNA, 75 bp, Homo sapiens
gcgggccctgggggtcctcagcgtggtctgcctgctgcactgctttggaagatgagaatgtgcctactgctcctg

SEQ ID NO: 77821 - DNA, 88 bp, Homo sapiens
ctgtcatgagaagtggcgatcaaaattgaaagttcgtcgctgcttcctgtgctccaggagaggacatctcctgtattcctgtccagcc

SEQ ID NO: 77822 - DNA, 101 bp, Homo sapiens
acggtgcagacggggttctgcgactggagcgcccgctattttgcccagcccgtcatgaaggtactccaaagattcaggtttactcacgtcatccagcagag

SEQ ID NO: 77823 - DNA, 74 bp, Homo sapiens
ctctattcaaatctggttcagattttacagctctgggacctgttactatgactagtgtacaccccccaatacgt

SEQ ID NO: 77824 - DNA, 129 bp, Homo sapiens
cagaagtttatcaaggctgtcacacatcaagttaaatttggtcaacaaaatccacgtcaggctgaagagatcactttaacaattggccaagcatttgacctggcatacaggaaatttctagaatcagga

SEQ ID NO: 77825 - DNA, 90 bp, Homo sapiens
cgcagtgggtcccggacaaggagaatcaagccagggaggacttcaaccaggacatcggctggtgtgtctccctcatcaccgactacaggg

SEQ ID NO: 77826 - DNA, 97 bp, Homo sapiens
caagatcggcaggcgagattgcctgacccaggcctgctcggccctcacagggtcaatggccagcaaggaggggggtccgagccggcggcggcggcgg

SEQ ID NO: 77827 - DNA, 90 bp, Homo sapiens
gagctgcgggcgcgcgagttcagccgcctggcagccaaaccaaacaggaagcttacttttctctacctagccaatgatgtcatacagaac

SEQ ID NO: 77828 - DNA, 98 bp, Homo sapiens
ccctgggtcgcttggaagaagccaagcccaaagcagtgtccacaccagcaccagctacaactcagcagtcagctcctgccagcactacagcagttact

SEQ ID NO: 77829 - DNA, 90 bp, Homo sapiens
gagcttcctgcggacgtccaagctgctgcttccggatgactttaaggcccctgagcctctgagctccttgaagtccatggcggaacgggc

SEQ ID NO: 77830 - DNA, 100 bp, Homo sapiens
ttggctccttccccatcttcacagaatacacctctggctcaagtgtttgtccctttggagtctgttaagcccaaccccaggctccagaagcagatgagga

SEQ ID NO: 77831 - DNA, 75 bp, Homo sapiens
gaacttttgggaaaaggagcaagtgtgcttgcagtagatgaaaatgttggcttcctgaggctcaggtagtccaaa

SEQ ID NO: 77832 - DNA, 82 bp, Homo sapiens
ggagaagcaggctggcggaaacccttggtacactgaggaggggacggctccgtcttcacattgtgcacagatctgaggatgg

SEQ ID NO: 77833 - DNA, 75 bp, Homo sapiens
tatattcagtggctaaatggctccctgattcatggccatcatctctcagcaaggtgacatatttgtttttgacct

SEQ ID NO: 77834 - DNA, 99 bp, Homo sapiens
cccaggcagcagaatctgcccacagagttcggctgataggaagatgtcttcaggaaatgctaaaattgggcaccctgcccccaacttcaaagccacagc

SEQ ID NO: 77835 - DNA, 73 bp, Homo sapiens
gaccgcgaggccttccagaggctcaacttcctgtaccagatattgtactccaagatacttggattacgaagat

SEQ ID NO: 77836 - DNA, 88 bp, Homo sapiens
ctatatatccttttgcacggccccagatgaataccaggactcctgagagcagcctccatgaggccctggaccagtgcatgaccgccct

SEQ ID NO: 77837 - DNA, 97 bp, Homo sapiens
agggggcagaggaggcggccaaggacctggccgacatcgcggccttcttccgatccggagcgtgaggatcatccccggagaggacgggaggatcggc

SEQ ID NO: 77838 - DNA, 103 bp, Homo sapiens
caatagttttaatgggaacatacgatgatggagcaaccaagaaatgcttccagactgcacacttttacttagaggacagtacatcccctagagttatatccac

SEQ ID NO: 77839 - DNA, 100 bp, Homo sapiens
agtggctgatgaagggtggcacattttacagaataagtcagatgactttctgtgctggaatcgatggagaaagcatcggcaactgtcctttctctcagcg

SEQ ID NO: 77840 - DNA, 109 bp, Homo sapiens
ggggaagaggaggcggaaaaggacgcaaagttctccggcgaggttacttcctcagaatgttggcctcctgtatgttggaggttatgaaagaccctttgcacaaatcaag

SEQ ID NO: 77841 - DNA, 82 bp, Homo sapiens
gatacccacagtacggctggcagggtggacctcaggagcctcctaaaaccacaggtatcttgcggtaccgagtagatttcca

SEQ ID NO: 77842 - DNA, 100 bp, Homo sapiens
cagaggaaagaagagtagaaagggatattcttaaggaaatgttcccctatgaagcatctacaccaacaggaattagagcagtatagctgtgactatggat

SEQ ID NO: 77843 - DNA, 75 bp, Homo sapiens
tcgaagaaggggacgccgacaaggttgcacactgggccacagaggatccagcaaggatgaagaaatggagcagca

SEQ ID NO: 77844 - DNA, 81 bp, Homo sapiens
atgatttactggaggattcagacagtgaagagcattccagatcagattctgtgacagagcaacaagatatggatttggata

SEQ ID NO: 77845 - DNA, 50 bp, Homo sapiens
attgaagggaacaacacccttgatggttgactatagtcaatggggccaat

SEQ ID NO: 77846 - DNA, 100 bp, Homo sapiens
aatttgttacgcaagtatcgccatggcgacagattatgactgctggaaggagcacgaggaagcaatgggtgagtcaagtgaagacatagaccaaatgttc

SEQ ID NO: 77847 - DNA, 97 bp, Homo sapiens
ggccaacctcatccaggagatgggacagcgtctcaatgttttgatacaaccaagtcggatgggcagtttaagaagacagccagtaacagcaagctga

SEQ ID NO: 77848 - DNA, 98 bp, Homo sapiens
tcctgttcctggcggtgctgcggccacacaccggcaacgcggtcacggcccagcgcgttcgatatgaggccccaggattcctggcgaggtcctcctcc

SEQ ID NO: 77849 - DNA, 71 bp, Homo sapiens
gcgctcaaccagatcgcgcgggagatgccttcaattaagttgcagagttctgatggagagatatttgaagt

SEQ ID NO: 77850 - DNA, 75 bp, Homo sapiens
atcagagaactccagagaggggtgggggaacctcaaggagttgatgaagtgtggctgtcactggcatgtctgcaa

SEQ ID NO: 77851 - DNA, 74 bp, Homo sapiens
gaggaggcagctgcggtggcagctgctgagttctcggtgaaggaacatggagctgatccaggacacctcccgcc

SEQ ID NO: 77852 - DNA, 101 bp, Homo sapiens
gctttttggaattcagttatcaagctttagagcctggctactcacagttgaagcctgattgcagaacatgttcttcaagtatacatggaataactttttgc

SEQ ID NO: 77853 - DNA, 96 bp, Homo sapiens
ctttcctgtgttagggagaataatgtttgtgacataaattcagtgcatggcttgtttgccacaggaaccatagagaacccctgaacagtgcccaag

SEQ ID NO: 77854 - DNA, 96 bp, Homo sapiens
gccggccgcggccccctgttgtgttgctgcggagagacacatatgtgatcaagctgttcgaccggagcgtggacttggcccagttcagcgagaaca

SEQ ID NO: 77855 - DNA, 75 bp, Homo sapiens
cggcgcccccaccccatccccgggaggtaagaatgattgatgttggctgatattggagtgctcattcacatgaag

SEQ ID NO: 77856 - DNA, 75 bp, Homo sapiens
acgacattcccttcgagctgcgcatcgtggatctgattaaagagcatgcaagcggcaagatgtcctacagatgaa

SEQ ID NO: 77857 - DNA, 100 bp, Homo sapiens
caaggagcacaagtagctgctcttccaagcaaggaagtcgacaggttctcatcccaggccttgtggagggatctaccaaaaggaagcgggttctgagtcc

SEQ ID NO: 77858 - DNA, 75 bp, Homo sapiens
caagcggaggcgcgcggaacagtcgccgaggcgattcccgcccagtaagactttgaccccgacgcaggcttcagt

SEQ ID NO: 77859 - DNA, 100 bp, Homo sapiens
catgcacagcctggcgacggctgcggtggccaacatgagtgctaaggacggcacgtgtacactgcaggactgcatgtacaaggatgtgcagaaggactgg

SEQ ID NO: 77860 - DNA, 100 bp, Homo sapiens
acggaaccggcagagcgagagcccagaagctctgagaccagccgcatctacacgtgggcccgaggaagagctccaccgggggacggctacgtgcaggcgg

SEQ ID NO: 77861 - DNA, 88 bp, Homo sapiens
gcgaggaaaggtgtgctgtgcctgaggccagtgatgtccttgcattgcccatttttaagcaagaagagtcgagtttgcctcctgataa

SEQ ID NO: 77862 - DNA, 101 bp, Homo sapiens
ttttaattgaagctggaaagcttggacttgtttatgaaggcgagcgtgccatgacaaaggataacaacctgcttggcaagtttgaactcacaggcatacct

SEQ ID NO: 77863 - DNA, 102 bp, Homo sapiens
gcgggtctcttccgcggaaactgacattgcgtttccgttgtcggcctcccactgcagcgtggagattggtgaaagcgtgagaggggaagatgtctacatcat

SEQ ID NO: 77864 - DNA, 82 bp, Homo sapiens
gcttcctgcaggcccagagccggcatgaactctcccaacgagtcgggagaaaagccttacagatgctcatgggaagggtgtg

SEQ ID NO: 77865 - DNA, 100 bp, Homo sapiens
atcgtcgagaagcctatcatcgatcacctctgcagcctgcacagccgggcctttggactcctggatgctagagtgacctgggcgctgaggagggcccccg

SEQ ID NO: 77866 - DNA, 73 bp, Homo sapiens
gagtgtcagccatcgcttcggaggggaaggctgaggaaaggaaccctaaggactctgcaatatgaataattcc

SEQ ID NO: 77867 - DNA, 75 bp, Homo sapiens
aacccagttagttacttcctgtctagagttgtagcttccacctgctacttgaaggaaattttgccaaagaagtga

SEQ ID NO: 77868 - DNA, 74 bp, Homo sapiens
gccagcatcatacaccggctgttcgaggccttgactgtagatatggctcgtggacagcagaaaattcagtctca

SEQ ID NO: 77869 - DNA, 75 bp, Homo sapiens
aatgcctatgaccggcgtcgagaatttcaactggttgttcctcaaagtcattcaagctgtactcgccgaaggagc

SEQ ID NO: 77870 - DNA, 100 bp, Homo sapiens
ctgtcgccggcttcagcagcccgcgcccgggcaggtccaccttcatccgaagaggctgaatcataaatataacccagtgtcacttcccaaagacttaccc

SEQ ID NO: 77871 - DNA, 74 bp, Homo sapiens
atcctgaatgaatttagagccaaactgtccaaggctttggcagtaaaataccatgaagattttgaaaaaacaaa

SEQ ID NO: 77872 - DNA, 75 bp, Homo sapiens
cgcggggaccgctgtgctctcgacgcaaacatgcagatctttgtgaagaccctcactggcaaaaccatcaccctt

SEQ ID NO: 77873 - DNA, 110 bp, Homo sapiens
aaatatttggaaaaaaagataaaccaaaggtttgaccatgaaatgtttggcctgaagcctaaacacagaacaccttccaccatgaccacctcagcaagttcccacttaaa

SEQ ID NO: 77874 - DNA, 75 bp, Homo sapiens
ctgcaagggccaagcacgctgttccagtttcagcacccatttggactttcacaatcagagatggcagcggtaaag

SEQ ID NO: 77875 - DNA, 82 bp, Homo sapiens
ccaaataccagctcgacaaagatggggttgtcctctttaagaaggagagtcgcggttgctgatcgtggtgcttgagtagagc

SEQ ID NO: 77876 - DNA, 95 bp, Homo sapiens
agttgatgaccagtctttcccatatcagagcatcacttttcctgagttaagcaataaagagttgatccctgaattttattatctccctgagatgt

SEQ ID NO: 77877 - DNA, 100 bp, Homo sapiens
aagcagccttagccctagtgtagaggcctttttgcaaatgtgtaacttgcctatcaaagtagtttgtagggcaaatgcagaatatatgtctccatctggt

SEQ ID NO: 77878 - DNA, 100 bp, Homo sapiens
ttccaggaaaccttcactgctaagaggaactaagatctagagtatctcctcgaggaagtacaactgcagttgagagtgatgctgcagacattgtctttct

SEQ ID NO: 77879 - DNA, 100 bp, Homo sapiens
gctaaatgtagacaatggttagagaagaattttccaaatgaatttgcaaaacttactgtaggtccagtgcacgtgccaacattacactgtcagggaagaa

SEQ ID NO: 77880 - DNA, 90 bp, Homo sapiens
atccgggccgggagctgcgggcgcccgggcgcccgaggcttcccggtgcgctccgccagtgttctccgtggcccgatgcccccacagcct

SEQ ID NO: 77881 - DNA, 101 bp, Homo sapiens
gggaacatgctgagaaactgatgaagctgcagaaccaacgaggtggccgaatcttccttcaggatatcaagccgccccgggggaaggtgcggaggacgcag

SEQ ID NO: 77882 - DNA, 50 bp, Homo sapiens
tgtctatcaggattccttgttggcggggagaagcccgaggaagattgacc

SEQ ID NO: 77883 - DNA, 99 bp, Homo sapiens
gaaaagcaactttgatgcagcacgcagtgacattctacgaatggattccaccaatgcagatgctctgtatgtacgaggtctttgcctttattacgaaga

SEQ ID NO: 77884 - DNA, 100 bp, Homo sapiens
cgcttcagttctcccggtgtggccacgagtcgggatggggctggtaagtagcaaaaagccggacaaggaaaagccgatcaaagagaaggacaagggccaa

SEQ ID NO: 77885 - DNA, 75 bp, Homo sapiens
gagtgtgttgcaaacatgaaagatctgttcctcctgggaagatgcagaggctcatgatgctcctcgccacatcgg

SEQ ID NO: 77886 - DNA, 74 bp, Homo sapiens
ctcgccgcagcctccggagaggaacagaccctcactctctctgtcagaaaaataaaaagttacgtcgatcacaa

SEQ ID NO: 77887 - DNA, 75 bp, Homo sapiens
agtatgtggatgtcacagccaaaacgctttccttaaagtttcccatgtctcaatggactcctgaatataacgagc

SEQ ID NO: 77888 - DNA, 83 bp, Homo sapiens
gaggaaaattacccggtatcgttagagaggctgacccgcggctgattgagtccctctcccagatgctgtccatgggcttctct

SEQ ID NO: 77889 - DNA, 83 bp, Homo sapiens
caggaaccaccagtgacagagtagcctttccagtaaatatatgactcagggaaaagcctcagcgaagaggacccagcaggaat

SEQ ID NO: 77890 - DNA, 75 bp, Homo sapiens
cgaagatgcttccctgtgcaagaggcttgcagtaaggttgggctgctggcacgacccttacatccaccactttgt

SEQ ID NO: 77891 - DNA, 73 bp, Homo sapiens
tgagctttatgatggagttgaagatgcttttggtatatgccctcattttgcttaagacctctggccagagcag

SEQ ID NO: 77892 - DNA, 96 bp, Homo sapiens
caagattaaaagagcgaataaagtttatcacgccgggatcagggagcagagaaacatgaaggcacaggtcagtcctctgggatcactgatcaagag

SEQ ID NO: 77893 - DNA, 98 bp, Homo sapiens
tggaagcaggactgcgccgcgtcttcctcaagtattctaccttgtaaatactgttatttgtatatactgtaaatgatgacatcggtgggcactaaccg

SEQ ID NO: 77894 - DNA, 82 bp, Homo sapiens
cgagaccgcggccgggaccgaggccatccacgaaaatgctttcattgtgttcattgcctcatccctcgggcacatgctcctc

SEQ ID NO: 77895 - DNA, 83 bp, Homo sapiens
atcatgtctgcgagccaggattcccggacactcatgaggaccatgatacttccactgagaatacagacgagtccaaccatgac

SEQ ID NO: 77896 - DNA, 75 bp, Homo sapiens
gcttcctgaaggggaagatctcaatgaatgggttgcagttaacaacatagggcctgattacattccaacagagga

SEQ ID NO: 77897 - DNA, 51 bp, Homo sapiens
gagtgtatgaccacaaacagccatcaagatggagtctcgctctgtcaccca

SEQ ID NO: 77898 - DNA, 83 bp, Homo sapiens
caatgccggtggaggaatttgtggctggctggatctctggactctccttcagcaactccagaagcttcagactttggtgatgg

SEQ ID NO: 77899 - DNA, 100 bp, Homo sapiens
ggaagtgtcagcgctactgccgcaggttgatatccctgaaagtacttaatagcatcgtgctgttggggaaatcgtgccagtatgtgaaggaagccaaaat

SEQ ID NO: 77900 - DNA, 100 bp, Homo sapiens
cactatttagtattcttgaaggagagcttgaagcaagggaccttgttatagaagccttaaaggtgtatactcttgatgtaccagatgcattctattactg

SEQ ID NO: 77901 - DNA, 82 bp, Homo sapiens
gctcagtgacctcctggacttcagcatgatgcgagccacccctctggctgctcctgcgggttccctgtccaggaagaagcgg

SEQ ID NO: 77902 - DNA, 100 bp, Homo sapiens
tccgccgtccccagccctgcctctccctgggctctgttagcaaaaggtgtgacaagcaacctgcctatgccccaaccaccacagaccaccagccgcaccc

SEQ ID NO: 77903 - DNA, 100 bp, Homo sapiens
tgacttttgaattatctgctttggaagattatccatgacactgttctgccctgctctgctctaacaacatttgacaagagcgaagccaccaggggagctc

SEQ ID NO: 77904 - DNA, 90 bp, Homo sapiens
cccactctttccgccctaatggaggtctccagtttcgtatctgatgaaaaggataccacagaacccaagataccagcatatcaaatcaag

SEQ ID NO: 77905 - DNA, 96 bp, Homo sapiens
cctttcctgaggacggcgtacggagtgtgggatcctcagtcttccacaatgaaccctgtttacagccccgtgcagcctggggctccttatggcaac

SEQ ID NO: 77906 - DNA, 100 bp, Homo sapiens
gaggaggacgacgacgatggggatatcgctggagaatgctggaggagaccttaaggatggccaccaccactatgaaggagctgttgtcattctggatgct

SEQ ID NO: 77907 - DNA, 90 bp, Homo sapiens
ggtccccaggagagcctgcctgcacggaagagacgcctcctcggtgtttgtaaaatgtatgaagaacatctgaaaagaatgaatcccaac

SEQ ID NO: 77908 - DNA, 80 bp, Homo sapiens
tacagagaaaaagaagatatgtatgacgagattattgagttaaagaagatctattaatgagatgaagcggttggaagaaa

SEQ ID NO: 77909 - DNA, 50 bp, Homo sapiens
tcatctttaaggacgaagagaggaatggatataaatttctctactgttct

SEQ ID NO: 77910 - DNA, 50 bp, Homo sapiens
cagaactgtacaactcgtgtggaagacaccagagactctaccaggacata

SEQ ID NO: 77911 - DNA, 75 bp, Homo sapiens
gctacctgcacgacatcatcacggagggcgggaaaggacgcataggagtggtcatatcatcctacatgcatttca

SEQ ID NO: 77912 - DNA, 83 bp, Homo sapiens
caacgttttgagccacaactgtcacaactccagggtatgagtattatagaacaattagaccctgtatcttttagcaattactt

SEQ ID NO: 77913 - DNA, 90 bp, Homo sapiens
gattccttcttggggaaactcggagggaccctggcccggaggaagaaagccaaggagggacttcagaaatgggcttgggaaccagctgag

SEQ ID NO: 77914 - DNA, 90 bp, Homo sapiens
cctcagcctcctaagtagctgggactacaggttctccaactctgtggcttactatggcctggccatggacctgcagaagtttgggctcag

SEQ ID NO: 77915 - DNA, 100 bp, Homo sapiens
ccctgaaagcaaccaggaggcagtaaattcttcagctgctcggacagatgaagctccccaaggagctgcagagttatgcccagccaagtcttcagtatat

SEQ ID NO: 77916 - DNA, 89 bp, Homo sapiens
ggaggagatctatctcttctccctgcctattaaggctctaatcaatcgtggggttaacctggatcccctgggcaagtggtcaaagactg

SEQ ID NO: 77917 - DNA, 98 bp, Homo sapiens
tcgcgggccgtgtctccggcatcatgtgtggatacattaattgtttggtcagaagcagagaactatgatttggctctgagttttcaggagaaagctgg

SEQ ID NO: 77918 - DNA, 100 bp, Homo sapiens
ccgggctcctggacttcgcctttcccgagccctggaggtggggagaaaaggatcttttgccagaaatgagggcatactggcctgacgtaattcactcgtt

SEQ ID NO: 77919 - DNA, 49 bp, Homo sapiens
ctgagtggatggggacctgcctgctgaaaaaagcttggccagaccacaa

SEQ ID NO: 77920 - DNA, 85 bp, Homo sapiens
ccggacggtacttctgccactgctgctccgtggagatcgtcccgcgcctgccggtctcggcgcggaagatggccggcggcgtgga

SEQ ID NO: 77921 - DNA, 96 bp, Homo sapiens
tctgacctaaactgctcagctcccggaaattccaagggatttgtcttggctgttactatgacacgggaagcaattgatgaatttcggcgttttcag

SEQ ID NO: 77922 - DNA, 100 bp, Homo sapiens
gcggccaccgccccgggacccgcgccgctgccctccggctccgcgggcggcccacggcgagaggctgataaaataccagtaatgcgtggacagtggttta

SEQ ID NO: 77923 - DNA, 50 bp, Homo sapiens
cgcctactcactctggagcctgcatttgcccagtataacatggatcagtt

SEQ ID NO: 77924 - DNA, 98 bp, Homo sapiens
aagaagatgaagaacaaaccagcacccaacctcatagggcaccaagcaaggaagaagataaagaaatgggggctcagagcagtcaagaacatgcccca

SEQ ID NO: 77925 - DNA, 101 bp, Homo sapiens
tcaacagacgggagactgaacttgagtgtttgaaagatgtatggtgatcttgaaacctccagacacaagaaaacttctagcaaattcaggggaagtttgtc

SEQ ID NO: 77926 - DNA, 100 bp, Homo sapiens
ccagaacgcagatcagaggtagtcggacctttcccgctggcgcgcagcctcagctagaaatgaaagctcattagcatctacactgaagacgctcctgttc

SEQ ID NO: 77927 - DNA, 113 bp, Homo sapiens
gatttgttagaaaggagacccgactgcaactgctggattgctgcaaggctgagggacgagaacgaggtaagaatgattgatgttggctgatattggagtgctcattcacatga

SEQ ID NO: 77928 - DNA, 82 bp, Homo sapiens
acacggggtgctgcgctgcgccgacggctccacctacaagatccggaacatggtggcggtgctggaagtcatctccagcctg

SEQ ID NO: 77929 - DNA, 83 bp, Homo sapiens
ttcaagatggggtggcttcaccagctacccctgggaccgggaaatctaagacggcgggcgctaacaccaccgacaaggagcta

SEQ ID NO: 77930 - DNA, 100 bp, Homo sapiens
ctgattctgctgtgggcgctgacgaccgaagtttgcagacctgacagacgctgctgcccgcaacgcggagctgctccgccaggccaagcacgaagccaac

SEQ ID NO: 77931 - DNA, 90 bp, Homo sapiens
gttatattcaccaagctcacaacagtaccaggaaattcggcgccttcatcagtatgtgaaatttgctgtccaagatgtgaatgatgttct

SEQ ID NO: 77932 - DNA, 101 bp, Homo sapiens
ggagagggcctggggaaggatggtggaggaatgaaaacgccgctatccaacttgataaagtcaatcttcaagtatattgtgcatggtctcttctggataac

SEQ ID NO: 77933 - DNA, 100 bp, Homo sapiens
aaagtttttaagactctcaggcttactgtggatctggattctaaggcaacacttccttgaagaaacaagcttacagttactccacaggatccgctgaaca

SEQ ID NO: 77934 - DNA, 82 bp, Homo sapiens
ttctgtcatagaaactcacatgagacaaatgcgctcagcttcaattgattgacgtgagtgaattcagatataactcaagctt

SEQ ID NO: 77935 - DNA, 95 bp, Homo sapiens
cagcgagcggcgcggagctggacgccgcgatcgtggggcccgcgaggcgggcagccggggcgtccagctagttcttctggagctcaacttcttgc

SEQ ID NO: 77936 - DNA, 100 bp, Homo sapiens
ggaaccagcgcagcgtggcgatgggcgggggtagagccccgccggagaggctgggcggctgccggtgacaggttgggcccgaaggcatcctgcagaacgg

SEQ ID NO: 77937 - DNA, 76 bp, Homo sapiens
gtcctcggcgccgccctgcgtggagccgccgccggccacccgggtgctggagaatctggtaaaagcaccattgtga

SEQ ID NO: 77938 - DNA, 75 bp, Homo sapiens
gccagggaactcaaacagcagatgcaggaagctatgaagcagataacccagctcctaccagaggacctcagaaag

SEQ ID NO: 77939 - DNA, 100 bp, Homo sapiens
cttaggtgccagtccttctaggcagaagggccctcttggggcacaaccatattaatttccctgacttctgtgctacatgacaacaaagaatttcccaacc

SEQ ID NO: 77940 - DNA, 97 bp, Homo sapiens
ggatgactgaaaacatcctggaatcaaatagtgttacggcaacaagtacttcctcctgtgctggttccaagacacagcgaatataatcctcagcaca

SEQ ID NO: 77941 - DNA, 90 bp, Homo sapiens
gctcttgctgaggacccacaagaacttcgagatggattccaacatcctgctagacttgttaaggtgagtgatttcacgtggagccatgat

SEQ ID NO: 77942 - DNA, 100 bp, Homo sapiens
ctaaaaacaagactggggctgctcccatcattgatgtggtgcgatcggaaccaaccggtgagccctctcctaagagacccaggggaagacccaaaggcag

SEQ ID NO: 77943 - DNA, 82 bp, Homo sapiens
cctggcccgggtgacccacgcggaggccgtcaagatgcctgaggaaacccagacccaagaccaaccgatggaggaggaggag

SEQ ID NO: 77944 - DNA, 75 bp, Homo sapiens
gcctccccaggccgcctccgcccgtgaagggttaaagcacgaattgggagctctcagcgacatcaccagtcagca

SEQ ID NO: 77945 - DNA, 75 bp, Homo sapiens
cttatccagaaggatatggatattaccctggtcaggctaatagctcgtcagcttgctaaaatccatgctattcat

SEQ ID NO: 77946 - DNA, 83 bp, Homo sapiens
ggagaccatggctgactacctgctgtacaccctcaacaaacaccagcgctttggacagcccacctgaggatattgaccataag

SEQ ID NO: 77947 - DNA, 100 bp, Homo sapiens
ccggaagggtgatgtggctgcggcatcgccggcctcgctatggtgccaggtcgacctgtcagccctcagtagggaacagacgcacaagctggagttgcag

SEQ ID NO: 77948 - DNA, 82 bp, Homo sapiens
aaccccagatccatttacactttacaactctttttgatcagaacaatgctgcaaaaaaagaagagtcagaaactgccaacaa

SEQ ID NO: 77949 - DNA, 74 bp, Homo sapiens
gccatggagggggtgctgtacaagtggaccaactatctgagcggtaaagaaactgcggcaatgaaagctgatct

SEQ ID NO: 77950 - DNA, 83 bp, Homo sapiens
ctgaaagactctctgaaagccttaaattaagattgatccaaatcctgatcagtcagcagatgatagaccatcctgcccctctc

SEQ ID NO: 77951 - DNA, 145 bp, Homo sapiens
gacaaactgctgacagctcagatgatccatgattggaaggatgtggtcatcaccaagatgtctttctttctcctgcctcaaattcctgcctttcctcaagagaagagcccccaggagaaaagccagtattgcttgtgctcctaac

SEQ ID NO: 77952 - DNA, 74 bp, Homo sapiens
ggcatgtcgatttgtccttcactacagtcaagctgtattagtcgacaggaccatttacatttcaggacagatag

SEQ ID NO: 77953 - DNA, 74 bp, Homo sapiens
aaaaaccttaaagggctgagagcttgagggcaggaaagaccacagcaagattctttcattcgtctcctcctagc

SEQ ID NO: 77954 - DNA, 100 bp, Homo sapiens
ggaggagaaggaggacaagctctccagggacaggacaactgatgcccattcaccagaatctcaaggagctgctggccgtcagggcggagctgcagaagcg

SEQ ID NO: 77955 - DNA, 137 bp, Homo sapiens
ctgggggagagcgagggcctcagtgacgacgaggagaccatctccaccagggtggtccggcggcgggtcttcctgaagtgcctacaccaactaatgttacaattgaatcctataacatgaaccctatcgtatattgg

SEQ ID NO: 77956 - DNA, 82 bp, Homo sapiens
ttcggtggactccttcggcagtccacccaccgccgccgcctcccagggaagatcagttttcctgccatccaggctgctccct

SEQ ID NO: 77957 - DNA, 75 bp, Homo sapiens
tcggcctggaggagttgtacggcctggcactgcgcttcttcaaaggtcacggagctgctggacgtctccatggag

SEQ ID NO: 77958 - DNA, 100 bp, Homo sapiens
ggaagtcatttgtttggacagtagcagtggcagtgaggatgaaaaaagcagtcgagatggtccgagtggacagatgaattaaacacgtacagagtggaag

SEQ ID NO: 77959 - DNA, 90 bp, Homo sapiens
aagatgatcgcccggctgggcaaggagatcaacaacccagagtccgtgtattactgggcccagaaggccctggagcacctagaccaccgg

SEQ ID NO: 77960 - DNA, 113 bp, Homo sapiens
tgtattatggataccaaggaagagaagaaggaacggaaacaaagttattttgctcggtactccaaagattcaggtttactcacgtcatccagcagagaatggaaagtcaaatt

SEQ ID NO: 77961 - DNA, 75 bp, Homo sapiens
acaacattgttcctggaacgccctctttttaaaaaaggggctccatgggccttaccccttcggccagtcttaaac

SEQ ID NO: 77962 - DNA, 100 bp, Homo sapiens
tcctattgtttttgtggtaggggcctttgcccatggcaagaaagccattgatctggtgacgaaagccacagaggaggacaaagccaagaactacgaggag

SEQ ID NO: 77963 - DNA, 98 bp, Homo sapiens
ggtgccaatattgacctggactcccagaggaagggcaagtgtgctgtgatcaaaacctctacacgacaggtctccatcacatttttgcccagaggtag

SEQ ID NO: 77964 - DNA, 50 bp, Homo sapiens
ggaccaccagcgccggcacctggaagggcagtcagggcgacagcaagaat

SEQ ID NO: 77965 - DNA, 75 bp, Homo sapiens
ggtgctttcccgaatctcagaatgcctgcctggctctctggctatgaaaatcctgtggtgtctcgaattaatatg

SEQ ID NO: 77966 - DNA, 82 bp, Homo sapiens
ccgagaacctcctgctggatggcaacatggacatcaagctggcaggaagagctggacatccgcccaaaggtatcgtctcttc

SEQ ID NO: 77967 - DNA, 90 bp, Homo sapiens
cagatgcagagccgaaacaagaagtgggctcagggcggcgactggcggcgcgatggacctgaccgggctcctgctggacgaagaaggcac

SEQ ID NO: 77968 - DNA, 50 bp, Homo sapiens
cctcctgaatagctgggactacagactgctttgccagcaacatgctcaat

SEQ ID NO: 77969 - DNA, 100 bp, Homo sapiens
atttcctctcctcccctctggatttctcagaggctgaagggtatgtgattggcagctgtattaaacacattccaatcgcaggacgagatataacatattt

SEQ ID NO: 77970 - DNA, 97 bp, Homo sapiens
aaattccgtgacgaggccagaaggctagaagaatcagacgtgctccaggaggccagaaggaaatacggtgattctgggggtccacttgtctgtaatg

SEQ ID NO: 77971 - DNA, 76 bp, Homo sapiens
caaggtttgctggcagtcagagaggtcaaccagatgtagtggtgaaagaagatgaagaatataaacgtgttgattt

SEQ ID NO: 77972 - DNA, 100 bp, Homo sapiens
acggggacgacgcgtgcttcgtggcccggcaccgttccgcggacgtgctcgtttgcaggtcgaagtaagaaggaaaccaaatattctcttaaggctgtcg

SEQ ID NO: 77973 - DNA, 97 bp, Homo sapiens
atggaggaggaggaggacgacgacgatggggatatcgacaccaaatggattgcttctgactccgagtccactgctctccagcatacatttctggagc

SEQ ID NO: 77974 - DNA, 98 bp, Homo sapiens
agaaagacaaggatgaccaggaatgggaaagccccaggacttccaatagtagtcagacattatcatcctgtcatactatggagccatgtacatcagat

SEQ ID NO: 77975 - DNA, 75 bp, Homo sapiens
ggcaatgggggcaggagctgttggagctttgcagctgacctacatctcgaagggcgaccattgacgaggtggaga

SEQ ID NO: 77976 - DNA, 100 bp, Homo sapiens
tgagccagtccctagggctcagggagcaggagcttcaggttgtccgagcatctgggaagactccctggaggaaaagcggaagcggcagcggtctgaacgc

SEQ ID NO: 77977 - DNA, 100 bp, Homo sapiens
agaggccatggaggacgaggagagacagaagaagctggaggccggcaaagccaaggagcagatgtctcaagtattagatgccatgtttgaaaaattggtc

SEQ ID NO: 77978 - DNA, 75 bp, Homo sapiens
tctgggtctctctgcctgaggccctggagggagagaagggggggccctcagcctcttggccttgaacgggctgtt

SEQ ID NO: 77979 - DNA, 75 bp, Homo sapiens
gtttccatcacgagtgccgccagcatgtctgacaaactgccctacaaagtcgattgaaagtatccagctgatgat

SEQ ID NO: 77980 - DNA, 75 bp, Homo sapiens
gagcttcccaggacggcgctcctcatcttcaaaggcctgagctacccggtgttcaaaggcatcatgaagaagggg

SEQ ID NO: 77981 - DNA, 97 bp, Homo sapiens
tggtttacctggcactcctggacaggatggattgccagggcttcctggcccgaaaggagagcctatggggtcttcttatgttgcccaggctggtctc

SEQ ID NO: 77982 - DNA, 87 bp, Homo sapiens
gatagtgccaggcctatgttggagcgtcgtctcggagatgcagccaagaaagccatcagtaaattgacaaccaggacagtaaagaag

SEQ ID NO: 77983 - DNA, 100 bp, Homo sapiens
ctccattgacaacctagaggcggctcctcatgatatcggctacgtcaaacaggccatgttccactatttccagatggccgccctgctcccccaatgaaag

SEQ ID NO: 77984 - DNA, 51 bp, Homo sapiens
tgcacctgtcaagtcgggtttacagcgtataatcgcttagcacagtcggtg

SEQ ID NO: 77985 - DNA, 74 bp, Homo sapiens
atcaaggatggcatcctctaccagcagcatgtcaagtttggcaaggaatggcgtcatgctcatggcatgaggtg

SEQ ID NO: 77986 - DNA, 74 bp, Homo sapiens
ataatgacgacagcaacccgaagacagggaaatttagttcaggacctcaaggggctcggctatgagaaggggaa

SEQ ID NO: 77987 - DNA, 75 bp, Homo sapiens
tccgtgcagcccaacttccagcaggacaagggccgtgatgggcagcaaggacagacgggactcagaggaacacca

SEQ ID NO: 77988 - DNA, 98 bp, Homo sapiens
gtatttgaaaggcttccccaaaatgggcaacttcagcttaaggggccagagttactcagcaaatacattggagcaagtgaacaagctgttcgggatat

SEQ ID NO: 77989 - DNA, 83 bp, Homo sapiens
ggccggaggacaccccatcgtgcaggtcagtcatatcatttggatcaaaaaatagaacaatcggagttgcagccaaaaatcag

SEQ ID NO: 77990 - DNA, 87 bp, Homo sapiens
gggcggtccctggctgcgtgcacagcgccttgttccagcagggcctgatccagacttgggaagatccccatgaaaaagataagagca

SEQ ID NO: 77991 - DNA, 98 bp, Homo sapiens
cggaggcgacatggggcacccggtgtaccgcggcgagaagccccagctgcactacgcggtgtaattagcatggtcaatgcgggagcgatgagtggctc

SEQ ID NO: 77992 - DNA, 75 bp, Homo sapiens
agcaaggtcggcagagcaaggggcttacgcagaaggacctggccacgaggtccagttccggccgtaccgcacaga

SEQ ID NO: 77993 - DNA, 82 bp, Homo sapiens
gcaggagggcggcggcggcggctgcggtcgaagaaggggacgccgacaaggtcatcatcagatttgaaatatttaaagtgga

SEQ ID NO: 77994 - DNA, 83 bp, Homo sapiens
cgccgaggcaccgaggcactcagaggagatcctgaggaggatgaaggggctggccctggaggccgagagtgagctggagagac

SEQ ID NO: 77995 - DNA, 95 bp, Homo sapiens
aacctttgcacaaaactgcaggaacattgaagtactgaatctaaatgggtgtacaaagacaacagacgcgtatcacagcctgtacctgaaggtga

SEQ ID NO: 77996 - DNA, 90 bp, Homo sapiens
ctgggccgcaggggcgcgcagcgcggggagctgccagaaagttcaggagccctggaaaggagaaggaataagacggcaggaggaagagag

SEQ ID NO: 77997 - DNA, 73 bp, Homo sapiens
gtcagaaaagagtagcctgggctgtctggaaatctgaggttacttcttgctgcagattctgcgcaggatcgga

SEQ ID NO: 77998 - DNA, 83 bp, Homo sapiens
ggatggaacacttcagtgcattcaaggaatccaaatgagactcagaacaatagcacaagctggcctgtcttcaaaagcactga

SEQ ID NO: 77999 - DNA, 75 bp, Homo sapiens
ggttcaagcggtggcgggagcctgtcagatttaggcctattaaaggaaggcaggaagaactaaaggaagtaattg

SEQ ID NO: 78000 - DNA, 75 bp, Homo sapiens
ctcagggagggcaggagagcctgaggagtggcggggccgccaggtggaccttcaatcctgctgttctcactaaag

SEQ ID NO: 78001 - DNA, 100 bp, Homo sapiens
cactgccaacacgcccacgcccgttcgcaagcagtctaagcgccggtccaacctgttcaccatgttcccacaagcctgcatttccagagcatgctgaaat

SEQ ID NO: 78002 - DNA, 83 bp, Homo sapiens
ctctgggatccccgccgctctgtctacaacccgagctgggattctgtccctgaccgtcttcacagtccaggtgatcttgacta

SEQ ID NO: 78003 - DNA, 98 bp, Homo sapiens
ccgggccctcttcgacagctacacaaatctggaacgggtggccgattactgcgagaacaactacatacaggtgacaaaacacgacagccttcttcaag

SEQ ID NO: 78004 - DNA, 90 bp, Homo sapiens
cggatggaagtgcaggactccaagatttacttccttccctttccagcagaattacctgagacgacagatataatttctacagtagaattt

SEQ ID NO: 78005 - DNA, 100 bp, Homo sapiens
tcttttgacaagatgtcacctgaaagtggtcacagccgcatctttgaaggttcagccgtctgtatatctccccagatacctgaaactgaccacctgagta

SEQ ID NO: 78006 - DNA, 100 bp, Homo sapiens
ccctgactaccctggaagtagcaggccgcatgcttggagagatggagtttcactgtgtcagccaggatggtctcgatctcctgacctcgtgatccgcccg

SEQ ID NO: 78007 - DNA, 51 bp, Homo sapiens
tgcttcagcgttctgtggttgtcaacagaaacgcttcgttaagggactcag

SEQ ID NO: 78008 - DNA, 100 bp, Homo sapiens
gtagggctttgacttctaattgtgaaaattataacacagtatctccttttggaaattttagcattcaggtgccaggaatgcagatgggacagccagtgcc

SEQ ID NO: 78009 - DNA, 144 bp, Homo sapiens
agcattctccagggaaaggatgacatatttttggacctgaaacagaaattctggaacacctatatgttctttatagctccaagctctacagattcttcaaatatattgagaatagggatgttgcaaaaacagtgttaaaggaac

SEQ ID NO: 78010 - DNA, 99 bp, Homo sapiens
cggcagaagccgagttcaacatcctcctggccaccgactcctacaagctgatggtgagaccattctaaaaggcctccagtccattttccaggagcaggg

SEQ ID NO: 78011 - DNA, 75 bp, Homo sapiens
gcgagccagcgcccggagcaagcggagctcccccaagagccggaaagaacattgacatcaccaatttcagcagca

SEQ ID NO: 78012 - DNA, 87 bp, Homo sapiens
caagatatcaagtcagatggcttcagcatcgagacatgcaaaattatggttgacatgctagataatgtccctcttccagtggaaagc

SEQ ID NO: 78013 - DNA, 120 bp, Homo sapiens
gaagaccgcgcgcagggcctgcagcgggagctggacggcgagcgcgagcggcgcgagaaagaattgactttaaaattaggaccatagagctcgatggcaagagaattaaactgcagatat

SEQ ID NO: 78014 - DNA, 80 bp, Homo sapiens
ccaggttgccttggaaaatgccaacgccgtgtctgaaggaggatacgaagcgttttcggcttcctgcccggagctgtgca

SEQ ID NO: 78015 - DNA, 83 bp, Homo sapiens
gcgccgggggccggggagcgccagatcacttaggaaaatggctgttggtatgatcctagcatgcctggcatttgcagttgcgg

SEQ ID NO: 78016 - DNA, 83 bp, Homo sapiens
ctgtgtccggcacttcctgcaggccacaggattttttatcaagcagaaatgcatcgaacaacgagaatcaagatcactgagct

SEQ ID NO: 78017 - DNA, 50 bp, Homo sapiens
ctcttgcgctacgccctggatgagatgatcccagaagagcacgacctgga

SEQ ID NO: 78018 - DNA, 100 bp, Homo sapiens
ctgctcgctagatgcacccagatggtctaccctgatgggagagtctgcatttccatcctccacgcgccaggcgatgaccccatgggctacgagagcagcg

SEQ ID NO: 78019 - DNA, 83 bp, Homo sapiens
ctgtcttcggtggactccttcggcagtccacccaccgccgccgcctcccagatgaacaggaagcggtgcaggaggttcctaga

SEQ ID NO: 78020 - DNA, 82 bp, Homo sapiens
gactggaccaagatcgagcccagcgtcaacttcctcaagtcgcccaaaggctcctgctctcctgtgcctccgaggcccccag

SEQ ID NO: 78021 - DNA, 75 bp, Homo sapiens
cgcattagcatttcagcagaaattccacaggaaacttggctgtaacttcaaaagaagatttgattctttatttct

SEQ ID NO: 78022 - DNA, 100 bp, Homo sapiens
gggggtaccacggagagggcaataagagcctggtggtggcccacgcgcaggcccgatgagagaaagggaaagttaaggatgctggagcagaacaatggat

SEQ ID NO: 78023 - DNA, 90 bp, Homo sapiens
ccctccacgggcggctgcagggtggaggtttgctctggaattagtcacagaaaagggccatacatttgccgaagagcttcagaaagtgag

SEQ ID NO: 78024 - DNA, 100 bp, Homo sapiens
ggacaagcagaaaaagcggcagcgagaccgcatggtggaaagattccctcccaggctgtccctcgccgccttgctacagcccccaagactgaaaaacctc

SEQ ID NO: 78025 - DNA, 100 bp, Homo sapiens
tgaagaattacttgacaaatcttcttaaggttgctccttgagggcaggacagttcttatggctttatccgttgcgtaagcacagagaggtctgcgaggtc

SEQ ID NO: 78026 - DNA, 80 bp, Homo sapiens
gcagaacccccagaccatcatgccgggctctcgccatgggtcactgtcgcctctgccacgggaagttttcctcgagaagc

SEQ ID NO: 78027 - DNA, 98 bp, Homo sapiens
agaaatgagctgaagaccattcacagctacatcaaatgggtctttggagggcctggataaccaggagggaggggtgtgccagacaagagccatgaaga

SEQ ID NO: 78028 - DNA, 100 bp, Homo sapiens
gaacatggacgccgtcaacgccttcaaccaggaggaagaggcagaaatccaggcagaacttgaacgtttggaaagagtcagaaatcttcacatacgtgag

SEQ ID NO: 78029 - DNA, 50 bp, Homo sapiens
tttgatgattggcagagacccactgtctgtacgaattggagcaatgttgg

SEQ ID NO: 78030 - DNA, 90 bp, Homo sapiens
gaggtggcctgcaaagatcgcctgcaccttcaaggccaaactatgcaggttttggcttggtttgaagaaggtgaagaaacaattacagcc

SEQ ID NO: 78031 - DNA, 75 bp, Homo sapiens
gaagtgatttgcctcagcttgtactctggagagatttaccagcatgagaattaagaaggagaaggaaaagcccaa

SEQ ID NO: 78032 - DNA, 90 bp, Homo sapiens
ctctccagggagtgctctgttcacggctccatcgctgttacttcctggacaagatcgacgtgatcaagcaggctgactatgtgccgagcg

SEQ ID NO: 78033 - DNA, 90 bp, Homo sapiens
tggcacccagcctcctggacagaaataaaactggagtctctccgaggcaaagatggagctgagaagaaaagatcaatctctgcgtcagct

SEQ ID NO: 78034 - DNA, 112 bp, Homo sapiens
cctgaaaccactcaagagtcataggattagatgatccaagtcaccaagaaattactgtctcaagtgatacgtgacaccacagccaaagccctatgggaagctttactgaaca

SEQ ID NO: 78035 - DNA, 97 bp, Homo sapiens
ctgccgtccatgcggaagatcgtcgccacctggatgctggagggtgctttcttctgcgacctggtactcatctacctcatcaaaaagagagagtttt

SEQ ID NO: 78036 - DNA, 83 bp, Homo sapiens
aacgtcttccacaaaacctcagtcatcgtcacgagtcctgagtcggttaaggtgaatgaaaactttgccattgatttgatagc

SEQ ID NO: 78037 - DNA, 97 bp, Homo sapiens
agaaagagttttctatcgatgttggttatgagagatttttgggacctgaaatcttttttcatccagagggaaggccaaaaatccccctggagactcc

SEQ ID NO: 78038 - DNA, 100 bp, Homo sapiens
attcgttctgtgcctgaactcaaagatgcccttaaaagggagcagtatgcagaggggaagatgagaggggctgccccaggaaagaagacatctggtctgc

SEQ ID NO: 78039 - DNA, 78 bp, Homo sapiens
ggttccgggtcttggccccgtccttacctcacagctgcagttgtggttggataatccaaagattcagctgacatttga

SEQ ID NO: 78040 - DNA, 80 bp, Homo sapiens
ggcggcggggccccaggccgcggggcggcgcgggacggcgggcgccggcgccggattaagcatgaaaatattgttgccct

SEQ ID NO: 78041 - DNA, 83 bp, Homo sapiens
ctgaagtcggtgtctgctgcgttcacggcaggattcggttagttggaaaatggatataccttatttgattatgatgttggact

SEQ ID NO: 78042 - DNA, 74 bp, Homo sapiens
gaaattccacaatgaattaaatgcccacataaaactttctaatttgtacaagggaagtcgagacaacatgagtg

SEQ ID NO: 78043 - DNA, 83 bp, Homo sapiens
ccatgtagagaattttggtctcgattcagcctggagctgctggcggatgttcagtttgccttggggcttcccttctacccagc

SEQ ID NO: 78044 - DNA, 75 bp, Homo sapiens
cacagcacagttcctgggaaggtggagccaccagcctctccttgactgcaaaattcaaaatggggctcaaggtat

SEQ ID NO: 78045 - DNA, 75 bp, Homo sapiens
ccatcgacaccgaaaactccaccgtagcccttgccaaaggatgcctaaatcaaaggaacttgtttcttcaagctc

SEQ ID NO: 78046 - DNA, 74 bp, Homo sapiens
cctatccagacggctgcccttcaagtaccagttggatggcaagcatgtggtgtttggcaaagtgaaagaaggca

SEQ ID NO: 78047 - DNA, 101 bp, Homo sapiens
aaagatgatgagaaataaggacaaaagccaagaggaggacagttcgctacacagcaatgcatcgagctgcagaaccttggcctgaaaatgctacattatat

SEQ ID NO: 78048 - DNA, 51 bp, Homo sapiens
cggttggtacagataaaactttaaggaacttatgctgtgctatttgattaa

SEQ ID NO: 78049 - DNA, 51 bp, Homo sapiens
gggtgttttgctaccgtgaccgtttagaaatgcttcggttacccacagtct

SEQ ID NO: 78050 - DNA, 76 bp, Homo sapiens
tgtatcatgcaaggatattcctcatatatcatacttaattcagtgcacaaatgagatgaatgtgaacatcccacag

SEQ ID NO: 78051 - DNA, 90 bp, Homo sapiens
atccatctctcgaagacttgaaggtgtgctgggcatcaaggtgaagatcatgctgccctgggacccaactggtaagattggccctaagaa

SEQ ID NO: 78052 - DNA, 99 bp, Homo sapiens
cctgtgaattaaaatatggaggctttgttgtgagaagaactactgaattaactgttacaggctacgaacagcagcaggagcaagagaagctggagcgag

SEQ ID NO: 78053 - DNA, 74 bp, Homo sapiens
cgagagcgtgaccgagagcgcgaatatcgtcatcgttagaagagctgcggtgcaaccctgggcagtttgcgtgt

SEQ ID NO: 78054 - DNA, 90 bp, Homo sapiens
agactgcttttgagtgacatttatttagcagctagtaacttcacttatttcagggtgaaaggtgtagcagtcactcggcctacacccaca

SEQ ID NO: 78055 - DNA, 104 bp, Homo sapiens
ctgaatccgcccgggctacgctcctccatcacgtggttgaagaaatatggagatcaacacaaaactgctcatcagtgttacctgtatcagctttttcacctttc

SEQ ID NO: 78056 - DNA, 100 bp, Homo sapiens
cgcctgcaggcctcgcgctgacaggatcttttgtgacgctgcaaatgtcctgccagaaagactccaggggactcattactctgtgcagtcagacatctgg

SEQ ID NO: 78057 - DNA, 75 bp, Homo sapiens
cactgactgaaacctgagttttgattcaccaggaaaaatctgtgctggaggaaatagatgtgatagtggccagct

SEQ ID NO: 78058 - DNA, 100 bp, Homo sapiens
acattcgggaggtgcagaaactggtggagagcggggtggatgtgaactcccaaaatgaggtcaacggctgtattgtccttgtgaacttccttgaagatgg

SEQ ID NO: 78059 - DNA, 80 bp, Homo sapiens
ctcaagttaggggagagtttcgagaagcagccgcgctgcgccttccacactgtgcgcttttaatggatcgagaagtggcg

SEQ ID NO: 78060 - DNA, 100 bp, Homo sapiens
ttatgtagaatacttgggtgacatctgcctgagagatctccaagaattacaggaatagccaggccagaagaaggaaggcctgtggtgagtgggacaggaa

SEQ ID NO: 78061 - DNA, 75 bp, Homo sapiens
tgaaaccacagacatgactgagtcctccatgaagacttcggaaccaaaaagaagcttcccagagccggggccagg

SEQ ID NO: 78062 - DNA, 100 bp, Homo sapiens
ctataaaggagagcgccaaaccattactgatgatgtggaggttaacagctatctttctgtgcacttacagagtgctacgatgaactggggaacagatatc

SEQ ID NO: 78063 - DNA, 82 bp, Homo sapiens
gtaaatatacgctttgttggtggactactctcagcctactatctgtctggagaagagcttaaagaaagtggttattgtacag

SEQ ID NO: 78064 - DNA, 83 bp, Homo sapiens
ccccgctctgctgtgggcgctgctggcgctctggctgtgctgcgcgacccccgcgcatgcaagagtgagccatggagctacgt

SEQ ID NO: 78065 - DNA, 74 bp, Homo sapiens
gatttccaaggaagaatttcctctgaagcaccgaagttccacctggtgccaagcatcaacaccatgagtggcag

SEQ ID NO: 78066 - DNA, 90 bp, Homo sapiens
ccttaatgcttcaaggtgtagaccttttagccgatgctgtggccgttacaatggggccaaagggagatagaggaggacctgggatacctg

SEQ ID NO: 78067 - DNA, 100 bp, Homo sapiens
ctgacggactcacctttggcaaagggactcatctaatcatccagcccttttgcctgagaatacagatcaacccacagaacaaagcggatttccaaggcat

SEQ ID NO: 78068 - DNA, 83 bp, Homo sapiens
gttttcttatgcttataagagtggaacagaacatccagtcatggataaaaatgagctggttcagaaggccaaactggccgagc

SEQ ID NO: 78069 - DNA, 100 bp, Homo sapiens
tcccatgaagctgaggtcttgaagcagctggctgagaaacgagagctcccagattctgcggctagtggagaccaaggactccatcggagatgaggacccg

SEQ ID NO: 78070 - DNA, 88 bp, Homo sapiens
ccatcactggatctgctgccagcattagcctggctcaatatctaatcaatgtcagctcctctctgctatatgaaatatgggagacgac

SEQ ID NO: 78071 - DNA, 100 bp, Homo sapiens
gaaagatcagccctttttggaaacatacaggatatctaccacttcaatagatcagtgtactgttacccggacatacctattccttcacaagttctggttc

SEQ ID NO: 78072 - DNA, 90 bp, Homo sapiens
cacaaacggcgcacattggtatgatgtggaagaaaaatatggtgttatccctaagaaatgcttccctgaatcttatacaacagaggcaac

SEQ ID NO: 78073 - DNA, 100 bp, Homo sapiens
tactgtcatcctacccaccataccacaggtgaatctgtctctgtcatcaagcacactgatcccgtccctgacccacgagctgtcaaccaagataaaaaga

SEQ ID NO: 78074 - DNA, 82 bp, Homo sapiens
gacgacacgccccacaggtcttgggaggattaagtgaggggacatgagtaggagctgtggcgcggggccttccaggagtctg

SEQ ID NO: 78075 - DNA, 96 bp, Homo sapiens
gaattacatctgacccccaaagctcagcagccaatttgacgacactgaggatccctgtgtggaaatcattctttggctgtctgaggaatattcatg

SEQ ID NO: 78076 - DNA, 87 bp, Homo sapiens
tcctcctccagcacccttgcctactccccgcgggacgaggaggacagcatggtgccaagtcctgccctgccaacttcttggcagctg

SEQ ID NO: 78077 - DNA, 100 bp, Homo sapiens
atcgacaacaacgggttcattctgatctccaagaggtcccgagaggtgctggagaatctggtaaaagcaccattgtgaagcagatgaggatcctgcatgt

SEQ ID NO: 78078 - DNA, 82 bp, Homo sapiens
gatccacctggagctgaggaaccggaccccggcagctggggatatgagactttctactcggaatatcctgagtgttgcgtgg

SEQ ID NO: 78079 - DNA, 83 bp, Homo sapiens
ccaacggaacgcacattgcagtgcagcaggaacattagcccagccctttgctgcatctgtgcccagggatggagcttcctacc

SEQ ID NO: 78080 - DNA, 74 bp, Homo sapiens
ttccagcactggactcatggaggctgagcatttattcaggcaaagcagagagcagaggttcttcagtccacgca

SEQ ID NO: 78081 - DNA, 90 bp, Homo sapiens
gttttcatcacttctctccagaagacaagttggatggcttgaggactggtactaaaaggaaacgtgactgggaggccattgccagcagaa

SEQ ID NO: 78082 - DNA, 96 bp, Homo sapiens
ctatgagagcggacgggccatacccaataaccaggtgcttggcaaaatcgagcgggccattggttaatttggagtggcccctggagtcagtttcct

SEQ ID NO: 78083 - DNA, 75 bp, Homo sapiens
ctggggacctcactgagaagtattttgctctgcgaaacatcatccagaagaggtccagcaccccatcctcgccca

SEQ ID NO: 78084 - DNA, 88 bp, Homo sapiens
acgccaggcggatctcagaaggccagttcaaagacaagttggatggcttgaggactggtactaaaaggaaacgtgactgggaggccat

SEQ ID NO: 78085 - DNA, 125 bp, Homo sapiens
ttcaagaaccacgtgatcaagtaccttgagacactcctttactcacagcagcagagctccacgcaggagatcggtgaggagctgatcaacggagtcatctactccatctccctgcgcaaggtgca

SEQ ID NO: 78086 - DNA, 82 bp, Homo sapiens
cccaccactgccacaaacgccgcaccaggtcttgtagcagcgcctcctcgttgattatggaagattcccacaagagtaccac

SEQ ID NO: 78087 - DNA, 82 bp, Homo sapiens
ttgaagaagaggaagaggaaagaaagacaagtcaggcatggctctcacccaggtaagggccagctcttccgaggctccagcc

SEQ ID NO: 78088 - DNA, 51 bp, Homo sapiens
gatcgctcggacacagaagaacaaggataaccagcccgagtcatgcagtct

SEQ ID NO: 78089 - DNA, 74 bp, Homo sapiens
acatcatgtgacgacacccctgatggggcaggaggggcctttgcagctcaggacttggatgttgtgggtgatgg

SEQ ID NO: 78090 - DNA, 100 bp, Homo sapiens
cattgccgacggccacaggatgctcgccatctatgatggctttgacggcttcgccaagggccaggtagcgggaaggatgaccacgctcacacgacaagac

SEQ ID NO: 78091 - DNA, 75 bp, Homo sapiens
atttaaaggagcagccctggtgtcacctatcagtaaaaggaaccctaaggactctgcaatatgaataattcccta

SEQ ID NO: 78092 - DNA, 82 bp, Homo sapiens
tttaaagctgagctgcgaggaaaatggcggcgggaggcagaggtggaggagacactgaagcgactgcagagccagaagggag

SEQ ID NO: 78093 - DNA, 139 bp, Homo sapiens
ggggtcggcggaggagccatccccgcaggcggcgcgtctggcgaaggccctgcgggagctcggtcagacaggtgacagattgactgggatcccctcgcacatcctcaacagctccccatcagaccggcagattaaccag

SEQ ID NO: 78094 - DNA, 75 bp, Homo sapiens
gcagttttcatggatgcccctgtttctggtggtgctggagaatctggtaaaagcaccattgtgaagcagatgagg

SEQ ID NO: 78095 - DNA, 109 bp, Homo sapiens
ggagcggacgtcggcttctccccgcgggagcccccagcatggacaatgcagatcttcgtgaagactctgactggtaagaccatcaccctcgaggttgagcccagtgaca

SEQ ID NO: 78096 - DNA, 98 bp, Homo sapiens
cgaaatggagaaactggaaaagaccctcttcagacttgaacaaggaaaaaagggttgctcattttgggtatcactggagtctgatggaaagagatagg

SEQ ID NO: 78097 - DNA, 100 bp, Homo sapiens
caacgggccggtggaggtgtccacattgcaggttctcccatgggcaggtggtctctctggatgagctgcgccccttccaggacccagacctgagctccct

SEQ ID NO: 78098 - DNA, 83 bp, Homo sapiens
caggaaactctgttaaccattgtagagttttcaggactctacatcctgtccttcactgtcatcatggtggggtttatcctgta

SEQ ID NO: 78099 - DNA, 99 bp, Homo sapiens
cagctgccaactaccgctgctccggggcttacgacctccgcatcctggacagcgcgcccaccggaagtgggaaaactcttgcctttgccatcccaatga

SEQ ID NO: 78100 - DNA, 75 bp, Homo sapiens
gggaacccaggccccgccgaggcggccaggccagcactccttgcccgaggacagagatggcgagcgcccggattg

SEQ ID NO: 78101 - DNA, 75 bp, Homo sapiens
tggaaaacgaaaagagaatcccatcgaagacgatttgatctttcgagtggtgtgccatgcggagctgaatgccat

SEQ ID NO: 78102 - DNA, 83 bp, Homo sapiens
cgcaaccccagatccatttacactttacaaatgattacggacctgaagccaaagaacaagatgcgctagtggacagattgctg

SEQ ID NO: 78103 - DNA, 82 bp, Homo sapiens
gtcagagccgccatcttgtgggagcaaaaccaacgcctggctcggagcagcagcctctgagcagaaaaatatggctcaggag

SEQ ID NO: 78104 - DNA, 83 bp, Homo sapiens
gatgaagctccccaaggagctgcagaatccacattcatctcaatggaaggatcctgccttaagtcaacttatttgtttttgcc

SEQ ID NO: 78105 - DNA, 98 bp, Homo sapiens
gcaagatgaagagacagtgcggaagcttcaggccagggaaacagatccagatggaggaaacatctgataaagtttgcctaagcagccagcagtctatc

SEQ ID NO: 78106 - DNA, 75 bp, Homo sapiens
tgctgaatcctttcatatcctaataggaattaacctccaaataaaacatgactgaaagttcaggagccctggaaa

SEQ ID NO: 78107 - DNA, 74 bp, Homo sapiens
tgtgaagagtgaggagaccatagctgcacagccaggaagtgttttagatcacagtttggaaagcctcatccacc

SEQ ID NO: 78108 - DNA, 81 bp, Homo sapiens
cccctcgcttatcctgtgggggccgccgggctgcggcaagcctcttagcaaatatccggctgtgatcaatgatatttcatt

SEQ ID NO: 78109 - DNA, 74 bp, Homo sapiens
ccgttggccttcgtacccgtcttgattgaggcctgcactgcccaaagtcttggaaacttgctggatatgatgta

SEQ ID NO: 78110 - DNA, 90 bp, Homo sapiens
tgcttcatccttgtttaatgactttggtgccctcaacatctctcagagacgaaagtctgaaccggacggcttttctcatttccacttgta

SEQ ID NO: 78111 - DNA, 76 bp, Homo sapiens
ctgtgggtcttgtgctgcccatgcttataaacaagtggatccgtctattacgagccttcacgtaaatgggtccagt

SEQ ID NO: 78112 - DNA, 74 bp, Homo sapiens
tatgcaaggagtgaatgtttcagggtggagaagaatctgcttgtctatggatgtttctttctcagcaaaataga

SEQ ID NO: 78113 - DNA, 78 bp, Homo sapiens
tagcttggatccttgtgggcatgatccataatcggtttcaaggaaaatcctgccttgcttcgttgggcctatgcaaga

SEQ ID NO: 78114 - DNA, 75 bp, Homo sapiens
ttcttcgagtatttgtagaagggggcagatttattgaaattaactagagatgatgtgatccaaatctgtggccct

SEQ ID NO: 78115 - DNA, 100 bp, Homo sapiens
ggatgagcctgcagagcgcgcagtacctccggtaattaataatgcttgtgctactcaagccatagtgagtgtgttactgaactgtacccaccaggatgtc

SEQ ID NO: 78116 - DNA, 82 bp, Homo sapiens
tcggagccgaataccaagctcggatccctgaatttgatccagtctcaggggccagccaagcccccacccccaaggaagccac

SEQ ID NO: 78117 - DNA, 75 bp, Homo sapiens
aagaatactgtgaattatgcaagcacagatttgcttttacaccaactgaatttgtgatcagtcttgctgagaaaa

SEQ ID NO: 78118 - DNA, 98 bp, Homo sapiens
tctttgttgtaggtttatctcagcgcctagcagacccagagatgagctcacagtgcctgcactttaccccagtagccctgaagtgtgggccccgtacc

SEQ ID NO: 78119 - DNA, 51 bp, Homo sapiens
tctgctgtccttctttgtggagagcaaggtcaggatggctaactggttggc

SEQ ID NO: 78120 - DNA, 100 bp, Homo sapiens
cataaccttgaatggcgactagatgtacaggaggcaggtggaagtcatcataaagtttctgtttcacccgtcgtccatgttcgaggactctgtgaatctg

SEQ ID NO: 78121 - DNA, 100 bp, Homo sapiens
gagggagtgatgtcttccagactcggtgctgtacccgcctctattgcgtctgcagacatggatttcaaccagctggaggcattcttgactgctcaaacca

SEQ ID NO: 78122 - DNA, 100 bp, Homo sapiens
cggagcggcgcctgcattagcaggtgcacatgaacttgaacagatgcagctgattttagaatctattcctgttgtacatgaggaagatcgtcaggagctt

SEQ ID NO: 78123 - DNA, 75 bp, Homo sapiens
ctggattatactgtactgcccatgaaaaaggatgttgaccggacagggagaccaaattttgaggaaggtggacca

SEQ ID NO: 78124 - DNA, 50 bp, Homo sapiens
agcagagtggaccaccccatgaacctcggcatgaaagaattactgatgtc

SEQ ID NO: 78125 - DNA, 100 bp, Homo sapiens
aacatttttgccagttcctcagatgatggccgggttctcatttgggacattcgggaatccccccatggagttgtcggacaagtaaccgcaagagcttgat

SEQ ID NO: 78126 - DNA, 102 bp, Homo sapiens
agagccaagtcactggacaggaggtccacggagccctccgtgacgatacattccaccgttgatctgggggaaaagtggacacatccagacagccttgtatgg

SEQ ID NO: 78127 - DNA, 100 bp, Homo sapiens
gggccctctcagcaagaacgggaacaaaactctggtcccgccagggacatgcagcccaccatgaagttcgtgatggacacatctaaatactggtttaagc

SEQ ID NO: 78128 - DNA, 89 bp, Homo sapiens
ctttatatagaagggagagtaggtatcagcatagtgttgagtgggcagcagagctgatgcgtagacaggggcaggatgagagtacagtg

SEQ ID NO: 78129 - DNA, 82 bp, Homo sapiens
ccttgagtcagtgcgccgctctccagcccgcttgaacgggcaggagcgatttggcaacatgacccgagtatactacaaggaa

SEQ ID NO: 78130 - DNA, 74 bp, Homo sapiens
ttttgaagacaatcgtcacttatacagacaattgcagcatgactttcccagggccctgattttcagcacggatg

SEQ ID NO: 78131 - DNA, 100 bp, Homo sapiens
tggagaaataaaaatgacttcccattatgtgattgccatctttgccctgatgagctcctgtttagccactgcagagttcaccgaacagcagaaagaattt

SEQ ID NO: 78132 - DNA, 112 bp, Homo sapiens
ccggtgtctgagcatttcctcctgacggctgtacttgagcagtcacctggcacagggtgctttcttctgcgacctggtactcatctacctcatcaaaaagagagagttttac

SEQ ID NO: 78133 - DNA, 83 bp, Homo sapiens
cggcccgcgcctgggctgccggcacttcgcggcaggtcaaaatgcagatcttcgtgaaaacccttaccggcaagaccatcacc

SEQ ID NO: 78134 - DNA, 101 bp, Homo sapiens
ccacagcaagagcacctggctgatcctgcaccacaaggtgtacgatttgaccaaatttctggaagagtgttcaagaaggaagtgtatcttcatacatcacc

SEQ ID NO: 78135 - DNA, 98 bp, Homo sapiens
ccgtgcgccagggggctcagcatctgctgcgaatctccggcctcgaatacttcaaacattgtgcagaaaactgaggcttcctcaagcttttgatttct

SEQ ID NO: 78136 - DNA, 75 bp, Homo sapiens
cctgaaatccgacactactgattctagtcaagatgcttttactgactctgctatcagtgctaaagtgaatggcga

SEQ ID NO: 78137 - DNA, 82 bp, Homo sapiens
caaaggaagacttgtaacctggagaagaggtggagtctttcattttggatcaggatgatttggaaaatccaatgctggaaac

SEQ ID NO: 78138 - DNA, 82 bp, Homo sapiens
tcccgcctccatctgaagagggctccaggcatccggtcctggtccctgctggttggtgggacagtcacttcctcctccctcc

SEQ ID NO: 78139 - DNA, 88 bp, Homo sapiens
agcaggacccgaggccaggagccaggggcccagaaggtttgtctacagattttgagcgttcgaagttgacccctgactaagtatactt

SEQ ID NO: 78140 - DNA, 75 bp, Homo sapiens
cggcctgggtgctggcgaagcggaggccggagtgtctcaggatgatacataccggtttttaactttggtgtcatc

SEQ ID NO: 78141 - DNA, 101 bp, Homo sapiens
aaaggtgtacttgcaagaaacctcaggacttgagtaacagcaacatgttgtacaatggtagatggagtgatgattcttcctgtgcttatcatgattgctct

SEQ ID NO: 78142 - DNA, 92 bp, Homo sapiens
ggggcaggggcggaggcggaggcagaggtggaggcgctttgaaagacaatgcagatcttcgtgaagactctgactggtaagaccatcaccct

SEQ ID NO: 78143 - DNA, 90 bp, Homo sapiens
gctgagacctcagtcaccattgacgggatccgcttcgtagtagattccggtgctggagagtcatgcctgtgagccctgggcacctcctga

SEQ ID NO: 78144 - DNA, 100 bp, Homo sapiens
ctcctgagtagctgggattgcagcttggatgaacgttttgccccttttgacagctattgaattccattcagcttgggcaatgggaatgggagttaatctt

SEQ ID NO: 78145 - DNA, 75 bp, Homo sapiens
aactgaaagatcagatagcagagctgaatcatgaggtatgagaaagtgccagtcatcttggttgggaacaaagtg

SEQ ID NO: 78146 - DNA, 90 bp, Homo sapiens
gggtacattgatatatgtaaattacggaagatcatttatatacacatgctgccaaatggtgtcacttaccacactggaacatatcaagac

SEQ ID NO: 78147 - DNA, 75 bp, Homo sapiens
cacgcactgggtcgtcacggaggacgggaaaatccagcagcagagtgtcctgccatacttcgtagctacaaaact

SEQ ID NO: 78148 - DNA, 98 bp, Homo sapiens
aacggtgcacgtactacgagacgtgtgctacatacgggctgaatgtggagagggtcttccaggacgctgaagtgagtagtgaatatagtatggacaag

SEQ ID NO: 78149 - DNA, 83 bp, Homo sapiens
gcttaccgcatctggctggagccctgcattcgcggcgtgtgcaggttggattatctcaagatgcccaggatcaaatgagaaag

SEQ ID NO: 78150 - DNA, 101 bp, Homo sapiens
gggagagatgacactataatggctacagtgtgtggaccagttgacaaagatccaaactgaattacaagagacagtgaaagatttagctaaaggcaaaaaga

SEQ ID NO: 78151 - DNA, 98 bp, Homo sapiens
aattgctaaaaacaaagagttatatgaaatcaatcctccaatcagtcgcatcgaatacattcattcaaagaacttcatccaccgggatgtgaagccag

SEQ ID NO: 78152 - DNA, 98 bp, Homo sapiens
accaagtggtccaaacggcccggtcacctgagcaacccctctgcaggaaccgcaggacctgaaggagaagaaggagaaggtggaggagaaggcaagcc

SEQ ID NO: 78153 - DNA, 100 bp, Homo sapiens
taccgatgatcaagatgtggagctgggataccagaaggccctattgatcaggggccagctataggaagagtacgcgttttagaagagcagcttgttaagg

SEQ ID NO: 78154 - DNA, 100 bp, Homo sapiens
aaacctggaccaggcacgggaagatgcccaggtgtgcagcaatgacaacaagaccttcgactcttcctgccacttctttgccacaaagtgcaccctggag

SEQ ID NO: 78155 - DNA, 51 bp, Homo sapiens
gccgatccaggagcaactatgactgcacagccagagaacaacacatcacac

SEQ ID NO: 78156 - DNA, 75 bp, Homo sapiens
gctgtaattgcaaataacatcattaccattaacaagaatgacagcccatatcaaggcggtgtattctttttgaca

SEQ ID NO: 78157 - DNA, 87 bp, Homo sapiens
agggctccgtcaatggcttcatcagcactttgggacaatgcagatcttcgtgaagactctgactggtaagaccatcaccctcgaggt

SEQ ID NO: 78158 - DNA, 98 bp, Homo sapiens
atgacgtatttgagttgaagcagttttctcagctgcctgctaacatagctgtttgcagttctaagctacccgctcccttccccagtgcttagcagctc

SEQ ID NO: 78159 - DNA, 100 bp, Homo sapiens
caggaaggtgattctcagctgcggcattttcttctggtcggccgtcaccttctccagctccttcattccccagcagactccccacctggtgaacctgaac

SEQ ID NO: 78160 - DNA, 100 bp, Homo sapiens
gaagaagatgctggcaccctcacagactataccaaccagctgctccaggcaatgcagcgcgtctatggagcccaggtgtcatggagaaactccagctggg

SEQ ID NO: 78161 - DNA, 100 bp, Homo sapiens
atgcatttcacggtggccttgtggagacaacgccttaacccaaggaagtgactcaaactgtgagaacttcagattctgcctgatcaatgcaggagtcctg

SEQ ID NO: 78162 - DNA, 101 bp, Homo sapiens
gcgcgtgggtcggttgcggtcggccccggcagagcctggcccaactagagaatctgtgcaaacagctgtatgaaaccacagacacaaccactcgactccag

SEQ ID NO: 78163 - DNA, 88 bp, Homo sapiens
gtccacgtgaaggggcccttctcggtggaggccgacccatccaggttgaaggtcgaggagctggaaggcgagcggagtcggctggagg

SEQ ID NO: 78164 - DNA, 75 bp, Homo sapiens
acagccacgcccacgactgcccggacgaggccgaccacagacgtgagtgcagtgcacagccagagaacaacacat

SEQ ID NO: 78165 - DNA, 75 bp, Homo sapiens
tcctcgtcagcactgactttcagctatggaatcgttaagggaagaaagtcggaggctggctttggctgcgaaaag

SEQ ID NO: 78166 - DNA, 76 bp, Homo sapiens
cgcggatggccgtaaccccgaaggaaatgaacaggagtacagctgtgtagtaaagatgccttctggtgaatttgca

SEQ ID NO: 78167 - DNA, 74 bp, Homo sapiens
aggaggcagccaagctcatggcctgccactgcgtgcgctgtctgtccccagaccccagagcacgtccggcacca

SEQ ID NO: 78168 - DNA, 100 bp, Homo sapiens
gtattcccttaaaaagacggacagcccatcgtgtgaactatagagtttgtggacagatttatattgtgccggtggtggtgtgcacattgagccccggtat

SEQ ID NO: 78169 - DNA, 100 bp, Homo sapiens
attctcttcactcgagagatgaggacactgaaattcagagaggggaagtgatttgcctcagcttgtactgctaaccggcctcctgcaaagctcaacctgc

SEQ ID NO: 78170 - DNA, 83 bp, Homo sapiens
taaggattccaagtaactcttatttgggtatgttagagcccaccaaggaaccactgaaaccactttctgctgcagaaaaaata

SEQ ID NO: 78171 - DNA, 98 bp, Homo sapiens
gtcgctagaactcagttgtgcgttgcggccagtcgccactgctgtcttgagtcaccacgtccgaatataattcttgggttagtaatctgccaaaaaat

SEQ ID NO: 78172 - DNA, 100 bp, Homo sapiens
gacgtttcagagcccttgcctccttcaccatgccggttgccgccaccaactctgaaactgcagcttgagcctgatcgagtgcggcccagtgcacaccgcc

SEQ ID NO: 78173 - DNA, 74 bp, Homo sapiens
taagcgcagaaagcaggcgaacccgcggcgcaataacggaatcccttggcaccatgtcctgtgtgcattataaa

SEQ ID NO: 78174 - DNA, 100 bp, Homo sapiens
tgggaggagcgccggaacgccgaggcccagggcccttctagcccaatccagagctgtaccatggcagagacaagagaagaggagacagtgtcagcagaag

SEQ ID NO: 78175 - DNA, 90 bp, Homo sapiens
tgttggcccagctccgaaacctggacaacgcggtcctcatcgatatgaggccccaggattcctggcgaggtcctcctccccttttccagc

SEQ ID NO: 78176 - DNA, 75 bp, Homo sapiens
gcaggagcaacacgtgatgtgtctacttatcagggatcttttgccagaaatgagggcatactggcctgacgtaat

SEQ ID NO: 78177 - DNA, 89 bp, Homo sapiens
ccggcgcggaaggacgaggctgaggcgagaaacgagaatctccctggaaaaggagacatgaatgtctgcaatgatacttcctgacaaga

SEQ ID NO: 78178 - DNA, 83 bp, Homo sapiens
ctgggcttgtccttgctggtgcatgcgtcgtcggcctctgggcagcagagtcagcgtgggagaaattgtaacgagaaaccaac

SEQ ID NO: 78179 - DNA, 100 bp, Homo sapiens
gctttccccgcaagatggacggtttcgccggcagtctcggttcaacagagtttggaaaagatttctaaactggagcaggaaaaagaacattggatgttgg

SEQ ID NO: 78180 - DNA, 96 bp, Homo sapiens
ggatcctttatcctggtcatcttctatttccaaactctaagcgaaagacatgaggcctcagcctgaaatgaggttgttttgaggtcatctgatttc

SEQ ID NO: 78181 - DNA, 83 bp, Homo sapiens
ctcagtaaatctcagacggacgagaaggagacctttctggatcctttcgtcctccgggacctcctgcctgcatccctgggcag

SEQ ID NO: 78182 - DNA, 75 bp, Homo sapiens
aaagttgtcctccttgttagaactgataagcgaagtgattctcttataaggcaatttgaatcaacccatagaagt

SEQ ID NO: 78183 - DNA, 78 bp, Homo sapiens
cttcaagcagttcgcactacagcgggagcaggagctggagcaccagtggcagttcgcagcctccaggacttggctcgc

SEQ ID NO: 78184 - DNA, 73 bp, Homo sapiens
atgtttaccatttaaacataagtatacaattggaccgtggatgaggtggtacagtggctgatcacatatgtgg

SEQ ID NO: 78185 - DNA, 101 bp, Homo sapiens
cctgtgcagccctcccaggtggagtacacggcagactagtgaagatagtccaagtcctaagagacagcgcctctctcattcagtctttgattatacatcag

SEQ ID NO: 78186 - DNA, 100 bp, Homo sapiens
aatgtaccccaaaagaactctgagagaatatactcaactgtcctgctgtgattaaacaagactgctgtatttttttctagagttgtgaatacatacggac

SEQ ID NO: 78187 - DNA, 88 bp, Homo sapiens
cgaggacagcgcgtgcccgcgaggagccgccgcgcgcccgcgccctccgcgcgacgccagctgccactgcagagccccgccatggaag

SEQ ID NO: 78188 - DNA, 98 bp, Homo sapiens
ccagatggagattctggcaaaccagctcacggggctcatggacatgaagattttctacaaggggaagaacactgacttaattcagtgcacaaatgaga

SEQ ID NO: 78189 - DNA, 75 bp, Homo sapiens
cagctcctggggctcctgctgctctggttcccagcattcaacagaaggtgtcaaattgacagctctcaatgacag

SEQ ID NO: 78190 - DNA, 90 bp, Homo sapiens
tgcaaaatatattgaaacttcggagctatgcctttggtgcttcatgaagaatatttccagatatctcacagacattaagcctttgcctcc

SEQ ID NO: 78191 - DNA, 100 bp, Homo sapiens
agttacttccactcaagaatcgtaggccaggctgatggagagctgaacattactcttccagaagaggtttttcgttggaatatacgttgcacatttatgg

SEQ ID NO: 78192 - DNA, 75 bp, Homo sapiens
ggcagatccaggaggaggaggacgagaagcagcggctgcagaatgaggtctgccatcatggatgttctcgcagaa

SEQ ID NO: 78193 - DNA, 85 bp, Homo sapiens
cgaacgaccaagagggtgttcgactgctagagccgagcgaagcctcaccatggatgatgatatcgccgcgctcgtcgtcgacaac

SEQ ID NO: 78194 - DNA, 99 bp, Homo sapiens
ataagaagacagatcctgaaagagcaagctgttgtagaacacgtagagcccttacgtccctacgaatccctcgacaccctgaaacagttcctccagtat

SEQ ID NO: 78195 - DNA, 100 bp, Homo sapiens
cagagcgtgtggcatctccacctcaaggaatgcaccgacagagaagtccaacacaatctcctccagcagacacatcgttcagcagtcgcaggggaagaca

SEQ ID NO: 78196 - DNA, 82 bp, Homo sapiens
ctgacatcagcggctctttgtatgatgacagaaacttgcccaggccaaagaagagaacgtgggcttacatcagacactggat

SEQ ID NO: 78197 - DNA, 75 bp, Homo sapiens
aggcccagaaactgcggaactcggccaagggaaaggtgcccaagtcggcactggtctgcgctcctcagaccaccg

SEQ ID NO: 78198 - DNA, 83 bp, Homo sapiens
ccccggcccgcgctgcccgcactcctggtcctgctcggggctctgttcccagctccccgcagccaccgccacccattggaatg

SEQ ID NO: 78199 - DNA, 120 bp, Homo sapiens
cccgcgctggtgcagccaccctcgctccctctgctcttcctcccttcgctcgcaccatggcagttgtgaaaaacttcaggacaaaaatgtttcatttaaggacttgtgctgctaagttga

SEQ ID NO: 78200 - DNA, 101 bp, Homo sapiens
cgaagacatgacacttacaagatggacagggatgataattgggcctccaagagtattgtcaatatggactcgccatatggttctgtaacaccttcttcaac

SEQ ID NO: 78201 - DNA, 100 bp, Homo sapiens
ggatgtgtgtggaggacatctatgccaacatcttcatcatcaaatgcagccgagagacagagaaggtgtgggcccatcgctggatggatctgtcagaaca

SEQ ID NO: 78202 - DNA, 96 bp, Homo sapiens
tttggcatgtttaaaagttcccgaagcaaattcttcttggatggacacagttataagacaatctaagctggaaccagaaccaaatacaaagacaag

SEQ ID NO: 78203 - DNA, 83 bp, Homo sapiens
gtgaagtggaaaggatggcccccaaagtgtccctggccagtgtccttccacctgtccacaagcatggggaacatcttcgccaa

SEQ ID NO: 78204 - DNA, 82 bp, Homo sapiens
ccggcccgcgctgcccgcactcctggtcctgctcggggctctgttcccaggtttctgctttgggacaaccatacatctaatt

SEQ ID NO: 78205 - DNA, 100 bp, Homo sapiens
tgaagatgcacatgtctgggaggataattgggatgatgacaatgtagaggatgacttctctaatcagttacgggaccattgacatttatggatgtggcca

SEQ ID NO: 78206 - DNA, 83 bp, Homo sapiens
tgtttgttcaacatatctacaatctcggtactacaggctaccggctctctgaccagttccacgacatcctcattcgaaagttt

SEQ ID NO: 78207 - DNA, 100 bp, Homo sapiens
aagaaaaatgaaagacacagacagtgaagaagaaattagagaagcattccgtgtgtttgataaggacttaaagagagatctacttcagagccagcagtcc

SEQ ID NO: 78208 - DNA, 75 bp, Homo sapiens
tattcgagtgaccgagaccgcggccgggaccgagggtcttgaggaccggcccagctcaggctcctggggcagcgg

SEQ ID NO: 78209 - DNA, 82 bp, Homo sapiens
agatatttgcaattcatcagttaggacctggatataaggtcaaaatgcagatcttcgtgaaaacccttaccggcaagaccat

SEQ ID NO: 78210 - DNA, 97 bp, Homo sapiens
gcccgacggctctcctctgactgcagcgtcactcagatttagtggagtttaacttgggtagtcccaagaatgtgggtcccttccttgcagtggacca

SEQ ID NO: 78211 - DNA, 50 bp, Homo sapiens
gtcactccccaggattatgcgcgctcctctcgggctcttggaccactgcc

SEQ ID NO: 78212 - DNA, 100 bp, Homo sapiens
ccctgctccccagtcctccgccccctcgcgtcgcggccctgggcgggcgccgcgagccggggtgagaaggactggcagaaatacgagactgctcggcggc

SEQ ID NO: 78213 - DNA, 75 bp, Homo sapiens
tggactgcccagatgggtatgacgaaggagtacattgtcaggccactgaagatcctggtgtcgccatgggccgcc

SEQ ID NO: 78214 - DNA, 98 bp, Homo sapiens
ctgggacagctaccgcagcatgagcgaaagctacacgctggagaatttcgctaaggagtttgtgatcagtgatcggaaggagctggaggaagatttca

SEQ ID NO: 78215 - DNA, 100 bp, Homo sapiens
gaaaacatcctggaatcaaatagtgttacggcaacaagaatgccgggacattctgcttcctgtcatcaccaaagagctgaaggagctgctggagcagaag

SEQ ID NO: 78216 - DNA, 90 bp, Homo sapiens
cccgtttctggctccgggctgagcttcctggagaagaggaagtcgtggcattcctggtggctttccatcagaacaagcagctcatcggtg

SEQ ID NO: 78217 - DNA, 100 bp, Homo sapiens
cttctcgactcggtcctgtttcgacagcgaacatgtcgcggcctgtcagcacttttccagccattaactccaggctctcgagaatttgaagatgttgtaa

SEQ ID NO: 78218 - DNA, 90 bp, Homo sapiens
ctgataagcatcttgggaaaaccctggatcaaatggagccttatctcatagagtgttccttgcctgtatctccccttggttcaatagcta

SEQ ID NO: 78219 - DNA, 100 bp, Homo sapiens
tttgcccagagatcagaacaatggcctagactgatcctttgaaatactccagccatgactaaaagagaagcagaggagctgatagaaattgagattgatg

SEQ ID NO: 78220 - DNA, 100 bp, Homo sapiens
gcggaggcggctttggaagccgtgcggagcgagttacgagaattcccggccgctgcaagggtactatactggcaattgctggagaagattttgcaattgt

SEQ ID NO: 78221 - DNA, 75 bp, Homo sapiens
attgggggaatccaatgcacaaatggagaaatctccctggtgacagagcaaaagctcttgatattatgattccca

SEQ ID NO: 78222 - DNA, 98 bp, Homo sapiens
gggactctgggaggctggtgcagccagaaggcatggctcttgacagccttctagtagaatctctggaattgtgcatgggacaggggaggcctcctcag

SEQ ID NO: 78223 - DNA, 99 bp, Homo sapiens
gccgggatctcaggtcctcgggggcggcggccacgccaaggacggtatcttctcacagagaatctcttctacacctggctatgagatggggcctggcta

SEQ ID NO: 78224 - DNA, 99 bp, Homo sapiens
cgccgcgctcagcgacaaacaaggcgaagctgtgctcaggcccgggctggacgcagagccagagctgtccccagaggagcagagggtcctggaaaggaa

SEQ ID NO: 78225 - DNA, 100 bp, Homo sapiens
gacatgtctaaccccggaggccggaggaacgggcccgtcaagctgcgcctgacaggaagaggagcaggacttggatggtgagaaggggccatcatcggaa

SEQ ID NO: 78226 - DNA, 111 bp, Homo sapiens
cagctgtgtgtccagaacgtgccatggagacgcttaacgtattctaccttgtaaatactgttatttgtatatactgtaaatgatgacatcggtgggcactaaccgagcccg

SEQ ID NO: 78227 - DNA, 90 bp, Homo sapiens
ttttgatggccatggcataaggaactctatcccaggaatacagctttgcattagaaagctacgatcaatttaagcagaatatccacagcc

SEQ ID NO: 78228 - DNA, 101 bp, Homo sapiens
gggccctgtgccgcctcccgcggcgcggcctctggctgctcctgggagcgatctctctttgagtcggcatggaagaaggagaaggacatcgtttccaagga

SEQ ID NO: 78229 - DNA, 74 bp, Homo sapiens
gtattagtgaagatgtggaagagagtcttcccatgcacaagatgattaatacagatcttagcagaatcttgaaa

SEQ ID NO: 78230 - DNA, 75 bp, Homo sapiens
ccggctgcaggccagagagggcctcgggaagagatgcgaggatgacaaggttcgagaacttgtcttggacaattg

SEQ ID NO: 78231 - DNA, 73 bp, Homo sapiens
ggctatcacaagctgcaccagcttctaaccgacttccatgttgtgacctcaaaggggaatcttgagtgtttga

SEQ ID NO: 78232 - DNA, 50 bp, Homo sapiens
cctagccgatgtctctctgaaggatgaagatataacacttcagataactg

SEQ ID NO: 78233 - DNA, 100 bp, Homo sapiens
aaccatgtgagagcattaatgagccacagtgcccagcaggaaagcgtggatacccatcaacgaagttttgatattggaattcagattggctatcagcgac

SEQ ID NO: 78234 - DNA, 75 bp, Homo sapiens
gaaaaaagtggatcatgaattggatgacgtgtttgaaaacgttgtgtgacgtgatcctcatggtccaggaaagaa

SEQ ID NO: 78235 - DNA, 90 bp, Homo sapiens
ccgacaaccccttcggagacaacaacctgctgggcaccttcatctggaataagcgtgttgtgctcctacagactgcaaccctgctagggg

SEQ ID NO: 78236 - DNA, 75 bp, Homo sapiens
ccacgtccaagcaaaccgggaaaggagaggatcccggagccgcttctttccttgctgctggaggccctgtcctgc

SEQ ID NO: 78237 - DNA, 101 bp, Homo sapiens
tgctttgcatgactgcaatggagatgtcaacagagctatcaatgttcttctggaaggaaacccagacacgtgtaaggcaaacattggtgggcaccgatctt

SEQ ID NO: 78238 - DNA, 82 bp, Homo sapiens
gcagggcctgggccgccgctgctacctgcagcgccgtgtggcacgacacaaaaatcaggaagcccgaaagatgagatcaata

SEQ ID NO: 78239 - DNA, 100 bp, Homo sapiens
ctcccggccctctcgcgctgcactgtctctccgacgcaagactgtcccggcccggaatgaatctgagctttttggacgtacaattcgtgtcaatttggcc

SEQ ID NO: 78240 - DNA, 88 bp, Homo sapiens
acagccgcgaacagcacggcgtggccgcctcctgcctcgaagacctgaggagcaaggtgctgggctttgacaaacttcctctgtgggg

SEQ ID NO: 78241 - DNA, 96 bp, Homo sapiens
aggaattggctcttgagatggctgccctgatggcccagggtcctctgaaggagttcaaagctgctggccaagctcagtggggagcctgggctctga

SEQ ID NO: 78242 - DNA, 100 bp, Homo sapiens
cagcctctccccttctggggtctcgggaaacacgcgactgattcttgctattccaaatcctcttccacgttgacagcccttcagatatttcaacactcct

SEQ ID NO: 78243 - DNA, 100 bp, Homo sapiens
ccgggggaagctggccttgggtgcagaatacagaaactgcagccatgaccacgcacgtcaccctggaagatgccctgtccaacgtggacctgcttgaaga

SEQ ID NO: 78244 - DNA, 100 bp, Homo sapiens
ggagagaatatcagcgacaggactacatggatgccatggctgagaaggtgcctttcctgaagactatcttctggtctcgaaatggacatgatagatccag

SEQ ID NO: 78245 - DNA, 100 bp, Homo sapiens
agatgcagtacgccacggggccgctgctcaagttccagatttgtgggaaagaagcctaaggaataaagtcatctctctagaccataaaaataaaaaacat

SEQ ID NO: 78246 - DNA, 100 bp, Homo sapiens
agtccccgtctccagttcagggcaagaagagtccgcgactcctgacctgagggcactcgctttgctcctgtcagtacacactcccaaacagttaaaccca

SEQ ID NO: 78247 - DNA, 90 bp, Homo sapiens
gtttgtggacagatttatattggatctcactggcatcgaatctatggatcagtgtcgccataccttggaacagcataactggaacataga

SEQ ID NO: 78248 - DNA, 75 bp, Homo sapiens
ctttctcgcttgtcaccttgccatgtggaagaaactgggaatgcttctagtcacaacagacacccttggccatga

SEQ ID NO: 78249 - DNA, 96 bp, Homo sapiens
acctcaccatgtgtctacattttgttgcttagaaaagcctaggcatttctgtaacatttgatgagaccctttttgctcttcctgctgcatctgagc

SEQ ID NO: 78250 - DNA, 75 bp, Homo sapiens
ttgacacaactgtagagcagctgtatagcatcttcactgtaaaggagaacttcctgaatgctggcagctttcctg

SEQ ID NO: 78251 - DNA, 82 bp, Homo sapiens
tgtccagcatgggagagtacatgagacgatgaagcaaagtacctggagtagaacagaaaaattattatgtctgtgttccctt

SEQ ID NO: 78252 - DNA, 83 bp, Homo sapiens
gacagcaagaggcaaaacttcggacatagaggccaaccaacctttggagaatgctgaagcttggaacaatttgtcaacttcct

SEQ ID NO: 78253 - DNA, 100 bp, Homo sapiens
aggatgcctgggactacgtgcaggctcagattctgctgaagtgatccagtctcgagtgaacgaccaggagggccgagaggaattctatgtacactacgtg

SEQ ID NO: 78254 - DNA, 101 bp, Homo sapiens
ggcctccccagccacgtgaaactgtgaatctggattgggaaagtcgacattaatcaactcattattcctcacagatttgtattctccagagtatccaggtc

SEQ ID NO: 78255 - DNA, 102 bp, Homo sapiens
cagaggagcgagctgagcgcctccagcgagaagttgagggagaaaggcgggcccgggaacaggttgccaacttggcctgttccatctcaaataatgaagaag

SEQ ID NO: 78256 - DNA, 98 bp, Homo sapiens
ggaaagttcaacagattatacaaagctgcaagaagaattttgtctaatcgcacagaaagaacgctttaccctgtacagctctaaaaaccttagacaag

SEQ ID NO: 78257 - DNA, 78 bp, Homo sapiens
tccatgtttctggacgcggatttttggcctcatactctgttatagataaacaagggcagagcggcttgggtaaatcca

SEQ ID NO: 78258 - DNA, 100 bp, Homo sapiens
cttggaggcattcatggctgaagtggaggctattataatggttttagagtcaactggagaaagtacatttaagatgattttggatttattaaagtccctt

SEQ ID NO: 78259 - DNA, 50 bp, Homo sapiens
acctccgccagttaagaggaaaaagagcaaacatgaacgttggagttgcc

SEQ ID NO: 78260 - DNA, 99 bp, Homo sapiens
gtgtgaaactcataggagttcccgctgacgctgaggccttaagtgaaagaagtggaaacacccctaactctcccaggttcccacgtaacatcacatcag

SEQ ID NO: 78261 - DNA, 82 bp, Homo sapiens
ccatcctggttcttccaaagtgcccggacccaaaacaggaaatgtgatgactgaagcccaccacaaatatgaccactctgag

SEQ ID NO: 78262 - DNA, 126 bp, Homo sapiens
ttgtggtctatgacaaggaataccttgagcagatctccactctcatcaacaccaccgacagatggttgattcttcaccacactgaaaccattaggaaaaatccttgtggttaacagcagaggcttc

SEQ ID NO: 78263 - DNA, 88 bp, Homo sapiens
gctcgctgggagagaggtacctctccttttccctctccctttccctaaggttgaaggtcgaggagctggaaggcgagcggagtcggct

SEQ ID NO: 78264 - DNA, 100 bp, Homo sapiens
aaagctgcgttaatgtttgcaaatgcagaggaagaatttttctatgaggtatctgtaatgcgtgatgaggataaattactgaggattaaaattaatgaac

SEQ ID NO: 78265 - DNA, 145 bp, Homo sapiens
tccggagtggggaagacctgcgtcctttttcgtttttcggatgatgccttcaatactacctttatttccaccatagcagtagcagccagatgaagaagcggccaacatctgcagtgggctacaagaggcctatcagccagtatgc

SEQ ID NO: 78266 - DNA, 82 bp, Homo sapiens
ctccaccttccacagggtgatcccttccttcatgtgccaggtgtttcccattaaacactaccaggacaaaatcaggccttac

SEQ ID NO: 78267 - DNA, 75 bp, Homo sapiens
gttactggctggttcttcacaatctcaccccacaggtgacagagctgaatgaacctctctccaatgaagatcgaa

SEQ ID NO: 78268 - DNA, 96 bp, Homo sapiens
ctggacagatgaagagtgacttgtttctggatgattctaagaggtgctggagaatctggtaaaagcaccattgtgaagcagatgaggatcctgcat

SEQ ID NO: 78269 - DNA, 100 bp, Homo sapiens
ttctggcgctgccgcccaccttgtggccctgggctttaccatctttgtggctgtgcttgccaggcctggctccagctaaactcaaaatgggatctccgaa

SEQ ID NO: 78270 - DNA, 82 bp, Homo sapiens
ggcgtctgcctcgagactgaagaccggatcccatgacagattctgttgtcacgtctccttacagagtttgagcggtgctgaa

SEQ ID NO: 78271 - DNA, 87 bp, Homo sapiens
tggttataatcaaaagtggtcttcagaatcttctttgaggatgttaagcaagtttttggacagaccacaattcatcaacatattcca

SEQ ID NO: 78272 - DNA, 83 bp, Homo sapiens
gtcttcggaactgggaccaaggtcaccgtcctagacaatgcagatcttcgtgaagactctgactggtaagaccatcaccctcg

SEQ ID NO: 78273 - DNA, 49 bp, Homo sapiens
tgggttctcttgcaatggttatagaaggagacggggtttcaccacgttg

SEQ ID NO: 78274 - DNA, 88 bp, Homo sapiens
agaaggacattatttcggacacatctggtgacttccgcaagctgatggttgccctggcaaagccgctgtgattggaaccaggctgcat

SEQ ID NO: 78275 - DNA, 100 bp, Homo sapiens
ggatttctcccgagccttgctcacccctcgcatcaaagttggccgagactatgtgcagaaagcccagactaaggaacagcaacggcagcctttaacagtt

SEQ ID NO: 78276 - DNA, 151 bp, Homo sapiens
gcctcgtcctctgcacgttaccttacctcagagattatatgccttacctcgctgaatcatcacagccctaggagataaggctcaattacttgaaatagccaaagctaatgcagctgccatgtgtgctaaggctggtgtccctttaccacca

SEQ ID NO: 78277 - DNA, 102 bp, Homo sapiens
tggccctgagcaatagcacgaggcctgttgtctaccaagtgcagtttaaatacgcctttttaaaaaggaatcctggaaaccatttgtataaatggaaacaaa

SEQ ID NO: 78278 - DNA, 100 bp, Homo sapiens
gacaagttcagagaatatcatgcttccagtctactgtaaaggtcagtactcctgcatttgtaccaacgaaaactcacgtgctgcttcatcgaatgagtgg

SEQ ID NO: 78279 - DNA, 100 bp, Homo sapiens
ccaaagccaagctcaagccgggggctcctctcaaacccaaactcaacccgaagaaagccagggcctatggcagaggtattatccatgcagcagaagagaa

SEQ ID NO: 78280 - DNA, 83 bp, Homo sapiens
gaaaggatcggcaggccggtgcatgagtttatgctgaagagctccacgcaggagatcggtgaggagctgatcaacggagtcat

SEQ ID NO: 78281 - DNA, 82 bp, Homo sapiens
gcctgccatgtccgggagaagacagtgggaggaggagctcgccaagcgcatgaaccttcagaccatggtggacacgctgcag

SEQ ID NO: 78282 - DNA, 100 bp, Homo sapiens
aggacagaatcaccagcactggctgaaggatttgcctcaaagggcactgcaaaaattgaacagaggaatcccaaggaagctgcctgaatttgcctgtata

SEQ ID NO: 78283 - DNA, 100 bp, Homo sapiens
gaaagagtgagaaagacaaggattgatagaaaaggcagttccacgaggagcccaggatgtgcgagttcaagtgctacccgaggtgcgaggccagctcggg

SEQ ID NO: 78284 - DNA, 75 bp, Homo sapiens
gcgggatccactgtccggcagaggacactgacgaccgaaacaagatgtcagtgtaagtgccttttgttttgtttt

SEQ ID NO: 78285 - DNA, 97 bp, Homo sapiens
gggccaggaagcaattctggaagcgcagcaacagcaagctcccgggcaggtgaaaggtgtagcagtcactcggcctacacccacagcatcgaccttg

SEQ ID NO: 78286 - DNA, 90 bp, Homo sapiens
caatctccatggagtccttaaaaggcacaggagattcagtagatgaacagatatcagttttagagaatgtggcgtggagaaattctcaag

SEQ ID NO: 78287 - DNA, 75 bp, Homo sapiens
cagatgaaaaagaaaagactaccgcactgaaagttgacggactggacaaagcttctatagcaaactcagatggcc

SEQ ID NO: 78288 - DNA, 97 bp, Homo sapiens
ctcggagcgcggtccctgtattggtctcctgctcctagagactgattcttgctattccaaatcctcttccacgttgacagcccttcagatatttcaa

SEQ ID NO: 78289 - DNA, 83 bp, Homo sapiens
cgcagggcctgcagcgggagctggacggcgagcgcgagcggcgcgagaaagagatggtaacctgcacctcaatgtgacggcgg

SEQ ID NO: 78290 - DNA, 100 bp, Homo sapiens
cgcagacctgaatgagctgcggtaccagcgggaggacatgtcattagcccagtcgccaggggccagcgtcatcagcacccgatgttctgagacctacgag

SEQ ID NO: 78291 - DNA, 74 bp, Homo sapiens
cagaaattgaaaggcttcaaagctagcagtactgccaaatctgtcgaaagggagataatgaagaactgcttctt

SEQ ID NO: 78292 - DNA, 75 bp, Homo sapiens
gctgcgcagggcctgccaggtggcgctcgatttggagcaagaggtggtggtggccttcccccgaagaaatttggt

SEQ ID NO: 78293 - DNA, 100 bp, Homo sapiens
ctggatcggttcaaccatctggcaccaggaaaggaacgggatgatcatgaagagttagcctggcctggcataatggagccccagtttgagggacagcggg

SEQ ID NO: 78294 - DNA, 100 bp, Homo sapiens
gcgctgcctggcccaggcgcacacggaagtgcgggcctccccttcctcatcatcgagacaagcaccatcaagccttaccaccgagggttttactgcaatg

SEQ ID NO: 78295 - DNA, 100 bp, Homo sapiens
gcgcggcttcctcaacttcacgctggcgcgagccccgtcctccttcgccgccgcgcacaaccgcacgtgcagaaacagttcgtgactatgagcaccagtt

SEQ ID NO: 78296 - DNA, 75 bp, Homo sapiens
gcgaagtctactcaacgtttccaaggtttcaccggaagacttttgtgaaaagatgtggatcaattatacctattt

SEQ ID NO: 78297 - DNA, 76 bp, Homo sapiens
gaggaaaagtaccacctgagggatccacatctcaaagaagtggggcttcaccaagttcaatgctgatgaatttgaa

SEQ ID NO: 78298 - DNA, 75 bp, Homo sapiens
tctcggcgctgccgtctctggaggagtactggcaacagccctttcccagtctgcctggagaacccacacatcatc

SEQ ID NO: 78299 - DNA, 75 bp, Homo sapiens
cacctcgggggccacactgcaggcctccgcgctcagtgctatgtgatgatgatgccatttaaacgacaggctcta

SEQ ID NO: 78300 - DNA, 87 bp, Homo sapiens
gggaaaacgtggagaagagaattctgtgccacatgcagctcagttctgcacaggaggaggagggggccagtgggggagcagtccatt

SEQ ID NO: 78301 - DNA, 100 bp, Homo sapiens
ctttgagaagcagaacgaggaggcccggaggaccaataggcaggccgagctctttgccctttacccatcagtggacgagcccaagacctgcaaaatttac

SEQ ID NO: 78302 - DNA, 100 bp, Homo sapiens
ctccgtgcaggagctggccccgccgcccgccctaccccccaagcagcggcagctgtatttgtgtggaagtaatcgaaaagacaacatatttattgatcct

SEQ ID NO: 78303 - DNA, 90 bp, Homo sapiens
cacctcagcactatcccaagactgctggcaacagcaccctcatcacatgtgtggattctgggattctcagagtctggcatgacaaggaca

SEQ ID NO: 78304 - DNA, 50 bp, Homo sapiens
ctcgtatgcaacctcaggcttcagccaatgctgtctttgcatttcaacta

SEQ ID NO: 78305 - DNA, 134 bp, Homo sapiens
aagcctgtgtgcattcataagaattcggaatgtctgaaagagcagcagaaacgctactttccagggaagaaggagaaagggccaacccctgaagaagcaatacagaaactgaaggagacagagaagatactgat

SEQ ID NO: 78306 - DNA, 78 bp, Homo sapiens
aattacccagtatattcaaagctacaagggatttgttgacataacggttgatgaaaaaaccgtaggagaacctggttg

SEQ ID NO: 78307 - DNA, 82 bp, Homo sapiens
gaagcttctgaaccatccacacatcataaagctttaccagctcttgaaattggggctgacctcccatctaatcatgtcattg

SEQ ID NO: 78308 - DNA, 118 bp, Homo sapiens
gctcaatgagaaaatctccctgctccgcagcgacatcaccaagctggaggtggacgccatcgtcaacgccggtactccaaagattcaggtttactcacgtcatccagcagagaatgga

SEQ ID NO: 78309 - DNA, 98 bp, Homo sapiens
ggatttgttaaggattccaagtaactcttatttgattcagaattcctgggctccctgggtgcattctatcattccagttgaaagtttgcttccttcca

SEQ ID NO: 78310 - DNA, 82 bp, Homo sapiens
catactcatcatggggctcctgtacaaggacagagcgggatgccaccagcttgtccaaagggaagttccaggagctcctggt

SEQ ID NO: 78311 - DNA, 99 bp, Homo sapiens
cttccttcgctaacgcctcccggctctcgtcagcctcccgccggccgtctccttaacaccgaacacccctcttcgagcactactgctactcccggggcg

SEQ ID NO: 78312 - DNA, 75 bp, Homo sapiens
cgataccgaagcgggctgtgtgccccttctccacccagagcctagatattatcctactgaagatgtgcctcgaaa

SEQ ID NO: 78313 - DNA, 96 bp, Homo sapiens
cggtcctatacaaggagtatgctgaagatgacaacatctatcaacagaagatcaaggacactgcccatctctaagataagaacctggaaaggggac

SEQ ID NO: 78314 - DNA, 75 bp, Homo sapiens
cccgaccccacttgtgctggaagccccgagcctggagatgagggggagccggggcggtcgggactggagcttgaa

SEQ ID NO: 78315 - DNA, 100 bp, Homo sapiens
gaggtttctgcagcctgcctccactgtgaaaagactttgcagcaggttgtggaaaatgcccttaaagtgaacccaatactaggtccacaaatgtttcaac

SEQ ID NO: 78316 - DNA, 100 bp, Homo sapiens
tatcagagaagaagggtgtttggggtgtgttttacaaagccgcctcggccgcgccggaggagggcggggagaggaccatgtgagtgggctccggagcctc

SEQ ID NO: 78317 - DNA, 100 bp, Homo sapiens
cagctcttcacagggggtagaacaagtggtactaggattatacattgtaagaggtgacaacgtgctcatccacctgcagacatggggcgcagaaagtcaa

SEQ ID NO: 78318 - DNA, 88 bp, Homo sapiens
cagccacggcgcctcctgatgcgcctaacagggaagagggtgtcgtagtcattcttcagcacaattcttaattggagaccaagaaccc

SEQ ID NO: 78319 - DNA, 100 bp, Homo sapiens
taaaggttccaactactggagaaacaggctaaaggttggtcttcaggttgtggcagtcaaggctccagggtttggtgacaatagaaagaaccagcttaaa

SEQ ID NO: 78320 - DNA, 75 bp, Homo sapiens
ttgtttattttcctcaccactgaatctacaggatttgtactgtgttcgcagtgacctggggaacctgctcaaagc

SEQ ID NO: 78321 - DNA, 82 bp, Homo sapiens
tggaggcaaagttccgaatagggatgaggcatacgtggtgtctgcctgtatcccagtgttcaggctggctagacggcggaag

SEQ ID NO: 78322 - DNA, 100 bp, Homo sapiens
atttcaaatgaccaccatgttgcaaaaggaactgatgatgttgtaggccctgaaggcatggagaaattttgtgaagacattggtgttgaaccagaaaacg

SEQ ID NO: 78323 - DNA, 75 bp, Homo sapiens
caataaatgtgattttgcctatgaaaccatgggaactattgaagtacaaagcttggaagtctttttgcatgttac

SEQ ID NO: 78324 - DNA, 141 bp, Homo sapiens
atgcattgtaattggtgtgctgtattttgctattcatgtaagcacagtcttcacagtattgcaggttacattgattacccacctagtacaacatcttacgggaagagcatagtatttcctagaggaatatgaacataacag

SEQ ID NO: 78325 - DNA, 100 bp, Homo sapiens
tcctgatatagatgccagtcataatagatttcgagacaacagtggccttctgatgaatactttaagctcaaagtctaactccccaggactataatctgag

SEQ ID NO: 78326 - DNA, 100 bp, Homo sapiens
aattgcagtggattcctcggggatagaccaaaggatccagtttgtgtgttctctgtgcaaataccggaccttctatgaggacgagatggccagccatctt

SEQ ID NO: 78327 - DNA, 90 bp, Homo sapiens
ccaccacctcttgatgaagaggctttcaaagtacaggaatcccgttctgcttccagaagtggaagtgctcacggatcggggaaatctgca

SEQ ID NO: 78328 - DNA, 96 bp, Homo sapiens
tgattgagcagcttcctatggatctgcgggaccgcttcacggaaatgcgcgagatggacctgcaggtgcagagaaatgcttccagactgcacactt

SEQ ID NO: 78329 - DNA, 106 bp, Homo sapiens
cagaaggtggatttgatccctgtgaatgtgtttgctctcatgaacatgcaatgagaagactgatcaatctggtatcagtttttggaagaagcttttcaaaatcaga

SEQ ID NO: 78330 - DNA, 75 bp, Homo sapiens
catgaaggcaaaggcagcattctttctttccttaggaaaaatccctaaaagataagttagtacaagagaaaaagc

SEQ ID NO: 78331 - DNA, 82 bp, Homo sapiens
ggcgagcgaggaggatggcggagtcggggctcctgacgatgatgctgaataatcccctatttgctggaaatcctcagcttca

SEQ ID NO: 78332 - DNA, 98 bp, Homo sapiens
gaacattgtagagtctgagaaggcccttgtgaagactgggacatgttggatgttgatgaagatgaaaagctaactggtgaagaagaatttgaattact

SEQ ID NO: 78333 - DNA, 75 bp, Homo sapiens
atctttacagaggaatagtctacaaaggaagacttgtaacctggagaagagtacggccgtaccatttcagcttgc

SEQ ID NO: 78334 - DNA, 95 bp, Homo sapiens
tagggacagccgcccctggtgcacacaccctcgtattctcctgcccttccccagggggatatgagactttctactcggaatatcctgagtgttgc

SEQ ID NO: 78335 - DNA, 90 bp, Homo sapiens
acctgtcaggccacaacctggccaacccccacccgttcgcaggaaaacgctgccgcggtccacagtgtcgattctggatgaccacattag

SEQ ID NO: 78336 - DNA, 50 bp, Homo sapiens
ttgaacggaatttaaggcgggaagaagagacggggttttgccatgttgcc

SEQ ID NO: 78337 - DNA, 90 bp, Homo sapiens
tctcccttaagcactgggatcagggaattgacataggggatagcttaactattccagatgaattcacggaagacgaaaaaaaatccggac

SEQ ID NO: 78338 - DNA, 100 bp, Homo sapiens
cccaggaggcgctggagcaacagctccccacactgcaccatgagctcagttggctgcaggagcagctagcacaggaatctggaaactgttcttcaggaag

SEQ ID NO: 78339 - DNA, 83 bp, Homo sapiens
ccagtgttcaccatcctggccccggaaggcttgggcactgtttaaaggaaagttccgagaaggcatcgacaagccggaccctc

SEQ ID NO: 78340 - DNA, 100 bp, Homo sapiens
gaagcctctgttccccgggaattcggaaatcgatcagatcaacaaagtgttcaagatgagcagcaccagcagtaagagggctccgaccacggcaacccag

SEQ ID NO: 78341 - DNA, 82 bp, Homo sapiens
ttgagatagtggccactattctttcatggacaggcttggccactccaacagaactagaagatcttctgccatctagaccgga

SEQ ID NO: 78342 - DNA, 100 bp, Homo sapiens
cgtgctgctgttgatgctggctttgttcccaatgacatgcaagttggacagacgggaaaaatagtagcaccaaaccctgccatcagcatcactgaaaacg

SEQ ID NO: 78343 - DNA, 82 bp, Homo sapiens
ctcagcccacatgcccgctcacctgcgctgtgatgcctgcagagctgtggcttaccaggtaattgcagccacaaacagggtg

SEQ ID NO: 78344 - DNA, 74 bp, Homo sapiens
ggggacgtggcttttgtgaagcacagcacggtactggagaacacggatggatcgaagagtcagaccaaggccct

SEQ ID NO: 78345 - DNA, 75 bp, Homo sapiens
caggttactcgcacgcggatttggctggcgtcccgcaaagtgaagtcactgcttttgctgtcttggatcaagacc

SEQ ID NO: 78346 - DNA, 74 bp, Homo sapiens
acggccgctccgaggacttccgcaggacccgcaacagcgcagagggtagaaaatctggtgtattaactgtgaaa

SEQ ID NO: 78347 - DNA, 100 bp, Homo sapiens
actgtgtcccctcggctccacggctgccccgggggcgctgctttcggtctcctctgagcctccggcctccataagacccaaaacagatgacacctcttcc

SEQ ID NO: 78348 - DNA, 75 bp, Homo sapiens
gggccacagccacatcaccggagctctttgacatctgtcttgcccgagccaaggagaggtggcggtcccttagca

SEQ ID NO: 78349 - DNA, 75 bp, Homo sapiens
agcaccttttattaaccagtttcaggtgttaaaccgcctgacttttgcgtctactctttctcacctgcgtcgttt

SEQ ID NO: 78350 - DNA, 101 bp, Homo sapiens
ctcccgccctttcgctcctcggccgcgcaatgggcacccgcgacgacgagtacgactacctctttaaagttggtgcttcccgtgctgctgttgatgctggc

SEQ ID NO: 78351 - DNA, 100 bp, Homo sapiens
cgctcttccctggctgtgctggcggaggctgcgccgatgaacctgactgagttacaggcccaaaaactgcgactggcatacacaaggagctctcattatg

SEQ ID NO: 78352 - DNA, 98 bp, Homo sapiens
aaggagctcttacagatggacctgtacgcgctgctaggcattgaggagaaggcagcggacaaagagaatacatccagcctgtgtgcctcccagctgcc

SEQ ID NO: 78353 - DNA, 75 bp, Homo sapiens
tgagacgcttcggagagtgttgccaaaagtcagagtcctctcaaactgtgagtaactaagtggtttgtgcatcat

SEQ ID NO: 78354 - DNA, 100 bp, Homo sapiens
ggcgaagatccggactctgggtgttttgctaccgtgaccgtttagggttacattttgccatctgcctttccagagtaagtggctctatgtgggcactgaa

SEQ ID NO: 78355 - DNA, 96 bp, Homo sapiens
gctgcagccgagatgccgggggagcggggccttccacaccccctccgtgggtgtgtggtcagttcaccgggacctggaggcccagattgcgatcgt

SEQ ID NO: 78356 - DNA, 74 bp, Homo sapiens
tcatctggaattttgccgatttcatgactaaccagtgcggctgagccagaggccaactgcagaggaactggaac

SEQ ID NO: 78357 - DNA, 82 bp, Homo sapiens
ctggagtttatctggagtgaggtggccggttcttggtgggatctgagcaggcgtccgagctgggccacagcctgaacgagaa

SEQ ID NO: 78358 - DNA, 75 bp, Homo sapiens
ctgttcgaggatgtgtacgagctgtgcgaggtgatcggaaacttccaattgaagacttgtgcagtttaacatccc

SEQ ID NO: 78359 - DNA, 82 bp, Homo sapiens
cgcaccatgccgctcctaagcctgcacagccgcggcggcagcagcagtgagagcacacttccaccctgggcagcgtgtttgg

SEQ ID NO: 78360 - DNA, 151 bp, Homo sapiens
accagtggaagaggtcaaatacatgaaaaatggggcagaagaagagcagaaaatagcagccaggaaccaagaaaacttgctcctgaattcagaccacagatccacagccacagtccagatatgtagcggttctgtaaaccttaagggtgct

SEQ ID NO: 78361 - DNA, 100 bp, Homo sapiens
tgtagagtttgcatatatcaactgtggccttaatgagcatgttgacagcatcgatgctagacagacaattttgggaaccagtaggacattgacatacatc

SEQ ID NO: 78362 - DNA, 87 bp, Homo sapiens
tgaaactgtttgggaaatgcaacaatccaaatggccatgggcacaattataaaggggccttggacaagttgttactgactatgttca

SEQ ID NO: 78363 - DNA, 82 bp, Homo sapiens
ggcggcctcgggcgccgcgaggtcgtgttcccgaacagggcacctggacgatgacggattaccgcacgggttctgcacagtc

SEQ ID NO: 78364 - DNA, 110 bp, Homo sapiens
tttgcctcatttgaggagtgggaacaggcttcggcgaacacaaaggtgctgactccagcacagatcaagtcaatttgtcaggcaattctggactctgggaagcagtatgc

SEQ ID NO: 78365 - DNA, 96 bp, Homo sapiens
acatcacccccatggaggccctggcagagcagaggaaggcattactgggtaccggccaagaggctgtttggtggtcagatcgtgggccaggccctg

SEQ ID NO: 78366 - DNA, 100 bp, Homo sapiens
aaggagtccctagagacacctagtaatggagatgtgggttccttcgtgctgaagttagtggagggccttcagggccagacctgggccccagactgggtgg

SEQ ID NO: 78367 - DNA, 100 bp, Homo sapiens
tgagtcttctggcaaacagtgtttgcctctggttcagctcatacaacagcttcttagctattcagcataaatatacaaactggaaagcttttctagtgaa

SEQ ID NO: 78368 - DNA, 75 bp, Homo sapiens
gttcaagcgaaaacatgaccgctgagcccatgagggaagatcagttttcctgccatccaggctgctccctccttc

SEQ ID NO: 78369 - DNA, 83 bp, Homo sapiens
cgccgaggaggttgggatcttcttcactgcctctggcatggatgagatcgagacgctccctccggagctcttccagtgccgga

SEQ ID NO: 78370 - DNA, 100 bp, Homo sapiens
gcaggctgggctgcaggctctcggctgcagcgctggcaggttcaggagaagtggcacctggtggaggacctgtcgcgactgctgccggagccaggcccga

SEQ ID NO: 78371 - DNA, 100 bp, Homo sapiens
ctggagtctgcgaaggccgggacccggttccccggcccacagtgggggtgtgcaaacccgagagaactgggagaaatacgaatgtgctttaaagcgagca

SEQ ID NO: 78372 - DNA, 74 bp, Homo sapiens
tgggacacccgggagtcaggaaatgcagcagtggacgtcagctcagcgaggtcttcatccagctgccctcgcga

SEQ ID NO: 78373 - DNA, 50 bp, Homo sapiens
cttagctcagcaattcttaccttggctgacaggacaactggatcagtttc

SEQ ID NO: 78374 - DNA, 82 bp, Homo sapiens
tcggaacctttttagtgccggactccgggccgcaggcagtcccgcggcagcaggatcacagagaaatgttctttactaccat

SEQ ID NO: 78375 - DNA, 100 bp, Homo sapiens
ctgtgggaagtggagcacgactcatttctgtttgttactttgagtctgaaaatgactgggattgttcattgctgctggaggaagatcatggactgtcgcg

SEQ ID NO: 78376 - DNA, 82 bp, Homo sapiens
ccgtggtgggcacccctgacgcaagaagtctatgtgccccaggatcctggattacctgaggaagaagagatcaaggaaaaaa

SEQ ID NO: 78377 - DNA, 100 bp, Homo sapiens
cctgtatagccactaaccattttggaactgctagcagtactggaaacttggtagtgaaagatgcagagcaaagcggcagtccccggacagggatgggctc

SEQ ID NO: 78378 - DNA, 76 bp, Homo sapiens
atgagaagaagaaatacatggaccgaagtctggacatcaatgcctttagggtcctctccacccggatcctggccat

SEQ ID NO: 78379 - DNA, 108 bp, Homo sapiens
ctgcagttgctggccgagcctggcctgggccgcgtccatcacctggcactcaagacaatgcagatcttcgtgaagactctgactggtaagaccatcaccctcgaggtt

SEQ ID NO: 78380 - DNA, 73 bp, Homo sapiens
aaaaagtgattgagcttactggcactgccaggcgaagtttattttgagttggatgctgataaaatatgtagag

SEQ ID NO: 78381 - DNA, 75 bp, Homo sapiens
ggagtcctccacttgccactggactccaagaatgaaaaggctctgggccgcaaaataaactcctgggaatcatca

SEQ ID NO: 78382 - DNA, 83 bp, Homo sapiens
agaagaaatccattctcatgaagcagctgcagcagcagcagcacagcgacaagacggtactgactgcattgcagaaagacagc

SEQ ID NO: 78383 - DNA, 80 bp, Homo sapiens
ggactgagtcctgcaggacacagactgacgacaacagtggagacttggacccaggagtcttgctgacagctcaaactatc

SEQ ID NO: 78384 - DNA, 74 bp, Homo sapiens
tctccatcacctatcacagcagcatccgctctctggaggccacgcccagatttcttctaccgctgcttccctga

SEQ ID NO: 78385 - DNA, 83 bp, Homo sapiens
accggctgtatgattaggccacaatcttcaatgagtaaacatattcctacctattcaacgaattgcttgaaaactgaacaggc

SEQ ID NO: 78386 - DNA, 74 bp, Homo sapiens
ccgccgaacgacaggacgttggggcggcctggctccctcaggaagacctccgtgtggatggccgtggctgtgag

SEQ ID NO: 78387 - DNA, 97 bp, Homo sapiens
ggaaggaacgaggcaaggagctaaagcagcgtgcgttcagccctgggagctgaagaagcaggtggagagtgccgagctgaagaaccagcggctcaag

SEQ ID NO: 78388 - DNA, 75 bp, Homo sapiens
ctcgcctcggatttgggggcttcctcactcgtggctttccgaaggctgctgactggaacgtgagaaacgagcccg

SEQ ID NO: 78389 - DNA, 100 bp, Homo sapiens
ccagtacccgctgttctgcttcctgctgctctgtctcagcgccgcctccctgcttcttaacaggtaaaagtgctgtttgtacgcaaccttgccaatactg

SEQ ID NO: 78390 - DNA, 122 bp, Homo sapiens
ggcggcggaagatggtgccgggggtcgctggctctgctgctgccgccggcgaaggaggaggcgttgccggggaataccttggcaagcagctccagtccgagcagccccagaccgctgccgcc

SEQ ID NO: 78391 - DNA, 98 bp, Homo sapiens
gcataagaggtcctagaagatatctggtatggccagagtacagagggaccggagtatcgcgcttactatggagcatttaaggatgtcaaggagaaaaa

SEQ ID NO: 78392 - DNA, 74 bp, Homo sapiens
gtttaaaacttatgctatctgcggggccattcgtaggatgcacgtttcctgtggcagcctaagagggagtgtca

SEQ ID NO: 78393 - DNA, 88 bp, Homo sapiens
aagctttccagagaatgtttcagagaaagttacgtggagcgtgggcgtttcgcagactcctaaggcacggatgggcagaagcctttgc

SEQ ID NO: 78394 - DNA, 83 bp, Homo sapiens
ctggcaccatcattgcccgccagggagaccagatgcagctgtcttctcctcagtgctggcgctctgactacccttcccaaaga

SEQ ID NO: 78395 - DNA, 85 bp, Homo sapiens
tgaagccaggccaggcagaggatagcagagtgctttcggagcagctcagccagcagacgctctctattggaggcatcatcattct

SEQ ID NO: 78396 - DNA, 89 bp, Homo sapiens
ttactgagcacctttcctaggagagacgtagaaacgttgaagcacaatgatccttttgctcctggtggaacagttgttgcagcaagcga

SEQ ID NO: 78397 - DNA, 75 bp, Homo sapiens
gaccatcacacaagtcattaaagttctgaaccctcagaagtcgagcaaaagatgtgataataccagcaaagccac

SEQ ID NO: 78398 - DNA, 80 bp, Homo sapiens
gcccgctcacctgcgctgtgatgcctgcagagctgtggcttaccagctggcagccaggaggcaggagcagcgggcgacag

SEQ ID NO: 78399 - DNA, 100 bp, Homo sapiens
ccttgctggcctacgtcgcctcggaatggccaaagactatgacgggtcttcctagcacatcagggacaactgccagtgtggtcatcattcggggcatgaa

SEQ ID NO: 78400 - DNA, 100 bp, Homo sapiens
gaggggaatagactccatctatccatatgaggtgctggagaatctggtaaaagcaccattgtgaagcagatgaggatcctgcatgttaatgggtttaatg

SEQ ID NO: 78401 - DNA, 75 bp, Homo sapiens
aaaaaccaaaattatcgccaagattcagcaaaccagtgtgcttttcttggagaaagaagaaaagaagaaagaagg

SEQ ID NO: 78402 - DNA, 87 bp, Homo sapiens
cgtgaagcggaagcaggagctggcgacggtgggcaagagcagcaagatgctgcagcatattgattacaggatgaggtgcatcctgca

SEQ ID NO: 78403 - DNA, 83 bp, Homo sapiens
gcagaagccgagttcaacatcctcctggccaccgactcctacaaggctatgactttgcagccgtcctggagtggttcgcggag

SEQ ID NO: 78404 - DNA, 83 bp, Homo sapiens
gaaagacaaagacccagtgaacaaatccgggggcaaggccaaaaagaagggatttcaaggatttggatttggagatggtggct

SEQ ID NO: 78405 - DNA, 90 bp, Homo sapiens
cgcggctacgctgaggctctccgctcagcttcctgcctgacacagctcacttcaagaagtgcacaatgtcagaacgtggaattaagtggg

SEQ ID NO: 78406 - DNA, 82 bp, Homo sapiens
attcaagccaagctgaccaagaagccaaagaactggctaggcaaataagctttaagctggctccaaggctgcatctctccac

SEQ ID NO: 78407 - DNA, 100 bp, Homo sapiens
gccgccgtcgctgccgccacccggagaactgttgtaattgggtctctagctcagaaccattagacacatcagtggagtccatgctacctgattgcccccg

SEQ ID NO: 78408 - DNA, 75 bp, Homo sapiens
aaggattccaagtaactcttatttggaatggttttagggaagactgttgccggatgacaaggctgtcactattgt

SEQ ID NO: 78409 - DNA, 83 bp, Homo sapiens
ggcgaggcagagaagggccaggagaggagcactttgaggacatggcctccgacgaggacatcattgtcccagatatagccgtt

SEQ ID NO: 78410 - DNA, 95 bp, Homo sapiens
gtcggaggccgattcgacacagacaaggacgagaagctcactgtgacccaggacctccctgtgaatgatggaaaacctcacatcgtccacttcca

SEQ ID NO: 78411 - DNA, 100 bp, Homo sapiens
gtttttgcgggaggaatatgttaaaacaaactcaagatacgaaatgagacttttgaagtgcctttgatttctgggtttatggctacaaatgatttgatga

SEQ ID NO: 78412 - DNA, 100 bp, Homo sapiens
gaagcccacgcagattttaattcccactctagattctggaatgtatcctgtcaggtataatgtcagtgaatggcaagaaagttcttcatatggatcgaaa

SEQ ID NO: 78413 - DNA, 100 bp, Homo sapiens
aaaattggaagtgaatggccccatggtgacggtggccctgtcagtggctctcttggccctcctgaaatggtgtacaaagataatcaatgctgattcggag

SEQ ID NO: 78414 - DNA, 98 bp, Homo sapiens
tgtgtattacctcattcaaaagcctcagcttaagggtatagttaccaagctatacagccgacaaggctaccacttgcagctgcaggcggatggaacca

SEQ ID NO: 78415 - DNA, 51 bp, Homo sapiens
gatgttgatcagcttcgtgatatcaaagaaatggctgttgatggtgggtgt

SEQ ID NO: 78416 - DNA, 74 bp, Homo sapiens
gaaaggtccagtatgcttcctaccatggcagcaggtgtgaccaattcagtgaaaggaacgaatgcgattctctg

SEQ ID NO: 78417 - DNA, 75 bp, Homo sapiens
ctgggacaccgcattcgccatccaggctctgcttgaggaatggaagttggatacactttgtgacttgtacgagac

SEQ ID NO: 78418 - DNA, 100 bp, Homo sapiens
tggcgtggccatgccggcggccctcacagcaaccagcaccagatgaaggagcattcctcttgggaagggaaaaggccgaggcatcagcgtgtgaagaccg

SEQ ID NO: 78419 - DNA, 50 bp, Homo sapiens
gcgccttccacactgtgcgctgttgacagactaatggagttgcattttaa

SEQ ID NO: 78420 - DNA, 100 bp, Homo sapiens
aacattcctggggtgatccagtcagtcattggctggtttggggggaaagagctcagagatgaggaacagacagctgagagcattaagaaccaaatgactg

SEQ ID NO: 78421 - DNA, 90 bp, Homo sapiens
gcgacggaaatgtgtcatcgaaagccaggaacagatgttgttattgtaaagaatggaagaagaatatgtggaacaggaggttgtttagcc

SEQ ID NO: 78422 - DNA, 88 bp, Homo sapiens
gcccttgacaggcagggagggctaggctgtgcatccctccgctcgcattgcagggaggttttgggatttgagattgacgcggtgaact

SEQ ID NO: 78423 - DNA, 75 bp, Homo sapiens
gtggaggccgcagcagtcagggacatttctgaagcgagcgtcttcgatggcaaatgttctgaaaaagactctgca

SEQ ID NO: 78424 - DNA, 87 bp, Homo sapiens
gtccgagtcccaggtcaagagcctctgcgagaagttctttaaggaaaaacagtagtgctctgcatagtttactgaaacgagtggtca

SEQ ID NO: 78425 - DNA, 83 bp, Homo sapiens
ttgaagtgtggttcagggccagtgcatattagtggacagcacttagtagaggacagaaaaatggttcgtattgttcttacaaa

SEQ ID NO: 78426 - DNA, 100 bp, Homo sapiens
aatgtagccttggaccgagacatgatgaagaaaggtaacgggaatggcaggactgtggttgagctttgggagcccgggaaggaaggatactggagctggg

SEQ ID NO: 78427 - DNA, 50 bp, Homo sapiens
gctgaagcaggccggctctggcgtccacgaaatgtctttcctccaggacc

SEQ ID NO: 78428 - DNA, 100 bp, Homo sapiens
gaagaaggcatatgttcgactggctcctgattacgatgctttggatgttgccaacaaaggctgccaggcgcccagctgtgcccagatggatgggacagag

SEQ ID NO: 78429 - DNA, 82 bp, Homo sapiens
ccgggagacacagtgtcagaattacaaggatttgcagatttacagaatggctgcacattaatggaaagagaagcataaacct

SEQ ID NO: 78430 - DNA, 75 bp, Homo sapiens
ccctctggcatctctcaaatcgctgacttacctaagatgatatcatcaagttgaatcgaaaggaagggaagaagc

SEQ ID NO: 78431 - DNA, 82 bp, Homo sapiens
ctcaacttctaccagttcctcggggtgcagcaggtggagtctttcattttggatcaggatgatttggaaaatccaatgctgg

SEQ ID NO: 78432 - DNA, 83 bp, Homo sapiens
gagtgcagtttcgatggaaaatgaagttgagccccatatgggggttggcaggcagcagagaggcccctttcaaggtgttcggg

SEQ ID NO: 78433 - DNA, 75 bp, Homo sapiens
cagcacgccagtgagggagatggagaccaatcacccacccagtgtgcggtactccaaagattcaggtttactcac

SEQ ID NO: 78434 - DNA, 83 bp, Homo sapiens
ttactaccactcacccgcagactccttctccagcatgggctcgcctgtcaacgcgcagaatagcctaacatggcagaccagag

SEQ ID NO: 78435 - DNA, 75 bp, Homo sapiens
cctatactttctaccagaagcttgaagggtttggttaagtcatggctccgatcttcatcttgaagaagagtgaca

SEQ ID NO: 78436 - DNA, 73 bp, Homo sapiens
gtggcctccgccaccgtgcacatccgaatggatgcctggaatgatgtcgtcagtaatgcctggaatgatgatg

SEQ ID NO: 78437 - DNA, 100 bp, Homo sapiens
ggccgagccgggatctcaggtcctcgggggcggcggccacgccaaggacggacttaattcagtgcacaaatgagatgaatgtgaacatcccacagttggc

SEQ ID NO: 78438 - DNA, 83 bp, Homo sapiens
tgcttagacgctggatttttttcgggtagtggaaaaccaggttgggcccatgagatgtgtgctctgtatattccggaggtaca

SEQ ID NO: 78439 - DNA, 50 bp, Homo sapiens
catcagcgaccgggagaacatagacggtatgaacgctgccgtccgtgccg

SEQ ID NO: 78440 - DNA, 99 bp, Homo sapiens
gaactggtgaacgcaggatgcgaccaggacaaaactttcggtttgaagaataagaaaggagcaaagcaacagaagtttatcaaggctgtcacacatcaa

SEQ ID NO: 78441 - DNA, 74 bp, Homo sapiens
cgtgctcttggctgcctttgaaaagttggtcagcatcggctcctcttacaactatgggaacgaagaccaagccg

SEQ ID NO: 78442 - DNA, 101 bp, Homo sapiens
gagcagcaggtgcagaacctggacgtccatacatcgataaaaatttccaatgggcaaatactggagcagctgtgtttggaacacagtcagtcggaacccag

SEQ ID NO: 78443 - DNA, 100 bp, Homo sapiens
caggggcgccggggcagcagcgaccccacagtgcagcgctccgtgtttgcatcggtggacaaggtgccagggattaaagcctgtggtttccacagaagca

SEQ ID NO: 78444 - DNA, 82 bp, Homo sapiens
acgccatgtcgggttattcgagtgaccgagaccgcggccgggaccgaggtttttgaaatcatgaatcctgtttatagtcctg

SEQ ID NO: 78445 - DNA, 97 bp, Homo sapiens
ggagagactcctatagcagtcatgggcgagtttttgagagtggatcaagataaagacaaggattgtagcttggactgtgcgggttcgccccagaaac

SEQ ID NO: 78446 - DNA, 100 bp, Homo sapiens
ctgatcaccgtttccagtcattttaaaaattcaggctctgacgcccgctctgcggcttcggtgtttgaacaggccacagtccaggagcgcttacattcag

SEQ ID NO: 78447 - DNA, 129 bp, Homo sapiens
ctgggacatcctgagtggggagcagctgcgggtgttccgggagcaccggggctccgtcatctgtctggagaaccgcatgcacgagtctctcatgctcttcgactccatctgtaacaacaagttcttcat

SEQ ID NO: 78448 - DNA, 100 bp, Homo sapiens
ggagggtccgagccagccgctgttttgccggaggagcccctcaggccaaatacactttcgggaaatggcctctaaatcctggctgaattttttaaccttc

SEQ ID NO: 78449 - DNA, 83 bp, Homo sapiens
tcaattttggggctccctcgggcacctccggtaccgctgcagccaccgcggcccccgcgggtcgagcctcttaggcagagttt

SEQ ID NO: 78450 - DNA, 76 bp, Homo sapiens
ctgagctgcctgtgtctctgcctccttccgcatgtggtcccagacaaatttacatgtattggagaccagaccagaa

SEQ ID NO: 78451 - DNA, 50 bp, Homo sapiens
ctcccgatggcgggagctccaggaaaggctgatcagctgaccgaagaaca

SEQ ID NO: 78452 - DNA, 100 bp, Homo sapiens
ggtagcggcgtctggctgctgcggaccccgccgagtcctagcgcctggcctgcgcgccgctgcccgcgccacagggctggaaacaggattgttgaaatac

SEQ ID NO: 78453 - DNA, 148 bp, Homo sapiens
ctttctccaacgtgagctattacactcgtattctgccctctgtgcctaaagattgccccacacccatgggaaccaaaggtggcttcttctcaacctgtatcttctgagatgtatagggatccatttggaaatccttttgcctaaattc

SEQ ID NO: 78454 - DNA, 74 bp, Homo sapiens
atagcttcctcaagatctggaactaacgccagtaggggaaccccctcggaaggggaagggttgggtgctgacgg

SEQ ID NO: 78455 - DNA, 80 bp, Homo sapiens
cccgggtgtccccgcggcgcaggaggcggtggagcgcagagcgggcgagcgcggtgcgtatagcagcaaaattcatcatt

SEQ ID NO: 78456 - DNA, 101 bp, Homo sapiens
gccgggattcgcggcccggagctcgggaccgtcagaacagtccggccgaagacttccaggagccgtgccagtattcccaggagtcccagaagttctcctgc

SEQ ID NO: 78457 - DNA, 82 bp, Homo sapiens
cgcgccgctgctggttgctgtccctgatgctgaagagtttctggcagaaggtttgcggaatgagaacctcagcgctgttgca

SEQ ID NO: 78458 - DNA, 76 bp, Homo sapiens
caagaagttgaaaaacgcttttcacgtcacctggagagatgcacagtgccggtggtggtgtgcacattgagccccg

SEQ ID NO: 78459 - DNA, 87 bp, Homo sapiens
gactacggtgtgctgttagaaggttctggtcttgcactaagaatgtctactagagtccttttagccactctttccatccctattact

SEQ ID NO: 78460 - DNA, 99 bp, Homo sapiens
cctcctcccccgcctccccctcccccaagggcacccctgagaaagccaatgagatggcccactgcgtgaccttggttcagctgtccatttcctgtgacc

SEQ ID NO: 78461 - DNA, 97 bp, Homo sapiens
ggtcctgaccaccgtgaacggacagtcccccccaggtggatctccttacgtagcagccaaaataaatgaagcaaaagacttgctagaaacaaccacc

SEQ ID NO: 78462 - DNA, 100 bp, Homo sapiens
ccagcttctaccatgccttttcaggagcgcagaaggatgggcaacactccagattcagcctcagacaacctcggtttccgctgtgctgcagacgcaggcc

SEQ ID NO: 78463 - DNA, 88 bp, Homo sapiens
ggggcagcagaagctccagagcccagacttgcaggacatggaggagtgaatcagcttgggggggtttttgtgaatggacggccactcc

SEQ ID NO: 78464 - DNA, 113 bp, Homo sapiens
caagtttcgagccaagggccgcaagccctgcaagctgatgctgcaagtggtcaagatcctggtggtcacggtgcagggggaagacgttttcatcccgctaatcttgggaataa

SEQ ID NO: 78465 - DNA, 100 bp, Homo sapiens
gcagctggtggtacatgaactcttttccagtgtccttcaggagatctgtgatgagggggcaatggcggcttcctgtgttctactgcacactgggcagaag

SEQ ID NO: 78466 - DNA, 50 bp, Homo sapiens
tttgttcaggaaccaccagtgacagaattttaccaaatgttgcaagaact

SEQ ID NO: 78467 - DNA, 87 bp, Homo sapiens
tcgacatccaggcgaactcggcctatcgctaccctccgaagtccgcacctgtggaatcctctcaagaggaacagtcattgtgtgaag

SEQ ID NO: 78468 - DNA, 83 bp, Homo sapiens
atccgaaacacatgacaaagttgctgcactggtcaagaaaagggaggctgatccgatagagtaatacctaattatatcaccat

SEQ ID NO: 78469 - DNA, 100 bp, Homo sapiens
tttaatgtggttggaacaactgagcttaacagagcgttccaaaaagaggactctccagctactttttattgcatcagtatgcagtggtttagagaatggg

SEQ ID NO: 78470 - DNA, 75 bp, Homo sapiens
cagcctcccgagtaggtgggattacagctctgaagatggctgtggtagatatctatcattccaggttaaaggaga

SEQ ID NO: 78471 - DNA, 101 bp, Homo sapiens
tgtcttcagatcttcacagcacagttcctgggaaggtggagccaccagcctctccctggacccagatgatgtggtaccagttggccaaagaagagcctggt

SEQ ID NO: 78472 - DNA, 101 bp, Homo sapiens
tgataacaagggcacacccaggctgcggaccacggttggtgtcgacggatctctttacaagacgcacccacatgctgtcaaagggaaaaccccccaagtag

SEQ ID NO: 78473 - DNA, 100 bp, Homo sapiens
ggcgaagcagctggagaagctggccaagaaggcggagaaggactccaaggcggagcaggccaaagtgaagaagccaatggagatcttcgtggatgatgag

SEQ ID NO: 78474 - DNA, 100 bp, Homo sapiens
cgagcggcgagccggagcgcggagcccggctcccgcaccatggaggaggacgacagctacggaatagacccatctctgcaagcagagaatagaattcctg

SEQ ID NO: 78475 - DNA, 75 bp, Homo sapiens
tgagggggaagggcctcaaagccagaaggtacttgaactggcaggaaatgcatcaaaagacttaaaggtaaagcg

SEQ ID NO: 78476 - DNA, 99 bp, Homo sapiens
atattaatgaaggacaagtacaagttagaactctttatctttctgtggatccttacatgcatgattccacctttccactgatagactcaagttcccaga

SEQ ID NO: 78477 - DNA, 74 bp, Homo sapiens
agctatgcatgctgcttttgatgtctgacaacgtggatcgttgttttgaaactgacttttttgaacgaaccatt

SEQ ID NO: 78478 - DNA, 100 bp, Homo sapiens
ctttacgtcatcttcgattagctaataaccaactgcaattcctacctccagacttaattcagtgcacaaatgagatgaatgtgaacatcccacagttggc

SEQ ID NO: 78479 - DNA, 96 bp, Homo sapiens
tctgcttccatcccgccagtttggataccccatcagcctgagtctcttaaaggcctttatacacatatgtctacacatagggatttggatgatctc

SEQ ID NO: 78480 - DNA, 90 bp, Homo sapiens
cagaacttcaccacacttgaagctgcgaaaacagtgttacaccagaagagcagccggcctcctgtaccgatctccaacgcgaccaaacgc

SEQ ID NO: 78481 - DNA, 83 bp, Homo sapiens
ccggtgtctgctcctgtcgccttcgcctcctaatccctagccactatgaagtccattggaatattaagcccaggagttgcttt

SEQ ID NO: 78482 - DNA, 82 bp, Homo sapiens
acagtcagatctcaggaatggaaggttacacgcatggggagatactctggaggaagcatttgagcaatgtgcaatggccatg

SEQ ID NO: 78483 - DNA, 100 bp, Homo sapiens
tattttgcctgctggaacctgctgtatctactcaagagtggaagttttcacagtctattgcgtctgcagacatggatttcaaccagctggaggcattctt

SEQ ID NO: 78484 - DNA, 75 bp, Homo sapiens
acactggtgataacacaacatttcctgatgctgaagataaagactcccaggaaggaaattacaagtcagaagtca

SEQ ID NO: 78485 - DNA, 50 bp, Homo sapiens
aacttcctcaccagcaccttacagagtcatttgccctggctccatagttc

SEQ ID NO: 78486 - DNA, 100 bp, Homo sapiens
ggcccaggggaccctgtgaaatactgtaaaggtgaactactgagttcttcattatgtctgatggagattatgattacctcatcaagtttttagctttggg

SEQ ID NO: 78487 - DNA, 100 bp, Homo sapiens
gagaggcaccgggatcgtgaccgagaccgtgaccgagagcgtgaccgagagcgcgaatatcgtcatcgttagaagtctctagtgatccctgaaaagttcc

SEQ ID NO: 78488 - DNA, 50 bp, Homo sapiens
cagtttctgtatagtgtaaaagccagcagtatctgttggaaatgttggcc

SEQ ID NO: 78489 - DNA, 96 bp, Homo sapiens
ttggcagcttgatcattggctatgccaggttgtaaagaagaaagttctaccctttctgtcaaaatgaagtgtgattttaattgtaaccatgttcat

SEQ ID NO: 78490 - DNA, 72 bp, Homo sapiens
gaagggccggctgcacctgactttggccaacgtggcttatgttcctgaggaagaattgaaggcagcagaaat

SEQ ID NO: 78491 - DNA, 50 bp, Homo sapiens
cgacagcaacagctctgccggctggaagtttgcagttaacatgtttcgaa

SEQ ID NO: 78492 - DNA, 95 bp, Homo sapiens
cgcaccaggctcatcctgtccatcgtgtgcctgatgatcacgcagctggctggcttcagtggaccacttggtgtaaaaattgccaaagcagttgc

SEQ ID NO: 78493 - DNA, 90 bp, Homo sapiens
gtggagatatggcgcaactgcggcgcctacaaggctttggccgaccaagtgtgtaccatgctgctattgtcatcttccttgaattctttg

SEQ ID NO: 78494 - DNA, 100 bp, Homo sapiens
cacctgcgctgtgatgcctgcagagctgtggcttaccagacaatgcagatcttcgtgaagactctgactggtaagaccatcaccctcgaggttgagccca

SEQ ID NO: 78495 - DNA, 100 bp, Homo sapiens
gagaaatttgctaaagctgtgggacagggttgtgtcgaaattggatcacaggtcctggagttgttaattcaccgagatggggaatttcaagaactaatga

SEQ ID NO: 78496 - DNA, 90 bp, Homo sapiens
caatgcgctcaaaggcaaaaaggcaacctttcccctggatctcacaaaaactcgactccaaatgcaaggagaagcagctcttgctcggtt

SEQ ID NO: 78497 - DNA, 88 bp, Homo sapiens
gatgctcttgttggaagaatactaccagagatcctgaaggagctagacgagtgctacgagcgcttcagtcgcgagacagacggggcgc

SEQ ID NO: 78498 - DNA, 96 bp, Homo sapiens
ggagaaggagaacctgcggctggccctggatgccatgaggtcttgcgccccaggagtcttcagtgtgtgagcctccatctcctgtccaatgacatg

SEQ ID NO: 78499 - DNA, 89 bp, Homo sapiens
ctctacaacgtgcctgcagtggccgaggagattcaggatgaagttgttggctggggaacagaccagggaattggtggatttggagaaga

SEQ ID NO: 78500 - DNA, 89 bp, Homo sapiens
gagatgatccatttcaaggacttgctgctgcacgagaatacgtcgcctacagccacacgggccgcatcatccctgcaatctggttccgc

SEQ ID NO: 78501 - DNA, 82 bp, Homo sapiens
tttcattgtcttttccgcccgcttcgatcgcctcgcgccggctgctctttccgggaatggtcctcgtccgaagtgagaatgg

SEQ ID NO: 78502 - DNA, 90 bp, Homo sapiens
caaggaacagtgccaagttagatgccgattacccacttcgagtcctttattgtggaggtcttccccagggaggtcctgaactacacagct

SEQ ID NO: 78503 - DNA, 97 bp, Homo sapiens
tttgatgactttgcacattatgaaaagcgtcaagaagaggaggaagccatgcgtaggagttgtggaaagtaaaaatgtagccctaccaaaaggaact

SEQ ID NO: 78504 - DNA, 50 bp, Homo sapiens
cggaactcgggcatcatggcctcaggtgcagtagacattgttgcaatcat

SEQ ID NO: 78505 - DNA, 75 bp, Homo sapiens
tagaaactccaatgagagaacgttttaggaatctagatgaagtcattaagaaggcaaatgataccttaaatggaa

SEQ ID NO: 78506 - DNA, 100 bp, Homo sapiens
gcagtgactccttcggagcccctccacaagttccatctaggcctacgagggccccgcccagtgtcccaagatatgaattgagaattcgttatttgccaaa

SEQ ID NO: 78507 - DNA, 75 bp, Homo sapiens
gaaattgagggttcttgccatgaatcaccatgatcgattacttctgctcatcataaacatctagttcctaagcag

SEQ ID NO: 78508 - DNA, 114 bp, Homo sapiens
attaatatcaccaacaatgagagagtggttgtaaaaatcctgaagggaagtgttcgccagttactacatgaaaagataagagatgcttatactcacccacaatttgtgaccgat

SEQ ID NO: 78509 - DNA, 87 bp, Homo sapiens
atgctccagtacatgcagatgacttgagagaaggtgcacagtatttgatgcagggcaccatgccggtggaaaggatgcgcatgcgcc

SEQ ID NO: 78510 - DNA, 51 bp, Homo sapiens
tgaaaaacctgaggctgatgacccaaagaacagcagagaggggcagcagga

SEQ ID NO: 78511 - DNA, 76 bp, Homo sapiens
cacctatggacaagtctataagatgcaggacaagtactccaaaagtggcattgcttgtttcttaaaagaagatgac

SEQ ID NO: 78512 - DNA, 113 bp, Homo sapiens
gccgagccgccaccgcaggtcgaggacggtcggactcccgcggcgggaggagcctgttcccctgaggtcaaaatgcagatcttcgtgaaaacccttaccggcaagaccatcac

SEQ ID NO: 78513 - DNA, 82 bp, Homo sapiens
ttggattgtctgcttcaagccctggctcaaaataagaatgatgaggagcaggaggcactgccatctctggataaacctggct

SEQ ID NO: 78514 - DNA, 100 bp, Homo sapiens
ggtcacaggggccatggccttcgtcgggggtttggtgggcggcccaccgggactcgccgttgacttcccaagtaagaagcggaagaggagccgctggaac

SEQ ID NO: 78515 - DNA, 85 bp, Homo sapiens
actattgtggttggcttctgttacgctaggaatatggcaaaccgtggtgatggtggatgaggcacacgaaaggaccctacacaca

SEQ ID NO: 78516 - DNA, 82 bp, Homo sapiens
ctcaactgtcccagatgaaatccaagagggccgcgatgggcctcttggaacattggtgtgttcatctgcattcgatgtgctg

SEQ ID NO: 78517 - DNA, 98 bp, Homo sapiens
gagagagctctcacatctgtgacttcatccgaaaaacactgaatgctggggcgtactccaaagttgttcaggaacgagcccacaggcggttttgtgag

SEQ ID NO: 78518 - DNA, 49 bp, Homo sapiens
ggacaagcacagtcttcggaaggtttttcgttggaatatacgttgcaca

SEQ ID NO: 78519 - DNA, 100 bp, Homo sapiens
cgggaggcagcggccgcgcggcgctggactggagcagaaccccaggactgcgcccccgggagcgggcgcccagagcccaaagcagtgtccacaccagcac

SEQ ID NO: 78520 - DNA, 75 bp, Homo sapiens
aagcacctggatgagacatttgctacagcatcccacattaagtcaacgcagaagatggctgtgccacccacgtat

SEQ ID NO: 78521 - DNA, 80 bp, Homo sapiens
agaccgggggaggcgacgctaagttgctgatcgtggcggttttgggatttgagattgacgcggtgaactctgtccagttt

SEQ ID NO: 78522 - DNA, 75 bp, Homo sapiens
aacaagtgttgttaaagattctcagcttcttggacacttaatgattgttggcaagaaatgtgctgctgatctggg

SEQ ID NO: 78523 - DNA, 100 bp, Homo sapiens
ggcttgcatttgtttctgctgaccgcgggccctgccctgggctggaacgaccctgatggcccactgcgtgaccttggttcagctgtccatttcctgtgac

SEQ ID NO: 78524 - DNA, 51 bp, Homo sapiens
cgacagcctcctccgagaaggtttccagagtatgatgacctctactgcaag

SEQ ID NO: 78525 - DNA, 100 bp, Homo sapiens
cgggacgggcagctagcgcgaccctgagccggcgcccgtggtccggccatggacgacctcggtactccaaagattcaggtttactcacgtcatccagcag

SEQ ID NO: 78526 - DNA, 100 bp, Homo sapiens
ggccgctgctgctgctgctgctcctggaaaccggtggatggtggagctgagtgccttgtagaaatccgtagcatagtctcagagtcagatgtttcatcat

SEQ ID NO: 78527 - DNA, 100 bp, Homo sapiens
gagggcttggtggatgacaaggaggcctgagtagaccgcaggacaactcaaacttatacatggtcatggagtacgtgcccggcggggagatgttctcaca

SEQ ID NO: 78528 - DNA, 75 bp, Homo sapiens
tgccgaagtatacaatgtaccattggactctcaggtgttgacttcaaaatcaaaactgtagagctaagaggaaag

SEQ ID NO: 78529 - DNA, 82 bp, Homo sapiens
tgcaaggggaggagagaggccgcctcagactcggtgaaatacctggagtgctcagctctcacccagagaggcctgaaaaccg

SEQ ID NO: 78530 - DNA, 101 bp, Homo sapiens
agggaggcgaggttcccgcaccggataggtgtccatcataccccagggcaaggggctccgctacgcacagtacctgccccgggagcagcagctctacaccc

SEQ ID NO: 78531 - DNA, 100 bp, Homo sapiens
ggcgtggtgcgggatggcaaggtgctggcgaacccgcggcggacttacgtcacgcctcctggcacaggtcaaaatgcagatcttcgtgaaaacccttacc

SEQ ID NO: 78532 - DNA, 83 bp, Homo sapiens
caactttcgtttccctctgagggaattgggaggtcggcggccccaaaaggtggcccagttgaaatccttcccttcctctacct

SEQ ID NO: 78533 - DNA, 129 bp, Homo sapiens
aatgtctaaaatatatttgtactggagatttccctcctggaaccaaaggaaatacatttgtacacgatcccaagatgcatttcatcttctcagatacagcggtgcttctgtttgatttctggagtgtcc

SEQ ID NO: 78534 - DNA, 100 bp, Homo sapiens
cattggagaaactggaggtcacctcgaaagttctcaccactaaagttacaatgccatcaagtcatataaaacagaaggaagagctgaacgtttagaggca

SEQ ID NO: 78535 - DNA, 101 bp, Homo sapiens
cttcccagagccggggccaggagccccaagcgccctctagcagcaaacacagaaggggcctcatccacatgctcacccacttggccgaggctctgcaccag

SEQ ID NO: 78536 - DNA, 106 bp, Homo sapiens
cgccgtcgcacgagtctttccttagtaacctgggcgatagctggtgaaaattagttctgctgtgcttaaagctgcggcccatcactatggagctcaatgtgataag

SEQ ID NO: 78537 - DNA, 82 bp, Homo sapiens
gaagactaatgaccgaagcttcaagactttgacatgtgtgaaaacatgaaatggttttttggaacgaagtggatgatgttcc

SEQ ID NO: 78538 - DNA, 82 bp, Homo sapiens
ggcgtccccggcgcgaagaggctggactcggattcgttgcctgagaagaagctcattcacacagaagacccatttaatgatg

SEQ ID NO: 78539 - DNA, 75 bp, Homo sapiens
ctcccagaacataggagaacagggctactcctccacaaactccagtgacagcagatttggagcaagaggtggtgg

SEQ ID NO: 78540 - DNA, 100 bp, Homo sapiens
acgaatatccatgcaacactcagtgcatacaaagtggagttagcagatggatggaactgaggttcaacactctggcaaaatgcccacactgcaaaaaaat

SEQ ID NO: 78541 - DNA, 100 bp, Homo sapiens
ttctccgccatgcaaggctggcgcgtctccatggagcagcagccgctcttctaaaacattcaaaccaaagaagaatatccctgaaggatctcatcagtat

SEQ ID NO: 78542 - DNA, 90 bp, Homo sapiens
ctggtgccacatcctagcccctttccttactggatcctcaaaccagaagaaaacctgaatctctgaggtacaccaggggttggaaaaacc

SEQ ID NO: 78543 - DNA, 50 bp, Homo sapiens
cacctgagccctgacagcaccaagattccaactccacagagtgaccagag

SEQ ID NO: 78544 - DNA, 100 bp, Homo sapiens
ttggtgtcctgtaaaatcacagattatggtaatactgcattgcatgattgtgcagaatctggaagtttggacatcatgaagatgcttcttatgtattgtg

SEQ ID NO: 78545 - DNA, 83 bp, Homo sapiens
ctggatgcaaaaccggatttgccaactctctcaagaatagagatcctagcgatatggtccggcttgctttcacagatgtttcg

SEQ ID NO: 78546 - DNA, 83 bp, Homo sapiens
tgattacttccggtaccttgctgaagttgcgtgtggtgatgatcgaaaacgtttgatcattccggcaaattgtgtgtctcctc

SEQ ID NO: 78547 - DNA, 89 bp, Homo sapiens
gtccagagggtcggcagcggcacctacggggacgtctataaggatcctttgaggttgccttccctgatgctgcggagaaaatgaagaag

SEQ ID NO: 78548 - DNA, 98 bp, Homo sapiens
cctgagcaggaacctggagttttcagattccacctgctcctacgaagcccgactttgatggtcctcgagagaagatgcagaaactgggagaaggtgaa

SEQ ID NO: 78549 - DNA, 100 bp, Homo sapiens
cgaggagcgcttccgcgtggacaggaagaaacttgaggccatgttacaaggttgttcctcaaagtcattcaagctgtactcgccgaaggagcccccgaac

SEQ ID NO: 78550 - DNA, 83 bp, Homo sapiens
tggtgcagagcgccgtctggagccgagatggagccctggtgggcacggcgtgcaaggtctcctctgagcctccggcctccata

SEQ ID NO: 78551 - DNA, 83 bp, Homo sapiens
ctcaatctctggaaaaacttcttgccaaccaaatttgctggcctagacctgaactcttcagataatcagagtggaggaagtac

SEQ ID NO: 78552 - DNA, 75 bp, Homo sapiens
ctgtggatgcgcgtctggtcaagggagcctggggaggggccatggtgccaatgcacttactggggagactggaga

SEQ ID NO: 78553 - DNA, 96 bp, Homo sapiens
cggtgctgcgggatagcaatggaaagagggaataccttggcaagcagctccagtccgagcagccccagaccgctgccgcccgaagctaagcctgcc

SEQ ID NO: 78554 - DNA, 100 bp, Homo sapiens
ctggcggctgctggtagttccatgctgtctgttcagacttcagcttggtgtgtgatgaatgcagactctgctaccattttggctgtttggatcctccttt

SEQ ID NO: 78555 - DNA, 100 bp, Homo sapiens
acagttacagcgagctgcttactatcagaaactgattattgatgagaagaagtattacttatttgggagaaaccctgatttgtgtgactttaccattgac

SEQ ID NO: 78556 - DNA, 82 bp, Homo sapiens
gcctccatcttcggcaccgagaaagacaaggaatagcatttcaaggttcagtggaggagaaccccaagagcaccaaaatgga

SEQ ID NO: 78557 - DNA, 100 bp, Homo sapiens
cttctggctcaatgctgcagagacctgggttgatatatcttccaacactgccgggaaggttggatggcaagcatgtggtgtttggcaaagtgaaagaagg

SEQ ID NO: 78558 - DNA, 100 bp, Homo sapiens
acaaagaagaccacacactgggaaacatcattaaatcgtgagaattatgaagatgatgacctagtaaattctgatgaggttatgaagaaaccatgtccag

SEQ ID NO: 78559 - DNA, 96 bp, Homo sapiens
tagacttcagtggtgtcacctttgcagatgctgctggggccagagaagtggtgcaggtgaggaagaggatggagatgaagatgaggaagctgagtc

SEQ ID NO: 78560 - DNA, 74 bp, Homo sapiens
cctaccccttgcacacctaccctaaggttgctggaggagccagtatgagtcagatttcagaagcactgagccga

SEQ ID NO: 78561 - DNA, 100 bp, Homo sapiens
tgacctgaaggatatgatgctctactgcaagttcaaagggcaggagtgcggccaccaagacttcaccacatgcctagaaagagccatgaagtttgccttt

SEQ ID NO: 78562 - DNA, 98 bp, Homo sapiens
ttggggccctttgggacgagtgctgtgactgtgttgtgtgtcccggcatggatatccggaacaacctcactaggttgcatgagctggagaattgctct

SEQ ID NO: 78563 - DNA, 100 bp, Homo sapiens
tcagcaccctctgcttaccacagccagggtaaacttcatgatccagaaggcatgggaattattccaagaatagtgcaagatatttttaattatatttact

SEQ ID NO: 78564 - DNA, 152 bp, Homo sapiens
caagatgttccctgccctgggcttcggggccaagctgcccccggatggcagagtgtcccacgagttcccactgggcattggcactgatgagaagtgcctcattgagatcttggcttcccggaccaatgagcagatgcaccagctggtggcag

SEQ ID NO: 78565 - DNA, 100 bp, Homo sapiens
tccaagtgtgagaggcaaagtctggagcttagccattggcaacgagttaaatatcacccacggccatgccatgcccattcgctccttgaccttttccccg

SEQ ID NO: 78566 - DNA, 90 bp, Homo sapiens
ctacaggggctgggctggagcccaaatctgcccaagataaggccaaggccacctttgatgccatttctaagacctacagctacctgaccc

SEQ ID NO: 78567 - DNA, 95 bp, Homo sapiens
tgttttctggtgtgctgcaggacatcaattcttcaaggcctgttttactaaatgggacctatgatgtgcagcacgagtacacgagacaggattga

SEQ ID NO: 78568 - DNA, 90 bp, Homo sapiens
gtggaattgctgatagacatgggggcctcaaacgtggagatcaactcctctctgttaatggagtggtcattcagaaatgtaatgcacgtt

SEQ ID NO: 78569 - DNA, 98 bp, Homo sapiens
ggcactcagttggaagagtccagcaagatggaaaatctcaaatgggaggtggatcagaaagaaagagaaatccagtccttgaagcagcagctggactt

SEQ ID NO: 78570 - DNA, 90 bp, Homo sapiens
tggtgccttggttcatccctaagggtcctaaccgggggtttgacatctacaggaaggtgcccaaggaccttacgcagccaacgtacaccg

SEQ ID NO: 78571 - DNA, 100 bp, Homo sapiens
attgagctctcctccaaatgatgctgttggagaattggagcaacaggcatgtactggcattgaaaacattgacgaagctattacattgcttgaacaaaat

SEQ ID NO: 78572 - DNA, 75 bp, Homo sapiens
cttgcaggagatcgagagcaccgacaccgcctgtgtggggcccaccctccgtacatagtggaatgtcatgggatc

SEQ ID NO: 78573 - DNA, 75 bp, Homo sapiens
cttggttaaaacctgacacttttaacagagggaatctggaaaaattgcaatcaaaacatcatttctctaagaaaa

SEQ ID NO: 78574 - DNA, 101 bp, Homo sapiens
caagaagagaatgcaggatgccgctttccacctagaagaagcctaatagtcccagtgaatattgtttttatgtggatagtgatatggtcaatgaattcaag

SEQ ID NO: 78575 - DNA, 75 bp, Homo sapiens
tgttcttccactggcttcatcatccagtattatgcggagtgtcacggcgtcatctacgtcattgactccaccgac

SEQ ID NO: 78576 - DNA, 75 bp, Homo sapiens
cgcggccgcaacgtgtgccgtgctcccgggaccagctgtactggcgctacgatgaccacacgaggcacatggacc

SEQ ID NO: 78577 - DNA, 99 bp, Homo sapiens
ccgccaagatgatgtgcggggcgccctccgccacgcagccggccaccgccgagacccagcacatcgccgaccagttttgctgctgcagcccattgagag

SEQ ID NO: 78578 - DNA, 75 bp, Homo sapiens
acgtgcgaacagctccagctgggtcacaaggcacttaaagcattgttgaggtcattggtaggtcttcaggaagag

SEQ ID NO: 78579 - DNA, 101 bp, Homo sapiens
gaagccgcccgccccccaccgccgccccctccggcgtgttcatgcccccgggcttcggaaccaaaaagaagcttcccagagccggggccaggagccccaag

SEQ ID NO: 78580 - DNA, 75 bp, Homo sapiens
cgtctctctgctgcggcgcggggaccgctgtgctctcggtgtgtgatggatgatgacaatgaagtaagggaccga

SEQ ID NO: 78581 - DNA, 74 bp, Homo sapiens
cgacttcctcacctgccacggcctcaccgtttccgacggctcgggttcatgacgctctcgatattcctgtgcag

SEQ ID NO: 78582 - DNA, 90 bp, Homo sapiens
gatttatgattccctggattatgcaaagaaaaatgaacccaaacatagacttgcaagagtggatgtgaaattggaccccaaggatttgcg

SEQ ID NO: 78583 - DNA, 96 bp, Homo sapiens
gggggctgttcctcagctcccaccctcagcccctgccactagtgagatgaccacgtacgtagagaaatcgacactcttaatgaacgtttagctgct

SEQ ID NO: 78584 - DNA, 75 bp, Homo sapiens
tccagccctgcctcggcggaccaaagggatgcagaaaatgcgattgtgcatatgggcggtcagtggttgggtggt

SEQ ID NO: 78585 - DNA, 82 bp, Homo sapiens
caagcagctgcttgccggccccaacacggaccttgaaacctctgtagaggagcaggatgcaaccgacaggctgtggccggac

SEQ ID NO: 78586 - DNA, 83 bp, Homo sapiens
ctctttcacaggctggatgaagattggggtagttagaaacaaacctgtggcaaggcaggctcctggcaaacggaagtgcaatt

SEQ ID NO: 78587 - DNA, 86 bp, Homo sapiens
gaggcaaggagctaaagcagcgtgcgttcagccctgggcccgagcgggaagaagttccgcagcaagccgcagctggcgcgctacct

SEQ ID NO: 78588 - DNA, 75 bp, Homo sapiens
tggcagcagtgactctgctggctttggcgtatacacaggacaaattgatggccaggagatcactgccaccgccgt

SEQ ID NO: 78589 - DNA, 75 bp, Homo sapiens
gcgcttccgcaccatcacctccacgtgatgatgaacagtctacacagatggctgcaagttgggaagatgataaag

SEQ ID NO: 78590 - DNA, 83 bp, Homo sapiens
cccagagcggggagctgccctcagagaggtggaaccccacgcagaacgtcagcgacttcctgattctcccaggattcatagac

SEQ ID NO: 78591 - DNA, 75 bp, Homo sapiens
ctaatagctggcaaatttctgttccatcagcgtttgtttgagacattagtaaaaaccgcctcttaagtattaaaa

SEQ ID NO: 78592 - DNA, 83 bp, Homo sapiens
tggagcctcagttggaagcagccgatccagcctgcggagcctgtggggcaggtgcccggagcagtgcccaagctgactcgggt

SEQ ID NO: 78593 - DNA, 75 bp, Homo sapiens
cctgaagacaaaaatccagaagtacaagcagtctggtcgagtcccagacaccagaagtctgaatttggagaaggc

SEQ ID NO: 78594 - DNA, 75 bp, Homo sapiens
gcctaagagtgcccatcgcacgctgctccggactatcgcaatgtatctgctgagcaaaaagatgaaaacaaagaa

SEQ ID NO: 78595 - DNA, 83 bp, Homo sapiens
cggacagccgcgcgctgagggtctcggggcgggcgccgcgggacctctccgggccatgggcttgggcactgtttaaaggaaag

SEQ ID NO: 78596 - DNA, 75 bp, Homo sapiens
ccggggagcagtatgccggaagctggttttcaggccacaaatgctttcacaggtcatttggatccaggattccta

SEQ ID NO: 78597 - DNA, 50 bp, Homo sapiens
caagcatataagtggtcaaacaagtgtgctcatgggagcttagaagatcc

SEQ ID NO: 78598 - DNA, 50 bp, Homo sapiens
agactcagaagatgatgctaacagttgagaggagttttgcgtcaccaaac

SEQ ID NO: 78599 - DNA, 98 bp, Homo sapiens
cgcagatgctggagaagtccccttatgaccaggtcagatgtaccaacagtaccagcaacaggccggctatggtgcacagcagccgcaggctccacctc

SEQ ID NO: 78600 - DNA, 101 bp, Homo sapiens
gtttatggcttccagtggaggcattttggggcagaatacagagatatggaatcaggtacttcacatgactggaggttacggtgtggtgctgtggacttgta

SEQ ID NO: 78601 - DNA, 51 bp, Homo sapiens
attccatgtttgcaataataaggcattgatcaatatgacagagatagcatc

SEQ ID NO: 78602 - DNA, 74 bp, Homo sapiens
gccattgctccacaggttggcaatgatccaaaatacggagctggcatatacttcaccaagaacctcaaaaacct

SEQ ID NO: 78603 - DNA, 90 bp, Homo sapiens
cctgatgtgagcagtccctctgacacatccaacttcgacgtggatgacgacgtgctgagaaacacggtgttcccaccaactccagtccgt

SEQ ID NO: 78604 - DNA, 87 bp, Homo sapiens
gacaacggccacacactgtggggacaaattgatggccaggagatcactgccaccgccgtgctggccccctggcctaggccacccccc

SEQ ID NO: 78605 - DNA, 100 bp, Homo sapiens
agagcactggatgatgtgagaaacaggcagcaggatgtgcgggttatcaatactctggctgaccatcatcatcgtgggactgactttggtggaagtcctt

SEQ ID NO: 78606 - DNA, 50 bp, Homo sapiens
gctatcgaaccctctacatcgggacagaacggaaagatgctgaaggatgg

SEQ ID NO: 78607 - DNA, 100 bp, Homo sapiens
gctgcggaggctgcggcccccagggcctctgaaaaatggaaccaaattctctgaggactaaagtcccagctttcttatctgatttggggaaggccacatt

SEQ ID NO: 78608 - DNA, 75 bp, Homo sapiens
ttgccacacaggactcctttgatgatgatgaactggatgcagctgtagcagttgctctaggtcgtaaccagcctt

SEQ ID NO: 78609 - DNA, 82 bp, Homo sapiens
gaaacaagccgtggaataggtgtatcaagtaatggtgcaaagcctgaagccctgacaagccaattgacagatgaagagctag

SEQ ID NO: 78610 - DNA, 75 bp, Homo sapiens
gaaagaaggtgggagcggagagcgcaggcgtggaaggtgctcgggtcttcggggcactgggtcccatcggtccct

SEQ ID NO: 78611 - DNA, 100 bp, Homo sapiens
tggcttaacagagaatctgtgcctgcaagaactgtgtttgtgttgataaggcagatgatgaagatgatgaggatttaacggtgaacaaaacctgggtctt

SEQ ID NO: 78612 - DNA, 74 bp, Homo sapiens
cgctttcagtccttgtggacgattcgcggcttgtggggccgaggacagacacgaaagggggctgtatacagctt

SEQ ID NO: 78613 - DNA, 82 bp, Homo sapiens
gctttgtctccttcgacttggagtctttgtccaggacgggcgaactttctgaccaagtatacaactacccagagggcctagg

SEQ ID NO: 78614 - DNA, 90 bp, Homo sapiens
tttccagcccgtggtccttctccatattcgaggtggagccgccaccaaaatgcagattttcgtgaaaacccttacggggaagaccatcac

SEQ ID NO: 78615 - DNA, 88 bp, Homo sapiens
ctgtttctctgctgcaccgacctcgacgtcttgcctgtgtcccacttgttcgcggcctataggtcatgcaagacaagataatctgcct

SEQ ID NO: 78616 - DNA, 100 bp, Homo sapiens
ggagtggggaagacctgcgtcctttttcgtttttcggatgatgccttcaatactacctttatttccaccataggtatatgtggtcgctatgaatattaaa

SEQ ID NO: 78617 - DNA, 75 bp, Homo sapiens
ccgccgccccctccggcgtgttcatgcccccggggtgcatctgcagacgcagcaggaggtgaagctgcgcatgac

SEQ ID NO: 78618 - DNA, 90 bp, Homo sapiens
cttcactgctaagaggaactaagatctagagtatctcctcgaggaagtacaactgggttgtggacttcctgctgaaggccatcatgcgca

SEQ ID NO: 78619 - DNA, 75 bp, Homo sapiens
tcaaggacatcttcggaggactggctggctgccccgtgatgctggtggttggggataatgcacccgctgaggacg

SEQ ID NO: 78620 - DNA, 90 bp, Homo sapiens
atgaacaaggccagtcctccatttcctcttatctccaacgcacaagatcttgctcaagaggtttatagcattcttcgtcatgttgctgag

SEQ ID NO: 78621 - DNA, 82 bp, Homo sapiens
caagcgcttcgccatcgacatagagctcccagctcctccagcagccgacaggaggcccgtcaagatgcaggcaggcattgcc

SEQ ID NO: 78622 - DNA, 50 bp, Homo sapiens
gcctctcaaagtgctgggattacagatggagtctcactctgtcgcccagg

SEQ ID NO: 78623 - DNA, 71 bp, Homo sapiens
cggcccatcaccggcagaacacagcagggcggaggaaagtgcagttcaacttcctcaattgctttgcctca

SEQ ID NO: 78624 - DNA, 82 bp, Homo sapiens
gttggtgggagccgtgctctacctctatccggttagcatggcctcattgaaagaactagatcaaagactctttgaaaattac

SEQ ID NO: 78625 - DNA, 123 bp, Homo sapiens
agggtggcggcggtcgacatgttccaggtcccggatagcgagggcggccgcgccggctccaggaacttgctactaccagcaccatgccctaccaatatccagcactgaccccggagcagaaga

SEQ ID NO: 78626 - DNA, 75 bp, Homo sapiens
atggaagaagatggaaaaaacttgtttaatggctgctctgttaaaagcgaaaatgaaacaattgcctgcggcaac

SEQ ID NO: 78627 - DNA, 82 bp, Homo sapiens
gaaaaagctgtggaaggctctggataaggaccagtacctgcccaggaaactgttcactagagaaaaaatccttattgcgaga

SEQ ID NO: 78628 - DNA, 101 bp, Homo sapiens
aatggctaaagctacagcaaagcagtcatggttatagctgtagtgaaaaattatccaaagctcagttgacaatgccatttttgtgacaaggcctttatgaa

SEQ ID NO: 78629 - DNA, 83 bp, Homo sapiens
cctgtctgggtctcagccgccaaagaccccgtccggtagagacaagaggagcagcagcggcaccgcccctcaccctggagggt

SEQ ID NO: 78630 - DNA, 74 bp, Homo sapiens
agcggccgccggctcccccacgagggggatatgagactttctactcggaatatcctgagtgttgcgtggatgta

SEQ ID NO: 78631 - DNA, 75 bp, Homo sapiens
gtgaggccggcatcgtctttccgtcctctgaggcgacggccgcggctgcacaggcaatggatcacttggagtcct

SEQ ID NO: 78632 - DNA, 100 bp, Homo sapiens
cttcctacctggagaaggtgcgcgccctggaggaggccaacgctgacctggaggtcgtcagtgaggccacacagcagcagcatgaagtgctctaaagaca

SEQ ID NO: 78633 - DNA, 100 bp, Homo sapiens
gaaaaggctaatggcacaactgtccacgtaggcattcaccccagcaaggtggtagaggacattgaatacctgaagttcgataaagggccgtggctcaagc

SEQ ID NO: 78634 - DNA, 100 bp, Homo sapiens
tccaaagaaattcctcaaacagaatttcacacagggtattccatggagaatgagtgtttcctgaggttataggcgggtgtttgaggagtacatgcgggtt

SEQ ID NO: 78635 - DNA, 100 bp, Homo sapiens
tttttaaaaagaactgttgagttttatcattttcgttaagtgaccgtgcgcagcgctgtaactgagctggagtcagatggcagcactatggaggactatt

SEQ ID NO: 78636 - DNA, 75 bp, Homo sapiens
tcgccacagctgaaggctgcgagggactaagagcagagttgtctgcattcaaaagagcattctattaaagctacc

SEQ ID NO: 78637 - DNA, 100 bp, Homo sapiens
ggtttcttgtgaggacgcggcagcccgtggagtcggctgagggaaaagcgaggcaaggcaggcgggtgctggtgaatctggtaaaagtacaattgtgaag

SEQ ID NO: 78638 - DNA, 75 bp, Homo sapiens
ctttgtcatgtagccaagactggagaaacaatagctgacttttttgaagatgaggcgattgaacagattttgaag

SEQ ID NO: 78639 - DNA, 115 bp, Homo sapiens
ccgccgcccacggcacggcagccaccatggcgctcctgctgtgcttcgtgctcctgtgcggagtagtgggatgaatttcacccattcatcgaggcacttcttccacatgtccgtg

SEQ ID NO: 78640 - DNA, 74 bp, Homo sapiens
caacccctctcacagatccagcagcatcctgccacgggcatttggccatccagtgtcattggtctcagaggcca

SEQ ID NO: 78641 - DNA, 100 bp, Homo sapiens
tccctggggatggcgcatcacacaccaaagggcaacctcctggcttcaggggccagcgattctgaaatcttcatttgggatctgaataacttgaatgtgc

SEQ ID NO: 78642 - DNA, 76 bp, Homo sapiens
caaggcgtgtccagagcattctgctcccataaaagttcatcataatcaaacggtgaaattcgatgctactgtgatg

SEQ ID NO: 78643 - DNA, 74 bp, Homo sapiens
atgaacaaaccacatatgtgttttttgacaacaaaattcaggttactgtaaaatggggaaaggagaaatttgaa

SEQ ID NO: 78644 - DNA, 100 bp, Homo sapiens
atatcgcatcctatggctcaaagaaagatgattatcatgaatgtcagcatcatcattcaaagaacaagaaacattctaagaaatctaaaaaacatcatag

SEQ ID NO: 78645 - DNA, 75 bp, Homo sapiens
cctgtttgtggataagacagtcccacagtccaggccgtcaccgatgggttgtatatactactgaaatgaatggca

SEQ ID NO: 78646 - DNA, 75 bp, Homo sapiens
aaccgtgctgccccgccccgctccacccgtgaggtcaggatggctaaaggtgaccccaagaaaccaaagggcaag

SEQ ID NO: 78647 - DNA, 76 bp, Homo sapiens
ataatgcagaaaatctgagcattcgtgaatctaatcattgagccagaagatcagctgccatgttacttgactcaca

SEQ ID NO: 78648 - DNA, 100 bp, Homo sapiens
ggaaatagtggcaggtgacagtctgcatgtgcagttttcaggtttgggccccatggtatccctgtgacagtatttcccaaaagggaatataaggataaac

SEQ ID NO: 78649 - DNA, 82 bp, Homo sapiens
tgctgagcttggcctcggcgtcctcggggtcagccagcagccggcccggggtgtcagccaccccacccaagtccccggtcta

SEQ ID NO: 78650 - DNA, 98 bp, Homo sapiens
aaaacaggtcataactcctggagaagggattgcccagtcagcaaaggttcagccctccaaggccatcagcatcagcaaagccatcaacacccaggagg

SEQ ID NO: 78651 - DNA, 100 bp, Homo sapiens
ggggagccccaagccttggcgggtccttgcggcgaataggagtctggtcaggcgtcaggctagtccgacgaagagtggttttatcttcaagacactaaaa

SEQ ID NO: 78652 - DNA, 50 bp, Homo sapiens
cgaaaacaccctgcaatctttcagacaggagccatgtgttcacatgtcat

SEQ ID NO: 78653 - DNA, 100 bp, Homo sapiens
tctctcccagatatccggcacccaaagtacaccaaaccgctcacctttgctgactgcattagtgatgagttgccgctaggatgggaagaggcatatgacc

SEQ ID NO: 78654 - DNA, 75 bp, Homo sapiens
tgcaaagtgtccccggcaagaaggggacggcaaaacagaacagaaaggcggagataaaaagaggggtgttaaaag

SEQ ID NO: 78655 - DNA, 98 bp, Homo sapiens
aatgacgaaggggcttcttccagagccaaggaggaagggttgtccggagtgaccagtggttggactcttggcggcgcttaccctgaacctgagtgtta

SEQ ID NO: 78656 - DNA, 90 bp, Homo sapiens
ctaccccacggaggactacaaggtatctccatccagttcctggtgtacaggcgcagcaccgccgcctcggagcttgagcccctcctcccc

SEQ ID NO: 78657 - DNA, 93 bp, Homo sapiens
tggagcctcagttggaagcagccgatccagcctgcggagcctgtggggcagagagaactcgatgccaccgcaacggtattggcgaaccggcag

SEQ ID NO: 78658 - DNA, 74 bp, Homo sapiens
cctcattcaggcccagccctgcttttatcaaaatacaactcaaacctagctactccaatagcaattaaagcagt

SEQ ID NO: 78659 - DNA, 75 bp, Homo sapiens
catccgaggtgcctttctccaaaaggtgtgatgaatgcagactctgctaccattttggctgtttggatcctcctt

SEQ ID NO: 78660 - DNA, 84 bp, Homo sapiens
gcaaccacgtggccagtggcgccggggaggcaggtagggagccattgagacccagagcagcagttctgaagagatagtgcccag

SEQ ID NO: 78661 - DNA, 51 bp, Homo sapiens
aaattgaactaagaaatggagaggttatcaatactctggctgaccatcatc

SEQ ID NO: 78662 - DNA, 101 bp, Homo sapiens
ctcagctctagctgatactacagacagtacaacagggacccgtgacattaaaggatgttattgtggaattcaccaaggaagaatggaagttactgacccct

SEQ ID NO: 78663 - DNA, 75 bp, Homo sapiens
ccgggctgcgccgcgggagttcgaggtttggtgcacctcgatttggaggaagtagggcagggcccttatctggaa

SEQ ID NO: 78664 - DNA, 99 bp, Homo sapiens
ccagaggtcatcccagctccagacgtggacacattttcttccaatggtggttcgagatcagatctctcactgcacagtgaaattgcgccagaccacagg

SEQ ID NO: 78665 - DNA, 90 bp, Homo sapiens
gaagcatgtgtcttccccagctctgcagccacatactatccgtttgttcaggaaccaccagtgacagagggagctgctgttgccccagga

SEQ ID NO: 78666 - DNA, 88 bp, Homo sapiens
cggagagcggcgaggcggcagccacaggatcaagtcttccataccagggaccaggccaaaaccagactgccactgcccctacttgggc

SEQ ID NO: 78667 - DNA, 110 bp, Homo sapiens
agctgaagagcgacaagccgctggcagccgcggatctcaccgccgctcaggttgcctgacctggtaccccagctggggacactctaccagttaatggaaagcagagtcaa

SEQ ID NO: 78668 - DNA, 88 bp, Homo sapiens
aacagtttacagtactcagcaaaagaacatggaatgcctgaaaagcgtgtgaaggcaaagaagaatgctgctccattcagaagtgaag

SEQ ID NO: 78669 - DNA, 95 bp, Homo sapiens
agcaccgcagatgttgtcaaggtggcctaccaggaggccaggggtgtcgccatggcatggtggttttctggaaccttcccactaactcacccctg

SEQ ID NO: 78670 - DNA, 75 bp, Homo sapiens
agaaccatggacaatggaagatgaaaggcacagtcgaatctgtccagatggagtctcgctctgtcacccaggctg

SEQ ID NO: 78671 - DNA, 75 bp, Homo sapiens
ttcgctgtggcgggaagatggccggatttgaagatatctccggagcatttggataatgtgacagttggaatgcag

SEQ ID NO: 78672 - DNA, 90 bp, Homo sapiens
tctttgaactactgccggagcttctgccaggtgctggagaatctggtaaaagcaccattgtgaagcagatgaggatcctgcatgttaatg

SEQ ID NO: 78673 - DNA, 100 bp, Homo sapiens
cattaccctctttattaccattgagccccagctggttcctggagagtccattcgagaaaagctttctaaaaccaatttttccaacaacaacgatttccgt

SEQ ID NO: 78674 - DNA, 97 bp, Homo sapiens
cgcagatgcccaccggaatggagaaggaagaggagtcggtacaatccttggatttaccctccgaccatacagaatgagctaccgggaagtcaagtac

SEQ ID NO: 78675 - DNA, 75 bp, Homo sapiens
ttctggctgtttgaagaaagggagaaggtcttagtcctgggtaacaagcgagaccttccgggagcattggatgag

SEQ ID NO: 78676 - DNA, 76 bp, Homo sapiens
ggaacccgcaccaagctctgctccacactgccaaccggccagaggacgagtgtgactcaaagtcctctggctcaca

SEQ ID NO: 78677 - DNA, 96 bp, Homo sapiens
caaggcgtgaggcgccgcccgggtgtccccgcggcgcaggaggcggtggagcgcagagcgggcgagcgcggttcgagaacttgtcttggacaattg

SEQ ID NO: 78678 - DNA, 100 bp, Homo sapiens
gaaggaggaggcacccacaggctgctgggaggagagcataagttagtaacaggagtatgggaaggcaaatacaacttcttctgtcagggcacacgcaccg

SEQ ID NO: 78679 - DNA, 88 bp, Homo sapiens
atgttgtcaaggtggcctaccaggaggccaggggtgtcgccatgggttggggtctgctaggtccccggaatgagttgtttgacgcagc

SEQ ID NO: 78680 - DNA, 101 bp, Homo sapiens
ttcttggagttgctggtgttctatactggaagaggcatgccagaggtagagcagctgctgtgacttactcgaagcctcgattggccacattttggtactac

SEQ ID NO: 78681 - DNA, 100 bp, Homo sapiens
cgaggccctgctgtctatctacaagcagacccaggctgcctccgcctcccagggctccgcctctgctgctgaagtagagacggggttttaccgtgttagc

SEQ ID NO: 78682 - DNA, 83 bp, Homo sapiens
tggagctgcagaagaatccattgggatatctggagaggcatagaatgtcaagctaaccaggcgtccgctacttcagaagagtg

SEQ ID NO: 78683 - DNA, 75 bp, Homo sapiens
gtcagacccagggctcaacactggcggctggaacataggtactccaaagattcaggtttactcacgtcatccagc

SEQ ID NO: 78684 - DNA, 96 bp, Homo sapiens
cttagaggacttccctttggatgtagcaaggaagaaattgttcagttcttctcagaagtcattgtattcaaagaagaataagcaagaaagaaaaga

SEQ ID NO: 78685 - DNA, 49 bp, Homo sapiens
gcaatttgccatttatttgtaataagtactatactggcaattgctggag

SEQ ID NO: 78686 - DNA, 75 bp, Homo sapiens
cgccatgtggctgctggggccgctgtgcctgctgctgagcagcgccgcggaaccttcgagatctgcggtctgggg

SEQ ID NO: 78687 - DNA, 134 bp, Homo sapiens
gcaaagcggggacccagaccctggagcctcagttggaagcagccgatccagcctgcggagcctgtggggcagcggggatctgatgagcttctttcttctggcatcattaacggaccttttaccatgaatagttc

SEQ ID NO: 78688 - DNA, 100 bp, Homo sapiens
tggagaaggagctgatctccgtggtgatcgctgtcaagatgcagggtgggtatatggctgccaaggtccagaaattggaggaacagtttcgatcagatgc

SEQ ID NO: 78689 - DNA, 100 bp, Homo sapiens
ctgcttggcagcactgggcatccagtaccagacaaggatcctgtacgacacgtacccactctcggaggagacctggcacacacaccagttcaacttcatc

SEQ ID NO: 78690 - DNA, 82 bp, Homo sapiens
ggcttgaactcgcctaaagagctgcgccctctcaatgtgaagttcatttccaatccgccctccatggtggcagcggggagcg

SEQ ID NO: 78691 - DNA, 100 bp, Homo sapiens
ctgaactcaggacttggcaactcaggtgcctaaaaggccagaggggcttctcaggccaacctccttttgatggaatccacattgtcaaccatttaatagg

SEQ ID NO: 78692 - DNA, 76 bp, Homo sapiens
ttggagagctgctgaaacaggcggatctctacatttctgaattgaagattcctgtctctggatccaaatcagaggg

SEQ ID NO: 78693 - DNA, 100 bp, Homo sapiens
ttgatactgacctgtaaatcatcctttaggctcagatccggaacctgaccgtgctgacccccgaaggggaggcagggctgagctggcccgttgggctccc

SEQ ID NO: 78694 - DNA, 75 bp, Homo sapiens
gaatcttcactcccgctgtctcagcagtctacagcacgaatgtgagtgctttgagaggagagaggaagagctttg

SEQ ID NO: 78695 - DNA, 101 bp, Homo sapiens
tggctgaagtgggtgtacctgtttccgtctcccactttgacttgcacgaggagatgctgtgggtggggagccacgggatggagtctcactctgttgcccag

SEQ ID NO: 78696 - DNA, 100 bp, Homo sapiens
ttacaaggaaagaagatcaagctacagatatgcacccttacccttctgaagaacagaaaaagcagttggcacaagacacgggactcaccatccttcaagt

SEQ ID NO: 78697 - DNA, 50 bp, Homo sapiens
caaagtgctggggttacaggcgtgaacaaatagaagctgagggtgaagga

SEQ ID NO: 78698 - DNA, 100 bp, Homo sapiens
ctgagacgcggcggcgcggctgccggctggatgggaagttaatgtttacggcgaagtctactcaacgtttccaagtgaggattatgggaagaactttaag

SEQ ID NO: 78699 - DNA, 100 bp, Homo sapiens
cctggtcaatttgtacctgcaggcctcctacacctacctctctctgtcttactactttgaccgcgatgatgtggctttgaagaactttgccaaatacttt

SEQ ID NO: 78700 - DNA, 82 bp, Homo sapiens
ttgttcccccaaatgtctgactctgactctcggactgagaaacgcaagacccagccgatgcccaatcctgtggcgtactacc

SEQ ID NO: 78701 - DNA, 75 bp, Homo sapiens
cgcccagcctgccgcctcgctgtccctgcggcttctggggttactccacaggatccgctgaacataggatgttgc

SEQ ID NO: 78702 - DNA, 74 bp, Homo sapiens
tggactgtgaagagtgaggagaccatagctgcacagccaggttctgacaacaaaggagattgtgacatattgct

SEQ ID NO: 78703 - DNA, 96 bp, Homo sapiens
tttggatttagcgtttcagaattgcaattccaaaatgtgtaagacgggatattctcttctgtgctgtcaaggggccatgatccaaaggaaccagag

SEQ ID NO: 78704 - DNA, 83 bp, Homo sapiens
caccgccgcccgcgccctcaccaggtgcctcaggaaggtctttccaccgaccctttccgacctgccttgctgtgcccgcagcc

SEQ ID NO: 78705 - DNA, 50 bp, Homo sapiens
ccgcggtccccgctcttgctggtcctaggcctacttacaagcctccagtc

SEQ ID NO: 78706 - DNA, 100 bp, Homo sapiens
aaaaaacaaaaggactgtgggattccattaaaagggcaattgaaggaacagactaaaaatcgtgtcctggaaggaaactacaggtactaccagggatttt

SEQ ID NO: 78707 - DNA, 100 bp, Homo sapiens
agcctggtggggtggcggagggggagactgtgccgtggagggcctcgccatgtcctgctgcccggtatctctgcattagccagattggacatatgtaaag

SEQ ID NO: 78708 - DNA, 50 bp, Homo sapiens
gcgatttcctccgcctcttccaaagcgagaattaccttttccagggacgg

SEQ ID NO: 78709 - DNA, 90 bp, Homo sapiens
tgagcaacatccgcgagttcctgcgcggctgcggggcttccctgcggctggagcctggagtgcagtggcgctatctgggatcactgcaag

SEQ ID NO: 78710 - DNA, 110 bp, Homo sapiens
ccaccactatcgtggagtgcctgcattcctgggagactgtggccgctttctgtctaaccgagccctcaagcgggtcagatgcagcctccatccgaacctctgctgtgccc

SEQ ID NO: 78711 - DNA, 75 bp, Homo sapiens
cttgggccgccgagctggacccggaccggttttgggtctcggacagcccgggagacgagccctcggagtccccat

SEQ ID NO: 78712 - DNA, 100 bp, Homo sapiens
atggatatggtcgtgatcgtgactattcagatcatccaagtggaggttcctacagagattcatatgagagttatgaaatgcccggcgaagccacagaaac

SEQ ID NO: 78713 - DNA, 50 bp, Homo sapiens
tccagatctcgatcatactcacctcaattggcagagggggtcgatttggg

SEQ ID NO: 78714 - DNA, 100 bp, Homo sapiens
gtttacaggccctctattgccaactgttaaatttgctgctgcttccaggagaagtggagcaggatgtaagcaccagcattccttcctgtatcccttttgt

SEQ ID NO: 78715 - DNA, 73 bp, Homo sapiens
ccgccgcagcccaggcgcgggggcgacgacagattttaccaaatgttgcaagaactctggagttcttatggta

SEQ ID NO: 78716 - DNA, 82 bp, Homo sapiens
gacaatccagtttcctgctaatttgcagcttcctccagaaccacgaagctgccctgagacgctcactcacgctgtggggatg

SEQ ID NO: 78717 - DNA, 89 bp, Homo sapiens
tgaaaagatgggaacagcagaaaatcaaaacaagctctttatgagaatggcatctaaggtcctgatgaagttgtagggccagaaggaat

SEQ ID NO: 78718 - DNA, 100 bp, Homo sapiens
acgcgagtgggagcaccaggatctcgggctcggaacgagactgcacgggggattcccgaagtcttccgttttctgagaatgtgagtgctgttcaaaaatt

SEQ ID NO: 78719 - DNA, 100 bp, Homo sapiens
gtctggaagttacttgtggacatggcgcaagcaaactgtcgagtaggagttgcagcactgaatactctagcaggctatattgactgggtgtctatgagtc

SEQ ID NO: 78720 - DNA, 75 bp, Homo sapiens
ttcgcctcgcctcgggacccgcggtccccgctcttgctggtcaaaatgcagatcttcgtgaaaacccttaccggc

SEQ ID NO: 78721 - DNA, 76 bp, Homo sapiens
ggctgctccactggcccctcatgtaacctcagagatctgggcaggccggaagctgagaggaaaagccttttatttt

SEQ ID NO: 78722 - DNA, 100 bp, Homo sapiens
gggcctttccagcccgtggtccttctccatattcgaggttctaaatgagaagaaacttcaagaggttgatagtttatggaaagaatttgaaactccagag

SEQ ID NO: 78723 - DNA, 100 bp, Homo sapiens
cgaatggcatccatttactctgaggaaggcaacattgaacatgccttcatcctctataacaagtatatcacgaaatttggttatgtggattttgaatctg

SEQ ID NO: 78724 - DNA, 82 bp, Homo sapiens
tcctcacctcgctactcgcttgcctacccgccggcccgcgggtctacttcctcaaaggatctgcatctccaatggatactga

SEQ ID NO: 78725 - DNA, 51 bp, Homo sapiens
tgcgttcttggctcttccagcatctcatgttgactggtctgagtgtctcca

SEQ ID NO: 78726 - DNA, 75 bp, Homo sapiens
cccgaaggccctatcaggacatggagtatgaaagacgattgggctaatggatactacagacaacagagaaaactt

SEQ ID NO: 78727 - DNA, 75 bp, Homo sapiens
cagaggccctgctgcacttccggacccactgcttcaactggcactcccccacgctaatgcacaagctgagtgtgg

SEQ ID NO: 78728 - DNA, 90 bp, Homo sapiens
tacctaattgcacggattgctttgaaagccttgatcaggggaaaggtgtaccttccggtttcccagcacggccatcaagatccagttcac

SEQ ID NO: 78729 - DNA, 82 bp, Homo sapiens
cagaagaactgttgaaactagcaacatctataagtgaaaccttggaagagaagttctgcaggctgggaagcccaaggtcgag

SEQ ID NO: 78730 - DNA, 88 bp, Homo sapiens
cagcagcggtttcccaagtttcctgacttcttccatcctctggaaatcagctgtgtccaaaagaaactcttccttcaaaacctgtgaa

SEQ ID NO: 78731 - DNA, 75 bp, Homo sapiens
cttcaagaaatgttcaacaaaacaccaaatgtggttcagttattacaggactctaattatgggagataagaaagc

SEQ ID NO: 78732 - DNA, 100 bp, Homo sapiens
ctccagggtgtcaggactaagagaagtcacaaaacagcagatttcccaagagcagcggaaaatgatccagtcacaggctcccgagccagccgggaggaca

SEQ ID NO: 78733 - DNA, 83 bp, Homo sapiens
ccccactccgcgagaccctggtgcacctcaatcttgctgcgggctgacgcacgaggcacacaggaaggaggtggagcaggtgt

SEQ ID NO: 78734 - DNA, 128 bp, Homo sapiens
gcagtggcagcatggagaaacgcaagtccatgtacacgcgagattataagaagcttgggttcattgtgtcttctctttagggatggtgaggttggaaaaaggctcctgtaaccctcctccaggatgaa

SEQ ID NO: 78735 - DNA, 82 bp, Homo sapiens
cttgcccaagggcttcgcggtgagcgagcgctgcaaggtgacaggccgctgcggctctgtgctggtacgcctcatccctgca

SEQ ID NO: 78736 - DNA, 90 bp, Homo sapiens
accatgccagaccgtggaagatttaacgaatggggttgtgatggcccaggttcttcaaaagatgactggaatgtcacgtggaataccagc

SEQ ID NO: 78737 - DNA, 100 bp, Homo sapiens
tgcaaattcaagaatgaaaaagttcaatcagctcatgaagaaagtaatggaaaagttacacaattctattattccaggttgaagaagcctcagcggaggc

SEQ ID NO: 78738 - DNA, 103 bp, Homo sapiens
gactggaaacaatggcatttacagaaagagtcaacagcagtggcaacaggccagtactaaagtggaagtggacatggagaaagcagaaagcctgcaagtgacg

SEQ ID NO: 78739 - DNA, 95 bp, Homo sapiens
acacggctgtcaagctggcgcgccagagcggcatcgagatgtccagctcgccgctgtccaagaaacgtcgcgtgtccgggcctgatccaaagccg

SEQ ID NO: 78740 - DNA, 98 bp, Homo sapiens
gccatcttccccaactaccaccaagtcctctccatctgatcccatgaccacctccagagctaatcagacggaagctcctcagtcttagagagttctga

SEQ ID NO: 78741 - DNA, 90 bp, Homo sapiens
ctgatcttaagtattatcggtttgctgtctcaactaggtttcatgtccttagcaagctactgagtttcatggcacctattgaccatacta

SEQ ID NO: 78742 - DNA, 98 bp, Homo sapiens
agacgttagcgtgagtgatcactctcaatcccgggttgctgcttttgctcagaggacatccatgaccctaatggtctttttgttcaagataaagtgat

SEQ ID NO: 78743 - DNA, 80 bp, Homo sapiens
ctttgccactgataggaatgacttccggaggaactgtggctgcaccatctgtcttcatcttcccgccatctgatgagcag

SEQ ID NO: 78744 - DNA, 100 bp, Homo sapiens
tacgttttgctggtgttgtccctcccgtggcagttttgctacttgagaagatagaacatgatgacatctgcaataaaactttgaagattacagattttgg

SEQ ID NO: 78745 - DNA, 100 bp, Homo sapiens
tttttcttccttctgtcacatcacacccaatgaatcctcactatggatgggctcattgaggacattaagcatcggcggtattatgagaagccatgccgcc

SEQ ID NO: 78746 - DNA, 134 bp, Homo sapiens
gggagggccccggactccgacggcggctcggacgccgactcggaggtgggtccggggagcccgactcggaccgcggaggctatttgctttctagaagagaaggccaagcagggtctcctgaaaagcctctctcc

SEQ ID NO: 78747 - DNA, 83 bp, Homo sapiens
cctgtctcgccgagcgcacgccttgccgccgccccgcagcaagagtgagccatggagctacgtgtggggaacaagtaccgcct

SEQ ID NO: 78748 - DNA, 98 bp, Homo sapiens
atttgtttctcattctcatatttcaccaataaaggtttccttaatgacaacaaaaaagggagtaatcctacccactgtaagagtcatgactcttgatt

SEQ ID NO: 78749 - DNA, 98 bp, Homo sapiens
tttaccgcaagggcaccatctccttctttgagattgatggacgtaagaacaagcttgagatcttcttagcccagagagcagtggagttgagtgaggag

SEQ ID NO: 78750 - DNA, 90 bp, Homo sapiens
ttcataatggagaccaagctcaaacccctccggaaggtcagctacacaacctggatcttaccacagtttggatatgactgaggctctcca

SEQ ID NO: 78751 - DNA, 82 bp, Homo sapiens
gtcgccctcaaggccatgatcaaaacgcaagagcggtgagcggggcgcctatgcctccttcgggagagacgcaggcgtgggc

SEQ ID NO: 78752 - DNA, 113 bp, Homo sapiens
gcatcagcgtcatcgacagccccggcatcctttctggggagaagcagcgcatcagccgaggtactccaaagattcaggtttactcacgtcatccagcagagaatggaaagtca

SEQ ID NO: 78753 - DNA, 74 bp, Homo sapiens
ggcgacggccgcggctgcacagtattgaatttgaccgggattgtgactattttgcgattgctggagttacaaag

SEQ ID NO: 78754 - DNA, 95 bp, Homo sapiens
gaatggggatctttgcagcctttagaaaaaaagttttagagacagtctttgatgaagtcatcatggtagatgtcttggacagtggcgattctgct

SEQ ID NO: 78755 - DNA, 100 bp, Homo sapiens
ctaggacaaccaatatttccaggggatagtggtgtggatcagttggtagaaataatcaagcttagatggaaaccatttgagattccaaaagcatctcaga

SEQ ID NO: 78756 - DNA, 75 bp, Homo sapiens
cagagaagcaggacctcgggccatggtcccctccagggcaggtgactgaggccgtgaaggtggccattgacgtcg

SEQ ID NO: 78757 - DNA, 75 bp, Homo sapiens
aatcccatcaccaaagggcacattcagatgtttgtgtgcagtttcctcaagggcagagattttgtccatcttgtc

SEQ ID NO: 78758 - DNA, 100 bp, Homo sapiens
gatggaggaagactcgatccgcctgcctgcgcacctgcgtagttggcaaaaaaggagaaagccactaaggtacaaaagacactggacaaccatattgcaa

SEQ ID NO: 78759 - DNA, 100 bp, Homo sapiens
aagaaccagttaactgtacaaactacacagctcatggcctttcagacatcccaggtgaagccatggtgaagctctactgccccaagtgcatggatgtgta

SEQ ID NO: 78760 - DNA, 75 bp, Homo sapiens
actggaggaaatgggctttacagatgtgggcccagaaaacaagccagtcaggttgtatgaaatcttggaattggc

SEQ ID NO: 78761 - DNA, 100 bp, Homo sapiens
catgatgcagatccacgaggatgtcttccccgagccccaggcccgaggaggtcctgaccgggatccagggcctcggtaccagccattccgcctaaccccg

SEQ ID NO: 78762 - DNA, 75 bp, Homo sapiens
agaaagtagtagactacacaacagcgaaggatcttatggttggtgatgaggcaagtgaattacgatcaatgttag

SEQ ID NO: 78763 - DNA, 80 bp, Homo sapiens
gccacggtctgcccacccaacgcgaagacggtaacccgtgtgactttgactggagtgatcagcagctggactgtgccttg

SEQ ID NO: 78764 - DNA, 100 bp, Homo sapiens
cctgaatgtggcttggttgtagaaaccgaagctgaaagactggcatcctcctgggggctttattctgggattatgggcacttattatcatggttttcttc

SEQ ID NO: 78765 - DNA, 80 bp, Homo sapiens
aaaatgacggttataagaccatttatttctttggagacaaaactatgccaggtcagttggatctcttaaggagcaatacg

SEQ ID NO: 78766 - DNA, 74 bp, Homo sapiens
tacatcacaaattatcgtctttatttaagaagtttggaaacgaataacatagctgatccagaagaactgttcac

SEQ ID NO: 78767 - DNA, 100 bp, Homo sapiens
ccaacgaattaggtggtctgactaccagtggctctgcagagatcttatgccttcattcatccggcatggtccaacaattccaagacgaactgatatctgt

SEQ ID NO: 78768 - DNA, 100 bp, Homo sapiens
aagttgaatctgcaaaacttattcgggataaagtagcaggtcacgagaagagaatgccttctagatgcaaaatcacctccaaaccagaccacttttcttg

SEQ ID NO: 78769 - DNA, 100 bp, Homo sapiens
ttcacggagattgtcttctgtgctgtcacctcgaatgagcaggtcaagcctgaagatgaccatggacaagacgggtctcctgctgctcagtgacccagac

SEQ ID NO: 78770 - DNA, 100 bp, Homo sapiens
agctgaaagggtgaagcaagagaatctgaacctcgtctgtattcccacttccttccagctccctccttgggcctgtggattcataatggatacaaattct

SEQ ID NO: 78771 - DNA, 111 bp, Homo sapiens
gaaacccaatctgccatcgaacaagaaataagaatccttctaagggctctcggctcctggagtcctcactgtccagctcagagggagaggagcctgtggagtacaagtcct

SEQ ID NO: 78772 - DNA, 100 bp, Homo sapiens
gatgagaggaacgctcgcccttgtcagctcttaaaccgctctgagtacctggccgtagtcgatgctcctcccctggacctccggttcaacccctcgggct

SEQ ID NO: 78773 - DNA, 74 bp, Homo sapiens
tgcaagacatgtagtaaaagtggttcttcacacacccccattcggcgtagtacccagagagctcaagatgtgtg

SEQ ID NO: 78774 - DNA, 75 bp, Homo sapiens
caggattcagaaatcatggaaagcaggtcatgcaagacaagataatctgccttccgaaaagagtgcagcctgctc

SEQ ID NO: 78775 - DNA, 82 bp, Homo sapiens
ggttacccagcagaccatagagctgaaggaagagtgcaaagactttgtggacagactgcaggatgccggctggaagaccgag

SEQ ID NO: 78776 - DNA, 81 bp, Homo sapiens
atttgaaccatgtttggattgaagccgcctctgtattacttaccagagccaaatctcctcagccacctgttgaagaagaag

SEQ ID NO: 78777 - DNA, 100 bp, Homo sapiens
gacggcattgctctaccaccaacagactttataggccattttatcttcagctgaccaatatgccttttataaattattctattcagaagccctgcagtcc

SEQ ID NO: 78778 - DNA, 90 bp, Homo sapiens
cggagcagcttatgactactgacgtggccgctttggagagtcagcctttattaggattcactgttattcaagttaaagatgagaattccg

SEQ ID NO: 78779 - DNA, 80 bp, Homo sapiens
tagtggacagataacccaagtcaaatctaagcatttaaaagacaggatcatccagcagctcgtcaacggcatcatcacgc

SEQ ID NO: 78780 - DNA, 109 bp, Homo sapiens
cgctcggcggcatagggggcggctccaccgacactacgcggacgcctcctgccgcaggttgaaggtttagaacagatgtggaaaaatgtttacttcagagaaaggggtt

SEQ ID NO: 78781 - DNA, 82 bp, Homo sapiens
gccgccgccgccgccgcccggaccccggcgcgctgaatgcagcaattctgtggtgttcttggtcacacatttatggagtttc

SEQ ID NO: 78782 - DNA, 74 bp, Homo sapiens
cctgccctccttgcaagtagctccagaaataattcaggaagctgaatatggtgggcatgatcagatagatttgt

SEQ ID NO: 78783 - DNA, 75 bp, Homo sapiens
ctaagcaccgttggtatcctcatggacggtgaaccatctgaaaagaccagtcagtggagtgggggacgctccagg

SEQ ID NO: 78784 - DNA, 100 bp, Homo sapiens
tcgcagaacggagcgcccgggatgcaggaggagagcctgcagggccgggctctcgccatgggtcactgtcgcctctgccacgggaagttttcctcgagaa

SEQ ID NO: 78785 - DNA, 82 bp, Homo sapiens
gcccgggctgcggcgtgtgcgcgcccgccagctgctccggagatacggatggatagaatgacagaagatgctcttcgcttga

SEQ ID NO: 78786 - DNA, 74 bp, Homo sapiens
ctcatcccctggatgggggaccacaagatcctcatcgacagtttggaccccaatgaccagaagtctctagaggg

SEQ ID NO: 78787 - DNA, 100 bp, Homo sapiens
tcgtggcgtcgtctgcgaccgctgccttctcggagttctaaagttcctgttgcttcagacaatggatgagcaatcacaaggaatgcaagggccacctgtt

SEQ ID NO: 78788 - DNA, 75 bp, Homo sapiens
ccagttcccatttctgaagaatctgaagagctggatcagaagacattcagcatttttaattggttggggtcagat

SEQ ID NO: 78789 - DNA, 98 bp, Homo sapiens
ggcagcgctcgcgccccgccgctgagccgccggggagccgtccagtcttcgaatcccagttccagtgacttttgtcgacattgctgtgtacttctccg

SEQ ID NO: 78790 - DNA, 74 bp, Homo sapiens
tgctgttgagtatatcaataccctgttcccaaccgagcaagtcaaatttgttggggcataaaggtgaagtggca

SEQ ID NO: 78791 - DNA, 75 bp, Homo sapiens
ccttagcatcttacttcttgtcatttccttatgcgaggcttggctggaggagatgttaaagtaacccatcttgca

SEQ ID NO: 78792 - DNA, 100 bp, Homo sapiens
ggtggcgccgcccggggcgaggcagggccagcagcaggcgggaggccaagtcctgtatctgccatgtctgtggcgtccacctcaacaggctgcattcctg

SEQ ID NO: 78793 - DNA, 75 bp, Homo sapiens
tttcctcacctgcgggaggagatcctcagcggcgccttgcggagggaccccagtgattctggacaaggattaaga

SEQ ID NO: 78794 - DNA, 100 bp, Homo sapiens
cgatttggcagccagatcttcatcgagcacgtggccgatgtggggtggattactgcctgctgagtgaccatggttgtgaatactcctgtgtcaacatgga

SEQ ID NO: 78795 - DNA, 50 bp, Homo sapiens
cgaagcttcacaaaagatgtctaagaaagggtgcactcgccagcagtttt

SEQ ID NO: 78796 - DNA, 75 bp, Homo sapiens
ccacagacggaacaagcatgcagggctatcattaagaaggcttccgatctagagtacaaaatccagagaagaacc

SEQ ID NO: 78797 - DNA, 100 bp, Homo sapiens
tccctcgccagaaactttaaaaggccagaagaaaataaaccggattcagctccctctcatctccaaatctcggttagcactctacgtatatgaatatctg

SEQ ID NO: 78798 - DNA, 76 bp, Homo sapiens
aattttgccgatttcatgactaaccagtgttatctgtgctacaattgcatttggaatggggattgacaaaccggac

SEQ ID NO: 78799 - DNA, 87 bp, Homo sapiens
gccccgccggagaggctgggcggctgccggtgacaggtgagaagccctaccactgcaactgggacggctgcggctggaagtttgcgc

SEQ ID NO: 78800 - DNA, 75 bp, Homo sapiens
ccccaaacagctggtcaccaacgcctgcctcataaaggccagaggcattgatgtgcagcaggtttctttagtcat

SEQ ID NO: 78801 - DNA, 82 bp, Homo sapiens
gcgcagggcctgcagcgggagctggacggcgagcgcgagcggcgcgagaaatcgtccctcatggaccttgctgacgtcttca

SEQ ID NO: 78802 - DNA, 82 bp, Homo sapiens
cctgcgcgcccgcctcggcccgcacgccaagcacgtggtgggctatggccaccttgatgtcatcgcaacagataaagaagac

SEQ ID NO: 78803 - DNA, 94 bp, Homo sapiens
cgccggaggaaagatggaagactaccaggctgcggaggagacaatgcagatcttcgtgaagactctgactggtaagaccatcaccctcgaggtt

SEQ ID NO: 78804 - DNA, 100 bp, Homo sapiens
agcgggtcctacgaggagggctgtcagagcctcatggagtacggtgcacattcaggttcccgagcacaaacatcaagataacgttcactgccctgtccag

SEQ ID NO: 78805 - DNA, 103 bp, Homo sapiens
aaatgattttatcatcaaggcagcagctgttacccttaaatccaggcaactcctagtagtacaacggaagaaacagctacccagaaggaacagtggtttggca

SEQ ID NO: 78806 - DNA, 83 bp, Homo sapiens
tggaagcaggactgcgccgcgtcttcctcaagagctcccagctcctccagcagccgacaggaggcccgtcaagatgcaggcag

SEQ ID NO: 78807 - DNA, 72 bp, Homo sapiens
gctatcaggaccaattacaatgacagatacgatgaggttcaagggcagcaggaaagacgagatcctgggcat

SEQ ID NO: 78808 - DNA, 73 bp, Homo sapiens
ttatagctaagactccaggacacccctgaagccgagaaatgtaattcgccaaaatgacgaacacaaagggaaa

SEQ ID NO: 78809 - DNA, 50 bp, Homo sapiens
tccgagcctttgatttgagtgggattaacctccatttcagctaatcatgg

SEQ ID NO: 78810 - DNA, 74 bp, Homo sapiens
gcggccccagcactcccagctgcgcagggcctgccaggtggcgctcgacctcatagttattcctaggagtcaag

SEQ ID NO: 78811 - DNA, 90 bp, Homo sapiens
gatggcgccaggacgaaggccctactgggcaagcttcttccagaccagctggtcttgcttctggagcatctcttggagcagaagactctg

SEQ ID NO: 78812 - DNA, 82 bp, Homo sapiens
ggcaatgggggcaggagctgttggagctttgcagctgacctacatctcgaagcctatatatgcaaacagatttgcagtacca

SEQ ID NO: 78813 - DNA, 74 bp, Homo sapiens
ctttattgccagcaaaggcgtcaagctggtctccatcggggcagaagacgcaaacatgcagatctttgtgaaga

SEQ ID NO: 78814 - DNA, 100 bp, Homo sapiens
ccgacatcaattacgccaatgtggacggactcactgccctgcaccaggcagggcaagaatcctttcgttccatcacaaggtcgtattacagaggtgcagc

SEQ ID NO: 78815 - DNA, 95 bp, Homo sapiens
cagtgacagtgaaagtgccagtggagaatccaagggcttccaccggagcagctctcgggaaaggctcagtgatgagcctgaacgaactgcgggtg

SEQ ID NO: 78816 - DNA, 50 bp, Homo sapiens
tggaaagacctcacttcaccttaccaggccaacagagcacttatggcaag

SEQ ID NO: 78817 - DNA, 127 bp, Homo sapiens
aaaggaagcaagcagttcagaagagccaaggaataaacatgcaatgaacccaaaagggagcaatttacagcaatgagggatttatacatgaaaaatggacaaggatttgcattagtttattccatca

SEQ ID NO: 78818 - DNA, 75 bp, Homo sapiens
gcagacattacttcaggacaacctcttgggcaggatcgtaaagctgaaaattgaaatcatgaaagtagacaggac

SEQ ID NO: 78819 - DNA, 74 bp, Homo sapiens
caacctcatcgccttcatcatctacgagtttgtcctgggagattgtatggagacaccaactctacaacattacc

SEQ ID NO: 78820 - DNA, 100 bp, Homo sapiens
tccgaatgtcttgtgaagccatgaacgagctctttcagcccaccgtcagcgggatcatccagcacataggatgataatgaagataattcaaatgatggga

SEQ ID NO: 78821 - DNA, 100 bp, Homo sapiens
gggatcggttcctccaggagaagttagcttcagagttctttgtggatggacttgattctgatgagaggctgtattcatcaccaaagaaaaaacttacacc

SEQ ID NO: 78822 - DNA, 98 bp, Homo sapiens
aaaaaataaaaagaagaagaagaaaagcaagatactgaaatgtgatgaacatggatgagagtccaatgaaagcaaacttccttcaaaacatgatagaa

SEQ ID NO: 78823 - DNA, 80 bp, Homo sapiens
gtttgtcccagattttcagtctgataaccaatggagatttacagacagtcatctgggtggaggacacccttttgggatca

SEQ ID NO: 78824 - DNA, 96 bp, Homo sapiens
ctggactctgcttcatttctctgcagcaagaggaaaggaaagatgtgttcgggtttttctagaacacggagattctggacaatcaggaagtccaag

SEQ ID NO: 78825 - DNA, 53 bp, Homo sapiens
tggacttcccagcctccagaactgctgagtcatcactagagagtgggaagggc

SEQ ID NO: 78826 - DNA, 100 bp, Homo sapiens
aatccatcaagctcatcaaaaggtgcacattcaggttcccgagcacaaacatcaagataacgttcactgccctgtccagcgagaagagagagaagcagga

SEQ ID NO: 78827 - DNA, 96 bp, Homo sapiens
aaagatgatagctgtgaccaagtctgcagagtcaccccaggacgattggtgaaagacaacaagtgttagtaacagaagaatcttttgattccaagt

SEQ ID NO: 78828 - DNA, 75 bp, Homo sapiens
aggtggaattatgccctgttggttccaatgctgggattggctgcttttctgcacagccagagaacaacacatcac

SEQ ID NO: 78829 - DNA, 83 bp, Homo sapiens
cagatattcctccccagcatgtcagcatgaccaagcgcctctactacctctggatgtaacccagcttagactagaaagtctag

SEQ ID NO: 78830 - DNA, 100 bp, Homo sapiens
ctctgttccaaatgctttgctgaactgataaatttcaaacggaagagagtggcagcatttagaaagaatctaattgaaatgtctgaactggaaataaaac

SEQ ID NO: 78831 - DNA, 101 bp, Homo sapiens
ggggacacgccaaacctgagtttctacagaaatgagatccgcttcctgcccaacgcactgtgattgccaccaacattctcttggttgatgagatcatgcga

SEQ ID NO: 78832 - DNA, 76 bp, Homo sapiens
atctgcttctatttggaggctggggacctctcaaagatgccgtgagagcaggggcttgttttaccgcttgctgttt

SEQ ID NO: 78833 - DNA, 90 bp, Homo sapiens
caacagatcgtggatctgaaagtgacaagcattttagaaagaaatacaggtatcaggatgaagatacacctcctcaagagcatatttccc

SEQ ID NO: 78834 - DNA, 100 bp, Homo sapiens
cctgcagagaagtctggcaggggtgtgaattctctcttcccttcagggagagcatgttggcagataaattgaacatgactccagaagaagctgaaaggtg

SEQ ID NO: 78835 - DNA, 100 bp, Homo sapiens
gactgttcagtcatgcggagattaaacaccaatgggaatcccaatggggaagtcgatgctggtgcttctcaccttcttggccttcgcctcgtgctgcatt

SEQ ID NO: 78836 - DNA, 100 bp, Homo sapiens
aggacaccgacatggaacagggactcactggggagtctggtgctggcagaaagtagtcctggaagggatagtactgaatattttattgtatttgagcccc

SEQ ID NO: 78837 - DNA, 83 bp, Homo sapiens
ctggaactgctgctgcctgtcatcattgactgctggattgacaatatcagattggtggaacgagaatgcctacacgcagccac

SEQ ID NO: 78838 - DNA, 100 bp, Homo sapiens
caaagctctccttcaggataaggacgtaattgccatcaatcaggaccccttgggcaagcaagggtaccagcttagacagtattgtccttgtgaacttcct

SEQ ID NO: 78839 - DNA, 78 bp, Homo sapiens
gaacttctctcatggaactcatgaggttaaagaagagatgctatttgaagcattagttacaaggaagacggtgacagt

SEQ ID NO: 78840 - DNA, 98 bp, Homo sapiens
gctgaatggccgctacatcagcaacgaatttaaggtggaggcaccatcatgggagcagcattgctggaggactggtgaagggggctttgtctgttgct

SEQ ID NO: 78841 - DNA, 127 bp, Homo sapiens
ataaggaaagttgactgaaaatggggcggaagaaaatacaaatcacacgcataatggatgaaaggaaccgacaggtggtttcagacaccctcacaggttttctaccatgcagcaactgaacatggag

SEQ ID NO: 78842 - DNA, 82 bp, Homo sapiens
cgcgcgactcggcgcccgcccgcgatttggaggccaatcactgccaccttttatttccctgtgggtccaggaactggatttc

SEQ ID NO: 78843 - DNA, 100 bp, Homo sapiens
gggtgagaccctcacttcatccggatcatggggttgacagcagcattttccagaatcctaaaaagcttcatctaactattgggatgttggtgcttttgag

SEQ ID NO: 78844 - DNA, 100 bp, Homo sapiens
gattctcttcagccaatcttcattgctcaagccttgctattttggaagctacaagaaaaaaatagaggaaggaaggtttggtctttttagtggacatggc

SEQ ID NO: 78845 - DNA, 95 bp, Homo sapiens
acattccccacatcttaaaaggttgtatgccagacagatatcaggagcccctggtagcaaatgatatcctcaaccaccccaactttgtaaagaaa

SEQ ID NO: 78846 - DNA, 74 bp, Homo sapiens
aatcagttgttggagaaaattaaagaataacctgggtatcttgtggtctgaaagagaagaaattgaaactgcac

SEQ ID NO: 78847 - DNA, 101 bp, Homo sapiens
atctcggctgtccttcctcccgacggtgggcaagagcagcaagatgctgcagcatattgattacaggatgaggtgcatcctgcaggacggccggatcttca

SEQ ID NO: 78848 - DNA, 113 bp, Homo sapiens
ctggccaaagcctgcccagacggctcacctgtgcgggatggaacaaaagggcgccctgcgtccggcagaggaggcgagcatcccgctcaggtgatgaggaacccctcgcgcac

SEQ ID NO: 78849 - DNA, 75 bp, Homo sapiens
agacagctccctgggcaccaggcagctaacagcaattaccagctctggctgggtcgccacaacttgtttgacgac

SEQ ID NO: 78850 - DNA, 100 bp, Homo sapiens
ccgactcctaagtccttcggccgccaccatgtccgcctcggctgtcttcattctggacgttaagggcaagaggagaaggcagagcccccccaggctatga

SEQ ID NO: 78851 - DNA, 111 bp, Homo sapiens
cagtcctcatcctggatgaagccaccagcgctttggatgccgagagcgagtatctggaggatacgaagcgttttcggcttcctgcccggagctgtgcagcaaacagtcgac

SEQ ID NO: 78852 - DNA, 83 bp, Homo sapiens
gtcattttggctgtgacgaagaacaagaagctccggaattctgtacctggagtagaacagaaaaattattatgtctgtgttcc

SEQ ID NO: 78853 - DNA, 98 bp, Homo sapiens
gctgttagccagaagcctcccttccagtcaggggaatcagagatcattgatttcttcctgggggcctctctcaaggatgaggttttgaagattatgcc

SEQ ID NO: 78854 - DNA, 82 bp, Homo sapiens
cgcggcttgaactcgcctaaagagctgcgccctctcaggtgtccgcaatgttgccagtgtctgtctgcagattggctaccca

SEQ ID NO: 78855 - DNA, 100 bp, Homo sapiens
tttaccaacgccatcaccgacctcatcagtgagctgtccctgctggaggagcgcttccggatcagacactcctctaatttacaaagcagtgcccagctgg

SEQ ID NO: 78856 - DNA, 60 bp, Homo sapiens
ggagaactacatgaacctggcctctgtgggtgcttatgggcaacgttccagaccgggggg

SEQ ID NO: 78857 - DNA, 83 bp, Homo sapiens
caacctcaagatagcggagctgaagctgcgggaggcccccagccccgtgttgacttcaaaatcaaaactgtagagctaagagg

SEQ ID NO: 78858 - DNA, 95 bp, Homo sapiens
ttcgatcccttctctgatttgctgtcagccatgaacggatggatgtgatgcctgctagccaaaaggcatttaaatcaaacggtattgagatggat

SEQ ID NO: 78859 - DNA, 83 bp, Homo sapiens
atgaaatcctggatgcactctcacattgccatcataaactggaactgtggctgcaccatctgtcttcatcttcccgccatctg

SEQ ID NO: 78860 - DNA, 74 bp, Homo sapiens
ctgagtgtgccacacaggtagccctggacggcattcagtgttttggccagaagcctgtcttagatgttcatgca

SEQ ID NO: 78861 - DNA, 100 bp, Homo sapiens
ctcagctccccggcactgcagtctgcagagttctcctggaggcaggggctgctgccttgtttcaccttccatgtcagggacaggctggcctgacatggaa

SEQ ID NO: 78862 - DNA, 82 bp, Homo sapiens
ttcactacgcggcacacacccagctgcctcttccaggatgtggatgaaagggcagccccgagaaccacaggtgtacaccctg

SEQ ID NO: 78863 - DNA, 51 bp, Homo sapiens
cgaatagattatcaaggaaggccatcaggctctgcgaacatcaatagatgc

SEQ ID NO: 78864 - DNA, 100 bp, Homo sapiens
ttcaagctctacctgaccatcatcctgctcctgggtgccgtggcatgtcgatttgtccttcactacaggcagtgtttcggcgatggcttgaactgggctg

SEQ ID NO: 78865 - DNA, 100 bp, Homo sapiens
tggaagggaaagtccctaaaaatcacgagttcaggcgtctgagacttggtgggaacggaccttcctcttagattgttctctggggccggactgagaaatg

SEQ ID NO: 78866 - DNA, 74 bp, Homo sapiens
ggtcttgggtcctccgagagcagcagcgccctgcctctttcttgtcgcagtcagtttcatcatcagatagaaac

SEQ ID NO: 78867 - DNA, 100 bp, Homo sapiens
gccgccgcctcggccgaccagggacctgcccgcctgcggctgctccggttgctgattgttggaggttcttttggtcttcgtgagttttctcaaatccgat

SEQ ID NO: 78868 - DNA, 75 bp, Homo sapiens
gccgatccagcctgcggagcctgtggggcaggttcaacagagtttggaaaagatttctaaactggagcaggaaaa

SEQ ID NO: 78869 - DNA, 96 bp, Homo sapiens
gctggaaccatcagggaacatgagtgaattttggcacaaactgggctgctgtgtggtagagaaaccccagccgggttcttcatgaacatatccaga

SEQ ID NO: 78870 - DNA, 98 bp, Homo sapiens
gaagaaaaagtccttcgtaacaataaaaactttagtactgtagatatccagaagaatggtgttaaatttaccaacagccttttggccataaccagtct

SEQ ID NO: 78871 - DNA, 100 bp, Homo sapiens
tttttcttccacagctatagaactggtccaggttaagctgaatgaacgaataatagccacttcacagggactcctgatccgctctgttcagggttctgac

SEQ ID NO: 78872 - DNA, 82 bp, Homo sapiens
ccggaagcggacggcgtggagtgactatcccaccgccgcgggtggaagttaaacgagctgagcctcgggacagcaagagcca

SEQ ID NO: 78873 - DNA, 100 bp, Homo sapiens
ggacagcccaaggtccaccgagcccgcaaaaccatgtccaaaccaggaaatggacagcctgatctagttgaatctgaagatgtggacctgctgatgaaga

SEQ ID NO: 78874 - DNA, 74 bp, Homo sapiens
ggctgccagtctcctatgtcccctattatctcccctgcccagagatcttgtttccaaggtgctattgggagctc

SEQ ID NO: 78875 - DNA, 100 bp, Homo sapiens
ggaccggctgctgcaggccatcgacccccagagcaacacccaacatgagtgaagtttcctgcaagaaacgggacgactatttggaatggccagagtattt

SEQ ID NO: 78876 - DNA, 89 bp, Homo sapiens
tgaaatgagagaattccaagttattagtgaacagtgacctgggagctgtcatttccctcctgctctggggacgacagctttttgcactg

SEQ ID NO: 78877 - DNA, 100 bp, Homo sapiens
gtaccccttcctgatgatcccggacctgagcagcccgtacctctccaacggacccctgtctcccggaggagcgcgcaccattgctcgctgtaagcagctc

SEQ ID NO: 78878 - DNA, 88 bp, Homo sapiens
ttacttccccggctcagcagggaaagcacaacaccatggagtctctgttagagcgaggtgagaagctagatgacttggtgtccaaatc

SEQ ID NO: 78879 - DNA, 101 bp, Homo sapiens
gcggcgaacgcggagagcacgccatgaaggcctcgggcacggcccaagtctgttttggtggtctgagaggaaaaaagatgagcttctaaagttttgggaaa

SEQ ID NO: 78880 - DNA, 100 bp, Homo sapiens
tggaaacaatggcatttacagaaagagtcaacagcagtggcaacagatccattacaagattttggcttttctgttgaaaagtgttccaagcaattaaaat

SEQ ID NO: 78881 - DNA, 75 bp, Homo sapiens
ccgagcggcgctgtcttttgcctttgccttcctgcgcagggcctggcgatcagaaactaatctggattcactccc

SEQ ID NO: 78882 - DNA, 51 bp, Homo sapiens
cagccctcacctccaagcacttcttcctgtccaagatccggtcccacgtgg

SEQ ID NO: 78883 - DNA, 147 bp, Homo sapiens
gacaagagcatcacgctgccccccgacgagatcttccgcaacctggagaacgccaagcgcttcgccatcgacatagcacatgattaagtaccggtacatcccgttcacacatgggaagagaaggtacagaggcaaggaggatgccgg

SEQ ID NO: 78884 - DNA, 100 bp, Homo sapiens
agagactacagcagctcttcaaggggagccagtttgccattcgctggggctttatccctcttgtgatttacctggctctggtagctgaagaacatctcac

SEQ ID NO: 78885 - DNA, 100 bp, Homo sapiens
gcaagatgagaaaaagaggctccattgtctctaaattgctggcttccatgatgtgcaaagctgactgcgattcctactgcaaggcctccaaggggaagct

SEQ ID NO: 78886 - DNA, 82 bp, Homo sapiens
ctgaagccgaaggtggcagcatggagtcccaggggcagccactggcctcccagcccccggtcgtcgacccctacgacatgcc

SEQ ID NO: 78887 - DNA, 76 bp, Homo sapiens
ctctcgcgcgggtgtcgctgggctgtcggcctggaccttgcagccgcaatgattgtctccagctttaagaccacga

SEQ ID NO: 78888 - DNA, 113 bp, Homo sapiens
attccactcgtggtatgagagtggataatataatcaactcctctgcctgcaatgatgctcctgaggacacgggaaccctggaactcttaaacgccctcaccaaagaccctggc

SEQ ID NO: 78889 - DNA, 90 bp, Homo sapiens
acgcagagctcatcgtccttggcctgacctctcgggacacacccagccctgtggacccagacaccgtggaggtgttgatgacctttgaac

SEQ ID NO: 78890 - DNA, 75 bp, Homo sapiens
tgggatgatgacaatgtagaggatgacttctctaatcagttacgagtgaagtaattgggaaactgttcatttgag

SEQ ID NO: 78891 - DNA, 100 bp, Homo sapiens
ccgggacccccaggacgacgtgtacctggacatcaccgttatttgaaggattgaaggcatttcgaggagtagataataaaattcgactgtttcagccaaa

SEQ ID NO: 78892 - DNA, 97 bp, Homo sapiens
tgtattcgctgtggcttcaacatcaacgttcggggtgtcttggctgggcatgacaaccgcgtcagctgcctgggcgtgactgacgatggcatggctg

SEQ ID NO: 78893 - DNA, 96 bp, Homo sapiens
tcatgaaatcctccccacttatgtttgtaaatgtgagtggaagccatgaggccaaaggcagttgtattgaatgcatggatctcaaaggaaacaaac

SEQ ID NO: 78894 - DNA, 100 bp, Homo sapiens
ggcccccggaaaacctaaccatgaagacttgaacttaatacagcaagaaagaccatcaagtttaccagatgataatgaagataattcaaatgatgggacc

SEQ ID NO: 78895 - DNA, 96 bp, Homo sapiens
ggaagactgaaaggcaaggccatttaaatgtatataaagatgaagcgcagctgtataaagaagagcacctgaggaatcggcagcaccctcactgct

SEQ ID NO: 78896 - DNA, 76 bp, Homo sapiens
ttcatttacaagttattttctcttcttctgaaaaagagatcttggacctgaaggagaagaaggagaaggtggagga

SEQ ID NO: 78897 - DNA, 73 bp, Homo sapiens
agcaaaggaacctctaccagtcgaacagtgtgccacggaccacaatgtggacaacaccacagagatgctgcag

SEQ ID NO: 78898 - DNA, 51 bp, Homo sapiens
gaaggcactgaagcttggggccaaaaagaaccctcggcctcaggaaagtcg

SEQ ID NO: 78899 - DNA, 74 bp, Homo sapiens
ctgacgccccccggcggattgaagagtctgccattgatgaggtgttacagcacatgaaggccgtgcaggcagat

SEQ ID NO: 78900 - DNA, 97 bp, Homo sapiens
catgaaaatccagcagtatgacaaggcactggatgatgcaatcaaagctcgacttctcaatcccaagtggccaaagtaccttctccaggcaaattcc

SEQ ID NO: 78901 - DNA, 96 bp, Homo sapiens
ctgggcgctcagcgaggaccgttagcagcaacagcttctgctcagcatgttggcagataaattgaacatgactccagaagaagctgaaaggtggat

SEQ ID NO: 78902 - DNA, 99 bp, Homo sapiens
agctaccaccctggctgggcctcacacaatggagggtgaaaggtatcaaggttacattggtgcagccctagttttagggggagtagatgttactggacc

SEQ ID NO: 78903 - DNA, 96 bp, Homo sapiens
ggagcttccgggagggcggctcgcaggtgctgatgtatggacagccgtatcgtgttaccttagagcttgagctgccagagtcccctgtgaatcaag

SEQ ID NO: 78904 - DNA, 75 bp, Homo sapiens
cctgcagtacctgcagaaggtctctggagacatcttcagcagtgttctacgcagaaatagaagagctgaaactgg

SEQ ID NO: 78905 - DNA, 75 bp, Homo sapiens
tcacctgtgcgggatggaacaaaagtgggggcccctgaagccactgatggaagccacactaccggggcatcggac

SEQ ID NO: 78906 - DNA, 100 bp, Homo sapiens
gtgaagcgccagcaggagagggttgctccttgagggcaggacagttcttatggctttatccgttgcgtaagcacagagaggtctgcgaggtcaaaactat

SEQ ID NO: 78907 - DNA, 50 bp, Homo sapiens
ttttacttcaagcaggggctgatttagtagtttctctccctggctcatct

SEQ ID NO: 78908 - DNA, 74 bp, Homo sapiens
gccgctgctgtcgctatggagacaggtttatggttggctgtgggagatgtgatgactggtttcatggtgattgt

SEQ ID NO: 78909 - DNA, 82 bp, Homo sapiens
taggcccagtgtaaatggcctagcattagctgaatatgttatttacagaggagaacagatggagtctctctctgttgcccag

SEQ ID NO: 78910 - DNA, 80 bp, Homo sapiens
ggggcgaagaggacgagggggccaaggcttcctccgggaggctgggaggcggcagaatgcagccagaggagggcacaggc

SEQ ID NO: 78911 - DNA, 75 bp, Homo sapiens
tttgcaaatgtggagccccgaactgcagtggcttcttgggtgtaaggccaaagctctgcgtacgtgtcctatggg

SEQ ID NO: 78912 - DNA, 90 bp, Homo sapiens
gggggattctcgacctgctaacagaactggaccttttcgggagtgcatccgccccaacccttttccccctcgtctcctgtgagaattccc

SEQ ID NO: 78913 - DNA, 75 bp, Homo sapiens
cagatcgacaagtccgggagctgggcggccatttaccaggagatggcagcagaaaaggccaaagcagcagccggg

SEQ ID NO: 78914 - DNA, 98 bp, Homo sapiens
atgggagccaacgtctgtcagaagcccagtggtatcctggaacccgagcgtcatgttagggtgaagcagaggacctcagtgctgaacatgctaaggag

SEQ ID NO: 78915 - DNA, 92 bp, Homo sapiens
tgggtcgcagttcttgtttgtggatcgctgtgatcgtcacttgattacaccaccaccttcactgtcagatccacttaaagagctttttcgac

SEQ ID NO: 78916 - DNA, 75 bp, Homo sapiens
gcgtcgtcggcctctgggcagcaggtctcggcgcggaagatggccggcggcgtggacggccccatcgggatcccg

SEQ ID NO: 78917 - DNA, 97 bp, Homo sapiens
ctctgtgaccggcaggcaccgggagatccgtagctcagacgccaggacatcccggaagctgggaaatggacactttcttcatgagcaacaaacccca

SEQ ID NO: 78918 - DNA, 90 bp, Homo sapiens
agattttgtacctcggggacctgctggagacctgccatttccaggccttctggagaatgccacgggtgacctggccaccagcaggaatgc

SEQ ID NO: 78919 - DNA, 99 bp, Homo sapiens
ctctgagggagggtccgagccagccgctgttttgccggaggagcccctcaggccggccggtgcataaacttctcccgagttccatctcagtaaaaggga

SEQ ID NO: 78920 - DNA, 73 bp, Homo sapiens
gatggttcagttgactattgcaaagataccatgctgtgaagtccaggccacatggaggtgtcctgtgtagatg

SEQ ID NO: 78921 - DNA, 50 bp, Homo sapiens
ctaaaatggctgaggagagagtcgcgacgcaatctgcacatcgtgctgcc

SEQ ID NO: 78922 - DNA, 109 bp, Homo sapiens
tgggtagccggctgcgcgtggctggggaggcgaggccggacgcacctctgtttgggggtcctcagtgagaaagatcagtctaaagaaaaggagaagaaagtgaaaaaaa

SEQ ID NO: 78923 - DNA, 83 bp, Homo sapiens
ctcagttggaagcagccgatccagcctgcggagcctgtggggcaggcatgaaagaattactgatgtccttgatcaaaaaaatt

SEQ ID NO: 78924 - DNA, 83 bp, Homo sapiens
ggggagagtgtggcagctgcccttagccctctggcctttctgagaaaagtctacagcattctttctctgcaggttctcttaac

SEQ ID NO: 78925 - DNA, 80 bp, Homo sapiens
tccctctgcggccgtttgtcattcccttcctgaagcacagacgcagtcttcagcaaggaagtgctgggaacgccctggag

SEQ ID NO: 78926 - DNA, 75 bp, Homo sapiens
aaatggatttgctttggctctctgcttatcttttttgccaaatactgatgtttgggcttcctgtagacacccttt

SEQ ID NO: 78927 - DNA, 75 bp, Homo sapiens
ctccctacgatgagaactggttctacacgcgagctgatcctcgttcctagctgcctgccagcgtcctcggcccgg

SEQ ID NO: 78928 - DNA, 100 bp, Homo sapiens
tttaccttcaccttcgctaagaacccagggcagaaaggtttaggtttcagaaggatcccacttggtcagagactggagaccgttatctgttgaaactctt

SEQ ID NO: 78929 - DNA, 100 bp, Homo sapiens
ccccctgccacctcagattttcaatgaaagccagtatcgcggggtttattgaagtcaaaatgtccaaaaaaatcagtggcggttctgtggtagagatgca

SEQ ID NO: 78930 - DNA, 74 bp, Homo sapiens
gcctcgtcgacatgagtgatgtggaggaaaacaacttcgagggcagagtttacccaaggtccagcctagcccct

SEQ ID NO: 78931 - DNA, 50 bp, Homo sapiens
cagtgctcaaactcaccgaccagtttgctggcctagacctgaactcttca

SEQ ID NO: 78932 - DNA, 116 bp, Homo sapiens
agttgaggcaacaggcaacaactgtcctccacatattgaaagtgtggacttaaatgaagaagaaactatattgatcatcaggcgtctacataaggtgttaagaccatttttactaa

SEQ ID NO: 78933 - DNA, 75 bp, Homo sapiens
ttctcttgtttatacagacacgcctaccgcactgaggaacagggaaggagggtgagcggagaattagagtacata

SEQ ID NO: 78934 - DNA, 100 bp, Homo sapiens
gctgtcacaagaccaatatttggtatactgggcacaatccatctggtggcagattcctggagttctgtaaagaaaacggagggtataccgggtgtccctt

SEQ ID NO: 78935 - DNA, 90 bp, Homo sapiens
gctgaaggtgaactgggctgaagcctacaaggagaagatgaaggagctgtcggtgctgtcgctcatctgctcctgcttctacacacagcc

SEQ ID NO: 78936 - DNA, 82 bp, Homo sapiens
caatcagaggactcttagatcaaaatggatttacagcagatgatatcaacaagaaatttaaaagcctgttgattcaagaact

SEQ ID NO: 78937 - DNA, 82 bp, Homo sapiens
ggatactacacctggccaaagaatttgctgattcccttggaattccgtttttggaaaccagtgctaagaatgcaacgaatgt

SEQ ID NO: 78938 - DNA, 98 bp, Homo sapiens
tcggaggcggctgcgagagtggcagaggagctggcggagagcggcctgcgggcgatcgggccgagatttcgccagaagtttgagtatcactactcctg

SEQ ID NO: 78939 - DNA, 100 bp, Homo sapiens
ttcatgtagatactccagaggaaaggagcaatgttcctttagttgggactgggggccttcctttcctacccagggaatctggaaagatgttagaattgaa

SEQ ID NO: 78940 - DNA, 106 bp, Homo sapiens
tcaggaggaacctcagaacatgggtccgtggtcgtttgtttctccaaggtttgaaaagcagctggcctgcaagtagagacggggtttcgccatgttggccaggatg

SEQ ID NO: 78941 - DNA, 101 bp, Homo sapiens
gcgaggccttgcttccttccactcgatgccggtggtggtgtgcacattgagccccggtatagacagttcccccagctgaccagatcccaggtgttccagag

SEQ ID NO: 78942 - DNA, 83 bp, Homo sapiens
aaaattggatgtgaaaatgaagccagaccgaggattctcagcaagttacagaagtatctttgacaactcttgtgaactttgtg

SEQ ID NO: 78943 - DNA, 82 bp, Homo sapiens
gtgctgctgggattcgcgctgctgggcacccacggagcctccggggctggcttcttccccgggagctcgcagggctgcgacg

SEQ ID NO: 78944 - DNA, 100 bp, Homo sapiens
tcatgtgtcctggaaactgggctgggtagagatcaacagcagttcaaggtgactctcctattccatctgtttcttcgggatcatcttcacctctttcagc

SEQ ID NO: 78945 - DNA, 98 bp, Homo sapiens
cggcgcccgcgcctcgggccgtcgggagcggagcctcctcgggaccaggagtgtgaacaagaatgtgaacttgccattactgacctggagagcggccg

SEQ ID NO: 78946 - DNA, 83 bp, Homo sapiens
aagaagtgttctgtcgaaaagaaatcagaaatggaaagtgttttggcccagcacctgaactcctggggggaccgtcagtcttc

SEQ ID NO: 78947 - DNA, 100 bp, Homo sapiens
atgcagccagtagcttggatccttgtgggcatgatccataatcggtttcaagagagtgagtaaaggaatacttaaagcatttggtaattctactgaaaag

SEQ ID NO: 78948 - DNA, 100 bp, Homo sapiens
ctcgacaaagatggggttgtcctctttaagaaggaggcagcatggcgggagctggaggccgagcgggcccagctgcagagtcagctgcagcgtgagcagg

SEQ ID NO: 78949 - DNA, 85 bp, Homo sapiens
tcgtggctgcgtcctctaggccaggacctccggctagcctgtttcagccacctcgtcgtcctggccttggaactgttggaaaacc

SEQ ID NO: 78950 - DNA, 100 bp, Homo sapiens
actgatcaaattgtgagaggaaaacagcctacccgggcatagatggttccccaggggagaagggagaccctggtgatgttgggggaccggtgagtgggaa

SEQ ID NO: 78951 - DNA, 82 bp, Homo sapiens
ttgaatatggtgactaggcaaggggcactttgggctaatactctaggttctctgggcttttgacctttatgaacaaagatat

SEQ ID NO: 78952 - DNA, 87 bp, Homo sapiens
gcaacggagataaattcccggaaccgcgattcggcgtgtcagaaagtttcctacactactgaggtttaggggcactgtgaagcaaaa

SEQ ID NO: 78953 - DNA, 100 bp, Homo sapiens
ctcctgcctcagtctcccaaagtgctggaattacagggataaacttctgcactggaggggcctctcctcccctcgttctgcacatggagctctaatcccc

SEQ ID NO: 78954 - DNA, 94 bp, Homo sapiens
ccgggaggaaggaacgaggcaaggagctaaagcagcgtgcgttcagccctggggaagctcttcgtgggcggtcttgactggagcacgacccaag

SEQ ID NO: 78955 - DNA, 51 bp, Homo sapiens
tgcaggaccgcctggcacacaagctgtccgcaggcttgtccaaaaggaaac

SEQ ID NO: 78956 - DNA, 98 bp, Homo sapiens
ccggcagcaggtggtggggccatgggtggcagcacgcaaagggtgtccctgtccctcaaggggtcatggcctccatgttgctcgcccagcgcctggcc

SEQ ID NO: 78957 - DNA, 95 bp, Homo sapiens
cgctgaggtggcccgtggggcagatgccttcaattaagttgcagagttctgatggagagatatttgaagttgatgtggaaattgccaaacaatct

SEQ ID NO: 78958 - DNA, 75 bp, Homo sapiens
tgggggaactgtgggcgtcttctctccaaagaagcctggtccgacccccagtggcactaacgtgggatcctcagg

SEQ ID NO: 78959 - DNA, 109 bp, Homo sapiens
gacgccatgtcgggttattcgagtgaccgagaccgcggccgggaccgagggtgtggaaacaggaagagaactagaactggaagtaaagcattgaagatgtgactgaatt

SEQ ID NO: 78960 - DNA, 73 bp, Homo sapiens
ctgctgggtccgctgagcggggcgacccgaggttgaaatcacaaagattagacacctttttagataggtgttc

SEQ ID NO: 78961 - DNA, 103 bp, Homo sapiens
gtcattaattggacacagtgccagagtgtatgcactttactacaaagatggacttctctgtacagagtatgtatgtaactgctctgtggttggaagcctgaat

SEQ ID NO: 78962 - DNA, 75 bp, Homo sapiens
gaaaaatcaccttctactgggtggataccaccgaatggtctaaggaaaatggctttgtaaagaagtttgaaccta

SEQ ID NO: 78963 - DNA, 50 bp, Homo sapiens
gcgctttgatttacagcagctgcagcccccaggctccgctcttgccagag

SEQ ID NO: 78964 - DNA, 75 bp, Homo sapiens
ctcggatagaagatggcaaactgtactatgacaaaagatgggtgttgaaagcagcaggggcctagaagacattaa

SEQ ID NO: 78965 - DNA, 73 bp, Homo sapiens
ctggcagcagcatctcagcccaagagaaggtgaccactgactgggaccttcagaagggcactggctgcactga

SEQ ID NO: 78966 - DNA, 75 bp, Homo sapiens
ggcattgacatttaattttagggtcctttatatagaagggagagtagacattcttcttttggccgatgaaaaatt

SEQ ID NO: 78967 - DNA, 82 bp, Homo sapiens
tacatgggttccaaagggctgactgcgaaacggagaggagcggaagaccttctggtgtgggctgggcagcaattcacttgaa

SEQ ID NO: 78968 - DNA, 75 bp, Homo sapiens
gaaaaacagaaaaaagaagaaattctaaagacaacttgtttcatctgtggaaaaatgctcaatatccacccatcc

SEQ ID NO: 78969 - DNA, 80 bp, Homo sapiens
cagttcaggagacagatggccccaagagcccagatccaggttttaaaatcaaagatgggaaaatcggagaaaattgccct

SEQ ID NO: 78970 - DNA, 49 bp, Homo sapiens
atgtagcaataactggaccacaaattcaacacccaacagcttccttaat

SEQ ID NO: 78971 - DNA, 82 bp, Homo sapiens
gcaggaaggactggggccacgtggagctgctggagggagcatcagatccatgctgctgctgactcggagccccacagcttgg

SEQ ID NO: 78972 - DNA, 75 bp, Homo sapiens
tggctgcagtccgtatgctgagaacctggagcaggaatgcggggaagctgagacgcattctcactatgttgccca

SEQ ID NO: 78973 - DNA, 80 bp, Homo sapiens
tacgtctgtgcggctgcgtggggctcggccgcgcggactgaaggagactgaagggagtgcatccgccccaacccttttcc

SEQ ID NO: 78974 - DNA, 100 bp, Homo sapiens
aagcagagttggaaagtgatccaccttacatggaaatgaagactggatacacgtctgtttaactacgcaaaaggtaatgctggcatggcttactgggacc

SEQ ID NO: 78975 - DNA, 100 bp, Homo sapiens
caaatgccagctctgctactatgagaccaagcacacggaggaactggacagccaccttcgggatgagcataaggtggacgtctgatttatgaagctcccc

SEQ ID NO: 78976 - DNA, 100 bp, Homo sapiens
gcggcctcagccctgggcgctggggctcctgctctttctccttcctgggagcctgggcgcaggcctcatggcggtccgagcttcgttcgagaacaactgt

SEQ ID NO: 78977 - DNA, 74 bp, Homo sapiens
ggagctctacgcctcctacgtttacctgtccatgcggtttgctgtgtttcaaagaagggtgctgaccacagtag

SEQ ID NO: 78978 - DNA, 89 bp, Homo sapiens
gactctgtgtgagggaaagaaaacaatttctcctgctctgcagcttctgttcagggtggaagatgtctatggatgtgacattcctgggg

SEQ ID NO: 78979 - DNA, 100 bp, Homo sapiens
agcagtcacatgagccagtacccgatacctctgtggagaaagatttagcatgtagactgctggggcaatcaatggatgaaagtggattaccacagctgac

SEQ ID NO: 78980 - DNA, 83 bp, Homo sapiens
ccctattacaactccctcaaggactgcctttcctgatggcccactgcgtgaccttggttcagctgtccatttcctgtgaccat

SEQ ID NO: 78981 - DNA, 100 bp, Homo sapiens
cagcgctatgcggaggatgttggggccgtcaacaacacagtcactcctggcggcaaaccaaacaaaaccagagtcatctggggaaaagtaactcgggccc

SEQ ID NO: 78982 - DNA, 80 bp, Homo sapiens
gcggagggaccaaggtggagatcaaaccaacgaatcagtattcagcagctcttcactattacctccaggcaggagctgtg

SEQ ID NO: 78983 - DNA, 75 bp, Homo sapiens
gcggagccaatacccgcggcagcagcaccagatgagcagcaccagcagtaagagggctccgaccacggcaaccca

SEQ ID NO: 78984 - DNA, 100 bp, Homo sapiens
gggacgatgtccaaaacaaaaaatggcatcacctgtcaaaaatggagttccacttctccccgcagacctagggaaatgcaataccttatttccagatgac

SEQ ID NO: 78985 - DNA, 75 bp, Homo sapiens
ggagcacttcctattccactggattgggaaagaccatggcaggcatccgtgtacaagatttgcagagaaatgtat

SEQ ID NO: 78986 - DNA, 74 bp, Homo sapiens
tctgctctgcctccggggacaagaaactagagcaaataaccgttttgaaattgctctctatgagaacatgctgg

SEQ ID NO: 78987 - DNA, 100 bp, Homo sapiens
attggaaagtttttttaatgtggttggaacaactgagaggttttaaaagactacatcaagccagatggggaatatttggagttgtttgctcgaaatttac

SEQ ID NO: 78988 - DNA, 74 bp, Homo sapiens
tcgagatttgaaagagctcagacatctggccggagcctcaacagaaagctcctttagttcctcctcctccaccg

SEQ ID NO: 78989 - DNA, 100 bp, Homo sapiens
ggtttctatgcccctctatgcagtcatgtatcctgtgtttaatgaggtgggttgcctatgaaaaagaacattttaaaggccagcagtttctgcttgaaga

SEQ ID NO: 78990 - DNA, 50 bp, Homo sapiens
aagtcttggctttgctgcaggggactcacaccacccggcaagaactgctc

SEQ ID NO: 78991 - DNA, 75 bp, Homo sapiens
tgtctcagcgaagtggtgaaagagcatcagttattcaagcggagaaatgttgctacagcagaagaagaaacagaa

SEQ ID NO: 78992 - DNA, 90 bp, Homo sapiens
tcaacattcgatttattggaggcctacttgcagcatattacctatcaggagaggagccatgctgtgacctacaagcaaactaaatagcca

SEQ ID NO: 78993 - DNA, 100 bp, Homo sapiens
cagagttcaaggaggccttccagctgtttgaccgaacagggtatcagcatggaagccatgagtgagaataaaatggtgccctctgagtttagcacaggac

SEQ ID NO: 78994 - DNA, 100 bp, Homo sapiens
gcgacggcagcggtcccagcggcagcagcagcggcgggaggagcctccggggtttgccaataggattatcctgctgccatcatgtcttggtttgttgatc

SEQ ID NO: 78995 - DNA, 100 bp, Homo sapiens
agaaattcgactatggcaacaagtacaagcggcgggtgccccggacaatgcagatcttcgtgaagactctgactggtaagaccatcaccctcgaggttga

SEQ ID NO: 78996 - DNA, 83 bp, Homo sapiens
ctacaccatggagaacaagcccatcgtcacctgctgacgtgatggcagacagggttccccgctgcccggtctgcaccggcgtt

SEQ ID NO: 78997 - DNA, 90 bp, Homo sapiens
gcggaaactgacattgcgtttccgttgtcggcctcccactgcaggggcggagaaactcatcatccacctgcggaaacatggcatcccctt

SEQ ID NO: 78998 - DNA, 82 bp, Homo sapiens
cggcccggggccccgggatctcggctgtccttcctcccgaagaaaaagtcagcactttttgaagtgtctgaggttataccag

SEQ ID NO: 78999 - DNA, 100 bp, Homo sapiens
aaaatggtggtgcaagtagtgattggagaacaaagaggtgaaggagtattgtatcagcagatgttgcacacaaacttggtataccttgctacaatagcag

SEQ ID NO: 79000 - DNA, 51 bp, Homo sapiens
ccgagctttgcgggaaagcagcggttctgaagaaagtctccaaatacattc

SEQ ID NO: 79001 - DNA, 54 bp, Homo sapiens
ctcggagaagccctcgagcatccccacagcttggagacacatagggcaccgtac

SEQ ID NO: 79002 - DNA, 100 bp, Homo sapiens
caacatcaagtcggcttccatgcatccctaccagcggggcgacgtcgtaaaccaggacgacctgtaccaggccttggccagtggtaagattgcagctgct

SEQ ID NO: 79003 - DNA, 100 bp, Homo sapiens
cccgagaagtacttaaaaaaacattggaattctgcttatctagcctctacggcagacacatgcaggccaacccagaaccaccgaagaagaataatgacaa

SEQ ID NO: 79004 - DNA, 100 bp, Homo sapiens
tcaggtggactgaaggccgctatgatcgaattggtggaaaggttgaagttcaagagctcagaccctaaagacaaggagcatccaagatacctgatcccag

SEQ ID NO: 79005 - DNA, 100 bp, Homo sapiens
cagaagaaacacttcctataaatctcgcccaaacaggaaagaaagtggatctcttcagcctgggaattatcttctttgagatgtcctatcaccccatggt

SEQ ID NO: 79006 - DNA, 75 bp, Homo sapiens
cggcatttaacaaggcggtgtggtttactccatgcagttgtcaggagagctgcaaaggaacctgaagctgtggct

SEQ ID NO: 79007 - DNA, 75 bp, Homo sapiens
agatggcagccagtcagtggtggagtgcgccaatctgcagaacgccattgcggatgccgagcagcgtggggagct

SEQ ID NO: 79008 - DNA, 133 bp, Homo sapiens
gatcaataacttcgactccactatcgggaaaggaatcggtattttttgctgaaccacccttcaaggggaagatggtgaaaggaatgggaggtgctatggatttagtgtccagtgcgaaaaccaaagtggtggt

SEQ ID NO: 79009 - DNA, 83 bp, Homo sapiens
agctcctggccctggccctgatcatcctgctgggcttcgtccagatcgggaaggaatctccggcctgtgaaactgtgagggga

SEQ ID NO: 79010 - DNA, 87 bp, Homo sapiens
agacctgggcaaatgtctgatgaagcatgaggccctagactggagctggttacagacggaagaagaagagcacagctgcctggagca

SEQ ID NO: 79011 - DNA, 75 bp, Homo sapiens
aagacccagaagatgacatatgcaagatctctctaggagctgacactcgaaccttcacgacccattcggattttt

SEQ ID NO: 79012 - DNA, 100 bp, Homo sapiens
caaaagttaaatctactacagggacaagtttcagagctgccactcagatccccgtcgaggtcaagatcaagatccaggtctatttcacgaccaagaagca

SEQ ID NO: 79013 - DNA, 116 bp, Homo sapiens
gagctgcccgcgccatgtccgcgcacaatcggggcaccgagctcggttccaatgattcttgttggtaataagtgtgacttggaagatgaaagagttgtagggaaggaacaaggtca

SEQ ID NO: 79014 - DNA, 123 bp, Homo sapiens
cggaggagcagctcctgcccctgtccgggggatgactgattctcctccgccagctgccaaggggccaagggatgagctggggccctccttcccaatggcatctccccctggtctggaactgaa

SEQ ID NO: 79015 - DNA, 88 bp, Homo sapiens
gaggcccagagatgaccccttatgaaggccacggcgtatgcctccgaggacggggtcctgaccgaggccatgatggacacccgcgtgc

SEQ ID NO: 79016 - DNA, 146 bp, Homo sapiens
tccacccacatgacagcaggagcgatggccgggatcctggagcactcggtcatgtacccggtggactcggtgaaggtcaaaatgcagatcttcgtgaaaacccttaccggcaagaccatcacccttgaggtggagcccagtgacac

SEQ ID NO: 79017 - DNA, 75 bp, Homo sapiens
gcgggcaggagcctggcgaggatgcaccttcccctgccttggaaagacgaaatctcacaaaactgtcccttatct

SEQ ID NO: 79018 - DNA, 101 bp, Homo sapiens
tttctgaacccaaaacatcaaatctgtgtgggaatcgagcatatggaaaatctctggttgaaatcacaaagattagacacctttttagataggtgttcttc

SEQ ID NO: 79019 - DNA, 100 bp, Homo sapiens
tgagggtcgctgtctgcccattgatagaggccagattgtcttggaagttccaaagttgcaacgatttctgacttaaccaccaccatgtcgagcaaaagaa

SEQ ID NO: 79020 - DNA, 80 bp, Homo sapiens
aaccacactaacgagattcaagattatttgcaacagctcacgggagcaagaacgccaacaaatggaattttcttgagcat

SEQ ID NO: 79021 - DNA, 75 bp, Homo sapiens
cacctttggaaaactttaatattaagaatgtcgtacgaatgttgcagatatcaagaaagtcaacaacttcatcag

SEQ ID NO: 79022 - DNA, 99 bp, Homo sapiens
cggagtgctcgctcgcgcctcctaaagctctcagccgagcgcgccgagacccctcagggcggccgcacctgtggaatcctctcaagaggaacagtcatt

SEQ ID NO: 79023 - DNA, 75 bp, Homo sapiens
ccagggcgcattgacagaaaaattgaattcccaccccccaatgaggagttagagatgtttatgattacttccgag

SEQ ID NO: 79024 - DNA, 99 bp, Homo sapiens
ccccaacatcatctgttactagcgagaactcagaagtgttccacgtttcagaggcaggaatgtctgatcacagatacggggatggtggctctactttcc

SEQ ID NO: 79025 - DNA, 75 bp, Homo sapiens
gtgacgggtctggagtgcgtgggggaccggctgttggcgggtctgcaaatgaagagtccagaaaagaagcgaagg

SEQ ID NO: 79026 - DNA, 51 bp, Homo sapiens
agagagatgaagatctacctcaggaatcatcctgatgttgcaagcaaattg

SEQ ID NO: 79027 - DNA, 82 bp, Homo sapiens
ctggcttaggcatgtcctctgaaactgcaagctaattctaaacttatatgaaaatgaaaaggcacttaaataactcacacaa

SEQ ID NO: 79028 - DNA, 98 bp, Homo sapiens
cttaccgaggagatgatccagcttctcaggagccacaggatcaagacaggaaaagaattccatggcaacatcattaaagtgtcctttgccactagaag

SEQ ID NO: 79029 - DNA, 100 bp, Homo sapiens
ggggcctcggagcaaccacccgagcagacggagtacacggagcagcggccccggccccgccaacgctgccgccgggaaactgagcccaattaccaagtcc

SEQ ID NO: 79030 - DNA, 87 bp, Homo sapiens
cgccggccaagctccgccgcgcccgcggcccgcggccgccagtgaagacatttccacctggacacctgaccatgtgcctgccctgag

SEQ ID NO: 79031 - DNA, 75 bp, Homo sapiens
ccaaactcaatcaccaccatctttttacagggtgtttggagaagagggattgaccctgaatcttgaagacgttca

SEQ ID NO: 79032 - DNA, 80 bp, Homo sapiens
ccaggcactccgtcagtgagatggcctccaacaaggaaatctggcattttttaaagtttgcgccccacaaagaggaaata

SEQ ID NO: 79033 - DNA, 75 bp, Homo sapiens
gggcatcgccttgctggcctacgtcgccttgtggacgaatgtggaacctcgctctgtggctgtgttcccttggca

SEQ ID NO: 79034 - DNA, 90 bp, Homo sapiens
ctttccccgcaagatggacggtttcgccggcagtctcgcgagtaaccagctcataaatcacatcgaacagtttttggatactaatgaaac

SEQ ID NO: 79035 - DNA, 101 bp, Homo sapiens
ttcgcaacacaacaatcagatggcaccagggactggcagctccactgccgtcaactcctgttctcctcagagcctgttaagtgggcagaccaacatccacc

SEQ ID NO: 79036 - DNA, 100 bp, Homo sapiens
aaactttctggatgcttatatcaatttaggaaatgtcttgaaagaggcacgcatttttgacaggttttgcagccactcttgatgatgacaaaccttggta

SEQ ID NO: 79037 - DNA, 80 bp, Homo sapiens
ctttggaagcataatggatgtcactgaggaggtgtgggacaaggtgaccaagaatatggcccaggtgaccaaagccctgg

SEQ ID NO: 79038 - DNA, 105 bp, Homo sapiens
ctgggctgtgctggtcacagccacactctgcaccgctaggccgtccccgaccttgcctgaacaaggaactggtgctcctatgtggtgacccgcaccatctcatgc

SEQ ID NO: 79039 - DNA, 100 bp, Homo sapiens
ctatgtttccacatcggtcagaaaaagatgccccttcacagatgtagtcactacaaatcttaaattgcgaaatccatcggatagaaaagtgtgtttcaaa

SEQ ID NO: 79040 - DNA, 82 bp, Homo sapiens
ttcgccctttccacctcgcggcagttcggtgtcagctgtgatgcatgtttaaaaggaaattttcgaggtcgcagatataagt

SEQ ID NO: 79041 - DNA, 83 bp, Homo sapiens
gttcaaggccaagttcctgacagcctggaacaacgtcaagtacgggcatcatgctggtctacgacatcaccaacgagaagtcc

SEQ ID NO: 79042 - DNA, 100 bp, Homo sapiens
agctgagcttgccgcacaaaaagctagagagaaagttcgtcgctgcttcctgtgctccaggagaggacatctcctgtattcctgtccagcccccctttgc

SEQ ID NO: 79043 - DNA, 75 bp, Homo sapiens
aaaccaacaaatgacagttcaagcccagccacagattgccacattagcccaggtcccttctcataccgtcgtggc

SEQ ID NO: 79044 - DNA, 100 bp, Homo sapiens
agaaaagaagccagaggaactcatctcctgtgccgactgtggcaacagtgatccagacatttaatgtggatgcaccatgccagaccgtggaagatttaac

SEQ ID NO: 79045 - DNA, 75 bp, Homo sapiens
agactcctgcccgaggcctggcgtggtagcactagacaaactgaatggatttcagttagagaatttcaccttgaa

SEQ ID NO: 79046 - DNA, 137 bp, Homo sapiens
agttcatccagaaagctttactgatttgcttgtcataaggcagacatcatctgctctaataggaagacccactaccttatctgagacaatgggaaaagctgacatatggcttatgcgaaactcctggaattttaaat

SEQ ID NO: 79047 - DNA, 90 bp, Homo sapiens
ccctctggctcccccgactccgcctccccgctttgcttgtgccatctgcccccatcgaccggtactggacaccctggccatgctgactgc

SEQ ID NO: 79048 - DNA, 50 bp, Homo sapiens
cggcgccctggggccccggagagcatttaccctcccattccaggagagga

SEQ ID NO: 79049 - DNA, 76 bp, Homo sapiens
atcttcttcatttgaactcatagttcagaagctcctagagactacagacagaggatctctgggaaagtttagaaaa

SEQ ID NO: 79050 - DNA, 87 bp, Homo sapiens
tgacgctcctgcctgcgcgcggccaagccatgctcggccccaggaaactactaaagttcctggggaagcaaagtagaatttcataag

SEQ ID NO: 79051 - DNA, 75 bp, Homo sapiens
gcggaaggcattgctgggagcctgaaaactgtgaatgatgtgtatatctcatgattgatatggagaaactagtca

SEQ ID NO: 79052 - DNA, 76 bp, Homo sapiens
tcggggactccttggtccagctcatgcaccagtgcgagggtttccaggtagcctacgtggtgttccagaagccaag

SEQ ID NO: 79053 - DNA, 101 bp, Homo sapiens
ccacacgcaggcggctcgctgtcctgccctacgagctgcggttcaaggagcccttaccggaatacgtgcggctgggggagcgtccctactgctgtgaccag

SEQ ID NO: 79054 - DNA, 74 bp, Homo sapiens
tttgtggccttagctacaggagaggaccaaaatgtctttgactccaagaagaaagtgaaattaaccaatgcgga

SEQ ID NO: 79055 - DNA, 100 bp, Homo sapiens
aagacgggtgatttctgcatttccatctgaggttttgcgtgggaggcggtcccgggatttcaagggtctacgcgcttttctatggcgaatgcaacccgac

SEQ ID NO: 79056 - DNA, 50 bp, Homo sapiens
ggatttttgcatgagacgcttctggacagacgaagtcttgctctgtcacc

SEQ ID NO: 79057 - DNA, 74 bp, Homo sapiens
gagactgcagctgctatgttaagaaaacataccaatattgttgcacagactatggactgctgggacgggcccga

SEQ ID NO: 79058 - DNA, 83 bp, Homo sapiens
caccgaacgatacacacgttggatcaaccagctgacgccggagcagctcctaacccagatgcagtgcaagctgtttgtctttg

SEQ ID NO: 79059 - DNA, 50 bp, Homo sapiens
agccactgcaccgacttcatctggcagcttcatcagccttgagcagtctg

SEQ ID NO: 79060 - DNA, 75 bp, Homo sapiens
cactaatatgaatttaactcagttgaagattgaaaatattgaacttcccatggatacaaaaacaaatgaaagaag

SEQ ID NO: 79061 - DNA, 95 bp, Homo sapiens
agaacaatttgaggtcctaaagcaacaaaaagaaataatagaacaagggatagatttactcaaatccagtacctcaagcaagtccagcagccgag

SEQ ID NO: 79062 - DNA, 82 bp, Homo sapiens
gaaagagcctggcccctgaacctgtgcagttcccagaaatgaatgctatgatcatgcgacggttcagtttgcctggagatgt

SEQ ID NO: 79063 - DNA, 100 bp, Homo sapiens
tgactctccaggtgcaggaccctgccatctatgactccaggtcttcagcacccacccaccgtggtacaggaaggagcaaaggagtatgccatgctccaca

SEQ ID NO: 79064 - DNA, 74 bp, Homo sapiens
ggggaccagctctacatctctgagaaggagtggacatatcaggccatggtccacgaactactaggcataaacaa

SEQ ID NO: 79065 - DNA, 100 bp, Homo sapiens
ggaatcatggcggctgcgctgttcgtgctgctgggattcgcgctgctgggcacccacggagcctccggggctgtggacgcggatgtcctcctggaggcct

SEQ ID NO: 79066 - DNA, 99 bp, Homo sapiens
aggccactccggagcgcgcgctgttcccgcgaagcgagtcgccgtctcgtattggggttagacttggaggaactcgaggagatagaagaagatgctggc

SEQ ID NO: 79067 - DNA, 100 bp, Homo sapiens
aggagaagtaccaggaggcgttggccaaggagcctcagctcaaaggcatcgtcaccaaactgttctgccgccagggtttctacctccaggcgaatcccga

SEQ ID NO: 79068 - DNA, 82 bp, Homo sapiens
tatggaaagcttgcagaagattatgccagtgaggctgagaatagagtccccatctgctttgatatgattgaagaagcataca

SEQ ID NO: 79069 - DNA, 75 bp, Homo sapiens
acctcaatgatgatgatgtcacaggttctgtgaaaagtgaaagggttaatacaatctgttggaatgacactggag

SEQ ID NO: 79070 - DNA, 99 bp, Homo sapiens
gtttgatacagcatgtgttaccaagctgtttcctaccaggtcacacactgttgcagcgcaggtcgtttggactgggagactcttgtgcacgaaaatctg

SEQ ID NO: 79071 - DNA, 75 bp, Homo sapiens
gcaaactgggcgtctgttccggcgccggacccctatttgcaaagagagctggcggtcaccatggcaatgcgggag

SEQ ID NO: 79072 - DNA, 90 bp, Homo sapiens
gtgaagctgggaactgatctagaatatacttccaggtggagggataccgccaatgacaatgagggccactcggatggcctggcaagaaga

SEQ ID NO: 79073 - DNA, 141 bp, Homo sapiens
caccgggatcgtgaccgagaccgtgaccgagagcgtgaccgagagcgcgaatatcgtcatcgttagaagggtgttactatcgttaaaccaatagtttacggtaatgttgctcggtattttggaaagaaaagagaagaagat

SEQ ID NO: 79074 - DNA, 90 bp, Homo sapiens
acggacggcgcgtcctgctgaccccagccggcgccgagggcttggaatctcgagcgggaaaaggtaaacagattcaagtgttatcgggcc

SEQ ID NO: 79075 - DNA, 82 bp, Homo sapiens
tgactctgactctcggactgagaaacgcaagatggggacccagagcctgctcttgggaacagccagagtaagattggaaccc

SEQ ID NO: 79076 - DNA, 100 bp, Homo sapiens
ctttgcctgtacttgtgcccctggctaccgacccggaccccgcggagcctcttgcctcggacgacttcaaagagggctacctggagacagtggcggctta

SEQ ID NO: 79077 - DNA, 100 bp, Homo sapiens
gtgaagattccaagttcaggagaactcgaccggatgaaattgattctgcagtaaagatgttggtgtcattaaaaatgagctacaaagctgccgcggggga

SEQ ID NO: 79078 - DNA, 100 bp, Homo sapiens
cgccgctcgttcactccaccgccgccgccgccgccgccgctgccgctgccgctgccgcacctccgtagctgactcggagccaaaaacctgtatatcatct

SEQ ID NO: 79079 - DNA, 100 bp, Homo sapiens
ctgatgaaaattctcttcattctcttggactgaacttaaatactgataggtactaggttttgacaagcttgcatcatgcgtgagtataagctagtcgttc

SEQ ID NO: 79080 - DNA, 99 bp, Homo sapiens
ttatgggctggatacaaaatggggtgacatcgagcagtggatgcttcgcctcaacagcatcaagaagctgtccaccatcgccttggcccttggggttga

SEQ ID NO: 79081 - DNA, 98 bp, Homo sapiens
atgctgcgttcattccttttggagacatcacagatattcagattcctctggattatgaaacagtgaatattacttcagtgtagaaaatttggaacgag

SEQ ID NO: 79082 - DNA, 90 bp, Homo sapiens
aaaacttgcagagcaacggcgccgttgggataatgatgatatgacagtgccggtggtggtgtgcacattgagccccggtatagacagttc

SEQ ID NO: 79083 - DNA, 89 bp, Homo sapiens
gccgcgctctgggcacagccttggaaagtcaggaccgcgacggcagcagagcagtgtcatggagaaactccagctgggcccagagattc

SEQ ID NO: 79084 - DNA, 90 bp, Homo sapiens
cgaggagcggcaggacgagcatggctacatctcccggtgcttcacgcggaaatacacgtagcacaagtaaccgctccagcacccggagcc

SEQ ID NO: 79085 - DNA, 87 bp, Homo sapiens
ggaagaggtagaggacgatactctgaccgttttagtagtcgcagacctcgaaatgatagacgtgattcgcctttgccagtctcatct

SEQ ID NO: 79086 - DNA, 88 bp, Homo sapiens
gcgtagtcatcatggatctgattttaaaccgaatggattatctgcagggatggtgtctgttttggacttgatgcagggtggttaccca

SEQ ID NO: 79087 - DNA, 100 bp, Homo sapiens
ttttgaggttcatttaaccccaaaatcagtgattctacatctcaagctcatattttgaagtgtttacggcctttgaagtaaattttatggatgatgtagg

SEQ ID NO: 79088 - DNA, 75 bp, Homo sapiens
tcgagaagctccagatggcgtcttccgtgggcaacgtggccgacagcacagagtaacagttacccctcaatgagc

SEQ ID NO: 79089 - DNA, 82 bp, Homo sapiens
gaaagttgaacagaacgcggctcccagccacaccaagttcaggcaagctctttttggagaccatgttaagaaaccccagagc

SEQ ID NO: 79090 - DNA, 100 bp, Homo sapiens
acaactggaaaacagctttttgatcagggcagcctgcactcagatggctccagcgggggcagcagtggcaatacccatgatgactttgttatgatagact

SEQ ID NO: 79091 - DNA, 82 bp, Homo sapiens
aaggaaataggatttaaccgctctctgcctcccaggtatcgagaaccttccctgcgaacttcagaggaacttccagctgatg

SEQ ID NO: 79092 - DNA, 98 bp, Homo sapiens
gaaacaaaagggtatttcttttctctcttcagcccccaacccagtggagcagtcccagctatctgacttcatgtgaaagatggctaatgcagaagtga

SEQ ID NO: 79093 - DNA, 100 bp, Homo sapiens
tcattctacagtgtttcagatgacaatgctccctctccttatatgagtgaacacaacatgctcccttggtctctgcaaccatcgattcctaacagcctag

SEQ ID NO: 79094 - DNA, 110 bp, Homo sapiens
ctttcaaaagtcaacccttcacagactcataataatatgtatgcctgggggcaggaaaacggacgatgtattactaagctggaaaacatggggtttcgagtgggacaagg

SEQ ID NO: 79095 - DNA, 101 bp, Homo sapiens
attgttgtgaacctcacaggcaggctaaacaagagtatctttagaagatctgtataatggcaagacaaccaaactacaacttagcaagaatgtgctctgta

SEQ ID NO: 79096 - DNA, 90 bp, Homo sapiens
cggaaccgcgattcggcgtgtcagctgtgttccagatcatctccctggtaatttaccccgtgaagtacacccagaccttcacccttcatg

SEQ ID NO: 79097 - DNA, 75 bp, Homo sapiens
ataaaaagatgcacaagcaccaaaagcaccacaagtaccacaagcatggcaaggaggcaagtgaggcctatctgg

SEQ ID NO: 79098 - DNA, 75 bp, Homo sapiens
ggaggttcgagcgctgttctcgctccggagccgctgcacatttcgcttataggctttatactgtggtgcctcgcc

SEQ ID NO: 79099 - DNA, 90 bp, Homo sapiens
attagcagaaaacttttaaatgcaaaacactcagagaaatcaccaccttctacagattgctcatttagaaagtggatgtgtgggataaca

SEQ ID NO: 79100 - DNA, 100 bp, Homo sapiens
ctggacattcactaaagtccctggatctggtcaccatgaaaaagctggacagtaaggatggtgccatgacaatggtgtgaactacaagattggagagaag

SEQ ID NO: 79101 - DNA, 88 bp, Homo sapiens
agaggaggggcaacctgagttatcagaaagtgacttcctggccttcccttctttactgatcaggcatagaatgtcaagctaaccaggc

SEQ ID NO: 79102 - DNA, 98 bp, Homo sapiens
agagcagcgggagcggcgcggggaagggggcggtgtccgcagagcagggcatgatcgcactgcgcaggggtgccacggagctcacccacgaggactac

SEQ ID NO: 79103 - DNA, 100 bp, Homo sapiens
ctccattacactgctgagtcacacacaacgcttgttatgttttcatcacttctctccagaagccacaccatatcctggtggatttaaatgtttcacctgt

SEQ ID NO: 79104 - DNA, 101 bp, Homo sapiens
cgccggagccggggcggtgattgcagccccagacagccggcgctggctgtggtcggtgctggcggcggcgcttgggctctaatttcgctaaggagtttgtg

SEQ ID NO: 79105 - DNA, 97 bp, Homo sapiens
tggagaggccgagggtttgatgaaggtggaggcagcgcggctctcaggtgtcatggagaaactccagctgggcccagagattctgcagcgggaaaat

SEQ ID NO: 79106 - DNA, 50 bp, Homo sapiens
atccccgcggacgccacagcgctccgctgccatggcccagacactgcaga

SEQ ID NO: 79107 - DNA, 82 bp, Homo sapiens
gattcagccagcacactcctcgcgagcaagtgctgaagctgctgaaagatggcagaagaagtggtggtagtagccaaatttg

SEQ ID NO: 79108 - DNA, 75 bp, Homo sapiens
ttccacagatgtgtcaccaaaccaggcagctgttaaatctaagaaagctacagatacctataaactctatgtgga

SEQ ID NO: 79109 - DNA, 98 bp, Homo sapiens
gcgctgcgcatccccgcggacgccacagcgctgtctcctctgagcctccggcctccataagacccaaaacagatgacacctcttcccagtcccccgcg

SEQ ID NO: 79110 - DNA, 100 bp, Homo sapiens
gagaaagagcgcgagcgagcgaggcctgggccttgcctgaggatacctgggatgaactcctaattggtagtgtagaagtgaaaaaggtaatggcatgccc

SEQ ID NO: 79111 - DNA, 75 bp, Homo sapiens
gtgatgaaaaacacccacctgaaaatatcattgatgggtagtgggcagcagtcagtgacaggtgtaacctctgtg

SEQ ID NO: 79112 - DNA, 98 bp, Homo sapiens
gacgcactggaccgactggagaccctgggcccccagggctcatgggcgagaagggcaagcttggggtgccaggcctcccaggttatccaggacgccct

SEQ ID NO: 79113 - DNA, 82 bp, Homo sapiens
cgtgcacagtagatccctcccggcttcccggcttcccgtctcgtcaccctctggaagccagttgagggaagttctccatgaa

SEQ ID NO: 79114 - DNA, 100 bp, Homo sapiens
gtcgcagacctcgaaatgatagacgctgctcctgctaaggccaagccggctgaagctcctgctgctgcagccccaaaagcagaacctacagcagcggcag

SEQ ID NO: 79115 - DNA, 74 bp, Homo sapiens
atcaagcaggcagcgggctttgccagcaaaaccgaaacaggactctgcccttgtccacaaggagagcacacagg

SEQ ID NO: 79116 - DNA, 83 bp, Homo sapiens
cctgagaggcagctctaaagcacaagacctggatgtgtgacacacagttttggaaaaaggtggatcagtacaagggaaagcgg

SEQ ID NO: 79117 - DNA, 74 bp, Homo sapiens
gcccctccgagctggggttggacgctgccagtttgcacagcagcagcccccaaatacatcaagatgtttgtact

SEQ ID NO: 79118 - DNA, 73 bp, Homo sapiens
ctgaacaaaagaagctggaagccgcagaccttgtgatattccaggtcgagctgtgtttagagtgcatcgaatg

SEQ ID NO: 79119 - DNA, 74 bp, Homo sapiens
aatttcttatatagagacctattcactgcaatgattattgggaagcacttggagaatatttagatgggaagaag

SEQ ID NO: 79120 - DNA, 100 bp, Homo sapiens
ctagtcgctgcaacactcctctacagtttgagacatctccagttacagcccgaacactggaaactctgattcgactggccacagcccatgcgaaggcccg

SEQ ID NO: 79121 - DNA, 96 bp, Homo sapiens
ggtaggagcagcaatttatccgtgtgcagccccaaactggaaagaagatgctaattaaagtgaagtttagaaacctgctgaagtggtatgctaagg

SEQ ID NO: 79122 - DNA, 51 bp, Homo sapiens
gtgaggcctccccagccatgtggaactacggggtctcactctgtcgcccag

SEQ ID NO: 79123 - DNA, 90 bp, Homo sapiens
gaaaactcatattgatgattacagcacatgggacatagtcaaggctacacatgttcagcctcacaggcctacaacaaatccaaacacttc

SEQ ID NO: 79124 - DNA, 50 bp, Homo sapiens
agaaaagctcacagccttcaaaggtcatctttaacagtgtggagaagttc

SEQ ID NO: 79125 - DNA, 83 bp, Homo sapiens
cttgtgggagcaaaaccaacgcctggctcggagcagcagcctctgagacctcctgccccccgaggtctgcagtctcctgaacc

SEQ ID NO: 79126 - DNA, 75 bp, Homo sapiens
agtcagatgtctgtgatgaggggtcagagtaacagttacccctcaatgagcgacccctacctgtccagctattac

SEQ ID NO: 79127 - DNA, 75 bp, Homo sapiens
agcgccctgagagaacagggtggccgcttggtccagattgcccaaggactccagatactccaaataatgaccctc

SEQ ID NO: 79128 - DNA, 100 bp, Homo sapiens
gtttgaaatgatcattaatcctggagataatgtcctcctagatgaacctgcttattcaggaactcttcaaagtgcccaagaggatgctgagaaacttcgg

SEQ ID NO: 79129 - DNA, 83 bp, Homo sapiens
ccgggctccgggaaaactacactggccagatcaacagtacaaattctgaagtttgtaaacttgctgatggtggtggtaagcca

SEQ ID NO: 79130 - DNA, 100 bp, Homo sapiens
gccaaaagtggaggatcctatgcctgaatctaaggccacggaaaggtatgatatatttgatccaagacagtccattccagtccgggaatctacagtggtg

SEQ ID NO: 79131 - DNA, 99 bp, Homo sapiens
agagcaaagggagtgacaaagactttgtgattgtccgcaggcctaagctaaatcgagagaactttccaggaatggcggcgctagatagtaaggcatcag

SEQ ID NO: 79132 - DNA, 82 bp, Homo sapiens
tcagctcagtgctgtgcgggccagttccagggtctccctccactgctgtagtaacccgggtccggggcctcggtggtgctcc

SEQ ID NO: 79133 - DNA, 82 bp, Homo sapiens
aggggggctttggcaccgtcttcgcaggacaccgcctcacagatcgactccaggacaaagccaaaggccccttgttagctgg

SEQ ID NO: 79134 - DNA, 132 bp, Homo sapiens
gccgggagccgcggcccggaatcggggcgcttcgccccgggccccccagcatgaagaccccggcggacacaggtcgcaatggaagaagagatcgccgcgctggtcattgacaatggctccggcatgtgcaaa

SEQ ID NO: 79135 - DNA, 50 bp, Homo sapiens
ccgagcgggagtggcctcgttggagatctataaggacaggcagaaattct

SEQ ID NO: 79136 - DNA, 75 bp, Homo sapiens
tcagaagattataacaagatgactcctgtgaaaaactatcaaggttgtaaagctctctgaaatagtgaccttagc

SEQ ID NO: 79137 - DNA, 99 bp, Homo sapiens
gcagaagctctgaatcgtgttcctgaatgaaagaagtcaggcgtcgattagcaaggtaaaagtaacagaaccatggctcagtttccaacaccttttggt

SEQ ID NO: 79138 - DNA, 75 bp, Homo sapiens
ccgccagagaggcccgcccaccagttcgcccgtccccctgccccgttcacaatggacaggctggcctgacatgga

SEQ ID NO: 79139 - DNA, 83 bp, Homo sapiens
cagacgcacacgcataccccagcgcccggcagttatgtattctccgctctgtctcacccagatcaatgtccgagttaccacca

SEQ ID NO: 79140 - DNA, 78 bp, Homo sapiens
ccccggctgccctaggggccaggaccggcgtgacagcctccagtgacactacctgagaagcctgttaaactagcttca

SEQ ID NO: 79141 - DNA, 82 bp, Homo sapiens
cgcgggcactgctttccactcggctcctgtcgtccgttctctcaggctcccgttcagggcgaactttctgaccaagtataca

SEQ ID NO: 79142 - DNA, 89 bp, Homo sapiens
cggatagcgtggagtgacggtgccaccgcggcgcgttaaatgtaaacctaaagtgggttacatgaagaaacagccagacatcactaaca

SEQ ID NO: 79143 - DNA, 88 bp, Homo sapiens
agctgcaccgtgcggctgctggacgacagcgagtacacctgcaccatccagggagttctgggaaatcgttcattcatttacagatgaa

SEQ ID NO: 79144 - DNA, 74 bp, Homo sapiens
cttccgggagctctttgggatccggccagatgattacttgagcactgcagtttcctcctgaaggctggctccgg

SEQ ID NO: 79145 - DNA, 100 bp, Homo sapiens
gcctgcgtaactttctcccttgatccgggagtctttccactggatttcgccgccagctttctgaaccctgtaactcctttcctcctttgccgacgatgcc

SEQ ID NO: 79146 - DNA, 50 bp, Homo sapiens
agactctcggctatggagtccccatgttgcacccagtcagcttgaagagt

SEQ ID NO: 79147 - DNA, 75 bp, Homo sapiens
acgacccacgagatcatggggcccaagaaaaagcacctggactacctctgtgagtgaaagccttcagagggaagc

SEQ ID NO: 79148 - DNA, 100 bp, Homo sapiens
tggtaagaatggtgcctgtcctgctgtctctgctgctgcttctgggtcctgctgtcccccaggagaaccaagatgctcttcctgctgcccacattcctgc

SEQ ID NO: 79149 - DNA, 100 bp, Homo sapiens
gatgcccaccatgcggaggaccgtgtcggagatccgctcgcgcgccgaaggacagaataacgggctcccagattcacaagccccaccaagaggatcaccc

SEQ ID NO: 79150 - DNA, 100 bp, Homo sapiens
ctccctccgccaggacccgcacaggcataatcaccagcaacacccgggacaataatacgggggccacctacccccacctgaacttcagcattcccatcac

SEQ ID NO: 79151 - DNA, 90 bp, Homo sapiens
aggacgactgggaccgggacctgctgctggacccggcctgggagaagcagcagcgcaagggtgtcaaattgagaaccaggtagatcccca

SEQ ID NO: 79152 - DNA, 100 bp, Homo sapiens
acattcactggtgcaactgcccaaagaaattcggagggcagcactgtgaaataggccattttgctgcagaggatgtgaaggccaagcttcacgagctgaa

SEQ ID NO: 79153 - DNA, 50 bp, Homo sapiens
ctgggccaaggtgaatcaggagacatgttttgagcgcctgctgtgtctca

SEQ ID NO: 79154 - DNA, 100 bp, Homo sapiens
aactaagaccaaggtcaattgaagtagaaaatgactttctgccggtagaaaaggtggatggaatggatatcctgtgcgtccgagaggcaacaaggtttgc

SEQ ID NO: 79155 - DNA, 100 bp, Homo sapiens
gcgagacaacagcagcaacttctgcaacagcagcacaaaattaatctcctgcagcaacagatccagccataaccagcagaccacagcattcaggcatcct

SEQ ID NO: 79156 - DNA, 110 bp, Homo sapiens
tagacatgatggagggagaccacacagtgatgtctaacagttctgttatccatttaaaaccacattcagcaactagttcctgaatataaggaaaaacagacacctgaaag

SEQ ID NO: 79157 - DNA, 96 bp, Homo sapiens
tagatctggactccgacccggcgccagatttcctcgtcctgtgactgtggagcccatggaccagttagatgatgaagagggacttccagagaagct

SEQ ID NO: 79158 - DNA, 49 bp, Homo sapiens
gcgactggctgctgcggcgcgagggagccaagtttacatctgatcctgg

SEQ ID NO: 79159 - DNA, 100 bp, Homo sapiens
ccatgccgctcctaagcctgcacagccgcggcggcagcagcagtgagaggcactgccgccctgcactgtagcagatgcctaaataaagtgtggagcctga

SEQ ID NO: 79160 - DNA, 120 bp, Homo sapiens
tgctgggctccggggacactttgcgttcgggctgggagcgtgctttccacgacggtgacacgcttccctggattgggggttcctggtggccttgcagtatggttttgccaatggagaggt

SEQ ID NO: 79161 - DNA, 100 bp, Homo sapiens
ttcttccttctctgaggcctgagatatgttccatttaaggctctgaagatggggagagaattctggatgatccaggtgggcccttaataatggtccctta

SEQ ID NO: 79162 - DNA, 98 bp, Homo sapiens
tctccgtccatggccccagatgacacttcagttttccacctatttccctggatattttgatggtcagtactggctctggtgggtgttccttgttttag

SEQ ID NO: 79163 - DNA, 100 bp, Homo sapiens
gaaatttataaaagattgggaatgaaaagaggtgaagaaattgcttcctcagagatgctgcctatggaagttgcaatttctacattacacttcttgactg

SEQ ID NO: 79164 - DNA, 102 bp, Homo sapiens
ctctgtctctacttggtgggcttcttgggacagtatgatttggtgaaatgcctggctcctattcgagaccccaagaccgagcaggatggacatgatattgag

SEQ ID NO: 79165 - DNA, 101 bp, Homo sapiens
gccggaggagtcagtcagaggggcgagcaggagcgattccgtcgccaaacagatcacccggaagttcaggctgaattctgaaggcaaacttgagcagacgg

SEQ ID NO: 79166 - DNA, 83 bp, Homo sapiens
cggaaggcctcagaaaaagccttaaaggtcagcccaaggccaaccccactgtcactctgttcccgccctcctctgaggagctc

SEQ ID NO: 79167 - DNA, 83 bp, Homo sapiens
ctcgggagaagcagcgcctgttcccggggcagatccaggttcaggtcgcaatggaagaagagatcgccgcgctggtcattgac

SEQ ID NO: 79168 - DNA, 50 bp, Homo sapiens
gccgccgacccgccgagcaaaatgcagcagccgctcttctaaaacattca

SEQ ID NO: 79169 - DNA, 122 bp, Homo sapiens
aaacaactaccaaggaatgcttaaagtggcctgtgctgaagagtggcaagaaagcaggaacaagctgaaagctggatacctaatgtcagtggagtcttctgagtgtttcctggaagaagtcg

SEQ ID NO: 79170 - DNA, 80 bp, Homo sapiens
ggggagatggaggggccggggctgggctcgcagattcatgatgttgctatcaaaagttgagaaattgtcagaagaaatca

SEQ ID NO: 79171 - DNA, 83 bp, Homo sapiens
attcatcagattttgcattggatattcgcatgcctggggttacacctaaacaggtggtgctgtgggtcggcctgggcgtcctg

SEQ ID NO: 79172 - DNA, 98 bp, Homo sapiens
agacgcacagctaagatgtcaggacatcctggaagctgggaaaggggtgggctgaaaaacagcaaacatgaatgcaccctgtcttcacaagaatatgt

SEQ ID NO: 79173 - DNA, 100 bp, Homo sapiens
cttgaggaattgtgagttgtcacacagtatactcatagggagaatgagttagattctgctcattctgaaattgaactcctgaggagtcagatggcaaatg

SEQ ID NO: 79174 - DNA, 90 bp, Homo sapiens
ctctgaaggccacattaaactcactgactacggcatgtgtaaggagagctcaaaggatggctactgacatgcagaggaagagaagcagcg

SEQ ID NO: 79175 - DNA, 137 bp, Homo sapiens
ccgcggcgctctctcagcccctctgcggacctgcagagcaccctcaggaactcgaggcaggctcctggctggtgccccccgggagctcgctgtgcccgatggctacaccaaccggactggtgctgtgtacctgtgcc

SEQ ID NO: 79176 - DNA, 82 bp, Homo sapiens
ggacacctcgtggcccacgcccccacctgccctgcgtgagggggctgttgtggttccgactataaacagtacgtgtttggcg

SEQ ID NO: 79177 - DNA, 90 bp, Homo sapiens
gcctgcgcgcggctacagcacggttcgtttttcctttagtcaggaaggacgttggtgttgagtaataaaagactagtggccttagtgccc

SEQ ID NO: 79178 - DNA, 105 bp, Homo sapiens
tcgtccagtatgagtgggcactgctgcagggggacccgtcagtggacatgaaggaggccctgaggaagatcatcaaaacactggctgtgaagaatgaagaaattc

SEQ ID NO: 79179 - DNA, 83 bp, Homo sapiens
catggcccaggcagaccttgcagtcaaagtatcagcggcagggaaggaggctttgccatcttggctgcactgggactcacaga

SEQ ID NO: 79180 - DNA, 100 bp, Homo sapiens
gcctattgtctttctccgcggcgaaggtgaagagttgtcccagctcggcccgcgggggagccccgggagccgcacgcgggactacttgttgatatttgag

SEQ ID NO: 79181 - DNA, 75 bp, Homo sapiens
atggatctgccaaattttatatttcagatttgtggaaggccatgaatattgtcacttcagtgctgctgctttatg

SEQ ID NO: 79182 - DNA, 78 bp, Homo sapiens
ctgcagtcctttaacgagatcactgctatggggaacgcccttttgcttgtgactggcagggctgcgacaagaagttcg

SEQ ID NO: 79183 - DNA, 100 bp, Homo sapiens
gcaactgggttcagtttgaagatgacacaccctgggccagcacatctccacctcatcaggaaacagctgagacaggatctagtgaaaagccatttgatgt

SEQ ID NO: 79184 - DNA, 98 bp, Homo sapiens
gaggactaggccccaatttagtgggggtagccccttccagacaacagtgagctgggacggagacaagctccagtgtgtgcagaagggtgagaaggagg

SEQ ID NO: 79185 - DNA, 50 bp, Homo sapiens
gaggccgtggatgcaggcattaagtagcaaattgcttcaggagttgagac

SEQ ID NO: 79186 - DNA, 83 bp, Homo sapiens
aaatgcaaaaaaggaggccaaagactttatgaatatagcagcagtgaaactactggtgaaaagccagagcagaacgatgatga

SEQ ID NO: 79187 - DNA, 74 bp, Homo sapiens
aatggataaatggtactgaatggacaagacagcagaaagtgaaactcttcactgctcacaacaatatgaccaac

SEQ ID NO: 79188 - DNA, 100 bp, Homo sapiens
tttgatgcaaatatcgaagaacagaaagaagaaaagaaagatgcagaggaagaggaaagcgaactggtgtctgtgacctttgaggatgtggctgtgacat

SEQ ID NO: 79189 - DNA, 83 bp, Homo sapiens
tacttttcaagacaccaagtgagaggccaaccaggtacaatgactcttcttgcttttcacctaagttgaataagcaccctgtg

SEQ ID NO: 79190 - DNA, 75 bp, Homo sapiens
caaactcttgccctttgagggaccaggaccctcactacgtccagcaggcgctgaccaacgtcttgctgatggacg

SEQ ID NO: 79191 - DNA, 100 bp, Homo sapiens
ctccagatgaggtgatggcaacggccaacttcggcaagatccagatcgggatttacgtggagatcaagcgcagcgatgacacacaaactcgggccacttc

SEQ ID NO: 79192 - DNA, 73 bp, Homo sapiens
aagagtccacaaagggacctgatgaagcgaagatcaaggtgaggacaccagtgatgaattctgaagcaaaagt

SEQ ID NO: 79193 - DNA, 88 bp, Homo sapiens
gagactgaagcgcggccatgggggtgatactgccccagcgtaaatttcagttgcaccatttaaagctttctgaagatgaagagactgt

SEQ ID NO: 79194 - DNA, 90 bp, Homo sapiens
tccgggagctgcagatcatgcaagggctggagcaccccttcctggtcaatctgtgtgaaaaatgtgaggttttacaatattctgcaaggg

SEQ ID NO: 79195 - DNA, 100 bp, Homo sapiens
cacaggctgctcctggagcagaagatccaaaattaacgggacaggctcttattccaggatcagtaatataccacaaacagtcacaaatactattggttta

SEQ ID NO: 79196 - DNA, 100 bp, Homo sapiens
tataattacaaaatggaacagatttcaaaaggacgtaatactccactgtgcgacagtatttttgacaggtagtgatcgcattcctattcttggtatgaag

SEQ ID NO: 79197 - DNA, 100 bp, Homo sapiens
tgagcatcgcggagcttgacccgtccatcgctgtgcgctagtcctgctgatgggcaaagaaggtgtccacggtggtttgatcaacaagaaatgttatgaa

SEQ ID NO: 79198 - DNA, 100 bp, Homo sapiens
ggatgaagaggttggagatgggaccacatcagtaattattcttggtactaatttggtcgaagcagataaccaagcggagtggaccgacgttcagaagaag

SEQ ID NO: 79199 - DNA, 74 bp, Homo sapiens
gaagaatccactgatagaaatcatttccatcaataccgggtgacattccaagcctgcagtatatctgaggccag

SEQ ID NO: 79200 - DNA, 108 bp, Homo sapiens
gccagagcgcagcgccgagcgcggcccgggcgccatcgagccttggcggcggacgtgcagacaatgcagatcttcgtgaagactctgactggtaagaccatcaccctc

SEQ ID NO: 79201 - DNA, 82 bp, Homo sapiens
aaacacttagaggaagttctggagatgaaacaatgcagatcttcgtgaagactctgactggtaagaccatcaccctcgaggt

SEQ ID NO: 79202 - DNA, 100 bp, Homo sapiens
ctgcaatggagatgtcaacagagctatcaatgttcttctggaaggaaacccagacacggtggcgaaattcacatactcactgtctgtggcaaatggcatt

SEQ ID NO: 79203 - DNA, 75 bp, Homo sapiens
caaatactgcatatcagaaacaacagagagtcccacgaactggctgggtatacagaaatgtccagaggccggaga

SEQ ID NO: 79204 - DNA, 97 bp, Homo sapiens
ggagagaaaacttgcaaggaaaggaacatgtttgaatttcagatgtgttcctcaatgaatcacgtagaatcactgtggactgagacccacctttcta

SEQ ID NO: 79205 - DNA, 83 bp, Homo sapiens
aattctttggaaagactcagaatgaagtccattgtggaggctcagatgtgcaaagatccaccttacaaagtagaagaatctgg

SEQ ID NO: 79206 - DNA, 100 bp, Homo sapiens
aaatttcagcattttaatcctgttttggaaacttacattaagaaacactttagtgcaacgttagcctacacgtgaagtggatcctaaagagaggatagca

SEQ ID NO: 79207 - DNA, 82 bp, Homo sapiens
tcacggagctgggcgacgagctgaccctgggagacatcgacgaggctgggaggcggcagaatgcagccagaggagggcacag

SEQ ID NO: 79208 - DNA, 98 bp, Homo sapiens
gcgtggctgtcataggcatcgacgaggggcagtttgttggatcgtcaaacgcaggctactaccttggtccatcaaatttttggagggtatctcagatc

SEQ ID NO: 79209 - DNA, 100 bp, Homo sapiens
ccaaccgaagagaaaggggtgctccaccactccctcccatcccgagggccgcgatgggcctcttggaacattggtgtgttcatctgcattcgatgtgctg

SEQ ID NO: 79210 - DNA, 74 bp, Homo sapiens
cctaactcctgcagagctcattgaaagattggagcagagacgagttgtactgctgtcacaggaaatggacgctg

SEQ ID NO: 79211 - DNA, 82 bp, Homo sapiens
gagcctccttcgccgcgccccacttgctcgtgcactttacacacatgagagagaagggcagaagtgcccacagcccacccca

SEQ ID NO: 79212 - DNA, 50 bp, Homo sapiens
catgctggctgcaaagaagggactgaagacacgggcatatcataggctga

SEQ ID NO: 79213 - DNA, 87 bp, Homo sapiens
acatgctgtgatgtgtgccgagggaggaattgatcttggcatatacagaagggctgcatggaaaatggctgttcacagagatacgat

SEQ ID NO: 79214 - DNA, 80 bp, Homo sapiens
gagcagcggcgggggcccgagggagtgaagacatttccacctggacacctgaccatgtgcctgccctgagcagcgaggcc

SEQ ID NO: 79215 - DNA, 97 bp, Homo sapiens
tgtttcttttgggcaggactgttccatttttgccaaagtactctgctggattagaattacttagcagcctgattacatcaaccccagagccgtgcag

SEQ ID NO: 79216 - DNA, 75 bp, Homo sapiens
tcctttggttgaatccccaggcccttgttggggcacaaggtggcaggcttgtgagaaggttggcatgcagatccc

SEQ ID NO: 79217 - DNA, 100 bp, Homo sapiens
gtccacagatgagccagtatggaccacaagagggtgctcgagaggaagacctcgatgctgtggaagcgcagattggctgcaagcttcctgacgattatcg

SEQ ID NO: 79218 - DNA, 75 bp, Homo sapiens
ccaagaacgtgctcttcgctcacctggatgacaacgagaggaggaatgtatcctgtcaggtataatgtcagtgaa

SEQ ID NO: 79219 - DNA, 82 bp, Homo sapiens
cttcttgctggcgttggtgggagccgtgctctacctctatccggatttttagactctgaggagcagttggagctaatccaca

SEQ ID NO: 79220 - DNA, 100 bp, Homo sapiens
gtccgagccagccgctgttttgccggaggagcccctcaggccatcggtttgggcttggccagccaggaagaatacctggttctgtgaatgccatgagagt

SEQ ID NO: 79221 - DNA, 83 bp, Homo sapiens
ctcaaactcctggactgaaacgatcctctcatctcagcctccaaaagtgctggcattacagggaaccctactctggaaactgt

SEQ ID NO: 79222 - DNA, 82 bp, Homo sapiens
aagatgttcagcgtagagtcgctggagcgggcggagctgtgcgagagcctcctcacttggttggaatcgaagcctcttaaaa

SEQ ID NO: 79223 - DNA, 100 bp, Homo sapiens
accaaactcatcggaaacatggcactgttgcctatcagaagtcaattcaaaggacctgcccccagagagatgagagggtccaagcctggtaagaatgtcc

SEQ ID NO: 79224 - DNA, 115 bp, Homo sapiens
gtgtttctgttcactgtaaaaagaaacacaagcgagaggaggaggaggatgatgagtttggaatcatacttgaaaagattaaaacagtaattaatgatgatgcaagatacatgaa

SEQ ID NO: 79225 - DNA, 100 bp, Homo sapiens
cccaggtgaccaaccccaaggaggacgagggccggttgccgggcgcgggcgagaaaggtgtctgaagtgctgtctgaagaaaagtcacgtttgtctataa

SEQ ID NO: 79226 - DNA, 105 bp, Homo sapiens
agaccagttgtatacaaatacctaacagagaaagcagtaaaatggtcacagcagcattatgccagtacatacaggcttctaaagccagggatggtgccagccctt

SEQ ID NO: 79227 - DNA, 82 bp, Homo sapiens
gccgcctcggggcgcgacgccgagccaaaaccgcccgcgggctccgaggccacagggaagcccgtcagcctgagctacagat

SEQ ID NO: 79228 - DNA, 50 bp, Homo sapiens
cccatccctgcagcatgaacaagaactcaagctccatgaggagatgtttc

SEQ ID NO: 79229 - DNA, 90 bp, Homo sapiens
gcaaactgtcagaaaagagtagcctgggctgtctggaaatctgaggatattgtacctgtggatgcatcttatgaagtaaaagaactatat

SEQ ID NO: 79230 - DNA, 75 bp, Homo sapiens
caaaacaattattccccgacttacagaaaatcctgagcgagcagctctgtactttgtttctggcgtgtgcatcgg

SEQ ID NO: 79231 - DNA, 100 bp, Homo sapiens
ttactccctctttaagattgcgtacccactgcagagtgctgaagacggggtagccacgaggtgatggcatcagctgagaagggaaggaagcccatgtgag

SEQ ID NO: 79232 - DNA, 98 bp, Homo sapiens
ccatacccatccggataccctcccaatcccagcttttatgacaagaagacagcaattcacaaagccctctgtgacaatgttgacacccgcaccgtcat

SEQ ID NO: 79233 - DNA, 88 bp, Homo sapiens
gggtacccttcaaaaatttaaacaagaatccactgttgctactgaaagggagttgggctgttcctacacagatgttgctgctcaggat

SEQ ID NO: 79234 - DNA, 71 bp, Homo sapiens
aggaggcctgcgggagctgcagcttcgaagcctcacagatctctcaaaggccttggttctgacagaaattg

SEQ ID NO: 79235 - DNA, 100 bp, Homo sapiens
cacctctcgccgcacatgtttggagatgatgattattctccaccgtctaagagaccaaaggccaatgagctaccgcagccaccagtcccggaacccgcca

SEQ ID NO: 79236 - DNA, 98 bp, Homo sapiens
cgccgcccaggagacccctctgctgcaccacttcatggtgtgggttgctgaccgaggaaataaaagaatccaagtatttgataaagacactggggagt

SEQ ID NO: 79237 - DNA, 100 bp, Homo sapiens
caaacgcgcggcctactacagcgccgcggggcccaggccgggagccgaccggcacagcagcatcctggtggggaagaagttttaagggaacaagctggag

SEQ ID NO: 79238 - DNA, 82 bp, Homo sapiens
atttacagtcatcaatattatgtacagtttcaacaaaactcagattgtcagaagcttcagttctggtaaaagagaaggtggg

SEQ ID NO: 79239 - DNA, 142 bp, Homo sapiens
caccctgtgctggagagcggcctcctggcatctgccggctgctccgcaccccggggtcccaggaagggcggcccaggtgctggagaatctggtaaaagcaccattgtgaagcagatgaggatcctgcatgttaatgggttta

SEQ ID NO: 79240 - DNA, 80 bp, Homo sapiens
ggttgctgctgctgccgctgctgctgggcctgaacgcaggtgccgtgagcgatgtggagatgcaggaacactatgatgag

SEQ ID NO: 79241 - DNA, 82 bp, Homo sapiens
cgacgcagaagagtccaccaccggacagccaggtgacgcagctggaccagaggctggcactcatcaccgacatgcttcacca

SEQ ID NO: 79242 - DNA, 106 bp, Homo sapiens
ctgaaagctgccgctgaagctgccgccgttgcctccgccgccaagagtgagcgagcggacccgcgatgggtgctgttgctgtgtttgcagttggttatataaaaat

SEQ ID NO: 79243 - DNA, 100 bp, Homo sapiens
ggctcgccgtctccacctcctcgcgtccgtaatcagtgacgaggtccgctacgtaaatccctttgcggcgggtactactgagcgagtgtgcttgatccag

SEQ ID NO: 79244 - DNA, 51 bp, Homo sapiens
gccgaatcttccttcaggatatcaagtacgagctcaactggaggcagtcct

SEQ ID NO: 79245 - DNA, 83 bp, Homo sapiens
tgtagctatgttgtaactaatggccttgggactgcctgaagttacatttagagactgaaatcactgcaccttaaaaacaaaag

SEQ ID NO: 79246 - DNA, 75 bp, Homo sapiens
ctatgatgctattgtggttgaacaatggacagtcctggaagatcagtttgtgtgtggagaaacagtcccagcccc

SEQ ID NO: 79247 - DNA, 100 bp, Homo sapiens
gtggatgtcctgcgtgtcgcagagcaccgggcagatccagtgcaaagtctttgactccttgctgaatctgagcaacttcacagagaatgcagttgtcttg

SEQ ID NO: 79248 - DNA, 76 bp, Homo sapiens
cctctccacccctcgcctgctcatcaacaaggagaaagctggccaggtactggtgtggcatactcggacagagaag

SEQ ID NO: 79249 - DNA, 82 bp, Homo sapiens
cgccctctgagcctcccgagccctctctccatttcccacaattgtgctggggtgagcccctccagactccgaataggagatc

SEQ ID NO: 79250 - DNA, 100 bp, Homo sapiens
ccagagtctgaccgcctcccgcggaggggtggccgccgccgaccaggttgacggatatattcagacgttacgacacggatcaggacggctggattcaggt

SEQ ID NO: 79251 - DNA, 100 bp, Homo sapiens
cttgagccatggctacagcaaactgcggagcagcgcagaacagatgcatccaggttatatatgatgctctgcaaaacctggataagaagattgatgtgat

SEQ ID NO: 79252 - DNA, 100 bp, Homo sapiens
tggggcgtcgtgcgcaaaggcctgcagtgcgcgcgcctgtgaccctgggctgtctcgaacgtgtgaccagaacacctatctgagtggcctgtgttacctc

SEQ ID NO: 79253 - DNA, 107 bp, Homo sapiens
ctataccagccaccctgcccccaagaaggaagtcatcatgggccggcctggaacaggtgagaagccctaccactgcaactgggacggctgcggctggaagtttgcgc

SEQ ID NO: 79254 - DNA, 100 bp, Homo sapiens
gtccagaagaatgcaggaaagctgaccaccactggctggttgatatgtgaagagccaacctgtcgcaatcgaactcgtcaccttccccttcaattctccc

SEQ ID NO: 79255 - DNA, 96 bp, Homo sapiens
gcaaccccagggacctggaaagacagacaggatggggaggaggttcttcagtgtatgcctggtggcccacaaactctttaacaacttgaaataaat

SEQ ID NO: 79256 - DNA, 75 bp, Homo sapiens
gattagagacatactaatgtacatggttcaaaccttgtactactcagctgatcacaagctgcttgatgggaacct

SEQ ID NO: 79257 - DNA, 100 bp, Homo sapiens
ttcaatgtcctggggttctcggccgcactgtccaccaacatcatggactgacttgaaagagggctccagaaaaagtagatgcgtatctgtacaaacagat

SEQ ID NO: 79258 - DNA, 75 bp, Homo sapiens
gagaggcacccgatatatgttctctaggccttttagaaaacatggtgatttgaagatattaaagctagaaattgg

SEQ ID NO: 79259 - DNA, 82 bp, Homo sapiens
actatgaagactctcagggcgcgatttaagaagacagagaggctgaggggatctggcggtggagcgctaggatcagacgccc

SEQ ID NO: 79260 - DNA, 50 bp, Homo sapiens
aagactgcgttcctgctcaacatccaggttcgaacgatacaggtctggcc

SEQ ID NO: 79261 - DNA, 50 bp, Homo sapiens
cttctctccaggccctgaacattctcagagccatgtgttcacatgtcatg

SEQ ID NO: 79262 - DNA, 96 bp, Homo sapiens
ggtcaccatcaaaattgcaccaaacacacctcagctggctgacattgttgcaacaggcacacagcaagaaggaggccatcagcaaactgggaagag

SEQ ID NO: 79263 - DNA, 100 bp, Homo sapiens
gccaagattattaacaatacagagaatcttgtgcgggaattgctgcagataaaacgtcactgtgcagagccttttacagaatattggacttgcattgatt

SEQ ID NO: 79264 - DNA, 75 bp, Homo sapiens
cgcggggcagttcgggccggctgtcctggcgcgaaaaagcttgtggtgaaggggggcaaaaaaaagaagcaagtt

SEQ ID NO: 79265 - DNA, 82 bp, Homo sapiens
gggggatggagcgagcgccgagccgggtcaggagctgtggctaaaggaagtggaggggccgtgggatgcggagagccgaggg

SEQ ID NO: 79266 - DNA, 75 bp, Homo sapiens
gagcgggcaggacacggaggaccggagcggcctgtccgaggttaatacaatctgttggaatgacactggagaata

SEQ ID NO: 79267 - DNA, 99 bp, Homo sapiens
tcctgacccgcttcaagaagcctgctgagttcaccacagccacagctgggaaacctattgcaggtaaaccgaaccctgggtcggaatgtgcctctagcc

SEQ ID NO: 79268 - DNA, 75 bp, Homo sapiens
gccagcgttacagtaatgttccagtatcaccttttgccatgatagcatttctttcattggacagttccttacaag

SEQ ID NO: 79269 - DNA, 100 bp, Homo sapiens
tgtgagaaaagtgaatcagaaaattggaagctgtacacagcaagacgttgagttacatgttcagaaggattggagaatccatgttgaccaaatgcaccag

SEQ ID NO: 79270 - DNA, 75 bp, Homo sapiens
acccggcccgtagtgtggaagcagcttcaggaatcccgttctgcttccagaagtggaagtgctcacggatcgggg

SEQ ID NO: 79271 - DNA, 99 bp, Homo sapiens
tacattgcaccatgggaaagagagagaaggctgacagcagccatggcgagcggcagtggagacagcgtcacccgtcggagcgtggcatcacagtttttc

SEQ ID NO: 79272 - DNA, 83 bp, Homo sapiens
tgattggcagagacccactgtctgtttgcctgagaatacagatcaacccacagaacaaagcggatttccaaggcatctcccca

SEQ ID NO: 79273 - DNA, 100 bp, Homo sapiens
ggatattgagagacattatcgaaagtcctatacacagaatgggattttacatatgctggacagaaataagagaatcaagccccggccagaaagattccag

SEQ ID NO: 79274 - DNA, 98 bp, Homo sapiens
gctgctggagaaaagcaaagggacattgacctccgagtatatggatcagttacagttgtggattcgaggcaacgtgagtgcctgtgcgaggtccatct

SEQ ID NO: 79275 - DNA, 90 bp, Homo sapiens
cggcgctctcctggctcccttctgccccagctccgtctcggcggcggcgggcgtcctgcctctgcggctctgccccctgcatcctgtgca

SEQ ID NO: 79276 - DNA, 75 bp, Homo sapiens
gagaactcaacacctccctacaaggaccttcctcccaagccaggtgtcccatttcccaaaaactttatgtctgtg

SEQ ID NO: 79277 - DNA, 101 bp, Homo sapiens
gcggcggcgagcgctcgcgagcggctgcgggacgcgaggtttccgggccactcttcacctccaccatgagcctggacatccagagcctggacatccagtgt

SEQ ID NO: 79278 - DNA, 100 bp, Homo sapiens
gagtggagatcctattcagaggggccggtctctctaaatatgccccagatgtggaagatgtcaagtttgtgatcaactatgactatccaaacagctcaga

SEQ ID NO: 79279 - DNA, 99 bp, Homo sapiens
gaagactatggactaaaacctgttccaggggacctcgttctcaaaggagtgctggccattcaggcccgaaagcggaggccgaaaagagagaaacatccg

SEQ ID NO: 79280 - DNA, 75 bp, Homo sapiens
tggaagctgcacgccatgagcaccaggtcatgctaatgagacaggaaatcccatgctgttggcccccaggaaatc

SEQ ID NO: 79281 - DNA, 50 bp, Homo sapiens
atttgatgttcagcctgtcccattaaggattaaactgcaaatatctcatg

SEQ ID NO: 79282 - DNA, 75 bp, Homo sapiens
gcagattctagaggaagaagtcgaacaaaaatggtgtctcaatcacagcgtggatgaaaatactaggaaaagttt

SEQ ID NO: 79283 - DNA, 100 bp, Homo sapiens
gccttggagagcccaggagcaggggagacatggtgttttggggaacgagtttagtatattaaaatcaccagggtctgttgttttccgaaatggaaattgg

SEQ ID NO: 79284 - DNA, 100 bp, Homo sapiens
aggatacatctttgtggatttcagcaatgaagaggaagtgaagcaagctctgaaatgcaaccgggagtacatggtgttccttgcctgtatctccccttgg

SEQ ID NO: 79285 - DNA, 75 bp, Homo sapiens
ctgcactccagcctgggtgacagaacggcctttcttagcatcttgatgagatcattaggaaataagaatactgtc

SEQ ID NO: 79286 - DNA, 90 bp, Homo sapiens
caggaacaccgtcacgctgctggaggagccgggggccatcaagtataagaccacaggaccacgtgattcataaagaactactgtcaaaac

SEQ ID NO: 79287 - DNA, 90 bp, Homo sapiens
gcagcgccgtgtggcacgacacaaaaatcagctgggagtgtccactcgccttccaccagcatggcaacgtcttcacagtaccgccagctg

SEQ ID NO: 79288 - DNA, 75 bp, Homo sapiens
gcaaagctcaccctcccgagttgaaaaagtgaaactgatggtaaatccatttgcttatgaagaatataggaaaga

SEQ ID NO: 79289 - DNA, 75 bp, Homo sapiens
gaatgaagatggcccttccatgtctgtgaatttcacctcaccaggtgatggaagctgttttattgtccagcaaga

SEQ ID NO: 79290 - DNA, 83 bp, Homo sapiens
gctacctcaactggattggcgtccccacaaaagatctgcttggctttgaggaagagtggcagtactgcctcactgcataaggg

SEQ ID NO: 79291 - DNA, 75 bp, Homo sapiens
aaacgccgcgcactcggagccggcacggctcggcgtctcaaaccatgaattatgtgggacagctggctgggcagg

SEQ ID NO: 79292 - DNA, 100 bp, Homo sapiens
gaaaaggtattcattaaagaaaataatgggaaggaagaagtatccaaggccaaccaagccctcgagcagttattcccatgtcctgtataaccaatggaag

SEQ ID NO: 79293 - DNA, 50 bp, Homo sapiens
ccgctttctgtgttaagcaactggattaacattaaccaggtggtatttgt

SEQ ID NO: 79294 - DNA, 75 bp, Homo sapiens
cagaagcagaacttgaaggttaaaccactagcccatttcacaggcttcagggatgacttcttagggggcagggga

SEQ ID NO: 79295 - DNA, 75 bp, Homo sapiens
ttctcctttcttcccgcagcactcctcctacgtggctcccctggccacactggctctacatccatgagcccatca

SEQ ID NO: 79296 - DNA, 100 bp, Homo sapiens
ccgatgtgctcgtcacggaagaccctgcagatgtcagagcaactacccagtcctctgcatgaaagagccctccctcaagagcttggaagcaacacaaaat

SEQ ID NO: 79297 - DNA, 100 bp, Homo sapiens
ctggaagacctcgatgaaccagacacagaggatttccggactgaccgggcagtgagaatcaccagtaaagtaatctcacaagctgccaaagaacacatcc

SEQ ID NO: 79298 - DNA, 82 bp, Homo sapiens
agaagctgcgtcccaacatccccaactggtggcagagttatgagttggaatcgaagcctcttaaaatggcagatgacttgga

SEQ ID NO: 79299 - DNA, 74 bp, Homo sapiens
tccgcctgtgggacacctaccagtctctcatcacttttgtgaacaagcacctgaacaagctgaatttggaggtg

SEQ ID NO: 79300 - DNA, 83 bp, Homo sapiens
cagtccacccaccgccgccgcctcccaggctgtgacaaaccctgtgcccacgctgcctccactgccgggagactcagggctgg

SEQ ID NO: 79301 - DNA, 96 bp, Homo sapiens
aagaaaaagagaagaagatgaagaaacccagcttgatattgttggcttgcagatgggtcaagggttgtggagagtggtcagaaaccagcagctgca

SEQ ID NO: 79302 - DNA, 100 bp, Homo sapiens
cagtaccgcaggcattttctggtggacaacagtgtgtttcatgtacttcgggatgacttcagacaaaacccttcggatgtcatggttgcagtaggagagc

SEQ ID NO: 79303 - DNA, 100 bp, Homo sapiens
ctgacagaaattccatgcatgtagatatggctatctatgtgcctgctgatgacttgactgaccctgcccctgctactacgtttgcccatttggatgctac

SEQ ID NO: 79304 - DNA, 75 bp, Homo sapiens
agccctgaagttgcctcttctggtgtcaaagcttttggacattcctgggcatcagacaacagtcagcgctttcga

SEQ ID NO: 79305 - DNA, 50 bp, Homo sapiens
ctcttgttaatcacatggatgttacaatgcagatcttcgtgaagactctg

SEQ ID NO: 79306 - DNA, 100 bp, Homo sapiens
tttagccggagtgagaagcaagaaggccctggacacagcaatatctctgggctttcacaggtcttgctatcacagatgaaattttgctgagtaaggcaga

SEQ ID NO: 79307 - DNA, 100 bp, Homo sapiens
ctgccagcgggcccctccggaggccctgcctgccacccctgccaccacagcgttgctgggccaggagataaacccactgccctacagccgcgtggtgcac

SEQ ID NO: 79308 - DNA, 96 bp, Homo sapiens
ggccgccgcagccatgaccgtggagttcgaggagtgcgtcaaggactccccgcgcttcagcgagaattagaactgcagcgtcagcgtgacttgcat

SEQ ID NO: 79309 - DNA, 83 bp, Homo sapiens
gtgaacagaaaaagaggatacctctgcgatcccgggtcatctccagatgctagggttatggggtggcccagttgaaatccttc

SEQ ID NO: 79310 - DNA, 82 bp, Homo sapiens
ttaaacacaagaagttctcgaaatgggagtttgaagacctggaatgggggaggtgggtttggaggatttgggacaacatcta

SEQ ID NO: 79311 - DNA, 100 bp, Homo sapiens
tgttccctctcttcgcggagcggcgccgcgtagcttccatccgccagctgccatgagcgagcgcctccgtcccaggagccagcaccgctctttgaccttg

SEQ ID NO: 79312 - DNA, 75 bp, Homo sapiens
acaagtggagctccttttcctccacctaccttcccgacatttaaatcaaacggtattgagatggattgggttatg

SEQ ID NO: 79313 - DNA, 97 bp, Homo sapiens
accagcaagtcttccagtatgaatcccacagaaaccaagaattgtgatctgtctgggtgtgatcttcaagaagccaacctgagagggtccaacgtga

SEQ ID NO: 79314 - DNA, 75 bp, Homo sapiens
cgcggccacttttgccttcccgggctttgtgtgcaacacgtgccctgaaaagtggatcaatttccaacggaagtg

SEQ ID NO: 79315 - DNA, 100 bp, Homo sapiens
gtgattcctgaatctacaataatgagaactctacatagtggagaaataaccagtcatgagcagggcttctctgtggaaggttatgtggtccgaatcagtg

SEQ ID NO: 79316 - DNA, 83 bp, Homo sapiens
cccgcccgcccaaggtctctcgcgggcgggagaacggaaaactcccaacttcctggtgctcttacagcctgttccaagtgtgg

SEQ ID NO: 79317 - DNA, 50 bp, Homo sapiens
aaaattggagagactgccatgaagcaaagcccatggaacagacttacggc

SEQ ID NO: 79318 - DNA, 75 bp, Homo sapiens
tggagcagtggagcccaaagacccctggagacatggtgtggccgacgacgatgccctcgctgaggagcgcatgcg

SEQ ID NO: 79319 - DNA, 75 bp, Homo sapiens
ctccccccagctccatgaatggaaatcggctccgcaggttcatcgggattaggcagccctcttggccgaagtcga

SEQ ID NO: 79320 - DNA, 100 bp, Homo sapiens
tcggaggctggtgtccagggtctcagcgcgggggacgactcaggaccaagaatcgccttcagccctgtctggtgcatccttggcagaaagtgaggaggaa

SEQ ID NO: 79321 - DNA, 100 bp, Homo sapiens
gagatccaagcacagaagtgtgtagagttaacagaaggaatagaatgtcttcagaaacattccaaggtgtctgctttttcaacgtgggagaaggagttgc

SEQ ID NO: 79322 - DNA, 92 bp, Homo sapiens
aagcattaatctagggggcataaacatcccttatacaacagggatggggctggtaagtagcaaaaagccggacaaggaaaagccgatcaaag

SEQ ID NO: 79323 - DNA, 82 bp, Homo sapiens
cgtcttgatccttttgcagatggtcagcccaaggccaaccccactgtcactctgttcccgccctcctctgaggagctccaag

SEQ ID NO: 79324 - DNA, 75 bp, Homo sapiens
ctttgacaatacaggaaatgtttgtattgaagcccctgggtgataatttgatggaggaaaacataaggcagtctg

SEQ ID NO: 79325 - DNA, 100 bp, Homo sapiens
aggagtggacttgattgatatatatgctgacgaggagttcaaccaggtgtcatggagaaactccagctgggcccagagattctgcagcgggaaaatccaa

SEQ ID NO: 79326 - DNA, 98 bp, Homo sapiens
cagctttaaaaagcagtgggctctggaacaacacggtgttcatcttttctacagtggttggatttcatcccttactggtctcaaccaaaatattcctg

SEQ ID NO: 79327 - DNA, 75 bp, Homo sapiens
gttggagtagaagtgtccagcgacagcttctgggaggtcagcccaaggccaaccccactgtcactctgttcccgc

SEQ ID NO: 79328 - DNA, 100 bp, Homo sapiens
tctgccagtataaatgcagtgacggtgaatccgccatactacatcccgctggttgagctggtcccccacccggagacggcccctacgacagtggacagaa

SEQ ID NO: 79329 - DNA, 100 bp, Homo sapiens
acctgtcgcacccacactcattcgggttggacttgccggcgtcaccgccgcggacttcgctttgggccatgaccaggacttggggtggagtcgaaagcag

SEQ ID NO: 79330 - DNA, 98 bp, Homo sapiens
ggtgctaaagagagcagtaccctgatggagtcccttgcagatctagaaatggccattgcctactggaacttagtgcttaatggaagatttaaattctt

SEQ ID NO: 79331 - DNA, 98 bp, Homo sapiens
agacccctcggaggctgaagcgacgccggaggcagtgggggcccctgaagccactgatggaagccacactaccggggcatcggaccatgaacccctgt

SEQ ID NO: 79332 - DNA, 98 bp, Homo sapiens
ttaccagaaaaacaggtcccgatcccgaccccaaaagagtattcttggatcttgcacaggaaggaattaaagactttgtgtggacagtaatgacctca

SEQ ID NO: 79333 - DNA, 120 bp, Homo sapiens
cgagctgagtggttgtgtggtcgcgtctcggaaaccggtagcgcttgcagcatggtaagaagagttcctgggtcaagtggtcaccttcataaaaccgaagacggggactgggagtggagt

SEQ ID NO: 79334 - DNA, 90 bp, Homo sapiens
gaggattcttatgtggctagtttgcagaatcgagagctccagatcatgagaaagctagatcactgtaacatagtccgattgcgttatttc

SEQ ID NO: 79335 - DNA, 74 bp, Homo sapiens
catatttgagactttctgtcgcatccaccagtgtatcagcattaagttgggtatctacagccattggttgctgt

SEQ ID NO: 79336 - DNA, 100 bp, Homo sapiens
gcctggggcggcgcgacggctggtgcgcagtgtaatgaacaagtctggggtgaatcgtgtagtttggaaacgacctcgactcactcacaatggacctgtt

SEQ ID NO: 79337 - DNA, 74 bp, Homo sapiens
cgaggatgctatataaagacacatgtcatgagataaacattgacgatcttgaggatgaccctgtggtgaacggg

SEQ ID NO: 79338 - DNA, 51 bp, Homo sapiens
ggaagctattgctgggattttgaggagatctattcttacatacagccgaat

SEQ ID NO: 79339 - DNA, 75 bp, Homo sapiens
cagacaagtttggcaacatatgtgtgatgtgtcactccatccccgtgtctcacatccgcgccgtggagcgcgtag

SEQ ID NO: 79340 - DNA, 75 bp, Homo sapiens
gtcagatgattccattctccgattggccaaggccgatggcatcgtctcaaaatgatgaggagtctgatgaggaag

SEQ ID NO: 79341 - DNA, 100 bp, Homo sapiens
cgagtaccttccctgtcccatcgcaaacccaaagatccccgttcctggagattctgattgaggacacattcagctaacgtattttagcaggtggagtgag

SEQ ID NO: 79342 - DNA, 88 bp, Homo sapiens
ggcacacagatgctcacaataaggcactgtctgaggcctgtggtcaggaaataactactaagcaaatgctgcccatcgtattaaaaat

SEQ ID NO: 79343 - DNA, 82 bp, Homo sapiens
tgtgagaacagaagctttatctgtgatagaattgctgcttaaaaaacttgaaggaaaaatgaggaagctgtgagtaccagtg

SEQ ID NO: 79344 - DNA, 83 bp, Homo sapiens
ggaggcttcgagtgacccgggtgccgaggagcgggaagagttgctggggtgcccgtggttgacacgagctgtgtccccagctg

SEQ ID NO: 79345 - DNA, 50 bp, Homo sapiens
tggatagataccgaattcttatcacaaagaaaacccatatagacagctgc

SEQ ID NO: 79346 - DNA, 100 bp, Homo sapiens
aaaattttccttgacctttaggtgcttttatattcatctcaaaaacaaaattctgaactcaggacttggcaattacggctagatgaggctcaagaagcag

SEQ ID NO: 79347 - DNA, 100 bp, Homo sapiens
agttcctgcatgagtatgacatgaccaagatgcccgagtgctacttctactccaagttcggtgtgatccctcacatccacaaatctctgattggaaagaa

SEQ ID NO: 79348 - DNA, 98 bp, Homo sapiens
aagaagagggcggagcggagacgggagtattatgaaaagatcaatgatatggaacctagcaaagctgttccactgaatgcatctaagcaagatggacc

SEQ ID NO: 79349 - DNA, 75 bp, Homo sapiens
tggaactgaacttagctcgacggggctgaccgctctggcccagggtggcagatcgggagcggtgccgagaaaaat

SEQ ID NO: 79350 - DNA, 75 bp, Homo sapiens
ggcgaaacgaggaggagataacgcggccttgggctctgctccagaaggtcctgagcctcggccacatcagcaccg

SEQ ID NO: 79351 - DNA, 98 bp, Homo sapiens
agattcgcagtggtcgcttcttctccttggtgaagacattcagtgaagcttgcctgatggtaaggaaaccagccctagaacttctgcattacctgaaa

SEQ ID NO: 79352 - DNA, 49 bp, Homo sapiens
ctcgccgggcgccctttagacctcctcaagagttactgatctatgaaat

SEQ ID NO: 79353 - DNA, 83 bp, Homo sapiens
ccatgtcgggttattcgagtgaccgagaccgcggccgggaccgaggcttgagcctgatcgagtgcggcccagtgcacaccgcc

SEQ ID NO: 79354 - DNA, 75 bp, Homo sapiens
ctcgggctgagggagctcgggccaatcagagggacggccccagaatggcatgatgcgctgcctgaccacgcctat

SEQ ID NO: 79355 - DNA, 98 bp, Homo sapiens
ggccgccgggccccggggttgaggcgaggagcccgcgggcggccggtcgggcggggcggcggcgctgacaggtttggacatatttgactcttttcccc

SEQ ID NO: 79356 - DNA, 75 bp, Homo sapiens
gcctgctgaactgggtgctttatataggatgagaccctttttgctcttcctgctgcatctgagcctgtgatacgc

SEQ ID NO: 79357 - DNA, 100 bp, Homo sapiens
tctcttacgtctgcggaagtgcagctgcctcagttcttagcgcagcctatgaaagagacaaccagcaccaagatgaagcagaaggagatccaggtaatag

SEQ ID NO: 79358 - DNA, 100 bp, Homo sapiens
ttgaataagtgttttaagaaagtggacaaagagaggagtcaggctcacagaacatttcctgcctgttgctcacactctgttgtccacagcatacccgcac

SEQ ID NO: 79359 - DNA, 101 bp, Homo sapiens
aagatagaggcagaactgcaggacatctgcaatgatgttctggccgccacaaaggattttgtggagtcgccccaggcctgacggcgttaattatccctggc

SEQ ID NO: 79360 - DNA, 75 bp, Homo sapiens
gctgagtctcgctgctcggtgcgaggcggcggagagcgaggcctggtcttccgaccccgaactccaccggaggca

SEQ ID NO: 79361 - DNA, 82 bp, Homo sapiens
aggattccaagtaactcttatttggtttgacgtcaataaagggaaactgccacaatttttatactgctatttctaaagatgt

SEQ ID NO: 79362 - DNA, 100 bp, Homo sapiens
catagccttcacagagagtccagttgccaaggtgaattcatcattggccgagttatcaaagccatgaataacagctggcatccggagtgcttccgctgtg

SEQ ID NO: 79363 - DNA, 130 bp, Homo sapiens
cttccaccgtgattgtgagtttcctgaggccttccctagccatgcttcctgtatagtctgtggaacggcgccaagcccatctttgtgtgcttgcatccaactgtgatgagcctatgtatgtcaagttggt

SEQ ID NO: 79364 - DNA, 75 bp, Homo sapiens
aggaaacaagatggtccttaaaaccgaagaggaggacgaaatggaaaaggtgttctaaaattcatgtggaactgc

SEQ ID NO: 79365 - DNA, 100 bp, Homo sapiens
gatcctgggccggaaccacgaggagagcagtgagaccatgaatgacttgctggcccaggtagatgatgagctggagatcaaggcctactatgcaggccac

SEQ ID NO: 79366 - DNA, 100 bp, Homo sapiens
ctgatttagaaggaggttcaggctacggtgagccgaagccctgtgcagagcccgagtgcgcgctcaggaacccgagttcagctacggctgcgcagaaggc

SEQ ID NO: 79367 - DNA, 105 bp, Homo sapiens
cgccccttcgcgtcccctgcaccatgagctggggcaccgagctctgggtacatgtcccagagcaagcacacggaggcccgggagctcatgtactcgggagccctg

SEQ ID NO: 79368 - DNA, 74 bp, Homo sapiens
gggaacaggccagcaaaacactcagctgcaagtccaaagccacaaggggcttctttcctgtcgttgttggcttt

SEQ ID NO: 79369 - DNA, 99 bp, Homo sapiens
aaaaatggcagcattggaaaacagactggttctagaaaaggtcatggcagcgccaggcggcaggtcggagccgccgcagctccccgagtacagctgcag

SEQ ID NO: 79370 - DNA, 101 bp, Homo sapiens
tttagcctagttggcaagcgagcaatttccacctctgtgtgtgtacgagctcatggccacggcagagacaacgtgtgtaccccaagtgcacatggctgacc

SEQ ID NO: 79371 - DNA, 82 bp, Homo sapiens
tataaatggtggcagaaataccagaaggaagtgctctctggcgtggtggtcatatcgagtaaggattcagtccaacaccagg

SEQ ID NO: 79372 - DNA, 87 bp, Homo sapiens
gggggatatccacagttcgatcaaggtgattgaaatctctgaatatcgaacccagctctatgaatatctacaaaatcgaatgatggc

SEQ ID NO: 79373 - DNA, 50 bp, Homo sapiens
gtggagtgtaggtcatatcgccgcgggacccagacatggagctgcgggaa

SEQ ID NO: 79374 - DNA, 75 bp, Homo sapiens
agtcctgcgcttggggatcctctgtacgcccgttcactggtttggtgcacctcgatttggaggaagtagggcagg

SEQ ID NO: 79375 - DNA, 90 bp, Homo sapiens
agaaaatggacatccctttccttggggaaatgcccgcagaggatatgggccctcacattttccaaacctgtccatctgctaactattttg

SEQ ID NO: 79376 - DNA, 115 bp, Homo sapiens
ttattaactactatggaatgcaaagatttggaaccacagctgtccctacgtatcaggttggaaggtggtttttcaaggatataaccaggaaggacgcagaaaggcagcttttggc

SEQ ID NO: 79377 - DNA, 100 bp, Homo sapiens
ggcgcctcggagcgggcggcccgggctgtagtgccggcgccgccgcgtcttcccggtctcctttcccggccgcacagggactcacaccacccggcaagaa

SEQ ID NO: 79378 - DNA, 50 bp, Homo sapiens
aagactgtggtcattgtgcttgcctcgtgatacctgtggcaaccacacta

SEQ ID NO: 79379 - DNA, 97 bp, Homo sapiens
cccgaggaatgacttcccccgcattgaagcacaacattctgaaattttttggttattgtaatgatgttgatcgggagttgagaaaatgcctgaagaa

SEQ ID NO: 79380 - DNA, 97 bp, Homo sapiens
tggaggaggctgaggaggagaggacagaggtgcctggggcaacctccaccttgacggttccaggaactgccgtatgaggctctgcggtacatgactg

SEQ ID NO: 79381 - DNA, 75 bp, Homo sapiens
agatctacccaagtgcatatataaagttgaaaacaatcctcgaacaggaaatcttggtgcactaattaaggtctt

SEQ ID NO: 79382 - DNA, 98 bp, Homo sapiens
tccttcttcaggagagcgccccagggcaagccccgctccggccaacaaggacttaagtcacaacagattatctttcatcaaggcaagttccatgagcc

SEQ ID NO: 79383 - DNA, 98 bp, Homo sapiens
gcagccgagaagaaggtgaagatgctggagcagcagcgcagtgaggtcggtcctgtcagccttctggccatcggggtcctcaccgtgcactgcatggt

SEQ ID NO: 79384 - DNA, 82 bp, Homo sapiens
tggactgtgggctggtgtgtggaactgattctcacatgcttaacactggaaatgatttgaaagaaaatgtcaaaagcgattc

SEQ ID NO: 79385 - DNA, 50 bp, Homo sapiens
caccatgggccgggatcacattctgatttgatgatgatgatgattttgat

SEQ ID NO: 79386 - DNA, 100 bp, Homo sapiens
cgcgcctgcctccaggccgtcaagtacctcatgttcgccttcaacctgctcttctggggcaactccaacaacattgccaccgtggacatctccgcaggct

SEQ ID NO: 79387 - DNA, 100 bp, Homo sapiens
tggggagttacttgtcagtcccggcttacttcacctccagagacctgtttcgatttattcaggagattgagcatgctctgggtcttggcccagccaaaca

SEQ ID NO: 79388 - DNA, 98 bp, Homo sapiens
cgcgggcaccgaggactccgctcctgcccagaaggaagaatcctgctcaaaaatgaggtgaattaatacttgggcgctcaggaaccctggacagctac

SEQ ID NO: 79389 - DNA, 88 bp, Homo sapiens
gcccctggaacagagcgagagtatcaagcctggctacagataagggaccaaaatgactgactcaaaatatttcaccacgaccaagaaa

SEQ ID NO: 79390 - DNA, 98 bp, Homo sapiens
gcagagccgatgggtcatgaggatgtaagtgcgtttgaaggcttccacaccctctactccagggcctatatgaacccaatagcaatggcgagatcaag

SEQ ID NO: 79391 - DNA, 98 bp, Homo sapiens
atttacatcccattccctgaagatgattctaattcaacaaatcataacttggtgtcatggagaaactccagctgggcccagagattctgcagcgggaa

SEQ ID NO: 79392 - DNA, 75 bp, Homo sapiens
tgcaggactgccgcgagtgcactggaggcatggagctgcaattggaacatgcaagacaagcctttgcactcaaag

SEQ ID NO: 79393 - DNA, 60 bp, Homo sapiens
ggagtgaagctgcagaccttcgtggaatgatgacaggcacaatagaaacaacggggaaca

SEQ ID NO: 79394 - DNA, 99 bp, Homo sapiens
cgagaagcctgaaaagtcgcagcgagctggagccgccggaggaaacatgccctgaactgtcacagaatgaaaccagcgctcttcagcgtcctgtgtgag

SEQ ID NO: 79395 - DNA, 99 bp, Homo sapiens
tgacaactatgggtccacagctgaggacattgtggagtggctgaagaagaagattgttgatcgaatcgacaatgatggggatggctttgtcactactga

SEQ ID NO: 79396 - DNA, 75 bp, Homo sapiens
cgacttcgatgatcgtgtgtcggatgaggagaagattgaccccaaagttgcatttcctcgtcgagcgcaacccaa

SEQ ID NO: 79397 - DNA, 75 bp, Homo sapiens
gcagaagtatcaagcgtccttagtcacacacggcaagaggatgagactgtaaattcacctgtcacccagaatgcc

SEQ ID NO: 79398 - DNA, 75 bp, Homo sapiens
ctttggaagaagtatatgcaggaaattttgtggaagtgaatgaaaactttgccattgatttgatagcagagcagc

SEQ ID NO: 79399 - DNA, 100 bp, Homo sapiens
ggccggccagaagcgggcggcgcgggggagatggttttgacctgtagcagagaaccaattctggagaacagcctcacttctttgattgaatacttacata

SEQ ID NO: 79400 - DNA, 90 bp, Homo sapiens
cgggcccgggctgcggcgtgtgcgcgcccgccagctgctccggagatacggtaaccgtacttttcccaaaatgctatattgcaattggac

SEQ ID NO: 79401 - DNA, 87 bp, Homo sapiens
gacaacagcctcagtatggaggccttccagcaccgttctgtgtcctggtcgcagttcaacaaggagtttgggctttgcaaaactgag

SEQ ID NO: 79402 - DNA, 75 bp, Homo sapiens
ggatcaaaatcttcgaaggaggccaagtccttctcagcaaatcaaccttggcccgtcgtccaatcctcatgctaa

SEQ ID NO: 79403 - DNA, 100 bp, Homo sapiens
agcgacccagctataagttcttcttcaagtctatggacgacgatttcgggatgctttcattggatttggaggaaatgtgatcaggcaacaagtcaaggat

SEQ ID NO: 79404 - DNA, 75 bp, Homo sapiens
tggaaccggggtttggagggcagaaattcatggaagatatgatgccaaagatcggaagttgcacccatcaaatgg

SEQ ID NO: 79405 - DNA, 100 bp, Homo sapiens
atcttcttccttaggaaaccaacagcaccagttgcccttgaagcagaaaacagaggtgaaatgaaactagctctccagtatgtcccagagccagtccctg

SEQ ID NO: 79406 - DNA, 75 bp, Homo sapiens
ctgagctacattgcgaaaattaaactcccgaagaagagggctcttttccaagaagtggattttcattcaaagttt

SEQ ID NO: 79407 - DNA, 82 bp, Homo sapiens
agcccccaaggattctgggggaggcctcagtgttatagttttgccgctggactcttccctcccttcccccaccccatcagga

SEQ ID NO: 79408 - DNA, 101 bp, Homo sapiens
agctaagtttcccaggactccagaaaattcagcaaagaagaagcttttaaggtgtttcaggcctcacctgaagatcatgaaaaatacggtggggatccaca

SEQ ID NO: 79409 - DNA, 83 bp, Homo sapiens
atcagatgcccctgcctgaccgtgacttctgcggccccagaagtttcaccctggaatcctgaagggcttcgacccactcctca

SEQ ID NO: 79410 - DNA, 100 bp, Homo sapiens
gagggaggcaggcgggtgggctgccggcggtggactcgtcggagccgcgggcggtcagctgaataccaagagatatctcctgatatctgcacctctgtgg

SEQ ID NO: 79411 - DNA, 101 bp, Homo sapiens
aatgtagaggatgacttctctaatcagttacggtactaggttttgacaagcttgcatcatgcgtgagtataagctagtcgttcttggctcaggaggcgttg

SEQ ID NO: 79412 - DNA, 100 bp, Homo sapiens
cagatcctcaggggcaagtacagttactctggggagcatacacaagctgagggagaatgtctttcaagagcatcagacccttaaggagaaggaacttgaa

SEQ ID NO: 79413 - DNA, 90 bp, Homo sapiens
gagcaacgggtgcccctgagtgtgcaactgaagcctgaggtctccccaacgcaggacatcagaggaggaagatgactatctctttgatga

SEQ ID NO: 79414 - DNA, 75 bp, Homo sapiens
acaaacactcaaagtcaagtatactggttggagaaatggggagttcccattagacttgaagttgggccacgtgat

SEQ ID NO: 79415 - DNA, 101 bp, Homo sapiens
ttacttttggagtgtttggaagtaaattcagagatgctgttcagttaaatgtgattgcaacgcgacagcttattctccttgcacaacaaatgaagaatctg

SEQ ID NO: 79416 - DNA, 83 bp, Homo sapiens
gagccccctccgagttacacctccagagccaaaagtaatcagtatttaaggacaaccagggaaatgtggacagagactcaaga

SEQ ID NO: 79417 - DNA, 50 bp, Homo sapiens
tttggcttcaagattttgtgccaaccagtggccacagatgtctttaattc

SEQ ID NO: 79418 - DNA, 100 bp, Homo sapiens
tgtccactgaagtaacagcagcaatgaccttccctcgggaattccacctctgcgtttttccctccagggatcgactacaagaccaccaccatcctgctgg

SEQ ID NO: 79419 - DNA, 75 bp, Homo sapiens
cttgaacttgccagcttcctgaactcaaagaacagtctgaacttgatcaagatttggatgatgttgaagaagtag

SEQ ID NO: 79420 - DNA, 100 bp, Homo sapiens
gaagaggtagctcacgcgatagaaacgtgttcgctgcccagaagaagggaaggcgcgagtgaggaaaggaggtactgtagtttacaggagagccgaccat

SEQ ID NO: 79421 - DNA, 75 bp, Homo sapiens
cacttagtgagcggaagaatgaaccttctaagtctcagacacgtaaacccaagtgtggcaaaggaactcattgct

SEQ ID NO: 79422 - DNA, 82 bp, Homo sapiens
gctcggcgtcgtggccttcagcacgttaatgcttcacagtacagagccagttgtccaggagaatggggacgaagctggggag

SEQ ID NO: 79423 - DNA, 50 bp, Homo sapiens
ggagaacctggcacttatgtcctccctggacttctccattgtggttgggg

SEQ ID NO: 79424 - DNA, 51 bp, Homo sapiens
cgctcatcttcctctcggtctacttccgacgaagcggagcaggtgtgggtg

SEQ ID NO: 79425 - DNA, 80 bp, Homo sapiens
ctcaatgtcaaatgggaccggattgccccgaaggatttgatgccctggatccctttattcccatcctggtttccaactat

SEQ ID NO: 79426 - DNA, 50 bp, Homo sapiens
agagctggatgacccaggagagcaggtctcacagggcacatatgggcagg

SEQ ID NO: 79427 - DNA, 100 bp, Homo sapiens
caggagggagaggtgccaagaagcagcggtacacacaggggcaagtgtccgagtggtgaatcagctacttacagagatggatggtctggaagcacgccag

SEQ ID NO: 79428 - DNA, 98 bp, Homo sapiens
gtaaaacatgaacggaagagtggattatttggtcactgaggaagagatcaatcttaccagagggccctcaggtttatttatgaaacagagcatcataa

SEQ ID NO: 79429 - DNA, 82 bp, Homo sapiens
ctggtgctgctcagtgtggtggatcatttcaaccggacatggatttgattgacatactttggaggcaagatatagatcttgg

SEQ ID NO: 79430 - DNA, 100 bp, Homo sapiens
gattttggaggccggggccgcgctgagggcgcccagctggaaggtgctcgggtcttcggggcactgggtcccatcggtccctcctcacctgggctcaccc

SEQ ID NO: 79431 - DNA, 75 bp, Homo sapiens
tccccaagcactctcaggaacctggcaacagtttcagaatggcttcggttattgcctttccttggtgtactcgca

SEQ ID NO: 79432 - DNA, 100 bp, Homo sapiens
tccagcttcctctacataggggacatcgtgtccctgtacgcggagggctcggtcaacggcttcatcagcaccttggggtgaatgaaaactttgccattga

SEQ ID NO: 79433 - DNA, 88 bp, Homo sapiens
cagataatatgtacagaaacatgatcattgacagagagaaccagtgcgtcattatcagagccctatgagtttgtctctctggaatggc

SEQ ID NO: 79434 - DNA, 75 bp, Homo sapiens
cattcccgtgagttaccagactgttatgtctttcagaatacggtgtctgcttttggggcagagttttcatcggag

SEQ ID NO: 79435 - DNA, 87 bp, Homo sapiens
gtcagcctcccgccggccgtctccttaacaccgaacaccgtgtcgtgaaaactacccctaaaagccaaaatgggaaaggaaaagact

SEQ ID NO: 79436 - DNA, 75 bp, Homo sapiens
atggctggttatcagcattgcagcttgaggcaattacatatgcagcccaggagcatggggaagtgattgactgtg

SEQ ID NO: 79437 - DNA, 100 bp, Homo sapiens
acattctcgaatacctagaatggggtgtcatggagaaactccagctgggcccagagattctgcagcgggaaaatccaaggcttatttatgccaggctgag

SEQ ID NO: 79438 - DNA, 82 bp, Homo sapiens
cgggagctcatcttcgtggggcgtgaggagtgtgagctcatgctacagccgcggcgagtcctttgcacatgttggcaacaca

SEQ ID NO: 79439 - DNA, 51 bp, Homo sapiens
gcttgaaatgctacatttccaagtacgagctcaactggaggcagtcctgtg

SEQ ID NO: 79440 - DNA, 100 bp, Homo sapiens
gatttttagaactccacatttgagagatggagcagaaggaagggaagctctctgaggatgggaccaccgtctccccagctgcggacaaccctgagatgtc

SEQ ID NO: 79441 - DNA, 82 bp, Homo sapiens
ggagatccccgaacaaagagcagccttggaaagtttgacaaaactatgaagaaatcgggagtgcactttttgactgtagatt

SEQ ID NO: 79442 - DNA, 75 bp, Homo sapiens
atcccagggagtgcaagcttagagcgtctggccaagaatcagaggaagtggctcctaaaagacgacggcctgcac

SEQ ID NO: 79443 - DNA, 75 bp, Homo sapiens
ggatgatgtgcttggtggagcagctgcctgggagaatgttgactctactgcagctgcagaaccttggcctgaaaa

SEQ ID NO: 79444 - DNA, 82 bp, Homo sapiens
cgtcaccgaggagaagtaccaggaggcgttggccaagggaccacatggtgacaatgcatgatgtgcttgatgctcagtggct

SEQ ID NO: 79445 - DNA, 83 bp, Homo sapiens
gtcgtccgttctctcaggctcccgttcagatatggctcgtggacagcagaaaattcagtctcagcagaaaaatgccaaaaagc

SEQ ID NO: 79446 - DNA, 96 bp, Homo sapiens
gacagattcgcagtggtcgcttcttctccttggaattgaatgatctggcacgggaccctccagcacagtgttcagcaggtcctgttggagatgata

SEQ ID NO: 79447 - DNA, 97 bp, Homo sapiens
gtatgttgttctcagctacttgggactcctctctcaagagaagctgcaagagcaacatctttcctcaccccaagattcatgttacatgtaaagctgt

SEQ ID NO: 79448 - DNA, 90 bp, Homo sapiens
gcttctctgaggcggcgagagatggtcaggtctggagctcgaccgggccagttaattggccttggtcctcacagctccaaaaagaaacag

SEQ ID NO: 79449 - DNA, 75 bp, Homo sapiens
tgaatgaccacctagagccttggatccaggagaacggcggctgggcccgtgggagtcagcatgccgcgtggctgg

SEQ ID NO: 79450 - DNA, 96 bp, Homo sapiens
caaacatattcatgtcaaagctttttccaaagatcagatttaatccagagactgacttcactatagaacccacagttgtatcaatggttggggaaa

SEQ ID NO: 79451 - DNA, 75 bp, Homo sapiens
agggaacctgatttgagatcaattcttggagaacacaaagaagtgtgatgatccaggagatggtccactcggaag

SEQ ID NO: 79452 - DNA, 82 bp, Homo sapiens
tgacacttacataaaagcctacttgagaagagctcagtgggcatttgatgtagaactactgtacatagcacagttctttaaa

SEQ ID NO: 79453 - DNA, 75 bp, Homo sapiens
gaaccattgaaaaatttgagaaggaggctgctgaggtattgatgaagatgaccctactgctgatgataccagtgc

SEQ ID NO: 79454 - DNA, 51 bp, Homo sapiens
gagcactagtgtctagaaggcactaaggctacgagagtacaaggtagtggg

SEQ ID NO: 79455 - DNA, 75 bp, Homo sapiens
ggacatccaggagcccatgttcagtgctgcccgggaacagtaccatccttccagatacaagtaggaaaagtcgcc

SEQ ID NO: 79456 - DNA, 50 bp, Homo sapiens
cctcggccaggaccggcgcgagaggcgtttgcagagcagtctctgatgaa

SEQ ID NO: 79457 - DNA, 75 bp, Homo sapiens
acttcaagtactccgtcatgatcaacaaggccacgccctacaactacccaggttgccatcaagattatcgacaaa

SEQ ID NO: 79458 - DNA, 75 bp, Homo sapiens
caggcgtgcgcggacggtgtgcggggtgttcagacttacatctcttggatatgttgaccccaactgaaagaaagc

SEQ ID NO: 79459 - DNA, 90 bp, Homo sapiens
gggacggcaggagggaagtgagaagcccaactaaagccccacatttgcagctcattgaaggaaaggtgagcgaagcaggtgttcacagac

SEQ ID NO: 79460 - DNA, 76 bp, Homo sapiens
gccaaagtggttgcgctcgaaagtgacaaaacttttattccacatttggaggtgattgaacaagaaaagcttgaag

SEQ ID NO: 79461 - DNA, 147 bp, Homo sapiens
acaaacttctgaagcacatgattattgagcataagattgtcatagctgatgtcaagttggttgctgatttccaaagctctagaggacaaaatcccagtccttggcacaaactcaggaaatggaagccggagtctgttttttgtgggg

SEQ ID NO: 79462 - DNA, 75 bp, Homo sapiens
catggacactaggaaatcctaatcatgatgcaaaaaatcgtggaattgccattccagtggatttggacagccaag

SEQ ID NO: 79463 - DNA, 74 bp, Homo sapiens
agcaagtatgttctcagaagctatacactcattatctgatacttgtaatcagcgaatgctgatgtcttaaaggc

SEQ ID NO: 79464 - DNA, 90 bp, Homo sapiens
cgaagcgctgcgctcgcgcccggatccctcaggcttgggcactgtttaaaggaaagttccgagaaggcatcgacaagccggaccctccca

SEQ ID NO: 79465 - DNA, 87 bp, Homo sapiens
tttttgtacttacaaagtccatgctaacctactatgagggtcgagcagagctgtgcctttggctgcaacaagtatgttgattactca

SEQ ID NO: 79466 - DNA, 78 bp, Homo sapiens
tctgggattctcttcagccaatcttcattgctcaaggggatatgagactttctactcggaatatcctgagtgttgcgt

SEQ ID NO: 79467 - DNA, 82 bp, Homo sapiens
gtccgggtgaagcgggaggcagccagagtcggagccgggcccgagcaccaggcgcagaaagtggaagatgcgaagattgcaa

SEQ ID NO: 79468 - DNA, 96 bp, Homo sapiens
cgccggcctcgcctcctcgcagcagcgccatgcatcaacaacagcaacttgtgattggcggtgaccggatattcagttgcacatccccacatcaat

SEQ ID NO: 79469 - DNA, 83 bp, Homo sapiens
ctcggagcgcggtccctgtattggtctcctgctcctagagcagttggaattgatcacaccttttcagttgtacttcaatcctg

SEQ ID NO: 79470 - DNA, 90 bp, Homo sapiens
ctctcctcctgtcggtcctgcagttcttttgtccccgggtagagggacagcaatcagacctattgctttgagagctgtgacctccattgc

SEQ ID NO: 79471 - DNA, 75 bp, Homo sapiens
atgaccaggtgctccacgaagacgaaaccacgtggacagaggactgcagaaaatcaacctatcctccttcaggac

SEQ ID NO: 79472 - DNA, 100 bp, Homo sapiens
atggatctggcctcaagactggtgatcgaaagctgctttgcgtcgcagttggagcagcacccccaccgcaggtggcattgaagggagcgtgaagctgcac

SEQ ID NO: 79473 - DNA, 75 bp, Homo sapiens
cggcgattggctccaagagcgatgtaatgaaagtactaaattcttccaatgagcatgtcattagcattggagcaa

SEQ ID NO: 79474 - DNA, 87 bp, Homo sapiens
caaacagaaatttgtgctcaaaacccccaagggcccatcaaccgtgagatgcgccacctgattagtagtcttcaaaaccacaaccac

SEQ ID NO: 79475 - DNA, 82 bp, Homo sapiens
cgtccgccgccaccacccactccggacacagaacccagtgacttgattgtaaaaatttacagagcggaatcatatgctggtc

SEQ ID NO: 79476 - DNA, 98 bp, Homo sapiens
gctactttattccagaacaatcacagaccgagatctcactcagcagacagcagcagcccgggagcctgagctcaggaggaactcttacctggaaattg

SEQ ID NO: 79477 - DNA, 90 bp, Homo sapiens
gagaccatggcccccactcagggcccccgggccccgctggaattcggagggcccctggagccagacccagggccctccagattaccccag

SEQ ID NO: 79478 - DNA, 83 bp, Homo sapiens
cgcagggcctgcagcgggagctggacggcgagcgcgagcggcgcgagaaagatcagtttgacaacttagaaaaacacacacag

SEQ ID NO: 79479 - DNA, 83 bp, Homo sapiens
ttccagccccgagcgggacagcgcggcggggagcgacgatccagaacacatattacataatggagccgggagacagactaggg

SEQ ID NO: 79480 - DNA, 75 bp, Homo sapiens
aacatgtggccctacatcaggaatttcatggcaaggggtgccaaagcatgctttctgcgggacattcctttctcg

SEQ ID NO: 79481 - DNA, 88 bp, Homo sapiens
ccaaatgttattcccaatttgaagttactttcagattcttctggacaatggatcatattagaacagctttgctgagccatcaaggtct

SEQ ID NO: 79482 - DNA, 99 bp, Homo sapiens
tcgatcttgggacccaccgctgccctcagctccgagtccagggcgagtaccatggggcgcaagttggaccctacgaaggagaagcgggggccaggccga

SEQ ID NO: 79483 - DNA, 80 bp, Homo sapiens
atgagatttacctgtgagatgtttcatcccaacagaaaattgcctaagaattatgacccaaaagttaccccagatccaga

SEQ ID NO: 79484 - DNA, 100 bp, Homo sapiens
cagtatcatgctggccaagaagatcatcattaaggacggaggcacgggccgcgatgggcctcttggaacattggtgtgttcatctgcattcgatgtgctg

SEQ ID NO: 79485 - DNA, 100 bp, Homo sapiens
gcgtccggcaggagacgaagagcccgggcggcgctcgtacttctggccactgggcgagcgtctggcaggctctggaagaggatctgaaccagaagaagcg

SEQ ID NO: 79486 - DNA, 75 bp, Homo sapiens
tgctgaagagactttccgttacatgatcagcagataagcagagagccctagaagaaaccaaagcctacaccaccc

SEQ ID NO: 79487 - DNA, 51 bp, Homo sapiens
ctgtcaggccgagtgtcaggccgggcagaggctgggaggcggcagaatgca

SEQ ID NO: 79488 - DNA, 83 bp, Homo sapiens
cccacccctcctgtaacccagcctgtttcacttcttggtacaatgactcttcttgcttttcacctaagttgaataagcaccct

SEQ ID NO: 79489 - DNA, 100 bp, Homo sapiens
ctttatcctggtcatcttctatttccaaagtatgttgcacccaggttgacagatttgcaatggaattagaacaaagccgaaatttgagcaataccatagt

SEQ ID NO: 79490 - DNA, 90 bp, Homo sapiens
gagggcgggaggaacatgacatcgcggagatgcagacaacatatgttttacagagtcttcatttgaggattccagaaatttcaaatatta

SEQ ID NO: 79491 - DNA, 75 bp, Homo sapiens
ggacacagcaatatctctgggctttcacaggtaccgatgggcctttattccagaagcctcagatgattcaggttt

SEQ ID NO: 79492 - DNA, 80 bp, Homo sapiens
gtccttgcaagaagtgaattacccgaccctgcatggcggacaccgacctgttcatggaatgtgaggaggaggagttggag

SEQ ID NO: 79493 - DNA, 76 bp, Homo sapiens
gacaatgcttcccaggctcgagttgatgcccacaggactcaaaattgagaacagtgtgtccggtatgagccagaag

SEQ ID NO: 79494 - DNA, 75 bp, Homo sapiens
agtgttcaccatcctggccccggaaggacttgggaccctggaggactgacgctgctggcctgggcgtccccttcc

SEQ ID NO: 79495 - DNA, 100 bp, Homo sapiens
gcagctgaagacccggccgcccagatgatgcggtggtgggggacctgccggcacgcgactccccccgggcccaaagtattagaaaactactcggatgctc

SEQ ID NO: 79496 - DNA, 90 bp, Homo sapiens
cccaagacaccacagaagccctccgagcccagggctgccacacttgtgtatcccttcttccttgaatttaaccaggagtgagcagtggac

SEQ ID NO: 79497 - DNA, 100 bp, Homo sapiens
gctgcagaactcctctatgatgaagaagaccttgaaatgcatccgctggtcgctgccggaaatggccaggtgcagtacctgaaggacaggcagctggcgg

SEQ ID NO: 79498 - DNA, 97 bp, Homo sapiens
cccctacattgtgaagctcctgggagcctactatcacgacgggaagctgtgggtaatactgcattgcatgattgtgcagaatctggaagtttggaca

SEQ ID NO: 79499 - DNA, 75 bp, Homo sapiens
gaaaaagtcaccttgtctttccctagtactctgcaaacaggcatagaatgtcaagctaaccaggcgtccgctact

SEQ ID NO: 79500 - DNA, 50 bp, Homo sapiens
aaaaaagcttattgggaagaaggtggctttaaccaagagagcagatccag

SEQ ID NO: 79501 - DNA, 100 bp, Homo sapiens
gaacttctgatgaggatgttacagatgctggtcttaccacttatcatctccagtcttgtcacagagtgtgccctggaggatgaaacgtatgcagatggag

SEQ ID NO: 79502 - DNA, 75 bp, Homo sapiens
gagatcgttttgatggatatatcttccttgacagcaaaggtgataacgtggtgctggaccagacctacctgtggc

SEQ ID NO: 79503 - DNA, 83 bp, Homo sapiens
tttctcgattcgctgtcggaggagaatgagaccctggtggagtttgctattggtttggtgcacctcgatttggaggaagtagg

SEQ ID NO: 79504 - DNA, 82 bp, Homo sapiens
gctccatggcctctcctggactggctgcgtgaccccgacggctgcttctggatgccatggacaatattaccaggcagaacca

SEQ ID NO: 79505 - DNA, 102 bp, Homo sapiens
gctgtcctggtcttctttctcttcgccttgccctcttttattaaggagcctcaaacaaagccttccagagttcagaaggaacagctggctgccatcttcaag

SEQ ID NO: 79506 - DNA, 100 bp, Homo sapiens
tccttcgctaacgcctcccggctctcgtcagcctcccgccggccgtctccttaacaccgaacaccattacgtggagaaccaccctttttggcaagctcag

SEQ ID NO: 79507 - DNA, 75 bp, Homo sapiens
cgagtatgaaagtcaagtcaaaggaataataatggttggggttatcgttggttcaaagaagactggtataaatcc

SEQ ID NO: 79508 - DNA, 100 bp, Homo sapiens
gaaggaggatgatgatgaggaagggaggatgatggtgaggcaggagaggaggacgaagaggtagctcgtaagctggtcatcctggagggtgagctggaga

SEQ ID NO: 79509 - DNA, 50 bp, Homo sapiens
agatccatttacactttacaatctgttacctaaagcaataaaaaatggcc

SEQ ID NO: 79510 - DNA, 49 bp, Homo sapiens
cattgccaaatcctccatcaaagatcaatgaactgagccatgttcaaat

SEQ ID NO: 79511 - DNA, 101 bp, Homo sapiens
ggaggaggggagaggcctggaggacaccaacatggtactccaaagattcaggtttactcacgtcatccagcagagaatggaaagtcaaatttcctgaattg

SEQ ID NO: 79512 - DNA, 98 bp, Homo sapiens
tccctgcggccccgggatgacttctcagcgttcccctctggcgcctttgctgctcctctctctgcacggagaaatggcttccctgaggcaagtgtaac

SEQ ID NO: 79513 - DNA, 101 bp, Homo sapiens
tgccagcacctttcggcttctgagacggcggcagcagcggcattcagtaaaggcatgacttcctggcaccacagggaaaatcgggtgcaagcccagaaact

SEQ ID NO: 79514 - DNA, 100 bp, Homo sapiens
ggagagtacttcccaggaactggggacctacgggtagttaacctgcagtacagtgaagttcaagatcgggtcatgctcactggccgccacatggttcgag

SEQ ID NO: 79515 - DNA, 100 bp, Homo sapiens
tcttggctcctccattctgcttttaagtgactctgacatcattagaagcatgccagaacagactggtgaaaagtaaaccttttcacctacaaaatttcac

SEQ ID NO: 79516 - DNA, 80 bp, Homo sapiens
ctggcctggaggctatccagcatgatgataattccgaagaaggcttccacactattcattcaggaaggcatgaatatgca

SEQ ID NO: 79517 - DNA, 75 bp, Homo sapiens
gcacagaggaggaggcagcagaaccccatcactgtaatggcgttgactggcgtcagaagctggactctcagcgag

SEQ ID NO: 79518 - DNA, 100 bp, Homo sapiens
tctgcccacccctcctgtaacccagcctgtttcacttcttgatatggatcagaaactttcgaagttggtagaagagctcacaacttcaggagaaccccga

SEQ ID NO: 79519 - DNA, 100 bp, Homo sapiens
ttcattctggacgtgcttctgcccgagatggagtctccctctgtcacccaagctggagtgcagtggcgcagcctctgctcactgcaacctctacctcccg

SEQ ID NO: 79520 - DNA, 98 bp, Homo sapiens
gcagaacggcgagtagcggagcgggacccgctgacaatcatatcctgattcagcccttcctccacaaaggcaagacagattttgttctaattctggta

SEQ ID NO: 79521 - DNA, 75 bp, Homo sapiens
gcgggaggagcctgttcccctgagatgccttcaattaagttgcagagttctgatggagagatatttgaagttgat

SEQ ID NO: 79522 - DNA, 50 bp, Homo sapiens
agatattacagcaatgctttttcagatgctgggttggattttgatcacct

SEQ ID NO: 79523 - DNA, 75 bp, Homo sapiens
gaaaaatctcatccaagaagccctaacgtgttatctgtcgctttgagtcaaaggctggagcgcaatggcgtgatc

SEQ ID NO: 79524 - DNA, 101 bp, Homo sapiens
ctgtcttctcggaggtggagtacctgaacgtgcgcctcagcctgcgggagcccccggccggtgatgatgaaggaatccaggagacagcagaatcagatggg

SEQ ID NO: 79525 - DNA, 100 bp, Homo sapiens
ttccaaaagaaaactggctaaagatgctgtgtcgacatgtagctaacaccatttgtaaagcagatgctactgggctggcttagatgaagatgaagatgca

SEQ ID NO: 79526 - DNA, 75 bp, Homo sapiens
caaaggggaggttacgcagcaaaccatccagaaggtgacagagctgaatgaacctctctccaatgaagatcgaaa

SEQ ID NO: 79527 - DNA, 51 bp, Homo sapiens
cttagtgtacagaagttcatgcttcttggacacttaatgattgttggcaag

SEQ ID NO: 79528 - DNA, 100 bp, Homo sapiens
tccttagtgaggctcagagatgcctgtaccgtgatgtgacgctggagaacctggcacttatgtcctccctgggctccctggcattgggcagtgttacagt

SEQ ID NO: 79529 - DNA, 95 bp, Homo sapiens
gaacatgcaatgagaagactgatcaatctgtacagaacctgctaaggccatcaaacctattgatcggaagtcagtccatcagatttgctctgggc

SEQ ID NO: 79530 - DNA, 82 bp, Homo sapiens
cacccaaatcctcttctccaagaaggtatagtcgtctccccctccaccacggcaagtcctgcagagggaaccagctctgaca

SEQ ID NO: 79531 - DNA, 100 bp, Homo sapiens
gcgggtcttgggtcctccgagagcagcagcgatccagacatttaatgtggatgcaccatgccagaccgtggaagatttaacgaatggggttgtgatggcc

SEQ ID NO: 79532 - DNA, 82 bp, Homo sapiens
aaacggcgagagtgggcgagaacgtccactgcgggccggcgaaagctggtcagcccaaggccaaccccactgtcactctgtt

SEQ ID NO: 79533 - DNA, 87 bp, Homo sapiens
tcctctggtcttccctgaccccgcggccggacgacccaagcccgctgagcaggatgaggattctgacaatggagatattaattatga

SEQ ID NO: 79534 - DNA, 74 bp, Homo sapiens
aaaccctcagattggaggctggtgtcccggagcagtgcaaggattgcatgtcgtggcaaaaacatggaagtgag

SEQ ID NO: 79535 - DNA, 90 bp, Homo sapiens
gcagaacacagcagggcggaggaaagtgcaggtttcccggtcctctggcgaggatcctccaaggcgtctcacatgaaccggctcagaaac

SEQ ID NO: 79536 - DNA, 74 bp, Homo sapiens
ccgatttgacgggcaaccaatcaatgaaacagacacacctgcacagttggaattcagagcccttctatttgtcc

SEQ ID NO: 79537 - DNA, 90 bp, Homo sapiens
tacaatagaattaaagcgcttccttctgggattggagctcaccagaaggaacaccagccagccgtggaacctcaggtgcaacagagacgc

SEQ ID NO: 79538 - DNA, 141 bp, Homo sapiens
cggagatccgctacgagggcatcctctacaccatcgacaccgaaaactccaccgtagcccttgccaaaggctggcatggctctatataagattgtccccaaaaatccctactacttttggtctgtgatgagcttaattatg

SEQ ID NO: 79539 - DNA, 49 bp, Homo sapiens
atttcttactgcaagagataagctttagttttggtccagaaagcatttt

SEQ ID NO: 79540 - DNA, 100 bp, Homo sapiens
tacgaagactcctgccgcgtataccaggcatccagccccgatgagttcatgcaggatgcatcagatgtgatgcagcttttgttaaagacccagacagact

SEQ ID NO: 79541 - DNA, 83 bp, Homo sapiens
gacgaggcctccttcaagtccgaggaagacacagctgcccagagcagcccaggccgtggtgaggaggcggaggcatcggcggc

SEQ ID NO: 79542 - DNA, 100 bp, Homo sapiens
taagagaagctcaaggccgaagccgagcagaggatctaaatacaagagtggcctattggcaaatactgtggtctggggttgcaaatgaaccattcaattg

SEQ ID NO: 79543 - DNA, 90 bp, Homo sapiens
gattcgcagtggtcgcttcttctccttgggtgaaaatgggatggaggattgtgtcatggccctagaaaccttgtttagtgttctgctttc

SEQ ID NO: 79544 - DNA, 105 bp, Homo sapiens
cgtccgtgtgaagagaccaccaaacaggctttgtgagttctgtgctgagccgaagttcatctgtgaagacatgagccgcacagacgtgtgtcaggggagcctggg

SEQ ID NO: 79545 - DNA, 100 bp, Homo sapiens
gcgggagcctgggcggcgagccgggtgtgagctgcctgaaaatgcactcggatgccgccgctgtcagcgggcgctaatattgacacctgctcagaagacc

SEQ ID NO: 79546 - DNA, 90 bp, Homo sapiens
cgatttcagaaaaccaagaacctgctgacaggagagacagaagcggacccagaaatgatcaagggcaagaagtacaagcccctggacctg

SEQ ID NO: 79547 - DNA, 100 bp, Homo sapiens
gagccaagcattggcaaagcgaagctgcggcctcttccagaaactaggagaatattacttacaaaatgcgctattagttcgttacaccaagaaagtaccc

SEQ ID NO: 79548 - DNA, 75 bp, Homo sapiens
ctcctcctgtggtggaggagaaggaaagttgcaaccagtgtggcagagagtctaagcttttgtcaaaattttatg

SEQ ID NO: 79549 - DNA, 75 bp, Homo sapiens
agagtcaacagcagtggcaacagtttctacagcagtataatcactacaaatccaatgtggagattttcaaattgc

SEQ ID NO: 79550 - DNA, 90 bp, Homo sapiens
tgtacagccatcaagaggatcttaaagtgtggtctttagtggaaaaaaaggtggaacgagaactttgttcagccacagctgaatttgagg

SEQ ID NO: 79551 - DNA, 100 bp, Homo sapiens
aacgagctacatcatttgaggaatcagaacgcaagcaaaatgcgttaggaaaatgtgatgcatgtctcagtggtgaaattgccctcttggaaggcctgac

SEQ ID NO: 79552 - DNA, 100 bp, Homo sapiens
cctaggcgaagatccggactctgggtgttttgctaccgtgaccgtttagtgggctcgggatgagtttgaaggcctcttcaagcagccagcagaaaatgtc

SEQ ID NO: 79553 - DNA, 96 bp, Homo sapiens
cattgccatcttccccaactaccaccaagtcctctccatctgatcccatgaccacctccagagctaatcagacatatctgaagagatggattaaga

SEQ ID NO: 79554 - DNA, 100 bp, Homo sapiens
gcctgtggcagcgatggcgccgttacaagtaccgcttcgttccctggatcgcactgaacctaagccacaacccgagggaacaacctatcttcagcactcg

SEQ ID NO: 79555 - DNA, 96 bp, Homo sapiens
tctcggaaaccccgcctcttacagtcacgaggcgcacctatgttggcagcatgcctggtcgcatcatcaacggcttgaagactgtgggagtgaaca

SEQ ID NO: 79556 - DNA, 100 bp, Homo sapiens
ctccttttaatttggtacctcatgtggacaacattgagacagccaacagttttgctgtaacaaacgcctgttctttcagagcacggcttcggccccatca

SEQ ID NO: 79557 - DNA, 75 bp, Homo sapiens
ttgacgagacagagtaccatgcagatgggggcaaggtcgttccaggggtagaggaggcatgaaggatgaccgtcg

SEQ ID NO: 79558 - DNA, 83 bp, Homo sapiens
gcttggtttcatagagactgtttacagttcttctcaccactaaatccaatacgagttcatattgatattggagctgatggcag

SEQ ID NO: 79559 - DNA, 75 bp, Homo sapiens
gaattgtgggctctcattttgaatatttccagccaacctgaggaggtacactcagtgaaatttgcaaactctcga

SEQ ID NO: 79560 - DNA, 78 bp, Homo sapiens
tttgcaggggttgttttatatttaaaatttcgtttgccagaaatcagcagaaccaccaccacctaaaatccccaaaat

SEQ ID NO: 79561 - DNA, 83 bp, Homo sapiens
ctctggaaaaacttcttgccaaccaaatatcatcgagaaaggagaagaacactgtggacatctaattgaggcccacaaggaat

SEQ ID NO: 79562 - DNA, 75 bp, Homo sapiens
gccttcaagtgcatgatgtgcgatgtgcggaagggcacctccacccgactggccttatgggtttctagaaggaaa

SEQ ID NO: 79563 - DNA, 100 bp, Homo sapiens
gccctggccacggggactctcttctggatgtccagttacaacacagggatcacaacaaacacaaccgccacagaagcactatggcattacttctcctatc

SEQ ID NO: 79564 - DNA, 106 bp, Homo sapiens
gcgagtttgtcttttcttacctgagactgggcctgaagggagagtttcagttcttcattgacgcgccggcatcggccgcacaggcaccatcattgtcatcgacatg

SEQ ID NO: 79565 - DNA, 75 bp, Homo sapiens
ggagttcttacaacatggcagacattgacaatgtaagaagaagcttgggaagctgccacctcagtatgccctgga

SEQ ID NO: 79566 - DNA, 100 bp, Homo sapiens
cgcgaggcggcatgagggagccgctcggtactccaaagattcaggtttactcacgtcatccagcagagaatggaaagtcaaatttcctgaattgctatgt

SEQ ID NO: 79567 - DNA, 100 bp, Homo sapiens
gagtggtctaaggcgccagactcaaggttgcatcataaatacaaaggactgaagttataaaagagaaaagagaagtttgctgctaaaatgaatctgagca

SEQ ID NO: 79568 - DNA, 100 bp, Homo sapiens
cagacctctgtttggggagacgtccgccaagggctccacgtgttccccacgtttgtggcgtacgagctcacggtgctggtgttcctcaccttgtcagtgg

SEQ ID NO: 79569 - DNA, 50 bp, Homo sapiens
ggcttctctttccacctggagcaggtacgctacgggccatgacatcacag

SEQ ID NO: 79570 - DNA, 100 bp, Homo sapiens
ccatggtctccgtggtgacctcatcaccccctggcacctggggctgccttgcttgcctaaagccaagcgcaggccaaggcaaaggccaaaacttacgagt

SEQ ID NO: 79571 - DNA, 98 bp, Homo sapiens
tcatgctggccaagaagatcatcattaaggacggaggcacggtatatcctgatcagcaaacccacaatatggacagaaagattaagaatgcagttcct

SEQ ID NO: 79572 - DNA, 60 bp, Homo sapiens
gcctgctgcactttgggttcaaggcgacatcaaagaagtttggcagagatcacggagcta

SEQ ID NO: 79573 - DNA, 97 bp, Homo sapiens
tggcggccgaggtagaggcagtggcgcttgagttggtcgggggcagcggcaggtttgaaaccaggtcagagaaaggttttgtttacttgcttcaaac

SEQ ID NO: 79574 - DNA, 90 bp, Homo sapiens
gacgcggtgggccgcccctccgcgaagcagcagttttgggaatttcgatcgttttcggaataattctttatcaaaaccagatgattcaac

SEQ ID NO: 79575 - DNA, 75 bp, Homo sapiens
caaatgcccccatcgctatacaaaagagagagaagctcttcagaaacagctggatgaagcaaatcgagaagcaca

SEQ ID NO: 79576 - DNA, 75 bp, Homo sapiens
tgcatgatccgggtgaagaagcagatgtgctggtggacggacagccatgtgaccgcgaggctgtggcggcctgcc

SEQ ID NO: 79577 - DNA, 98 bp, Homo sapiens
tcgccgttaagcagccgcgggacacagctccggggaccggggtctgactcccttaaactgagctttctcttaagtgtgccaagctgccatccaacttt

SEQ ID NO: 79578 - DNA, 74 bp, Homo sapiens
aggtgaagagttgtcccagctcggcccgcgggggagccccgggagccgcacggccctggccaacgtcaacattg

SEQ ID NO: 79579 - DNA, 98 bp, Homo sapiens
gaaggaagatggcggatctggaggagcagttgtctgatgaagagaagacttgaaagagggctccagaaaaagtagatgcgtatctgtacaaacagatc

SEQ ID NO: 79580 - DNA, 82 bp, Homo sapiens
atgacggagctgcagtcggcactgctactgcgaagacagctggcaggtattcacaacattgtctgtgaccaagcgctctggg

SEQ ID NO: 79581 - DNA, 133 bp, Homo sapiens
gcaaggtgtcggtgttccacgtgaagctcaccgacagtgccctgagggccttcgagagctaccgcgccagacaggtcaaaatgcagatcttcgtgaaaacccttaccggcaagaccatcacccttgaggtgga

SEQ ID NO: 79582 - DNA, 98 bp, Homo sapiens
tgcacaacgaggacgccttccagcacggcatctgctttgaggccaagattgggagagtcatattaataccaaatggtcagcacctcagcagaattttt

SEQ ID NO: 79583 - DNA, 75 bp, Homo sapiens
ttcaacattatcaacatgaccttccccacactcatgatggagcagtccaagaagtcctccctcatggtggcccgc

SEQ ID NO: 79584 - DNA, 100 bp, Homo sapiens
aaccaaaagctgtgagaacaactacacgttacgctattcgttgtggtccaaaacagtttacctcttatctaacagtggctgacaaaacagcctatctgat

SEQ ID NO: 79585 - DNA, 88 bp, Homo sapiens
tctcctgatacagcaggcgctcaccatgttccctggaggtgagcacctgcggatctgtccccagggctacacctgctgcaccagcgag

SEQ ID NO: 79586 - DNA, 100 bp, Homo sapiens
gctggagaatggcgagccccgtggactccccatcatccaagacgtcatgctagccgaggcccagctatcagttgagggatttgcagttgataaaatggct

SEQ ID NO: 79587 - DNA, 100 bp, Homo sapiens
gttcgtgtcgctgctgcaggaggccaaggacggcgttctggatctcaaagcgatatggctcgtggacagcagaaaattcagtctcagcagaaaaatgcca

SEQ ID NO: 79588 - DNA, 90 bp, Homo sapiens
gccgggagagggagaacacagttggagaaaatcggcagctgagacggccttggccggcttgcagggtggcccccgctccgacttcgacat

SEQ ID NO: 79589 - DNA, 100 bp, Homo sapiens
ggcaattaccatggcagctgctcaagcagttcaggctacagctcaggtgatctgggctcttgggatctgctcatttgcctgtcttctaagaaagcagaag

SEQ ID NO: 79590 - DNA, 100 bp, Homo sapiens
gatggctgcgtttaagttggatttccttccagaaatgatggtggatcattgctctttgaattccagtcccgtagaccctcctggatgacttccttctcac

SEQ ID NO: 79591 - DNA, 106 bp, Homo sapiens
aattatgtagaggaagaaaacattcctgctctgaaagctcttcttgaaaaatgcaaagatgtagatgagagaaatgaggagttcaaagaaggacgcagagccagcc

SEQ ID NO: 79592 - DNA, 90 bp, Homo sapiens
taaatcccgaaaaggagaacttcttaagaagagtggtcagggaagtcaaagatgcatccctgagttcttcctagcaggcaagcagccgtg

SEQ ID NO: 79593 - DNA, 100 bp, Homo sapiens
gcgtacgctggttggcatttgctctgagcatcagtcacggttattagaggaagtaacacaaggggatatgagtgcagcagacacatttctgtccgatctg

SEQ ID NO: 79594 - DNA, 98 bp, Homo sapiens
gcggcgctccatcccaaacacacacacatttttcccccggacttggaaagtcacccaaagccgccccaagtgcagggtgaggtggctttgaccccggg

SEQ ID NO: 79595 - DNA, 51 bp, Homo sapiens
atagatgcctgggaattgcgtaaagggataagaagcatgtagactgggtca

SEQ ID NO: 79596 - DNA, 90 bp, Homo sapiens
aggaaccagagcccatcttaatcccggggctagtgacatttgaagatgtagctgtggatttcacccaggaggagtggcagtacctgaacc

SEQ ID NO: 79597 - DNA, 85 bp, Homo sapiens
ccagcgtccgccgcgcctcggccaaggtaagtaaggaggtctctgtaccatggctcgtacaaagcagactgcccgcaaatcgacc

SEQ ID NO: 79598 - DNA, 75 bp, Homo sapiens
aagaaacttccaacacagtttcccaaagaaaaatgggcaccaagggcaaagttgcattttggacacttgcatacg

SEQ ID NO: 79599 - DNA, 98 bp, Homo sapiens
gcaggcaagcagtgtcaatattgcagctactgcttctgaggttatgaaaaccaggctggctgtaggcaaaactgggcagtactctggaatatatgatt

SEQ ID NO: 79600 - DNA, 83 bp, Homo sapiens
ccagattctgcgcgtcaacgacaaatccctggcccgggtgacccacgcggaggccgtcaagtcgtgagatggagaataaagaa

SEQ ID NO: 79601 - DNA, 73 bp, Homo sapiens
ggggcgaagctggatcccctagatttcgatggggtcctctatcatatttcaaatcctaatggagacaaaacaa

SEQ ID NO: 79602 - DNA, 100 bp, Homo sapiens
gagctggccatggtgccccactatggtggcatcaaccgagttcggtcctcctgcaaggagaatccttttaaccggaagccatcacctgcagcgtccccag

SEQ ID NO: 79603 - DNA, 98 bp, Homo sapiens
aatgaaggggtctagatgtaaatgtcagtggaaaggagagctaccatcactaaggccgggtgagagcaaaactttcagcaccacttgctggcatggga

SEQ ID NO: 79604 - DNA, 87 bp, Homo sapiens
tggtggatccttcccaattgtcaggcatctggtgtcgaaggctcagatattcctgatgatggtaaactgataggatttgcccagctc

SEQ ID NO: 79605 - DNA, 90 bp, Homo sapiens
gcctgccattcttatcatttctaagcaggttcatgccagcccagaacagagaatcaggatcgcaacaatgcaaggcaaattcatgaaggt

SEQ ID NO: 79606 - DNA, 98 bp, Homo sapiens
ccgcaatgtgtccagcctcgtcgccacccgtgaggactacaggtacagctggataacttgccaggaatgagtctcgtggctgggaaagcacttagctc

SEQ ID NO: 79607 - DNA, 75 bp, Homo sapiens
tctggcttgttcgggctcagcggccgcgaggccgcagctcccgaactgataaatttcaaacggaagagagtggca

SEQ ID NO: 79608 - DNA, 100 bp, Homo sapiens
gcgcgacgacggctcctgggaggtcatcgaaggctaccgggcccagcacagccagcaccgcacgccctgcaagggaggatgataatgaagataattcaaa

SEQ ID NO: 79609 - DNA, 75 bp, Homo sapiens
gccattggagggcgcggggactgcaaccctaatcagcaagaagccaccgcagagcaagagaacaaacggtatgaa

SEQ ID NO: 79610 - DNA, 50 bp, Homo sapiens
tcactgtgaccaccaaccaagcaggaacgtgttcaaaaaagtttccctca

SEQ ID NO: 79611 - DNA, 100 bp, Homo sapiens
ggagatggaaaaggagttcgagcagatcgacaagtccgggagctgggcggccatttaccagctgctgaaatgggttgcggattgaacaagttagagaaac

SEQ ID NO: 79612 - DNA, 87 bp, Homo sapiens
ggaacagacttgggaacaaacacaagccctcagcaccactttgaacaggagcagattctggccagatttctgaagaaacatggaatt

SEQ ID NO: 79613 - DNA, 74 bp, Homo sapiens
gcctgttccgcagcccgcgtccgcgccggccccacagctctgcgtccgggctctccgtgtgaaatggtcccatc

SEQ ID NO: 79614 - DNA, 89 bp, Homo sapiens
aagtggcagaccaagccaaagctgaccatccatggggacctgtactatgagggttctcagaagcgagctatctctaccccagaaacccc

SEQ ID NO: 79615 - DNA, 51 bp, Homo sapiens
gtagaatcacttgggttcattctattcaggcgaggattaaatccaccacac

SEQ ID NO: 79616 - DNA, 96 bp, Homo sapiens
ctgcagtggaccacagcattcctgaaatacatccaggaaagacatggagattctcttaaaaagcttgcacagaagatgggatttccacctaatatt

SEQ ID NO: 79617 - DNA, 75 bp, Homo sapiens
gtctgtttgcaaagcacctgaactggaaatggtgttcacactggccctgaatcaagggaacaccagttttcacat

SEQ ID NO: 79618 - DNA, 50 bp, Homo sapiens
gaggaagaggaggatgacccacttgccccacaccagtgagaagcatcagc

SEQ ID NO: 79619 - DNA, 100 bp, Homo sapiens
agctcaagggactgtgtccaccctcaggtacccagactcatggtatcgtgatatcacatccaacaagaagttcttttcccttgctgcaacctacagaggt

SEQ ID NO: 79620 - DNA, 59 bp, Homo sapiens
aaaagttctcaattttgaacaagctatcaagaatgattacggacctgaagccaaagaac

SEQ ID NO: 79621 - DNA, 113 bp, Homo sapiens
acccagcgctgtgctccaacgtgctgcagcacccagaccatggcgagcccagggaaagacaattatcgaatgaagagctataagaacaatgctctaaaccctgaagaaatgag

SEQ ID NO: 79622 - DNA, 98 bp, Homo sapiens
ctagaggggtgacagcgaaacgtgttcgaaatccgcaccactgatgacctcactgaggcctggctccaagaaaagttgtctttctttcgttgatctct

SEQ ID NO: 79623 - DNA, 100 bp, Homo sapiens
gtccgacgtctggccgtgagacgtttcgggagccggagtctctccaccgcagacatgacgaaggttccagaagccaatatcttgggacaaattggacatg

SEQ ID NO: 79624 - DNA, 100 bp, Homo sapiens
cctgatggtgaacatgccaggagagcaatgcaaaagctggagttgatcaaggatgatgaaaaagaggctgaggaaggagaggatgacagagacagcgcca

SEQ ID NO: 79625 - DNA, 90 bp, Homo sapiens
tggaaacaccatggctgcggcggcccagctctctctgacacaggttgagcatcctgtcacagaatgcattactggcctggacctagtcca

SEQ ID NO: 79626 - DNA, 75 bp, Homo sapiens
ggtgatctggacaaaggaacaggtatctcagaactgtcagaccttcagcagcctcagctgcctgagcgcagggac

SEQ ID NO: 79627 - DNA, 75 bp, Homo sapiens
acagtttaaaagccttggcagtcaagccagagactgctgctactttgaaacgtacgatagaggccctgatggaca

SEQ ID NO: 79628 - DNA, 75 bp, Homo sapiens
cggctgcgcgaggagcaggaaaagatgctctctgtgtgggtatgtgtgtagccatcctccttctttgaagtctca

SEQ ID NO: 79629 - DNA, 100 bp, Homo sapiens
ccctctcctaagagacccaggggaagacccaaaggcagcaaaaacaagagtccctctaaagcagctcaaaaggcaaggtgcccggcgacgactgcccgct

SEQ ID NO: 79630 - DNA, 100 bp, Homo sapiens
agtctcgccagcgtctcctctgccaaaacccagggctggaagatgtggcagccggccacggagcgcctgcaggccttgctattttggaagctacaagaaa

SEQ ID NO: 79631 - DNA, 90 bp, Homo sapiens
agcaggggatgtggtccaaggaagaaattgatattttgatgaacaatattgaacgctatcttaagacttcacagagaatgcagttgtctt

SEQ ID NO: 79632 - DNA, 75 bp, Homo sapiens
gcagaacggagcgcccgggatgcaggaggagagcctgcaggggctgaagaagatgcagagcagcctgaagctggt

SEQ ID NO: 79633 - DNA, 95 bp, Homo sapiens
aaaagttttcctttgaaccaaaaatccgatcacctcgaagatttattggcagcccacgaacacctgtcagcccctcatatggaaaatttgaaatg

SEQ ID NO: 79634 - DNA, 88 bp, Homo sapiens
cagcccaccatgatgagtcaaactgttagcccccaaggttggggcccgacagatgccatggacaatattaccaggcagaaccaattct

SEQ ID NO: 79635 - DNA, 100 bp, Homo sapiens
tggagcatgtgcaggatcctcagaacactgttaaggtccagggcccagaggctttctccgatgtctaactctttgtgccttgagctcctttatgtttggg

SEQ ID NO: 79636 - DNA, 78 bp, Homo sapiens
tcgcgtgtctaggtgagtcgcggtgggtcctcgcttgcagttcagcgaccacgaatagcctaacatggcagaccagag

SEQ ID NO: 79637 - DNA, 75 bp, Homo sapiens
ccatgcccatccgaaaggatgatgaagttcaggttgatgttgaacagcacactttagccaagtatttgatggagc

SEQ ID NO: 79638 - DNA, 100 bp, Homo sapiens
atctacaacgagtactgtgggcctggagccaagcccctcttcaggagtaagatatgactccacgtagcatgtcaaggactacattaatcaccaattcctt

SEQ ID NO: 79639 - DNA, 75 bp, Homo sapiens
cggagattggctgcctcatccgcttctatgcagccaaaccaaacaggaagcttacttttctctacctagccaatg

SEQ ID NO: 79640 - DNA, 82 bp, Homo sapiens
gtcggggatcggtcgcctgagaggaacaagatcactcaaggtgaaggataatctactaataccagcactttgaatgaaaatt

SEQ ID NO: 79641 - DNA, 82 bp, Homo sapiens
gtgtgcagcggattaaagctaaagacatagttcctggtgatattgtagaaattgctgggcaatgagctgggatgaagacaac

SEQ ID NO: 79642 - DNA, 83 bp, Homo sapiens
ggctcctctctttactgctgaagctttacttcgagctcatggtttattgggcacttcctagcaccaggcactgcaataagaaa

SEQ ID NO: 79643 - DNA, 100 bp, Homo sapiens
tggatgtgtgtggaggacatctatgccaacatcttcatcatcaaatgcagccgagagacagagaagcaggttcaggagaagtggcacctggtggaggacc

SEQ ID NO: 79644 - DNA, 144 bp, Homo sapiens
cggacgcggctggcgaagctggcgagcgggggtcatccgagccgtgtcacacagggacagccgcaatccggacctggcgacatcccccatttgagaccaaagcctgtgtacattactaccactcgagacaatgagaacatttac

SEQ ID NO: 79645 - DNA, 50 bp, Homo sapiens
aacgccgtctatttctgcaacaggatgctcaagaattccttcgatgttta

SEQ ID NO: 79646 - DNA, 74 bp, Homo sapiens
ccaagatgtagctaatgaccgtggttcccactgagatagggccagatttgagtgtgtgaatttttgagtgaaac

SEQ ID NO: 79647 - DNA, 100 bp, Homo sapiens
ctgcagaggagcgtcgcggcgcccgggaaccagccgcagccgcagccgcagcagcaggtgctggagaatctggtaaaagcaccattgtgaagcagatgag

SEQ ID NO: 79648 - DNA, 76 bp, Homo sapiens
tggacttcccaacctccagaactgcccattgctagaagactgggacataatcagccccaaagatgtcattggctcc

SEQ ID NO: 79649 - DNA, 98 bp, Homo sapiens
atcgaagccccttcccaggtcctcaactttgaagagatcgactacaaggagatcgaggtggaagaggccgacgcccccaacccatccctcatcccaga

SEQ ID NO: 79650 - DNA, 90 bp, Homo sapiens
ctctttcatcggacttctaatgcctgggttggtggttttatagccatttccatcatcagtttcctgtctctgctgggggttatcttagtg

SEQ ID NO: 79651 - DNA, 98 bp, Homo sapiens
tggcggccaatgtgggatcgatgtttcaatattggaagcgctttgatttacagcagctgcagaaataagcgggttttgaaaacaaaaaaaagaaggag

SEQ ID NO: 79652 - DNA, 97 bp, Homo sapiens
tgctttttgccaaaaaatacagagttgaatatactcagatgtatccagggaaagataacaggtaatgcatgtccatggtacacaaattcacaaggtt

SEQ ID NO: 79653 - DNA, 118 bp, Homo sapiens
atgccgtccgccttctctgtcagctctttccccgtcagcatcccagccgtgctcacggtgagaagccctaccactgcaactgggacggctgcggctggaagtttgcgcgctcagacga

SEQ ID NO: 79654 - DNA, 98 bp, Homo sapiens
caaagtccagctaaagcggcctaaggatgccaaccggccctactgagggcccccagatcgggatctgcggccgcaccggcagtgggaagtcctccttc

SEQ ID NO: 79655 - DNA, 104 bp, Homo sapiens
gagtcagaagccgctatgcttcctggacagcttgcagaaccttaaacacagtgggaatatcacttttgatgagattgtcaacattgctcgacagatgcggcacc

SEQ ID NO: 79656 - DNA, 75 bp, Homo sapiens
tagacctgaagacaaaaatccagaagtacaagcagtctgttgaacaggtagttaagcccccccaaaacaagacgg

SEQ ID NO: 79657 - DNA, 88 bp, Homo sapiens
ttcgtctgtgtcctattgagttttttcatggctagagtattcatgagaatgaaactgcctaccttccactggaagaatctcaaacagc

SEQ ID NO: 79658 - DNA, 83 bp, Homo sapiens
ggccatcttcaccgtgtacctgggctcgagcctgcacatgaaggttgcccccaagtttcctggcagtgtgtgatactgaggag

SEQ ID NO: 79659 - DNA, 100 bp, Homo sapiens
tgttcgtgaacacctcagccccccgccagctccgaacctttggtcgtccatccgcaacgtgcacagcatccaccagcggtcgcggaagcgcctcagccag

SEQ ID NO: 79660 - DNA, 100 bp, Homo sapiens
tttatgattttgtagcaagtggtgataacacactcagcatcactaaagttaccagatgtatgctactcatggtgggtcctggcttccctaaagataattg

SEQ ID NO: 79661 - DNA, 98 bp, Homo sapiens
atggagtccgcgctggaccagctcaagcagttcaccaccgtggtggccgacacgggcgacttccacgtgccggtggtggtgtgcacattgagccccgg

SEQ ID NO: 79662 - DNA, 100 bp, Homo sapiens
atttggaatagcctctcttcagtgttcacagagatgcaaccaaaatatggctacacacacctttctgcaggagagctgcttcgtgatgaaaggaagaacc

SEQ ID NO: 79663 - DNA, 100 bp, Homo sapiens
caaggactcagggcattgccccctctctacctgagaactagactcagcgcccagcactggatttgataatacaggtgggcgctcctcgccaaaaaaggct

SEQ ID NO: 79664 - DNA, 90 bp, Homo sapiens
cgcggctgagggcagcgccggttccttgcggtcaagatgctgcaaaacgtgactccccacaataactgtccccgccctactccggaccgc

SEQ ID NO: 79665 - DNA, 112 bp, Homo sapiens
cgagaccgtgaccgagagcgtgaccgagagcgcgaatatcgtcatcgttagaagctcccctcccacccggtcactccgtccagcaagcacgcagacagcaagcccgcgccgc

SEQ ID NO: 79666 - DNA, 75 bp, Homo sapiens
cacacagttctccatgagttggacagataccaaagagggaactgtggctgcaccatctgtcttcatcttcccgcc

SEQ ID NO: 79667 - DNA, 100 bp, Homo sapiens
gcgacagcaacagctctgccggctggaagatcggacagctggcttttaaaggaatgaagagactcaatagaatccagtcaatagtgtttgagactgccta

SEQ ID NO: 79668 - DNA, 100 bp, Homo sapiens
cacgtcatgaggaaggagcagcgcaaggaggtcacaagccccaaagtggacgtgttcaatgctaacagcaacctcagttctgggcctctgcccatcttcc

SEQ ID NO: 79669 - DNA, 51 bp, Homo sapiens
cagagacagctcaacacggcacttccacagaataactgaagtgaagtgatg

SEQ ID NO: 79670 - DNA, 98 bp, Homo sapiens
cttctacagatagagctgttaagatttgtagccaaaccgtgcgccatagccctcaacattcaggccaatggaccacaaattgctccgcccaatgccat

SEQ ID NO: 79671 - DNA, 135 bp, Homo sapiens
gactgacttacctaggaatgagagggacaggagtatctgaggatggagaactcagcaacactctggaaaacggatccaataagggtgaaaggtgagcaaaatgttcccattggccgttcctgcttttcagcgatg

SEQ ID NO: 79672 - DNA, 100 bp, Homo sapiens
tacatgctggaaaaacagtgccgattgtgaaaggaggggaggcaacaagaatggaggtttcagcagtagtgacttttcagacctgagtaatggagaagag

SEQ ID NO: 79673 - DNA, 96 bp, Homo sapiens
ttctcctggttaatcaagaattctctatttctgctccgtcatccatgccacttttggaaattttagcattcaggtgccaggaatgcagatgggaca

SEQ ID NO: 79674 - DNA, 116 bp, Homo sapiens
aatgaagtcagtctatgacaacgtctctctgccgtgaatcattcctgcagatgaaaaagtgtgacttggcagctgggaaaatggagctgatagtatcctggatcttggattagtag

SEQ ID NO: 79675 - DNA, 75 bp, Homo sapiens
gttttaaactcattgactttggacttagcttcaaagaaggcaatcaggaggagatgttaaagtaacccatcttgc

SEQ ID NO: 79676 - DNA, 100 bp, Homo sapiens
atcttctgttcacgttcctgtttctgctcttggtgcaggatctgcagctactgctgcatcagaagaaatgaaaggtgcaaaattccttagtgatgctgag

SEQ ID NO: 79677 - DNA, 87 bp, Homo sapiens
gattcgtgaccctcagcgccggtgcatgtcgatgtacatgtcccagagcaagcacacggaggcccgggagctcatgtactcgggagc

SEQ ID NO: 79678 - DNA, 51 bp, Homo sapiens
tggagacatggaccgcggcgagcaagctggaacagtgaaccatggagctgt

SEQ ID NO: 79679 - DNA, 75 bp, Homo sapiens
cgccatggctgcgtcggagctctacacaaaggagtttaccagctacttccaaagacatgacgaggtcctaacaga

SEQ ID NO: 79680 - DNA, 74 bp, Homo sapiens
ctctccatcccttccgaggcccgacttcgagtcgacttcaatgttcctatgaagaacaaccagataacaaacaa

SEQ ID NO: 79681 - DNA, 74 bp, Homo sapiens
ctacgcctgctcaatgagatcattgccgacttcgacgaggtgcagctgaatgccggccagctgcagtatatccg

SEQ ID NO: 79682 - DNA, 48 bp, Homo sapiens
tggtgacggaggacgatgaggcgcagaccagcatctcagacatgtcga

SEQ ID NO: 79683 - DNA, 75 bp, Homo sapiens
gtttgcggttcagccctttgatgaccgcagcagggaaatttgaacacagagacatacacaaagggaagaagatgt

SEQ ID NO: 79684 - DNA, 100 bp, Homo sapiens
ccgactgcagtaagctccgccgccccctaaagcggaaccggatcaccgagggcatttacggcagtttgttgcatattctaaggacccagacataggcttg

SEQ ID NO: 79685 - DNA, 75 bp, Homo sapiens
gccgtacgcggtgctgcgagggcagaacctggttcctctgtgacgagggtgcaggtatctctggggactacatcg

SEQ ID NO: 79686 - DNA, 99 bp, Homo sapiens
gcggggactcggagctgagaggagctgctgctcggaccagcgcggtctcctctgagcctccggcctccataagacccaaaacagatgacacctcttccc

SEQ ID NO: 79687 - DNA, 75 bp, Homo sapiens
ccaatcgtgaaaactatattcacaggacaaccctccatatgataagggagccttcagaatcgaaatcaactttcc

SEQ ID NO: 79688 - DNA, 90 bp, Homo sapiens
atggcagcagcgtggcctccgccaccgtgcacatccgaatggtaggataagttctgaacgtcgaaaagaaaagtctcgagatgcagccag

SEQ ID NO: 79689 - DNA, 76 bp, Homo sapiens
taacactcaagcaaagaagagttgagcacaatcagttggacaacatacatgttcttcagcattttgagcctctgga

SEQ ID NO: 79690 - DNA, 100 bp, Homo sapiens
cactttcgccagcccgtgccgcgagcgcggcctgcaggagacacggcttacctggatggggtgtcgttgcccgacttcgagctgctcagtgaccctgagg

SEQ ID NO: 79691 - DNA, 90 bp, Homo sapiens
cagggaacaaggatggagaaatgtgctaagtgctggtggaagtggtgaagtaaagtgtcccagaagcttttgttgacaattccagtttcc

SEQ ID NO: 79692 - DNA, 100 bp, Homo sapiens
ttgttcagtcagattggaccctgtaaaagctgtaaaatgataacagagggtcagtatagaccttctgatttgctgtgccctgagacatatgtttgggtac

SEQ ID NO: 79693 - DNA, 98 bp, Homo sapiens
gctgtcttgatcaggaaactgaagactctctgcttttgccacagcagttcctgcagcttccttgaggcattacgagattggacgaccaaatatttctg

SEQ ID NO: 79694 - DNA, 82 bp, Homo sapiens
gaagcagctggcttagaagcagatctggaatgcaaacagatctggcaaaatttgggatattaaggctaagacatactgcatt

SEQ ID NO: 79695 - DNA, 90 bp, Homo sapiens
ccttccaaatttccttttccaactaagtccataggtgtggaccctctgccggctaagctgtcctatgacaagtcacatgaccaagtgtgg

SEQ ID NO: 79696 - DNA, 89 bp, Homo sapiens
tctccttcgaggaacagagaaaatgaaaccagcagacagaatttgtcagcctctcctcctcccagttctcctctggatcgcagtcatcc

SEQ ID NO: 79697 - DNA, 75 bp, Homo sapiens
cacggatatcctctgttgggggagaaggctatgtggaggagatatagagccaagaaatatttatgtaaagtgaaa

SEQ ID NO: 79698 - DNA, 83 bp, Homo sapiens
ggtgaactctgtccagttttcaaaccacacagagctcaggccccggggcctccagcggcaccagcggagaccacggtgagctc

SEQ ID NO: 79699 - DNA, 121 bp, Homo sapiens
gctgtcaccctgggccagttcaaggagctgctgaccaaaaagggcagctacaggcacttccgttccggcgcccctccggtcatcaacccgctgggcaccagcttcccggacgacaccgcgg

SEQ ID NO: 79700 - DNA, 74 bp, Homo sapiens
aggagccccgcgagtggcgcgccggggatgctagcttgtcactttctgcaaaggtttccctcagggagcctcct

SEQ ID NO: 79701 - DNA, 100 bp, Homo sapiens
gcggcggcagatcttcagttgcggtgcggagctgagcagctgtccctacctggctcgcaagctgacccttgccatccccatcatcgctgccatcctcttc

SEQ ID NO: 79702 - DNA, 96 bp, Homo sapiens
cttatttcaacactacaagctatacgagtttatgttctactctgccagggaagaaattgtgataggaactgaggatgaagtcattgctgtttccga

SEQ ID NO: 79703 - DNA, 101 bp, Homo sapiens
gggagcggctcacggcggaggacgacgcgctcaaccagatcgcgcgggaggtcaaatggatgatgtactggattatatttgcacttttcaccacagcagag

SEQ ID NO: 79704 - DNA, 90 bp, Homo sapiens
gttttctggctgcggggggttgtcggagggattccaccaagcagatcttgattttgccagccttgctcgaggttttgccctgctgaggat

SEQ ID NO: 79705 - DNA, 101 bp, Homo sapiens
gggcttctccctgatgacaagcttaccctcttctgcgagtgcatacatagagacgtgaagccagaaaatatcctcatcacgaaacattccgtgattaagct

SEQ ID NO: 79706 - DNA, 100 bp, Homo sapiens
ggaaaatgtcactgtcccattggccatattttagttccagggtcacccccgagaggacaacaggcatctggaagtgctctctcgccactctgggtgcttt

SEQ ID NO: 79707 - DNA, 50 bp, Homo sapiens
gtgaaagtgaatctgtgccatcgagccaaagcctcactgtttcaattgtg

SEQ ID NO: 79708 - DNA, 74 bp, Homo sapiens
aaagaggcggaatttctgcagaagctgcttccaggatactacatgtctctggcatctctatcccctatgaggca

SEQ ID NO: 79709 - DNA, 124 bp, Homo sapiens
ggaaatgctccacgcagttactagtgtctgaagatccaaaggaaggaggagctaccaccaaagagtcagaagacccttttgaggacttctttgggaatcgaaggggtccccgaggaagcagaag

SEQ ID NO: 79710 - DNA, 103 bp, Homo sapiens
cttagctgtgctcgcgctactctctctttctggcctggaggctatccagcgtcatagagctgcccaacatccagaaggtcgaagtgtacccagtagaactgct

SEQ ID NO: 79711 - DNA, 113 bp, Homo sapiens
cacagtgtcaagacaacgacacatagctgggtgtcaggctgagggttagtgagcagatcctagtccactgcctggaacatggaagatgctccataattgtttgctgaaggaac

SEQ ID NO: 79712 - DNA, 75 bp, Homo sapiens
gaaaagttctcaattttgaacaagctatcaagcattgacaaaatctctaagataacctctccagtattaataatt

SEQ ID NO: 79713 - DNA, 100 bp, Homo sapiens
ttgtggacccggctactccacccctctggaggccatgaaaggttgttgatcattatgaaaatcctagaaacgtggggtcccttgacaagacatctaaaaa

SEQ ID NO: 79714 - DNA, 97 bp, Homo sapiens
tgaaaagagtaaacacaagtttatggtacagacaatttttgctccaccaaacacttcagatatggaagctgtgctccctgatggctcggagatcccg

SEQ ID NO: 79715 - DNA, 100 bp, Homo sapiens
tactggacatgcaaaaatcacatgtggctatgaccttcctgcaaaatgtaaagatggctttgcagcaggaaggatttgaccgaaaaaagcgaggttacag

SEQ ID NO: 79716 - DNA, 90 bp, Homo sapiens
ctggcaggagcagattccaaaggcacaggaagaagcttgcaggtacaccagaggatcgcttcctggcagaatttgggagctgtttattgc

SEQ ID NO: 79717 - DNA, 74 bp, Homo sapiens
ctgtaactgccaaacccaagttggttggagatgtggattttgaagccatgctgtgacctacaagcaaactaaat

SEQ ID NO: 79718 - DNA, 51 bp, Homo sapiens
aggcacagccttttacattgatcagtttttcagaagaagtgaagtcaagat

SEQ ID NO: 79719 - DNA, 83 bp, Homo sapiens
cactcaccaacgccatccaggactccctgactcgatggctcatcttggcagccaacagggatgaattctacagccgaccctcc

SEQ ID NO: 79720 - DNA, 90 bp, Homo sapiens
gcaagcgtgacttgaagtgttgcatgggcatgtgtgggaaatcctgcgtttcccctgtgaaaggctgacccagctggatgttgacagcca

SEQ ID NO: 79721 - DNA, 100 bp, Homo sapiens
cagttatgcactttaccctttttaatattggccaatcatcaagacaagccagcagctcgctcagtacaagaggcaccgaccgtcacgagctaacttcctg

SEQ ID NO: 79722 - DNA, 74 bp, Homo sapiens
aagacatcaaccaattaatcataaatacactctgcatgttggcagataaattgaacatgactccagaagaagct

SEQ ID NO: 79723 - DNA, 50 bp, Homo sapiens
gtaactacctggcattgccttttgttgagttcctccagtcatccgggtgt

SEQ ID NO: 79724 - DNA, 74 bp, Homo sapiens
cttctgcgccccaggtgttgtgtgtgggggtgcaggtgcggagcgggccctggtggcgcggccctccctggaga

SEQ ID NO: 79725 - DNA, 101 bp, Homo sapiens
ctggaggcttcctttactgctgcttccctgggaaaatctgttgacagcaaggtcccctctctgcaggtgacaaacagcatgtttggtgcttcaagaaagaa

SEQ ID NO: 79726 - DNA, 73 bp, Homo sapiens
ccggagcgtcacatcactttccgatcacttcaaagtatctgactgcagccatgagcagcaatgagtgcttcaa

SEQ ID NO: 79727 - DNA, 51 bp, Homo sapiens
gttgaattacgcattctgcttcagagcaagcaccaacaatgtttagcagta

SEQ ID NO: 79728 - DNA, 75 bp, Homo sapiens
gttcaggaaatggctgaagttcgtaaagatgatgttgtaacagtgactggtgtgatccctcacatccacaaatct

SEQ ID NO: 79729 - DNA, 100 bp, Homo sapiens
ggagagtttggagccctgcagactgtccgcctggagcgttacaaggccttctacattaccgggcgtctctggccgagcctctttttgtggaaaacgacag

SEQ ID NO: 79730 - DNA, 90 bp, Homo sapiens
ggagaggtcggctcggaaggaaaaggggtacacatctttctggaatgactgcatatcatcaggcctgcgagggggcatcctgatagagct

SEQ ID NO: 79731 - DNA, 50 bp, Homo sapiens
ggaggggctccggctggtctgtggtgagatccctcgggctggtggaaggg

SEQ ID NO: 79732 - DNA, 90 bp, Homo sapiens
cttcccctccgtggtgacagcctctgggtcctcggtcggtacagtctctgcacctcgcgccccagcagagtgtgacatgttggcgagcca

SEQ ID NO: 79733 - DNA, 75 bp, Homo sapiens
gtggaaccctcaaaaatgcctccaccagagttaatttggagtggcccctggagtcagtttcctacaccatccgag

SEQ ID NO: 79734 - DNA, 73 bp, Homo sapiens
atggactcggaatattacagcggcgaccagtcaggaagcattcagaattgtctgaattgaatgttaaagtcct

SEQ ID NO: 79735 - DNA, 100 bp, Homo sapiens
gtgggctgcgtgtgggacgggtttagcggcagcctcttcgagtgcacatttggccatgatcgataccctcatgatggcttatactgtagaaatggtcagt

SEQ ID NO: 79736 - DNA, 95 bp, Homo sapiens
ggctgaggcagcgcggccgcagcagccctctattcaggattatgaaactgctcaggaacacaatgaaaatgatcagcagattcgagaaggtctag

SEQ ID NO: 79737 - DNA, 98 bp, Homo sapiens
agaacccccaggagcagaagtccttcttcgccaaatacgaggagccgaggaaggtctgcttcacctacgacctgttcctgaacctggaaggcaacccg

SEQ ID NO: 79738 - DNA, 83 bp, Homo sapiens
ggcatcagaagacctacgccttcaggatttttagactctgaggagcagttggagctaatccacattatggaaatggaaaccac

SEQ ID NO: 79739 - DNA, 75 bp, Homo sapiens
caagtatgctgcaagtgagaacatatttaacaggtgttggagcgggccggagagaagtagagtgggctgcgagga

SEQ ID NO: 79740 - DNA, 100 bp, Homo sapiens
tgcaaaggcagcaagagatgcacaggaggtaaatgaaattgcctttataaatacccttgaagcccagaataaacgtcatgatgttttatcaaaattgaag

SEQ ID NO: 79741 - DNA, 100 bp, Homo sapiens
agcccagaataagattaagggttgtacaggctctttgaatatgactctgcaaaggaatgttttaaaggaagttgggctactcacaagttactacataaga

SEQ ID NO: 79742 - DNA, 106 bp, Homo sapiens
ctgaagctgacatcactgagctctgccgggacatgttctccaaaatggccacttacctgactggggaactgacggttctgaaacacagacaacatcaagggggaaa

SEQ ID NO: 79743 - DNA, 100 bp, Homo sapiens
ctttggttacctatgtacctgttaccactttcaaaaatattgagctcctggcagcttgcagagaagaatttcataggagactaaaagtgtatcatgcttg

SEQ ID NO: 79744 - DNA, 96 bp, Homo sapiens
ctcctcctccactgccactacagggaagtgcatcacatgtcagatcctggcgcccctgtgaaattgccttgtctgccagtgaaactgtcgcctccg

SEQ ID NO: 79745 - DNA, 101 bp, Homo sapiens
ctgctccttacagtcctggtcgtcgccgctgcccggccggggtgcgagtttgagcggaaccccgccgcgattattggagccggaattggtggcacttcagc

SEQ ID NO: 79746 - DNA, 83 bp, Homo sapiens
ctccgccatggacctcttcggggacctgccggagcccgagcgctcgccgcgcccggctgccgcctcccaaagtgaaatgcctg

SEQ ID NO: 79747 - DNA, 75 bp, Homo sapiens
agaagatcaagactggcttgatatgagcaatgttgagcaggacagtctcatcgaactcaaggaatcttcagcaaa

SEQ ID NO: 79748 - DNA, 98 bp, Homo sapiens
cggtttaccatggaacccgtgaccaagtggagccccaaacaagtggtggactggactagagatatggctcgtggacagcagaaaattcagtctcagca

SEQ ID NO: 79749 - DNA, 100 bp, Homo sapiens
gactccactgactcagcaggaagatatcaaactgtatgatatggcagatgtatgggtgaagatccaagatgttctacagcaagaagttgagaagtttaca

SEQ ID NO: 79750 - DNA, 75 bp, Homo sapiens
acgtgttggaccttccggagcttctcagaagacagagggttttcttttgagagatgggatctcgctgtgttgtcc

SEQ ID NO: 79751 - DNA, 83 bp, Homo sapiens
cgagattagctgtggctttccaagctatgggtgccatgaaggccggtctaattgaagccaacggagaactcaaggtcttcata

SEQ ID NO: 79752 - DNA, 75 bp, Homo sapiens
tcctgcgtggaagcgtttgctgccaccttctgcatcgtagaacaaccccgtgccgcgcagccgacgcgaggttcc

SEQ ID NO: 79753 - DNA, 99 bp, Homo sapiens
cctgtttgaaaatgccatgcgcagcgacagtggcagccagtgccccttgctgtggaggatgtatttgaactttctggctgatcagctgaccgaagaaca

SEQ ID NO: 79754 - DNA, 75 bp, Homo sapiens
tccttcctcagccgcgggtgatcgtagctcggaaatggcggtccctcctcctatgtctccatcctccaaatctgt

SEQ ID NO: 79755 - DNA, 82 bp, Homo sapiens
gagagctggagaagctgggattggagattccacccaaacttgctggtcactgggagagctggtggagttgagatctataatg

SEQ ID NO: 79756 - DNA, 100 bp, Homo sapiens
ggattccaagtaactcttatttgggcccagcgagcatgatggcctacttggttgtttctgggctattcctaactcgacttcgaagacccattggtaagat

SEQ ID NO: 79757 - DNA, 101 bp, Homo sapiens
ggccctctcgcgctgcactgtctctccgacgcaagactgtcccggcccggggacaggagagagtggcaagagtacgtttatcaagcagatgagaatcatcc

SEQ ID NO: 79758 - DNA, 100 bp, Homo sapiens
ctgctgctgctgctactacttacaactgtgagtaccagagtgcccactggttccaacagttcttctcagaccacagagtgtcttacacctgaatcctgtt

SEQ ID NO: 79759 - DNA, 101 bp, Homo sapiens
aagttcttccttgaagaaatacagcttggtgaagagttactagctcaaggctgaactccagtgcacccagttagacttggagcggaaactcaagttgaatg

SEQ ID NO: 79760 - DNA, 87 bp, Homo sapiens
cgtggctgctgccaagggctacattgaggtgatgagggacccagacatggagctgcgggaagaagcctggtctccggggccgctgga

SEQ ID NO: 79761 - DNA, 50 bp, Homo sapiens
ggtgacaagctcaaggcctgcgaggaactgtggaaggtgcatcagtgaag

SEQ ID NO: 79762 - DNA, 100 bp, Homo sapiens
gcggcacctacggcgacgtctacaagatgagaactggactgatgaccaactgcttggttttaaaccatgcaatgaaaaccttattgctggctgcaatata

SEQ ID NO: 79763 - DNA, 97 bp, Homo sapiens
agcgcgccggaccaagcgggcccagaagcggatcagccgcatcgagtatatccactccaagaacttcatccaccgggacgtcaagcccgacaacttc

SEQ ID NO: 79764 - DNA, 100 bp, Homo sapiens
ggcagagctcacgtgcctcaacgaagcctcggtgctgcacaacctcaaggagcgttactactcagggctcatctaccgggaatgcatatcagtccacgtg

SEQ ID NO: 79765 - DNA, 100 bp, Homo sapiens
gtgatgaggttgaagatctctatgagcttttgaaacttgttaaggtgttggtaaatcatgcttattgctacagtttacagacaagaggtttcagccagtg

SEQ ID NO: 79766 - DNA, 85 bp, Homo sapiens
cagcgagttggtcggtcccggggtcacccgctacgggaagcaggcctcgccacaggggaaggagttcgagacacgactgaaggag

SEQ ID NO: 79767 - DNA, 90 bp, Homo sapiens
cggggaagtcatgctcgcttcacggaggcaatagctagccggacaaaagatccttcatcaccgaagtgacgttttagaaacagtggtcct

SEQ ID NO: 79768 - DNA, 75 bp, Homo sapiens
gcgccgagccggaggctgcaggatgatcatgagcgtcttgttgttcatcgagcactcagtagaggtggcccatgg

SEQ ID NO: 79769 - DNA, 100 bp, Homo sapiens
cggcagcgccagtcggggcccttccctctaagcagacgttggacctctcgaacaaccagctgagcgagatccctgcagagcttgcggactgccccaagct

SEQ ID NO: 79770 - DNA, 74 bp, Homo sapiens
tgatagtattggcatttataatactgaactatggacctatgaggtgtacgaagccatcgacagcagagatggag

SEQ ID NO: 79771 - DNA, 100 bp, Homo sapiens
cggaggtacaaccctgggagtgagagtatcaccttcctcaaggatttcagttataaccgggaagactttgccaaagcagagtcttgctctgtcgcccagg

SEQ ID NO: 79772 - DNA, 74 bp, Homo sapiens
cagccctgaagagaaactgcaccttatcacccggaacctgcaggtgatctgtgaaaatggttcgctattcactt

SEQ ID NO: 79773 - DNA, 100 bp, Homo sapiens
cttccagtacacagacgagcatggggaaggctcggacatcatcatgcagctggacgacgtggttagcagtactgtgactgggccacgtgtggaggaggcc

SEQ ID NO: 79774 - DNA, 82 bp, Homo sapiens
gcggtagcagcgactcatgagagcgcggccggaggacagcatttatgacattaacagagaacaggactatgtcaagaattct

SEQ ID NO: 79775 - DNA, 74 bp, Homo sapiens
gaacaatctaactgggcaaaagaagtacaaggaatttcagaacaaggggtgtttgatgcttccctcaaaatggc

SEQ ID NO: 79776 - DNA, 75 bp, Homo sapiens
ggtcatgaaggacctgagcctgacgcgggccgcgcggttccagggtctccctccactgctgtagtaacccgggtc

SEQ ID NO: 79777 - DNA, 100 bp, Homo sapiens
cagaagctgctctcctacaccaagcccgacgtggccttcctcgtggccgcctccttcttcctcatcgtggcagctctggacagggtctcgctctgttgcc

SEQ ID NO: 79778 - DNA, 99 bp, Homo sapiens
ggaaatcgtgcacatccaggctggtcagtgtggcaaccagatcggtgccaagaacaccttccaccatgaccacctcagcaagttcccacttaaataaag

SEQ ID NO: 79779 - DNA, 75 bp, Homo sapiens
cctgcccagacggctcacctgtgcgggatggaacaaaaggtggagctgatcagaataatgttcagcatcaacccc

SEQ ID NO: 79780 - DNA, 98 bp, Homo sapiens
gggcctgcatctcttcccactatctgctaggaaacacgagggttcatcaatgccagaagacgaattcttcagccaatgttggattcaagttgttcaga

SEQ ID NO: 79781 - DNA, 100 bp, Homo sapiens
tactcgccggacccggtggtcgtccgcggctccggtcacgtcaccgtgagagattaaacagattctagaaaatgaacttcagatacctgtgtccaaaatg

SEQ ID NO: 79782 - DNA, 90 bp, Homo sapiens
gctgggtccgctgagcggggcgacccgaggagctggtcaggctcaccatcgagaagcagggacgtccgtctccgacgagccccgtgaagc

SEQ ID NO: 79783 - DNA, 75 bp, Homo sapiens
gacaacacaaacctggtccccaggctctgttctgtgcattccttggctcctggctggtcccctttgcctacctca

SEQ ID NO: 79784 - DNA, 75 bp, Homo sapiens
tgtctgttcgcgatcctgccggagccccgccgccgccggcttgatgccagatatacgaaacccagaaggaactca

SEQ ID NO: 79785 - DNA, 51 bp, Homo sapiens
ctcccgagtagctgggactgcaggttgtatcagagtaagatggacggtagc

SEQ ID NO: 79786 - DNA, 83 bp, Homo sapiens
cctaaatgtggcgacttgtgcacacatgtagagacctttgtatgcgttttaaggatgaacagattgacatcctcgtggccact

SEQ ID NO: 79787 - DNA, 90 bp, Homo sapiens
ggccgccccaggaagcagcagcaaggcgccctgcgtccggcagaggaggcgagcatcccgctcaggtgatgaggaacccctcgcgcaccc

SEQ ID NO: 79788 - DNA, 82 bp, Homo sapiens
tcggcagtccacccaccgccgccgcctcccaggagtgcctgtgaagaaaacggggtattgccctgaggcttatattctgcct

SEQ ID NO: 79789 - DNA, 83 bp, Homo sapiens
cctggtgttcttctacccggaggacggttgtggcagcactgcctgaaggtatgagaccagattctaatctttatggttttcca

SEQ ID NO: 79790 - DNA, 102 bp, Homo sapiens
cacttcatcgtgggctacgccatcctgcggcccagcctcagtctctggatggtcgtcagatccgtgtggatcatgcaggcaagtctgctcggggaaccagag

SEQ ID NO: 79791 - DNA, 50 bp, Homo sapiens
gaccaagcaggatctgggcccaggaactgtggctgcaccatctgtcttca

SEQ ID NO: 79792 - DNA, 74 bp, Homo sapiens
aacgggtttgccgccagaacacagtctattgcgtctgcagacatggatttcaaccagctggaggcattcttgac

SEQ ID NO: 79793 - DNA, 100 bp, Homo sapiens
ctggcaaccaccccgtctgagaagtgaggagcccctccgcccggcagctgccccgtctgagaaagaacaccttctgcagtggggaccatgtgtcctggca

SEQ ID NO: 79794 - DNA, 74 bp, Homo sapiens
tacgagctggttaggaggcacagggcgtcggacctgcacgagctgtctgaaacttcagtgctctcaagaaggaa

SEQ ID NO: 79795 - DNA, 80 bp, Homo sapiens
tgcaggaggtgcaggcgagggtgcagagcctggagagcatgccccggccccctgagcagcccgtctgccgtttaagcgcc

SEQ ID NO: 79796 - DNA, 50 bp, Homo sapiens
tgaagagggaagacacgcggaaacaggtcaacgtattgaaacttactgtt

SEQ ID NO: 79797 - DNA, 100 bp, Homo sapiens
gccggcctcctcagtgcgaagaagctgcagccgcacctggccaaggatgcaaataatacggcactccgaacagacactaaaaacagctctcatctcaaag

SEQ ID NO: 79798 - DNA, 50 bp, Homo sapiens
ccttctcctggagacgcaactcaagtctgcctgaaggggaccaaggtgca

SEQ ID NO: 79799 - DNA, 100 bp, Homo sapiens
gcttttgaagactggctgaatgatgacctcggctcctatcaaggacattcactactttcactgcctaagaatcctggaccttctcaaaggcacagaggcc

SEQ ID NO: 79800 - DNA, 82 bp, Homo sapiens
gcgctgaccatctacgatacccacggtctgagtgcccggaccgcttggctatggactttggtggggctggtgccgcccagca

SEQ ID NO: 79801 - DNA, 100 bp, Homo sapiens
gctgcctcctttccaagcgcgacccgttgagtctgcgctcctcagaccaccggcaggtgaacagcctgatgcagaccgaggagtgcccacctatgctaga

SEQ ID NO: 79802 - DNA, 75 bp, Homo sapiens
tcctgtacacaatcttcatgaaaggtgcccagtcccctggaaggcagtgaaggggacggagacactgactgaggc

SEQ ID NO: 79803 - DNA, 75 bp, Homo sapiens
gtgcagagaccagcatccttggagaagagtgatcagcagctggactgtgccttggacctaatgaggcgcctgcct

SEQ ID NO: 79804 - DNA, 90 bp, Homo sapiens
gaccagatctgatagatgaggctcttcttagacctggaagactggaagttaaaatggagatagatggagtcccctgtttccacaccagca

SEQ ID NO: 79805 - DNA, 74 bp, Homo sapiens
aacaatggcatttacagaaagagtcaacagcagtggcaacaggttcgcctgccattgttgccggttgattttct

SEQ ID NO: 79806 - DNA, 100 bp, Homo sapiens
ataccacattctgctgcccatgagcctggacgagtaccaggtggcccagctctacatgatccagccgattacacctcaacaagaaggcaactgacaaaca

SEQ ID NO: 79807 - DNA, 75 bp, Homo sapiens
ccggggcaagagcaggagcccggcaccccccgccgacaaggagggttggtgttcgaggaagagacattgttgttc

SEQ ID NO: 79808 - DNA, 100 bp, Homo sapiens
ccttgggccgcgtctcctttgagggctcctcgcacctaccccagcaactcaaattcaccacctcggactcctgcgaccgcatcaaagacgaatttcagct

SEQ ID NO: 79809 - DNA, 82 bp, Homo sapiens
aggactgttggaattgttggcaaccaacctaaggtggcctcagggattcaactaatgaaactactgcccattccgatgctgg

SEQ ID NO: 79810 - DNA, 75 bp, Homo sapiens
gcgccccttccgcaagctcaacgcgtttggcaacgctttcctcaacagggtaccgtgagggttttctctggaagc

SEQ ID NO: 79811 - DNA, 50 bp, Homo sapiens
tactgtgcttgaagctgcaaaggacctgggatccagttggaggacggcgg

SEQ ID NO: 79812 - DNA, 87 bp, Homo sapiens
ctcgagagctcgccccgaacgggggtcttcctcctccgccgttgacagcttatgtccctgatgccaaaaatgcacctactctttcct

SEQ ID NO: 79813 - DNA, 74 bp, Homo sapiens
catattctcaggcacagagaaaggaatagcgggttttgcagcaattgttgcatatggattatataaactgaaga

SEQ ID NO: 79814 - DNA, 100 bp, Homo sapiens
cttgggtcctccgagagcagcagcgcctacaacacagcagtcccctcaggatgagcaggaaaagctcttggatgaagccatacaggctgtgaaggtccag

SEQ ID NO: 79815 - DNA, 100 bp, Homo sapiens
cgcggagctgctgcagtccttcgcgccctcctcgccctccccaccgacatcatgctccagttcctggtaaaagagaacctgctttcatgcaagatgctgc

SEQ ID NO: 79816 - DNA, 83 bp, Homo sapiens
cagtcaatggtcagatattgaagagttctgcaatcgtttaccgacaagactgtgaaactttcgggatggtggtgaaaatgctg

SEQ ID NO: 79817 - DNA, 100 bp, Homo sapiens
tcgtaggcggagtcgccgagtcgcccgtggaccgggagcccgtggaccgggagccggtggtgtgccaccccgacctggaggagcggctgcaggcctggcc

SEQ ID NO: 79818 - DNA, 100 bp, Homo sapiens
gataaggaaattgttggtactcttctaggatttgatgactttgtcaatctccttaggtgatgcacagtccaactacctgctaaccaccgccgagaacgag

SEQ ID NO: 79819 - DNA, 82 bp, Homo sapiens
ttctcgctgccgcgcgcccaagctcggcggacggcagtgccccaggaacctaaggagatgctgactctaaggtgaaagaggg

SEQ ID NO: 79820 - DNA, 100 bp, Homo sapiens
gttctggttcttgcgactatagtcacctcccgaggcaaatgaccactgtcctgagaggacgtgggtgaggggcaggacctgaaggagaagaaggagaagg

SEQ ID NO: 79821 - DNA, 75 bp, Homo sapiens
cctggacacagcaatatctctgggctttcacagtgattatgagcaaccactggaggtgaagaacaacagtaatct

SEQ ID NO: 79822 - DNA, 75 bp, Homo sapiens
ccagcatcctgcccagccgacgtggggtgttccattgagtggttccattttgcctgtgtggggctgacaaccaag

SEQ ID NO: 79823 - DNA, 74 bp, Homo sapiens
atggagaagttgaaccagctgtgggagaaggcccagcgagggccttcctgctgtgctggacgcccttcttcgtg

SEQ ID NO: 79824 - DNA, 90 bp, Homo sapiens
ctgggcaggctgaaagatggcggcggcgtctgtctctgcggcttctggttctcacttgtcgaattaaggaagttcactggagtaaaatgg

SEQ ID NO: 79825 - DNA, 95 bp, Homo sapiens
caggaaactgagtccaacactatgctggtttgaggacaacgagacattagaggtgcacccacccccgaccactacatatcaggacgtcatcctag

SEQ ID NO: 79826 - DNA, 75 bp, Homo sapiens
cgctggattctgaggaccagcagatggccagtcacgagaacccaggtgggatgtgtgtgggctgaaattccgagc

SEQ ID NO: 79827 - DNA, 101 bp, Homo sapiens
cgactggaccccacgtggcaggagatgctgaaccatgctacctgcaagattgattataccggaacagagccttccagtccctgtaataaatgtttatctcc

SEQ ID NO: 79828 - DNA, 93 bp, Homo sapiens
tgcacatccttcgaaaagctgccaagttgaaaatggacgagtaatcgcctgctttgattcattgaaatatgccaccacgggctgttccctgac

SEQ ID NO: 79829 - DNA, 100 bp, Homo sapiens
ggagatgcagctgtacaacagcatcttcagcctgctcagcttcgagaagattggctacacaggatgaaacaggcgcctatttaatcgacagagaccccac

SEQ ID NO: 79830 - DNA, 75 bp, Homo sapiens
cttcctgtcgctgacggcgactgcgggaggccaggggttgcagatggtgtaggaggctggagagactatggagtt

SEQ ID NO: 79831 - DNA, 90 bp, Homo sapiens
caccaaaggtctcgtacctctcagaggtagatgatgagctggagatcaaggcctactatgcaggccacgtgctgggggcagccatgttcc

SEQ ID NO: 79832 - DNA, 82 bp, Homo sapiens
ctagagcaaataaccgttttgaaattcgaagaatagccagaattcagcaaatcgaaaaggacatacttcgtatacgacagct

SEQ ID NO: 79833 - DNA, 100 bp, Homo sapiens
tcaacaccggggagtctgcggatatgttgatgatgtgatcagccgcattgacaggatgtttcctgaaatgtccatccacttatccagacccaatggaaca

SEQ ID NO: 79834 - DNA, 83 bp, Homo sapiens
gcactgacccagcctgtcctcctgttgcctgcaggccaggtgtggacactgccagcggctgcagccgacttggaatgacctgg

SEQ ID NO: 79835 - DNA, 100 bp, Homo sapiens
gtcaccagcaccccagatgggtgagagatgtgatcactggtttcgtggcctgaccaaggacctccaagttgggcactgccaccctctcgtggtccaagca

SEQ ID NO: 79836 - DNA, 49 bp, Homo sapiens
atcacctacttggaggaagagctggaggagaaggcagagcccccccagg

SEQ ID NO: 79837 - DNA, 100 bp, Homo sapiens
ttcgcagtctggaaagctttaggagttcacagtatctgaaactcagcaccgaggctctgctccccactctgagagtgatctaccagagcaggaagaggag

SEQ ID NO: 79838 - DNA, 100 bp, Homo sapiens
ggaacatccagctatttatgatagcatttgcttcattatgtcaagttcaacaaatggagaagcatgtgaatctgttacatatcgagtcccgaaaatcaaa

SEQ ID NO: 79839 - DNA, 75 bp, Homo sapiens
ctggggatcttcgcactatcccaaggaaaaccagtagattcccagacatcgcgaagtgaatctgaaattgtgcca

SEQ ID NO: 79840 - DNA, 82 bp, Homo sapiens
ggagctgtggccacctgagaaggtctcggcgcggaagatggccggcggcgtggacggccccatcgggatcccgttccccgac

SEQ ID NO: 79841 - DNA, 83 bp, Homo sapiens
aattccaaccaaatcccggggctcatctggattaataaagcagaagctcctcctggggtagagacagatcttattgatgttgg

SEQ ID NO: 79842 - DNA, 100 bp, Homo sapiens
ggcgcggagcgagcagcccacgtcgccaggcacaagacacgtcggatgttgcagcagagccagcagctagcgcaggtgcacacatcttgaccaactcagc

SEQ ID NO: 79843 - DNA, 73 bp, Homo sapiens
ggcaagtattgctgtgggtgctgggacttcccgtccgcggcgtggagggtgtgaccatgaagctcatggatga

SEQ ID NO: 79844 - DNA, 101 bp, Homo sapiens
ctgttattgcatttcgttttctcaccacagcttagcagtgtctgcaaaaacgaatcttttcctacaacctgttaactgactggactgttggtaacaaagta

SEQ ID NO: 79845 - DNA, 51 bp, Homo sapiens
gagggaaatgttggacacgtgcagatgcgtctgaagaaacatcgctggtat

SEQ ID NO: 79846 - DNA, 82 bp, Homo sapiens
aatatgtcaagatcacagcaagttaataacttcaccaggtaaatctgagacattttcgtagaggtcggaggagatcacttgc

SEQ ID NO: 79847 - DNA, 75 bp, Homo sapiens
gtcatcagggacatcttccgcaaataccccaacaagtccaccgggcatacttagtatctttggacaaataggaat

SEQ ID NO: 79848 - DNA, 98 bp, Homo sapiens
ctttcagtcctgaaaagctgaacgaggttactcactataaacaatatccacccaacacaagcaaagtttattcctactttgaatgccgtgaaaagaag

SEQ ID NO: 79849 - DNA, 100 bp, Homo sapiens
atcccaaaaagacccagctggagcaggaagctgggaaaccacaaaggaatggtccaaaggactatagctaagcagattcagatggtgaaacagattggaa

SEQ ID NO: 79850 - DNA, 82 bp, Homo sapiens
tgagatcaaaggtcacctggaaattgccttattggaaaaacatttcttacgagcatcagatccatgctgctgctgactcgga

SEQ ID NO: 79851 - DNA, 75 bp, Homo sapiens
ccgtgctgtggagttgcctggtccgcttcctccccgcggtattaatcaagaagagctatgaccggaccaaacgtc

SEQ ID NO: 79852 - DNA, 50 bp, Homo sapiens
acaagatctaaggctcttgtctggttgcctgtgatttgcttcggaggatt

SEQ ID NO: 79853 - DNA, 75 bp, Homo sapiens
gggcggttctgcgtacccctctccaaggggaaactgaggcccaaggaaattgagtatctctgcaaagtcaccagc

SEQ ID NO: 79854 - DNA, 82 bp, Homo sapiens
gcaggcttgtggcgggaacagcctgggtggagcaggccaggaggaagcagcgagaagaacgcctgcagcagctgcagcacag

SEQ ID NO: 79855 - DNA, 83 bp, Homo sapiens
cgaaagaccctgaactagagtcccaggtcaacctgtaagtttgcctgcaatgagatttcattctctacatttaaaggacatcc

SEQ ID NO: 79856 - DNA, 74 bp, Homo sapiens
aaggattccaagtaactcttatttgatccagtggttctggagagcattgcgttctttcgatcaagctgaccgtg

SEQ ID NO: 79857 - DNA, 75 bp, Homo sapiens
gacagtgccctgagggccttcgagagctaccgcgccagacagcttgtactcccagagtacctcatccacgctttc

SEQ ID NO: 79858 - DNA, 90 bp, Homo sapiens
cgcgagtccccgccgccctcaggtgactatgaccagagcaggaccaaagtgctgcacatgagcctgaaccccaccagtgtggccaggcag

SEQ ID NO: 79859 - DNA, 97 bp, Homo sapiens
atactcagcatccagctgtcaaatcaacaccaagagccttgcttcctgttttacatcacaaatctaaaaaaggacccccccgtcaagccaaatatgc

SEQ ID NO: 79860 - DNA, 90 bp, Homo sapiens
aaggagcagatttacaaactggccaagaagggccttactccttcacagatcgacatgcgtcgggatgtccaggaaatttttcgcatgacc

SEQ ID NO: 79861 - DNA, 100 bp, Homo sapiens
aggactcaggagcaaatcagtaatgacttggtggggaaacttaaagatgcttcgaaaagcctggaaagagcaactcagttgtaacttggggaagttaacg

SEQ ID NO: 79862 - DNA, 60 bp, Homo sapiens
gtatgattgaagtttctaagccaggtgaagaacaaattggttttgagctagtggagaaat

SEQ ID NO: 79863 - DNA, 82 bp, Homo sapiens
gagcccggcgcaggtgaccggcgcgcgggagcgctacggccccaacggtgtcgtgaaaactacccctaaaagccaaaatggg

SEQ ID NO: 79864 - DNA, 74 bp, Homo sapiens
ctgggcggtgccggcgccggagacgatgccgttgtctctaattaacagaagatggcaaagcccagccacagcag

SEQ ID NO: 79865 - DNA, 102 bp, Homo sapiens
ccaggctagttttctcttaaatccagagaaatatactgatgaacttgccactcagccaaggcgactgcttaacacactgagacattccactgcccttctccc

SEQ ID NO: 79866 - DNA, 98 bp, Homo sapiens
ggcccctgaagttggcactgcagcagacagctccctgggcaccaggcagctaacagggagtaccctgacttctaccggaagctctacggcctcttgga

SEQ ID NO: 79867 - DNA, 100 bp, Homo sapiens
ggggacagtgaccgtggggttcctcgcccagagcgtcttggcggctcccttctgttgccacatttgggccaaggaatggagagatttcttcgtctggaaa

SEQ ID NO: 79868 - DNA, 100 bp, Homo sapiens
cagattgaaagactgacccgtcctggttcctcttacttcaatttgaacccatttgaggtttgatttcctctgcatgcctgtcttccatccgcgtttcaag

SEQ ID NO: 79869 - DNA, 51 bp, Homo sapiens
tcttgactacatcttcacacggtactccaaagattcaggtttactcacgtc

SEQ ID NO: 79870 - DNA, 83 bp, Homo sapiens
ttctgaggaccagcagatggccagtcacgagaacccagccatgccagtgacggtaacccgcaccaccatcacaaccaccacga

SEQ ID NO: 79871 - DNA, 100 bp, Homo sapiens
tacacggccagttttgaaatcgacacacaaagaatagagttgagcctgtgggacacttcggccatggccatgcagaaaatctttgcccgggaaatcttgg

SEQ ID NO: 79872 - DNA, 100 bp, Homo sapiens
gagtttctgtccaaccagcagccatacccccagttcatggccaccgtggtgtataagggggtccactggacggggcctgagctacaacttcacccacctg

SEQ ID NO: 79873 - DNA, 83 bp, Homo sapiens
cgccgcgcgggacccggaggaccgtatccccagcccactgggctacgcagagactgatggagaggcagaaacggaaggcggac

SEQ ID NO: 79874 - DNA, 74 bp, Homo sapiens
gaaaatccgcaagaccatcatgcaggggaacgcccttttgcttgtgactggcagggctgcgacaagaagttcgc

SEQ ID NO: 79875 - DNA, 100 bp, Homo sapiens
gagggagctttctctgtgtattcggacttcctgctctacaagtcaggatgaggaagtacagacaattggtcagatagaactgtgcctcactaagcaagac

SEQ ID NO: 79876 - DNA, 100 bp, Homo sapiens
ttgtatccagttggtggaatcgggggatttgcagaaagaaatagcgtctgagatcataggattactgatgctggaggacagagcgggatgccaccagctt

SEQ ID NO: 79877 - DNA, 83 bp, Homo sapiens
ggcccagcacccgcctgccaggcgctcgggggccgaactggccctggactacctctgcagaacaaaactattgtgagtcgagg

SEQ ID NO: 79878 - DNA, 75 bp, Homo sapiens
ctgctggtgaatctttggcacttctctttgaattggccagaggaatagagagtggagaactaatgccgacgtgat

SEQ ID NO: 79879 - DNA, 76 bp, Homo sapiens
catcatcatctacttcacaggaattgccatttggacttgccatgaggtgttgaagccttgtttcactgagttggag

SEQ ID NO: 79880 - DNA, 97 bp, Homo sapiens
tgaagctcgtggggccggaggaggctctgagcccaggcgaggccagggacatggccatgaagctggagaagcttcgagagaaggagcgtaagaagga

SEQ ID NO: 79881 - DNA, 74 bp, Homo sapiens
ggccaagtcaacattggatattgttctggccaataaagatgacttggcagatgaacttgctcttgttgatgtca

SEQ ID NO: 79882 - DNA, 90 bp, Homo sapiens
agacatgaacgctctcgctctgggtccctcagaatatgactctctgcctgaaaatagcgagacaggtttctgacgtagaagagcttaccc

SEQ ID NO: 79883 - DNA, 100 bp, Homo sapiens
ctccagaaatccaggagattgttgataaggtggacagcgccatgtccctgatccaggcagccaagaacttgatgaatgctgtggtgcagacagtgaaggc

SEQ ID NO: 79884 - DNA, 51 bp, Homo sapiens
ctcacaagagctgttatttatctgaaagtaatctatgccagcaattatgac

SEQ ID NO: 79885 - DNA, 75 bp, Homo sapiens
gtacccgccgccgccgttggctggagatggccgcccatgccccatcattctttgggatgcatctttatcttcagc

SEQ ID NO: 79886 - DNA, 100 bp, Homo sapiens
cggccgcatccgtttccacgactttctgggagactcgaatcacatgcagcccaactacagattcttatggaattcctcaaggttgcaagaagaaataaga

SEQ ID NO: 79887 - DNA, 75 bp, Homo sapiens
tgcggttccggggagctcggctccaagttctgggttgaaatcacaaagattagacacctttttagataggtgttc

SEQ ID NO: 79888 - DNA, 100 bp, Homo sapiens
tgcctatgcaacgctgggcatgaggagcggagcggagaatgccaagattaaagagtctattgttggggaaatcagacgggaaattgtaagtggacttttg

SEQ ID NO: 79889 - DNA, 98 bp, Homo sapiens
gctcatctccaggaaaaaaaccccagagacaaggctgtagtgcctgtgtttaacccagtcaggtcccagatgagcaatgtgaagagactacggccacg

SEQ ID NO: 79890 - DNA, 101 bp, Homo sapiens
tctcttcctggctgcgtccctaggtcatcatcagatttgaaatatttaaagtggatacaaaactatttcagcaatgcagacaattaagtgtgttgttgtgg

SEQ ID NO: 79891 - DNA, 83 bp, Homo sapiens
aaagtgatttacatccaacattaccagctggccgatactctttgaatgtcacatacagctattcaagatctctggcagtggag

SEQ ID NO: 79892 - DNA, 95 bp, Homo sapiens
agctttggaacatttcaggcctggcacggaatgcagtttttacataagttgctctggaagaggatctgaaccagaagaagcgggagcaggagatg

SEQ ID NO: 79893 - DNA, 80 bp, Homo sapiens
cggcctcggccaccgagatcctgctgacgccggctaggtataatggaatgtgcttacaagggccagcaggagtgcctggt

SEQ ID NO: 79894 - DNA, 75 bp, Homo sapiens
tggtgggagccgtgctctacctctatccgatatgccgtagatgatgttcccttctcaatccctgctgcctctgaa

SEQ ID NO: 79895 - DNA, 99 bp, Homo sapiens
ctcatccgacagcataggctcctcacagaaagcccacgggatcctagcacggcgcccatcttacagccacccgaaacaatgaaatgtaatacattcata

SEQ ID NO: 79896 - DNA, 100 bp, Homo sapiens
ccggactccgtcggcgcacatccccgtcccagcgcagaggtacttatacgtccgcctggatggcacgatgtccattaagaagcgagccaaggttgtagaa

SEQ ID NO: 79897 - DNA, 98 bp, Homo sapiens
aagaaacctcaggacttgagtaacagcaacatggtggcatttttcaactccgctggaaccagtgcccaggaggagcaaaggatgtgctgccagcccct

SEQ ID NO: 79898 - DNA, 100 bp, Homo sapiens
atactctgaggctctcaaagatgcccaggagaagctggagctggcagagaaaaaggccaccgatgcagacctgttatcctaaactaggtgagtcagcttt

SEQ ID NO: 79899 - DNA, 97 bp, Homo sapiens
cttgggtcctccgagagcagcagcgtgtgaaggaagaagtgttctggaggaactacttttaccgcgtctccctgattaagcagtcagcccagctcac

SEQ ID NO: 79900 - DNA, 82 bp, Homo sapiens
ccgcaacagccccttcgtcccaagaaagatgaatgggagggctgattttcgagagccgaatgcagaggttccaagaccaatt

SEQ ID NO: 79901 - DNA, 98 bp, Homo sapiens
cggcccctgaagttggcactgcagcagacagctccctgggcaccaggcagctaacagatgcctgtggtctctctgatgtagcccatgtggaaagcttg

SEQ ID NO: 79902 - DNA, 97 bp, Homo sapiens
gttctatttctctagctattgccttattttttctcatggatgttcttcttcgagtatttgtagaaggtaaccccaagaaaggcatcagggttctgga

SEQ ID NO: 79903 - DNA, 90 bp, Homo sapiens
caaaggctatgaaaagaagccctattgtaatgcttgtcgagatgtccacagaaggaggatttggtggtactagcagcagtgatgcccagc

SEQ ID NO: 79904 - DNA, 97 bp, Homo sapiens
ccatggttattagagaaagagaaaggatttctaagcaggaactccccagctgttccaggagctctgagtcctttggccattccaaatgctgctgcag

SEQ ID NO: 79905 - DNA, 82 bp, Homo sapiens
cgccagccaagaagcatgtgcgactgcaggagaggttgctacaactatctgtataggatgaaagctctggatgccattcgta

SEQ ID NO: 79906 - DNA, 51 bp, Homo sapiens
gtttgtggatcgctgtgatcgtcacttggatgtacagttacccagcacgtg

SEQ ID NO: 79907 - DNA, 75 bp, Homo sapiens
gcatgatctccatcaccgaatggcagaatacgagaaaatgaccagtgggatgtacttgggggagattgtgcggca

SEQ ID NO: 79908 - DNA, 83 bp, Homo sapiens
gctcagcactgggattttctgtgggcgacagatgcgaaagaaacgagttccagtgccaagacgggaaatgcatctcctacaag

SEQ ID NO: 79909 - DNA, 109 bp, Homo sapiens
ctcgtcttcattttacatatgaaaacctaaattccaagatgccatctgttattaaaatagttttgaggcagctgtgccatcaaatagccacattgtttcggaacctgga

SEQ ID NO: 79910 - DNA, 75 bp, Homo sapiens
acctcctgctgctgtctttgtttgccggattagatccttccaagggatgcaagtattggaatggaatggaattcc

SEQ ID NO: 79911 - DNA, 100 bp, Homo sapiens
ggaacaaccgcctcccgctcctagcaggttgctactgccccgaacccgcgctgcagggaacagcggggcaaacaagcgccgccctgtgctgggctgccgg

SEQ ID NO: 79912 - DNA, 89 bp, Homo sapiens
tccttagaaagctgaaagctgataaggtggatgatgaagacttacaagatgaacctttacagatcacagttcttgaccatgatacttac

SEQ ID NO: 79913 - DNA, 100 bp, Homo sapiens
aaaattaataggaggaagtctcaagaaacaaagtgtacaaagagagcacttcctaagaagagtcaggcaacatcagatgctgacctgaaagaacatatgg

SEQ ID NO: 79914 - DNA, 100 bp, Homo sapiens
caggctggtctctactcctgggctcaagcagtcctcctgcctcagtctcccaaagtgctggaattacagggttctgggaggtgatcagtgatgaacatgg

SEQ ID NO: 79915 - DNA, 80 bp, Homo sapiens
aagatcgtcgccacctggatgctggagatgtccagctcgccgctgtccaagaaacgtcgcgtgtccgggcctgatccaaa

SEQ ID NO: 79916 - DNA, 144 bp, Homo sapiens
cgggatcgtgaccgagaccgtgaccgagagcgtgaccgagagcgcgaatatcgtcatcgttagaaggagtcagtggatcggtggggaaaatgctgcttaccctgggccctgggctgtagaaagaagacaccaaaggcaaagtac

SEQ ID NO: 79917 - DNA, 75 bp, Homo sapiens
agatggtcatgaggcccctgtggagtctgcttctctgggaagaggcatttcatccttcatgaagccattcaggat

SEQ ID NO: 79918 - DNA, 75 bp, Homo sapiens
ggcccaccgggactcgccgttggctatgactttgcagccgtcctggagtggttcgcggagcgtgtggaccgcatc

SEQ ID NO: 79919 - DNA, 75 bp, Homo sapiens
tgatcacctcaggcaaatggaacgtgaaagtatccggctgctttgatgaacctgggagccattctgcacctcaat

SEQ ID NO: 79920 - DNA, 97 bp, Homo sapiens
agggtggccgccccagcagacagtgctacagagccaactcctgacaggtgcccttgctcgtgtgaatgaacagaggccagagaattgcagaaaccca

SEQ ID NO: 79921 - DNA, 74 bp, Homo sapiens
taatattgtgctgcttgaagggattacaccaaatatacaaatggccaacagaaagggagaaggtgaagaaagct

SEQ ID NO: 79922 - DNA, 95 bp, Homo sapiens
agatcaacctggagctctacgcctcctacgtttacctgtccatgtctcacagaaagttctccgctcccagacatgggtccctcggcttcctgcct

SEQ ID NO: 79923 - DNA, 83 bp, Homo sapiens
aacattatgtggaaggatcaacagtcaattgtgtactagcattccaagtgttcggctaatgaatgagttcactaatatgccag

SEQ ID NO: 79924 - DNA, 82 bp, Homo sapiens
ttggttttagccccaacaagagaattggctgtacagatctatgaggaagccagaaaagccctgttaaacctggcagagcgac

SEQ ID NO: 79925 - DNA, 100 bp, Homo sapiens
ttttgtcgtgtgggacctgttctggctgctccagccccaggaaggacccaggacacccggaagccggaaatgtttttccagaaaggaggagtcaaggaag

SEQ ID NO: 79926 - DNA, 82 bp, Homo sapiens
ggccgctggggtctggacgggggtcgccatggtgaccctggcagcaaccccaacaaacgccagaggcagccccctctcctgg

SEQ ID NO: 79927 - DNA, 80 bp, Homo sapiens
gtggctgactgtctgacaaattgttatcagttctacagcgagtcgggcatgcctaccaaacatctttcagacagtgtgtg

SEQ ID NO: 79928 - DNA, 98 bp, Homo sapiens
ttgggacctcatgtaagaatggagggtgttcaaaggagaatgatccatctgtgagactgaaaattgcatcattgttgggtttattatcaaagacagca

SEQ ID NO: 79929 - DNA, 82 bp, Homo sapiens
cgcggggagcgcccccggcgcgatgcccttcaggaaagggggcggaggaaagcgcaaagggaaaagcaagaagtggaaagaa

SEQ ID NO: 79930 - DNA, 90 bp, Homo sapiens
aggatattcctcatgacattgctgtctgattttgagaagagggggaaaaaggaagtttgtcctgtcctggatcagtttctttgtcatgta

SEQ ID NO: 79931 - DNA, 100 bp, Homo sapiens
tcagaaatccaactctgcaaaatggcccctaccaagctgcagaaaagcatttcatctttttggagcctcacgattttgatgaatgtcgatttgatattag

SEQ ID NO: 79932 - DNA, 75 bp, Homo sapiens
ccggtgatctacaccatggagaacaagcccatcgtcacctaatatgacagatacctagcatctagcaaaataatg

SEQ ID NO: 79933 - DNA, 89 bp, Homo sapiens
tggagatgttcccattggaatctacaggactgagtctcagaaacttactacatctgagagaatgtgatcaatgggcaggactacgaagt

SEQ ID NO: 79934 - DNA, 85 bp, Homo sapiens
gataaagggatttctcggctgaagacgaggctgtgagctgtcggaaaaggtaacagaagatggaactcgaaatcccaatgaaaaa

SEQ ID NO: 79935 - DNA, 100 bp, Homo sapiens
gctgctgggaggaactggattggacccttccaagatgacgcctttagctgatctctgctacccctttcatggcccgggaattgaatgatctggcacggga

SEQ ID NO: 79936 - DNA, 75 bp, Homo sapiens
tttggcccctttgctgcaaagtgggctgaacccatcagaaccactgtcttccagtaccccgtgggctggccacca

SEQ ID NO: 79937 - DNA, 98 bp, Homo sapiens
ccgaaatgttgacttcaactatgctactaaagtctctgctggatgaaccgaatcctaacagtccagccaatagccaggcagcacagctttatcaggaa

SEQ ID NO: 79938 - DNA, 60 bp, Homo sapiens
aactctgtccattctatccccagaagtagccctgaagtttcagctcctggcatcagctct

SEQ ID NO: 79939 - DNA, 75 bp, Homo sapiens
cagcctctaatatggagtatatggaggagcatattatttaatatctagaagtctagggccagaatttggtggtgc

SEQ ID NO: 79940 - DNA, 82 bp, Homo sapiens
ccgcgggatgtagcgcgggggaccgcggcccccagcagagcccgcctgcccggctcatcccagccatcactcttccacctgc

SEQ ID NO: 79941 - DNA, 100 bp, Homo sapiens
tgaaacggttcaacaaagaaaaactcggtctcctgttgctcactttcctgggtattgtagccgctgtgcttgtcaagtcactgtgtgcccagtattctgc

SEQ ID NO: 79942 - DNA, 83 bp, Homo sapiens
cctgctttaaccatcgaaaatgagggtgtccgcaatgttgccagtgtctgtctgcagattggctacccaactgttgcatcagt

SEQ ID NO: 79943 - DNA, 101 bp, Homo sapiens
ccccggaccccccgattcaccaacgagccctatgtctcaggatgatacataccggtttttaactttggtgtcatcaaatgcaattgcaatgtgactgtttc

SEQ ID NO: 79944 - DNA, 100 bp, Homo sapiens
cagcagcagccccggggcccggagagagttatgtcatgcccaggccagcagggggctccatgaggattcatagaagatgccccgcgtctcggcgcctttg

SEQ ID NO: 79945 - DNA, 100 bp, Homo sapiens
gagattgttgagcatgtcattcatctgttcaaggaggaagtaatgaccaaattaagtcattttcgagaattggagttcaagagtttttaagaatgtggca

SEQ ID NO: 79946 - DNA, 112 bp, Homo sapiens
gataccatcggacaggatttctccgcctcagcccaacggggagatcaatgtccgagttaccaccatggatgcagagctggagtttgcaatccagccaaatacaactggaaaa

SEQ ID NO: 79947 - DNA, 75 bp, Homo sapiens
tcctctctttactgctgaagctttacttcgagctcatgatccctgcatgtcactgagtccaccatgctttacaga

SEQ ID NO: 79948 - DNA, 105 bp, Homo sapiens
ctccaatgggcctttccagcccgtggtccttctccatattcgaggatctcactggcatcgaatctatggatcagtgtcgccataccttggaacagcataactgga

SEQ ID NO: 79949 - DNA, 132 bp, Homo sapiens
cagccatttttggagtctcctttggtatccgcaaactctacatgaaaagtctgttaaaaatctttgcggatcacacctcgacacccaacccctgaaccccacacactctgccatgcacacaggaggagagct

SEQ ID NO: 79950 - DNA, 74 bp, Homo sapiens
atccacataatggagacattctgatggaatttgggaagaagaatttggtgttgatgattcttattctgaacaag

SEQ ID NO: 79951 - DNA, 100 bp, Homo sapiens
gacaagaactctggagaagtcatgacagtagggatcaaaatacttgctggatggtggactcagagaccaataaaaataaactgcttgaacatcctttgac

SEQ ID NO: 79952 - DNA, 83 bp, Homo sapiens
cagctggctctgggccttgaacattccgaaactgtcaagattggcaaggttgttgatcattatgaaaatcctagaaacgtggg

SEQ ID NO: 79953 - DNA, 75 bp, Homo sapiens
gaagctattcgattggttactctgatacttcaatcaatgagctgagcaatgttcctgttcctgtcatgctaatgc

SEQ ID NO: 79954 - DNA, 74 bp, Homo sapiens
tcgccatgatgggccatcgtccagtgctcgtgctcatggtgtctatcgaagatccctttgaccaggatgactgg

SEQ ID NO: 79955 - DNA, 75 bp, Homo sapiens
ccagagctgaggactgcctgtttgcagttttaacggtgactccctgatgatcattccttggcatgaacataaaca

SEQ ID NO: 79956 - DNA, 75 bp, Homo sapiens
gagggcagaaattcatggaagatatgatgccaaagctatcagttgagggatttgcagttgataaaatggctggag

SEQ ID NO: 79957 - DNA, 100 bp, Homo sapiens
ggtgcgcactgcgggcgcatccctgccccggcgccgtccgtgcccgcgggacctgacagccgggtcagaggtatcatgatattagctggtttgacatcaa

SEQ ID NO: 79958 - DNA, 83 bp, Homo sapiens
cttttagaagaaaataagataaattcatcggtgaaattcgcttctggtaatactgtagggttatgtggtccgaatcagtggtg

SEQ ID NO: 79959 - DNA, 100 bp, Homo sapiens
tagctgaatccagtaccaaaaacgtcaacaacagttttacggtctgaatttcctgctgctgttcacaaagatgctttttatctttaactttttgttttcc

SEQ ID NO: 79960 - DNA, 75 bp, Homo sapiens
ccatctgaattggctcaatgatgagaacctaaaggcagacccagaagagctttttacaaaactagagaaaattgg

SEQ ID NO: 79961 - DNA, 100 bp, Homo sapiens
ctcaccgcgactggacttcgctcagcttcagaccctgggctgcagctgcctaatgagtactatactggcaattgctggagaagattttgcaattgttgct

SEQ ID NO: 79962 - DNA, 100 bp, Homo sapiens
ccatcacccaccaacaacaccacaataatccacagccaaggtaccttgtggtctataatcctttagaacaagaccgaatctcgttggtctcagtctatgt

SEQ ID NO: 79963 - DNA, 93 bp, Homo sapiens
cagcatgccagatttacgcagaaagaagccactgccacttgtcagtgatctggcaacagctgaacagatgcgtctcgctcaagtgatctttga

SEQ ID NO: 79964 - DNA, 89 bp, Homo sapiens
aggtgttttttaccactgcagtaccagtagccagtagcccaggttgctccggttgctaagaagactatgaacaagtcagagaacctgct

SEQ ID NO: 79965 - DNA, 97 bp, Homo sapiens
ctaatccacccaaaatgtgcctggtgctccaaagagaaagctacatccatattggaattttaccgggaacttggattgccgccgaaacagacagtta

SEQ ID NO: 79966 - DNA, 95 bp, Homo sapiens
gtgagccgcggtgcccaaggctgcgccggcgaggggaagccgcgcggccggccggccgactaggcagcatctggaatcaagagacccatggcatc

SEQ ID NO: 79967 - DNA, 88 bp, Homo sapiens
cgagcgctgttctcgctccggagccgctgcacatttcgtgttatccaagataaattctgtgggattataaacatttcagtagaaggcc

SEQ ID NO: 79968 - DNA, 75 bp, Homo sapiens
cctgtgaccacccctgaagaaattgcacaggtaaagagaaatgtgtatgaccttacaagtatccccgttcgccac

SEQ ID NO: 79969 - DNA, 90 bp, Homo sapiens
ctggcttttgtctctggcatcttcttcatactatcgggagtcagtggatcggtggggaaaatgctgcttaccctgggccctgggctgtag

SEQ ID NO: 79970 - DNA, 75 bp, Homo sapiens
gtgcgcgcgaccgctccccggcgggagccagcgaaggactctagtatgggattcctttctacctacaatacctcg

SEQ ID NO: 79971 - DNA, 100 bp, Homo sapiens
ggtacagtctctgcacctcgcgccccagcagattaagcctgatcaagatgacaacctcccaaaagcaccgagacttcgtggcagagcccatgggggagaa

SEQ ID NO: 79972 - DNA, 116 bp, Homo sapiens
cttggccatgtgagatacaaggctacacagagacagatcaaagcagctcgtggagctggacagaatatttctgtccataagacccccagaagtcccctaagtgggataccagtgag

SEQ ID NO: 79973 - DNA, 88 bp, Homo sapiens
ttgtttgtggatcgctgtgatcgtcacttggttgtgaccgagattcccgacgagagagactgaggggaagagaggaaggaggggcggg

SEQ ID NO: 79974 - DNA, 82 bp, Homo sapiens
aagacatagctgtgaagctgggaactgatctagaataactcagtgttcctgaaagtacacctttcacagcagtcttaaagtt

SEQ ID NO: 79975 - DNA, 100 bp, Homo sapiens
ataaaaagggatattcaccccttggttgatgttgatgaatcaacacttagtccagaagagcaaaaagagagaaaaataatgaagttgcttttaaaaatta

SEQ ID NO: 79976 - DNA, 101 bp, Homo sapiens
ggactttcttccagcttctgctgtccttctttgtggagagcaaggctgcaagatcaaggccctgcgggccaagacaaacacctacatcaagaccccagtgc

SEQ ID NO: 79977 - DNA, 100 bp, Homo sapiens
atcaactggttccacaactacaggtatgagaaagtgccagtcatcttggttgggaacaaagtggacctggaaagtgagagagaagtatcgtccagcgaag

SEQ ID NO: 79978 - DNA, 83 bp, Homo sapiens
gaagtggagttgctgagtcaaagtatttttcagtgctgtacaagcgtcttgaattactctggtagcttttccagaaagaccca

SEQ ID NO: 79979 - DNA, 100 bp, Homo sapiens
gtaccttgagacactcctttactcacagcagcagactccactccacttggctgtgatcaccaaccagccagaaattgctgaggcacttctgggagctggc

SEQ ID NO: 79980 - DNA, 90 bp, Homo sapiens
agaggaagctcaacgactccattgccgaggagctgaacaagaagttggccaacaaggacatcaaccaggaagtttataatttcctggcaa

SEQ ID NO: 79981 - DNA, 100 bp, Homo sapiens
agaacagctgtggaaagaagttgcaaaacactgggagccttttgtggcagatgaatatattgaacgtcttgtatggagaaccccaggaggaggctctaga

SEQ ID NO: 79982 - DNA, 99 bp, Homo sapiens
tccagaaagtgaagaagaaaatgtagaatgggaaactaatagagatggtgttctgggactcagtgttagaagctgtctgtctgtaagaatcttgctgtc

SEQ ID NO: 79983 - DNA, 83 bp, Homo sapiens
ggcgtgcctgtgcttccggagcgagcaggaggacgagggtttcatatgtccccagtgtatgaaatctcttggatctgctgatg

SEQ ID NO: 79984 - DNA, 98 bp, Homo sapiens
acgggcgcctgcattactcaagaattacatgaacgacagccttcgcaccgacgtcttcgtgcggttccagccagagagcatcgcctgtgcctgcattt

SEQ ID NO: 79985 - DNA, 50 bp, Homo sapiens
ttacggaaaaagatgctacaattgcttctttccaagatgagatgggattc

SEQ ID NO: 79986 - DNA, 87 bp, Homo sapiens
gctctgctgctgccgccggcgaaggaggaggcgttgccgggtgggaccagggagattggatctgctctcaccaggatgtgcatgagg

SEQ ID NO: 79987 - DNA, 100 bp, Homo sapiens
acgcaggccttaaggagaaagtttcagtgtcttctacaaatgcttctgggaactggaggacccagttaaccatagggctgtcggattacgagactccagc

SEQ ID NO: 79988 - DNA, 75 bp, Homo sapiens
gcgcctcatcttccagaaccacagggcctcttacaagcctcttagcaaatatccggctgtgatcaatgatatttc

SEQ ID NO: 79989 - DNA, 96 bp, Homo sapiens
gcagattattttggtgatgctttcaaacagtgtcaatacaaagatactctccccaagcaaggatggaacattactgtggacctggtcattggccct

SEQ ID NO: 79990 - DNA, 75 bp, Homo sapiens
ctcgaatgggcacacctgtgtagtgtgaaaaactcaaattactgtcttccatcatataccgcttataagaactat

SEQ ID NO: 79991 - DNA, 100 bp, Homo sapiens
ggctgcggcgcctgggactgcaccgcaccgagggcgagctccagttacagaatgtctgaaggggacagtgtgggagaatccgtccatgggaaaccttcgg

SEQ ID NO: 79992 - DNA, 132 bp, Homo sapiens
gagaaataaggacaaaagccaagaggaggacagttcgctacacagcaatgcatcgagaaacctccacagctgttgagaaaaaggagaaacctcttccaagacttaatatccattctggattctggattttgg

SEQ ID NO: 79993 - DNA, 75 bp, Homo sapiens
acccggcactacagagctcccgaggtcattttggattaattggaggatctgacaacaaactgatttatagacatt

SEQ ID NO: 79994 - DNA, 138 bp, Homo sapiens
ctgtgtcccctcaaaaacaggtcataactcctggagaagggattgcccagtcagcaaaggttcagccctccaagccacataaagaagatccctaatagtcatttctcaacaattatatagtcaactgatgtaacaatg

SEQ ID NO: 79995 - DNA, 100 bp, Homo sapiens
agaaatcctactccacccataggaagacccacgtccacacctactcctcctcagtacactgcagttccagacctctactttgaaaatgccatgcggtttt

SEQ ID NO: 79996 - DNA, 100 bp, Homo sapiens
ggcagaccttctcgacaccatcaatacatgcatcaagaagggaaaggtacatggactatatcgcacaacaggtgctagttttgagaaggcccaacaggag

SEQ ID NO: 79997 - DNA, 75 bp, Homo sapiens
gaccagctctgtaaaagccccgcctctgccttcggatagcagcctcgtcttacagcgtgactgcaaagaaaaaga

SEQ ID NO: 79998 - DNA, 83 bp, Homo sapiens
caggaacagggcagacgttagcgtgagtgatcactctcaatcccgggctggccagctaaactatgtggatccagctactggct

SEQ ID NO: 79999 - DNA, 82 bp, Homo sapiens
tcgagaaagaagtgaaaagagtgtagaggtgaaatgacaatggatgctctgttggctcgattgaaacttctgaatccagatg

SEQ ID NO: 80000 - DNA, 76 bp, Homo sapiens
tgaagatgtccttaccagctttgacaatacaggaaatgtttttgcctgacctggtaccccagctggggacactcta

SEQ ID NO: 80001 - DNA, 100 bp, Homo sapiens
cctgcccccttttcctggtgcatgtgaagttatcaaaaacaggacatatttgacagtgattggtacacttctcgaaatctaattgggggcgctgacatca

SEQ ID NO: 80002 - DNA, 90 bp, Homo sapiens
cttagcacatgcagatgagaagtccttaggccgctttgtagttcagaatgtttctgcacagaaagatggagaaaaatctagagtaaaagt

SEQ ID NO: 80003 - DNA, 74 bp, Homo sapiens
aggagagagcaaggcagttcttcaggggagaatttcgctaaggagtttgtgatcagtgatcggaaggagctgga

SEQ ID NO: 80004 - DNA, 74 bp, Homo sapiens
caccaagcgggagtatgaccagtgtcgcatacaggtccagtgcacgtgccaacattacactgtcagggaagaag

SEQ ID NO: 80005 - DNA, 75 bp, Homo sapiens
agaccagtgcccgtggccaccgagaccagcagatatgtgcagcgggggctacagcgagtggggctagatccccag

SEQ ID NO: 80006 - DNA, 100 bp, Homo sapiens
atcacggttcctgacacgtacgaagcccgtgaggtccgagctccgatggtggtgcagcagcccccagtgcagccccaggtgcagcagcagcagacagcag

SEQ ID NO: 80007 - DNA, 90 bp, Homo sapiens
agatgaataagtgggttcgttgtatttgtgacatctgtgggtttaatccaacagaagaagaccattcctcaagaattttgtatccaaggc

SEQ ID NO: 80008 - DNA, 100 bp, Homo sapiens
cagacatattccttgagagcatttgagaaaccccctcaggtacagacccaggctcttcgagactttgagaaggtttgtcctggttgtggtcaagactgga

SEQ ID NO: 80009 - DNA, 98 bp, Homo sapiens
tgcaggaagcagaaaaagagctaaagagaaaacaagatgacgctgaccaggacatgatgatggcagggatggtgaccattgtgaggtagatattttgt

SEQ ID NO: 80010 - DNA, 75 bp, Homo sapiens
ccagacaatgccggtggaggaatttgtggctggctggatctctggggaagcggctgcagtggactcggaagccgt

SEQ ID NO: 80011 - DNA, 100 bp, Homo sapiens
tggacagcaacatttcccacaggacacgaagtttgtcggcccttgccttggcagagctgagaattaaacaaccaccatgtcgagcaaaaaggcaaagacc

SEQ ID NO: 80012 - DNA, 90 bp, Homo sapiens
caccctcgttcccccgattggggccgcaggacctccaggatatagtggctaccctgggccccaggtcagctacccacccccaccagccgg

SEQ ID NO: 80013 - DNA, 80 bp, Homo sapiens
gaaagaagttgcaaaacactggtctgaaaggcactttattatgcaggtggtctgtgaagccacacagtgtccagatacga

SEQ ID NO: 80014 - DNA, 50 bp, Homo sapiens
gaagcaaaagcctttcatgattatgtcctggatgcctcatcccttagttt

SEQ ID NO: 80015 - DNA, 75 bp, Homo sapiens
cgaggagttgggggaccatcccagcaggtgagaatgagatggtgatcatgagacctggaaacaaatatgagtaca

SEQ ID NO: 80016 - DNA, 83 bp, Homo sapiens
catgtctcgccgcaagcaaggcaaaccccagcacttaagcaaacgggaattctcgcgagctgtgactgatgagaattaaaggc

SEQ ID NO: 80017 - DNA, 100 bp, Homo sapiens
aacagatgacagctggaagggtagaccatacgcaagttcactggttgaggacccagttcccatctttggatatagaggtcgatggtggagtaggtcctga

SEQ ID NO: 80018 - DNA, 100 bp, Homo sapiens
gtgtatagttgcccatcttatatagcaaaagatttgatgaaagtacttcagggagtcaacggtgagggtgtccgcaatgttgccagtgtctgtctgcaga

SEQ ID NO: 80019 - DNA, 75 bp, Homo sapiens
cctcatgaaaaatataggaagaaaagatccagtagtgcaaaatatgggagcaaagactggtgctcttggagaaaa

SEQ ID NO: 80020 - DNA, 100 bp, Homo sapiens
cggagcctcccctgcagcgactcggaagattcgaggcggcgggggacaagtcggcgccccagagcggacgagttctcaaaagtctatggtcctgtgttca

SEQ ID NO: 80021 - DNA, 82 bp, Homo sapiens
ttgttctgcctgacttggaccctggaaaacctggccctcttcaatttctgacaaaagcttaaagcttttcaagccaggccaa

SEQ ID NO: 80022 - DNA, 100 bp, Homo sapiens
gagaacttcaggaacctgctgtcagtgggaaaagaattccatggcaacatcattaaagtgtcctttgccactagaagacctgaattcatgagaggaggtg

SEQ ID NO: 80023 - DNA, 51 bp, Homo sapiens
ttctggatgtccttgagttcaaccagccgcttacaaacacgcagatggcaa

SEQ ID NO: 80024 - DNA, 90 bp, Homo sapiens
ctcttggaatcaaagataaatccaaatactgcatatcagaaacaacagtgtaaacaggaacatcgataagtagtgtaaaaacttgcacaa

SEQ ID NO: 80025 - DNA, 98 bp, Homo sapiens
gcacttcctacacagcctgctgaagaagcagcacgaaagagagaggtccgtctaatgaagaacaggaactttgtgttaaagcatcatgtattcttggt

SEQ ID NO: 80026 - DNA, 100 bp, Homo sapiens
acggaagagagggccccgtcaagctcccaaaatggcgatgacaccggcacctggcccaacaaccagtttgacacagagatgctgcaagccatgatcttgg

SEQ ID NO: 80027 - DNA, 99 bp, Homo sapiens
agccagcgggcagccagtctggacacgagagacgggggacgtgtgtatctccatcctccacccgccggtggacgacccccagagcggggagctgccctc

SEQ ID NO: 80028 - DNA, 74 bp, Homo sapiens
ccatggccttctacgttgtgaaaatggttaatgttcgtgaagaaattgaagagttttttccaagaatgtggaag

SEQ ID NO: 80029 - DNA, 75 bp, Homo sapiens
tctaatccctgctctgtcactaacaagctgcgtgatcttcgggatacctttcgtccctgcatttaaaggctttca

SEQ ID NO: 80030 - DNA, 74 bp, Homo sapiens
gcgccacaagaacatgtctgtacacctgtccccctgcttcaggttcttgtctgtcgcccaggctagagtgcagt

SEQ ID NO: 80031 - DNA, 100 bp, Homo sapiens
atttgctcatccccccaaaagttgtcaggttgaaaatggaagagtaattgcctgctttgattccctaaagggtgtcagatgcctgatacattcaattcat

SEQ ID NO: 80032 - DNA, 101 bp, Homo sapiens
aaaaaggagagcatcttggacttgtccaagtacatcgacaagacgatccgggtaaagttccagggaggccgcgaagaaaacatccagtacagacctttctg

SEQ ID NO: 80033 - DNA, 83 bp, Homo sapiens
agccccgctacccgccccacagcctttcctacccagtgcagatcgcccggacgcacacgctggtaggtgagtgctgtcctcgg

SEQ ID NO: 80034 - DNA, 83 bp, Homo sapiens
catgtctgcgagccaggattcccggtgcgcttctccgagaaggtcactgtccatttcctggctgtctgggcagggccggccca

SEQ ID NO: 80035 - DNA, 101 bp, Homo sapiens
tgctggtgttcgcccacgaccatgatgctgcagttggagaagaaacttgaacgtgaacttgaggatgatgcacgagttattgcttgccggttccctttccc

SEQ ID NO: 80036 - DNA, 50 bp, Homo sapiens
gtctgcgagccaggattcccggtcagcccaaggccaaccccactgtcact

SEQ ID NO: 80037 - DNA, 100 bp, Homo sapiens
cactgtcgcagggacaggagtactccacagaggataaatttcaacctccggggccacaatagcgagaaataagcgggttttgaaaacaaaaaaaagaagg

SEQ ID NO: 80038 - DNA, 80 bp, Homo sapiens
ctgaagaactggaacacgtagaaagtgcaagcaaaggatattttcattgtctccgaattttagagctgaaaagtgcctta

SEQ ID NO: 80039 - DNA, 74 bp, Homo sapiens
tggtgcgagtcttcggagcgaccccggcagtggaatttctgtggagccacacgacggagagcatgtgtgtcgga

SEQ ID NO: 80040 - DNA, 51 bp, Homo sapiens
tgggtatctacctcatctgtgtggtacgagtggctgctttacagaatctgg

SEQ ID NO: 80041 - DNA, 96 bp, Homo sapiens
gcagtataaaacccagaagcagaacttgaaggttaaaccactagcccatttcacaggaacagatgttgttattgtaaagaatggaagaagaatatg

SEQ ID NO: 80042 - DNA, 75 bp, Homo sapiens
tcagatgttccacgtaataatgctgctgataccccaatgtccttctttgactttgtggttgatcctcattctttc

SEQ ID NO: 80043 - DNA, 75 bp, Homo sapiens
acattagcgtctacgaccaccaagcagggagatcattcgctgaaggaacatgagctcttggagcagcagaagcgg

SEQ ID NO: 80044 - DNA, 83 bp, Homo sapiens
ctgagactcctgctcagtgtagcattaagatttctgcgccaggagatgaggggcggtagagccctggaatggagatgtccttg

SEQ ID NO: 80045 - DNA, 90 bp, Homo sapiens
ctcactctacgtggagttgggccctgcaggaaggacggacttcaggggcagtgtaatgtgtacaattctggccaacggcggaagctattg

SEQ ID NO: 80046 - DNA, 51 bp, Homo sapiens
cgatgtatctaaacttggcaccaagtatgctacccactgctgaaactcccc

SEQ ID NO: 80047 - DNA, 80 bp, Homo sapiens
taatggattaacgtccctgtcgtgtgacattttctgaatgttggctcaattaagaaacatcagggagataaattcaaccc

SEQ ID NO: 80048 - DNA, 83 bp, Homo sapiens
gtcgcctagtaaacggggctgctggtgggccgcgtcgaagacatggaccagggctacggagctctacgaactcgacggggacc

SEQ ID NO: 80049 - DNA, 95 bp, Homo sapiens
gaatgtgacatgaaaaaaatgcattatgtggaccctgaccatgtaaaggttggcagtggcaatgacccctggtcagcctggagtgcctccaaatc

SEQ ID NO: 80050 - DNA, 75 bp, Homo sapiens
aagcagcagaaggtggaggacttttatgacatcggagaggagctggggaggtgagcgagtgctgtgctttcatgg

SEQ ID NO: 80051 - DNA, 100 bp, Homo sapiens
atggaattcttttaccatcttattaattcactctggtgtcatggagaaactccagctgggcccagagattctgcagcgggaaaatccaaggcttatttat

SEQ ID NO: 80052 - DNA, 100 bp, Homo sapiens
taccatcacagttaccaccgagcaacttacaaccgcatcatttcctgttggttccaagaagaataaagattccctcgttatgccacgaccagataagaat

SEQ ID NO: 80053 - DNA, 75 bp, Homo sapiens
cagcacagttcctgggaaggtggagccaccagcctctccctggtttgatttcctctgcatgcctgtcttccatcc

SEQ ID NO: 80054 - DNA, 50 bp, Homo sapiens
gcccgggaggggctcagggacaaggccctgggaggagcggggacactgag

SEQ ID NO: 80055 - DNA, 140 bp, Homo sapiens
tctcttctgggaccctggattttcggacactgagcgccatggccctgcctctgctgccgggcaacagcttcaaccgcaacctaccaagtcaggattgttacccccaccacctgcgctccctccaagaccttgtccatcac

SEQ ID NO: 80056 - DNA, 90 bp, Homo sapiens
gaagagccagaggtgatccctgggcctccatcagagagccctggcatgctgactaagctccagggccattatgctgtgatgaacaacccc

SEQ ID NO: 80057 - DNA, 96 bp, Homo sapiens
tggcggccgcggcgatgactcggacccagttggtcctgagaaaagggtgccagcgatgcctggatcgcctgtggaagtgaagatacagtccagatc

SEQ ID NO: 80058 - DNA, 83 bp, Homo sapiens
cagtgtgcctgcaacctgtccggggatcccagggagttggtcatgttcggagtttgacctgaatgagattcgcctgatagttt

SEQ ID NO: 80059 - DNA, 131 bp, Homo sapiens
ggggaatcaagagacccggtttctaatccctgctctgtcactaacaagctgcgtgatcttcgctccagggttccttgaaaagaaaacaggtagttaacctatctcctgccaacagcaagcgacccaatggc

SEQ ID NO: 80060 - DNA, 100 bp, Homo sapiens
gggaggattggctcagccacccgctgggaatcgtgcagggattcttcgcttggtgtaaaaattgccaaagcagttgcctgccacaactttgtaaaagcca

SEQ ID NO: 80061 - DNA, 125 bp, Homo sapiens
tgcaagaggcctacgtgcgggtggtcaccgagaagtccccgaccgactggcagttgtgaaaaacttcaggacaaaaatgtttcatttaaggacttgtgctgctaagttgaggccattgacggctt

SEQ ID NO: 80062 - DNA, 131 bp, Homo sapiens
cgcacgcgggaccagggaccaggctgagactcggggcgccagtccgggcaggggcagcgggagccggccggacaatgcagatcttcgtgaagactctgactggtaagaccatcaccctcgaggttgagccc

SEQ ID NO: 80063 - DNA, 74 bp, Homo sapiens
agcagacgatggggagcttgcagcccctttgccactcagtttgtcccgctggctggaagcctggcagtgacacg

SEQ ID NO: 80064 - DNA, 100 bp, Homo sapiens
gcagccgcgcctctcgcttgcttccctcggccgggccgtcctcggcggcagtgtcagggtatgtgacgcattcccagactcttcagccaactgagcatca

SEQ ID NO: 80065 - DNA, 100 bp, Homo sapiens
atgaggtgatggcaacggccaacttcggcaagatccagatcgggatttacgtggagatcaagcgcagcgatggtcagtactcctgcatttgtaccaacga

SEQ ID NO: 80066 - DNA, 98 bp, Homo sapiens
ttgcgtcccgggagcccggcctcgtgcgccgcgctttgagggtgaatttggaagtgaaaagaaaactgctttgcatgaaaaagaggagacacttcggc

SEQ ID NO: 80067 - DNA, 76 bp, Homo sapiens
gattctgcctggccctgggaagagaagcctagatatctgagtctccacagcctattggctcacttggacatgatgc

SEQ ID NO: 80068 - DNA, 76 bp, Homo sapiens
gaggtcccacaggctcctgccctggactaccgagaattcttcaaagaactacttgaaaatgcagagaaatccctga

SEQ ID NO: 80069 - DNA, 90 bp, Homo sapiens
gtgaagcagggcgagctgcagaaggtgatcctgatgctgtccctctacagccacaagcccgaggtggcccagtacacccacacgggcctg

SEQ ID NO: 80070 - DNA, 75 bp, Homo sapiens
agaggaggtgcagatggcactttccaaagtggatgcctccggggagaaaccccagttagtgaccgggggtgagag

SEQ ID NO: 80071 - DNA, 135 bp, Homo sapiens
gctggacgcccacatcctggagtggcacgattcgctcttccagatcctgtctgagaggcaggacatgggttatgtaccgaaggactctaccgtgtcagcgggaataaaactgaccaagacaatattcaaaagcag

SEQ ID NO: 80072 - DNA, 83 bp, Homo sapiens
cgaagccccctgcaggaactctacaacccaatccaggatgttggagctggtggcccagaagcagcgggagcgtgaagaaagag

SEQ ID NO: 80073 - DNA, 95 bp, Homo sapiens
ctgaagtcacaacttgccaggaggttgtcatagccttagctcaagcaatagattgctgctaaaattgattcaattcctcacttgaataattccac

SEQ ID NO: 80074 - DNA, 119 bp, Homo sapiens
gtttcaaaacatgagtagagaactgtatcgagatttagcacttcactttgcagagctccgagaggccttcagagaattcgacaaggacaaggatggctacatcaactgccgggatctgg

SEQ ID NO: 80075 - DNA, 100 bp, Homo sapiens
cgattgtatagctcagaagaaagaatggctgcagtctgtccaggccaccatgatcctgtcgatcatcttcagcattctgtctctgttcctgttcttctgc

SEQ ID NO: 80076 - DNA, 53 bp, Homo sapiens
atgcgaattgtgaatcgcttctccaaacacttcatgattgtatccaaaaaacc

SEQ ID NO: 80077 - DNA, 83 bp, Homo sapiens
cgagccagcccgccagcatgccccagtccaaaggctgtctgtccccagaccccagagcacgtccggcaccaccatgactgggc

SEQ ID NO: 80078 - DNA, 90 bp, Homo sapiens
tgaagaaggcgcgggagagctcggggcgcctggttcttagactctgtgagtaaagacagcttcatcttcccagttcatcatggcttcaac

SEQ ID NO: 80079 - DNA, 100 bp, Homo sapiens
gaaatcattatcagtggtcacagaagtctctaccaatggtgcttcagaagtttcatactttcaggtaatttcatctgtgccaaagcctccagaggacaag

SEQ ID NO: 80080 - DNA, 83 bp, Homo sapiens
ctggggctgcttgctgaccgctttttacatgtggcacccataaaagatgaggctgagaacacggaaagcttctcagcagtcaa

SEQ ID NO: 80081 - DNA, 83 bp, Homo sapiens
cagagaagtgcccgaggagagttaacagggacagagcagaatgggctgatatagatccggtgccgcagaatgatggccccaat

SEQ ID NO: 80082 - DNA, 90 bp, Homo sapiens
ttctccagggaaaggatgacatatttttggacctgaaacagaaattctggaacacctatatgtttcagctcctggcatcagctctattca

SEQ ID NO: 80083 - DNA, 90 bp, Homo sapiens
gtaggcttggagcagaatcaccaagcatcgccagcaccaggctcgagaattacaagctcgggtactaaaacgtgttcagatggaacagcc

SEQ ID NO: 80084 - DNA, 74 bp, Homo sapiens
gatgaggaagtggaggctttcctgaagggagtaccctgacttctaccggaagctctacggcctcttggacccct

SEQ ID NO: 80085 - DNA, 101 bp, Homo sapiens
agactgtttgtgttgcgggggccggacttcaagtatgccaccacgggctgttccctgaccctgcaccatacggagaaaccagaacatgaagacatatgtga

SEQ ID NO: 80086 - DNA, 50 bp, Homo sapiens
cagcgccccgcagagcagtcgagatgtgtggtttttaacaacagaggagt

SEQ ID NO: 80087 - DNA, 108 bp, Homo sapiens
tcaccttctacaccggggtcccgaaggcagaattcaagaaggagacgttcgacgtgacgctggagcccttgtcctcaccatcagcaccaggccgcccaggctctccat

SEQ ID NO: 80088 - DNA, 90 bp, Homo sapiens
gagcggtatagctccagcgggtccccggcaaactccttccacttcaaggtgtgtgacatatatataaattataaccttccattagtggta

SEQ ID NO: 80089 - DNA, 90 bp, Homo sapiens
gcgagctctaccgcgcctggtatcgggaggtgccgaacactggcagaagattttcgcaagctctggaaaactccacctcgagagaaagca

SEQ ID NO: 80090 - DNA, 80 bp, Homo sapiens
ctccactgccactacagggaagtgcatcacatgtcaggtgtggacactgccagcggctgcagccgacttggaatgacctg

SEQ ID NO: 80091 - DNA, 82 bp, Homo sapiens
gtacacttcttggcagtcatggacaagagctattgatagaaggatttttcaagccacattcaattgataggatgaaaaaatt

SEQ ID NO: 80092 - DNA, 48 bp, Homo sapiens
gacgagcaatggaacttcgaagtggacccatcaacttgtgccagtaca

SEQ ID NO: 80093 - DNA, 82 bp, Homo sapiens
cagaaaacctgcagaagaactggcttcgggaattttaccagaataccctctaccatctgctttggtcagggtgccgctcgag

SEQ ID NO: 80094 - DNA, 98 bp, Homo sapiens
aggaggctaagaaagtggtgaatcccctgtttgagaaaaggcctaagaattttggcattgttgtctatcaacgtctatgactacaactgccatgtgga

SEQ ID NO: 80095 - DNA, 83 bp, Homo sapiens
atcgtcatcagaaactgaaggcaactttgtctatcgcacagaataccaagctgctattttacacttgaagagggagcacaaag

SEQ ID NO: 80096 - DNA, 82 bp, Homo sapiens
aactattaaccaccattcttcagtgggctgtgattttcagaggggaatactaagaagtcaaaatgcagatcttcgtgaaaac

SEQ ID NO: 80097 - DNA, 51 bp, Homo sapiens
tgcggaagggccacgttgaacagggccctttaaaaggacgcagagttgaag

SEQ ID NO: 80098 - DNA, 97 bp, Homo sapiens
atatgatgattttgaagtcatttcacatcgaagccatgatttaaatatcggcgttaagatgtagccatagctgtaacgtataaccatgatgggtctt

SEQ ID NO: 80099 - DNA, 105 bp, Homo sapiens
ctcagttggaagcagccgatccagcctgcggagcctgtggggcagaagaagctcattcacacagaagacccatttaatgatgaacatcaggagaggcaagaggtg

SEQ ID NO: 80100 - DNA, 83 bp, Homo sapiens
tccttcggcagtccacccaccgccgccgcctcccaggactgctgtgtaagctatggtggcatgtggtaccttaaagggacagt

SEQ ID NO: 80101 - DNA, 75 bp, Homo sapiens
gggcctggggctgcctgccgggcggccgggcgcggcgagcccaggtactgctataaccagaatttggtagaaaaa

SEQ ID NO: 80102 - DNA, 100 bp, Homo sapiens
caaaaatctggcatggagcgttgccgaatccttttggaggctgccaggataataaggatggtgttatctgaaaaggttagtcagctgatggaatggacta

SEQ ID NO: 80103 - DNA, 100 bp, Homo sapiens
aacccggactccggcgtagcgttgctgccaaacaaggtgaatccgacccagagaggaaagaaacaaggcagaaagtagacgacgacagaaaacatgagat

SEQ ID NO: 80104 - DNA, 87 bp, Homo sapiens
gccgccaccacccactccggacacaggatttttagactctgaggagcagttggagctaatccacattatggaaatggaaaccaccga

SEQ ID NO: 80105 - DNA, 51 bp, Homo sapiens
gcgccgggagctattgggacctgcggtttctattccaaggacaatgaaggc

SEQ ID NO: 80106 - DNA, 50 bp, Homo sapiens
cttcaaatataatgccatcttcaagtgccgtggaggtcccagcccccgct

SEQ ID NO: 80107 - DNA, 97 bp, Homo sapiens
cattcaaatcctagcactctgggagagggccgttgctccagggagaactgcaaatatcttcatccacccccacatttaaaaacgcagttggagataa

SEQ ID NO: 80108 - DNA, 100 bp, Homo sapiens
gccgccaccatgttcctgggcaccggggagccggccttggacacggagcgggacggtatgcgggccatcctggggtcctacgacagcgagctgaccccgg

SEQ ID NO: 80109 - DNA, 100 bp, Homo sapiens
ggaccgcgctcaagaggctgatggccgagtacaaacgttggcttatttggacgtctaggcagttttccagttagagggacaccgatggccactcgactgt

SEQ ID NO: 80110 - DNA, 107 bp, Homo sapiens
agaaaggaatgaacatgtatttaaccaagttccaacaaaagaatgctgccgcagatgcaaataatacggcactccgaacagacactaaaaacagctctcatctcaaa

SEQ ID NO: 80111 - DNA, 90 bp, Homo sapiens
attccaagtaactcttatttgattgtctacaacctgttgtctctgcgcttcaactcacggatccgtgtgaagacctacacagatgagctg

SEQ ID NO: 80112 - DNA, 83 bp, Homo sapiens
acaagagtcctcaatccaacagcccagtgcttctgtctcgactgcactttgagaaggtcagtatgggaatcctttaaataaat

SEQ ID NO: 80113 - DNA, 97 bp, Homo sapiens
tatggacacagcttctagtgttgctttggatcttgtggaaagtcagatactgcaagcatctggccctgtctcagccattcagcttcacccagcagga

SEQ ID NO: 80114 - DNA, 113 bp, Homo sapiens
tcaggaaaagcctaaagattagactgtaagaaaagaaaatagaagccatgtttcgaagacctgtattacaggtcctcagaatggttggaatgaccctccagctttgaacagag

SEQ ID NO: 80115 - DNA, 82 bp, Homo sapiens
gttcacgtgactgtggatctcaagtactaccggccaactgaagtgatcttggagaaattcattcaaggcttttggatcacag

SEQ ID NO: 80116 - DNA, 96 bp, Homo sapiens
tgaggcaagcgcagggggacggggaccagcagctgtcgccgccgctctcagatgctgcagttggagaagaaacttgaacgtgaacttgaggatgat

SEQ ID NO: 80117 - DNA, 126 bp, Homo sapiens
gaagttatcagaagagagaacagaagatacagactgcgatggttcacctttacctgagtattttactgagtctccctttcctggtgatgatgaagaggaagtttttgacagtattgtaaatgatga

SEQ ID NO: 80118 - DNA, 88 bp, Homo sapiens
ggccaaccgcctacgtatcagctccatccaggccaccactgcggcgggctctgggtacactcacgtggaagctgagtgtcctttcctg

SEQ ID NO: 80119 - DNA, 75 bp, Homo sapiens
ggcctgcgcgccgctgcccgcgccacagttgttgacctcctgtactggagagacattaagaagactggagtggtg

SEQ ID NO: 80120 - DNA, 101 bp, Homo sapiens
ggcggaggcagaggtggaggcgctttgaaagcgtttagtcacatcaagaaatagaacagaattcagccatggccccaagaaagagaggtggacgaggtatt

SEQ ID NO: 80121 - DNA, 100 bp, Homo sapiens
aaactcaagcatagtcaagatccagctcccaaagagcaacagaaggctgaagccacagaacccctgaagtcagccaagccaggccaggaggaagacggac

SEQ ID NO: 80122 - DNA, 90 bp, Homo sapiens
gccaaaatggttttgggtacaagatgccagatgtccctgatgcatttccagaactctcagaactaagtcctacaatgattatgtgaggga

SEQ ID NO: 80123 - DNA, 75 bp, Homo sapiens
cggcagcggagggacggcagtctcgcgcgttctctcctgcgctatggtggaaacctgtccctccaaagtgccatg

SEQ ID NO: 80124 - DNA, 100 bp, Homo sapiens
cgaagtcaaggccctgtgcgctaaggccaggcccagctgagagccagcctggaggttacccagcagcaggccacccaggccgaaggccagctactagagc

SEQ ID NO: 80125 - DNA, 97 bp, Homo sapiens
tttttggtgcatatgttacccaaaccatctcaatcagtgaccacactgcccttgctcaattctgcaaagagaagaaaattgaatttgtagttgttgg

SEQ ID NO: 80126 - DNA, 51 bp, Homo sapiens
ccctgctggaggagcgctttcggctgccccagagcacatcagctatgtgcc

SEQ ID NO: 80127 - DNA, 75 bp, Homo sapiens
tcgacaaggaagatttgcatgatatgcttgcttctctaggtgctggagaatctggtaaaagcaccattgtgaagc

SEQ ID NO: 80128 - DNA, 82 bp, Homo sapiens
gcaccccggggtcccaggaagggcggcccagctggcaaacgcccttctggaaaaggaagtgataaactatgaggacattgag

SEQ ID NO: 80129 - DNA, 75 bp, Homo sapiens
ggacctggaggtgctgctgctgagtacttttggctatgatgatggagtgaactacgtgcaccagttctgtgtggg

SEQ ID NO: 80130 - DNA, 90 bp, Homo sapiens
ggtgggggtgctgtagaagcagccctttccatataccttgaaaactatgcaaccagcatgctggacggccaaccgccatgtgatgtaagc

SEQ ID NO: 80131 - DNA, 74 bp, Homo sapiens
ctgtgtctcattatctacttgagacctccagggtggtgtttcagatgtgcactcccagcaacacccctgccacg

SEQ ID NO: 80132 - DNA, 76 bp, Homo sapiens
taccttggataccctgctttgggtcccgcaggctcccgatggcgagattacggcgccctggccatcatcatggcag

SEQ ID NO: 80133 - DNA, 100 bp, Homo sapiens
ctgtccaattctgtttactctgaattaccatcagctgaagggaaaatgaaggataaatgaatgattctgccttttgttatgtgcgtgaacagaatggaac

SEQ ID NO: 80134 - DNA, 124 bp, Homo sapiens
tagaacttaaagtaaaacaaggtgcagagaatatgatacagatgtattcaaatggatcttcaaagtttggatgctcttccaagagtcacatgtccaaaccatccagatgcgattttagtggagg

SEQ ID NO: 80135 - DNA, 100 bp, Homo sapiens
tatgtgtatcttcctaggcaaaagctgtaatttccagagagaccattaggaacaggtcatctcgatgcactcctgaggggcttggttctgggaaaactag

SEQ ID NO: 80136 - DNA, 83 bp, Homo sapiens
atccagcctgcggagcctgtggggcaggtcccccacggcccttcaggatgaaagctgcggtgctgaccttggccgtgctcttc

SEQ ID NO: 80137 - DNA, 75 bp, Homo sapiens
tttgttgatcccggaaaccacaatagcgggattgatctccttaggacctgtgacttcatggtcatgacgattttc

SEQ ID NO: 80138 - DNA, 116 bp, Homo sapiens
ttccttcgtccctgacatcatctctgtgcactgataataaccctgcaggtaacctgtgtatggtgactggaggtgctaacctaggaagaattggtgtgatcaccaacagagagagg

SEQ ID NO: 80139 - DNA, 142 bp, Homo sapiens
ggaggggtaatggttctcagtcagaggcagcatgaaatcattttgaaagctgcacaagaactgaaaatgcttcggccagaagcctgtcttagatgttcatgcagaactagacagaattacacgaaaaccagttacagtttct

SEQ ID NO: 80140 - DNA, 75 bp, Homo sapiens
tttcgatccgggacggccggtcaggctcgccgccgagctgcaaattgtggctactaatttgccccctgaagatca

SEQ ID NO: 80141 - DNA, 83 bp, Homo sapiens
gtcaggttgattatcgagcaaaactttgggcctgtaatttctgttttcaaagaaatcagattatgagcctcaaacaatttgtg

SEQ ID NO: 80142 - DNA, 75 bp, Homo sapiens
gtcaacgggaccctggccgtctccagagccatcggtgcccagctaagacctgaatgccatcaccctccccagggc

SEQ ID NO: 80143 - DNA, 98 bp, Homo sapiens
aaacagcaagcactgacaagcagcacattctcaagagcacacaggttctgaaaagtgccttttctgaaaactctgctgcttggattctactctagagc

SEQ ID NO: 80144 - DNA, 100 bp, Homo sapiens
gagcgccgactgtctacgggcggccggggatcatcaatgctgtggtactgttgattttattgagtgccctggctgatccggatcagtataacttttcaag

SEQ ID NO: 80145 - DNA, 101 bp, Homo sapiens
ggtgtggactatgaagtcaaagccttctgcgcggagaatttggaggagaagatccacaagcgctatcagttgagggatttgcagttgataaaatggctgga

SEQ ID NO: 80146 - DNA, 83 bp, Homo sapiens
ctcatgttctgcacctcaggagggaattcagcctcagtgatgtccatgagacaatgcagatcttcgtgaagactctgactggt

SEQ ID NO: 80147 - DNA, 117 bp, Homo sapiens
ggatcgtgaccgagaccgtgaccgagagcgtgaccgagagcgcgaatatcgtcatcgttagaagaatgtggccccgtcccagagcaccacccgagacatcaggagcccatcgtgggc

SEQ ID NO: 80148 - DNA, 50 bp, Homo sapiens
gtaatacaagatgctttaaagaagacggtatccaactgttgaaaaacgag

SEQ ID NO: 80149 - DNA, 98 bp, Homo sapiens
ggtcgcgtctcggaaaccggtagcgcttgcagcatggagggtgtgaagacagagaatgaccacatcaacctgaaggtggccgggcaggacggctccgt

SEQ ID NO: 80150 - DNA, 74 bp, Homo sapiens
ctacggcaaagtggccactcaggttttaaaatcaaagatgggaaaatcggagaaaattgcccttccccatggcc

SEQ ID NO: 80151 - DNA, 80 bp, Homo sapiens
cgctctgagctggtcttctggcggtggatgtgctacagctagaatgaagcacatcaacctatcatttgcagcgtgtggat

SEQ ID NO: 80152 - DNA, 96 bp, Homo sapiens
cgggaattccacctctgcgtttttccctccaggctggagcggctcaggcggcctcggtgcgaaggagcaagggatccaggaccccatcaagggcgg

SEQ ID NO: 80153 - DNA, 75 bp, Homo sapiens
ctgaaggagttgttgtctcggcagcgcccgcggagacgtgaagaggtgaaaaattagacgatttcaagaattgga

SEQ ID NO: 80154 - DNA, 98 bp, Homo sapiens
tccttttccatttctgtgaggaaatatcttccatgttttacatttctttccagaattatacaatatttgcctgccgagtgcctgcgattgcaggcgcg

SEQ ID NO: 80155 - DNA, 75 bp, Homo sapiens
ctgaacatcaacctttggtcgacattgctgctgggaatggatctgactgcagccatgagcagcaatgagtgcttc

SEQ ID NO: 80156 - DNA, 96 bp, Homo sapiens
gtgcacttcccccaaagatgaagaaggctctccccttgtagtatctttaattggtgcacttttacgtgattttcccaatcgctgggagtactacct

SEQ ID NO: 80157 - DNA, 82 bp, Homo sapiens
ggaccctggaaaacctggccctcttcaatttctgacaaaaggtagctacagcaagctgggtagcaggcagatccaaaggata

SEQ ID NO: 80158 - DNA, 50 bp, Homo sapiens
gaaatggagggcatcttcaaccacaaagtgaagtaagaactctgctagag

SEQ ID NO: 80159 - DNA, 100 bp, Homo sapiens
ggccttgtggagacaacgccttaacccaaggaagtgactcaaactgtgagaacttcaggaattgaatgatctggcacgggaccctccagcacagtgttca

SEQ ID NO: 80160 - DNA, 50 bp, Homo sapiens
tgcaaagatcctgggagaccaagttcatgaggacaaggaaggaatttact

SEQ ID NO: 80161 - DNA, 100 bp, Homo sapiens
aatcaggagcagttacaggaaattgagtttacagacaaggatcagcagccctctggaagtgagggagaggatgatgatgcggaggctgccttgaagaaag

SEQ ID NO: 80162 - DNA, 74 bp, Homo sapiens
ctgtttaaaccattggtccttcgccgtcagtatttgaggagaaagcatttgcttagagctttcacagacaacag

SEQ ID NO: 80163 - DNA, 100 bp, Homo sapiens
aggttttaaatcaagatttaacattccaacacataaaaattatttatccaacagctcctcccaggaatgaatctgaagtctgctgcagtaaaacacagaa

SEQ ID NO: 80164 - DNA, 82 bp, Homo sapiens
ctgcctccaaattggccccagaggaagaggcaggaggggctggcacacccgtggcactgggaatctgaagaggtgtctgtgg

SEQ ID NO: 80165 - DNA, 83 bp, Homo sapiens
aggaggagtaggtgcgggtgaagatggcggcagccgaggccgcgaactgcatcatggaggcctgatcttttggccagaaggag

SEQ ID NO: 80166 - DNA, 87 bp, Homo sapiens
agaacaagagagaggacggcagcgccaagcaggagctgaaggacttcagggtgtcttttatgaataatcaaaagcagcaaaagccaa

SEQ ID NO: 80167 - DNA, 48 bp, Homo sapiens
tattttgccattaactggagacaggataccagaaggccctattgatca

SEQ ID NO: 80168 - DNA, 83 bp, Homo sapiens
ggacgctgctcttcaaagcgatccacaatctgttagaaaggatgagcaattcttaggttttggctcagatgaagaagtcagag

SEQ ID NO: 80169 - DNA, 100 bp, Homo sapiens
ctgacgagccagtacatcaagttcatcagcgagactctgcggcgcatggaggaggaggaggtgtccccaggtgtcattgccaacccctttgcggcaggca

SEQ ID NO: 80170 - DNA, 98 bp, Homo sapiens
gactgctgagcccgtccgtccgccgccaccacccactccggacacaggaaagaccacagcaagattctttcattcgtctcctcctagcctgggggacc

SEQ ID NO: 80171 - DNA, 111 bp, Homo sapiens
gcggtcgcagaggccgacggagccggagtcgcggacgccgcggggtctccgggacagacaatgcagatcttcgtgaagactctgactggtaagaccatcaccctcgaggtt

SEQ ID NO: 80172 - DNA, 101 bp, Homo sapiens
atcaacctttgaagagagaagttactggcaatctcaagtcaaccaggttccatgccattgcagtgtcaactaggcctcagttacttttcagtttgcccaaa

SEQ ID NO: 80173 - DNA, 75 bp, Homo sapiens
tataatacattccatgggaggaggggacctcaccaagcagcttcctatcatggtggtgggggagcacaaggacaa

SEQ ID NO: 80174 - DNA, 100 bp, Homo sapiens
gagctcctgtcccttcgctatgacctcactgattacagagactttgaccgagtccgggtaaatggctgggctaccctattcctccgaaccagcatcccca

SEQ ID NO: 80175 - DNA, 90 bp, Homo sapiens
gaggcggagaaggggcttcctgagcgtcccagtacactgacagagacatctgaagagctgccatgtctggggcatcttcctcagaacaga

SEQ ID NO: 80176 - DNA, 90 bp, Homo sapiens
cgacttcgatgatcgtgtgtcggatgaggagaaggtgtttgagaagtcccccctgcgggtgaagaacttcgggatctggctgcgctatga

SEQ ID NO: 80177 - DNA, 76 bp, Homo sapiens
ccaggacctccaggggaacaatgaggcctacgcagagctcatcgtccttggtgcagcttcaagcttaggaccaccc

SEQ ID NO: 80178 - DNA, 73 bp, Homo sapiens
tggcattggagcaagccaagaaagaatccgaagatcagaaacggtcagcttcccagacgtggaaaaggctgaa

SEQ ID NO: 80179 - DNA, 82 bp, Homo sapiens
ggaagacgacgggcagccccggactctagatgtgaactttgtccccataaggatggagctttaaaaagaacagataatgggg

SEQ ID NO: 80180 - DNA, 90 bp, Homo sapiens
gaggggctggagcccacctgctttgagaagagcaatgacattgggggcctgtggaaattttcaacacccatcatactgactccaagcccc

SEQ ID NO: 80181 - DNA, 100 bp, Homo sapiens
cgccgcctgaggaggcgagctagccgggagttacaccgccaccgccagttttcggctttgtgagaaaccttaccatcaaacacgatggccagcaacgtta

SEQ ID NO: 80182 - DNA, 74 bp, Homo sapiens
ggcgcagtatctgccgtcccagtcccagcagaggtaccagccgcagcagtcctccactttagtgtcttctctgg

SEQ ID NO: 80183 - DNA, 101 bp, Homo sapiens
cagggatgttgtcagacatcgttctggtctgtggctgtgccaaccagtgtcgtcacagttactcctggaaagccattgaatactgtaactaccctgaagcc

SEQ ID NO: 80184 - DNA, 100 bp, Homo sapiens
tacaactgttctaatgaggtcctatctattactgctatgttgtcagttaccgagctgatacccagacataccagccttataacaaagactggattaaaga

SEQ ID NO: 80185 - DNA, 83 bp, Homo sapiens
cttggacaagatgaacaacaatatcggcattctgtgctacgaagacgaagttatacggaagcgtctcctcattgatggagatg

SEQ ID NO: 80186 - DNA, 100 bp, Homo sapiens
gaggctggggaagccgtggcgtcccccatggacgacgggtttgtgagcctggactcgccctcctatgtcctgtacagaatttcgctaaggagtttgtgat

SEQ ID NO: 80187 - DNA, 51 bp, Homo sapiens
attcgcagtggtcgcttcttctccttgatgcccagcctacagagtctgaga

SEQ ID NO: 80188 - DNA, 100 bp, Homo sapiens
accgtatgatggtggtggtggtggtgtcttcctgtctcaacgatacctattttctagtgctgagatcctgagacaatgattgtggatttcttaaagaaga

SEQ ID NO: 80189 - DNA, 99 bp, Homo sapiens
gcccctcctcagatgcccctgccggagatccctcagccctggctgctgtctgaaaacgtggtgaaccgcatgaaggagcccagctctccaccccctgct

SEQ ID NO: 80190 - DNA, 75 bp, Homo sapiens
ctcccattgaccacgggttggaacagctggagacatgatggaggagatgtataagaaagctcatgctgctatacg

SEQ ID NO: 80191 - DNA, 75 bp, Homo sapiens
gaaaaacagccaccttcagtatctcagtcctccagtgtttggatattcagaatgagtccctggaacgccagatgc

SEQ ID NO: 80192 - DNA, 76 bp, Homo sapiens
taaatatctacccatggaataaagagctgtatttgatcaggtcagataccaggcccaggttccatgatgcccgggc

SEQ ID NO: 80193 - DNA, 115 bp, Homo sapiens
cttccgtcacctccgctcccccgatcctattcccagtcgtgttgcagatatcaagaaagtcaacaacttcatcagagaacaagacttatatgctttgaaatctgttaagattcca

SEQ ID NO: 80194 - DNA, 50 bp, Homo sapiens
cggcgccttcggcaaggtttacaagattgagaggatccagaatccagatc

SEQ ID NO: 80195 - DNA, 99 bp, Homo sapiens
ccatccccagaagatcctggtcccctgctttaaccatcgaaaatgagatgtttcaggattcagtggcctttgaggatgtggctgtcagcttcacccagg

SEQ ID NO: 80196 - DNA, 89 bp, Homo sapiens
ggaggctgtagctcaataccagatgatcattaaaaagaaagaagattatgtgcctgctttaaaaggtgccattgagaaacagaaattgg

SEQ ID NO: 80197 - DNA, 82 bp, Homo sapiens
cgacaagccgctggcagccgcggatctcaccgccgctcaggatctgggcggaccccggcaaatacgccctgatgggagctgc

SEQ ID NO: 80198 - DNA, 75 bp, Homo sapiens
cgcgggacctctccgggccatgggctcgaagggaattgaaacgcttgaaggaggaggctaggcgtaagcatgcag

SEQ ID NO: 80199 - DNA, 100 bp, Homo sapiens
ctgagagcacttgtagccatgaatgaaaatctgaaaagtcaagaacaggaatttaaagcacattgtcgaaaaggccctgtggacatcctggagatactcc

SEQ ID NO: 80200 - DNA, 83 bp, Homo sapiens
gagccgagcacgcgggtctgtcatcatgtcgcgttacgggcggtacggaggagggtctccgtctctccaccgggggcttcatc

SEQ ID NO: 80201 - DNA, 90 bp, Homo sapiens
ttcttttccatgatatcattatatggacagtttaggtttgccagggtttggatacctgatccagaggaagtctggaagtcagcagagctg

SEQ ID NO: 80202 - DNA, 100 bp, Homo sapiens
gagttacaggacatgattaatgaagtagatgctgatggcgttcaccttggtcgtcctgatgttttacctcagactccacctttggaggaaatcagtgagg

SEQ ID NO: 80203 - DNA, 90 bp, Homo sapiens
ggtcctttatatagaagggagagtaggcgtcacctcctcctgtcgcctggccctcgccatgcagaccccgcgagcgtcccctccccgccc

SEQ ID NO: 80204 - DNA, 50 bp, Homo sapiens
aagaattccagccggtctttaaaatgaagacggagtatgcaaggtttgag

SEQ ID NO: 80205 - DNA, 95 bp, Homo sapiens
catggagggagcaggagctggatccggcttccggaagtttgatgaaggccggaacaactttgaaggggaggtcaccaaggagaacctgctggact

SEQ ID NO: 80206 - DNA, 101 bp, Homo sapiens
gatctctcagttcctgcaagcagctgagcgctatggcattaacaccactgacatcttccaaactgtggacctctgggaagaactgctttctccaggggtta

SEQ ID NO: 80207 - DNA, 74 bp, Homo sapiens
aagacacttacgggtttcttctgtttgatactgaaaagcagtcaccaggagactaaagtccatcaaaaacatcc

SEQ ID NO: 80208 - DNA, 98 bp, Homo sapiens
ggaatgagacgccctcagaccccgtcatcattgacagggcaacgggcatgaggaggtagttgcatgcgcctgggatggacagacatatatcattgatc

SEQ ID NO: 80209 - DNA, 101 bp, Homo sapiens
ggagccggcgctgagaggggctgcggccggagcgggcggctgagacaaaggcgacgggattgttcccagaaagggagaccatttcatctcttcaggttgct

SEQ ID NO: 80210 - DNA, 75 bp, Homo sapiens
gaatggtttccttgctgatctatttaccaagtggaagccttttgtcatacatgatatggagacactgtgtatggc

SEQ ID NO: 80211 - DNA, 50 bp, Homo sapiens
ctgcgttccgggagcgccaacccctccagaattaaacaaccaccatgtcg

SEQ ID NO: 80212 - DNA, 75 bp, Homo sapiens
aagccgcctctgtattacttaccagggggggccctcagcctcttggccttgaacgggctgttcatcttgattcac

SEQ ID NO: 80213 - DNA, 100 bp, Homo sapiens
cttgcggaaaggatgttggcggtccctgtgacctgtggagacacggccagatctgccctccaaagaagctccgtctacagcctcctcaactcctgattcc

SEQ ID NO: 80214 - DNA, 100 bp, Homo sapiens
acggctgttgccatgaggcgaggctagggaggacctcacttccccggggtgtaataatgttaactgagcaccatatgaaggcggagtatggaaagttaga

SEQ ID NO: 80215 - DNA, 74 bp, Homo sapiens
ccagctaggaactaagcaggactcaagcaagctacaggaaaatcttgctgggctttgacaaacttcctctgtgg

SEQ ID NO: 80216 - DNA, 100 bp, Homo sapiens
ggaagaactagaatctgtgttagaggaagaggttgatgatttcccaacttttggagactcccagagtgactatgatacgttcccccagaagatcaatgga

SEQ ID NO: 80217 - DNA, 101 bp, Homo sapiens
gatggagaggctgagctgctccaggacttggggtggatggaagtttgcttagttgaagaattgccaccaaccactgaattggaagaagggctccggaatgg

SEQ ID NO: 80218 - DNA, 90 bp, Homo sapiens
atcatctggaagtaaaagatgttctgaagactttagtcctctctcacctgatgtgcctatgatctgtgacttcctccgcggagccacagt

SEQ ID NO: 80219 - DNA, 100 bp, Homo sapiens
gaaaacttacatggacatatgcagcaaatgttggggaacatgatctgttaaagcatgtgcagtctttgccaacaaaaaaaattaccaagaaacctattcc

SEQ ID NO: 80220 - DNA, 97 bp, Homo sapiens
aagaaggtggggaggaagaggaggaggaagaagaaggtgatgttatcaggatgcaaatttagtttttgaggagtttgctcgccataatctgaaagat

SEQ ID NO: 80221 - DNA, 103 bp, Homo sapiens
cactggcggatgaagcagctggtggggctctactgcgacaagcatgctacaagtgaaaactgatgagaaactgaatgtgtctgatgagaatacagcaagttgc

SEQ ID NO: 80222 - DNA, 98 bp, Homo sapiens
agctgtcaggaggacgatttcctggggggcatggagtgcaccctggggcaggtctccataacccctcggacaaacgccgccctgggctttgctcagat

SEQ ID NO: 80223 - DNA, 98 bp, Homo sapiens
caggtgccaagaactatgaacaggcagcaacaagaatgggtgaatcagcaaagggaagatattgaaaggcaaaggaaacttctagccaaacgcaaacc

SEQ ID NO: 80224 - DNA, 124 bp, Homo sapiens
tggaattctccgtccctttccagggagggaacaaagcccacagcaccggagaggatggccttaaggcactgaagatcaattaaatcatcagaactcaaagaccttttccttttgttggcagtac

SEQ ID NO: 80225 - DNA, 90 bp, Homo sapiens
tgaggataacatccctccagaagatgagtgcctggaagagctgggatgtctggttgagtcctatggcatgaatgtttgccaaccaacccc

SEQ ID NO: 80226 - DNA, 100 bp, Homo sapiens
ttaaatttcctccttgatgtctcatcagaattggagccgcttttcctctgcaatactggagcagcagagactcctcaggaagactcactggactgtaccc

SEQ ID NO: 80227 - DNA, 98 bp, Homo sapiens
attgatgtagagtttcagaaaggagatcagagttcagttgattccaccatctctagttcttcttccactaaaggaataaagaggaaagctacagaaat

SEQ ID NO: 80228 - DNA, 80 bp, Homo sapiens
tccttgcagagacagctcaacacggcacttccacaggaaccaggtgcagatgggtctcttccttcctgcccccatctctc

SEQ ID NO: 80229 - DNA, 83 bp, Homo sapiens
caggatttagaggaccactagttggaccccatcctcgtgctggaggaacagacacagaatgttcagcttaacaaagaaatgac

SEQ ID NO: 80230 - DNA, 100 bp, Homo sapiens
aggccaatgttgtggggccctggatccagaccaagatggagtggatcaatcttcctgtcctacaactgacaaaggatcccctaaagacccctggaaggct

SEQ ID NO: 80231 - DNA, 75 bp, Homo sapiens
gccaacatgtgatgggactcctctcccagagccggggacatcagagctgagagctttcaccaacaatcaccagtg

SEQ ID NO: 80232 - DNA, 110 bp, Homo sapiens
tcagataatagctcattttagtagagggcaataaatgccacatgagatgatcacctcagcagaaaactaatggtgtccacacagcgaggaagccacgcttgaacctctca

SEQ ID NO: 80233 - DNA, 100 bp, Homo sapiens
agcaggcggggaagatgaaagggttgcacgttttcaaaaaatacctaatggtgaaaatgagacaatgattcctgtattgacatcaaaaaaagcaagtgaa

SEQ ID NO: 80234 - DNA, 73 bp, Homo sapiens
cgcagccacctggagaaggcgcatgcttttcacttccactgcatctctcgctggctcaaaacacgacaggtgt

SEQ ID NO: 80235 - DNA, 101 bp, Homo sapiens
cgtggtcagagcgagtctcggagaagatgtggtggcttccgtttgttggtggaggaggtggcaggcctcggcggtttattgggcacttcctagcaccaggc

SEQ ID NO: 80236 - DNA, 100 bp, Homo sapiens
aagagcactagtgtctagaaggcactaaggatgccatggacaatattaccaggcagaaccaattctacgatacccaagtcatcaaacaagaaaacgagtc

SEQ ID NO: 80237 - DNA, 100 bp, Homo sapiens
caccatccgcgaggcaggagagaggaggaggagtgcggcgcggcggccccgggaccaaggaggtctcagccggtcgtcgcgacgttcgcccgctcgctct

SEQ ID NO: 80238 - DNA, 100 bp, Homo sapiens
agatctacagtgagtcattcaaacagcatgacataactgatcatgacaagatgtttaagatgagtgaaaagatattactcctgtgtgttggagaggctgg

SEQ ID NO: 80239 - DNA, 98 bp, Homo sapiens
atagcactgttcttggaatttaacatgcttgcacaaggacttggatgttgtgggtgatggtatgcagtgtcctccttcacctttgctttttgatcctt

SEQ ID NO: 80240 - DNA, 74 bp, Homo sapiens
taaagtgattttttgcctttgttgattaactggacaaattcagtgtttgatgatggtgatgagcgaacattgag

SEQ ID NO: 80241 - DNA, 75 bp, Homo sapiens
gcttgggatcctttatcctggtcatcttctatttccaaagtatgttgcacccagttcccagtgacctgacagcag

SEQ ID NO: 80242 - DNA, 97 bp, Homo sapiens
agaaagggcgcccaactactgccggaagcaaaataaaggtccagtggctcctggacaactatgagacggctgagggcgtgagtctgccacggagcac

SEQ ID NO: 80243 - DNA, 90 bp, Homo sapiens
ggagagtattttagagacaatggcaaacatgctttgatcatctatgacgacttatccaaacaggctgagatcgtcaaaaggctgaacggg

SEQ ID NO: 80244 - DNA, 100 bp, Homo sapiens
ctcttggatggagtaccagtagctttaaaaaaagtgcaggttatacattggctcttcaaagacgttcacctcatcagagaaatccctgactcctttgcag

SEQ ID NO: 80245 - DNA, 100 bp, Homo sapiens
gatcccgatattttaaaagctgagatctccactacaagattaagggcgtcgaccagaagattatgatattcataacagcagaaagaaaccaaggattgac

SEQ ID NO: 80246 - DNA, 100 bp, Homo sapiens
cagtggcctcggcgattatggacccggccgaggcggtgctgcaagagaaggcactcaagtttatgaatgtactcaagactgatcttctaagttcactgga

SEQ ID NO: 80247 - DNA, 100 bp, Homo sapiens
gcataggccgtgccccgaccggactggacgcatttttatacataggggaccaagccggaacctcctgctcaacgggaagtcctaccccaccaaagtgcgc

SEQ ID NO: 80248 - DNA, 83 bp, Homo sapiens
ggcagaagtaggaagtctttgggacaaaactgtatttaccttggaagctcttcgtgggcggtcttgactggagcacgacccaa

SEQ ID NO: 80249 - DNA, 100 bp, Homo sapiens
ccctgtttccaggaaggtgcatactactcgctgccaagctctgggggtcatcacagagaaggagacccaggtgcaatggccaatgtacatggtggactat

SEQ ID NO: 80250 - DNA, 97 bp, Homo sapiens
gcttctccggcctccctgctcttaccgggagacaggggcaagtgtccgagtggtgaatcagctacttacagagatggatggtctggaagcacgccag

SEQ ID NO: 80251 - DNA, 83 bp, Homo sapiens
aaggaacgaggcaaggagctaaagcagcgtgcgttcagccctgggatgccatggacaatattaccaggcagaaccaattctac

SEQ ID NO: 80252 - DNA, 100 bp, Homo sapiens
ggcactgtattctttacctgcttcccaatcccactgatgaggatcagcccatggcttatccagaatcagatcacagctaaggggactgcccagctggcag

SEQ ID NO: 80253 - DNA, 135 bp, Homo sapiens
ctcggccggctttaggtcccagtggtttcttcctccagttaggagccttgatgccggaggggacagtggtaattcagtaccaaactgttcgatatgatatcctccccttatctcctgtgtcccggaatcggctag

SEQ ID NO: 80254 - DNA, 100 bp, Homo sapiens
caacattgaacatgccttcatcctctataacaagtatatcacgttaaacccatccagagtaatggctgcggccttacccaggaccctgggggagttgcag

SEQ ID NO: 80255 - DNA, 100 bp, Homo sapiens
acaacaacttgcagctcatctctattgatgcctcctgacaaggtgatccgggcgggccccgcaggaattttatcccctcaccggcctcacactagtatcg

SEQ ID NO: 80256 - DNA, 51 bp, Homo sapiens
aggaggcattaacgagaccgggtaaggtgacttaagagattaaaattaatt

SEQ ID NO: 80257 - DNA, 75 bp, Homo sapiens
cagccagaccatggagctcgcccccaacttccagggtcctaggcctacttacaagcctccagtctcaaattatcc

SEQ ID NO: 80258 - DNA, 82 bp, Homo sapiens
tctttgccaaggagagccagtgggaccccacgtggctgtacctgtgcaagagagagtcattcaggagagcaggaaagaaaag

SEQ ID NO: 80259 - DNA, 82 bp, Homo sapiens
aagctcaccatgtggagactcgcagacatcgagcagtctacagatggcctgatatgaaggagtcacgcctcccgcctcccgg

SEQ ID NO: 80260 - DNA, 100 bp, Homo sapiens
gcagagattgtctcggctcttgagtacttgcactcgcgggacgtggtataccgcgacatcaaggtccagcagactctggaggcccgagcagctgctgcag

SEQ ID NO: 80261 - DNA, 83 bp, Homo sapiens
ctgatggaggtggaggtggaggcgaaagccaacggcgaggactgcctcaaccaggaaagccatcaccaagtcgggcctccagc

SEQ ID NO: 80262 - DNA, 100 bp, Homo sapiens
ttcttggaatttgtggaggattttattcaggttcctaggaatctcgttgaaattatggatccggatgagcaattggaaacccttcatgaagcactgaaac

SEQ ID NO: 80263 - DNA, 73 bp, Homo sapiens
tcagctggctctggatatctacggagggaccatgcttagctcaggatccgagccagccccagtgcctgctgag

SEQ ID NO: 80264 - DNA, 100 bp, Homo sapiens
gaaagcaaaggagtcagggatggctcttcctcaggatgagacaggagcctatctgattgacagggaccccacctactttggtcctatcctcaactacctc

SEQ ID NO: 80265 - DNA, 100 bp, Homo sapiens
tgggatcaccaggagaaattgcagctgcatgaatcccaaaaaggtcccaggtgtgtgatggcggctgcaatctgtcttgtgggtattaatgcaatcttca

SEQ ID NO: 80266 - DNA, 76 bp, Homo sapiens
gggcgggcggtgagcgcccatatgggggttctggagagcggggtgtgggcattttgaaagcgaagcagaagccgta

SEQ ID NO: 80267 - DNA, 120 bp, Homo sapiens
ctctgttagtgcgcctctaagatggcgacgcctttggcggtaaattcggagttgctgggagcctgagcacctttcgtttttcggctcagagaaagccaagtgcaacttgcttcagtcatc

SEQ ID NO: 80268 - DNA, 100 bp, Homo sapiens
atgacaacgtctctctgccgtgaatcattcctgcagatgaaaaagtgtgacttggcagctggtttgtccagaggggttgcgtttatccggtttgacaaac

SEQ ID NO: 80269 - DNA, 83 bp, Homo sapiens
cctgcatcaaggaggccattctcttgaaagtggatctcttcagcctgggaattatcttctttgagatgtcctatcaccccatg

SEQ ID NO: 80270 - DNA, 90 bp, Homo sapiens
cgtttctgagatttccttcgtccctgacatcatctctgtgcactgataataaccctgcagattctacaagggggttgctcctctctggat

SEQ ID NO: 80271 - DNA, 106 bp, Homo sapiens
cttgtttgtggatcgctgtgatcgtcacttggtacaatgactcttcttgcttttcacctaagttgaataagcaccctgtgcactttaatctcctgtcggtaccatt

SEQ ID NO: 80272 - DNA, 88 bp, Homo sapiens
gccggcgagcgcgtcgccaccatgcaggtcaatggccagcaaggaggggggtccgagccggcggcggcggcggcagtggtggcagcgg

SEQ ID NO: 80273 - DNA, 97 bp, Homo sapiens
cgttggctgggaccgtgcgcgtgcgcctgggggcaccgctgccgttccgagagtgcatctccctcgccccctgagagtctcgtggaggaggagcgac

SEQ ID NO: 80274 - DNA, 101 bp, Homo sapiens
ctggcgcgtacgagatctccgaccagtctgggggcgctggcggcctgcgcagccacctcaaggaccagatggcctttgaggatgtggctgtgtacttctcc

SEQ ID NO: 80275 - DNA, 111 bp, Homo sapiens
tttcattgtcttttccgcccgcttcgatcgcctcgcgccggctgctctttccggatcaatgaactgagccatgttcaaatccctgttatgttgatgccagatgacttcaaa

SEQ ID NO: 80276 - DNA, 88 bp, Homo sapiens
ttcagcagaagaaacacttcctataaatctcgcccaaacaggaaaggcgtcgaccagaagattatgatattcataacagcagaaagaa

SEQ ID NO: 80277 - DNA, 50 bp, Homo sapiens
gagaacctcaagaacatcttctcaggtatgcaaccactcatgtattcggt

SEQ ID NO: 80278 - DNA, 75 bp, Homo sapiens
cacggaggagccgctggggctgccgccacggccgcccggaggatttgcagatttacagaatggctgcacattaat

SEQ ID NO: 80279 - DNA, 82 bp, Homo sapiens
ttcgctgttatgccaattgtcttcagccatgggcctccaaactgcagaaccttggcctgaaaatgctacattatatcagcaa

SEQ ID NO: 80280 - DNA, 100 bp, Homo sapiens
ttcctttacagaagatgcgcttggcttgcggtatccactgtcttctctcatgtatacagtgctggccattcaggcccgaaagcggaggccgaaaagagag

SEQ ID NO: 80281 - DNA, 100 bp, Homo sapiens
agggttcatggggacatggcaaaacgctgatactaacctcttattcagaatgtcccaacagacaatgcagatcttcgtgaagactctgactggtaagacc

SEQ ID NO: 80282 - DNA, 90 bp, Homo sapiens
gcatcctagtggaggacgcccctgtgccagagcactggggcttaagcaatgatttggatggatgtcgaccatgtgactgtgaccttgggg

SEQ ID NO: 80283 - DNA, 90 bp, Homo sapiens
gccgttgctgggcctcgccgctgctgccgtcgcgggcagcagcggctcccctgttgtatggacattctgcacccgaaactgatagctgag

SEQ ID NO: 80284 - DNA, 58 bp, Homo sapiens
caggatatgaataatattcttctggaatgtgcactgggaactacacctttgttcctta

SEQ ID NO: 80285 - DNA, 50 bp, Homo sapiens
ggtggtgctcacgccgcccatgaagatggacgcacatgcagaacatcaag

SEQ ID NO: 80286 - DNA, 100 bp, Homo sapiens
cagaggatggatttttcaaaaaaactaaacggaaggtagtgccaccttctcctatgactggtggataaattagatgcttcagaatcactgagaaaagaag

SEQ ID NO: 80287 - DNA, 51 bp, Homo sapiens
agtgggtgtaatacatcatgaactgcaggcaaggagaacttcaacaatgtc

SEQ ID NO: 80288 - DNA, 98 bp, Homo sapiens
aagatgcaaagcctgagagatggaaactactatgcatgtaaacaaatgaagcagcgctttgaaagtgggaaaggggaacctgtgactgaactcagctg

SEQ ID NO: 80289 - DNA, 97 bp, Homo sapiens
cagtttatggcttccagtggaggcattttggggcagaatacagagatatggaatcaggaagcccaggggagagggcaaaaagtgtcggaaggtgtac

SEQ ID NO: 80290 - DNA, 100 bp, Homo sapiens
tgaccttaacgtggagctctccaagggtgtccgcaatgttgccagtgtctgtctgcagattggctacccaactgttgcatcagtaccccattctatcatc

SEQ ID NO: 80291 - DNA, 82 bp, Homo sapiens
aggagctgtgcagccgcgaggaggcgcgggaggtgttcgagaacgaccccgagacgggtcctcactgagcagcgagtcgtcc

SEQ ID NO: 80292 - DNA, 90 bp, Homo sapiens
ccaggacagtcgcgaggttcgagtgttgcagagcctgcggggcaagatctccttgaaaagatcttttgaggtcgaggaggtcgagacacc

SEQ ID NO: 80293 - DNA, 83 bp, Homo sapiens
cttccgtttgttggtggaggaggtggcaggcctcggcgcttaaagcttttcaagccaggccaagaagctgtgaagtaccaggg

SEQ ID NO: 80294 - DNA, 90 bp, Homo sapiens
gtttggcgtgacatacctggaggactattcggcagagtacatcattcagcaaggtggctggtggaaagaggcaaaacctgatgaattaat

SEQ ID NO: 80295 - DNA, 76 bp, Homo sapiens
ctgacgaggaggcggatcccccggcgtcaggtggagctgatcagaataatgttcagcatcaaccccctggagaacc

SEQ ID NO: 80296 - DNA, 100 bp, Homo sapiens
gattataaaggaatatcggattcctctgccaatgaccgtggaggagtaccgcatcgcccagctgtacatgatacaggtgctgctgcacgagctcgggctg

SEQ ID NO: 80297 - DNA, 100 bp, Homo sapiens
cttcgctgaagtcatcatgagctttttccaactcctgatgaaaaggaaggaagtgtgatgaatgcagactctgctaccattttggctgtttggatcctcc

SEQ ID NO: 80298 - DNA, 49 bp, Homo sapiens
aaggattccaagtaactcttatttggtacccattcctggcccagtgggt

SEQ ID NO: 80299 - DNA, 100 bp, Homo sapiens
cagtggccgaggagattcaggatgaagttggtgttacacataatattgcattacttcgagaggtgataatcaactcacgctttgtaaaaggagacatcag

SEQ ID NO: 80300 - DNA, 100 bp, Homo sapiens
ccacttgtgccgtaagaaggtggcaagtcgctcctgtcatttctacaacaacgtagaagacccccagctctaccaggagatccaggagcggggcctgaac

SEQ ID NO: 80301 - DNA, 101 bp, Homo sapiens
gcaacagcagcagcagcggctccggcagcggtagcacgagtgcgggcagcagcagccccggggcccggagaggttatgaagacagtatggagtttccagac

SEQ ID NO: 80302 - DNA, 82 bp, Homo sapiens
ctggaccgtccgtgtctgtgaaagagtcaagaaattggagcatggctatgagcaatggaaacaatgattttgtggttctgag

SEQ ID NO: 80303 - DNA, 100 bp, Homo sapiens
cggcttgcgacgggcttctcccaccccctcacgcagagtgcagtcatgggccaccgcagtgctggcctacatgcagttgctggaggactactcggagccg

SEQ ID NO: 80304 - DNA, 100 bp, Homo sapiens
attgaccggcagagagccaggcctcagggacgagatcctggacaggaattagaaggtgacgaggagggagaagacgaggatgatgcggaaattaacccca

SEQ ID NO: 80305 - DNA, 75 bp, Homo sapiens
gcagcatgtcggtggcggggctgaagaagcagttctacaaggcgagccaggagtggtccgcagacctgaatcgaa

SEQ ID NO: 80306 - DNA, 100 bp, Homo sapiens
caagcaacaggaaaagcccctttactgtaaaaggaaattggtacccctataatgggcagtgtctaccagatattgatttgcttgtaaatgcatcacgaag

SEQ ID NO: 80307 - DNA, 80 bp, Homo sapiens
aggactctatacagggacgtgatgctggagaattataggaacctggtctccctggagaagaagctggaggagttctccgt

SEQ ID NO: 80308 - DNA, 75 bp, Homo sapiens
atgcggggtccgagcggggctctgtggctgctcctggctctgcgcaccggcccctacggtgagcgggacgaccag

SEQ ID NO: 80309 - DNA, 86 bp, Homo sapiens
cgtcctcttgtcctcctcagcctcgtgtactaatggtcacttgatgtgcgctggctgttttatccacctactagcagatgcccggc

SEQ ID NO: 80310 - DNA, 113 bp, Homo sapiens
acttgatgtcatcacgcagaaggggtgaaagagactcggtgacagatacagcactactgggttggggtctccacgaccgagctggtctcatcaagtggcgtccaacaaggggc

SEQ ID NO: 80311 - DNA, 75 bp, Homo sapiens
aaagcatcaagcgcctttaccctggctctgtggaagaaaaaatgctgggcatcttggtgcagcacaaagtccgga

SEQ ID NO: 80312 - DNA, 76 bp, Homo sapiens
tggatggatggatggatggatggttactatgggcaaggcggcatgagtggaggtggatggcgtgggatgtactgaa

SEQ ID NO: 80313 - DNA, 51 bp, Homo sapiens
gcttcaagaagtcatgatggagttccagattgtgaataagtggaatacagc

SEQ ID NO: 80314 - DNA, 78 bp, Homo sapiens
gaggaagagatcaacatctatgcagtcaccgaggaggagtgtcgaccctaacgaccagaagaagacagcctgttacga

SEQ ID NO: 80315 - DNA, 100 bp, Homo sapiens
gtggagcgtgtcctgaaggagttccaccaggccgggaagcccatcgggttgaaatcacaaagattagacacctttttagataggtgttcttcagcaccac

SEQ ID NO: 80316 - DNA, 100 bp, Homo sapiens
cgtcccccccaacacctgagccaggtgaagggccccgtaaattggaaggatgcacaagttccaaggttacgtttcagttacagcaccatgagcccacagg

SEQ ID NO: 80317 - DNA, 75 bp, Homo sapiens
gggccagaagccacgatccagaccgcaattaacaatggtacagattctcctgagaatgatattcctatggagatc

SEQ ID NO: 80318 - DNA, 74 bp, Homo sapiens
catgatcaagggtgttacactggctttggaggagaagatacggaccacggagacacaggtgcttgtggcatctg

SEQ ID NO: 80319 - DNA, 96 bp, Homo sapiens
gaaatattcgagtggcaactgcagtacccactgatggtaatgctggcctgctggctgaaccccagattgccatgttctgtggcagactgaacatgc

SEQ ID NO: 80320 - DNA, 83 bp, Homo sapiens
cctggaccaggaggaggttttcaggaccaaaattgtggaaaagtcactctggtgttctgggactcagtgttagaagctgtctg

SEQ ID NO: 80321 - DNA, 74 bp, Homo sapiens
ttgtttctactaagatgacatcatacatggctattgatggcagtgctctttggttgaaggcctttcactgttgg

SEQ ID NO: 80322 - DNA, 75 bp, Homo sapiens
gaattcctagctatcttaaagaaattgccattcaatgtcccttcttcaggaatttggaaaaaggatggagagatc

SEQ ID NO: 80323 - DNA, 87 bp, Homo sapiens
caccacgtcggccgagatcgagctgccggacgtggagcccgcagccttcctggcgctgctgaggttttccctgatgaatttcacctc

SEQ ID NO: 80324 - DNA, 100 bp, Homo sapiens
ggagagagacagagagagcagggatcaggtaaaggagtggggctgctgcagccattcagacctcaggagctggtgaagctcgtgtgtggagtgccacggt

SEQ ID NO: 80325 - DNA, 133 bp, Homo sapiens
gtggagaacgtgaacgtcatcatctccacctacggcgagggcgagagcggccccatgggcaacatcatgcaaagagagcaggatgaatggacagtaccagcagcccacggacagtctcaacaatgacaacaag

SEQ ID NO: 80326 - DNA, 83 bp, Homo sapiens
atgagtacgataccgaagcgggctgtgtgccccttctccacccagaggtatcggtgttcctattatgttagcttatgtctatg

SEQ ID NO: 80327 - DNA, 100 bp, Homo sapiens
ttaatgaccttgttatcagtgatggctcttctctggaagatcttgtgcaatggcaccagcatgatatcattgatcattcctcccaaagaccagatttcac

SEQ ID NO: 80328 - DNA, 88 bp, Homo sapiens
cgagccaggaactgcgcagcctcttcgagcgccgcggacgcgtcatcgagtgtgacgtggtgaaaggcggctatgagaggttttcctc

SEQ ID NO: 80329 - DNA, 117 bp, Homo sapiens
gtttgcagaaaaaacttcagcatgtgccaggaacacaacctcaccttgatcaggccattgcgtggtacacccctatccactggaagcaagcgtgggaaaaattagatgctgacgttg

SEQ ID NO: 80330 - DNA, 73 bp, Homo sapiens
tcagactccagcagccaagatggtgaagcagatcgagagcaaggctttgtggatttgaccctccatgatcagg

SEQ ID NO: 80331 - DNA, 101 bp, Homo sapiens
gcaaagcattctgtgaattggctgactccacttctatggtgagagagaggagtgcatcaaagattactcccagttgtggacatcggatacccaaggagacg

SEQ ID NO: 80332 - DNA, 80 bp, Homo sapiens
ctcagaagctcccggacgcccagatacagatcacttggattcagtcgagtttgctttgctccgtgggaactgcaccagag

SEQ ID NO: 80333 - DNA, 82 bp, Homo sapiens
gattgctgcagccgcttgtcagtgtgatgaagattggcacccaggtgacttaagagattaaaattaatttggttgctgttgg

SEQ ID NO: 80334 - DNA, 100 bp, Homo sapiens
actactatgcattcctgattctaataatgatctcctacattccaaatgacactgctctcaaccttctgaaagaatcaggcccatcaggaattgaaacaga

SEQ ID NO: 80335 - DNA, 100 bp, Homo sapiens
cgaaaattgagagcgttttcgcactccagcggctgctcctggcggctctgcggccgtcaccatgattgcttccaagtatgatcatcaggcagaagaagat

SEQ ID NO: 80336 - DNA, 98 bp, Homo sapiens
cagcccttctctgagacggggaccaggggatggcagccatgcacctgacagcctggccccagttggatatgtcaagtgaccagatagctgccaatctg

SEQ ID NO: 80337 - DNA, 100 bp, Homo sapiens
ctcgcctcgactccaaatggttgaaaacagatatacagcaactccaggtggttccgctatttggggacatgcaaatagaactggcaagatatatcaagac

SEQ ID NO: 80338 - DNA, 86 bp, Homo sapiens
atatgtgcctttcagctttaaagagaattgaagatctatccatactaatggaaatgtaactggaactgactctgatgataaaatca

SEQ ID NO: 80339 - DNA, 100 bp, Homo sapiens
ccaggcctgatcacctgcctggagcaacgaaaagagccctggaatgtgaagagacaggaggcagcagacggacatccagacgggccaaggttgctcacgt

SEQ ID NO: 80340 - DNA, 100 bp, Homo sapiens
gacttatttcttccacttagttctgaggtgaagacagatcatgggactgataaattggaatccaaaaatccttgtggagtgtcttactcctgattttcga

SEQ ID NO: 80341 - DNA, 74 bp, Homo sapiens
ttaccgtttgttggagaaaaaggaactgcaagcacatgttgaccagataactgaaatggcagcagtaatgagga

SEQ ID NO: 80342 - DNA, 74 bp, Homo sapiens
ttttgacctgagcagatgaaaggatgcagttaccatgaaggctgcagatgagaaaaggcgacggcggattgaca

SEQ ID NO: 80343 - DNA, 98 bp, Homo sapiens
ggggttcgggtgtctcgtgtgtgaacatcacaggtggagtacatcctgctgcttcaagggtagaagactcctcactgctttccttcatgagatttcaa

SEQ ID NO: 80344 - DNA, 75 bp, Homo sapiens
gccattgtcgcccatgttctcttagtgaagtaattgggaaactgttcatttgaggataaaaaaggcattgtatta

SEQ ID NO: 80345 - DNA, 90 bp, Homo sapiens
cttgaaagcgaagttcaggaagagtgactgcaatgtgccaccccaagccctcccacctcccctgcttccccggctcctccagcaaacccc

SEQ ID NO: 80346 - DNA, 100 bp, Homo sapiens
gaagatccaaactggtggcaggcctacagggaaggggacgaagataatcaacctctagccgggcttgttccagcaatgtctcaggctgtgcagacaaacg

SEQ ID NO: 80347 - DNA, 100 bp, Homo sapiens
tcgaggttgcaggactctttctgttcaggccagaccctctgggagcttctcagccattttccacagatcagattctgaagaatatttctgtgtaaaaaga

SEQ ID NO: 80348 - DNA, 100 bp, Homo sapiens
caggctgcttactggaaactggatgcagcaaggaaataggatttaaccgctctctgcctcccaggctcccaaggtgaggcggcagagtgacacctgggga

SEQ ID NO: 80349 - DNA, 75 bp, Homo sapiens
tttggcagcgccattggcctctttggggtcatcgtcgcaattcttcagcttcatcttctccatggttggtctgta

SEQ ID NO: 80350 - DNA, 82 bp, Homo sapiens
atgaaagtcggggaagtccttatgcgaatcgtcagggcattagggcaccgcgtccgtgctgcagcgccggtcccccaatgag

SEQ ID NO: 80351 - DNA, 97 bp, Homo sapiens
aaagacaaaggaaagaccagtagaagagaaagaaaccaaaaacagcaagcgcagagccaaacagccaggcagacccggcggcaggagaggggatgaa

SEQ ID NO: 80352 - DNA, 100 bp, Homo sapiens
atcccaggaaacaagagattgttgctattacaggaatgaagaactgttgcctaattggaaagtgccagcattccagacttcaaaaataaaaaatctgaag

SEQ ID NO: 80353 - DNA, 50 bp, Homo sapiens
atttagcagagttttttgttaatgaaggatcttgctctgttgcccaggct

SEQ ID NO: 80354 - DNA, 75 bp, Homo sapiens
ggctcctactgttcttagagatgtacctttctcagtactgccttccccaggccctgcccttccccaagaggaaaa

SEQ ID NO: 80355 - DNA, 75 bp, Homo sapiens
tgatcttcgctgtaacccaagaacaagttcatttatatgaggtctcctttacagaaaggggcttggataaggagg

SEQ ID NO: 80356 - DNA, 100 bp, Homo sapiens
aacattgacagcctgtctgcttaggattttgctctgctgtctccatggaaaagtcaggctgtcagccagatgaaacagcaaaaatatccaacaaaagtct

SEQ ID NO: 80357 - DNA, 75 bp, Homo sapiens
aagttgggaactcagaccgtaccttgcaacaagctacaaggctttggccgaccaagtgtgtaccatgctgctatt

SEQ ID NO: 80358 - DNA, 95 bp, Homo sapiens
catcagggatgggaaagtgtacattcaccatatgtcacccactggaggtgtaaagcaggccctctggctcaccaagaccaagttaatagaaggcc

SEQ ID NO: 80359 - DNA, 74 bp, Homo sapiens
atttgtgggagttcttttgcaggtggaattcaagtcaccagtggccaaagtaccctccaggtgtgaagagttgc

SEQ ID NO: 80360 - DNA, 85 bp, Homo sapiens
aaaagaaggtggcactggccaagaagctcctggcaaaactgcgctttctggctgaggagggtttgagaaatactttaagaggagt

SEQ ID NO: 80361 - DNA, 88 bp, Homo sapiens
tgtttctccccaaaataaccattctccagatccaggcggctatgagaggttttcctccgagtacccagaattctgttctaaaaccaag

SEQ ID NO: 80362 - DNA, 100 bp, Homo sapiens
aaattcactgagtaatctttttaccatgggcttaaaattgaattcagtggatccaacaatgagcattgatcttaaatacttgggagtacagttacctttg

SEQ ID NO: 80363 - DNA, 74 bp, Homo sapiens
actcggccaaagaagagggcacgatctgtagaacgggaaatcatcgagttccccatcctaaagctaaatggccg

SEQ ID NO: 80364 - DNA, 101 bp, Homo sapiens
gccctccagcttcacccgtacaggtagccccgccgccgcgcacctgccttcgctcccgcaccgggagccacagtagcagaaattaaaaaacaatatcgttt

SEQ ID NO: 80365 - DNA, 90 bp, Homo sapiens
aggacaccgacatggaacagggactcactggggcaatgtctcaggctgtgcagacaaacggaactcaaccattaagcaaaacatgggaac

SEQ ID NO: 80366 - DNA, 75 bp, Homo sapiens
ctgaagccgagggagtcgtcttgagcgacaggaggctggtggcatgttgtcctcaatctcgacactactatcgcc

SEQ ID NO: 80367 - DNA, 75 bp, Homo sapiens
ggtcgccctcaaggccatgatcaaaactcgtatttttatccaaaagaaggacctggaggaggatgagagcgttac

SEQ ID NO: 80368 - DNA, 83 bp, Homo sapiens
tggatacgaaggcgggatagccctggtcctttctccagtcatactccctgtcacaaactccagctgaactaacttggaggagg

SEQ ID NO: 80369 - DNA, 50 bp, Homo sapiens
tctggacccaactgtggaatatgtgaaggcggcgctggcggcggccctgg

SEQ ID NO: 80370 - DNA, 75 bp, Homo sapiens
gctcaccccgcggccgcaccttcccgccttctcaggctgatcaccagttcctcttaggaaccggtgaacctcagg

SEQ ID NO: 80371 - DNA, 74 bp, Homo sapiens
tcatctgctttcgaaaaatgtcacccttggacaaggttgaagaattagccctccaatcaatgatcagttctaga

SEQ ID NO: 80372 - DNA, 75 bp, Homo sapiens
acgcggtgctgcgagggcagaacctgggtggtccgtactgagaagaacagtttgaacaaccgattcttaccctgg

SEQ ID NO: 80373 - DNA, 75 bp, Homo sapiens
atcttcagcggggagatcgacttatcgccattggagaagtctggacagctgatcacctgaaagagaggagccaag

SEQ ID NO: 80374 - DNA, 50 bp, Homo sapiens
ccgaccccctgcttgccactctagaaaagaacgtgagttaagcaaggctg

SEQ ID NO: 80375 - DNA, 100 bp, Homo sapiens
ccgtgtgctgccactgcgggggcaagacgaaggacggcccacctccatggagacggcccacggcctcgccaccaccagccccacctggcctccacttggt

SEQ ID NO: 80376 - DNA, 75 bp, Homo sapiens
ccagcagctgtgggagccccgagaacgcctccagcggggatgacacagaagaggccacaagaggaagctgaatga

SEQ ID NO: 80377 - DNA, 82 bp, Homo sapiens
atcggctaatagcccggagacaagcacaatgcagatcttcgtgaagactctgactggtaagaccatcaccctcgaggttgag

SEQ ID NO: 80378 - DNA, 95 bp, Homo sapiens
ccacaggaggcaaccacactagtttaggtaattaataatgcttgtgctactcaagccatagtgagtgtgttactgaactgtacccaccaggatgt

SEQ ID NO: 80379 - DNA, 80 bp, Homo sapiens
cagaggtttaaccataggatagagaaaccagtaatgtgtgtggctggtattggacttgttgtattattcttcagttggat

SEQ ID NO: 80380 - DNA, 89 bp, Homo sapiens
ttgactactggggccagggaaccctggtcaccgtctcctcaggggcaattccaaaagtcttcagatttccaaaaggaaggactgcagca

SEQ ID NO: 80381 - DNA, 118 bp, Homo sapiens
gagactgaagtcgcccgtgggggctgagcccgccgtctacccgtggccgctgccggtctacgttgtggcagcactgcctgaaggtatgagaccagattctaatctttatggttttcca

SEQ ID NO: 80382 - DNA, 50 bp, Homo sapiens
gaagattgctcagcgattacggacaaagttctgggaggtgatcagtgatg

SEQ ID NO: 80383 - DNA, 100 bp, Homo sapiens
ccgccggctactgccgcttcagttctcccggtgtggccacgagtcgggtggatggaagcatgcctaggggaagatctgcctcccaccacagaactggagg

SEQ ID NO: 80384 - DNA, 74 bp, Homo sapiens
aaagtcgagtatctggtgaagtggaaaggatggcccccaaagcttgggcactgtttaaaggaaagttccgagaa

SEQ ID NO: 80385 - DNA, 75 bp, Homo sapiens
ctcggctggagagcagaagaccgaaaggtttggtgcacctcgatttggaggaagtagggcagggcccttatctgg

SEQ ID NO: 80386 - DNA, 50 bp, Homo sapiens
agcactttgaagtcattaatgatgagggcaagtgtccagagaatggctgg

SEQ ID NO: 80387 - DNA, 75 bp, Homo sapiens
ccaaattcgcctccatctgtaccatgtttgctaatccagactttacacaacctatctcagaagttgtagatgaag

SEQ ID NO: 80388 - DNA, 100 bp, Homo sapiens
ctacagggataccgaagattgtcagagtgcctcataagtgtatagtaccaaatatccagcattttcgggttagtcagcaacataaaatcaacctaatgac

SEQ ID NO: 80389 - DNA, 96 bp, Homo sapiens
gatgctgactgtgtggagttacttctggaaaaaggagccgagtcccaccaaagatctccaatatctcctcggatgtcactgtgaatgagggcagca

SEQ ID NO: 80390 - DNA, 75 bp, Homo sapiens
agcgcagcgctgccatggagcccagcagcaagacagcacccaagaaaacctcatttggctcgctgaaggatgaag

SEQ ID NO: 80391 - DNA, 98 bp, Homo sapiens
ctttctcatctgactcgtgatctgcccatcttgttactccctagcagtgtggtaaggaaggaagcagccaccctcgccatggcctccccgcccgcctg

SEQ ID NO: 80392 - DNA, 75 bp, Homo sapiens
tctgttgaaaacatctaccaagactggcttgagagttccggaataccaaagatattaataaggcagcggaaagaa

SEQ ID NO: 80393 - DNA, 76 bp, Homo sapiens
aacaagctcagcttcaggagtttggtcaaagcaaccgaaaaggagagtttcctgggctgtcacatggtgactgaag

SEQ ID NO: 80394 - DNA, 100 bp, Homo sapiens
ctggaaacagctcagaataaagtggatctggacctctacagaagagagggagctccagattccagagtcgaggtggaaaaaagtttcttcctgtattgaa

SEQ ID NO: 80395 - DNA, 50 bp, Homo sapiens
ctggcagccccgctctctgcagtatgagggtgctggttgatgctcgagag

SEQ ID NO: 80396 - DNA, 98 bp, Homo sapiens
tgaagcctaagaatatgatcagcagcgtccgtctccaagagagtatgaagagagtgcgtctgtagggcagggaagatggcggacaagcgcaaactcca

SEQ ID NO: 80397 - DNA, 80 bp, Homo sapiens
gcatgcagcttactgcttgaaaggcttgggcactgtttaaaggaaagttccgagaaggcatcgacaagccggaccctccc

SEQ ID NO: 80398 - DNA, 50 bp, Homo sapiens
caggggccactcagagtcgcccgagaaagtcttgctgtgtcacccaggct

SEQ ID NO: 80399 - DNA, 74 bp, Homo sapiens
cggcccctcctccccggcgcctcccagccaaaacagagtggagtacgagaaaagggtccgagcacaagccaaga

SEQ ID NO: 80400 - DNA, 104 bp, Homo sapiens
agggtctggagggctgagcagtcaactcaaatgcaagtccaagaggaggaggaggcggaggtccaagcggaaagggaaatcctcattgacgattcaatttgttg

SEQ ID NO: 80401 - DNA, 83 bp, Homo sapiens
ttcggcagtccacccaccgccgccgcctcccaggattccccagctttccgttgcacaaacagtgaagtgacagtccagcccag

SEQ ID NO: 80402 - DNA, 51 bp, Homo sapiens
gagaggagcggccggcccgcctattttaacctttgagaccaagaacccgtc

SEQ ID NO: 80403 - DNA, 80 bp, Homo sapiens
caacatgcctcggtatgcgcagctggtcatgggccccgcgggcagcgggaagccccaggaccaaattaccatcacagggt

SEQ ID NO: 80404 - DNA, 100 bp, Homo sapiens
tgcagactgcctcaacagagtgatagtgggttgtcttctggcctcagagtatcccttatcagaaccttgggcccctgggccccttcactcagtacttggt

SEQ ID NO: 80405 - DNA, 100 bp, Homo sapiens
cgttggtggtgttcagttgtggcggttgctggtcagtaacagccaagatgctgcggaatctgctgtgatgatctaaccacaacagggactgataactgca

SEQ ID NO: 80406 - DNA, 82 bp, Homo sapiens
gcctgagcccttgagttggtcacttgaaccttgggaatattgaggactgcatcgacgtaggctggtgggaaggagagctgaa

SEQ ID NO: 80407 - DNA, 90 bp, Homo sapiens
agcttagagcgtctggccaagaatcagaggaagtgggtggcgacatgtctaagaatgtgagccagtcacagatggcaaaattgaaccaac

SEQ ID NO: 80408 - DNA, 100 bp, Homo sapiens
gaaatggcagacgatctcggagacgagtggtgggagaaccagccgactggagcaggcagcagcccagggctgttgataatcaggtgtatgtggccacagc

SEQ ID NO: 80409 - DNA, 150 bp, Homo sapiens
gccagcccctccgccgcgcggagcccacgaaggggacagcgcagccggcccagagctcgggtctccggggaccgagaagttgggatatctaaagcagaagccttagaaactctgcaaattatcagaagagaatgtctcacaaataaacca

SEQ ID NO: 80410 - DNA, 75 bp, Homo sapiens
tcaaattccctaaacattttagatgatgattataatggacaagccaagattggaaagagtcaacctaaagcccag

SEQ ID NO: 80411 - DNA, 90 bp, Homo sapiens
cgaagccccctgcaggaactctacaacccaatccaggtgctttacaaggccaagtacggtccaatgtggatgtcctacttagggcctcag

SEQ ID NO: 80412 - DNA, 71 bp, Homo sapiens
agctgttttggaactgtcaggtacctcaaagcgtaagaagtttcagctgatcctactgccacactcacagc

SEQ ID NO: 80413 - DNA, 50 bp, Homo sapiens
ctccgtctgcggcctgcagtaagcggggagagaagtcttttttcctccag

SEQ ID NO: 80414 - DNA, 75 bp, Homo sapiens
ttggtggggtgaagaccccagttttgctgaccttattcaccatgacttatcagatgccatggacaatattaccag

SEQ ID NO: 80415 - DNA, 87 bp, Homo sapiens
atgcatggattatgcagtaactctagcaagacaagctggagagaggagaaggcagagcccccccaggctatgaatgccctgatgcgg

SEQ ID NO: 80416 - DNA, 96 bp, Homo sapiens
ccggcggatgttcatgggcagcaccatcgagccagaagcagtatttgtcctggactgactgcattgcacagatgatggatatttacgtatgtttga

SEQ ID NO: 80417 - DNA, 75 bp, Homo sapiens
tccaggacacccctgaagccgagaaatggagttggcctgggccctgccctggagttttgtattgctgtcaacccc

SEQ ID NO: 80418 - DNA, 71 bp, Homo sapiens
gtgatagtggagatgatccatttcaaggacttgctgctgcacgagtgtgcccccgagagcctgaagacacg

SEQ ID NO: 80419 - DNA, 100 bp, Homo sapiens
ctcctcaaaagactttggaagtggatttccggtgaaggatgggcggagaaagattctgccagaagaagaggtgaaatgacaatggatgctctgttggctc

SEQ ID NO: 80420 - DNA, 100 bp, Homo sapiens
gagaataatttctttctcgctgatcgcctaacttctactgacgaagcttggaagttgcagaaggacctgacatgaaacgcagatctagtggcagagagga

SEQ ID NO: 80421 - DNA, 96 bp, Homo sapiens
cctcctcctccccaccaccaccatctccatcacccaccaacaacaccacaataatccacagccaagtgctctggaactgaacccgcagtatcttcc

SEQ ID NO: 80422 - DNA, 74 bp, Homo sapiens
gagaaagaaaccaaaaacagcaagcgcagagccaaacagccaggcaggaagaaatgttggctatttggcgatga

SEQ ID NO: 80423 - DNA, 75 bp, Homo sapiens
gggatggcaagatagcggcgcgggagcgtaccaaaaccagaactgatggctctatttgcagtctttcagacaaca

SEQ ID NO: 80424 - DNA, 74 bp, Homo sapiens
tgtcatgttggagaactacaggaacttggatgtctttattcaagggaacaggattaaattaggagctggttttg

SEQ ID NO: 80425 - DNA, 100 bp, Homo sapiens
aacaagccgggggatgttgttagagccaaaaacgggaagaccatccaggcggcgtcgtggcgttagccatcgccagcttcgtggctgcggtgaaatttca

SEQ ID NO: 80426 - DNA, 97 bp, Homo sapiens
tcagtattccggccagcttcacgaagtcagagagaactgttttaatcatggacaaacaaagtaagtaatttattttaaatgtttactttcctcctta

SEQ ID NO: 80427 - DNA, 100 bp, Homo sapiens
tgaagcgactgagtccgcgatggagaaactaattctgaagcaagcccttatagttgtgctgcagtggtgtttcaatcacaattttagtgttcgactgtat

SEQ ID NO: 80428 - DNA, 100 bp, Homo sapiens
ccagaaattcaaccatgagcagcatgaatattaccatactcacatccccaacatcttccagggagatatacttcccaattcatcagattataagtcctca

SEQ ID NO: 80429 - DNA, 50 bp, Homo sapiens
atgatcaactattgaccatatagtttcgagaggcccgtgccatgagaccg

SEQ ID NO: 80430 - DNA, 95 bp, Homo sapiens
gtcccagagacaacgagatgaactcgggacgaccctgggacagtctccactggggcagatccagctgaccatccggcacagctcgcagagaaaca

SEQ ID NO: 80431 - DNA, 80 bp, Homo sapiens
ggtctaccgggccacgcaccgcctgctgctgctgggtcgcaatggaagaagagatcgccgcgctggtcattgacaatggc

SEQ ID NO: 80432 - DNA, 100 bp, Homo sapiens
tgtccacgttcaggcaggaggacgtggaggaccattatgagatgggggaggagctgggcaggccataggaaaaggatacagagtagagtttcatgaacct

SEQ ID NO: 80433 - DNA, 75 bp, Homo sapiens
ttcatttccgagcgggtggaggtggtgtccccactgagctcttggaagagagggtcatctataacgaagttatac

SEQ ID NO: 80434 - DNA, 100 bp, Homo sapiens
gaagaaaaaagaaaaaaaactcaaccgactggggttagaaaatggatttctgactggaatctcaccactgaaaaaaagcacacccttttaagactacttt

SEQ ID NO: 80435 - DNA, 75 bp, Homo sapiens
ctacagaatcaggattttgcaaggaaacacttcgtattactattgcaggatctcactggcatcgaatctatggat

SEQ ID NO: 80436 - DNA, 100 bp, Homo sapiens
acaagggctacgagaagaagccctactgcaacgcgatggcacatttcctagaggcagaatcctacaacttccactccaagtgagaaggagattcaaactc

SEQ ID NO: 80437 - DNA, 87 bp, Homo sapiens
gaggatgcagtggaggccatcaggggccttgataacacagagtttcaaggccgagacgcatccagagctttcgtgaccggggactgt

SEQ ID NO: 80438 - DNA, 48 bp, Homo sapiens
gagcggagcccggtgacaggatgaaggccaatgatgaggccaatcaga

SEQ ID NO: 80439 - DNA, 71 bp, Homo sapiens
agctaagggttacagtcctttaaatctggaaatttcaagcctccggcctctcctcctctccgtcaacaccc

SEQ ID NO: 80440 - DNA, 75 bp, Homo sapiens
gaatgacttcccccgcattgaaggccctgggaggagcggggacactgaggacctctctccaaattggcctctcaa

SEQ ID NO: 80441 - DNA, 75 bp, Homo sapiens
cagcacccctcggcccgacgcacccacgcccctcaccccccgagagccggttttaaaatcaaagatgggaaaatc

SEQ ID NO: 80442 - DNA, 75 bp, Homo sapiens
catttgcagctcattgaaggaaaggctgaagagatcactttaacaattggccaagcatttgacctggcatacagg

SEQ ID NO: 80443 - DNA, 75 bp, Homo sapiens
tcccacccccggcggcggcacgatgccctttgacttcaggaggttttgggtcctgctcctcggtggtgttccttc

SEQ ID NO: 80444 - DNA, 75 bp, Homo sapiens
ccgaaaagcgtttccgcagacagaagtggggagaagcggagattggtttatcttggaagctaaagggcattgctc

SEQ ID NO: 80445 - DNA, 98 bp, Homo sapiens
gcgaccttaatgggaggccccgggaggccgaggttcggtaacaaatgtggcaattattttggatctatcacctgtcatcataactggcttctgcttgt

SEQ ID NO: 80446 - DNA, 75 bp, Homo sapiens
caagcagcaagtgcgcggttggggccactgcgaggccgttttaggtttttaatgaagataccagatccttggaga

SEQ ID NO: 80447 - DNA, 96 bp, Homo sapiens
gaaagctgagagaggggggaaacgtttttggatgacaaaggatggagagctgcttttgcacattttcctgaactctatgattttgccctctcaaat

SEQ ID NO: 80448 - DNA, 100 bp, Homo sapiens
cccccgtccgattatgtctcggatcgaatccctcacgcgggcgcggatcgaccggagcagagagctggcgagcaaggctctgacgcccgctctgcggctt

SEQ ID NO: 80449 - DNA, 100 bp, Homo sapiens
ctcccgcatcgccagggcgctcgccttagtcgtcacccttctccacttgaccaggctggttgttggaagaggagcctttggagttgtttgcaaagctaag

SEQ ID NO: 80450 - DNA, 100 bp, Homo sapiens
ggattgggaaagaccatggcaggatgaaatctgtaagtacagacctgagaattctgttgctaatgacactggcttcacagtggtcgcacctggaaaggag

SEQ ID NO: 80451 - DNA, 75 bp, Homo sapiens
ttttacctactgttcatgaggtggatattttcagatgaagtggctgtaattgatgaaattcaaatgattagagat

SEQ ID NO: 80452 - DNA, 74 bp, Homo sapiens
gagggttgaagattgtgaagcaatagcctaagggtcaaggagctgagcccccacagtgggcccagtggagagca

SEQ ID NO: 80453 - DNA, 104 bp, Homo sapiens
tgcattactcagcaatctagttgcctgcaaagattcgaatatggaactactttatgaacaagggtatttgaagtataccatacaactgttttgaaaatccagcg

SEQ ID NO: 80454 - DNA, 101 bp, Homo sapiens
cagcagaggatcctggatctgggcatcacgggccccgagggacatgtgctgagccgacctgaggaggtcgagcccagtgacactatcgagaacgtcaaagc

SEQ ID NO: 80455 - DNA, 50 bp, Homo sapiens
tcatgcacaaatttttatgtggaggaaacttttgagaagaactttgaaag

SEQ ID NO: 80456 - DNA, 74 bp, Homo sapiens
gggcaggagctctagccatctgtgtaattaataatgcttgtgctactcaagccatagtgagtgtgttactgaac

SEQ ID NO: 80457 - DNA, 100 bp, Homo sapiens
agaaaagatatctttcttagaaggagaggactatgatttaatctccaaagaaccaaagccttttgtatttgagggaaaagtacgtggtcctattgttgtt

SEQ ID NO: 80458 - DNA, 100 bp, Homo sapiens
cgtggctgctgccaagggctacattgaggtgatgagatacatcagcccacagcaaggcgggctccagcagcccggagccatgggcccggccctcctgcac

SEQ ID NO: 80459 - DNA, 100 bp, Homo sapiens
accatccacacatcataaagctttaccagagcgcatcagcgaggaggtggggctgctgcagctccttggggaccccccgccccagcaggtcacccagacg

SEQ ID NO: 80460 - DNA, 53 bp, Homo sapiens
gcgccatcttcccgaccgcgagccgtccaggctggagtgcagtggctcggtct

SEQ ID NO: 80461 - DNA, 98 bp, Homo sapiens
gaggaggtcaatttaaatggttctggcaaactgctcaaggtggttgtgtcaaaccgattggtgacatctccatgctgtattgtcacaagcacatatgg

SEQ ID NO: 80462 - DNA, 82 bp, Homo sapiens
tggcaactcgcccatcttttaccgcgaggtgctcccactcaaccaggcacacaggcattagacagaaagctggaagttgaaa

SEQ ID NO: 80463 - DNA, 75 bp, Homo sapiens
ttactttttcttgtccgggtgcggataagggacccgacactgattttggtgccctggttgtcagatgttggaaag

SEQ ID NO: 80464 - DNA, 82 bp, Homo sapiens
gacaccttctaagagtttggcgagtcagtgactgaagcgcccgtccattccaaggatgccggctccaggagcagcagtggag

SEQ ID NO: 80465 - DNA, 75 bp, Homo sapiens
cagagtcaaagaagaaaccgtgctcagaaactagccagattgaaggtgaaagaactcttttcttctttgggagtc

SEQ ID NO: 80466 - DNA, 100 bp, Homo sapiens
acggcggctaggccgtagtgcagcctctccggagtcctcagccatgaggagtggaaccagatgcagagccaggaggatgaggtggccatcactgagcagg

SEQ ID NO: 80467 - DNA, 82 bp, Homo sapiens
tgggattatcaccagcaccgatacctgcaaggtccccgccgccaccctcatggatcagccacagttcagcggggcgccccgc

SEQ ID NO: 80468 - DNA, 95 bp, Homo sapiens
gacccctcagcaggctccggtgacgcctaggaaagaaaggaggcctagcatgttcgagaaggaggcagatgaaaactttgacctgtcaaaaagac

SEQ ID NO: 80469 - DNA, 87 bp, Homo sapiens
ggaagagccggggccgtggctgacatggagcagagtgctgatggcagagattggtgaggatttggataaatctgatgtgtcctcatt

SEQ ID NO: 80470 - DNA, 82 bp, Homo sapiens
gccccagtatgagatccaagccatcatgcacatgccaggtggagctcaacaggaaagtcctagcggatctggccatctacga

SEQ ID NO: 80471 - DNA, 100 bp, Homo sapiens
ccgacagtctgtctgttcgcgatcctgccggagccccgccgccgccggcttggtgtcatggagaaactccagctgggcccagagattctgcagcgggaaa

SEQ ID NO: 80472 - DNA, 75 bp, Homo sapiens
cacgctgacgtcggacccacggctgccgtacaaagtgccctagaaagtgaatttgtttcttgccaacttcatcag

SEQ ID NO: 80473 - DNA, 131 bp, Homo sapiens
cgctgagtgaacccatcctgccgtccttctccactttcgccagcccgtgccgcgagcgcggcctgcaggagggcgtgatggtgggcatgggtcagaaggattcctatgtgggcgacgaggcccagagcaag

SEQ ID NO: 80474 - DNA, 82 bp, Homo sapiens
caggtgtgcaggtttcggcacatggagattgatgctgttcggctcttgaatcccagcgatgaaaccaggaactcactttccc

SEQ ID NO: 80475 - DNA, 82 bp, Homo sapiens
aaattcctcaaacagaatttcacacagggtattccatggagaatgagtttgcctgagaatacagatcaacccacagaacaaa

SEQ ID NO: 80476 - DNA, 98 bp, Homo sapiens
atcgtaaagcgagctgacgctggttttgtgtacagtgaagctgtagccagttgctcttcaaaaaatggactcaatgctttcctcagaagctgcctggg

SEQ ID NO: 80477 - DNA, 50 bp, Homo sapiens
gagagatatgccaccagcatttattaatattgaatttgaccgggattgtg

SEQ ID NO: 80478 - DNA, 80 bp, Homo sapiens
tcctggatggaagatagcttgaacagggctgacaacatttttccttttccgctctcttggcctcctagtttctacctaat

SEQ ID NO: 80479 - DNA, 75 bp, Homo sapiens
gatcaccatggcacacatgcttcagatactacttacagtagacacaggtttgaagatgccgcatttggattggat

SEQ ID NO: 80480 - DNA, 100 bp, Homo sapiens
gttcgacttcgatgatttactgaaatttgatgacctagatggaacacatgctctgatgggtctaaaattcccaggactccacagctttgcaccagataag

SEQ ID NO: 80481 - DNA, 83 bp, Homo sapiens
atccagcctgcggagcctgtggggcaggcaagaaacctattggaattcgagacttaattaatgaagctttgcatcgagaaacg

SEQ ID NO: 80482 - DNA, 100 bp, Homo sapiens
gcggcgctgccgctcccgggcggccgcgggcgggaatcagagatcattgatttcttcctgggggcctctctcaaggatgaggttttgaagattatgccag

SEQ ID NO: 80483 - DNA, 73 bp, Homo sapiens
agggaggttatgaggcttaataaagaaggcctcacaccttaaacagcaccagcacctcaaagtcatttcagag

SEQ ID NO: 80484 - DNA, 98 bp, Homo sapiens
ttgaaaatgttaaaggctgtgctgaagaagagccgagagggaggaaagggaggcaagaaggaagcaggatttctataattggcctgatgaatcctttg

SEQ ID NO: 80485 - DNA, 100 bp, Homo sapiens
tctgcaatccaagccgactgatgactggagaggatggctactatttcaccaatctgaatgtttctccatcccagagagatgaagtaattcaatggctggc

SEQ ID NO: 80486 - DNA, 75 bp, Homo sapiens
atatgaaagattcatcaggccaatgggctcttggtggtatcgctcaatacgctatagtggagaccagattctaat

SEQ ID NO: 80487 - DNA, 75 bp, Homo sapiens
agtggtttttcggatcatgtctggtggctccgcggattataacagcggcccagcccaatccagctttactcccct

SEQ ID NO: 80488 - DNA, 83 bp, Homo sapiens
aaagaattgaaaaatcccaacatcgttaactttttggacagggggtgagaacatcaaaagcatcaaccagcagtcaggggcgc

SEQ ID NO: 80489 - DNA, 51 bp, Homo sapiens
tagaggggtgacagcgaaacctgcaggacaagttcgagcatcttaaaatga

SEQ ID NO: 80490 - DNA, 75 bp, Homo sapiens
gatgtttgacgaggacagcatcctgggcgagctcaacgggcccctgcgggaggttcctgattatgtcactgtaat

SEQ ID NO: 80491 - DNA, 82 bp, Homo sapiens
gtacatcaagggcggcacgctccggggcatcatcaagagcatgtatttgagaacacagtggctacggtgatggctctgcgca

SEQ ID NO: 80492 - DNA, 83 bp, Homo sapiens
gagacagatcaagatcaagaccggcgtggtgaagcggctcatcttggcagccaacagggatgaattctacagccgaccctcca

SEQ ID NO: 80493 - DNA, 82 bp, Homo sapiens
cgacatggggcttaagatgtcctgcctgaaaggtgaaatgctaccacaagaaataccgctcggccacccgtgacgtcatttt

SEQ ID NO: 80494 - DNA, 100 bp, Homo sapiens
ggatgcagtggaggccatcaggggccttgacaacacagagtttcaaggtgtcgtgaaaactacccctaaaagccaaaatgggaaaggaaaagactcatat

SEQ ID NO: 80495 - DNA, 83 bp, Homo sapiens
acatctgcgccatctgtcaggccgagttccgagagcctctgattctcctgtgccaggatatgggtctgcaggatggagttctt

SEQ ID NO: 80496 - DNA, 100 bp, Homo sapiens
ttctggaagttataacgctacacgaagaactaagaatattattagcacaagagcaccatactttgagggccgcggagctggtgacccagaactgcgaggc

SEQ ID NO: 80497 - DNA, 146 bp, Homo sapiens
ggaggcgactagcggcggcgggagcggcgccgagaggccgtgcgggacgcgggcgccaggaccggccgaacgcagaggtactccaaagattcaggtttactcacgtcatccagcagagaatggaaagtcaaatttcctgaattgct

SEQ ID NO: 80498 - DNA, 90 bp, Homo sapiens
gcattggacttaatagcaacaacacaagaggttctacagcaggaacttcagggcattcacagtttccgatcttagcaaagcaatgtctca

SEQ ID NO: 80499 - DNA, 80 bp, Homo sapiens
agatggtagctgtaaacctggccactggaaaacgaagggggtggcccgattctacaggtcacggaaaaagcacttgatca

SEQ ID NO: 80500 - DNA, 98 bp, Homo sapiens
tggcgcagggcacggtgggcgcctacctgtgcacttgcaggaaagacatggtgaagatttcaatggatatctttgtgaggaaatttcagccagacaga

SEQ ID NO: 80501 - DNA, 83 bp, Homo sapiens
ggaaggcctgtatttctctacctggaccgcacgctcctcgcgcaaggagggtagagctcaagaatgtcatacccaggctatcc

SEQ ID NO: 80502 - DNA, 100 bp, Homo sapiens
gtatcatcaagaacagaacaggccctatggggcatacctatggctttattgacctcgactcccatgcggactcaagagtagccttcctcgaggacctgcc

SEQ ID NO: 80503 - DNA, 103 bp, Homo sapiens
gtggctcccttggtgttccccttttactgccaggacactgagatttggagagcctcccgcgacgatgcccctcaacgttagcttcaccaacaggaactatgac

SEQ ID NO: 80504 - DNA, 100 bp, Homo sapiens
aggtctccgtgcagcccaacttccagcaggacaagaaaaagcttgtggtgaaggggggcaaaaaaaagaagcaagttctgaagttcactcttgattgcac

SEQ ID NO: 80505 - DNA, 82 bp, Homo sapiens
cacaggaccagactcaagacacacaactcataacagttgatgaaaaattggactgcaatgtgccgatcttagctgctgcctg

SEQ ID NO: 80506 - DNA, 85 bp, Homo sapiens
gaacccgtgggcctgtggactgcagcctcggcggtcagcagcactgccagtgaaagatgtagaagataaacctgaacaacaaacc

SEQ ID NO: 80507 - DNA, 74 bp, Homo sapiens
cggcagcatgtcggtggcggggctgaagaagcagttctacaaggcgagccaggatctatcttgggatcccatgg

SEQ ID NO: 80508 - DNA, 75 bp, Homo sapiens
gctgaactgggtgctttatataggagttgctggagaatgtaaccctaatccataaaccagtgtcgttgcaacccc

SEQ ID NO: 80509 - DNA, 100 bp, Homo sapiens
cggctcggagctgctcatcaccaaggccaagaacgggcacctggctgtgattcggaggaacctgagtgcctcagtcatcgccgtcaccatccagggggga

SEQ ID NO: 80510 - DNA, 76 bp, Homo sapiens
ttcttctccatcacagattcctaaaaagattctcagagccagtcttggtgctctgtgttcacctggttcatctgag

SEQ ID NO: 80511 - DNA, 98 bp, Homo sapiens
ggtggctctgtacaccttcggccatcgggccaacgagtggaccccttatccctctggacagaatgcaggtccaaccacgctggtataccctcaaaccc

SEQ ID NO: 80512 - DNA, 100 bp, Homo sapiens
cccctggaccgaaccaaaatcatcttccaagttgacatgaagacaatggagactgcagagaaactggctagatttgttgctcaggtgggaccagagatcg

SEQ ID NO: 80513 - DNA, 98 bp, Homo sapiens
gctggtaggccttggagaggcgggttaggaagttgcagatctgatctcttctgaacacctcatcgtgtctccatccctgggaatctgaccctagcaac

SEQ ID NO: 80514 - DNA, 75 bp, Homo sapiens
gttagccccgcgcagccgccggcgtcgccgccatggacctagagccagcagccacccccgcccagccaacacctc

SEQ ID NO: 80515 - DNA, 96 bp, Homo sapiens
ttgtacagagatgtgatgttggagaactatagcaatctggttttcttgggggagccttctcggtggtgcgaaggtgtgtgaaggtgctggctggcc

SEQ ID NO: 80516 - DNA, 82 bp, Homo sapiens
ctggaggtgaaactgggcaagaggccccagcccgtgaaaagtgagacaatgcagatcttcgtgaagactctgactggtaaga

SEQ ID NO: 80517 - DNA, 82 bp, Homo sapiens
gttaccaaagctggcgagggcttgtgggtcatcttgcacctttacaaacaaggagacaagaggagcagcagcggcaccgccc

SEQ ID NO: 80518 - DNA, 83 bp, Homo sapiens
gtgggctgggagccgctgtcctccccgccaccaccggtgccgggcaccagaaaaagcttgtggtgaaggggggcaaaaaaaag

SEQ ID NO: 80519 - DNA, 74 bp, Homo sapiens
caccacacacatcatcagtctgggaatctaagggaggaaattatcaactgtgcacaaggaaaaaaatagatatg

SEQ ID NO: 80520 - DNA, 100 bp, Homo sapiens
tttacttgttggggccctcttgataaaaagagatgtggggggattctcgacctgctaacagaactggaccttttcgttaatatgatcctctgttgaagca

SEQ ID NO: 80521 - DNA, 74 bp, Homo sapiens
taatgctggtggtctgcatcaccaccggatcaacttcgacaaatactccaaagacaacaggccctccctctgcc

SEQ ID NO: 80522 - DNA, 75 bp, Homo sapiens
atcgagtgttggataacttctctgacatagtagaagggatagcagcatcaaggagcattgtgtacatgcagaagt

SEQ ID NO: 80523 - DNA, 74 bp, Homo sapiens
cgagtgacccgggtgccgaggagcgggaagagttgctgggagagaagaagaaggaggttcctgctgtgccagaa

SEQ ID NO: 80524 - DNA, 100 bp, Homo sapiens
ccgggcgcgcggcgccgccacaagttgcgctgctcgcgacgaggacagaactgtaccgctctctttttggccagctccaccctcccgacgaaggccacgg

SEQ ID NO: 80525 - DNA, 60 bp, Homo sapiens
ccctctgtgctccaggactccctcaataatagctccagcattgactttctagcaagccag

SEQ ID NO: 80526 - DNA, 75 bp, Homo sapiens
ctttccctctcgcgtctctggctgcaggtctcggcgcggaagatggccggcggcgtggacggccccatcgggatc

SEQ ID NO: 80527 - DNA, 82 bp, Homo sapiens
tttgtgccctaaaagacaattccctggtagttgatgtcacttggcgatattcctgcaaacatgaagaggtgattgccagaag

SEQ ID NO: 80528 - DNA, 75 bp, Homo sapiens
ctgcatatgattggctctttagctgaaatacttctgaaggctgctgagcttcgtgcttatctgaaatctaaagga

SEQ ID NO: 80529 - DNA, 75 bp, Homo sapiens
attcagtgaatcccaactgttatgccaaagcagtgttgtactgctacttctataaacggacagccgtaagactag

SEQ ID NO: 80530 - DNA, 83 bp, Homo sapiens
ccctcgttgatgagagcattcgaagtgacctcagcagggcatccagattgatctggatactattgatgtaagcaacctcaaca

SEQ ID NO: 80531 - DNA, 82 bp, Homo sapiens
ttgctctttcaagacacagatttgctatcatggtgaacttacttcagattgtgcgggaccactgggttcatgttcttgtccc

SEQ ID NO: 80532 - DNA, 75 bp, Homo sapiens
agctggagcctcaggcggcagcgcttctaggtgattttacaacgagatgctgctctccatagggatgctcatgct

SEQ ID NO: 80533 - DNA, 100 bp, Homo sapiens
tcaaggtcgaagttttttcatccaaagccagttccggtgaatccagtctggaaaaagtgtttggaagaacaaggcttgaagtttgttggccaagatgttg

SEQ ID NO: 80534 - DNA, 100 bp, Homo sapiens
ccggcttttagcactgcaattcactcagcaaactgggactgttggtcaccctacctggcagccagtgataaggctttaaggagttttaagctgagtgtca

SEQ ID NO: 80535 - DNA, 100 bp, Homo sapiens
tcccagctttggttggaagacctattatcagatcaaccaccaaagtgggaaacattgaaatcaagatttctcgaatgctggcagccaaaaccgttttggc

SEQ ID NO: 80536 - DNA, 100 bp, Homo sapiens
gaaaaggagtcaggaatgcctcttagatgttcgcacacaagccatgtaccagatgatggatcaaggctttgtaggacttattttttcctgtttcatagaa

SEQ ID NO: 80537 - DNA, 75 bp, Homo sapiens
tcagcagaaatggaaaaaggacggtgttcttggtcaactctggaaactaaatatattttgccaactttggaaaaa

SEQ ID NO: 80538 - DNA, 83 bp, Homo sapiens
tggagtcctacgatgtgatcgccaaccagcctgtcgtgatcgacaacagcctcagctcaaaggcatcgtcaccaaactgttct

SEQ ID NO: 80539 - DNA, 74 bp, Homo sapiens
agcatcctcacagcacagtacacgaccagtgccggtggtggtgtgcacattgagccccggtatagacagttccc

SEQ ID NO: 80540 - DNA, 83 bp, Homo sapiens
ctaaagcagcgtgcgttcagccctggggttatacattggctcttcaaagacgttcacctcatcagagaaatccctgactcctt

SEQ ID NO: 80541 - DNA, 75 bp, Homo sapiens
cgccttcgccctttccacctcgcggcagttcgcaactgaagcagcagcgggacaagctgaggcagtaccagaaga

SEQ ID NO: 80542 - DNA, 100 bp, Homo sapiens
tttggaagaaagaaaagagaccgagtggatcatatcctggtatgtgacgcattcccagactcttcagccaactgagcatcagcttcttcacagcaattgg

SEQ ID NO: 80543 - DNA, 75 bp, Homo sapiens
catcaggaccccagatgtctgacagccctgtgtgacaccaagataagtaactttgtgatggacgcctctgacccc

SEQ ID NO: 80544 - DNA, 100 bp, Homo sapiens
atccgagagcagggggatggggcagaggacgaggagtggatggagaaggatgaaactgtgagtgactgctccccacacatagccaacatcgggcgcctgg

SEQ ID NO: 80545 - DNA, 83 bp, Homo sapiens
gggagacgctgcctcggcccggacgcgcccgcgcccccgcggctggagggtgggattatcttgaacacataacctccattggc

SEQ ID NO: 80546 - DNA, 89 bp, Homo sapiens
cagccacgatgatcgcgggctcccttctcctggtacggttcctggagcagcagaacaagatgctggagaccaagtggagcctcctgcag

SEQ ID NO: 80547 - DNA, 60 bp, Homo sapiens
aactctgcacagcaagcccaggctcattatcagtgaggtctgccagtctttagtgaaaca

SEQ ID NO: 80548 - DNA, 97 bp, Homo sapiens
aggtgtttccctctttgaataaatttgaagatgctaaacttgctgctgccatctctgaagtggtttcccaaaccccagcttcaacgacccaagctgg

SEQ ID NO: 80549 - DNA, 82 bp, Homo sapiens
cagagctttcacgaaggcaccgacgtcatcatgctgaccaccaatcagatccgtaagggccatgaagcccccaggaggagaa

SEQ ID NO: 80550 - DNA, 100 bp, Homo sapiens
agatggatgcctccattaagaaaatgaaacaagcctttgctgaattggagagctggcccataccactcgttccagtcagaggtgcttggcctttgtggat

SEQ ID NO: 80551 - DNA, 97 bp, Homo sapiens
ttggagccaggcgccggggtctgaggttttaaaaagttgcagaaagaagaaaggaaagggaaagaaaagtgttcagaaatctttatatggggaaaga

SEQ ID NO: 80552 - DNA, 75 bp, Homo sapiens
catcattgatgtggtgcgatcgcttcttctcagcctgttgataaccatgttagcccatcttccttcttgggccag

SEQ ID NO: 80553 - DNA, 90 bp, Homo sapiens
gtccagatccccgtgtatgactttgtctcccattcccggtgaggccgcaggcggtgctctgggtccgggagcgctgtccccagcatgaac

SEQ ID NO: 80554 - DNA, 82 bp, Homo sapiens
tcctggttctggcgatggttgagacgcctcgattgcggcgtgtaacggcagcagataatggcagctttaaactcccagactg

SEQ ID NO: 80555 - DNA, 83 bp, Homo sapiens
cttaggagttggtttggaaacaaagactttcaggccctacctatactagctaggaaatctggcattttttaaagtttgcgccc

SEQ ID NO: 80556 - DNA, 90 bp, Homo sapiens
ccaggatacagggtcaaaggagagcacaaccatcgcagttggaagcccatggggcagccttgttagatgacttggataaagaactaaaca

SEQ ID NO: 80557 - DNA, 88 bp, Homo sapiens
cagctccgcgcccgccagttgcttgatcaggtggaacagattcagaaggagcaggattaccaaagggtggttgtgtcaaaccgattgg

SEQ ID NO: 80558 - DNA, 101 bp, Homo sapiens
tctctgtcacctccatgggaccaggaccgtaggatgatgtttcctccgccagatggaatcgccacttatatatgtttcagttttgcttttgaacatatttg

SEQ ID NO: 80559 - DNA, 83 bp, Homo sapiens
cgcctctgtgctcgtgagtgcatggggtataaggcttgggcactgtttaaaggaaagttccgagaaggcatcgacaagccgga

SEQ ID NO: 80560 - DNA, 102 bp, Homo sapiens
gaaaacagcaggcacccaagcgggcggcagctccagatgaagatgagtgagcgggccgcctcgctgagcaccatggtgcccctgcctcgcagcgcctactgg

SEQ ID NO: 80561 - DNA, 129 bp, Homo sapiens
gctcactgtagcctcgaaattctgggccgaaatgatccgcctgcctcagcctccaaagtagctgagactacaggcaccgctctaaagagggtctgactgagcgctttgagctgtttgtcatgaagaaag

SEQ ID NO: 80562 - DNA, 75 bp, Homo sapiens
gggctcatgagcagacgcatgcgatgtatgacagctggcagagagagaagttggctagcatggaatcaccagagg

SEQ ID NO: 80563 - DNA, 75 bp, Homo sapiens
ccagcatccctgggggaaagccgccactactacgtgcccctcctgagagcggaagagacttcttctccagtcatc

SEQ ID NO: 80564 - DNA, 75 bp, Homo sapiens
gcgcgacgccatgggccggccgggcccagagctcctgtctctcagccccaccggcccgtgcatctgttctctggg

SEQ ID NO: 80565 - DNA, 98 bp, Homo sapiens
cttggagacggacttgcttccggctgacaaacgggctcatcataatgcactggaacgaaaacgtagggaccacatcaaagacagctttcacagtttgc

SEQ ID NO: 80566 - DNA, 96 bp, Homo sapiens
atccccctgtgcaggctccaccaccgctgtgctaactggaccgcggcagaagagtggctgaggctttacagttctctatactctcccaagagccac

SEQ ID NO: 80567 - DNA, 97 bp, Homo sapiens
cccgggcgggctgctcggcgcggattgcagcaattctccggaaacggaaattagactattatttacacaaactactccctgagatcctacaatccgc

SEQ ID NO: 80568 - DNA, 80 bp, Homo sapiens
gtaacgagcggcggcggcggcagcgggtcttgggtcctccgagagcagcagcgagtattgttacaatcacatttgacgta

SEQ ID NO: 80569 - DNA, 75 bp, Homo sapiens
cacaaattgcctccttatgtctccaacatggaccgcctgggggactcggaactggattttgtcagggagaaaaag

SEQ ID NO: 80570 - DNA, 115 bp, Homo sapiens
cggcgcgggcactgctttccactcggctcctgtcgtccgttctctcaggctcccgttcaggttatggaaacaaaggacatgctttacatcgtcactgaatttgctaaaaatggag

SEQ ID NO: 80571 - DNA, 98 bp, Homo sapiens
gtcatctccaagttggaacaaggagaagagccatggatcataaagagacacataccaaattggatctatccaggcatcatggctgccctcagatccct

SEQ ID NO: 80572 - DNA, 101 bp, Homo sapiens
acaaggtcgagatagaagctcgcttttagatgataccactgtgacattgtcgttatgccagctaagaaatatattgatgatgttaagaagttcaaaccggg

SEQ ID NO: 80573 - DNA, 90 bp, Homo sapiens
ggaaaaaaaatgtcgccaccttttatgcccagcagggaagaaggagaaagggccaacccctgaagaagcaatacagaaactgaaggagac

SEQ ID NO: 80574 - DNA, 90 bp, Homo sapiens
tgaggcctcccgagccatgtggaactccaactcagcctggttaagaacacctgttgaagaactagtgcaggcgtttggaggacataggac

SEQ ID NO: 80575 - DNA, 100 bp, Homo sapiens
gagagcgaactgcagcctggagctacccccggccagcggtccggccaaggacgctgagggcaatgacatcattgcagcagccaagcgcatggctctgctg

SEQ ID NO: 80576 - DNA, 101 bp, Homo sapiens
ctggaacagtgtacccaaagcgacctgaaaaaccagttcctccaccacctcctatagccaaagctacagagacttctgaagtggagagtctgcgacctcct

SEQ ID NO: 80577 - DNA, 100 bp, Homo sapiens
agaggcagatgttgttcttctggttggtacaaacccacgttttgaggcaccactgtttaatgctagaattcgaaagagggaggagatatcaccaaacatg

SEQ ID NO: 80578 - DNA, 83 bp, Homo sapiens
gtcagctcagtcccggccgccgccgcgcgaggaaatggccgaggagccggagccgcagcggagctggagtttgttcagatcat

SEQ ID NO: 80579 - DNA, 82 bp, Homo sapiens
cggagaagctgcatcccagaggagcgcgtccaggagcggacccggtacggacattgctgcaggagaagaggttgccatcaag

SEQ ID NO: 80580 - DNA, 83 bp, Homo sapiens
ggagcttctgcccggtgattggtcaaatgagggggatatgagactttctactcggaatatcctgagtgttgcgtggatgtaaa

SEQ ID NO: 80581 - DNA, 98 bp, Homo sapiens
tccatcgtgtgcctgatgatcacgcagctggctggcttcagtggaccagaggaggagggggccagtgggggagcagtccattcagacattgggagcag

SEQ ID NO: 80582 - DNA, 95 bp, Homo sapiens
cccagagaactctcacatcatgccgcattctgtccctggtctcatgtctcctgggataattccaccaacaggaaggatgataaagactatgcttt

SEQ ID NO: 80583 - DNA, 83 bp, Homo sapiens
taagctcatcagcgtggaggacctgtggaaggcatggaagtcatcagaagtgctgcttttgacacaaaaacggggttacgtgt

SEQ ID NO: 80584 - DNA, 82 bp, Homo sapiens
cctgtatgtggcagaataccacagcgagcctgtagaagatgagaaaccttaacaagcatgtgtgtagaccacactccaaaac

SEQ ID NO: 80585 - DNA, 82 bp, Homo sapiens
ttggagcagacggtcagttctggtttggtgcacctcgatttggaggaagtagggcagggcccttatctggaaagaagtttgg

SEQ ID NO: 80586 - DNA, 80 bp, Homo sapiens
cgacaagccgctggcagccgcggatctcaccgccgctcaggacccaacatgagtgaagtttcctgcaagaaacgggacga

SEQ ID NO: 80587 - DNA, 100 bp, Homo sapiens
attctgacgccctcaaggtcgccaaggaggtggacccccaggaacattgatgatggcacctcagatcgcccctacagccatgctctggtggctggaattg

SEQ ID NO: 80588 - DNA, 75 bp, Homo sapiens
atcataagaccaaggatgaatacttgatcaacagggaaaaaatgcatttttcaaagacctaacttcaattcagtt

SEQ ID NO: 80589 - DNA, 82 bp, Homo sapiens
gcccctaggcccgggtcccggatccccgcgcacccggccagagccacccctgagtgacgacctgcagccttcctcagctgtg

SEQ ID NO: 80590 - DNA, 83 bp, Homo sapiens
ctgcagcgggagctggacggcgagcgcgagcggcgcgagaaattccagctattcttcagatgctctggattttgagacggagc

SEQ ID NO: 80591 - DNA, 74 bp, Homo sapiens
aggaccaacatgggcattttgtttatgagcaaggtggcctccgagaagtacgaggagggggagcgggcattgcg

SEQ ID NO: 80592 - DNA, 83 bp, Homo sapiens
gtcttcagatcttcacagcacagttcctgggaaggtggagccaccagcctctccttggtagcagcaattgcagagacagatga

SEQ ID NO: 80593 - DNA, 120 bp, Homo sapiens
cagaaagtgaagctgtttcgggccagcgacccgctgctcagcgtcctcatgtggggggtaaaccactcggatttttagactctgaggagcagttggagctaatccacattatggaaatgg

SEQ ID NO: 80594 - DNA, 108 bp, Homo sapiens
ctgctccctggctcccactctgatctgcttttcactcttgccttgtctcccaattaataaggggatggccaggtggattttgatgaattcatgaccattcttggcccc

SEQ ID NO: 80595 - DNA, 82 bp, Homo sapiens
ggggagtggcagagagtatgcattaaagacttcccaagtaagaagcggaagaggagccgctggaaccaagacacaatggaac

SEQ ID NO: 80596 - DNA, 114 bp, Homo sapiens
gattacacggcattaatctcccaaaatattctagaaggggaaaagctacttcaaggaatggtcctcgtccgaagtgagaatgggcagttgttaatgattcctcagcaggccttg

SEQ ID NO: 80597 - DNA, 100 bp, Homo sapiens
gatgccccaggacacagagactttatcaaaaacatgattacagggacatctcagggctgactgcagttggtgggttggcactgatgggaggacatttgta

SEQ ID NO: 80598 - DNA, 89 bp, Homo sapiens
agcgggccctgcgcgcctgatgggtcgaggcggacgcgcggctgcgtcagtacagaacctgctaaggccatcaaacctattgatcggaa

SEQ ID NO: 80599 - DNA, 83 bp, Homo sapiens
cagatggcggatgccctgcagtacctgcagaaggtctctggagacatcttcagcagctctcgtggcattatccttcagtgggg

SEQ ID NO: 80600 - DNA, 75 bp, Homo sapiens
aggaattggctctgctgacaggaattataagtaaagcagcacttcctgcttttcatgcaacacccaacacttata

SEQ ID NO: 80601 - DNA, 80 bp, Homo sapiens
agtcagtgtgacagtccatatgtaaccaaatattatggatcctatctgaaggtcctttcccataacctgtgcacggtgct

SEQ ID NO: 80602 - DNA, 82 bp, Homo sapiens
aagagcatgatcggcatgtccaccaaggcaggtgagaagccctaccactgcaactgggacggctgcggctggaagtttgcgc

SEQ ID NO: 80603 - DNA, 100 bp, Homo sapiens
gccaaatgagcccaggggacctggccaagcggatccgctccaacctggacatccgggccctagacagcccccgaggccttcggacagaggtcacctccaa

SEQ ID NO: 80604 - DNA, 80 bp, Homo sapiens
cccttcatgcctgcttgggaagttgtgacttcagccatactgagagccgatcactggagctgacttccgcaatcccgatg

SEQ ID NO: 80605 - DNA, 75 bp, Homo sapiens
tgacatgccagcccagactttcatgagcctcctcaacaagcccaagagtgagatgaccccagaggagctgcagaa

SEQ ID NO: 80606 - DNA, 100 bp, Homo sapiens
ccgcctcgtctttgcaccggccttcctcatgttgttcttcctcatcatgaactttctggagaattttgtatgggcgaatgaagaataagactgggagtaa

SEQ ID NO: 80607 - DNA, 98 bp, Homo sapiens
gccacatccagcaccacggacagctcccgggcggaggctgtgcagaaggtatcctgcagaccatgaactgagcactgttcccagaccgttcatgagca

SEQ ID NO: 80608 - DNA, 80 bp, Homo sapiens
tggtggggagatgaacccaacctagtgggtgtaatacatcatgaactgcaggaacagtccacaggaagaggttgaactaa

SEQ ID NO: 80609 - DNA, 83 bp, Homo sapiens
caagtcttagtctcctaggaaattttgaggtgattgaattactcagatatgaagatcatcatctaggttttgtgtaaaaggcc

SEQ ID NO: 80610 - DNA, 101 bp, Homo sapiens
tcttccgaagaaagcgagaaaggaacaggcgccttcaaaagcccacttggcgatgggttacagtaagaggcacacaagaattgtgggcagatgagtgagat

SEQ ID NO: 80611 - DNA, 100 bp, Homo sapiens
aatgaaaacttcaggattctgaactccccatggatccagggcacgaccataataacatccctgacttctgtgctgcacaatgacaaagaattccccaacc

SEQ ID NO: 80612 - DNA, 100 bp, Homo sapiens
tacggcgcctcggccggggcgctcacggccacggcgctggtcaccggggtctgcctgggtcaaaatgcagatcttcgtgaaaacccttaccggcaagacc

SEQ ID NO: 80613 - DNA, 75 bp, Homo sapiens
cctcggagcgcggtccctgtattggtctcctgctcctagagagtgaagacatttccacctggacacctgaccatg

SEQ ID NO: 80614 - DNA, 82 bp, Homo sapiens
ggacacagccccaggatgtgcaggattcttcgctgctgctgccttaccgccgagaaccaccacccgccaggcgtcttgcggc

SEQ ID NO: 80615 - DNA, 75 bp, Homo sapiens
caaggatcttgagactcaaccccatatggtctgcgcaggcatggcactaagtgtcccatggcacatttggccctc

SEQ ID NO: 80616 - DNA, 99 bp, Homo sapiens
cgaagccgatctctctctcgttcaaggaagcgcaggctgaggagaaaatgctgagaagcttctgcagttcaagcgttggttctggtcaatagtagagaa

SEQ ID NO: 80617 - DNA, 96 bp, Homo sapiens
gaaatagtaaccctgccaaatacatcagcttgtaggagacagaggcactggtgaggtggattgatgatgaatcttctggcacacctggagcaactc

SEQ ID NO: 80618 - DNA, 100 bp, Homo sapiens
tcagatatactcaactccacagcagctgatgaggtgacagctcatctggcagctgcagatcagacctattgtgaccgcctggtgcaggacacgcctttcc

SEQ ID NO: 80619 - DNA, 96 bp, Homo sapiens
ttagaagccatgctaaaagagagggagagtgatctttctagcaaaacacagctgttacaggatgaagatgagctggattcccacaccatggtgaag

SEQ ID NO: 80620 - DNA, 100 bp, Homo sapiens
gattacaccattattctgccgagtcaaaaaggagccatgtggctagaaatcctcctcacttcagtgctgggctttgccatctactggttcatctcccggg

SEQ ID NO: 80621 - DNA, 85 bp, Homo sapiens
acatgtcgacctgacgctctacacgttccgcagctctctgtacttgctcatggagaccctcaatgcgacgacgccccactacgtt

SEQ ID NO: 80622 - DNA, 90 bp, Homo sapiens
aaacacgccagcttcaaagcaaggacaggaagatgtcacccaagcgcatagctaaaagaaggtcccccccagcagatgccatccccaaaa

SEQ ID NO: 80623 - DNA, 139 bp, Homo sapiens
gagccctgctcacactcggcgctctggttttcggtgggtgtgccctgcacctgcctcttcccccattctcaatgcacaaagcagggtcatcagaagcctctcgattcaaaagatgataataccgaaaaacactgcccag

SEQ ID NO: 80624 - DNA, 100 bp, Homo sapiens
gtgctttgcgtgctggtcagcatccggaacaacaggtcaaaatgcagatcttcgtgaaaacccttaccggcaagaccatcacccttgaggtggagcccag

SEQ ID NO: 80625 - DNA, 100 bp, Homo sapiens
gctgcagggcccacggacattgctgactcttcagaacgtgctgacatggagccagtttctctgcaggtggatattgttcccagccagggggagatcagcg

SEQ ID NO: 80626 - DNA, 96 bp, Homo sapiens
caaagttatggatgtcactgagggcatttgatgtagaactactgtacatagcacagttctttaaaattccaatagcagaaattgctgtcaactgga

SEQ ID NO: 80627 - DNA, 90 bp, Homo sapiens
ggtcgatggtcggcggcgcccggatgggcagctgagtcctcctgcatatgcccaagaggattgggagtggaatggacaccagcagaagca

SEQ ID NO: 80628 - DNA, 100 bp, Homo sapiens
ttgttcgagacatcaacctacaggtccgccttagtaagcgccgggccaaggctggggttcagtcaggcaccaacgccctgcttgtggtcaaacatcggga

SEQ ID NO: 80629 - DNA, 75 bp, Homo sapiens
cctgtccggagacagcctaaggcatgcttttcacttccactgcatctctcgctggctcaaaacacgacaggtgtg

SEQ ID NO: 80630 - DNA, 100 bp, Homo sapiens
aaggcaccggccttgatgaggcaatggaatgcggccctccaggcactgaagcgtaagaagaggtatgagaagcagctggcgcagatcgacggcacattat

SEQ ID NO: 80631 - DNA, 83 bp, Homo sapiens
gcggccgggactctgaactatggcgatgatatcatcaagttgaatcgaaaggaagggaagaagcagaattttccaagactaaa

SEQ ID NO: 80632 - DNA, 90 bp, Homo sapiens
cactgtcaaaactttacaagttaattgaagagtcttgtccacagctggcaaattcagtgcagatcaggagaactctcttcagaggtcgaa

SEQ ID NO: 80633 - DNA, 96 bp, Homo sapiens
aattctgtctctgaagcctccctttacctgcaggaccagatctccagtctatgtgctgaagaagcagcagcccaagagcagacaggtcaggtggag

SEQ ID NO: 80634 - DNA, 82 bp, Homo sapiens
agagcaaggggcttacgcagaaggacctggccacggtgctgggcgtcctcttctttgccatagcctgcttcttatacaagcc

SEQ ID NO: 80635 - DNA, 83 bp, Homo sapiens
ctgggattcgcgctgctgggcacccacggagcctccggggctgcaaaatgatgcttcaacacccaggccaggtctctgcctcg

SEQ ID NO: 80636 - DNA, 51 bp, Homo sapiens
gcctcaaccggctgtacggaatccaagagatgaggtctcactatgttgccc

SEQ ID NO: 80637 - DNA, 100 bp, Homo sapiens
agatgtaaagagaccggcaaagttcacgtgactgtggatctcaagtactaccggccaactgaagtgtgcagctgtctgcttcagaaagtgagggctccag

SEQ ID NO: 80638 - DNA, 76 bp, Homo sapiens
gtggaaaatgagcatcctcaagcaaaacaagctatcgatcagggaagatctccagttataatagataacactaata

SEQ ID NO: 80639 - DNA, 75 bp, Homo sapiens
ggaggccagtatggcttagtggctgcgtgtgcagctggagggcagagccatcatgaagctgaatggccaccagtt

SEQ ID NO: 80640 - DNA, 75 bp, Homo sapiens
ctgacggctgaatgtgccatcgtcaccctggtaagaatgattgatgttggctgatattggagtgctcattcacat

SEQ ID NO: 80641 - DNA, 100 bp, Homo sapiens
ccatcagcaagcccaggtctatgaaaactgtcgctgaaaagcaggagaagagaaatcaggatcgcttgaggaggagagaggagagggaacgggaggagcg

SEQ ID NO: 80642 - DNA, 100 bp, Homo sapiens
cgcagatgaagacttctatgctcggtttgctaccgggtgtgtctccatcccctggcagaatgaggtcatggaaaatggaagatttgcaaaatacaaatat

SEQ ID NO: 80643 - DNA, 102 bp, Homo sapiens
caagagccacagtctgtttcaattcttcagcatcttctcagtaatgttgcaggtcagtggaatccagtttttatgcagcctctgccagaggaagagattgtc

SEQ ID NO: 80644 - DNA, 100 bp, Homo sapiens
tccagccttccgaggaagaggcgcggggctacatcgtgacagacagagaacatgtcatgctgcccaaggacatagccaagctggtccctaaaacccatct

SEQ ID NO: 80645 - DNA, 100 bp, Homo sapiens
agatgagtctggggaccagcgaagaccaccagcacttcacctgcaccatctggagaagctgacctggagatctaaccccagcgacataaacgtgtgtcgg

SEQ ID NO: 80646 - DNA, 78 bp, Homo sapiens
gctggccgagcaggctgagcgatacgacgatgacttcctgctgtacctggaccctcactactgccagcccactgtgga

SEQ ID NO: 80647 - DNA, 75 bp, Homo sapiens
atgaggataacatccctccagaagatgatatgattctataacagactcttccagaaatgatatgaagaggaaatt

SEQ ID NO: 80648 - DNA, 75 bp, Homo sapiens
gagacgtcggttgagcggcggcgaacatgcgcttttgacacattggagatgaagttggagcccttgtttttgaca

SEQ ID NO: 80649 - DNA, 97 bp, Homo sapiens
cctgaagaagattccactcgtggtatgagagtggataatataatcaactcctctgcctgcggaaagtgaccagaagaggtgtgcagtttccaggcct

SEQ ID NO: 80650 - DNA, 75 bp, Homo sapiens
agaagccatagagagcagcctcgaggtggagaagaaggacaagcttgcgacctaatctgggagcctgcaagtgac

SEQ ID NO: 80651 - DNA, 116 bp, Homo sapiens
gacgggggaagcagcacgggatcccagcctcaggcctgcacggacggtgttggttggggttgaattgaccaaagcaatggtgatggagaagcctagtcccctgctggtcgggcggg

SEQ ID NO: 80652 - DNA, 74 bp, Homo sapiens
actgcagctagtaatttgccttctggattacaccagagaagcctatgatgacaagcaggtggtcacagagatca

SEQ ID NO: 80653 - DNA, 100 bp, Homo sapiens
caaacgttcgaagaatgacagcaagccctactgagcgtgctcccctctgagactggagtgagagggtcttctgcaggagcgagaacccgagcagcgccat

SEQ ID NO: 80654 - DNA, 75 bp, Homo sapiens
tccaactgtgggaactctttccagcttgtgtctggagtggagtcaacatatcaatggagcaagtcacagtcgtcg

SEQ ID NO: 80655 - DNA, 75 bp, Homo sapiens
cggatgccctgcagtacctgcagaaggtctctggagacatcttcagcagatgtcttatggtgaaattgaaggtaa

SEQ ID NO: 80656 - DNA, 51 bp, Homo sapiens
gaagacaatcgtcacttatacaggtactccaaagattcaggtttactcacg

SEQ ID NO: 80657 - DNA, 50 bp, Homo sapiens
ggcagccgaccaaggggactttggaaagagatgtggctgcaagattattg

SEQ ID NO: 80658 - DNA, 50 bp, Homo sapiens
cgcatcttcaacccccatctgaatgtatcctgtcaggtataatgtcagtg

SEQ ID NO: 80659 - DNA, 101 bp, Homo sapiens
gatgatgatggatccatttctcctattgaggagtcaacgattcagaatccatggctggaagaggtagtaaggccattgggagggcatgcctctcctcagcc

SEQ ID NO: 80660 - DNA, 75 bp, Homo sapiens
tgcgcaggaataaggaagcgacctgcaaccgacggtgaatgaaaactttgccattgatttgatagcagagcagcc

SEQ ID NO: 80661 - DNA, 100 bp, Homo sapiens
gggggtaggcaagacctgcctcctgttccgcttctcagaggacgccttcaacaccaccttcatctccaccatcggtgctgtcctggagccgagagctgcc

SEQ ID NO: 80662 - DNA, 96 bp, Homo sapiens
caatagaagcttattccggagcaaatgggattctaaaattcacaatgacatcctttcaagaagtcccattgcagacttccaactttgcccatgtca

SEQ ID NO: 80663 - DNA, 101 bp, Homo sapiens
tgacgccatgtcgggttattcgagtgaccgagaccgcggccgggaccgaggctgtgagccgtgagctttgaggcggtgggatgtgtcagcagaatgtctcc

SEQ ID NO: 80664 - DNA, 75 bp, Homo sapiens
tcgcccctcctgacagaagattttcacgttctgcgatacaactgatcaatactgggttccatgtttacatgatga

SEQ ID NO: 80665 - DNA, 76 bp, Homo sapiens
ccattgcctggagttggctaaagaagcagtgatgaggaatttaaatccaccttcatcaaactgggaggtggaaaag

SEQ ID NO: 80666 - DNA, 78 bp, Homo sapiens
gttcagccggcgtataccaacccaccccacatggcccacgtacctcagaatgccagctgatgaagaccgagaggccgc

SEQ ID NO: 80667 - DNA, 98 bp, Homo sapiens
acgaatcgaaggacttggtgggagtggaggaatcagacatcattgatcttgagaaacgctattggttattgaaggctcaatcccggactggacgattt

SEQ ID NO: 80668 - DNA, 100 bp, Homo sapiens
tcttcaccagctcttcagatcaatatgatgttgaaagtgtgatgaacagtgtggtatccctactcttgatcctggaaccagacaagcaagaagctttgat

SEQ ID NO: 80669 - DNA, 75 bp, Homo sapiens
tgatgacattgacctctttggatctgatgatgaggagttggaaatggaggatgaagatacaattgatgtgttcca

SEQ ID NO: 80670 - DNA, 90 bp, Homo sapiens
gacagactggccgttgctgtggagacgcctgctctcagtaaattatggagactactgcaaaattcaataaatgctcgcaccggaaaggac

SEQ ID NO: 80671 - DNA, 74 bp, Homo sapiens
cttctgactatcttctcttcaccagctcttcagatcaatatgaataatccagaatggctactctgatctatgtt

SEQ ID NO: 80672 - DNA, 100 bp, Homo sapiens
aggcagcaccggaggcccaggtctccgtgcagcccaacttccagcaggacaaggtggttggttttgacggctcttccacggttgatgagttcctccagcg

SEQ ID NO: 80673 - DNA, 100 bp, Homo sapiens
ctgtcttcggtggactccttcggcagtccacccaccgccgccgcctcccagcgtcgagggcgaggcccccagcagtgagactggcacatccctggacagc

SEQ ID NO: 80674 - DNA, 100 bp, Homo sapiens
tggtgtgtggggaccatatcatcattagtggccacaatgaccagaagatccggttctgggacagcaggagacaggcagttccagtcacccctgcgctggg

SEQ ID NO: 80675 - DNA, 75 bp, Homo sapiens
caccgcagtcgccgtgaagatggcgtctaccagccgataatttgcggtaaaagcctttcagtgaatgaaatgact

SEQ ID NO: 80676 - DNA, 51 bp, Homo sapiens
ggaggcagtagccaaacacccaggtcagtgctgacagttgcttgtgaacaa

SEQ ID NO: 80677 - DNA, 96 bp, Homo sapiens
gcgaggacggtctctgccagtataaatgcagtgacggaatagccaggccagaagaaggaaggcctgtggtgagtgggacaggaaatgacatcacca

SEQ ID NO: 80678 - DNA, 111 bp, Homo sapiens
gcgaggagaagcgcagcgacggcgtcgggagagcgcgcctagccggctcgcgagaaccttttgaggatggctttgcaaatggggaagaaagtactccaaccagagatgctg

SEQ ID NO: 80679 - DNA, 137 bp, Homo sapiens
cagtcgccatttttggtaacattacattatgctttccagacagaaaccaaacttcatctcattttaggtccagaggtgtccttctaaagctggtagaggtttcacgagtcatcagggacccagaacccttctctttt

SEQ ID NO: 80680 - DNA, 82 bp, Homo sapiens
ttgcatctttacaaccagaagctcagggagaagttgaaggaggaggagaacacagtggacaatttggtggaagggaagcgga

SEQ ID NO: 80681 - DNA, 83 bp, Homo sapiens
cgaggagctgctggcctacgaaggcgtgcgggcagcgcttgaggccctgctgccctacactgattttgcaagaacgaggctca

SEQ ID NO: 80682 - DNA, 82 bp, Homo sapiens
cagagagaggatgctggtttcttactaccgatacaggtgatcacgaacaaaggtattggcagaagattttggttgatagaca

SEQ ID NO: 80683 - DNA, 100 bp, Homo sapiens
gaagatccacttggacctaattgctattatgacaaaactaaatccttctttgataatatttcttgtgatgacaataggttttagctaaagaagatactga

SEQ ID NO: 80684 - DNA, 90 bp, Homo sapiens
cggtggtcgcggcgacctccggcggcgggaggcccggcctgggcagaccctgcccggcttggcgatggagtttccggacctcggcgctca

SEQ ID NO: 80685 - DNA, 113 bp, Homo sapiens
atctgggccgagaccattccgtatggagagccggtgcagtcattggagaaatcgatgaagaaacagattctgcgcttgatttggggaatattcgagcagaacctttaaattct

SEQ ID NO: 80686 - DNA, 101 bp, Homo sapiens
gtcggacctctatgccatgaacttcaatcccatcatttccagaaaggacatcacaggtcttgttcagcgttgcgtaatcatccagaaagatgacaatggat

SEQ ID NO: 80687 - DNA, 88 bp, Homo sapiens
tttggtagatgagactaacatgtatgaaggtgtaggaagaatgaaagtatgtgatggtgatgggagtggttcaggcctgcagccctga

SEQ ID NO: 80688 - DNA, 96 bp, Homo sapiens
tggtccccttggaggtcctctgaagttctctaacccttgcatcctttggcttcatgctgaccaggcagatgccagtgagagcaggtgccagcaggg

SEQ ID NO: 80689 - DNA, 152 bp, Homo sapiens
catcacttctcaccgcgccctccagcttcacccgtacaggtagccccgccgccgcgcacctgccttcgctcccgcaccgaatccaattctcagttttgaactacctatgaatttggcaaactggtttcctccaccaagaatgagaacaaaaa

SEQ ID NO: 80690 - DNA, 90 bp, Homo sapiens
cgccgagtcggctgccgtggctgtgctgagggtggcggccggataggtcagtttaggggctggtgcaaaggatgagttgcacattgttga

SEQ ID NO: 80691 - DNA, 98 bp, Homo sapiens
ctgagtctcagagaggtgaagtgacttgcccaagatcacagcaattcagatcaatgacaacagccattggaagcttaggaaaagcgaatgtaacgtga

SEQ ID NO: 80692 - DNA, 88 bp, Homo sapiens
gcgtgttgaacaaggccacgaatgtcgcccactggacaacccccagtctcaaatgcattatcaccaggagactaaagtccatcaaaaa

SEQ ID NO: 80693 - DNA, 116 bp, Homo sapiens
tcctgccgtccttctccactttcgccagcccgtgccgcgagcgcggcctgcaggagacctcctgccccccgaggtctgcagtctcctgaacccagcagccatctacgccaacaacg

SEQ ID NO: 80694 - DNA, 98 bp, Homo sapiens
ttcgccacctgggaggtggacggctccagccccagctgcgtgcccagagagcgcctgctcgctgtgcccccgggttatgacgacccccaataaaggaa

SEQ ID NO: 80695 - DNA, 100 bp, Homo sapiens
cgaggcccctatggcagatttgaaaattcacccttgtagagtcattcctgcctttgagcggactcccttttaaggtcacacagcggcagtgataaagagc

SEQ ID NO: 80696 - DNA, 100 bp, Homo sapiens
ctttgttcaggacctggctacaagagttaaaaaggtcatcactcctgaagaaatcattcacccggatgtggacgagcactcagttatgacttacctgtcc

SEQ ID NO: 80697 - DNA, 88 bp, Homo sapiens
atggaggcaccaaagtagttctagatgacaagttaattggcatgctgctggcctgctgtctgtcccggttcatcacggccaatcagta

SEQ ID NO: 80698 - DNA, 75 bp, Homo sapiens
cgtggatccaagatggcgacggcgatgcactgccccccaggtgttgagtaccagctctccagcccaacaggcaga

SEQ ID NO: 80699 - DNA, 101 bp, Homo sapiens
caagaaattactgtctcaagtgatacgttaagggaagaaagtcggaggctggctttggctgcgaaaagagaaaaaagaaaagagaagagaaggaagaaaaa

SEQ ID NO: 80700 - DNA, 82 bp, Homo sapiens
tcgcacccaggtggttcagctcgcatagtggtcagcccaaggccaaccccactgtcactctgttcccgccctcctctgagga

SEQ ID NO: 80701 - DNA, 74 bp, Homo sapiens
atggatgctgtcaacaagaagagcagttcccaggatctgcataaaggacctggtgtgaattattcagggtgtca

SEQ ID NO: 80702 - DNA, 83 bp, Homo sapiens
agaccttacgacgggttggggatggcgtgcagcgcaaccacgagacggccttccaagctggcaggggccgcctgaagtgggag

SEQ ID NO: 80703 - DNA, 83 bp, Homo sapiens
cacccggcccctccgcatccgagcaggtgtggatgaggtcaccattgtcaacattttgaccaaccgcagcaatgcacagagac

SEQ ID NO: 80704 - DNA, 60 bp, Homo sapiens
cagctcttggcaggagtagctgatcaaaccaaggatggcttgtaacacttcaagaagcaa

SEQ ID NO: 80705 - DNA, 100 bp, Homo sapiens
cgaagatgtcagcctcccctgtcccgaacgcagtgtgtggaaaggaagaagatttctctccccatgtcagctgtagtctgcctctggcttcggcaccttc

SEQ ID NO: 80706 - DNA, 101 bp, Homo sapiens
cttccccagaggagtaaactcagtgcgcgatcttaagcgcgcatctgtggaaacaattaaacaatgaccgtttgccaagtaaaattatctaatggcttact

SEQ ID NO: 80707 - DNA, 100 bp, Homo sapiens
gataaaccaaaggaattttgaagtcaccactgaggaggaattcaccctgttcgtctatggaggagatgttaaagtaacccatcttgcaggacgacattga

SEQ ID NO: 80708 - DNA, 75 bp, Homo sapiens
cccatcatccaccgcgaccttaagtccagcaacaacatgccaatatttggtttctgtccagcccatgatgatttc

SEQ ID NO: 80709 - DNA, 99 bp, Homo sapiens
ccggaggcaggttcggctggaaggaaccgctctcgcttcgtcctacacttgcgcaaatgtctccgatctgactgcagccatgagcagcaatgagtgctt

SEQ ID NO: 80710 - DNA, 90 bp, Homo sapiens
gccacccagtctcccacctgttacagcttgaatgcaccaaggaaaggccatttgtggggacatagcaagaaggcagctgtctgcaagcca

SEQ ID NO: 80711 - DNA, 90 bp, Homo sapiens
ggcctagcacgtggaattcgcgaagctgccaaagccttagacaaatgtggaagatgtgaaatttgtcatcaattatgactaccctaactc

SEQ ID NO: 80712 - DNA, 97 bp, Homo sapiens
tgaagtaaagggattaaaggctagtctcaggctggggatggctcctgtctatttcttctctctcagagactgcagatttaatccagagactgacttc

SEQ ID NO: 80713 - DNA, 100 bp, Homo sapiens
ttgtgacagaatatgccaaaaatggagaaatttttggggacggcaaaacagaacagaaaggcggagataaaaagaggggtgttaaaagaccacgagaaga

SEQ ID NO: 80714 - DNA, 75 bp, Homo sapiens
cgccatcgttgctgccttcttcgtcaaggagctgggaatcccaagtgcaaaattgcaattgttttgggaagaact

SEQ ID NO: 80715 - DNA, 75 bp, Homo sapiens
gagaaacacaggaggaggaggatgagattcttccaaggaaagactatgagctgcagatctgggacacggccggcc

SEQ ID NO: 80716 - DNA, 90 bp, Homo sapiens
agtggctgaaggggctggtgcgagcgtggactgtgaccgccggatacttgctttacagaagaatggtctgagaaaaaatggtattttgaa

SEQ ID NO: 80717 - DNA, 100 bp, Homo sapiens
cggttttatggtgcagagattgtctcggctcttgagtacttgcactcgcgggacgtggtataccgcgacatcaaggtggggaacgccaagcacaacgtgc

SEQ ID NO: 80718 - DNA, 100 bp, Homo sapiens
tgagggcattggaggggatggattttttaccatgaaatatgagggtgtgggccgaagatatgctcatgtggtgttgaggaaagcagacattgacctcacc

SEQ ID NO: 80719 - DNA, 89 bp, Homo sapiens
aaatctcccaagaggaatgacaaacaaccagctcttcaggttaatgttgaagaaggaaaatgcggaagtcgtcatttgacaagttttat

SEQ ID NO: 80720 - DNA, 74 bp, Homo sapiens
ttgtttgtggatcgctgtgatcgtcacttgaaaaacaggatgaagttgtctattacgatccatgtgaaagtcca

SEQ ID NO: 80721 - DNA, 150 bp, Homo sapiens
cgtgaaaaaaaagacctgctttgccctgggaaatagtaaccctgccaaatacatcagcttgtaggagacagaggacccagatgatgtggtaccagttggccaaagaagagcctggtgttggtgcatgtgctttggactagcatttatgct

SEQ ID NO: 80722 - DNA, 75 bp, Homo sapiens
gacgtttggaccccgcggccaccactggcaaggcccagcttgtgaaaatggaattacatgaacgacagccttcgc

SEQ ID NO: 80723 - DNA, 90 bp, Homo sapiens
cgcatctcggcctcctctgccaccagggagctggacgagctgatggcttcgctgtcggatttcaagacgtttgatgcaaatgatttgtat

SEQ ID NO: 80724 - DNA, 75 bp, Homo sapiens
cctcatgcaagcgagggacctgggactgctcacagccaggcttttatcttgagaacatggtgtctggagttaaag

SEQ ID NO: 80725 - DNA, 100 bp, Homo sapiens
cacaggaatcatgactcctggagaacggatcaagtgcttattacaggtgcagcggaactgctgcctgacgctctgcaacttcagcatccccgaggagctg

SEQ ID NO: 80726 - DNA, 82 bp, Homo sapiens
tgtgcctgaactcaaagatgcccttaaaagtgctgggattacaagcgtgagctaccacacccagcgaggaagccaagtttaa

SEQ ID NO: 80727 - DNA, 100 bp, Homo sapiens
aggaagagagactgactgggcaacatgttattcagattgccacggcagtgaagtttctacagaattcccgggtccgccagagcccacttgcaaccaggag

SEQ ID NO: 80728 - DNA, 74 bp, Homo sapiens
gcaagccccacactgtcccttgcaaggtacatcaggaacgtctctatcaagaatacaatttcagcaaggctgag

SEQ ID NO: 80729 - DNA, 98 bp, Homo sapiens
gcagaatgcaatgatgaaagcttctggttcagataatgaggagaaacctgtgcaaatgatgtttaagcaatctacttttaagaagacctatataggag

SEQ ID NO: 80730 - DNA, 98 bp, Homo sapiens
cgcggcaatggtctcatcaaggtgaacgggcggcccctggagatgattgagccgcgcacgctacagtacaaggaaatgcctcgataccatgagctgcc

SEQ ID NO: 80731 - DNA, 83 bp, Homo sapiens
acgggtctggagtgcgtgggggaccggctgttggcggagagcatcagtgatgtcacgtttggagcaggggtcagttacatcgg

SEQ ID NO: 80732 - DNA, 100 bp, Homo sapiens
acttcatgactggtatacctgcaacacctggcaatgagatccctgtagagagtagcacagaagagggaggatgctgtttccaaagaagtgactcgaaaac

SEQ ID NO: 80733 - DNA, 100 bp, Homo sapiens
tttgggaatgtcaagctggtggtccacgactgtcccgtctggaaacacgaccctcctctgagtagcatcccttgtctgcattataagaaaatgaaggaca

SEQ ID NO: 80734 - DNA, 100 bp, Homo sapiens
tgagttgggagaagagctccagagatcactctgagaggagtgataccaatgaaaaaaggtcagttgattccagtgctaaaagggaaaaacctgtggtccg

SEQ ID NO: 80735 - DNA, 101 bp, Homo sapiens
gcagggagaaggaagaggtgtttgaaaaggaatggtcctcgtccgaagtgagaatgggcagttgttaatgattcctcagcaggccttggcccagatgcagg

SEQ ID NO: 80736 - DNA, 100 bp, Homo sapiens
tggacgccatcgtcaacgccgaaagtttcctacactactgaggtttaggggcactgtgaagcaaaagccacgcctcagaatcccaggcggagactccgac

SEQ ID NO: 80737 - DNA, 50 bp, Homo sapiens
aaaagaagtaaggctttgaaagtattgcctaagtgtaatcttgaacatgg

SEQ ID NO: 80738 - DNA, 100 bp, Homo sapiens
cgggaactcgactcttggcgccaccgcctcatgcactgtgtaggctgtattcatcaccaaagaaaaaacttacaccaatgcagaaatcggttagtccatt

SEQ ID NO: 80739 - DNA, 87 bp, Homo sapiens
aagatgcagaggaagaggaaagcgaactgattatctcctgctgcatactacgcccagaggatgatccagtatctctcacggagagac

SEQ ID NO: 80740 - DNA, 82 bp, Homo sapiens
gcaaaaagctaccacctgccagtctgaagcaccgagatgacctgcctagagctggaacgttacctccagagcgagccctgct

SEQ ID NO: 80741 - DNA, 95 bp, Homo sapiens
tggaggagccttctcaagaacagagctgttgttggcctactgtacccctgtatcgacagtcacctcggagaaccccacaaatttaagagagaatg

SEQ ID NO: 80742 - DNA, 97 bp, Homo sapiens
agagctgagcaaaacacggagtctccagcagggcccggatggcctccggaagcagcaccaggagacattagagaagcaagtattttctctctggagg

SEQ ID NO: 80743 - DNA, 82 bp, Homo sapiens
acgtggggaagaatgaaaaaaccaaaattatcgccaagattcagcaattactccacaggatccgctgaacataggatgttgc

SEQ ID NO: 80744 - DNA, 75 bp, Homo sapiens
gcaaccggggcgaatcatggcggccgccaagattgggctaatggatactacagacaacagagaaaacttgttgaa

SEQ ID NO: 80745 - DNA, 82 bp, Homo sapiens
tgccaaggaaaaactggagagcttcatcaaaaatagtgatagctttgataagtcgatggccaggtggtcttcataaactata

SEQ ID NO: 80746 - DNA, 100 bp, Homo sapiens
cgcacgtctgctcggagatcatttgggagatccaagagattcagtatcactcgctcccttgatgatcttgagcatttatgacattaacagagaacaggac

SEQ ID NO: 80747 - DNA, 82 bp, Homo sapiens
cggcgcaggtgaccggcgcgcgggagcgctacggccccaacggtggaagttaaacgagctgagcctcgggacagcaagagcc

SEQ ID NO: 80748 - DNA, 87 bp, Homo sapiens
acagactgttggggaacaagaggcatctatcgagctgtgcctattcgagtcaatccaagagtgagtaatgtgaagtctgtctacaaa

SEQ ID NO: 80749 - DNA, 98 bp, Homo sapiens
atgggtacccctgaatatgtggcatctatattggaaagcgactgagcacaccctctgccagcacctactgagggaaaggaaaagcccctggaaatgcg

SEQ ID NO: 80750 - DNA, 90 bp, Homo sapiens
ccgggacccgcctgctgagtggacccgggtgtgtgggcccatcgctggatggatctgtcagaacacggctttgggctggccctgctcaac

SEQ ID NO: 80751 - DNA, 83 bp, Homo sapiens
cacccctccaaaaacagtcctggacgaccacacgcagaccctctttcagagaggtggagaagagcgagtacttgagaaagaag

SEQ ID NO: 80752 - DNA, 95 bp, Homo sapiens
gccagttattagttctctatatcatgaagaaaccatcaggaacttgaacatcagagaggagcccttatgaatgaaatccaagctgcgaaaaactc

SEQ ID NO: 80753 - DNA, 80 bp, Homo sapiens
agcacacactatggcgctgaaacggattaataagatgaacagactagccactttgcattgactggaaacaatggcattta

SEQ ID NO: 80754 - DNA, 90 bp, Homo sapiens
agcaagaaggccctggacacagcaatatctctgggctttcacaggtgatctgtgaaaatggttcgctattcacttgacccggagaacccc

SEQ ID NO: 80755 - DNA, 122 bp, Homo sapiens
aaaaaggagattgtgacatatcactgcattcaatacctagatgatatcacaaaatttgtccaggatagacatagagctagaagaaacagacttcgtaaagatcaacttaagaaacttcctgt

SEQ ID NO: 80756 - DNA, 98 bp, Homo sapiens
gcaaccgtagctgctgccgaccggtccaaatggcacattccgataccgtcggccgaatacatcaagcaatggtaacatctttaaatgaagataatgaa

SEQ ID NO: 80757 - DNA, 80 bp, Homo sapiens
ggggaggattttgaggacacttgtggagagctcgaattccagaatgatgaaattgtgggagcgtgttcaatacgtggaaa

SEQ ID NO: 80758 - DNA, 83 bp, Homo sapiens
aggaatccgagaagagcagagcggagggagccccagacacgaagaagaagatggagtgtgggagaatggactttcctatgaat

SEQ ID NO: 80759 - DNA, 100 bp, Homo sapiens
ggaacattgttcatcgtgatttaaaagctgaaaatttacttctggatgccaatctgaatatcaaaatagcaggagatgtaatcagtgtagagaaaaccgt

SEQ ID NO: 80760 - DNA, 90 bp, Homo sapiens
cagcccacccacgcacaatctcagtcctcgcaatacccacaagggaacccgagcgtcatgttagggtgaagcagaggacctcagtgctga

SEQ ID NO: 80761 - DNA, 75 bp, Homo sapiens
agaaacacaggatgccctggatactcccatagtgaccctctctggccacatggaggcagtttcctcagttctgtg

SEQ ID NO: 80762 - DNA, 100 bp, Homo sapiens
cgccgtctggatgggaagttacggcgaagtccacccagcgtttctcaggttctggtatgaaaaccctggagtatttaccccggcacaactcactcagctg

SEQ ID NO: 80763 - DNA, 100 bp, Homo sapiens
gaaggaaaaacagaatcagctgttccctgcgaaagccctgaaaaccactcgcttgcagagcgctggatcagcaatgcctactagttcttcattcaaacac

SEQ ID NO: 80764 - DNA, 100 bp, Homo sapiens
cggcagccttcgacgcgatgttccgccggagcttgaatcgttttgctacagatgcacatgttgaatggagctcttctggcattgctgtttcctgtggtaa

SEQ ID NO: 80765 - DNA, 100 bp, Homo sapiens
ccaccggaactggtcgaatgaggcacctaaaaattgtataccgcagattcaggccaaacgtaccaagaaagtcgggatcgtcggtaaatacgggacccgc

SEQ ID NO: 80766 - DNA, 100 bp, Homo sapiens
ctgggcatggttcccgtagggttgcctggacagcagctcgtgtctggaacggaaaacagttcttccttcaaagcatgcagtacctgaagtaatagaagac

SEQ ID NO: 80767 - DNA, 82 bp, Homo sapiens
gtggaagctatgaattttgcagatattgaacggaccatcactgaactgggagagaaggtcccagctgcagggcagccatgag

SEQ ID NO: 80768 - DNA, 140 bp, Homo sapiens
gtcattacacaccacatgcagcgatatgcagtttggtttggaggatcaatgctggcttccacggagtatgctgctgctgttccgctttgcgtcctcgctacaaacgcctggtggacaacatattccctgaagatccaaaa

SEQ ID NO: 80769 - DNA, 82 bp, Homo sapiens
cgcagtagttaaaaaactagatccaggttggaatcctcagatgtttctatactttgaagatcatggactagtgacgtgctcc

SEQ ID NO: 80770 - DNA, 75 bp, Homo sapiens
cggagcgggagtgttcgttgtgccagcgactaaaaagagaacatacatatgatagttgagaaagacacatattct

SEQ ID NO: 80771 - DNA, 101 bp, Homo sapiens
acgtcaaagctgttgcctcccgtgcaactgaagtgacaaagcataaatcatggacaccagagaataaggtggacctcaggaatccggaaaagactgagaag

SEQ ID NO: 80772 - DNA, 75 bp, Homo sapiens
agcacttcgcaggcatagtttggaagtcatcagggctggttcttttccttccagcctactttggggataaaggat

SEQ ID NO: 80773 - DNA, 75 bp, Homo sapiens
gtggaggccatcaggggccttgataacacagagtttcaaggccctggccaacgtcaacattgggagcctcatctg

SEQ ID NO: 80774 - DNA, 100 bp, Homo sapiens
gctgaacggagaggtagccatgatgccccacttggtgaatggagatgcagctcagcaggaatccaaatgagactcagaacaatagcacaagctggcctgt

SEQ ID NO: 80775 - DNA, 98 bp, Homo sapiens
cagtggtcgcttcttctccttgctgaagaaatcaggggagaaacccctgcttggtggaagcctgatggaatatgcaatcttgtctgccattgctgcca

SEQ ID NO: 80776 - DNA, 100 bp, Homo sapiens
ctcttccttcgctaacgcctcccggctctcgtcagcctcccgccggccgtctccttaacaccgaacaccccactgaggcggctcccagctgcgttggcga

SEQ ID NO: 80777 - DNA, 100 bp, Homo sapiens
ggattctgcttttaggagtacccgccaacaagcgggaccgagcaggaatccgtatctgggaacagcagttccaagagcctctgagttcctgccttttttc

SEQ ID NO: 80778 - DNA, 90 bp, Homo sapiens
aggctggaccagctgcctctccgtctaggtgagggccaggtgctgactccagcacagatcaagtcaatttgtcaggcaattctggactct

SEQ ID NO: 80779 - DNA, 95 bp, Homo sapiens
acgatacacaaaattgaagaagggattgtttaatgcgctgaaggttcccgtgccagaggataaatatactgcccaggtggatgccgaagaaaaag

SEQ ID NO: 80780 - DNA, 101 bp, Homo sapiens
agaaatccaacttaccttgtcaattatctccctccaaactctaaagaaggaatataaatcctatgaagccaagctccgccttctgagcagttttgatttct

SEQ ID NO: 80781 - DNA, 82 bp, Homo sapiens
cgaacacctgggatattttcctactgatctatttgcctgctgcagatctgggacacggccggccaggagcggttccgcacca

SEQ ID NO: 80782 - DNA, 101 bp, Homo sapiens
catcacaatcccattattcagagcgcgtatggagtggaaacgcttgtagggtttcaccagggtgcaacaccggaggatttcagcaacctcccacctgaaca

SEQ ID NO: 80783 - DNA, 100 bp, Homo sapiens
ggacttacgacgggagatcagctatgccattaagaacatccatggagtcagaaaggacccaggagcgataacagtaaatcaaataagatatttgtcggtg

SEQ ID NO: 80784 - DNA, 100 bp, Homo sapiens
gggaaggcgggagacgagaagcctgaaaagtcgcagcgagctggagccgccggaggtctggctacctgcagtaaaggctaaaggcttggagatttccgga

SEQ ID NO: 80785 - DNA, 82 bp, Homo sapiens
aacggaaggtagtgccaccttctcctatgactggtgtgggtcctgtggtagctggagtgttggtggccatcttggtgctggc

SEQ ID NO: 80786 - DNA, 88 bp, Homo sapiens
gatacattcaattcatggtttcttataaccctactccacgtctgatgaagcccggggcaagaactgtggtgtcttggtacattgcttg

SEQ ID NO: 80787 - DNA, 98 bp, Homo sapiens
gaagaatacaaacaaacaggagatgggcacatacctcagattcattgtctcccgcatgaaggagagggaatatacagatgttgccacaggaatctaat

SEQ ID NO: 80788 - DNA, 100 bp, Homo sapiens
gcaatgctgacctcggtttcctggacccattccgactcaggttggcgtgcagtggtgtgatctcagctcattgcaacctctgcctcccggactcaagcaa

SEQ ID NO: 80789 - DNA, 75 bp, Homo sapiens
aaggaaatgagggcaacttctgaagacttcaacaaggatgttaaagtctttagtgaagatgggacaagcaaagtg

SEQ ID NO: 80790 - DNA, 100 bp, Homo sapiens
cggagctgacggtggaggttcgcggctctaacggggctttctacaaggccagtacagtggtagcagttggactgaccattgctgctgcaggatttgcagg

SEQ ID NO: 80791 - DNA, 100 bp, Homo sapiens
ccaggcgaagctggccgagcaggctgagcgatacgacggtcttattagtaggtaagaaacagctgctcctccacctccaccccagccccatggagcttgc

SEQ ID NO: 80792 - DNA, 100 bp, Homo sapiens
gtttgctggcctagacctgaactcttcagataatcagagtggaggaagtacagccagcagaaatggtgttcacactggccctgaatcaagggaacaccag

SEQ ID NO: 80793 - DNA, 75 bp, Homo sapiens
tttgaccgagacataaactgcagaagagcagcctctgtgcacattcaggttcccgagcacaaacatcaagataac

SEQ ID NO: 80794 - DNA, 96 bp, Homo sapiens
actttatggctaaaaggcttaacccaggcatttggagggtttctcatttggcctggtactggaaaactgggcttctcttttgtgagaattacagct

SEQ ID NO: 80795 - DNA, 100 bp, Homo sapiens
atttttcacatagctagtgctgcagagagtgttccttgcctgtatctccccttggttcaatagctaccagatttttggaagaggaggaactgaggtctca

SEQ ID NO: 80796 - DNA, 100 bp, Homo sapiens
caagcacacaacctccatcttcgacgactttgctcactacgagaagcgccaggaggaggaggaggtggtgcgcaaggccaggaatagttgctgaacaccc

SEQ ID NO: 80797 - DNA, 73 bp, Homo sapiens
aaaggcctaagaattttggcattggtacaactccaaaaggagacattggagaagaaccaagctgggtctataa

SEQ ID NO: 80798 - DNA, 100 bp, Homo sapiens
ggaacatggacatgaagaggaggatccacctggagctgaggaaccggaccccggcagcttgcaagagaagcctgagccagtgccgctggagagccgctcc

SEQ ID NO: 80799 - DNA, 74 bp, Homo sapiens
acgacgaggaagaggaggtttctgaggaccagcagagagaagagattccatcttccagaggttgccactgtctg

SEQ ID NO: 80800 - DNA, 100 bp, Homo sapiens
aaactgatgacttttccgtgctgatttctttcaacctcgaagaagctcattcacacagaagacccatttaatgatgaacatcaggagaggcaagaggtgg

SEQ ID NO: 80801 - DNA, 60 bp, Homo sapiens
cacaaaccgctgccagaaaagaaagagaatactgtgccaggcctagactggacatcatcc

SEQ ID NO: 80802 - DNA, 100 bp, Homo sapiens
cttggagtccggagtaacttggccaggctggccccgagcggaactggagaaagctgagggcgcatattaaatttcctattgactacccctattcaccacc

SEQ ID NO: 80803 - DNA, 102 bp, Homo sapiens
tttttgagcagccacgatatttcaacattctcaccacccaatgggaacagaaataccatggcaacaagcttaaagggaaggacaccactggtaccagctgcg

SEQ ID NO: 80804 - DNA, 90 bp, Homo sapiens
gttaatagtttaagaaagcaaagagcaggttcttcatcttcaaaaatgaacagtttggccttaccagaggggcagacagcttcgtgggac

SEQ ID NO: 80805 - DNA, 74 bp, Homo sapiens
gggttggacgctgccagtttgcacagcagcagcggaaggagagttttacatggaagtggcttacagaaacttgg

SEQ ID NO: 80806 - DNA, 50 bp, Homo sapiens
gatcttcagaccccaggttctttgcccaatcaattgagcagagactgatg

SEQ ID NO: 80807 - DNA, 82 bp, Homo sapiens
ctcgagcaaaaatgaaccagcagcgtgggaggcgttttaggttctttagtaatcgaggataaagagagccagccacaaatgc

SEQ ID NO: 80808 - DNA, 99 bp, Homo sapiens
gaccagaaggtgtatgagatccaggacatctatgagaacagttatgtgtctcggtaccacgtgaaagactcctcacgccacgtcatcctaggcacccag

SEQ ID NO: 80809 - DNA, 75 bp, Homo sapiens
atgctggaccagcatcacaccgacctgatcttaaagaaagtcctacctccatctccgtgggccccagcaccagcc

SEQ ID NO: 80810 - DNA, 74 bp, Homo sapiens
caaggcccgagatgcagctgctgtccttgtgtccagggggaaatttgcagtggtgagaaaatgtataaagaaag

SEQ ID NO: 80811 - DNA, 111 bp, Homo sapiens
cactgctccagattactatgtcggaacagctggatttacctgtgagacaggcagattgttttacaaggacatgctacaagagtaactgctaaatctcaacagagtggagag

SEQ ID NO: 80812 - DNA, 100 bp, Homo sapiens
ctgaaaggaagagggagcagagcaagaaaaaaaggaagacgatgacttcagctggaaaaggattttggtctgagatgctgggcgtgggggacttctatta

SEQ ID NO: 80813 - DNA, 83 bp, Homo sapiens
gagctatcggcgccgcggcaagagccagtgatcagggccaaagcggtcagtgagaaggaagtggactctggaaacgacattta

SEQ ID NO: 80814 - DNA, 100 bp, Homo sapiens
tctgaagttatgaagatgcaaagcctgagagatggaaactactatgcatgtaaacaaatgaagcagcgctttgaaagatgttcctcctgctgatcaagag

SEQ ID NO: 80815 - DNA, 90 bp, Homo sapiens
agcagctttggataatgacgacagcaacccgaagacagggaaatttaggtcttgggcgtctttggtactggcttttttaggggtctgcct

SEQ ID NO: 80816 - DNA, 75 bp, Homo sapiens
tcgacaccgaaaactccaccgtagcccttgccaaaggggaaggtgtggctcattgactttaatccatttggtgaa

SEQ ID NO: 80817 - DNA, 75 bp, Homo sapiens
gaggctctgcgacaagtacaaccgtgccatcgacagcatccaccagctgggagactcaggtggccccctgatctg

SEQ ID NO: 80818 - DNA, 111 bp, Homo sapiens
cactacatgcagcagcttcctgtggatatcttgatattgcagagttggtcaaagaaaaagtgatgtatgaaaaagaggcaaaacaacaagaagaaaagattgaaaaaatga

SEQ ID NO: 80819 - DNA, 98 bp, Homo sapiens
tggcccagaggacactgtaccgagaggtgacactggagacctgggagcatattgtctccctgggtgagggttcagagtatggtgccagtggagaagat

SEQ ID NO: 80820 - DNA, 100 bp, Homo sapiens
aaaatctacaagatgatgcagggaggaggctaaatagagtcccagcacctcctgatgtctgagctccatggggcacatgaggcatcctgaagcattagaa

SEQ ID NO: 80821 - DNA, 50 bp, Homo sapiens
agtccacactcccaaaagggaaaggcatatctttttcttgcacatcaagg

SEQ ID NO: 80822 - DNA, 100 bp, Homo sapiens
caagaaaaagacctgtggctattaagatagctatgctaagaaggaatctgatcttaatggcgcccagatcaagcttcgagaatatgaagcagcactgaat

SEQ ID NO: 80823 - DNA, 100 bp, Homo sapiens
acacattgaatgggccaaggaaaaatcgagcagaaagaatgtctttcagtggtgaactatgacaatgtagtggacacaggttctgaaacagatgaggaag

SEQ ID NO: 80824 - DNA, 100 bp, Homo sapiens
cagtgtatctaccgtcatcgtaaagattatgacaaatcacaacttgtagaggtcaatgagtggtcattgaagataagaaaggaaatgagagttgttgaca

SEQ ID NO: 80825 - DNA, 74 bp, Homo sapiens
gggagttcaagaagaacactccagagtgccggatggagtgctgtgatgtgccagccgagacactctacgacgtc

SEQ ID NO: 80826 - DNA, 88 bp, Homo sapiens
aggatgtcatcagactcttcaaaaagacaatagatgatttgctgcggtgtggaatttgcttcgagtatttcaacattgcaatgataat

SEQ ID NO: 80827 - DNA, 96 bp, Homo sapiens
gccggtgggtgagcggcggccacggcatcctgtgctgtgggggctacgaggaaaggtatccgctgatcattgacccctctggacaggccacagaat

SEQ ID NO: 80828 - DNA, 50 bp, Homo sapiens
agaacggaaaactcccaacttcctgctgtatgcaggagctattcttgaag

SEQ ID NO: 80829 - DNA, 75 bp, Homo sapiens
cttgatagctcaaatttgaaaacaacctttcaggtggtgatctttgtgaagtctgtgcagcggtgcattgccttg

SEQ ID NO: 80830 - DNA, 100 bp, Homo sapiens
cgactgggccggtgccatcggaaaccggagtgaccagaggagggacacgctcccaaaatggcgatgacaccggcacctggcccaacaaccagtttgacac

SEQ ID NO: 80831 - DNA, 82 bp, Homo sapiens
gagccgatcgccgcggggcagttcgggccggctgtcctggcgcggaaggagtcaagactgagaacaacgatcatattaattt

SEQ ID NO: 80832 - DNA, 100 bp, Homo sapiens
attttcgatagagacgttttccggagggattccatcataggttgacatcatggacatatgtgagtccatcctggagaggaagcggcatgacagcgaaagg

SEQ ID NO: 80833 - DNA, 90 bp, Homo sapiens
ggcggcggcggcgcgcgggggcgacgcgcgggaacaacgcgagtcggcgcgcgggacgaagaggaaaggccatgtgaggacacagtgaga

SEQ ID NO: 80834 - DNA, 89 bp, Homo sapiens
attttttgactgctctgctcctctatgctggacatcaaatttccaggcactactgcagtcttcagttaagcaacaagtagaagctattg

SEQ ID NO: 80835 - DNA, 88 bp, Homo sapiens
aggaatgggacctcgagtcactgtggaacaagtggtgatgaacttggacagcaggcttctgatcttccctttatatatctgctgtaac

SEQ ID NO: 80836 - DNA, 75 bp, Homo sapiens
ctggaacttcatcatcatctacttcacaggaattgccatttgtcaaaatgcagatcttcgtgaaaacccttaccg

SEQ ID NO: 80837 - DNA, 75 bp, Homo sapiens
aagctctggagacttgtggcggggacctcaaacagatagttttgtgccagaataatatccataatcaggcccata

SEQ ID NO: 80838 - DNA, 48 bp, Homo sapiens
agaagctgcagcggaggaaggcgagggtaaaggagctggaagtgcgaa

SEQ ID NO: 80839 - DNA, 88 bp, Homo sapiens
ctgctgggcagttggctggaggggctgctgctgggaacacctggagtctccgcgggcaggtctttcatggtgctgattcagacataga

SEQ ID NO: 80840 - DNA, 80 bp, Homo sapiens
tgctcctgtcgccttcgcctcctaatccctagccactatggacgagattgaggagctgcgggccgagatgctggagatgc

SEQ ID NO: 80841 - DNA, 100 bp, Homo sapiens
gcagccggctgtacgcacacaccatcgcaggtgacttaagagattaaaattaatttggttgctgttggttctgaacaaataatgagttcttttatttgag

SEQ ID NO: 80842 - DNA, 100 bp, Homo sapiens
gcttggtggaagacaaatcagaactaactgggcaacccgaaagcctcccgctccaaagagtacatatgagtgaacatttacagttcagttttatgatgga

SEQ ID NO: 80843 - DNA, 90 bp, Homo sapiens
taagagaaaattttctcctggtagacctcggtccaaacaggagggagcaaaggagtttgctgctgctctcaccgctgagcggataaagac

SEQ ID NO: 80844 - DNA, 101 bp, Homo sapiens
ctctgtaggaaggaacttggttccccctccctcagcttccgccccaaaagagagctggcggtcaccatggcaatgcgggagctggtggaggccgaatgcgg

SEQ ID NO: 80845 - DNA, 98 bp, Homo sapiens
aacaggtgaaaagaatggaaaactgtggtctccagatgaagaggtttcccctgaagtactagcaaaggtgtgatccctcacatccacaaatctctgat

SEQ ID NO: 80846 - DNA, 80 bp, Homo sapiens
gaactacgcacggccgcccacggttatcctggagcactgccagtgaaagatgtagaagataaacctgaacaacaaaccag

SEQ ID NO: 80847 - DNA, 100 bp, Homo sapiens
accaaacgtggttgtacgagacgtggcctgtggcgctaaccacacggatgtcctgacactgtccagcagcacagaaagtgagggggaaagtgggaccagc

SEQ ID NO: 80848 - DNA, 83 bp, Homo sapiens
ctacagaccctcacaagtcagttactgaaaaggagaggcgtttccatcaaccagttttgcaaggagttcaatgagaggacaaa

SEQ ID NO: 80849 - DNA, 90 bp, Homo sapiens
ggagtgcccaacatggcggcggccgtaaggtgcatgggtagagttgagaatgaaaatcattgcgattttgtgaaacttcgagagatgctg

SEQ ID NO: 80850 - DNA, 100 bp, Homo sapiens
cacagcccggaacactggcatcatctgtaccattggaaacagagcaaatgcagcgttacaatcaaagacttattgaggaattgaaaaacagacagactca

SEQ ID NO: 80851 - DNA, 100 bp, Homo sapiens
ttaaactattatacaggcttcatatccctccaggtccttccaaccctcctgctaccatgaagattgcagtgattggacagagcctgtttggccaggaagt

SEQ ID NO: 80852 - DNA, 99 bp, Homo sapiens
tgacttcacttttgagtgcaactgccttccaggttttaatataactgcaggagttgatgaagaaacaggatttgtttatggaggaaatcgtttcaattg

SEQ ID NO: 80853 - DNA, 85 bp, Homo sapiens
cggctccgtcgtggaagcaggactgcgccgcgtcttcctcaaggtacaccaggggttggaaaaaccacactaggcaaagaacttg

SEQ ID NO: 80854 - DNA, 100 bp, Homo sapiens
ccgcccccgccggttcgcgtctctctgctgcggcgcggggaccgctgtgctctcggcctgcaggagttgttccaggccccagacctgcgtgggatctccg

SEQ ID NO: 80855 - DNA, 83 bp, Homo sapiens
tggaaacctaaggaaaaacgtctgacctgcggaggtatataatctgtctcagaatattcaagaagatgatcttcaacatttgc

SEQ ID NO: 80856 - DNA, 96 bp, Homo sapiens
agaacaccatgactacaaaggagtgtttacatcgtttttgtgcagactgcatcatcacagcccttagaaggaaaagttaaccattggatgccgcca

SEQ ID NO: 80857 - DNA, 100 bp, Homo sapiens
gctgacacttcaggtgcttgattttgtgcaggatccgtgctttgcccaaggagatggtctcattaaggtccagcctgatgagtgaagaggctaagcgagg

SEQ ID NO: 80858 - DNA, 50 bp, Homo sapiens
agactgggacttggagcagcagtgacagtcagtcggatgcggagactgca

SEQ ID NO: 80859 - DNA, 100 bp, Homo sapiens
ggacaataacatccaattcactgtgggagaggagctcaaaagccaaaagtctctgagaacgactttgaagatctgttgtccaatcaaggcttctcctcca

SEQ ID NO: 80860 - DNA, 98 bp, Homo sapiens
tttcttctgacttgagcctgcagtgtgctgtgagagatctaccactagaggcgtagaggctccggtgttttttgtgccaattgcctgaccacaaagac

SEQ ID NO: 80861 - DNA, 75 bp, Homo sapiens
tggacgaaatgaggggctacgcggagaagcccatgcagaatgccaccaagtatggcaacatgacagaggaccatg

SEQ ID NO: 80862 - DNA, 75 bp, Homo sapiens
cccgcatcccccccggagccggatgagctcacagtgcctgcactttaccccagtagccctgaagtgtgggccccg

SEQ ID NO: 80863 - DNA, 50 bp, Homo sapiens
ctgcttagtatgtgtattcagacagtggcagaatgagaaatttagaaaag

SEQ ID NO: 80864 - DNA, 95 bp, Homo sapiens
ggcaagtggcagaacgtgcacttccactgctcgggcgcgcctgtggccccgctgcagtgaagcaatactggagtaaccgcttcctaaaccatttt

SEQ ID NO: 80865 - DNA, 75 bp, Homo sapiens
aggtcctggcgatcagcaccaagaacccactgcaggttagaaaatggatttctgactggaatctcaccactgaaa

SEQ ID NO: 80866 - DNA, 100 bp, Homo sapiens
actgtactatgacaaaagatggcttcctgcagaggtggatcctgtgacagtatttgcctcactttccccagagggtctgctgatcatcgaagctccccag

SEQ ID NO: 80867 - DNA, 80 bp, Homo sapiens
ctgggtttgaacggaatgctggagtcagtggaagacggagctggtcggcccgaaggtcatcatcagatttgaaatattta

SEQ ID NO: 80868 - DNA, 100 bp, Homo sapiens
agagagaagagggcagagccgtgcatggggctgctccccaggacctgagcaggaacctggagttttcagaacaggacgcaggccttgatgccctttcctc

SEQ ID NO: 80869 - DNA, 82 bp, Homo sapiens
cggcaagaagatcggctgcggcaacttcggggagctccgcctagggctgggttacgacccctacaaccctgagctgcccaag

SEQ ID NO: 80870 - DNA, 100 bp, Homo sapiens
tttgacaattcattttcctacagactaccccttcaaaccacctaaggttgatgacaacaagaaactaggagaatgggtaggcctttgtaaaattgacaga

SEQ ID NO: 80871 - DNA, 90 bp, Homo sapiens
aagattttgagggatgagacaagaggaccttgcccaggacagtcattttgtttactcattcagccctgttgcaggtcccaataaactctt

SEQ ID NO: 80872 - DNA, 74 bp, Homo sapiens
taacctggaccctgcagccctgacgctggtgtcccgcaagctggagtctattatcctcccagtccacaacgctg

SEQ ID NO: 80873 - DNA, 100 bp, Homo sapiens
ccggagcttctcagaagacagagggttttcttttgagtaagcactatcctttgtactccctcaacgtggcctccatgtggttgaagctagggagactcta

SEQ ID NO: 80874 - DNA, 112 bp, Homo sapiens
ggccttcaattttggggctccctcgggcacctccggtaccgctgcagccaccgcggcccccgcgggaacttagtgatttggcccgtgaccctccagcacaatgttctgcagg

SEQ ID NO: 80875 - DNA, 71 bp, Homo sapiens
ggggtttggtgggcggcccaccgggactcgccgttgtagagacggggtttcaccacgttggccaggctggt

SEQ ID NO: 80876 - DNA, 100 bp, Homo sapiens
aagaataagagtctggttgataccattaagtgcctaattcaaatgggagcagcggtggaagcgaagttccatgccattgcagtgtcaactaggcctcagt

SEQ ID NO: 80877 - DNA, 50 bp, Homo sapiens
tccagaacttgcagcaacaataggtgttaaaaagtaatcgaagtacgaag

SEQ ID NO: 80878 - DNA, 90 bp, Homo sapiens
gctattcttatagaaaatatggatctttacatgttgaatccttgcagcactaaaatttggcgcagttgtgtagcagttgagtaatgctgg

SEQ ID NO: 80879 - DNA, 75 bp, Homo sapiens
gcagaaagcaggcgaacccgcggcgcaataacggcgagaaccactgtctctgatcaacgtgcggaagaggaacgt

SEQ ID NO: 80880 - DNA, 75 bp, Homo sapiens
gcacttggaacatcagtgccaggttggcattggaaacatttttatttgcagttattttgtctacttttactactg

SEQ ID NO: 80881 - DNA, 76 bp, Homo sapiens
tgatctacctaccaatcgtgaaaactatattcacaggaaacaaagcttagcaggagaggagagccagagaagtgac

SEQ ID NO: 80882 - DNA, 100 bp, Homo sapiens
ctgcccttgccagccagactctgggtcgcccttgcctgcagaggaggtatcgagaaccttccctgcgaacttcagaggaacttccagctgatgcgagagc

SEQ ID NO: 80883 - DNA, 100 bp, Homo sapiens
agaggaccaacaagttcatcaaagagctcattaaggacgggaagaacctcatcgctgcgacgaaaatggtagtcgctcttctaaaacttttaaaccaaag

SEQ ID NO: 80884 - DNA, 90 bp, Homo sapiens
gaagatcatccgcaaggaaataccagccaaaatcatttttgaggatgaccggaaaaggcgacggcggattgacagaagtatgattggaga

SEQ ID NO: 80885 - DNA, 96 bp, Homo sapiens
gtcaaagaggaaacacttgttgaagcatcagtcccctgaaaagcaaaggcctcatctccatggcacaggtgatgaaacaggaagactgaagcccag

SEQ ID NO: 80886 - DNA, 98 bp, Homo sapiens
ggagcctgtcacatcaccatggagttgcccagcaggaggctgaaatgttcaaacgctacaatggaacatttccattacctggaatacaccaaagtcaa

SEQ ID NO: 80887 - DNA, 82 bp, Homo sapiens
agactgccaaggaacagggaatccattctttggaaggtcaaagaaatggcagatgtccttaacccattaatcactgcagtat

SEQ ID NO: 80888 - DNA, 100 bp, Homo sapiens
tgagattcggtaacccccttctggtccagcaactagaagccatttgtgtcaaggtaacgtctggagaaacaaaaggtcaggaaaggccaatgctcctacc

SEQ ID NO: 80889 - DNA, 90 bp, Homo sapiens
taccattgtgaaagaaggttgggttcagaagagggtattgaatttgaccgggattgtgactattttgcgattgctggagttacaaagaag

SEQ ID NO: 80890 - DNA, 65 bp, Homo sapiens
attgtcttgcatccagacacagagcattctaaagatcttaccaatatatttgagtccttcctgcc

SEQ ID NO: 80891 - DNA, 100 bp, Homo sapiens
cttagttgatgatttagttgattctctgaaggaagcccatgaaacctttaatgagtggtttaagcatatgaattcagttccacaaaaacctgctttgata

SEQ ID NO: 80892 - DNA, 82 bp, Homo sapiens
tggctcggagcagcagcctctgagtttttggtgttgagccagacttgaccagggaaggcggcagtattcccgtgaccttgac

SEQ ID NO: 80893 - DNA, 100 bp, Homo sapiens
tgtagtgggcggccagagcgccggcaagagctcggtgctggagaacttcgtgggccgtttggcaatgaggagcagcagctggcgtgggccaagcgggaga

SEQ ID NO: 80894 - DNA, 101 bp, Homo sapiens
cggagctctggagaaacatgaagttcgggactatcttctggcaacctgtgaaaagctgaacaggtccaattctgaacttgaggatgaaatactctgtctag

SEQ ID NO: 80895 - DNA, 100 bp, Homo sapiens
cagagttcagtggtggctggcaccgcccgattctcatgccggtgcccccgtggcttccgagatgtttggtcagctggctgtgtactggcagagctcctct

SEQ ID NO: 80896 - DNA, 100 bp, Homo sapiens
tcatcctactacccaaggatgtggaggatgagtccacaggcttggagaagctacaaggctttggccgaccaagtgtgtaccatgctgctattgtcatctt

SEQ ID NO: 80897 - DNA, 88 bp, Homo sapiens
gcccctgaggggggctttgatgcagtactccaggcagccgtctgcaagaaccagacgtcctgggtcctctccagcatggcagccctct

SEQ ID NO: 80898 - DNA, 98 bp, Homo sapiens
gagagccctgccaggatgtggagtggacttcctagcagagcatcagcgagagctttctaactgtcaaaggtgctgccctttttctaccacggggaaat

SEQ ID NO: 80899 - DNA, 100 bp, Homo sapiens
aagtccagagctgaggactgcctgtttgcagaacccagcgggtgccgcttctccacccgaggcttccacctccaacgagccatgttccaggctgcaggag

SEQ ID NO: 80900 - DNA, 87 bp, Homo sapiens
aaagcagagagtgctcggctcttcagaatgtggtatagctttgaccacaaatttaagcaatgttgtcctttttggtgcatgtattga

SEQ ID NO: 80901 - DNA, 75 bp, Homo sapiens
ataatctgtctcagaatattcaagaagatgatcttcaacatttgcaagaccctgatgctcccataagacagaaaa

SEQ ID NO: 80902 - DNA, 101 bp, Homo sapiens
gggacggccggttctacatgaaggaggccatccagctcatcgctcgcatcgctgccgccaacggggttatacattggctcttcaaagacgttcacctcatc

SEQ ID NO: 80903 - DNA, 83 bp, Homo sapiens
ctgctagagccgagcgaagcgtaactaggatttctacctcaaccgcgagacctatgcaaggacggtgtggaccaactcgcgcc

SEQ ID NO: 80904 - DNA, 83 bp, Homo sapiens
atcgaaggtgccaaattcatcatgggggactcttccgtgcaggtcggagaccatgagaaacagcgtcaaatcatcttttcatg

SEQ ID NO: 80905 - DNA, 74 bp, Homo sapiens
cccaatctcctttctgggcaaacgttccaagaatggagatttacagacagtcatctgggtggaggacacccttt

SEQ ID NO: 80906 - DNA, 100 bp, Homo sapiens
agaggcggcgagaggcgggctgaggcggcccagcggcggcagtaagactttgaccccgacgcaggcttcagtgattgccgcggatcagaagcctgagcac

SEQ ID NO: 80907 - DNA, 97 bp, Homo sapiens
caccgggtgagctcaccgcccagcccaaaccaggagattgcgagggagcgatgcggtgcagcgcgtttctgtgtttgaagaacatacgcaccttcct

SEQ ID NO: 80908 - DNA, 100 bp, Homo sapiens
tggaggacatctgggggccacaaatgctccttctcctggagacgcaactcaagatctctctggcatggctgaaaggaagacccagccgagcatggtgagt

SEQ ID NO: 80909 - DNA, 75 bp, Homo sapiens
ggaggacgggctcactgccatggtgagcgggggcggggtcaaaatgtgggtacagctcctgattcccaggataga

SEQ ID NO: 80910 - DNA, 104 bp, Homo sapiens
aaaagaaagaccttcatcacagcaatggagaagagaaagcacaaagcatggagaccctccctccaggtgatgatgaacagtctacacagatggctgcaagttgg

SEQ ID NO: 80911 - DNA, 101 bp, Homo sapiens
ttattgctgtgcacccacatttcgtgagatccagttgcaagcagtttgtgaccggagggaagaagggatatctgtgtttgccttacatggcattgcagcag

SEQ ID NO: 80912 - DNA, 82 bp, Homo sapiens
cacaagctgcacttcctgcacaggaagacaactgttagttttgtggcttactgctgctccacccagtgtctgcagacttttg

SEQ ID NO: 80913 - DNA, 75 bp, Homo sapiens
cacccgtggaaagtacaggtcctgacagctggtactgctataaccagaatttggtagaaaaaggatttacttgtt

SEQ ID NO: 80914 - DNA, 115 bp, Homo sapiens
cgctggtggtgcaggcgctgcgccgcaacgccgagcgcaccgacatctgcctgctcaaagatctacgcagaccccaccaagaggctggagctgtacttccggcccaaggacccat

SEQ ID NO: 80915 - DNA, 76 bp, Homo sapiens
tcggtgtctgctgcgttcacggcaggattcggttagagtacccaaaggcaagtggaacagctctaatggggttgaa

SEQ ID NO: 80916 - DNA, 100 bp, Homo sapiens
aaaaccctgagaaaagatacaatgtcctgggagctgagactgtgctcaatcaaatgagggataagcacattgaagaagtgcggaagaacaaagaatccaa

SEQ ID NO: 80917 - DNA, 96 bp, Homo sapiens
tggtttttcaacaagttggagtaagcatgcaatcgatcaatgtccgagttaccaccatggatgcagagctggagtttgcaatccagccaaatacaa

SEQ ID NO: 80918 - DNA, 82 bp, Homo sapiens
ccagaacccaggcccacggaggaagagccgggcagtccctggagcgggccagactgtggtacagacctccatgagccggtcc

SEQ ID NO: 80919 - DNA, 82 bp, Homo sapiens
caggcaagctgctagctcagagactttttggggcctctttagaaaaggaactaagcgtcttgtagaaggaactattaatcca

SEQ ID NO: 80920 - DNA, 75 bp, Homo sapiens
aaggtcctagatactgtcatccccgtgtggctgaatcatgcaatggaccagatctttatggaaaatgtaggtgca

SEQ ID NO: 80921 - DNA, 100 bp, Homo sapiens
agagaaaccgaagtcctcaccactcaacagtcaaagtgaagcagtcacaatatggagcttccgtttctgccaagcctgaactacccctcttttacactcc

SEQ ID NO: 80922 - DNA, 83 bp, Homo sapiens
gcgaaggcgtctccctggcagagaggggcagttttggagccatggtgagaagccctaccactgcaactgggacggctgcggct

SEQ ID NO: 80923 - DNA, 60 bp, Homo sapiens
gtgagaagggtgttgcagttcttcaggagagaggaagtggagccagaatccacagatgtc

SEQ ID NO: 80924 - DNA, 75 bp, Homo sapiens
tatgataataaatgggtcagcattttctcctccgatgggaaatttaagtgtaggtagaagtttagcactgcagtc

SEQ ID NO: 80925 - DNA, 90 bp, Homo sapiens
tcatgagcgacagcggcgagcagaactacggcgagcgggtttaagaattgtttaagctgcatcaatggagcacatacagggagcttggaa

SEQ ID NO: 80926 - DNA, 75 bp, Homo sapiens
gtgagacagatcaagatcaagaccggcgtggtgaagcgctatgctaagaaggaatctgatcttaatggcgcccag

SEQ ID NO: 80927 - DNA, 74 bp, Homo sapiens
agctgcccccgcaggcccacggtctcggcgtagacggcgatcagtgggtgaccgcggctgcgagggactttgtc

SEQ ID NO: 80928 - DNA, 100 bp, Homo sapiens
gcggcaggggatggcaagatagcggcgcgggagcgtacccaacatggctgacaaggccaagcctgccaaagctgccaacaggacgccccccaagtccccg

SEQ ID NO: 80929 - DNA, 75 bp, Homo sapiens
gacaggaattgagagtcacagaggaaggacagtggagtctggcatcttattggatattatggggatggattaaat

SEQ ID NO: 80930 - DNA, 100 bp, Homo sapiens
gtccaaccaaacagccgattggagacgggagccaaccagggctgcattggaggtatagtggaagaataccagcttccttatcatgacctagtgcccagtg

SEQ ID NO: 80931 - DNA, 98 bp, Homo sapiens
ctgataacactgcatgaaatgttagagggagtgaactactttatgtccaagggtatcctggatgattcgccaaaggaaatagcaaagtttatcttctg

SEQ ID NO: 80932 - DNA, 96 bp, Homo sapiens
gcaacagggttgcaaactgtcttccagctcccctcccacccggtcactccgtccagcaagcacgcagacagcaagcccgcgccgctgacgcccgcc

SEQ ID NO: 80933 - DNA, 90 bp, Homo sapiens
tgcgggcccgggccatggccgccgccgatgccgagatttgaagttcctgaataaccacatcctggtgaaagacgctcaggagaaggccaa

SEQ ID NO: 80934 - DNA, 75 bp, Homo sapiens
cctcccgggctccgggaaaactacactggccaggtactggctgtgatcgaacttctcaaccctcagagacttaga

SEQ ID NO: 80935 - DNA, 82 bp, Homo sapiens
gacggcgagcgcgagcggcgcgagaaaatagcagactccttgaaagcagggtccttgtttagtgcatctttgcccacataca

SEQ ID NO: 80936 - DNA, 100 bp, Homo sapiens
tatgatgatgacctggatttgacacctgaatatttgttccccctgaaggcggagcgtgaagtaaaagcattggcaaaacttgatcatgtaaatattgttc

SEQ ID NO: 80937 - DNA, 50 bp, Homo sapiens
ctgccagtgtcagcatcaaccagacaggtcgctcaagccctcagttagac

SEQ ID NO: 80938 - DNA, 75 bp, Homo sapiens
gtgctgggaggcccggccagctcgatcgcaggcttccacctggcggccagttggaaaggtactttgttgggtgtt

SEQ ID NO: 80939 - DNA, 90 bp, Homo sapiens
gcccggccggagctgggtctggagacgccgtggcagcctgaacggagtgtgcgacggattgggaggcaatctgaaggcaaatcctgttta

SEQ ID NO: 80940 - DNA, 75 bp, Homo sapiens
gccaagctatccacaagtacaatgcttacaggaggagatgttaaagtaacccatcttgcaggacgacattgaaga

SEQ ID NO: 80941 - DNA, 75 bp, Homo sapiens
gctggtctctgaggtctggcataagaaacggaggaacatatgcagcagaaaaaagaggaggaagaagttcttaaa

SEQ ID NO: 80942 - DNA, 100 bp, Homo sapiens
agaagggttgccggctgctggctgtatgggagtttgtgtttggcggtatggcccatctcctgtacgcttggagcgacctttggctacgtggctggccttg

SEQ ID NO: 80943 - DNA, 74 bp, Homo sapiens
catgctgctacaatacggctaatctttcattgggaccgaaagcaaagcgggaaagagacatgcgaatgggtggc

SEQ ID NO: 80944 - DNA, 100 bp, Homo sapiens
caactccaatgggcctttccagcccgtggtccttctccatattcgaggagacccgtgtacagtatcatctcagttggagttagaagaagcctttagactt

SEQ ID NO: 80945 - DNA, 100 bp, Homo sapiens
tcaagccgctcttccccacctgcccggtgcccgaggaggcagccaagctcgtagcctgccactccgtgccagcgctggagagcgaggtggcttcaataag

SEQ ID NO: 80946 - DNA, 83 bp, Homo sapiens
atcccacacttctcagagctgcccctggacgaccaggtcatcctgctgcgggcaggaaaatatataccatgatctacaggaac

SEQ ID NO: 80947 - DNA, 100 bp, Homo sapiens
gacctattatgagaggcttccatatcggcagtcgatgatgtgaagaaaggttacatcaaagcagaagaaaagtcctatcaattacagaagctatacgaac

SEQ ID NO: 80948 - DNA, 74 bp, Homo sapiens
cgccgcagacacgggacccgcttcgaggccgctttggcgccaaatcctgagatgaacgatgtgctcctgtacac

SEQ ID NO: 80949 - DNA, 82 bp, Homo sapiens
cgccatcttgtgggagcaaaaccaacgcctggctcggagcagcagcctctgagatcatgagcgtcttgttgttcatcgagca

SEQ ID NO: 80950 - DNA, 74 bp, Homo sapiens
aatggagccgtgcaggggggcggagcctactagaccctgtcaggccgtggggccccgggggactatgaggagat

SEQ ID NO: 80951 - DNA, 75 bp, Homo sapiens
gcgggcctgtcagttatcgggtgtgaccgccgccgcccaggggcttcaagaagcgtgcacctcgggcactcaaag

SEQ ID NO: 80952 - DNA, 97 bp, Homo sapiens
gggcggcgcgccgcagctgcccaggccggaccgggccgggcgcccgcagcgtgaagcctctgcgggccttcttttcgtcttatttgaagtcattgcc

SEQ ID NO: 80953 - DNA, 80 bp, Homo sapiens
cttgtttgtggatcgctgtgatcgtcacttgaccaaactagagtcagaacgaatactagcatcagtggggaagaaacctc

SEQ ID NO: 80954 - DNA, 76 bp, Homo sapiens
ggggaggaagataatgcagccataagcgagaaaatttgtggaaagggaactgttcaaacccgatgaggtacctgaa

SEQ ID NO: 80955 - DNA, 50 bp, Homo sapiens
tccatgtttggtaccaagatggaacaggtgctggagaatctggtaaaagc

SEQ ID NO: 80956 - DNA, 75 bp, Homo sapiens
gggacaaccagtgggtgggctttgatgatgtggagagcttcaaaaccaagctagtaactgcacagacccatctga

SEQ ID NO: 80957 - DNA, 76 bp, Homo sapiens
atgtgaagatacataagatcgtagccagacccccaggttggatggcaagcatgtggtgtttggcaaagtgaaagaa

SEQ ID NO: 80958 - DNA, 50 bp, Homo sapiens
ctgctcagagtctcaatgaacttgtccctacagatgaagaagatgaaatg

SEQ ID NO: 80959 - DNA, 75 bp, Homo sapiens
cgaccgagggactgggagtcgttagtgagacttccaccgctgtcagaaggcaatgaccgctaaaggaggcgatat

SEQ ID NO: 80960 - DNA, 51 bp, Homo sapiens
ccttcagtcaagaccctccagcttgcctgtttaatagactacaacttccac

SEQ ID NO: 80961 - DNA, 74 bp, Homo sapiens
gtttgaggataactgacttaaaatctggatcgaaagctgctttgcgtcgcagttggagcagcacccccaccgca

SEQ ID NO: 80962 - DNA, 50 bp, Homo sapiens
tgctgtcacctcgaatgagcaggtcaaggccatgggtatcaatgatctgc

SEQ ID NO: 80963 - DNA, 100 bp, Homo sapiens
aggacacacagagtattggtcctaaagtccagagacagagcactaattaggcttctccagggaaagtgaccgaggcagtgaaagaggccattgacgcagg

SEQ ID NO: 80964 - DNA, 100 bp, Homo sapiens
tggagctggagctctcggaggctgtattcttcaggacttgtggaatgtgaggatcaggatccacttaatcctgatagaagttttgatgtggaatcagtaa

SEQ ID NO: 80965 - DNA, 88 bp, Homo sapiens
agccgtgcatggggctgctccccaggacctgagcaggaacctggagttttcaggagaagttgccccagtgcaaggcactgcattcgac

SEQ ID NO: 80966 - DNA, 82 bp, Homo sapiens
ttagcgcactggaggagcggcgggcttcagacaggtgccagaaccctgtggagcatcatgaactgggaagagtagctgagcc

SEQ ID NO: 80967 - DNA, 111 bp, Homo sapiens
tcatgatattgtacgatttctggtacagttagatgactacagggtgatgaattagaagacaatggaaagaatttctacgaatctgatgatgatcagaaggaaaagactgac

SEQ ID NO: 80968 - DNA, 51 bp, Homo sapiens
gcaaagttgtttattcctacaaggaaatagttgacaaacagggacatacca

SEQ ID NO: 80969 - DNA, 98 bp, Homo sapiens
aaaatttcaggtcttaaatctgaatacactttcagacttgatgttgaagaaggagtgggaatcccccgaatacctgtacatcccattggatataatga

SEQ ID NO: 80970 - DNA, 97 bp, Homo sapiens
tgtgcatagccaagaccttctcctaccttcgggaatctggacacaactcagatgggaagttcatcgcccgggcacagcggatagagtacgactgtga

SEQ ID NO: 80971 - DNA, 50 bp, Homo sapiens
tgcctggataccttcgaatagggtggacccaagtggagagattgtggaac

SEQ ID NO: 80972 - DNA, 90 bp, Homo sapiens
aagaactgaccagagctgatcccgagcagcgtcatgtacccctctctgcttatgataatgtcaacaaagttcgagtagctatcaagaaaa

SEQ ID NO: 80973 - DNA, 90 bp, Homo sapiens
gagctgggccctgggccagaggcagaaaacggacggaagaaaaggtctggccggaaagaccacagcaagattctttcattcgtctcctcc

SEQ ID NO: 80974 - DNA, 82 bp, Homo sapiens
gtttctcatctttatactcttccagtctcacagaaagttctccgctcccagacatgggtccctcggcttcctgcctcggaag

SEQ ID NO: 80975 - DNA, 50 bp, Homo sapiens
cttgacatcaaccagttactatttgacgggctcatcttcgcttgtgcctg

SEQ ID NO: 80976 - DNA, 100 bp, Homo sapiens
cgcgtgggcccagccagcaaggagaagtctaacaggcaggaggaggggagacacaaggagcccccgcaatgttgaaacatttgtagcagatatactgaaa

SEQ ID NO: 80977 - DNA, 82 bp, Homo sapiens
cctcgcctttgccgatccgccgcccgtccacacccgccgccagctgcatcttcctcccgtgaggctggccgagctccacgct

SEQ ID NO: 80978 - DNA, 104 bp, Homo sapiens
gaagattccaagttcaggagaactcgaccgctgcttttctaacccaaactgtatgtcttgatgacactacagtaaagtttgaaatatgggatacagctggtcaa

SEQ ID NO: 80979 - DNA, 97 bp, Homo sapiens
tgtgtagtgtgctgcagcataagatggaagaacttaaagaaggcctgcggcaaagagatgagcttattgagattgtgttcagtgtggacccctccga

SEQ ID NO: 80980 - DNA, 99 bp, Homo sapiens
ttgtacttgttatggaggaagccgaggttttaactgcgagagtaaacctgaaggtgtgatgaatgcagactctgctaccattttggctgtttggatcct

SEQ ID NO: 80981 - DNA, 100 bp, Homo sapiens
tgattagtccacagtcttcctctatagtcaaggatgctatctaaatgggccttttaattcaaatctactgactatcccgaagcaaaggtcatcttctgta

SEQ ID NO: 80982 - DNA, 50 bp, Homo sapiens
cagcagctgattacaagattttaggtggctgggctacctgggcctgctgc

SEQ ID NO: 80983 - DNA, 51 bp, Homo sapiens
ggagaccaagctcaaacccctccggaagggatgtgtttggccaaatgggag

SEQ ID NO: 80984 - DNA, 100 bp, Homo sapiens
gcagaactgaacgccatcattgggaattatttcctaacggatgttcagcgttcaagaaaattactcccaatatagatgaagaaggagcaatgaaagaaga

SEQ ID NO: 80985 - DNA, 98 bp, Homo sapiens
tgtattggacgagtcttggattcgtgaacagaccacagtggaccacttctgggcgggcagttgcaggagatgcctctgagtcagcactcttaaagtgc

SEQ ID NO: 80986 - DNA, 74 bp, Homo sapiens
ctggaactgggagaagatggctttaaagaatacacttcaatgaaagcccctcagggaaaaaaccagaagtcctt

SEQ ID NO: 80987 - DNA, 82 bp, Homo sapiens
gactagaaagagacataggatggtggccgaacccccaggcacaagtgatccttatgtgaaatttaagctgaatgggaagacg

SEQ ID NO: 80988 - DNA, 131 bp, Homo sapiens
gaccggttcgtcgcctccttgcccgtgaccgtcgctagaactcagttgtgcgttgcggccagtcgccactgctatccttatgtgaagattcatctgatgcagaatggtaagaggctgaagaagaaaaagac

SEQ ID NO: 80989 - DNA, 100 bp, Homo sapiens
agaatctccaggagtaaggagaaaaagagtttccccagtgcctgttagcactctacgtatatgaatatctgctccatgtaggagctcagaaatcagctca

SEQ ID NO: 80990 - DNA, 89 bp, Homo sapiens
aggagaggaggtgaccccgcgaaaggtcctcgatgggcttcctggaatattggtgtgtttatttgcatcagatgtgctggaattcatag

SEQ ID NO: 80991 - DNA, 75 bp, Homo sapiens
gaactagcaggccttacggtggccaatgaagcagactcactaacttatgatatttcttcgcaagactatggaaag

SEQ ID NO: 80992 - DNA, 100 bp, Homo sapiens
agaagacagagggttttcttttgagggatttgtatcgttgtgcccgtgtcagctcctggggagatcttttacctgtgcttactccgtctgcgtttcctcc

SEQ ID NO: 80993 - DNA, 75 bp, Homo sapiens
gggaaagctctctggggcagggtggttttagaaatttgcacactattgttctgggagcttgcaaaaatgctcttg

SEQ ID NO: 80994 - DNA, 75 bp, Homo sapiens
gcggtgggccccagccccacagaccagcccagcattcaggtctttactcacctggagacctgtggcccactccgc

SEQ ID NO: 80995 - DNA, 99 bp, Homo sapiens
atactttcttatccctttgacacagttagaagacgtatgatgatgcagggcctgtatatcattgggatcaagaactcgagccattggaaatgcagcaaa

SEQ ID NO: 80996 - DNA, 96 bp, Homo sapiens
ggtcacagtaaggccaaaaatgtgcatactcacagagttagagagagggatggtgaccggagtacactgggaagcatcaaagaaggaatcttgaaa

SEQ ID NO: 80997 - DNA, 75 bp, Homo sapiens
cccaccttccaccggaggtgctactggctccttcagggaacgatcagcgttggagtagatgccaccgaccttttt

SEQ ID NO: 80998 - DNA, 95 bp, Homo sapiens
ggacagcagattttggtttaatatctgattgggacaacattcagacccatttccagtcatgagacagttcgtgtttggttaaagagagacagtgg

SEQ ID NO: 80999 - DNA, 96 bp, Homo sapiens
gctatgatggagactttgtctttgatgactcagaagctattgttaacaataaggacacttcacggccatggtatggaagaacaccaagaagatggg

SEQ ID NO: 81000 - DNA, 82 bp, Homo sapiens
ggatggcatcctctaccagcagcatgtcaagtttggcaaggccgtccagcatcaaacactagcctccacacgtggaaaagac

SEQ ID NO: 81001 - DNA, 141 bp, Homo sapiens
ccaattctggagaacagcctcacttctttgattgaatacttacataatgcattggaacatgacatgagattaaggttgatgacaacaagaaactaggagaatgggtaggcctttgtaaaattgacagagaggggaaacccc

SEQ ID NO: 81002 - DNA, 100 bp, Homo sapiens
caaaaaaaccagagaggaaaacacaaaaaacaggataaaatcttatgattatgaggcatgggcaaaacttgatgtggtttatggctacaaatgatttgat

SEQ ID NO: 81003 - DNA, 100 bp, Homo sapiens
ccagcaccagcacacctgtgaccacagagcactgtccagagcttcctccagtggacaatagcatatttgtcgcaaaggaggtggaaggacagattctggg

SEQ ID NO: 81004 - DNA, 82 bp, Homo sapiens
cccacgcaaccccagatccatttacactttacaggtcaatgtctgtggagggcggtgctgtcatggctggagtaaggcccct

SEQ ID NO: 81005 - DNA, 83 bp, Homo sapiens
gccgctctgggatcccggccaccagcaattgtccggagtacttctttgattccagagtattaacagatggagaactggctccc

SEQ ID NO: 81006 - DNA, 100 bp, Homo sapiens
gctcaaagctgctgccgccccttgggctaaaagctggtgctcaagaccgaatcggctgggcttttggcctaggattagaaaggctagccatgatcctcta

SEQ ID NO: 81007 - DNA, 100 bp, Homo sapiens
ggaggaaggaacgaggcaaggagctaaagcagcgtgcgttcagccctggggtttgcctgcaatgagatttcattctctacatttaaaggacatcctttct

SEQ ID NO: 81008 - DNA, 80 bp, Homo sapiens
agtcccctgtgtcctcttctggtatgaagtgtaacagaacagactttaccacctgaaactgctgcttcaagttcagatca

SEQ ID NO: 81009 - DNA, 100 bp, Homo sapiens
gtggaaaggatggcccccaaaatcgacgtaattaacacattccagacgggagcctcttttaagggagtcctaaggcgacagaacatgggtcaacaccttg

SEQ ID NO: 81010 - DNA, 98 bp, Homo sapiens
ccctttctgtttatagaagtgtcaagaggctaggtattcctgacaggttgctgcatctacctttatccctgactgccttgaagttgaaggctctgtgg

SEQ ID NO: 81011 - DNA, 75 bp, Homo sapiens
ttgcaggaaaacaagctcagggcttccactgattctacattatgtccccctctacacaagaatctggatgcacga

SEQ ID NO: 81012 - DNA, 50 bp, Homo sapiens
aacagaccccacagatggaagcattttgatacaggtatccccgtttttac

SEQ ID NO: 81013 - DNA, 100 bp, Homo sapiens
tccccctgctgaaggccagaaagtgcatcctggcgggcgatcacaagcagctgccccccaccacagtctctcacaaaatcacggtcactttcaacattaa

SEQ ID NO: 81014 - DNA, 75 bp, Homo sapiens
ccaccgcacgttcagaagtcgggtcaccctgctgattgccttcatctgtgtgcggagctccctgtggaccaacta

SEQ ID NO: 81015 - DNA, 82 bp, Homo sapiens
cccggctgccggtcgacgaccgccccgcgtcatgcggctcctcggctggtggaaagatgaatgggagggctgattttcgaga

SEQ ID NO: 81016 - DNA, 100 bp, Homo sapiens
ggcgcgcggaggggaaatggctgccgaaaacaagccggaagcccgagaccgaggacgagaagaagcgctttgaggaaggcaaagggcggtacctgcagat

SEQ ID NO: 81017 - DNA, 80 bp, Homo sapiens
atttaccaccaatgggaacatgcacaggttattggagtgatgagtaaagaatacataccaaagggcacacgttttggacc

SEQ ID NO: 81018 - DNA, 83 bp, Homo sapiens
ctcaccgagacggcgatccgggcgctcgagacttaccagagccacaagacaaatttacatgtattggagaccagaccagaagc

SEQ ID NO: 81019 - DNA, 75 bp, Homo sapiens
tcagctcccaatgtgcatataaacacaatagaacctgtcaatattgatgttgcaaaagcttctcatttcagagag

SEQ ID NO: 81020 - DNA, 83 bp, Homo sapiens
aatgtaactacactgaaagatgatggggacatatctaaacagcaggttggattatctcaagatgcccaggatcaaatgagaaa

SEQ ID NO: 81021 - DNA, 82 bp, Homo sapiens
ccagcagatggcggatgccctgcagtacctgcagaaggtctctggagacatcttcagcaggaaaacgaagccccctcctgta

SEQ ID NO: 81022 - DNA, 76 bp, Homo sapiens
tggggagattggacaagtatgctgcaagtgagaacatatttaacaggcaaaggaaggatgaactggagcagaggat

SEQ ID NO: 81023 - DNA, 83 bp, Homo sapiens
caaagatccccgttcctggagattctgattgagtgccctctggtggtcagaagatgctgtgctgtctcgttaggatgaatgga

SEQ ID NO: 81024 - DNA, 101 bp, Homo sapiens
tgccaccctgagtgtcagccccagaatggctcagtgacctgttttggaccgcaagtgcggaggcaagacacatcaaagcagagatgggaagtgaaagagct

SEQ ID NO: 81025 - DNA, 100 bp, Homo sapiens
ctgagtactcaacatattgactgtatttgggctgcagcacaggacatggatttgattgacatactttggaggcaagatatagatcttggagtaagtcgag

SEQ ID NO: 81026 - DNA, 74 bp, Homo sapiens
agcaaccagctctccatgcagtgtgtcaaggatgatgaggttgcgaggggcggtgttgaagaatgtgtgggcga

SEQ ID NO: 81027 - DNA, 75 bp, Homo sapiens
cacctccgagcgcaaggacagcgcgaggtccgcgcagcccagcgcagccatgaatcccttggcaccatgtcctgt

SEQ ID NO: 81028 - DNA, 88 bp, Homo sapiens
ctggggttcttttgacctgagggctgctattgtatatcacactaaaggccaagtcctgtatctgccatgtctgtggcgtccacctcaa

SEQ ID NO: 81029 - DNA, 100 bp, Homo sapiens
tcaaagaaagaaacaagttcttggcaagagaggcatcctccttgaagtatttggctgaggagttttcaatcccacctgattacatcaaccccagagccgt

SEQ ID NO: 81030 - DNA, 98 bp, Homo sapiens
ttcagtcacaacagatgaagacagcaccaggttccaaatcatcaatgaagcaagtaagttgatggagaaccttgtgacctgtctttgaatataacctg

SEQ ID NO: 81031 - DNA, 100 bp, Homo sapiens
gggcagacacatcgaggcccatcgcatcctgctggctgcgtcctgcgattacttcagccgactccacgggaacccactccctctacacgatgtaccagga

SEQ ID NO: 81032 - DNA, 51 bp, Homo sapiens
caggatagctgttgtttcagagaaaggcatagaatgtcaagctaaccaggc

SEQ ID NO: 81033 - DNA, 74 bp, Homo sapiens
gggcaacttcgctgtggtgaagctggggcggcaccggatcaccaagacggagatatggaatgtgcagatgtccc

SEQ ID NO: 81034 - DNA, 100 bp, Homo sapiens
ggcggcgcgcgaggtcaagctgctgctgctcgatccttatgtgaagattcatctgatgcagaatggtaagaggctgaagaagaaaaagacaacaattaaa

SEQ ID NO: 81035 - DNA, 87 bp, Homo sapiens
gtggtcacagaagtctctaccaatggtgcttcagaagtttcatactttcaggtagaacaatctccatctagcagcaaactgaaagta

SEQ ID NO: 81036 - DNA, 100 bp, Homo sapiens
cgttgctgggcctcgccgctgctgccgtcgcggcttcctgcctgacacagctcacttcaagaagtgcacaatgtcagaacgtggaattaagtgggcttgt

SEQ ID NO: 81037 - DNA, 75 bp, Homo sapiens
cctttaatccagtgactgtcaggtcgatcatatgaaagatgaatgggagggctgattttcgagagccgaatgcag

SEQ ID NO: 81038 - DNA, 100 bp, Homo sapiens
gtccttcactgggagcactcaggtgggaaaacaggtgggcctgatggtgcaggagaggtttggggagccctggaagcttatgttcaatcagtgagaagta

SEQ ID NO: 81039 - DNA, 100 bp, Homo sapiens
gggagcggcgttggaggccaccgtttccagcagccagacccggtccgtttggaatgcctgggatggtgccgccgcatgttcctcctcagatgctcaacat

SEQ ID NO: 81040 - DNA, 100 bp, Homo sapiens
ccttcaccttccttcatgatggctctctttttgcctgctgccatccatgtaagacgcgacttgtttctccttgccttctgtcatgattgtgaggcttccc

SEQ ID NO: 81041 - DNA, 83 bp, Homo sapiens
cgtgtccctgcagcgaaggatcctggttggtaagtaaggaggtctctgtaccatggctcgtacaaagcagactgcccgcaaat

SEQ ID NO: 81042 - DNA, 75 bp, Homo sapiens
caccaactacctgcagccgcagctggactggcaggcccgagggcgaggtttattgggcacttcctagcaccaggc

SEQ ID NO: 81043 - DNA, 100 bp, Homo sapiens
gccacttcttctgggcccacgaggcagctgtcccatgctctgctgagcacggtgatgagacaccaattattgcggtgatggtggccctgtcctctctgct

SEQ ID NO: 81044 - DNA, 100 bp, Homo sapiens
ggagcccttaatgcctcagaaaccacacccaaagctctggaaaggaagagaaatggaagtgagaaagttgagcatttcctggcagttcttgatagttctg

SEQ ID NO: 81045 - DNA, 82 bp, Homo sapiens
gggccagggaaccctggtcaccgtctcctcagcgagggcggcactgctcacaggacggctacccatccgcaatggcttctac

SEQ ID NO: 81046 - DNA, 123 bp, Homo sapiens
atcgacagctgcaaggaggccgtcaccttcaaggccgtcagacaagattatttgcaggtgtcttccctcgaatggcagccatcagtctgggaggtttcatctttctgggggcttatgaccgaa

SEQ ID NO: 81047 - DNA, 100 bp, Homo sapiens
gacgggctttctgctgccgcccgcaagcagaggatcccatgacagattctgttgtcacgtctccttacagagtttgagcggtgctgaactgtcagcacca

SEQ ID NO: 81048 - DNA, 83 bp, Homo sapiens
cgagcacataacggggttcgggtgtctcgtgtgtgaacatcacagcattgcagtgtcgagatggctatgaaccctgtgtaaat

SEQ ID NO: 81049 - DNA, 90 bp, Homo sapiens
cagaatcagttgttggagaaaattaaaggtagtgtcagtggctgagtatcaccgcaggatcgatgctctaaatactgaagaactgcgcac

SEQ ID NO: 81050 - DNA, 100 bp, Homo sapiens
aaggaatagacaggctacgcctggacaaatactatatgttgtgtgacttcattgagacacattacctgaatgagcaggtgaaagccatcaaagaattggg

SEQ ID NO: 81051 - DNA, 100 bp, Homo sapiens
tcttgcatgctgtggttcaggagtacattttagatgtgctgggtaggccaggtttcagcatcgcagacaagaagcgcaggacaggctgcattggggccaa

SEQ ID NO: 81052 - DNA, 101 bp, Homo sapiens
gagcgagcgaccgacgcgccacccgccgacgcctcagccgcttggggcccgcacggaccctctacttcactttgcccgaagtttttacatacaaattctac

SEQ ID NO: 81053 - DNA, 75 bp, Homo sapiens
gcctcgagccgcagcacgagctcaaattccgagagtaacagttacccctcaatgagcgacccctacctgtccagc

SEQ ID NO: 81054 - DNA, 101 bp, Homo sapiens
cgacaggagctgcacaagctgctggacaaggaccctgacctgcctgtcgtcgtggtggccaacaagcaggaatacatggtttacaggaagcatacctacat

SEQ ID NO: 81055 - DNA, 50 bp, Homo sapiens
agcagtgaaacgctccatgaattggttttgaacgaagaatgtgatcagaa

SEQ ID NO: 81056 - DNA, 86 bp, Homo sapiens
cggcagagcaaggggcttacgcagaaggacctggccacggacggggaggtttactgcatcgacgcgcggttctacgggaacgtcag

SEQ ID NO: 81057 - DNA, 100 bp, Homo sapiens
accccagagacacccgtgtagatgggtacatcacggcttctctcccacgttaagacttaataaaggttgaaatcacaaagattagacacctttttagata

SEQ ID NO: 81058 - DNA, 83 bp, Homo sapiens
ggcaaccaagttcatgagacaaatccattagaaatgttgaggaaaaaagcagcaagccttcaggtgttccagtgatgcctgac

SEQ ID NO: 81059 - DNA, 100 bp, Homo sapiens
ttgctccgaagatgtggacttgccctgcaccgccccctgggatccgcaggttccctacacggtctcctgggtcaagaggcgtggagctatttcctatgac

SEQ ID NO: 81060 - DNA, 85 bp, Homo sapiens
caaaacatgttcgagttctgggatgggcccagatcattgatctgatgatgctggtcatcgatgtgaccaaggggatgcagaccca

SEQ ID NO: 81061 - DNA, 90 bp, Homo sapiens
ggttcagccctttgatgaccgcagcaggagaaccaggtgcatcagcgcattgcggagctgaggaaagcaggtctgtggtcccagaggcgt

SEQ ID NO: 81062 - DNA, 100 bp, Homo sapiens
tcatccgaggctggggtctctgcatctttttaccttttgtgctgagccaactcgagccaggctgcaaaaaggtttgctgactgcgccatattgttgctga

SEQ ID NO: 81063 - DNA, 100 bp, Homo sapiens
gcattttaagaaaggacagcattcctgtgacctctgcctaccatccataaaatactcattcccctctcagagagaagaagaaggaggttcctgctgtgcc

SEQ ID NO: 81064 - DNA, 73 bp, Homo sapiens
gctgaatggacacaggtgtcagcagggccacctggtaaagggaaaacagtgtgatgagcacttactcccctga

SEQ ID NO: 81065 - DNA, 87 bp, Homo sapiens
cggcctggaggagttgtacggcctggcactgcgcttcttcaaaggaagatttcgatgtcgatcattttgtgtctgactgtaggaagc

SEQ ID NO: 81066 - DNA, 80 bp, Homo sapiens
agacgccgcgtctgcggccagggggtcacgaatgcggccgcacatattctacgacgaggacttcaaccatgagccgtgtc

SEQ ID NO: 81067 - DNA, 82 bp, Homo sapiens
gtcttcggtggactccttcggcagtccacccaccgccgccgcctcccaggttacgggcaggacttgagtggcttcggacagg

SEQ ID NO: 81068 - DNA, 75 bp, Homo sapiens
ccgctgccaccgtggctacactctggaccccaatggcaaaacctgcagccatagggatgaggaagaaatgaccaa

SEQ ID NO: 81069 - DNA, 100 bp, Homo sapiens
tgaacgtggacaaagctgttgtctcagggagcacagaagaagaattcagggaacttcgagaacagccaagtgaccctcaagctgaacaagagcttattaa

SEQ ID NO: 81070 - DNA, 80 bp, Homo sapiens
ccaagatggcggcggagctggtggaggccaaagtgagaagccctaccactgcaactgggacggctgcggctggaagtttg

SEQ ID NO: 81071 - DNA, 97 bp, Homo sapiens
gccggaagctggttttcaggccacaaatgctttcacagatcagaaacctcttgaccttgcccagggtgctgaaatgaaacacattcttgttggtaat

SEQ ID NO: 81072 - DNA, 100 bp, Homo sapiens
gccgtgccgcatgagcatcgcggagcttgacccgtccatcgctgtgggcttactgaagaaacatgaagcttttgagacagacttcaccgtccacaaggat

SEQ ID NO: 81073 - DNA, 135 bp, Homo sapiens
taagatcgacgtgtaccactacgaggtggacatcaagccggataagtgtccccgtagagtcaaccggtcttgggcgtctttggtactggcttttttaggggtctgcctggggattacccttgctgtggatagaag

SEQ ID NO: 81074 - DNA, 99 bp, Homo sapiens
gcgaccgccgagcctgcagcctgccccgcggccaacatgagcttcttgttaagtgaacatccacttgcccagctttactgccattcaatcatggaacac

SEQ ID NO: 81075 - DNA, 100 bp, Homo sapiens
agtgaaaaatgtactctgacctgaatcctgaattttccttgatggtcaaaagattaagctccagtcagcccggtcaagcatgacagcaactcaaactcgg

SEQ ID NO: 81076 - DNA, 100 bp, Homo sapiens
accgtcagtttgagccagatgacgaagttatacggaagcgtctcctcattgatggagatggtgctggagatgatcggagaattaatctgctagtgaagag

SEQ ID NO: 81077 - DNA, 100 bp, Homo sapiens
agaagagccatggatcataaagagacacataccaaattggatctatccagactgactggagctctcccgtgtcagctcgtagcacagaaggtgaagagcc

SEQ ID NO: 81078 - DNA, 101 bp, Homo sapiens
tggtggagagccacaagctgggtggcacttgcgtggcttcccacacttctgactcggacgttccttccggtgtcactgaggtggtcgtgaagctctttgac

SEQ ID NO: 81079 - DNA, 75 bp, Homo sapiens
gtttctccaaggtttgaaaagcagctggcctgcaaggtccctgagctgcggaagaaatctcgccgagagtacctg

SEQ ID NO: 81080 - DNA, 96 bp, Homo sapiens
tgacccatttcagatggagaatacagactgctacctccccgatgccttcaaaattatgactcaaagatattatggctgtggtctggtgatccctga

SEQ ID NO: 81081 - DNA, 100 bp, Homo sapiens
ctcagttgtgcgttgcggccagtcgccactgctagacaaagcatggaggacacaagaatgggaggaaaggcggactctcaggaacttcattcttcacgtg

SEQ ID NO: 81082 - DNA, 101 bp, Homo sapiens
aggccatggagggacaggatccggaggcgccagctcaaccgatcaatgtgactctaagaacaaatggatgaatgaatatccatatgaagagaaaaacaata

SEQ ID NO: 81083 - DNA, 90 bp, Homo sapiens
gcagaactgagcccaggccacagtaccctattcacgctctgtgcttgtgccaagattacagagtcacgggagacaccgttctgtgttact

SEQ ID NO: 81084 - DNA, 50 bp, Homo sapiens
agccatcaactctccgaacctttcagatggagtctcgctctgttgtccag

SEQ ID NO: 81085 - DNA, 75 bp, Homo sapiens
ggctacctcaggggccgtccccaggacactgtccggatcttccctccctggcaacagatcccctaatttgtggct

SEQ ID NO: 81086 - DNA, 98 bp, Homo sapiens
ggttgcaaattcgtgaagaatcagcatcatgtttggcagctgagtattggagccaggagcctgccatgaggtgctttgtggttgggagcaaagacatg

SEQ ID NO: 81087 - DNA, 98 bp, Homo sapiens
ctggaggacacacctaaacatgtggaatcccaatgccggctctttcattatcatcctcatcttgatatagttccatgaatattaaatgagattatttc

SEQ ID NO: 81088 - DNA, 100 bp, Homo sapiens
tcaactcctgagtcctcagtctctagtcccgggaaggtttcagtctgaaagagaaagtggagatcgaaattttgcaataggatattacttaaaagaaaag

SEQ ID NO: 81089 - DNA, 74 bp, Homo sapiens
tgtgtgcggttcctattgcacagtttcttgcagaacataaattattaggaaacattaaaaatgtggccaagaca

SEQ ID NO: 81090 - DNA, 50 bp, Homo sapiens
gaccaactatgttgtttgggggtatatgactgatgggatgttacttcgtg

SEQ ID NO: 81091 - DNA, 75 bp, Homo sapiens
tgatttccccgttaatgctgaagaaatatggaattccctttgacaagtttagtcatccaacaagaagaaatatga

SEQ ID NO: 81092 - DNA, 100 bp, Homo sapiens
acgggacgagttcgtcatccgtgctgaggacatcccttccctcaagtctctagtgatccctgaaaagttccagcatattttgcgagtactcaacaccaac

SEQ ID NO: 81093 - DNA, 97 bp, Homo sapiens
caaagtcgaatgattcagacttgcaaggagtggaagctggacacactatgtgacttgtatgaaaccctgaccatcacccaggcagtcatcttcatca

SEQ ID NO: 81094 - DNA, 100 bp, Homo sapiens
ctcctacttcctctgtatagagcaactgttgaactcagctgcctgtaggtcatcatcagatttgaaatatttaaagtggatacaaaactatttcagcaat

SEQ ID NO: 81095 - DNA, 59 bp, Homo sapiens
cgcttcagttcatgtatgacgagcattcctctgaatattgatttgctgaatagcccaga

SEQ ID NO: 81096 - DNA, 83 bp, Homo sapiens
cttgtttgtggatcgctgtgatcgtcacttgcgatgccctcctagctagccgtcacgggatggagggcttcatggactcaggg

SEQ ID NO: 81097 - DNA, 99 bp, Homo sapiens
gacaaggcgccgcggcgactcaacaagcggcgcttcccggggctgcggctcttcgggcacaggcggatgtagctgttttagttgtagatgccagcaggg

SEQ ID NO: 81098 - DNA, 100 bp, Homo sapiens
gattgttgttgaaacaacatttagttcagaatccagtcagactctggcaacttttaggccctgtctctgcccctggtggtcatcgtccatggcaaccaag

SEQ ID NO: 81099 - DNA, 75 bp, Homo sapiens
agcaacgtgcggtgggaccacgagagcctagagttgggaagacatcactgattatgtctctggtcagtgaagaat

SEQ ID NO: 81100 - DNA, 99 bp, Homo sapiens
gtctgtcctcctagccaaagaaagtgtttctaagacctcagagaaatttggaatctatagacccgcagtttacaatccggaggaaaatggagcagatga

SEQ ID NO: 81101 - DNA, 75 bp, Homo sapiens
tcaaagtgggagggatccttgtcatgccactggaagagaaggagagaaatatgagttggagggaaggaaaagtgg

SEQ ID NO: 81102 - DNA, 75 bp, Homo sapiens
ggctgcggtgtctgctgctattctccgagcttcgcaatgttccagggtctccctccactgctgtagtaacccggg

SEQ ID NO: 81103 - DNA, 82 bp, Homo sapiens
ctcaatgcatctgggaagctacctgcattaagtcaggactgaggtcagcccaaggccaaccccactgtcactctgttcccgc

SEQ ID NO: 81104 - DNA, 80 bp, Homo sapiens
caggggaccagaggaactcagccctgattgcgctgccactggtgacatgccaacttaccagatccgagctcctactgctg

SEQ ID NO: 81105 - DNA, 115 bp, Homo sapiens
tctttgggattgggacttaaaacaatggtataagcctcattatcaagttgttaaaattacacactgtcctacactgctgaccagagatggagatcgaattcgaagtaatggaaag

SEQ ID NO: 81106 - DNA, 82 bp, Homo sapiens
ggcatcctccgcaatgtgtccagcctcgtcgccacccgtgaggactacagggtggcaaccaactatatctgaggaccagagc

SEQ ID NO: 81107 - DNA, 75 bp, Homo sapiens
ggttggacgtggggaatttctcctggggctcagagtaccattactgggacttccacccccaccacgtgcacagcg

SEQ ID NO: 81108 - DNA, 51 bp, Homo sapiens
gaagcagcagaaccccaggctggtgtacgaccatggcaaaagttataacca

SEQ ID NO: 81109 - DNA, 92 bp, Homo sapiens
tggaatatgccaaggaaaaactggagagcttcatcaaaaatagtgatagctttgataagctttatcctgtggataaacgcagagtgaacgag

SEQ ID NO: 81110 - DNA, 83 bp, Homo sapiens
ctacaagaaaatccacaagaacgcactttcctcccagggctatggttctgatggtctaaagttgttatcacatgaagaaagtg

SEQ ID NO: 81111 - DNA, 82 bp, Homo sapiens
ggcctcctgctgctcctgtttgtggggccgctgtcccgaggttcatccagcagaaactctacctcttcttggagcattgctt

SEQ ID NO: 81112 - DNA, 104 bp, Homo sapiens
actcaaggagccaaggacagtttggaaacaagcaggatccaaaataccagtagagtactatcccaactgtgaggtcgtgttcatgggaatggccaacatccatg

SEQ ID NO: 81113 - DNA, 82 bp, Homo sapiens
aagttcatcagcgagactctgcggcgcatggaggaggaggagcaggctcctgctccagcccagcccccagagagcagacccc

SEQ ID NO: 81114 - DNA, 100 bp, Homo sapiens
ttgtttgaagaaatgcttcaagttgctaatgctatacaatcaaagccttagatgggagatctcaagtttcaacaccacgttttggcaaaacgttcgatgc

SEQ ID NO: 81115 - DNA, 100 bp, Homo sapiens
ctccctcaccttggacacctcgcttgggtgaccctggcaaagatgagagtgcacatttcgtcctgcctgaaggtccaggagcagatggccaactgcccca

SEQ ID NO: 81116 - DNA, 83 bp, Homo sapiens
cgctgcttccacccaacttcctgttagatggtcctagaacaattggagattcatacgcacacaaagaacctcaacccttacct

SEQ ID NO: 81117 - DNA, 100 bp, Homo sapiens
ctcttgtcagacttaactaagcagatttcccgagactacggtgtgctgttagaaggttctggtcttgcactaaggccaagacccatgttcttgacattga

SEQ ID NO: 81118 - DNA, 50 bp, Homo sapiens
catctcctctggggaaatgcagaaggccatccactgcagagcaatccttc

SEQ ID NO: 81119 - DNA, 88 bp, Homo sapiens
aaggctcaagatggcgtgcttgttggagaccccaatccgcatgagcgtcctttcgggctgaaaaactgggtggtagctgaagacgtgg

SEQ ID NO: 81120 - DNA, 100 bp, Homo sapiens
aaaactgtggtctccagatgaagaggtttcccctgaagtactagcaaagatcgagagacagaagattctgaaagggttcaatgaaatgagagtcatcttg

SEQ ID NO: 81121 - DNA, 90 bp, Homo sapiens
tcagcaatatgcagctattgaacgtttgacatgtggcaagtttgaattgagatgtgctgtagttacttttggtgacgctgtccagttccc

SEQ ID NO: 81122 - DNA, 75 bp, Homo sapiens
gaaaactccaccgtagcccttgccaaaggttgggcccgaaggcatcctgcagaacggggctgtggacgacagtgt

SEQ ID NO: 81123 - DNA, 100 bp, Homo sapiens
gtgcagcttcaagcttaggaccacccaccatgcctatccagcatgtggagagggccaaatgtgaactgtgttgacagcactggctacacacccctgcacc

SEQ ID NO: 81124 - DNA, 100 bp, Homo sapiens
gagctccgtattctctgaagcctggaaacgaggcactcagttggaagagtccagcaaggtctcctctgagcctccggcctccataagacccaaaacagat

SEQ ID NO: 81125 - DNA, 75 bp, Homo sapiens
tcctgcgcccctgagagaggctgctagaacaacagaggcagcagttgcttactgaacgccaaaacttccacatgg

SEQ ID NO: 81126 - DNA, 83 bp, Homo sapiens
cgtcaagcttctgaaagaaagattagagaaattcttccatcgggaaaaaggtcactggtcagaacagcaagaagaaagtagct

SEQ ID NO: 81127 - DNA, 89 bp, Homo sapiens
tgtgggtaccctctatgaaaaacagaatggaaaagagtcttctggttaccccttccctactgctcctcctgtggatccatttgccaaaa

SEQ ID NO: 81128 - DNA, 100 bp, Homo sapiens
ggcggatggccccaggtgtaagcgcagaaagcaggcgaacccgcggcgcaataacgagtcgttcaccagacaggtgttatggaagctgctgaaggttgtg

SEQ ID NO: 81129 - DNA, 107 bp, Homo sapiens
aggagctgtgcagccgcgaggaggcgcgggaggtgttcgagaacgaccccgagacgcaattctgtggtgttcttggtcacacatttatggagtttctgaagggcagt

SEQ ID NO: 81130 - DNA, 75 bp, Homo sapiens
gtattacccctatctcagcagtgatggggagagccatagcgagctatgccaagaccaagacgagagccgaggtgc

SEQ ID NO: 81131 - DNA, 98 bp, Homo sapiens
ttactttaagtgcaatggggagtcattaaggattttgtgtagagcattggggagtcagcaatgtccgttgtgttaaatcagctgctgcccatgattaa

SEQ ID NO: 81132 - DNA, 89 bp, Homo sapiens
gaacacccccccatggaggcgagcttcttggacacttaatgattgttggcaagaaatgtgctgctgatctgggcctgaataagggttat

SEQ ID NO: 81133 - DNA, 80 bp, Homo sapiens
gaggggccatgcctgatggagatcgcccagcgggcagttagcacccagagaaccatggagtctggcagtaccgccgccag

SEQ ID NO: 81134 - DNA, 100 bp, Homo sapiens
cgcgaatatcgtcatcgttagaagattttgagatcaggagtgagaacgaggtaaatcccaagcaagagattagtgaagatgtacaatttgggactacatc

SEQ ID NO: 81135 - DNA, 100 bp, Homo sapiens
ctgatgcctcagggcctgaagcaaaagtccaggaggaagagcatgaccttgttgacgatgacatcaccactgtactggagaaaatgaaactgggattgac

SEQ ID NO: 81136 - DNA, 83 bp, Homo sapiens
gccgctgtacagattcatcaccacggaggatacgaagcgttttcggcttcctgcccggagctgtgcagcaaacagtcgacccc

SEQ ID NO: 81137 - DNA, 100 bp, Homo sapiens
tggcgagatgccgtgtggggaggattggctcagccacccgctgggaatcgtgcagggattcttcggcattactacagccgccgtttgtgtttatcccgcc

SEQ ID NO: 81138 - DNA, 100 bp, Homo sapiens
cgacggccacaggggcggcgacggcgcagtgcgaagcgaaacagatattaataaggcagcggaaagaagaaatatgaatacggctccatcaagacccagc

SEQ ID NO: 81139 - DNA, 100 bp, Homo sapiens
gaggctgttgggccaggccagtcatgctagaacttataaatgtcactctgcccgatgaaaagcaaaactacgtacatcgaattggcagagtaggaagagc

SEQ ID NO: 81140 - DNA, 98 bp, Homo sapiens
ctgccctcagtatcaacaatgattgctcaagacttctttgtggctttgctaaaggacaggtgttcaccatttccaaagaactggtccctcgggtacta

SEQ ID NO: 81141 - DNA, 83 bp, Homo sapiens
cagaaaggtggaggccgggaggacgaaggtgtcccgacccaggctaagcttgagcatggctgagcaggagcccacagccgagc

SEQ ID NO: 81142 - DNA, 98 bp, Homo sapiens
accttgaccctggggaccttcctcgtgggagctgcgctggccgctggcctactctggaagttcaagattctagactttggctacccacagaattccga

SEQ ID NO: 81143 - DNA, 50 bp, Homo sapiens
cagcagctaaggatattttgtgcagaaatgggacgtcggtcatcagatac

SEQ ID NO: 81144 - DNA, 101 bp, Homo sapiens
ctttttggagggaaagaaagagccctggactgtgaagagtgaggagaccatagctgcacagccagtgcaccaggtggcggagcgggtggaggccctggggc

SEQ ID NO: 81145 - DNA, 50 bp, Homo sapiens
gggcaccttgcgcttcttgcagtcggccaagtcctgtatctgccatgtct

SEQ ID NO: 81146 - DNA, 100 bp, Homo sapiens
agacaccaggctgttgaggaagaatctatggcaacattgtatctattaatatacagcttctgtatttatcagctggacaatccagatgagcaagcagccc

SEQ ID NO: 81147 - DNA, 82 bp, Homo sapiens
gcggagagaccgtccgaggtaattgtctgccacgagtgcacattctgaaaacagggacatccaacgggctcatagagtggta

SEQ ID NO: 81148 - DNA, 75 bp, Homo sapiens
ctacaaccttcgatctcctgacgaggatgaattgtaaaagcaacatcagcttgaccagtataaaattacagtgga

SEQ ID NO: 81149 - DNA, 90 bp, Homo sapiens
caggatcagtaaagaaggaaaaagcagtaaagccagaggaaggttttagatggagcaggattagatattgatttccatcttgcctctcca

SEQ ID NO: 81150 - DNA, 49 bp, Homo sapiens
gaacgctccgtctggaacggcgcagatgatgggaaatattgcagcagtt

SEQ ID NO: 81151 - DNA, 90 bp, Homo sapiens
cagaagctgaaatgacagcagtggtactgcctgactggaatacgctaattgtgggaaagctttctccatggattcgtccagactcaaaag

SEQ ID NO: 81152 - DNA, 100 bp, Homo sapiens
ggctgaacagcacagagcccctcgtgaaggagtatgctgcgtttgtgctgggcgctgccttttccagctctattaccaggttttaaacttcgccatgatc

SEQ ID NO: 81153 - DNA, 75 bp, Homo sapiens
tcacattggccggcaacttgttccaggtacagtagcagagggagctcccattattccaatttcagctcagctgaa

SEQ ID NO: 81154 - DNA, 100 bp, Homo sapiens
gatcaggaagtcaaattacagaggaagcagtaacaactgtggatgaagggggagaggcccgaggaaggagtggctgggggtctgaaccgcaaccagggcc

SEQ ID NO: 81155 - DNA, 74 bp, Homo sapiens
gattcctcctccttggtcgccgcgtccttggctggcgtgaagaccaacactgtcatctgaagttggaatcatca

SEQ ID NO: 81156 - DNA, 101 bp, Homo sapiens
gcagggacccgctaagctgatctcctgtacagtagtgctacttaaaatatgctggggaccatcaccatcacaggtatccagctcacatagaagacattgac

SEQ ID NO: 81157 - DNA, 101 bp, Homo sapiens
gcaagatggcggacagtgcggaactaaagacggcgcctcatctcccagagatcttccttggagaccctggaagatattgaggagaacgcccctctccggag

SEQ ID NO: 81158 - DNA, 100 bp, Homo sapiens
atggggctgctccccaggacctgagcaggaacctggagttttcagcttgcattgaaaggctctagttacagtggacttcttgaacgacatcatattcaca

SEQ ID NO: 81159 - DNA, 100 bp, Homo sapiens
caggagtacgtggaccagcacctgggcaggcctccggtgtggctgtctctgatggtgtcatcaaggtgttcaacgacatgaaggtgcgtaagtcttcaac

SEQ ID NO: 81160 - DNA, 96 bp, Homo sapiens
gaacaacatacagtgacgcttcacagggacttggactaaagtctgatgaacttcccaatcagatgagcatggatgattggccagaaatgaagaaga

SEQ ID NO: 81161 - DNA, 90 bp, Homo sapiens
cttccctgcactctcatcgctctcggcctcggcctcggcctccgacacggtgaccattgtgaggtagatattttgttctaattttccaga

SEQ ID NO: 81162 - DNA, 92 bp, Homo sapiens
caatatctgtcttcggtggactccttcggcagtccacccaccgccgccgcctcccaggtcttcgccttgatcgtgttctcctgcatctatgg

SEQ ID NO: 81163 - DNA, 100 bp, Homo sapiens
aaggaggcagtttccctggtgaaaggatcctacaagaccctcaggctggtagtgcgcaggtagctacagcaagctgggtagcaggcagatccaaaggata

SEQ ID NO: 81164 - DNA, 101 bp, Homo sapiens
ggccggttgccgggcgcgggcgagaaagttgcctgtctcgggaaacttgattgatctttatggaaaccaaggtctgcccccaccaggcctcaccatcagca

SEQ ID NO: 81165 - DNA, 83 bp, Homo sapiens
caccaacgagatcttccgccactacgaccgagagggtgacctctctgggcaaggactggcatcggccctgcctgaagtgcgag

SEQ ID NO: 81166 - DNA, 71 bp, Homo sapiens
agaacttgaaaatgtaaagactcttaagacaaaattaggaaagtgactattttaccccacagggagaattc

SEQ ID NO: 81167 - DNA, 71 bp, Homo sapiens
aagaccctcaacaacaagtttgcctccttcatagacaaggtcatcctggcccggcagtatggctccgaggg

SEQ ID NO: 81168 - DNA, 100 bp, Homo sapiens
acacccagcaatacgaatggcaccggttcaaaccttgtactactcagctgatcacaagctgcttgatgggaacctactagatggacaggctgaggtgttt

SEQ ID NO: 81169 - DNA, 98 bp, Homo sapiens
atggtgaaatggatgatagtcgaggtgtcatggagaaactccagctgggcccagagattctgcagcgggaaaatccaaggcttatttatgccaggctg

SEQ ID NO: 81170 - DNA, 98 bp, Homo sapiens
taactatgttcgtcggagtaaccaaaggaggagatgttaaagtaacccatcttgcaggacgacattgaagattggtcttctgttgatctaagatgatt

SEQ ID NO: 81171 - DNA, 74 bp, Homo sapiens
aggattgggagagaggtagctacccggatgcagtcctttgggatgaagatgacacctttgaggccctgtgcatc

SEQ ID NO: 81172 - DNA, 80 bp, Homo sapiens
aagaccacaataaaagagacctctacttagctcagcaattcttaccttagcaaaatatgctgtgaattccatcaagaaga

SEQ ID NO: 81173 - DNA, 83 bp, Homo sapiens
ggaccacaggccctcgttgcccagatgcctccggtgtggctgtctctgatggtgtcatcaaggtgttcaacgacatgaaggtg

SEQ ID NO: 81174 - DNA, 83 bp, Homo sapiens
ccacagatgtacctgaaaagtcgtcactctttcaccaaggtgttggagcgggccggagagaagtagagtgggctgcgaggaga

SEQ ID NO: 81175 - DNA, 101 bp, Homo sapiens
tcaccaacgtccgcatcaacagcaccatgaccaccccacaggtcctgaagctgctgctcaacaaatttaaggtctttgtgggaagaaacaaatcacaaaag

SEQ ID NO: 81176 - DNA, 101 bp, Homo sapiens
aagctgtagaaaccaaagatgaacgatttgaacaaagcgctagcaacttctaccaacaacaggaaggagctcattgccaagttagatcaggcagaaaagga

SEQ ID NO: 81177 - DNA, 82 bp, Homo sapiens
acaggaatctcactctgttaaagctggtctgttctaactgaggtataccaagcttggctacgcaggcaacactgagccccag

SEQ ID NO: 81178 - DNA, 96 bp, Homo sapiens
ggttctacaagctgcacgagcggaggtgtgagcccattgccatgacagtgcctcgaaagcttggatcctagcatgactatacattgtgacatggtc

SEQ ID NO: 81179 - DNA, 89 bp, Homo sapiens
caaggagctgcagaaaagcgagaaattagatgaacagcgcacagccacgatcctgaggaattcttgaatattctgtttcatcatatttt

SEQ ID NO: 81180 - DNA, 90 bp, Homo sapiens
aacgtctgaggctacatagccagtacaaaaaatgtagacaaccaatttcctgggcaagctgctccacctggattcccagtgtatcccgcg

SEQ ID NO: 81181 - DNA, 74 bp, Homo sapiens
ctaaatttgaaaaggagaaaatgaatgccaaatgggacacggtgagacgtggtcttgtaacacagtggttaaga

SEQ ID NO: 81182 - DNA, 75 bp, Homo sapiens
agatgtttccagccctgcctcggcggaccaaagggtcattgagactgcctcttctcaaagggacactgtcctcag

SEQ ID NO: 81183 - DNA, 100 bp, Homo sapiens
tttgattgtgtattatggataccaaggaagagaagaaggaacggaaacaaagttattttgctcgatatggaatgtgcagatgtcccactattaactccaa

SEQ ID NO: 81184 - DNA, 100 bp, Homo sapiens
ataaacagggccgtgccgcagatgcccaccggaatggagaaggaagaggagtcggatgaggatgggacagaagaggataacagtcgtgttgaacctgttg

SEQ ID NO: 81185 - DNA, 75 bp, Homo sapiens
agatctactactcggacaagtacttcgacgaacactacgagtaccgggcctctgaaaaatggaaccaaattctct

SEQ ID NO: 81186 - DNA, 74 bp, Homo sapiens
agacatgcagaaagtacgaatctgctctgagggcggatggggagcagattaagcgagtaaaagactcggatgat

SEQ ID NO: 81187 - DNA, 75 bp, Homo sapiens
aaacaagaagtcgtcaccccagacaacatgtgcatggggaggaccagtcgtggtgctggagaatctggtaaaagc

SEQ ID NO: 81188 - DNA, 100 bp, Homo sapiens
caaagcgcttggcccttcatggaacctgtgaagagaacagaagctccaggatattatgaagttataaggttccccatggcccacaagagtgaacagatac

SEQ ID NO: 81189 - DNA, 115 bp, Homo sapiens
caaaggcaagagtaacagcagcgccgtcccgtccgacagccaggcccgggagaagttcatgatcaagagggcccaaggacggaagcgctttgggatgaagaattttaagaagaga

SEQ ID NO: 81190 - DNA, 75 bp, Homo sapiens
agaaaacgagaggctcaccgcagtcgtgcaggatctgaaggagggaggagctaacatttgagatgcttgtactgg

SEQ ID NO: 81191 - DNA, 75 bp, Homo sapiens
ccactgtgtgctgccatacacagaacagtgcaaccctgaaactcgtcctgttgagaaaaaaataagatcagctct

SEQ ID NO: 81192 - DNA, 90 bp, Homo sapiens
caaggaagggatgcacatcatcacaccatcagcttcagagaatggcagccatttatttgtcccgtgactgatgaagtatttctggaagcc

SEQ ID NO: 81193 - DNA, 74 bp, Homo sapiens
caggtcggaggaaacagccagaccgagagcagcctgccggggcggaggaaatggcaactgctgacaggaagttt

SEQ ID NO: 81194 - DNA, 83 bp, Homo sapiens
gccgccgccgccgcggccccgccagacaatgcagatcttcgtgaagactctgactggtaagaccatcaccctcgaggttgagc

SEQ ID NO: 81195 - DNA, 100 bp, Homo sapiens
ttggtgaagagttcaggaaagtatatcaacaaaggagtgaaatttgtgaagagaaatgatatcatcaaaattggtgttaaattgaaatactctgatgtcc

SEQ ID NO: 81196 - DNA, 114 bp, Homo sapiens
ggaggagctgtgcagccgcgaggaggcgcgggaggtgttcgagaacgaccccgagacgactgtgccctgtccacggtgcctcctgcatgtcctgctgccctgagctgtcccgag

SEQ ID NO: 81197 - DNA, 101 bp, Homo sapiens
agtaaaccttggttgtctttcgttggccagaggaattgggcacagtgacttttgaagatgtggctgtgaactttacctgggaggaatggaatctccttagt

SEQ ID NO: 81198 - DNA, 98 bp, Homo sapiens
agaggcttcgcatttgtgcagctgtcctctgcaatgccagacgaggacagccggctgctgcccctgctggtctgcctgcggttcctgttcgtgcccct

SEQ ID NO: 81199 - DNA, 101 bp, Homo sapiens
tgcagaaacgtaaagaaatgcaattgagctcactgcaaatctaacttcatcatggtgaactaatttagagcatcctccagagctgaagcagaacattccag

SEQ ID NO: 81200 - DNA, 100 bp, Homo sapiens
agcaactgttgaactcagctgcctgtaggtggcagataatggaaagcctcagttgtcatctttgacatacattgacattagggtaattgaggagagcatc

SEQ ID NO: 81201 - DNA, 75 bp, Homo sapiens
gatggtgtcatcgaggtaagaaacggttgtggatcttgaagctttggaaagttggttaccacagagaagcgcttc

SEQ ID NO: 81202 - DNA, 135 bp, Homo sapiens
caggagccgcggagccggcgctgagaggggctgcggccggagcgggcggctgagacaaaggcgacgtttggtgccctggttgtcagatgttggaaagcagtaggacggaacatactcttcgtggttgtgtatccg

SEQ ID NO: 81203 - DNA, 97 bp, Homo sapiens
gctgtggatgaatttgcttttctggaagcttgcagtgagctgcatactccatcgctagatcgaaagccaaatagttttgttgcggtgagtgtcacca

SEQ ID NO: 81204 - DNA, 83 bp, Homo sapiens
gcatttacagaaagagtcaacagcagtggcaacaggtcatcatcagatttgaaatatttaaagtggatacaaaactatttcag

SEQ ID NO: 81205 - DNA, 98 bp, Homo sapiens
aacaacagtgacggaatgcctccatacatgttctaagctggtctatgtccatcaccttcttggagaaggagcctttgcccaggtgtacgaagctaccc

SEQ ID NO: 81206 - DNA, 115 bp, Homo sapiens
ctcagaggagcctggctaagcaaaaccctgcagaacggctgcctaatttacagcaaccatgaggagcttactccacgggaacagcctctagataatctgagttgttgaaaatacg

SEQ ID NO: 81207 - DNA, 100 bp, Homo sapiens
gactacacgctggagtactcggtggctttgctcatgaacctctgcctccgcagcacagatgatgaggagtctgatgaggaagctgtgaagaaaaccaaca

SEQ ID NO: 81208 - DNA, 100 bp, Homo sapiens
tgcggcagaagccgagttcaacatcctcctggccaccgactcctacaagatctgttacctaaagcaataaaaaatggccagaggatcagtgtccgatgag

SEQ ID NO: 81209 - DNA, 74 bp, Homo sapiens
agagagcaatgatgggcctgtgaaggttggtgggacaagtgatgttgaagtgaatgaaaagaaagacagagtta

SEQ ID NO: 81210 - DNA, 98 bp, Homo sapiens
ttgtggagagctgattcccaaatctaaaggtttattgactggtgtagtggtagactctggagatggtgtgactcacatttgcccagtatatgaaggct

SEQ ID NO: 81211 - DNA, 98 bp, Homo sapiens
cggagcccgcacggagcggccgggcgggacagggcgccctgcgtccggcagaggaggcgagcatcccgctcaggtgatgaggaacccctcgcgcaccc

SEQ ID NO: 81212 - DNA, 100 bp, Homo sapiens
cttcagcttttggcagcatgaaagttagcaactcacagatgaatgcttctcacccggaaacaaacttgccagttgggtatcctcctcagtatccaccgac

SEQ ID NO: 81213 - DNA, 51 bp, Homo sapiens
cttccatgcctcctcagcttcaaggggcaagattcttgccaagagaattaa

SEQ ID NO: 81214 - DNA, 87 bp, Homo sapiens
tcaaggcctgccgttggctatagcaaatgccccaggtggtggaggtggatacagcagtcggagaacatctggcagagacaaatacgg

SEQ ID NO: 81215 - DNA, 75 bp, Homo sapiens
caggggagttctctgtgtctgtgaatctgcgctcctcagaccaccggcaggtgaacagcctgatgcagaccgagg

SEQ ID NO: 81216 - DNA, 100 bp, Homo sapiens
atgagagtggcctgatgccttacacgaattacacatttgatttcaaggaatgtctgatcacagatacggggatggtggctctactttccagagcacaaca

SEQ ID NO: 81217 - DNA, 98 bp, Homo sapiens
atgatctccccttgaatgtttcccgcgagactcttcagcaacataaactgcttaagggtgtgggccgaagatatgctcatgtggtgttgaggaaagca

SEQ ID NO: 81218 - DNA, 75 bp, Homo sapiens
gagcgccccagggcaagccccgctccggccaacaaatgaggacggggacttggttgccttttccagtgacgagga

SEQ ID NO: 81219 - DNA, 83 bp, Homo sapiens
ccgcaaggccggagaaggccgccgggcccgggcatggtggtctggggcaacgcggaaggaaacccagcgtttgctggcagaac

SEQ ID NO: 81220 - DNA, 83 bp, Homo sapiens
gggcgccccccgggacagtctccgaagtctcgagcagtgcagggctcgcggcctggcaagaatgtacagctgacagagaacga

SEQ ID NO: 81221 - DNA, 82 bp, Homo sapiens
gcctacttcctgccggcgcaggataacgaaggaggcccaacttcattcaataaggagcctgacggatttatcccagacggta

SEQ ID NO: 81222 - DNA, 100 bp, Homo sapiens
tcagagcggagccaagatgcgaatgggatggagtttcactcttgtctcccaggctggagtacaatggcatgatctcagcttactgcaacctccgtctcct

SEQ ID NO: 81223 - DNA, 75 bp, Homo sapiens
caggtggctcattttactttccagccagatccggagccccgggagtacgagtaaaaggccaagctatgatagcaa

SEQ ID NO: 81224 - DNA, 75 bp, Homo sapiens
aggagcagcggttgctgttggaggagctctaagcgaaagacatgaggcctcagcctgaaatgaggttgttttgag

SEQ ID NO: 81225 - DNA, 75 bp, Homo sapiens
cgggaaaggagaggatcccggagccgaagccagctgaagatgagtggggtaaaaccccagacgccatgaaagctg

SEQ ID NO: 81226 - DNA, 51 bp, Homo sapiens
atttgcagctcattgaaggaaagatggaggagatgtataagaaagctcatg

SEQ ID NO: 81227 - DNA, 98 bp, Homo sapiens
acataaagataaagacatgagaaaagaagctgagtctttgttgaaacactgaaatgggtgcaggcctcaggagtgcaagtagctgatgaagtatgtcg

SEQ ID NO: 81228 - DNA, 87 bp, Homo sapiens
ctcaagcagtcctcctgcctcagtctcccaaagtgctggaattacagggtatgacaacattttgatggaagaggctgctcagattct

SEQ ID NO: 81229 - DNA, 104 bp, Homo sapiens
ctgagctcgggctccccgagcagtttgagtccccttgcccgctccttcaggtaactaggatttctacctcaaccgcgagacctatgcaaggacggtgtggacca

SEQ ID NO: 81230 - DNA, 100 bp, Homo sapiens
tggccccgcaggtcttcacccaggccctggagtgcatgcgcaggatgcttatagaattttatgagtcaccagatccagaaagaagaaaaagatttcctgg

SEQ ID NO: 81231 - DNA, 99 bp, Homo sapiens
tcggaggagtggcagagtacgatctgaaggaggggcttctggttagcccaggaatcctcagagagcaccaacaccaccatcgaggatgaagacaccaaa

SEQ ID NO: 81232 - DNA, 100 bp, Homo sapiens
ccagggccgcctggaggcccagaagagagagctgcagcaggccagacttctgggagttcccgggcagacggcgtttcggtccggacctattcctgctagt

SEQ ID NO: 81233 - DNA, 75 bp, Homo sapiens
aacttcataagccagggagagatacgtttggatcaggagttagtgataacagccctggttgttgctatgaaacag

SEQ ID NO: 81234 - DNA, 97 bp, Homo sapiens
tacaaagatgcaactgcaaagagaagccgagaatgagtccctggaacgccagatgcgtgaaatggaagagaactttgccgttgaagctgctaactac

SEQ ID NO: 81235 - DNA, 76 bp, Homo sapiens
gcaacctagaaagccagttgatgccacttgctattggagttgtggcagccagacccggtccgtttggaatgcctgg

SEQ ID NO: 81236 - DNA, 100 bp, Homo sapiens
gaccaggagctgaacgtggactggcgagatgagccagaggaggcagccatgcataaagacgagtttcatctgaaatttttcatgtgtgtgattcagtctc

SEQ ID NO: 81237 - DNA, 90 bp, Homo sapiens
tgcatttttatctctggtggctctgctacggcggcgcagaaatgaggcagaagcggaaaggccaaagagtgtggccagatgcaaaataag

SEQ ID NO: 81238 - DNA, 100 bp, Homo sapiens
ccagcaatcataaagtcatccctgtgtatgtaggagtgaatataaaaggacttcatctcctcaacatggaaactaagcttctcttttaaaaggactaaaa

SEQ ID NO: 81239 - DNA, 100 bp, Homo sapiens
gcctgttcttctggaatgtcttgggggttttgatcctgtcactgtgaaaccaggcgatgcggaagaagctaatcttgtacttcaagaggaggaatcacgc

SEQ ID NO: 81240 - DNA, 75 bp, Homo sapiens
cccatttcttcgatcgcagctacgacaagggcctcgcttggtaccggttacgggcaggacttgagtggcttcgga

SEQ ID NO: 81241 - DNA, 75 bp, Homo sapiens
cttttcttatgctgggatgtgccttagaggattatggtctgaagatgatgagaaactgaaaaagaggaaggagcg

SEQ ID NO: 81242 - DNA, 98 bp, Homo sapiens
gaccttcgcacctttgccagagtttgagcaggaagaggatgatgcaactttcatcctttgaaacgtgtgctgaaaaagaagaatcagcaaatactact

SEQ ID NO: 81243 - DNA, 101 bp, Homo sapiens
tgctgtggaggacaggggtcagtggtggaagtgagaccgaaatagactctgaagtaatatctggactttgaaattagacagagttttgccatgctgcccag

SEQ ID NO: 81244 - DNA, 100 bp, Homo sapiens
caatcgcttcaatgatgggaaggtggatcccgccgggaggtactttgctggtcctggcattgatgtgcctgctccagacatgagcacaggtgagcgggag

SEQ ID NO: 81245 - DNA, 100 bp, Homo sapiens
cccagtgagggtgtacaaatacccctttgaattaattatggctgtaactctgggtgcctttgggcatgaagaagaagttatctctaatcctttgtctcca

SEQ ID NO: 81246 - DNA, 82 bp, Homo sapiens
agcggctccgagggcgcggcggacgcagacaatgcagatcttcgtgaagactctgactggtaagaccatcaccctcgaggtt

SEQ ID NO: 81247 - DNA, 90 bp, Homo sapiens
cagcaaggaagaggacaggtagtggagatcctgcaatctgaaaagcagactgaaaggcctcgaaggagctccagcaagcccagacaacca

SEQ ID NO: 81248 - DNA, 98 bp, Homo sapiens
agccctttaccacaacaatgaagagaaaaataggctgccagcaaacagtcttccgcaggaaggagatgtgtttctattccaaggacaatgaaggcagc

SEQ ID NO: 81249 - DNA, 101 bp, Homo sapiens
tctttatttcatcactccgacatcaaaggtaaaataccatgaagattttgaaaaaacaaaggggagaggctttactcccgtcgtggacgatcctgtgacag

SEQ ID NO: 81250 - DNA, 75 bp, Homo sapiens
aagatccagatcgggatttacgtggagatcaagcgcagcgatggtgagaagccctaccactgcaactgggacggc

SEQ ID NO: 81251 - DNA, 100 bp, Homo sapiens
aaagccaagagagaccttggagtaattcgtcgacaggtatctttcagatgaaggcattgaagcttgcacaagctctccagacaaagtcaatgtaaatgac

SEQ ID NO: 81252 - DNA, 101 bp, Homo sapiens
ctccagcgccacagccttttacctgcagcttttcctgcttgatatagcacagaatcttccacaatctgtaattgaaaatgttggaggaaaaatttttacat

SEQ ID NO: 81253 - DNA, 80 bp, Homo sapiens
agaaaaccttgctcagaagcttccaaaccttgtggaactctggagccgagatggtcataaactcgtgagtgcttccactg

SEQ ID NO: 81254 - DNA, 75 bp, Homo sapiens
gggatatcgggtggcggctcgggacggaggacgcgctagttgtttacaggcattggagtttttacatgctaatca

SEQ ID NO: 81255 - DNA, 53 bp, Homo sapiens
ccaccgccctggccatctaccatgtggattatatgcgtcaggcaggagaagtg

SEQ ID NO: 81256 - DNA, 87 bp, Homo sapiens
cgaatcatggaatcccttgcatggctctcagttcctaaatatttgtcacagcaatgggctaaagcctctggaagaggtgaagttggg

SEQ ID NO: 81257 - DNA, 108 bp, Homo sapiens
gcctgacttggaccctggaaaacctggccctcttcaatttctgacaaaagtactaaggctcgtacgtctgcatcgattatcttacgtggggcaaatgatttcatgtgt

SEQ ID NO: 81258 - DNA, 88 bp, Homo sapiens
gagttcaaggaggccttccagctgtttgaccgaacagctcctgtatcacgtggaagagatagttatggaggtccacctcgaagggaac

SEQ ID NO: 81259 - DNA, 100 bp, Homo sapiens
ggggactgtacctcccttcagagccaacatcacttagaagtggaagcatcagttcacagcagtaatgcacactgtacagataagacaattgaagctgctg

SEQ ID NO: 81260 - DNA, 100 bp, Homo sapiens
tgactatgtagacagaggatattattcagtggagactgtgactcttcttgtagcattaaaggtgcgcaccctgtggcatgaccctcgtcacataggctgg

SEQ ID NO: 81261 - DNA, 82 bp, Homo sapiens
agcgtgggcatgtctctgaccatctggacggtgtgtggggtcctgtcactatttggcaccatgactcctgtgaggatgcagc

SEQ ID NO: 81262 - DNA, 74 bp, Homo sapiens
aaagtactgagagctttggataaaaggtggaccttcaatcctgctgttctcactaaagcgaacattgtccgaag

SEQ ID NO: 81263 - DNA, 101 bp, Homo sapiens
actctgcaccctgcccagaggtccctcagcaaagatggtacaaaagagtctttggaggatgcggctttgatggcatttaaatcaaacggtattgagatgga

SEQ ID NO: 81264 - DNA, 82 bp, Homo sapiens
cctgtagttcagccaagtccaaggttcagcagctggacatggagaaccaacgctcatcacctctgtcgttccccagtgttcc

SEQ ID NO: 81265 - DNA, 100 bp, Homo sapiens
ttttgagtagatccatagtgaaacggtgggcaaattttgcaaaatatgggataatggtaatggaaaatgtcaataaaccccagctctggaacattttcaa

SEQ ID NO: 81266 - DNA, 100 bp, Homo sapiens
caaccaatatatggtgctgataaagtttcgtgcacaggctgaggcccgcaggtctaagaccaaggaagcacgcaagcgccgtgaagagcgcctccaggcc

SEQ ID NO: 81267 - DNA, 100 bp, Homo sapiens
ccgaagactgaaggttcaagatcagatgactaagcagcatcaaaccagattagatgttgaagaagaggatgaacttgaatctggagaccaagaggatgag

SEQ ID NO: 81268 - DNA, 101 bp, Homo sapiens
atccaactatgatcaagacactgaaggtttctaagcatgaattgaggaacagaagaagcagagcagatgatcggagcagcatttgtttctccccaaatcta

SEQ ID NO: 81269 - DNA, 100 bp, Homo sapiens
agaacttcttcagaattagaaaggagctgcttcccaataaggaaacattggttgaatctggcgatgtggaacccatggatatggagggctgactatatac

SEQ ID NO: 81270 - DNA, 90 bp, Homo sapiens
gcaacttacccgagaacgtgcgggaagagaagatcatcgagcatttcaaacggttactcctggatggagcacctctgatagcaatccaca

SEQ ID NO: 81271 - DNA, 100 bp, Homo sapiens
aagttgatcctgatcctaaccagtatatttaaagttggagttcgttgctaaagatggcagacccagatgtcctcactgaagttccagcagcattgaagcg

SEQ ID NO: 81272 - DNA, 90 bp, Homo sapiens
aggaaattgagcaacgacttgccctgtggcagacatctggtccctgggcataacagctattgaacttgcaagaggggaaccacctcattc

SEQ ID NO: 81273 - DNA, 74 bp, Homo sapiens
aattctgtggaagagtggacaacagaagactggactgaagatttgctctcaccagaagatttagtgaatgcgtg

SEQ ID NO: 81274 - DNA, 89 bp, Homo sapiens
aagtttctgtggtgaagtcatctgtatttcctaggtcgtaaatctgggaagggcttttacatctatcaggagggtgtgaagaggaagga

SEQ ID NO: 81275 - DNA, 88 bp, Homo sapiens
agtcgcaacccatactattcggacagatggcacagaaaccgctgcgcctgaaaaatgatgtgatgaacctccttgaaagcgctggttt

SEQ ID NO: 81276 - DNA, 100 bp, Homo sapiens
ggcagtgactctgcacccagcaatccctctgcagacagctcccacaggagtcatgcccagtgtgtgaaggtctctaattaacagaagatggcaaagccca

SEQ ID NO: 81277 - DNA, 50 bp, Homo sapiens
cgggcagctagcagggcgcttcgggtgcttctcagcttcacgggaaaggg

SEQ ID NO: 81278 - DNA, 75 bp, Homo sapiens
tgcccacaaccgcaccaagaagcacgacctgctgaggtgttggggatgtcctttgcactgaccctgaactgccag

SEQ ID NO: 81279 - DNA, 83 bp, Homo sapiens
agagaagtggagcaccaggagactgcctatggagctttcaagttgtggatggaataaaaaagaaaaatatagttctgcaccaa

SEQ ID NO: 81280 - DNA, 136 bp, Homo sapiens
cgttccccgccaaccgcaaccattgacgccatgtcgggttattcgagtgaccgagaccgcggccgggaccgagggtgagaagccctaccactgcaactgggacggctgcggctggaagtttgcgcgctcagacgag

SEQ ID NO: 81281 - DNA, 83 bp, Homo sapiens
tggtacagctggaggccaagcagaaggcccggaagaaagaggagcggcagagcctgctggggttttggccaaattgggcgagg

SEQ ID NO: 81282 - DNA, 82 bp, Homo sapiens
gccacaagctcattcactgtgtaggtccggcctctttggcctacccccgttggctccgctgccccaggtcgatgagtcccct

SEQ ID NO: 81283 - DNA, 75 bp, Homo sapiens
gacctgcacctagccacttctggctacgtgtgccgcctggccattcaaactgtcaattttaggtccagaagtgtc

SEQ ID NO: 81284 - DNA, 100 bp, Homo sapiens
ctacctgtacaacgtgctggagagaccccgcggctgggcgttcatctaccacgctttcgtggcatcttctctgcattcagtttcatccaagtcattccgg

SEQ ID NO: 81285 - DNA, 75 bp, Homo sapiens
ccaccctggacacttctggaagtcagctgagccatcatctgtgcgatctctgcggtggacgaggtggactacaag

SEQ ID NO: 81286 - DNA, 83 bp, Homo sapiens
cactgctagctgagcaaggttcgaaggaaggacctcagaaatgttctgccagcgcaaagggtttggaaatcccttgtctccag

SEQ ID NO: 81287 - DNA, 73 bp, Homo sapiens
cgcgggcgagcggctgtgtggatgtcggcgaagccgcgggcgagaggccacaagaggaagctgaatgaagagg

SEQ ID NO: 81288 - DNA, 100 bp, Homo sapiens
ggggatccttccgcacactgaagagtacgtcttcgggtctacccctaatcacgcgacattgactacagcaccgtgctcctcggcatgctggtgacgcagg

SEQ ID NO: 81289 - DNA, 97 bp, Homo sapiens
atatgcgaatgctgtcctctcccaagtattcactctatgaagtgcatgtcagcggagatcatgatacatggtgatggcttgcagagtcgtaaacaaa

SEQ ID NO: 81290 - DNA, 90 bp, Homo sapiens
ggaacaggaaaaccatcttactttggttccaggatatactggtaatatagctaagcatgaagaggaaccacctcagaatatgaaaccaca

SEQ ID NO: 81291 - DNA, 74 bp, Homo sapiens
atctggagatggaggtcgagctgagataattttccccagatggcccatcagaagcggttcatcgaacggaagta

SEQ ID NO: 81292 - DNA, 100 bp, Homo sapiens
gcccaacttctgcgggatcttcaaccacctcgagcggctgctggacgaaggtggaagttaaacgagctgagcctcgggacagcaagagccaagcgccggg

SEQ ID NO: 81293 - DNA, 75 bp, Homo sapiens
agactcgtgggggaaaggctgcgcgttccttcacctcgggcagaataactttgcagaagcccacaggttcttcac

SEQ ID NO: 81294 - DNA, 80 bp, Homo sapiens
tgccggcacgcgactccccccgggcccaaagtcctgaacgaggctgtgggggccctgatgtaccacaccatcactctcac

SEQ ID NO: 81295 - DNA, 98 bp, Homo sapiens
aaagacacgactggaaaagcaattcaagaatccaaaggactgcatgacacaccataggatatagtcaagaagcctttggacatgggagtttcaagctc

SEQ ID NO: 81296 - DNA, 75 bp, Homo sapiens
cggaaaggggcccggcgtctgcctcgagactgaagaccggtttggtgcacctcgatttggaggaagtagggcagg

SEQ ID NO: 81297 - DNA, 101 bp, Homo sapiens
cacggatgagaaatctttcgagaatattcagaactggatgaaaagcatcaaggaggcccagtttgatatctctgtggccagtgaaattatggctgtcctgg

SEQ ID NO: 81298 - DNA, 75 bp, Homo sapiens
tcttctgataactcaggatttacttgaaacaaaaggagaccctaatcttcaggaatcctttgtgcattgaagact

SEQ ID NO: 81299 - DNA, 75 bp, Homo sapiens
tttggggcagaatacagagatatggaatcagcgggtgcctcccaggtcaaatggaataaaaaaaatgctaactgc

SEQ ID NO: 81300 - DNA, 123 bp, Homo sapiens
agcctacatggacatgtcctgtgtgtgacaagaaggctccctatgaatctcttatcattgatggtgccaggtcaccagatggaaagcgaaaaagaaagaacggccaatgttccctgaaaacca

SEQ ID NO: 81301 - DNA, 100 bp, Homo sapiens
cttccgtttgttggtggaggaggtggcaggcctcggcggcacgcggaataaaagatgctacagaaatcatctttgagatgtcaaaagacgaaagaaaaga

SEQ ID NO: 81302 - DNA, 74 bp, Homo sapiens
tcgaggtcattggcttcaccatgacgtcgttggaggtggaaaagtcgggtctgctcaacatgaccaagattgcc

SEQ ID NO: 81303 - DNA, 100 bp, Homo sapiens
cctggactgtgggctggtgtgtggaactgagcaaaatatgctgtgaattccatcaagaagaaagtcaacgacaagaacccacacgtcgccttgtatgccc

SEQ ID NO: 81304 - DNA, 82 bp, Homo sapiens
gttgcgggccccgggacctgggctgggaacccgcggtggagcgggacacgaacgtgggccgagaactactggtggcgtggcc

SEQ ID NO: 81305 - DNA, 75 bp, Homo sapiens
cgcttccgcgaccacccggagtgattgcccggcagagcgcgcagcatcactgtttcttggcgtgtgaagataacc

SEQ ID NO: 81306 - DNA, 82 bp, Homo sapiens
aaggaggggcggcagcttctccgacaatctctgttgaggagctggcgcggaatctggtcatcaaggtcaacagggatgctgt

SEQ ID NO: 81307 - DNA, 74 bp, Homo sapiens
tcccctggtgcacgtggtgtgtcagtcttatgctggcagagaggctgatgacatcgtgaactggctgaagaagc

SEQ ID NO: 81308 - DNA, 90 bp, Homo sapiens
ctcaaataccctccttttgcgaaaaagtggatcaatattcggaagtcatatggaaatttttacaagagagttaattgttaaatccagtat

SEQ ID NO: 81309 - DNA, 101 bp, Homo sapiens
ttgaggtctgtcggagctgcccttcagtgtgaatgatgtctatgaatgggctcgtgaccaccgtgcccaccacaagttttcagaaacacatgctgatcctc

SEQ ID NO: 81310 - DNA, 75 bp, Homo sapiens
aaatctgatgttgaatatgaaaatggcccccaaatggaattccaaaagatctaccttctgagatatcatccttct

SEQ ID NO: 81311 - DNA, 74 bp, Homo sapiens
cccggtacatctgaaagccgggaaatggcctctttgcacctccacgtgccttcagtgcaatctgacgagctgct

SEQ ID NO: 81312 - DNA, 89 bp, Homo sapiens
tatgaagatcatgtcccaagatgccatgatgatcacggatgaggtcaagactggatacacgtctgtttaactacgcaaaaggtaatgct

SEQ ID NO: 81313 - DNA, 91 bp, Homo sapiens
actttgcgacggaaatgtgtcatcgaaagccaggtaagaacaagagagttggaaagcagttagcctcacagaagatccttcagctgctgca

SEQ ID NO: 81314 - DNA, 85 bp, Homo sapiens
tatattatgccagttttttggaagtcttagttcgagatgtgtgtatttcatcttccttcaaaatgtctactgttcacgaaatcct

SEQ ID NO: 81315 - DNA, 74 bp, Homo sapiens
gagtttccacagtgattgatgctgcctcaggtcccttcaccgatgttgtcaccaccaacctaaagcttggcaac

SEQ ID NO: 81316 - DNA, 75 bp, Homo sapiens
gttgattttgactatcttcttagtggccgaaccatgtgtgctcagtattgcatctcctttgctgatgttgaaaaa

SEQ ID NO: 81317 - DNA, 100 bp, Homo sapiens
tagacttccggaaggactttggcgaggggccaaatccttgtagctgtcttcttgccccggtcagtgccagccgtactattcacaacactgctgctaccga

SEQ ID NO: 81318 - DNA, 74 bp, Homo sapiens
agaacttagccaagagtctgggtctccgggccaacctgagggttggaagtgtatcctcccttcttattttttct

SEQ ID NO: 81319 - DNA, 96 bp, Homo sapiens
agattatgagaaattgcagcagtcacccaaacctggggagaagattgtggccgccatcctcgccatcgctggcattgtgatgatgacctacgctga

SEQ ID NO: 81320 - DNA, 82 bp, Homo sapiens
tctgtttgatggcaccagccagtcaacagattcttggatctcccagtcagcttcatttccccgtaatcagaaacaaccaggg

SEQ ID NO: 81321 - DNA, 97 bp, Homo sapiens
tttctgccacttttgcaagggcgaggtcagccccaaactaccgttgcagaatgaagaagagtctggagaacctgaacaggctgcaggtgatgctcct

SEQ ID NO: 81322 - DNA, 100 bp, Homo sapiens
caacagctcagcaggatggaagggagagcccgggccacccggacagatgggaccagaaggtcctggaggccagcagggctcgccggggacccagggccgt

SEQ ID NO: 81323 - DNA, 96 bp, Homo sapiens
cctgggactcgtgcgctaccgcctggagcacggcggccaggaacacgcgtggatagatacttctcaagacatcacacagcgtgagtcaatcaagga

SEQ ID NO: 81324 - DNA, 74 bp, Homo sapiens
ttagaagtggtgatgcaagaagtttctaggaaaggccggacaccagaagctccaccatgaggcgaggtggatgg

SEQ ID NO: 81325 - DNA, 76 bp, Homo sapiens
tttgaaggtgcaagatactatataaaacaaatggacacctaccagggaacggagatgtgtatcaagaaaggctggc

SEQ ID NO: 81326 - DNA, 75 bp, Homo sapiens
cgccagatagaattcatcatcaagcagctaaattccgactctgaagaagaagctatggagactacaccagccaaa

SEQ ID NO: 81327 - DNA, 100 bp, Homo sapiens
gattgcggagcccgctcacttttacctgtttggattaatatgtctctgttcagacagctcagctctctcaagccagcggaatagtttcccaacttccttt

SEQ ID NO: 81328 - DNA, 74 bp, Homo sapiens
gaggtgacgtgtctggcatggagaccagatggcaaacgttttcctcctccaccaggcgctccacctccatctct

SEQ ID NO: 81329 - DNA, 80 bp, Homo sapiens
ctgcaaggctatcatttcacagctgattcctgggagcacatccatttcattggcaagcaattaccagtgataacatcaaa

SEQ ID NO: 81330 - DNA, 75 bp, Homo sapiens
acatcctgctcctgctcatggacgacggttaccttcccgccaatgtagaccggagaccagccactctccagagaa

SEQ ID NO: 81331 - DNA, 50 bp, Homo sapiens
tggaactcaggcagaaattcgagtttcttgcagaacataaattattagga

SEQ ID NO: 81332 - DNA, 80 bp, Homo sapiens
cgcggtggtcaagcgggccacgcacctcgtcaccaaggccaagataacagtcttcactcctatgctgatttttctggtgc

SEQ ID NO: 81333 - DNA, 101 bp, Homo sapiens
accacaacagggacacctggttccagctgcagcacgtggacgctgactcggaagtgcagatggccaccatgtctgggagatggaagcgaaaactgaccggg

SEQ ID NO: 81334 - DNA, 50 bp, Homo sapiens
catcctcccaaagggacagtaggcagagcactgcagcctgtggtgttgag

SEQ ID NO: 81335 - DNA, 90 bp, Homo sapiens
gcatatttgagtcatttccttcgtacccacagtgcttcatgagaggaacccaagacagaccaggatgaggagcattgccggaaagtcaac

SEQ ID NO: 81336 - DNA, 100 bp, Homo sapiens
ttgcccacgcaccccactcggcgtcgcgcggcgtgccctgcttgtcacaggtttttagaacttcagccataaaaatgggcagaattttccttgatcatat

SEQ ID NO: 81337 - DNA, 100 bp, Homo sapiens
aggaaggaggaagtgatctgggaatgtctggcaactctggtgtctgtgacctttgaggatgtggctgtgacattcacccaggaggagtggggacagttgg

SEQ ID NO: 81338 - DNA, 75 bp, Homo sapiens
aacgctggaggagaagtcagtagcaagcagctaagacaacatggtacatgtgagccctatgagtttgtctctctg

SEQ ID NO: 81339 - DNA, 100 bp, Homo sapiens
ctttgtctccaattcaaaattgttttcagctaatctgtggtgtgctgttggagtcaatttatctggtgggaagaccagagatggtggttctgttgttgga

SEQ ID NO: 81340 - DNA, 75 bp, Homo sapiens
ggaaaatggagcccttcaccaatgcagagtgacaaagacctcgatgatgccttggataaactctctgacagtcta

SEQ ID NO: 81341 - DNA, 75 bp, Homo sapiens
gcgcgggccgggccggcgtggctgctgctggcaatctgggttgaccagtatctctaccacatgcgcctctctgat

SEQ ID NO: 81342 - DNA, 82 bp, Homo sapiens
agctgggacacccgggagtcaggaaatggaatactcccccagttgcaagaggcgcaggaccgtggaagacttcaacaaattc

SEQ ID NO: 81343 - DNA, 90 bp, Homo sapiens
gcaagaataaagaaatcaagattgaaccagaaccatgtggcacagactgcttccttttgctgcccacttataagaagcgaaggttggatg

SEQ ID NO: 81344 - DNA, 74 bp, Homo sapiens
ccctgtttttgccaccacactccagcttgggtgaggaattttaaattggaacaagagcaagaaaaaaacaaaat

SEQ ID NO: 81345 - DNA, 123 bp, Homo sapiens
gatggctgctgcggaggcgttggagcgcggaaatctggaaccgggatggcgacgtctacactgagtcggaggcgaagacccaacatgagtgaagtttcctgcaagaaacgggacgactatttg

SEQ ID NO: 81346 - DNA, 100 bp, Homo sapiens
cttcttgctcatttctgagtattgtctttatatcctgacactatgaatgctacttggatgcctcttaaggatgttttagaagaatgtatgtctcttccca

SEQ ID NO: 81347 - DNA, 82 bp, Homo sapiens
agccctgtgcacttggatttttcttcagggtgggattaaaaactcagcctgaatcaaaatgccctgagctgcttgccaatta

SEQ ID NO: 81348 - DNA, 74 bp, Homo sapiens
gcatggcacgctgcatggagccaaaatcgggtctgaggttctgctccagacgagcccttaccacgttgactcac

SEQ ID NO: 81349 - DNA, 80 bp, Homo sapiens
agaagctcctggcaaaactgcgctttctggctgaggagcatggaggagcaggacttggagcgaaggttcgagctgctgag

SEQ ID NO: 81350 - DNA, 75 bp, Homo sapiens
cgtctttccgtcctctgaggcgacggccgcggctgcacaggggtagaaatatttctgtcatggctcattcaaaga

SEQ ID NO: 81351 - DNA, 90 bp, Homo sapiens
actgcttgaacatcctttgactggttagccagccgcttacaaacacgcagatggcaagaagattgatggcaggagggtccttgtggacgt

SEQ ID NO: 81352 - DNA, 51 bp, Homo sapiens
cttaccacccagcagcagggcatcaagtgtggcttcctgttgtggtgcatg

SEQ ID NO: 81353 - DNA, 90 bp, Homo sapiens
ggtcttgtagcagcgcctcctcggtgttgagccagtgcaggttcaggaaactgtggaaaatcacttgaagagtttgctgatcaaacattt

SEQ ID NO: 81354 - DNA, 100 bp, Homo sapiens
tggggaatctatagttaatcttggcgacattgacaatgatggctttgaagacttaattcagtgcacaaatgagatgaatgtgaacatcccacagttggca

SEQ ID NO: 81355 - DNA, 100 bp, Homo sapiens
ccccggcgcctcccgaggacgcagaggctggggagtagctgctgagatgggaaagggctccttcaagtatgcctgggtcttggataaactgaaagctgag

SEQ ID NO: 81356 - DNA, 80 bp, Homo sapiens
ggcgttcggtcctgctgttgcggccgctgccccagggctgcggggacggtgtggacactgccagcggctgcagccgactt

SEQ ID NO: 81357 - DNA, 100 bp, Homo sapiens
cgagaggatctggtgtaccaggcgaagctggccgagcaggctgagcgatacgacgagatcctgaaggagctagacgagtgctacgagcgcttcagtcgcg

SEQ ID NO: 81358 - DNA, 97 bp, Homo sapiens
ctatttcaccaaaatctgcaaatgtaaactgaaggacatcgcatgtttaaaatggaggaggagaacggggctgaggaggaagaagaagaaactgccg

SEQ ID NO: 81359 - DNA, 75 bp, Homo sapiens
caccatcgagcagtatgccgccctggccacggggactctcttctggatggggaaagtgcagtgttgcccttctga

SEQ ID NO: 81360 - DNA, 119 bp, Homo sapiens
ctgaagcgctgcggcatggcgcgcgcctgcctccaggccgtcaagtacctcatgttcgccttcaacctgctcttctgggaacttgctactaccagcaccatgccctaccaatatccagc

SEQ ID NO: 81361 - DNA, 83 bp, Homo sapiens
gaagcagccgatccagcctgcggagcctgtggggcaggaccggaagctcaccaagctggagcggcagcggttcaaggaagagg

SEQ ID NO: 81362 - DNA, 100 bp, Homo sapiens
tataatcctgaggtgtttgacaaaacataccaattcttgaatgacatccgagcgaaagagaaagagttctgttgagttggaagaattggcaaaatatctg

SEQ ID NO: 81363 - DNA, 51 bp, Homo sapiens
tgcgctgttccacctcattcaacttcaggtgtgggcagaagaaaaagctag

SEQ ID NO: 81364 - DNA, 75 bp, Homo sapiens
ccaccatggagaagcataaagagaatgcagaggctgtgcattttttctgcaattacgaagagagccgaggcaatt

SEQ ID NO: 81365 - DNA, 100 bp, Homo sapiens
tcctacagcaagctgctgtgcggcctgctggccgagcgcctgcgcatcagcccggacagggcctacaaatccgcactggactacaccaaacgaagtctgg

SEQ ID NO: 81366 - DNA, 86 bp, Homo sapiens
agccacccccagctcttcagcattgtccgccaggcctgtgtccggagcctgagctgtgaggccatcaccatcgaggctgagccaag

SEQ ID NO: 81367 - DNA, 82 bp, Homo sapiens
gaagagctctcctccttcttcctcaactatctcgctgacacgcaggagcaggccgggctctcgccatgggtcactgtcgcct

SEQ ID NO: 81368 - DNA, 73 bp, Homo sapiens
tgtccggggccgggctcaggagcagaggagtccaaaactacttacctggaagaccttccaccaccccctgagt

SEQ ID NO: 81369 - DNA, 100 bp, Homo sapiens
ctcgcttgggtgcccgcccttagcggcccggcgttgaattccgggaagtgggagcttcaggctcgctccgtgcggaggacagaaaaatggttcgtattgt

SEQ ID NO: 81370 - DNA, 90 bp, Homo sapiens
ggctcacctaacctctcccctaactgcaattcaagactgctgtactatcccaccttccatgatggactctcgtggcattatccttcagtg

SEQ ID NO: 81371 - DNA, 100 bp, Homo sapiens
cggcagtgtatctctgcgtatgaagcaggtggaagaactacacccaaggacaatgctgctactctacaaccatctgatgacaccgtgttacctggcggtg

SEQ ID NO: 81372 - DNA, 88 bp, Homo sapiens
ggccttgcccgcatctatagtttccagatggctctaacctcagtggtttttctatatgagtggagaagacagctgttaccagggaggt

SEQ ID NO: 81373 - DNA, 74 bp, Homo sapiens
gagaaagttgtgaagatggatcgagacatgaccaagggcttccgagtggacctgccaatcaagtcggcccgcta

SEQ ID NO: 81374 - DNA, 90 bp, Homo sapiens
gctgcggaacaggacgccctctgatgaaagaccacagcaagattctttcattcgtctcctcctagcctgggggaccaggctcgaactgac

SEQ ID NO: 81375 - DNA, 100 bp, Homo sapiens
aagcgctttcccgagaccgtcctggcgcgatgcgtcaagtacactgaaattcatcctgagatgagggagacattagagaagcaagtattttctctctgga

SEQ ID NO: 81376 - DNA, 75 bp, Homo sapiens
ggagactggaggaagaattcccaagccagagctttccagtgtgtcccggcatggatatccggaacaacctcacta

SEQ ID NO: 81377 - DNA, 83 bp, Homo sapiens
gattttataaacagcttggcagtgcaggaggaacatatgcagcagaaaaaagaggaggaagaagttcttaaagaagtaactgc

SEQ ID NO: 81378 - DNA, 75 bp, Homo sapiens
gctgctcttgcctgggagtcatggctctggtgtttgccatcaaggagatcacaaatcaacatctcacttccgaac

SEQ ID NO: 81379 - DNA, 75 bp, Homo sapiens
ctgagactgtgtgatgtgctgaagccaagaaggtgctggagaatctggtaaaagcaccattgtgaagcagatgag

SEQ ID NO: 81380 - DNA, 75 bp, Homo sapiens
ctgcgggtgggaactggagcgcagagtccgcggccggcacgggaaagatgtgtatatctcatgattgatatggag

SEQ ID NO: 81381 - DNA, 83 bp, Homo sapiens
tgacgacacgcctttgcacgacgctgccaacaacgggcactacaagctcgagttaaccttcagctacttggagattcatggcg

SEQ ID NO: 81382 - DNA, 89 bp, Homo sapiens
agaaatcatctttggacaaaagaaagcaagaccccgagtggaagactttgagaatcactacaagaaaaactccttgtggtgaaggttct

SEQ ID NO: 81383 - DNA, 100 bp, Homo sapiens
gaaggcttcaaaggctgtcgcaaggaggaaggcgtccaggtgatcccccaaacagcatgtgctcagccccagacctgccgcctgggaatcaggattcctt

SEQ ID NO: 81384 - DNA, 82 bp, Homo sapiens
gcaagctgtgcgacgtgaccctcaagaggaagcagaccagcccactacagagccaggcatggtcctggacagtgtggaagca

SEQ ID NO: 81385 - DNA, 80 bp, Homo sapiens
gatggcaacagaggatgtcaacaattttttggaggaaataccacacacatttattacagtttgatggtgaaggaggttgg

SEQ ID NO: 81386 - DNA, 110 bp, Homo sapiens
caatcatcgaatctactcctgagctggatatggacaaagatctcagtggatataaaggttcaaggcttccgaagatcttctcaaggaacactacgttgacctgaaggacc

SEQ ID NO: 81387 - DNA, 101 bp, Homo sapiens
ctgctagtgactggcgcgtacgagatctccgaccagtctgggggcgctggcggcctgcgcagccacctcaaggaaaacctatttgattctttgacaggcca

SEQ ID NO: 81388 - DNA, 100 bp, Homo sapiens
aggcagcacagatagacggatccatggcgttcaggaagtggcttatattcactcaaaccagaatgtaattggatcgagcaaagctgaaaatcacatgagc

SEQ ID NO: 81389 - DNA, 125 bp, Homo sapiens
gcccggggactacagcacgacccccggcggcacgctcttcagcaccaccccgggaggcccgatgagagaaagggaaagttaaggatgctggagcagaacaatggatttctctttctctttcatgc

SEQ ID NO: 81390 - DNA, 74 bp, Homo sapiens
gagcctcaaaatgaagatggcacatggcccaggcagaccttgcagtcaaagggtttaaagccaatttgtctctc

SEQ ID NO: 81391 - DNA, 90 bp, Homo sapiens
ctcagaatattttcttgaaccggagatcaatttggtgacggaaaacacggagaatattctgactgacctcaagagaatttgcaagacaat

SEQ ID NO: 81392 - DNA, 100 bp, Homo sapiens
aggatgaagtgaacagctgagcagctcgcagagagcagctgaattcttgccgccaggatggggaaacagaacagcaagctgcgcccggaggtcatgcagg

SEQ ID NO: 81393 - DNA, 74 bp, Homo sapiens
ggtcctttatatagaagggagagtagggaggagatgaagtggcggcagtgggcggacgactggctggtgcacct

SEQ ID NO: 81394 - DNA, 85 bp, Homo sapiens
aggccgcttggttctgacccagctgagcatttttgaaacgttggggttgttggagtggttggattttccctggaattgagtgaga

SEQ ID NO: 81395 - DNA, 75 bp, Homo sapiens
cggtcatccacctgctgcagatggggcaggtgtggagtgaacagagtatctgtcaggcaagagctgctgtgatgg

SEQ ID NO: 81396 - DNA, 100 bp, Homo sapiens
attgctatgggatttcctgcagaaagacttgaaggcgtatacaggaacaatattgatgatgtagtaagtggatgaggatcgcagtacggaacctgaccga

SEQ ID NO: 81397 - DNA, 75 bp, Homo sapiens
cccccacctggtcctcctccacctcccacatttcatcaggactcattctgaccagtttctggtggcattcaaaga

SEQ ID NO: 81398 - DNA, 100 bp, Homo sapiens
agagaagcattgggggaaccagtgggccccacgtgggtaaaaaggacattggctccctggattatcaagagtttgtagttgacattgaatccaggctgag

SEQ ID NO: 81399 - DNA, 98 bp, Homo sapiens
cccggacggactacgagtaccagcactccaatttgtatgccatatcagattctgaagggagtggtaatggaagtgaagatgcttcaaaggacagtgga

SEQ ID NO: 81400 - DNA, 50 bp, Homo sapiens
caggcacgcgccaccactcccagcaattctgtggtgttcttggtcacaca

SEQ ID NO: 81401 - DNA, 90 bp, Homo sapiens
tcccagatcaccgccatcgaggcacagcacttgctcaagaggaaaccagtaacgaatccagaaaactctggagagcccttcagagcatac

SEQ ID NO: 81402 - DNA, 95 bp, Homo sapiens
gcccagcctctaccagatccgcaccaacggcagcgccctctgcacccggtgcaccagggacctgtccctctgtcctacacggtcaccacagtgac

SEQ ID NO: 81403 - DNA, 76 bp, Homo sapiens
gagagggagcggctgctcaaggcccgggacgccgtggaggaccggctggacaggaacctgtggcccttcgtatccg

SEQ ID NO: 81404 - DNA, 82 bp, Homo sapiens
acaaatcacacgcataatggatgaaaggaaccgacaggggatcatcgtcttgctcttcttttatctcagtttgtgggtagcc

SEQ ID NO: 81405 - DNA, 100 bp, Homo sapiens
tcaactggatatgatccagttaaactttttaccaagatgagctttgatccaaaccttctccacaacaatggacataatgggtaccctaatggtacttcag

SEQ ID NO: 81406 - DNA, 83 bp, Homo sapiens
cctctgacgtgccgttactcagaggctgaccccgcactacatctacccaccagccatcgtgcagcccagcgtggtgatcccag

SEQ ID NO: 81407 - DNA, 74 bp, Homo sapiens
atgcggcagctggcccagacgggcagcttgggacgctctacgaactcgacggggaccccaagaggaaggaattc

SEQ ID NO: 81408 - DNA, 90 bp, Homo sapiens
ctttggaaaaccgatgtgataatggtagctgagtggaggttgtctcgaggtgttgaagaacagacacaagctttctttgaaggctttaat

SEQ ID NO: 81409 - DNA, 100 bp, Homo sapiens
gaacgattgggctgagcagaggacgacatgttgcttttcgtggagggaacccgagcgtcatgttagggtgaagcagaggacctcagtgctgaacatgcta

SEQ ID NO: 81410 - DNA, 100 bp, Homo sapiens
atgcgtcacactacgacagtgagaaaggaggacaaagcagttccaattccagagaaaatgagtgaatgggcacctcgacctcccccagaatttgtccgag

SEQ ID NO: 81411 - DNA, 104 bp, Homo sapiens
gcgggtcccgcgggccaggccgtggaggtttggaattcacccagttgcaggccgaatgcctggtcagcttaatgtgctgctggctgaggctggtgtgccatatg

SEQ ID NO: 81412 - DNA, 88 bp, Homo sapiens
aataacaacggatgggactcctggaattccatctgggattatggaaatcttgcgcgatctctggcctcttcaactgcatcaccatcca

SEQ ID NO: 81413 - DNA, 75 bp, Homo sapiens
ccaccctggcagcatcccacctcctgagtcctctcggcacccagcaagcttgatgaagaaatctctggaattgtg

SEQ ID NO: 81414 - DNA, 100 bp, Homo sapiens
ccagctatgtgtatccatggagacaagagtcaaccagaaagagattgggtacttaatgggcaattgaaggaacagactaaaaatcgtgtcctggaaggaa

SEQ ID NO: 81415 - DNA, 90 bp, Homo sapiens
agcgattctcccgcctcagcctcctgagtagcaattacagctgtcggaaaaggtaacagaagatggaactcgaaatcccaatgaaaaacc

SEQ ID NO: 81416 - DNA, 75 bp, Homo sapiens
tctcatcacagaggcatcacagcatctcccatgacaagaaaggaagctcttcgtgggcggtcttgactggagcac

SEQ ID NO: 81417 - DNA, 100 bp, Homo sapiens
gacggtcacgccgcggcgggcgatgacctgtgtagaaaaagcaggaacagatgagaaaatgcttatgaaggtttttcgctgtttgggaagttggtttaac

SEQ ID NO: 81418 - DNA, 82 bp, Homo sapiens
tatcaggacatggagtatgaaagacggcaagtatatcgcgtcaacacagcgacctgacgggacctggcgcaagcagcggagg

SEQ ID NO: 81419 - DNA, 60 bp, Homo sapiens
ttgctgcctctgtgtacgctgaggggggagggagtgcatccgccccaacccttttccccc

SEQ ID NO: 81420 - DNA, 90 bp, Homo sapiens
agcctcccgagtggctgggattacagtgcctcccttcaggagccgaggacatcatgtctggtggccccactttggaggctgctgaatttg

SEQ ID NO: 81421 - DNA, 98 bp, Homo sapiens
ttaacctggaggatgcagtgaaagaaacttcctcagtaaagcgaaactttgagggaaattttgagtcactggaccttgcggaatttgctaagaagcag

SEQ ID NO: 81422 - DNA, 95 bp, Homo sapiens
caacagactgagcgcgtccaggcctgacagctctgcggctcgggccctgaggttgaaccctcggatacgatagaaaatgtaaaggccaagatcca

SEQ ID NO: 81423 - DNA, 82 bp, Homo sapiens
tggactattccctggctgcagccctcactcttcatggtcactggtcagcccaaggctgccccctcggtcactctgttcccgc

SEQ ID NO: 81424 - DNA, 100 bp, Homo sapiens
ggagagtgaggagatcccaccgttccaccccttccaccccttcccagccctacctgagaacgaagatacagtttatgtaacttgatggaagaaaatggaa

SEQ ID NO: 81425 - DNA, 74 bp, Homo sapiens
ctcatttactgaacagtggacagatggttatgcttttcagaatcttatcaagtcagttgctctccctggaagga

SEQ ID NO: 81426 - DNA, 98 bp, Homo sapiens
ttgatcactgaaaatgatttatgcaagtttaagcacgtggccgaggagctccagcatctgctgcagtggctgatgggtgctcccgccgggctcaagat

SEQ ID NO: 81427 - DNA, 76 bp, Homo sapiens
cccggaagatcgcgatcctgggctaccggtctgtggaatgtcgtactctcaggaggctccaccatgttcagggatt

SEQ ID NO: 81428 - DNA, 100 bp, Homo sapiens
ccggacgagagctccgtgcgggtggctgtcaggtgtgaaaatgaaaccaagttcaaaacagaagatatattttgggcttacaatttctgccctactccat

SEQ ID NO: 81429 - DNA, 83 bp, Homo sapiens
tggaagcagccgatccagcctgcggagcctgtggggcaggttttgtagtgcatccctgagcatgagcacagaatgaagcggcg

SEQ ID NO: 81430 - DNA, 75 bp, Homo sapiens
cgtaagagctctctcctcacagaaatggtgaggttctggagaattgatgaggattatccagtgcaagttgcacct

SEQ ID NO: 81431 - DNA, 97 bp, Homo sapiens
ggcctgcgcttaccggaaagaggagcgtaagatgaaagagtgatttggtgctatggagaaatttttggtagaatataagagtgcagtggagaagaaa

SEQ ID NO: 81432 - DNA, 100 bp, Homo sapiens
ctctaatgtgtcttcagtgcctctgcctgcggagaatgtgacaatcactgctggtcagaggggaaaatcgttgcccagggtaaactgctcttgcaggaca

SEQ ID NO: 81433 - DNA, 107 bp, Homo sapiens
atttgatcctgattctacccaagtacatatgatttcagctgcaatggcagcctccatcaagaaatcggcgagagagagctgagctaaggccagacttctttgactct

SEQ ID NO: 81434 - DNA, 74 bp, Homo sapiens
cagctggagaccacaagcttgatgaagtttccattagagcaataggttgctccttgagggcaggacagttctta

SEQ ID NO: 81435 - DNA, 89 bp, Homo sapiens
gggtgggtgcaagatgccgctgccggttcaggtgtttaacttgcagacaatgcagatcttcgtgaagactctgactggtaagaccatca

SEQ ID NO: 81436 - DNA, 50 bp, Homo sapiens
gaactatagcaacttggtatcactaggtctctaattaacagaagatggca

SEQ ID NO: 81437 - DNA, 98 bp, Homo sapiens
gagtcatcatgagcgatgttaccattgtgaaagaaggttgggttcagaagaggggttccagagagattcctggaagttgctcagatcacattacggga

SEQ ID NO: 81438 - DNA, 98 bp, Homo sapiens
ctgagacctttcggcgacctcagatagacccatctgaagcggttctcagaatccaggatccgaaccagcaagctcacaacatttgtgaacttccccct

SEQ ID NO: 81439 - DNA, 100 bp, Homo sapiens
ctgctgctctgcctgctccacaagcggcgccgcgccctcggcctgcacggtaaaggcatgacttcctggcaccacagggaaaatcgggtgcaagcccaga

SEQ ID NO: 81440 - DNA, 100 bp, Homo sapiens
gccggttcggcgcgtcgactgcccagagtccgcggccggggcgcgggaggtttacccaaggtccagcctagcccctaggcaccatgtcggacagtgatct

SEQ ID NO: 81441 - DNA, 80 bp, Homo sapiens
cccacgggatttttagcccagcccatgaaggagctacagaaggcccaaaagaagaaatatatcaagaagaagcctttgct

SEQ ID NO: 81442 - DNA, 49 bp, Homo sapiens
ccacagtggcttggccaatggcacaggtactccaaagattcaggtttac

SEQ ID NO: 81443 - DNA, 98 bp, Homo sapiens
tggtggaggacctggatatggcaaccagggtgggggctacggaggtggttatgacaactatggaggagacagtggagatgcaccctgcctacaccgag

SEQ ID NO: 81444 - DNA, 101 bp, Homo sapiens
caggactacgaactcgtccagagggtcggcagcggcacctacggggacgtctataaggtgtccaaggcagctgcagatttgatggcctactgtgaagcaca

SEQ ID NO: 81445 - DNA, 97 bp, Homo sapiens
cgagtccacgggcctgaagaaggtgcagcggaactgctgcctgacgctctgcaacttcagcatccccgaggagctggaattccagtaccgccgggtc

SEQ ID NO: 81446 - DNA, 75 bp, Homo sapiens
ctaagaacccagggcagaaaggtttaggtctaacttcaaacttgtggctgttaattcaaaactctatgccatcgg

SEQ ID NO: 81447 - DNA, 98 bp, Homo sapiens
gcaaccctgtctgtaggaggaaaaactgtatcacgttttcgtgttttactgcaatcacagcaaccaaccccatttggcttataaagactcggttacag

SEQ ID NO: 81448 - DNA, 100 bp, Homo sapiens
gtttgatactgacctgtaaatcatcctttagacaagaaatcgctttgaaggcactagatcagaagtggaatcactgatgaaaaagatgaaggagaatccc

SEQ ID NO: 81449 - DNA, 100 bp, Homo sapiens
agccagcagtaccggccccactgcccaagaaaatctcctcagaggtgggcagtgtcaaaccgggaaatgcttatagctcaaaacagctccttggaattta

SEQ ID NO: 81450 - DNA, 116 bp, Homo sapiens
acaagaacctgcgggaggacggagagaaggcggcgcgggaggtgaagttgctgctgttgggttgaggaacaggttagcaccactgagagagtgtttcaggatagacaatatcagat

SEQ ID NO: 81451 - DNA, 82 bp, Homo sapiens
tggggatggcgcatcacacaccaaagcagcccctgtcaaagggaacaggaagcagtccacggagggtgacgccctagaccca

SEQ ID NO: 81452 - DNA, 82 bp, Homo sapiens
cgtcatcctgctgctgaagatctggaagacgcgctcctgcgccgtttggtgccctggttgtcagatgttggaaagcagtagg

SEQ ID NO: 81453 - DNA, 76 bp, Homo sapiens
cgagctgagtggttgtgtggtcgcgtctcggaaaccggtagcgcttgcagcatgggcgccatgttttggaagtttg

SEQ ID NO: 81454 - DNA, 75 bp, Homo sapiens
cgctgactttgtaggctccgccaagaggcgccgcaggagagctgcagagagacaaggcggcggcggctgctgtgc

SEQ ID NO: 81455 - DNA, 80 bp, Homo sapiens
caggaactcctgctgcaaaaatggaacaagttccagcacaagtgagtccctgtgaagcaggaagagtgagggcaggttca

SEQ ID NO: 81456 - DNA, 100 bp, Homo sapiens
tctccatcacccaccaacaacaccacaataatccacagccaagtatgccgagattttgctgtcctggaggaccacaccctggctcacagcctgcaggaac

SEQ ID NO: 81457 - DNA, 75 bp, Homo sapiens
ggaaagggccgcctcgtctccgctcctgggggaccgcagctatttgtcgtagatgtccagacaagccagatcacc

SEQ ID NO: 81458 - DNA, 98 bp, Homo sapiens
ttcccaattcctaaagcttttgttggaaatcagctgcctttcatcggatttacctactatagagaaaatttagatgcagaggatgctatttatggaag

SEQ ID NO: 81459 - DNA, 100 bp, Homo sapiens
ttttactctacgcaactgttgctttttcatggttgtttacattcagagctctatcaataagaggaatacatattacagtgaattcgacaaccgcacaagt

SEQ ID NO: 81460 - DNA, 100 bp, Homo sapiens
attataaccggagattctcagggcaacccagatctgctgtcattatttgtatcaaaaacaaagaatttgaaaaggcttcaaaaattttgaaaaaacatat

SEQ ID NO: 81461 - DNA, 83 bp, Homo sapiens
gaaggagatccgcagaggacagtcatcagattcctggtcgggtggcttccagtggtcttcagtctgtcgtgcaccgatgagaa

SEQ ID NO: 81462 - DNA, 97 bp, Homo sapiens
ctgccttatgggacagatcaagtttaccgacaagactgtgaaactttcgggatggtggtgaaaatgctgattgaaaaagatccttcattagaaaagt

SEQ ID NO: 81463 - DNA, 82 bp, Homo sapiens
agcgaaatcgagcctggccttgagggtccacaccgcgagggaagatgcgtgcgcccattgtgaaaggtgtagcagtcactcg

SEQ ID NO: 81464 - DNA, 100 bp, Homo sapiens
aggaaacaaaaagttaaacaagcaagcctgccataagtgagaaggcttgaagatgcagtggacgccagagcatgcccagtggccagaacagcactttgac

SEQ ID NO: 81465 - DNA, 98 bp, Homo sapiens
aggaatgagccagatgtttatgaaactagcgacctacctgaggatgatcaagcggagttcgatgcggattatgatgttgatgaagaggacatgatgaa

SEQ ID NO: 81466 - DNA, 75 bp, Homo sapiens
ctgctaaccaacggcaagctgccactgtgggcaaagcggctgattggctgataggctgaataatctcctgtaggg

SEQ ID NO: 81467 - DNA, 75 bp, Homo sapiens
atcaaaaatagtgatagctttgataaattcagaatggacagtttagaagaacctcagaaaaaagtctttaaggct

SEQ ID NO: 81468 - DNA, 87 bp, Homo sapiens
ggtagctggtgcagaagccattttttaaacttaggtatttaagtactgaaagttatcatttaacatggaagaagatgagttcattgg

SEQ ID NO: 81469 - DNA, 98 bp, Homo sapiens
caggcacggcccctctggaccgcctcaaggtcttcatgcaggtccatgctggcagcaaggctgcattggctgccctgtgcccaggagacctgatccag

SEQ ID NO: 81470 - DNA, 100 bp, Homo sapiens
gccctggcgcccagcaccatgaagatcaaggtcattcagtggtgcacccaccacaaggatgaccctcctcctcctgaagatgatgagaacaaagaaaagc

SEQ ID NO: 81471 - DNA, 90 bp, Homo sapiens
aatagagcctctattaatggacacttctataaccatgaatttcagaagaggagccccgccgaggcatgagggccgtgctccccccagagg

SEQ ID NO: 81472 - DNA, 100 bp, Homo sapiens
gtgaagggcagggagctggacctggaggcgccgccgcgacagcagcagccatggaggacgagatgcccaagactctgttgcaaaagcttctcatttcaga

SEQ ID NO: 81473 - DNA, 82 bp, Homo sapiens
atagaacctattatgctctatcaggctgctgctcctgctgccctgtgggctgtgccaagtgtgcccagggctgcatctgcaa

SEQ ID NO: 81474 - DNA, 89 bp, Homo sapiens
tgcagctcaacgagctgctggaggacgagggccagctgacggagatggtgcagaagatggaggagagaggaaaatatgatgttcccaag

SEQ ID NO: 81475 - DNA, 96 bp, Homo sapiens
gtgaagaggtgccggacccgatgagctcgggagtccaccatcgctctgcaagccgcaggtgtggggttagccaccagaaaactgggaaatttggcc

SEQ ID NO: 81476 - DNA, 100 bp, Homo sapiens
tcttcgagcattcactgcaccagaggttcttcaaaatcagtcactaacttctctctcagatgttgaaaagcttcatcactggtccagctgtaataccagg

SEQ ID NO: 81477 - DNA, 82 bp, Homo sapiens
agcgcgacgagggcgccgccgcggccgccccagaataccctctaccatctgctttggtcagggtgccgctcgaggatttaaa

SEQ ID NO: 81478 - DNA, 98 bp, Homo sapiens
cggagcggtaggagcagcaatttatccgtgtgcagccccaaactggaaagaagatgctaattaaagtgaagagtaatcaagtcagaggattatatgac

SEQ ID NO: 81479 - DNA, 100 bp, Homo sapiens
agagtggagctgaagctaagaaattgaatttaagggacgctgtgaagcaatcatggatgcaatgaagagagggctctgctgtgtgctgctgctgtgtgga

SEQ ID NO: 81480 - DNA, 100 bp, Homo sapiens
gtattccacatttagatctgaagaatgtttctgatggtgataaatgggaagccttgccttacacccagacaaaactctcgttgcaactggccaagtcggg

SEQ ID NO: 81481 - DNA, 100 bp, Homo sapiens
agctcatgaagcagtattacctgctggaggaccagacagatcgcctcaggcatggcgtacgtggagcggatgaactacgtccaccgggaccttcgtgcag

SEQ ID NO: 81482 - DNA, 75 bp, Homo sapiens
ggggtggtgccagtttggagctcctggaagaccccaccaacaactgaacgctttggtcaggctgctacaatggaa

SEQ ID NO: 81483 - DNA, 75 bp, Homo sapiens
gaagctgctattaaagggaagatcgatgtgtgcattgctctaagcgaaagacatgaggcctcagcctgaaatgag

SEQ ID NO: 81484 - DNA, 100 bp, Homo sapiens
agctgggtccacctcaccatcaacggagctatgaagacatgattggtgaggaggtgccatcggatcaatactactgggctcctttggcccagcatgagcg

SEQ ID NO: 81485 - DNA, 75 bp, Homo sapiens
cgtgcgaggggatgctacagagaatcaatgctttcattgaaaaacagagtccctgtgaagcaggaagagtgaggg

SEQ ID NO: 81486 - DNA, 83 bp, Homo sapiens
ggcggatggaagggaggagactcctgaccctcagaatgggaactgctcgcagaaagaagaaggtggttcatagaacagccaca

SEQ ID NO: 81487 - DNA, 100 bp, Homo sapiens
gacaagttacagtccaactggtcttcctctgattcagctgtggagtgtggttggagatgaataaaatgtttatcggtggactgagctggcagacctcacc

SEQ ID NO: 81488 - DNA, 83 bp, Homo sapiens
cgcagtggtcgcttcttctccttgggaggaagttttattttgtcttcatcaggaagccaactaattcggttgatacctgagag

SEQ ID NO: 81489 - DNA, 82 bp, Homo sapiens
ccagaccctggagcctcagttggaagcagccgatccagcctgcggagcctgtggggcagtcaccttcaggccattcagagga

SEQ ID NO: 81490 - DNA, 145 bp, Homo sapiens
tcgacagtgactaccatgacgaaaacatgtactacagccagtcttctatgtttccacatcggtcagaaaaagatgaagctgaatatggtgggcatgatcagatagatttgtatgacgatgtcatatctccatctgcaaataatgg

SEQ ID NO: 81491 - DNA, 100 bp, Homo sapiens
aacgagcctctgactccaggttatcatggattcccagcgcgggacagccagaaaatcatttgactcctggggacacagatttgctgccacagaggctgat

SEQ ID NO: 81492 - DNA, 99 bp, Homo sapiens
ctccagggttctttggggcccgagacattactggttatagaattaccacaacccctacaaacggccagcagggaaattctttggaagaagtggtccatg

SEQ ID NO: 81493 - DNA, 101 bp, Homo sapiens
tccaggaccaaaagaggaagatagtcttgggacccttgcatggtgtttcaaagggtggtgaagaactaaggagaactgcgacacatcaccaagctgaagcc

SEQ ID NO: 81494 - DNA, 101 bp, Homo sapiens
ggttatgagagatttttgggacctgaaatcttttttcatccagagaccatattttacatccttccacgcctttcaggccttattgaagatgaatggatcac

SEQ ID NO: 81495 - DNA, 101 bp, Homo sapiens
cagcagcggcccgcgcccgccggtgccaccgtcgcccgcccagcctccgcccggttgagactgagctaaagttaatctgttgtgacattctggatgtactg

SEQ ID NO: 81496 - DNA, 88 bp, Homo sapiens
gtgacctgcatgtactgggggattcgcagggaggatgtcgggacaccccggaagctgggaaatgagccctgaggatgatgacaggaag

SEQ ID NO: 81497 - DNA, 95 bp, Homo sapiens
caaactcgaagaacagctgtggaaagaagttgcaaaacactggacagcccacctgaggatattgaccataaggactcatatctcattacaagaag

SEQ ID NO: 81498 - DNA, 100 bp, Homo sapiens
ggataaacgcctggtggtactggatgaggagcttgagcacttttcaggattagaagaggctgtgtatagaaacatacaagcttgcaaggagcttgcccaa

SEQ ID NO: 81499 - DNA, 74 bp, Homo sapiens
tcctggttcttccaaagtgcccggacccaaaacaggaacggttaagaagattgtctaccaaatatagaacagaa

SEQ ID NO: 81500 - DNA, 82 bp, Homo sapiens
aaatttggagtgtgcgtgcgcgccgagcggtgtttgaaggcgtctacaacaattccagaatgctgcatttccttacagctgt

SEQ ID NO: 81501 - DNA, 98 bp, Homo sapiens
cgggagtgccgtgcgccgcagcccgggcccaggccccggcagcgcctgggacaagagaatgtaactggtcactacatttccccctttcatgatattcc

SEQ ID NO: 81502 - DNA, 100 bp, Homo sapiens
ccggagctgttcctattcggccatcttggctcctccacaagctctgaatggctttgtattagttgtcactacagatgctttggtcttttatgcttcttct

SEQ ID NO: 81503 - DNA, 80 bp, Homo sapiens
gtcacccctcagcacatggtgggggccacaccatttgccgtggccaggctagagactcctcagacccctgcacaattgag

SEQ ID NO: 81504 - DNA, 83 bp, Homo sapiens
gatgccttcaatactacctttatttccaccatagactttgccttcaaaagaaacagcatttttaaacactacacaaatgcctt

SEQ ID NO: 81505 - DNA, 92 bp, Homo sapiens
gcgcgcagggcctgcagcgggagctggacggcgagcgcgagcggcgcgagaaataatagctcttcaagtctgcaataaaaaatggcctccaa

SEQ ID NO: 81506 - DNA, 100 bp, Homo sapiens
cgtgtgaagctgccctccggctccaagaaggttatctcctcagccaacagagctgtggttgggccggatcgtggcacccagaggctgccaggactttggc

SEQ ID NO: 81507 - DNA, 97 bp, Homo sapiens
gaccgtgaccgagagcgtgaccgagagcgcgaatatcgtcatcgttagaagactgtttgaattccagaaggaccaacaccagataaattatgaatgt

SEQ ID NO: 81508 - DNA, 110 bp, Homo sapiens
cggcttcaggaggcccaagacaccacagaagccctccgagcccagaaccaggaagacagcgcttccagcaacccgtttgcactccccaactctgtcactccccccttacc

SEQ ID NO: 81509 - DNA, 100 bp, Homo sapiens
ctgagctgtaacaaagcactctgtgctagtgatgtgagcaaatgcctcattcaggaggagcaccgaacagccagttccctgagcagtggtgcccttacgt

SEQ ID NO: 81510 - DNA, 100 bp, Homo sapiens
cttcagggatctgtaaagatcatttaaatggagtgctcatctcattgaggagcagattaattttgcgctgctgaaaatatgacaagctgactttctggag

SEQ ID NO: 81511 - DNA, 87 bp, Homo sapiens
ggcggcggcggcggctgctgctgctgctgcccgcgtccgaggctcgcgggcggcgggcccggatctgggacatgagcgatgatgaga

SEQ ID NO: 81512 - DNA, 82 bp, Homo sapiens
ctgggcgctccggtggcggcggagaaatgaagctgttgtcatttctggaaggaaactggcccagcagatcaagcaggaagtg

SEQ ID NO: 81513 - DNA, 96 bp, Homo sapiens
cccgcgctttatcaagattatcgagctgcccaccgcacggatgatcgccttcgccatggcgctactgggctgcgtgctgatcatgtacaaggccat

SEQ ID NO: 81514 - DNA, 83 bp, Homo sapiens
agaagatcttcgagttcaaagagaccctcggaactcgggaacatgccctgtgtgccgccgtcatttcccacctgcggttattg

SEQ ID NO: 81515 - DNA, 100 bp, Homo sapiens
gtaggcaagacctgcctcctgttccgcttctcagaggacgccttcaacaccaccttcatctccaccatcggtgtaaagtggatatctcggcactccctct

SEQ ID NO: 81516 - DNA, 76 bp, Homo sapiens
gctgttggtttgtggaacagacagctccttctttattgctcccagggttgctagagctccttgtagaatatttccg

SEQ ID NO: 81517 - DNA, 75 bp, Homo sapiens
catgtctcccgaggagtgcaggcgcttcaccacagacgcgcacaactacgggattggcgccgccgcctgcgtgta

SEQ ID NO: 81518 - DNA, 75 bp, Homo sapiens
gtttttagaacggcctcgtgttcggtttgatggttcggctttccagtttggcagcagcactacaaatttcaactt

SEQ ID NO: 81519 - DNA, 100 bp, Homo sapiens
ccaccatctttcgggctgccgagggtgttcttgacgattaatcaacagaaggacagaataacgggctcccagattcacaagccccaccaagaggatcacc

SEQ ID NO: 81520 - DNA, 75 bp, Homo sapiens
cagatgcagctgtccaagaacgagcaggagcgagaggttcagtgtatctttgcctgcctacatcaatctgcaagg

SEQ ID NO: 81521 - DNA, 50 bp, Homo sapiens
ctggacaggacggagcgcaggcaggctgttttggagtcagcggaagatca

SEQ ID NO: 81522 - DNA, 101 bp, Homo sapiens
gaccgagcctgggaggccggccggtgccagcacctttcggcttctgagacggcggcagcagcggcattcagaatgcagagagcagtttgcagcagaagaat

SEQ ID NO: 81523 - DNA, 50 bp, Homo sapiens
acctggccaacccccacccgttcgcagcaggctatggaactcagtcaact

SEQ ID NO: 81524 - DNA, 82 bp, Homo sapiens
ggctgatccaccaatagcccggctcttgattgcggggactaactcctccgaccttcagcagatcctgagcctactcgaatcc

SEQ ID NO: 81525 - DNA, 100 bp, Homo sapiens
gtcatgcccatcgccatgagcatcaaggcaggcacggtggatgaggactcgtcaggctccgacctgactgccggaatcagagccgcgggtgagatcccca

SEQ ID NO: 81526 - DNA, 75 bp, Homo sapiens
atgaccagatccaggccaatctccccgatgaggaacagatggagtcggataactgttcaggaggagatgatgact

SEQ ID NO: 81527 - DNA, 82 bp, Homo sapiens
cagggtcaaaggagagcacaaccatcgcagttggaagcccatggggcaggagcgcctggaccatgctgctgagcgcctactg

SEQ ID NO: 81528 - DNA, 101 bp, Homo sapiens
gcgccaaggagaccaggaagcgagcactcagcaggtttctgcctcaatgctcaagcagtttcccaacagtggcctgagtccaggtcttttcaatgtggggc

SEQ ID NO: 81529 - DNA, 83 bp, Homo sapiens
cagagcagggcggcggcgactcgtttaagaggcgagttcaggagtccacgcaggtgctacgggagctggagacctccctgagg

SEQ ID NO: 81530 - DNA, 75 bp, Homo sapiens
tgctgcttttgatgtctgacaacgtggatcgttgttttgaaacctcctgggcaacgtgctggtctgtgtgctggc

SEQ ID NO: 81531 - DNA, 83 bp, Homo sapiens
catggctgactacctgctgtacaccctcaacaaacaccagcgctttggattgagaggatccagaatccagatctctggaatag

SEQ ID NO: 81532 - DNA, 99 bp, Homo sapiens
gagaattctggctccctgtaagacacttccctctgtgaccatgaaactctgggtgtctgcattgctgatggcctggtttggtgtcctgagctgtgtgca

SEQ ID NO: 81533 - DNA, 75 bp, Homo sapiens
gcgggagccagcgagccacgggagcgagccagggcgaccattgacgaggtggagacggacgtggtggagattgag

SEQ ID NO: 81534 - DNA, 50 bp, Homo sapiens
taacaccctgtaacagctgagtagtcagatgcctccgcagccacccggga

SEQ ID NO: 81535 - DNA, 99 bp, Homo sapiens
ccatgaatctggacaaatttgagaaaggccccagggaaatttttcatcctgaaatacaaaagagttgtggaaagtaaaaatgtagccctaccaaaagga

SEQ ID NO: 81536 - DNA, 98 bp, Homo sapiens
tcgccaaattaaagttttacaagatttaacctgtcatcaagacctgggattttggtgtggcaccctgtgctgcgcacactaaagaaccgcattgaaga

SEQ ID NO: 81537 - DNA, 75 bp, Homo sapiens
gcggctgctgtctgcgcttgaggacttggaggtcctgtctagaaacagctgttatacccattaatggttcacctc

SEQ ID NO: 81538 - DNA, 83 bp, Homo sapiens
gaaagcgagtttcttgaagagtcatctgctaaactccactagagtcatctctacacaaattgtggctactaatttgccccctg

SEQ ID NO: 81539 - DNA, 100 bp, Homo sapiens
ccgcttgccgcagccgcctcagaacccgaccaacatccagaacttccagctgcccccagctccaccgggggacggctacgtgcaggcggacgcccggggc

SEQ ID NO: 81540 - DNA, 49 bp, Homo sapiens
tcaaggataagtctcatgacaccagtcccctttacttggtaaatcacgg

SEQ ID NO: 81541 - DNA, 86 bp, Homo sapiens
aggcctatttggttgagagaaagcactgtccaaggggcatatggttctgaagatatgaaagaagcctgaacacttgcctttgcaga

SEQ ID NO: 81542 - DNA, 100 bp, Homo sapiens
gaggagaagaagaagcagctggtcagacaggtgcggtttctggagcagcagaacaagctgctggagaccaagtggacgctgctgcaggagcagaagtcgg

SEQ ID NO: 81543 - DNA, 100 bp, Homo sapiens
ttaaagccatattggagtagcgaggaatctgattccaagcaaaaaccagcctaccgtatgtgaacgggagctgtgtgtgtttgcttttcaaaccctggga

SEQ ID NO: 81544 - DNA, 100 bp, Homo sapiens
gagagggacaggagtatctgaggatggagaactcagcagcttgcattgatgacaatgttgatatggtgaagtttctggtagaaaatggagcaaatattaa

SEQ ID NO: 81545 - DNA, 82 bp, Homo sapiens
ctttctacaaggagggcaagtttgcttccaaggtggcagcctcggtttcttcccctcctccctggcctacagcccctaccag

SEQ ID NO: 81546 - DNA, 82 bp, Homo sapiens
ggatctttgagtctagcaagtgttattatttctgccctttgtacccttacaagaacagaaactgttcatacttggtgcgctg

SEQ ID NO: 81547 - DNA, 100 bp, Homo sapiens
ctattgccaagcagtgagactattgccaagtggtgagaccatcaccaagcggtgagactatcacctatcgccaagtgttttctggatatgccgcagaagg

SEQ ID NO: 81548 - DNA, 74 bp, Homo sapiens
tggaaatcgagggcgagaagatcaagcccatgaaacccctgaaggccaccgccaccacctcccagcccgtgctc

SEQ ID NO: 81549 - DNA, 96 bp, Homo sapiens
atccaagcgtttccgtgccgagcggcaggacaacaaggagaactggctgcaggccaaatccttgtagctgtcttcttgccccggtcagtgccagcc

SEQ ID NO: 81550 - DNA, 76 bp, Homo sapiens
tgaaagccaaaaaggagaattctctctttcagatgctgtgagagaagtaaggaaatattcctcagttcataccatt

SEQ ID NO: 81551 - DNA, 82 bp, Homo sapiens
ggagattccacccaaacttgctggtcactgggagtggaagcatcagttcacagcagtaatgcacactgtacagataagacaa

SEQ ID NO: 81552 - DNA, 100 bp, Homo sapiens
ggagtgtccgctgtgcccgggcctgcaccatgagcgtcccggccttcatcgacatcagtgaagaagatcaggatgtgatggagctgcttgaagaagatct

SEQ ID NO: 81553 - DNA, 83 bp, Homo sapiens
aagaaccacaaacttgaagatggatatcagctacagactttcctgagtcaggaagctgccacttttgctagagagcaaggctt

SEQ ID NO: 81554 - DNA, 75 bp, Homo sapiens
aatcatcgaaaagatgctgaacagggagtctgaagatacagtattgctcgtcctcaaagagatctaccaaaccca

SEQ ID NO: 81555 - DNA, 90 bp, Homo sapiens
ataaagtcagccatgtgagcactgggggtggtgccagtttggagctcctggaaggtgtgggcagaagaaaaagctagtgatcaacagtgg

SEQ ID NO: 81556 - DNA, 74 bp, Homo sapiens
cttcgagttgtcatccccccttcaagcaagggcatgatgcctccactagtctacatgttcaagtgcgtgtggcg

SEQ ID NO: 81557 - DNA, 100 bp, Homo sapiens
gtgggagaagtctctattcaggtggacttgtttacacaccctggtactggggagcacaaggtcacagtgaaaggtatccgcccccagatcatgaacggcc

SEQ ID NO: 81558 - DNA, 100 bp, Homo sapiens
ttcaggtcctgggtcgatgtctgtctatggaataaagccccgtcaggacagtcattttgtttactcattcagccctgttgcaggtcccaataaactcttc

SEQ ID NO: 81559 - DNA, 100 bp, Homo sapiens
gacggcctcagcaggcggggaagatgaaaggaagcatcagatggtgaaggagaaggagacacagaagtgatgcagcaggagacagttccagttcctgtac

SEQ ID NO: 81560 - DNA, 78 bp, Homo sapiens
aaacttattcacagttaccaaagctgtatccgtaccattctgatgttttgagacaatacagatgttttcccttgtggc

SEQ ID NO: 81561 - DNA, 75 bp, Homo sapiens
ttgagctcatccccgggcgattcctgtctaagaaaaggaggatttgcctactctgtgtatgatgaagacattggg

SEQ ID NO: 81562 - DNA, 50 bp, Homo sapiens
agcaggtcttgagtttggcaacacaggtacgcaataactgtttggtattt

SEQ ID NO: 81563 - DNA, 82 bp, Homo sapiens
cctcactaagcccatcgtctgctggtgcatcgggacgtgtgccaccatgttctcctctgagagtgttctgccagttctggat

SEQ ID NO: 81564 - DNA, 75 bp, Homo sapiens
gaagaagcatacatgacaaaatgtggccacagcttttggtgattgatgagatttatcgtgtgttgagatatgtca

SEQ ID NO: 81565 - DNA, 99 bp, Homo sapiens
tccggctcctccagctaccggcccaaggccatctacctggacatcgatggacgcattcagaaggtatcgagaaccttccctgcgaacttcagaggaact

SEQ ID NO: 81566 - DNA, 100 bp, Homo sapiens
aaccgtttggatatgacttgctcgggcaaaagttgtgcattggcccgatcaagcctgacttctagccaaggaatggtcctcgtccgaagtgagaatgggc

SEQ ID NO: 81567 - DNA, 90 bp, Homo sapiens
gctggacggcgggagagaggctcggaggaccggtagctcccagcaaagcggcccagcggttccagagtcacggttcgaccgagattccgg

SEQ ID NO: 81568 - DNA, 90 bp, Homo sapiens
acatctgtaggaccagttccagctccagtgggcaccgccagcacgcccagtaccattgtttgttgcaatgaccaaaacccatgtgatagc

SEQ ID NO: 81569 - DNA, 75 bp, Homo sapiens
ctgaagacagagggctctgatctgtgcgacagatgaactttgaggcgctgatcatcaccatgtcggtagtcgggg

SEQ ID NO: 81570 - DNA, 100 bp, Homo sapiens
cgcctccctgcgactcctggaccaccgggcgctggtctgctcccagccggtcagttcaccgggacctggaggcccagattgcgatcgtgacggagaacca

SEQ ID NO: 81571 - DNA, 101 bp, Homo sapiens
ccaagacacactcaacacattagacggcctcctgcatctgatggtgacagctggagtatcagccttggaagtatatacgccaaaagaaatcttcgtggcaa

SEQ ID NO: 81572 - DNA, 74 bp, Homo sapiens
tcctttgctgtcgcactctgccacctcgcagagctacacgcggagcagaacgtcctgaaggagcacgcagatga

SEQ ID NO: 81573 - DNA, 74 bp, Homo sapiens
tgacctcctggacttcagcatgggcgtctctggccgagcctctttttgtggaaaacgacagcagcagcagtggc

SEQ ID NO: 81574 - DNA, 51 bp, Homo sapiens
aagaaagctctgctatgtgtcagtgctgcatggctgagaggttgaaggagg

SEQ ID NO: 81575 - DNA, 75 bp, Homo sapiens
ggcggagctgacggtggaggttcgcggctctaacggggctttctacaagatcctgaggaggatgaaggggctggc

SEQ ID NO: 81576 - DNA, 100 bp, Homo sapiens
cccccaaatgtctgactctgactctcggactgagaaacgcaaggctctgacgcccgctctgcggcttcggtgtttgaacaggccacagtccaggagcgct

SEQ ID NO: 81577 - DNA, 75 bp, Homo sapiens
atttgagtcatttccttcgtacccacagtgcttcatgagaggacaaccctccatatgataagggagccttcagaa

SEQ ID NO: 81578 - DNA, 100 bp, Homo sapiens
tttctttctcgctgatcgcctaacttctactgacgaagcttggaagttgcagaaggttatgatgtgattgctcaagcccaatctgggactgggaaaacgg

SEQ ID NO: 81579 - DNA, 75 bp, Homo sapiens
atctcttcaagtacatcataatcggcgacacaggagcctagtaataaacgggtcaaacccctttcccgagtcacg

SEQ ID NO: 81580 - DNA, 75 bp, Homo sapiens
tggcagcggttttatcaactgacaaaactcttggattctatgcatgaacctcaccctgtgatcccactttcatcc

SEQ ID NO: 81581 - DNA, 100 bp, Homo sapiens
ccacctccctcttggggtcgtcgccctcgagatgattatcgtaggaggagtcctccacctcgtcgcagaaatttctgaataaattggcagaagaacgcag

SEQ ID NO: 81582 - DNA, 75 bp, Homo sapiens
actgggccaataccagccggcgcgggggttggtgccatctacatccgtcgccggccccgtgtgcgtgtggaggcc

SEQ ID NO: 81583 - DNA, 76 bp, Homo sapiens
cggactgggagtttgaccgcgttgacgacggctcgcagaaaacctgtggatttttgtatctaagtttactgaattt

SEQ ID NO: 81584 - DNA, 50 bp, Homo sapiens
gcggaggtgctgggagcgagttggctgtttctattccaaggacaatgaag

SEQ ID NO: 81585 - DNA, 82 bp, Homo sapiens
tttgatgctgtggttggatatttagaggacattatcatggacccagtcatggcagcctccagcatcagttcaccatggggaa

SEQ ID NO: 81586 - DNA, 88 bp, Homo sapiens
atttccagatgccttgttcaacagcttcttaatgaagaggataactcagaatcatcggctatagagcagccacctacttcaaacccag

SEQ ID NO: 81587 - DNA, 75 bp, Homo sapiens
gggaaacaaggcttccagtgccaaggttcatgcagcatcccaagaactttggcctgatcgcatcattcctggaga

SEQ ID NO: 81588 - DNA, 98 bp, Homo sapiens
tggcccatgagctgtccggggagcagcttctcagatgaccaagatggtgctgcagatggtgctgaggatggagaacccaccaagccccgctaggagcc

SEQ ID NO: 81589 - DNA, 80 bp, Homo sapiens
ccctggtgaggcagtttggacagcaggactggaagttcctggccagccacttccctagccagtcttggtgctctgtgttc

SEQ ID NO: 81590 - DNA, 98 bp, Homo sapiens
tgctgtcgcccagcgccgccccgtcgtcgtctgccttcgcttcacggcgccgagccgcggtccgaagtgcgctagatgttggaccgagtatggaatcc

SEQ ID NO: 81591 - DNA, 75 bp, Homo sapiens
tggaataactgatgaggaacaagccattagcaggaaattatgatgtgatgaccccaatggttgatatacttatga

SEQ ID NO: 81592 - DNA, 75 bp, Homo sapiens
agatcatagcagagtacgatactcaggtcaaagttactgtaaaatggggaaaggagaaatttgaaggtgtagaat

SEQ ID NO: 81593 - DNA, 75 bp, Homo sapiens
tcccaggacagcttcagcaaacactacaagtccacggtgggagttgtcgagatgtccacagaaggaggatttggt

SEQ ID NO: 81594 - DNA, 100 bp, Homo sapiens
gaggaggaggaggaggaggaaggacccggctgcccagtccctcatgatcatgaacaagatgaagaactttaagcgccgtttctccctgtcagtgccccgc

SEQ ID NO: 81595 - DNA, 96 bp, Homo sapiens
aggaggaggaataatatttatggagcatatattatggaacacaaagcagagcccctggaaaactcacatatgtgtcaacaatagtccttgatgccc

SEQ ID NO: 81596 - DNA, 81 bp, Homo sapiens
cccacctccagctccgccactgccaggctctggaccctggactctgcagaagatcattgagaagcagccaggccacattcg

SEQ ID NO: 81597 - DNA, 100 bp, Homo sapiens
cgacagcctcaaacaggagctggagcagctcaaagagatgctgcattcctggcccgagagaaagcgaaagcagatgctgaatattatgctgcacacaaat

SEQ ID NO: 81598 - DNA, 98 bp, Homo sapiens
gcctcctcctggacagcgcgatggggcccttctgggcgagaaagggacactgccttaggaaaaccacgagaggtgtttcgacttcctacagatttgac

SEQ ID NO: 81599 - DNA, 75 bp, Homo sapiens
ccttccatggaggattcctctgctgtcctcatggaaagcctaaagttggctggatctattattggcaaaggtggt

SEQ ID NO: 81600 - DNA, 90 bp, Homo sapiens
gtggatttggacatggtcctcaaatgtctccgaatgatgccaatgggtggaatgatgccacctggaccaggaataccacctctgatgcct

SEQ ID NO: 81601 - DNA, 74 bp, Homo sapiens
aacaagactggggctgctcccatcattgatgtggtgcgatcgagaatgtccaagcacacagatgcagcagaaga

SEQ ID NO: 81602 - DNA, 100 bp, Homo sapiens
accttttttcatttccatttctaccttgtatgcctcaatttgctggatttaagcactgctgcactttatgagggtatgttagagcccaccaaggaaccac

SEQ ID NO: 81603 - DNA, 100 bp, Homo sapiens
gagacttggaattgaattctgcctcttccactaccagctgtgaaattggaaatggtggagtcaatgaagaaagtagcagggatggatgtggagctgacag

SEQ ID NO: 81604 - DNA, 87 bp, Homo sapiens
atgagaggctctcgcagaggatgtgttagactcagagcatgtactggcattgaaaacattgacgaagctattacattgcttgaacaa

SEQ ID NO: 81605 - DNA, 75 bp, Homo sapiens
ggtctcttcccacggacgcgcgagacaatgaggagtctacatcagcatcagcatctgcgtcaccatttcaatctg

SEQ ID NO: 81606 - DNA, 97 bp, Homo sapiens
gggcaggaagagctgcagtctttgtgggacaaggtgctggagaatctggtaaaagcaccattgtgaagcagatgaggatcctgcatgttaatgggtt

SEQ ID NO: 81607 - DNA, 50 bp, Homo sapiens
cctgtcgcgcagcttcctccgtttttagaacttcagccataaaaatgggc

SEQ ID NO: 81608 - DNA, 75 bp, Homo sapiens
gactgtccgtgtggaccctgactcacaggaatccaatgctttgagaaataagaaaaactctcgtcgagtcagctt

SEQ ID NO: 81609 - DNA, 95 bp, Homo sapiens
ggaagatccttcaggtgctggaaaggaatgaggagttacagagggccgagaaggacaggatcagtctccttatatacatttgacaaagccaaaca

SEQ ID NO: 81610 - DNA, 83 bp, Homo sapiens
tacccttatcccggagagctgacaatgatgaatctcagaagctgcagtaaaggaagatgaagaagaagtttcagataagggca

SEQ ID NO: 81611 - DNA, 90 bp, Homo sapiens
ttggcattcatcattttctaatcatcagcatttacatgacagaaatcacctatgtttacagcgacaggtgatgagacaaaccatgcttct

SEQ ID NO: 81612 - DNA, 75 bp, Homo sapiens
gaaggactttatggacagccagcaaaaaatcccagaagtgggatgaaatgaacatcttggcgacgtatcatccag

SEQ ID NO: 81613 - DNA, 80 bp, Homo sapiens
acatctgggtgtatatcaaacggcaagatgtccagtaatgtcccggcggatatgctagatgctggtgtgccagaaaaaat

SEQ ID NO: 81614 - DNA, 82 bp, Homo sapiens
gccgatccagcctgcggagcctgtggggcaggaaaagagcactggttgccattggtacccatgatttggacactttgtcggg

SEQ ID NO: 81615 - DNA, 79 bp, Homo sapiens
ctcagcgggagtttgacaggcgattctcccctcattttgtgcagacgccagaagtgagatttcagcagcagctggagca

SEQ ID NO: 81616 - DNA, 101 bp, Homo sapiens
gctgtttccacgtgcggtgctcgtcgggagtgatcacctaccctacagttgtcgagatgtccacagaaggaggatttggtggtactagcagcagtgatgcc

SEQ ID NO: 81617 - DNA, 90 bp, Homo sapiens
ccctcttcctcacttccctgtactctcatcgctctcggcctccgacacggttcatgctgaatactctagatttgtgaatcagattaatac

SEQ ID NO: 81618 - DNA, 75 bp, Homo sapiens
agggagccgcagctgatgtcagggagatcttgtgcgaaaactcaaagaagataaagcaccccaagtagacgtaga

SEQ ID NO: 81619 - DNA, 100 bp, Homo sapiens
cggcggcagcgggctcggaggcagcggttgggctcgcggcgagcggacggggtcgagtcagtgcgttcgcgcgagctcaccatggatgatgatatcgccg

SEQ ID NO: 81620 - DNA, 95 bp, Homo sapiens
atcagtcactaacttctctctcagatgttgaaaagcccccaggctccgctcttgccagagggacaggagccatggctcagaaaatggactgtggt

SEQ ID NO: 81621 - DNA, 98 bp, Homo sapiens
cctggccatgacgtggaggcctactgcctgctgtgcgagtgcaggtacgaggagcgcagcaccaccaccatcaaggacttcctgggaaaatcagatcc

SEQ ID NO: 81622 - DNA, 100 bp, Homo sapiens
gatcgcctaacttctactgacgaagcttggaagttgcagaaggtttgacatctacaggaaggtgcccaaggaccttacgcagccaacgtacaccggggcc

SEQ ID NO: 81623 - DNA, 100 bp, Homo sapiens
ctcatgggtaccgcttgccaactttggagaattaccccctctacattcgcagcacccctacggagaacgagctgaagttccactacatggtgcacacatc

SEQ ID NO: 81624 - DNA, 100 bp, Homo sapiens
ccacacccagtgcgccgcggcccgcgctcggccgcccgccgatgctgaagttccgaacagtccatgggggcctgaggctcctgggaatccgccgaacctc

SEQ ID NO: 81625 - DNA, 90 bp, Homo sapiens
gaagtgccaggtggagcggcaggaaggccactcacagggcttcaacaagctagctgagacaacacaggcagttctacataccggccaccc

SEQ ID NO: 81626 - DNA, 75 bp, Homo sapiens
ctacccggagaagcaggagccctactcggcagcggagctggagtttgttcagatcatcatcatcgtggtggtgat

SEQ ID NO: 81627 - DNA, 75 bp, Homo sapiens
ggagaattcggtttgtaggtcgtcagaaagaggcaagaactagttgcagaactggaccaggatgaaaaggaccag

SEQ ID NO: 81628 - DNA, 83 bp, Homo sapiens
cctcgatgcagccagtagcttggatccttgtgggcatgatccataatcggtttcaagcttaaagcttttcaagccaggccaag

SEQ ID NO: 81629 - DNA, 74 bp, Homo sapiens
ccggcccctccagctgccccctgtgtggcaaacctttcttgagctcagtgaagatagtgatccggggagacagg

SEQ ID NO: 81630 - DNA, 75 bp, Homo sapiens
ttatcgagggttttgggctggtggtctcggcaggttctgtacagagtaatgagatgtgtgacggctgcaaaccag

SEQ ID NO: 81631 - DNA, 101 bp, Homo sapiens
ctcgccatgccggcccggcggctgctgctgctgctgacgctgctgctgcccggcctcgggggggatatgagactttctactcggaatatcctgagtgttgc

SEQ ID NO: 81632 - DNA, 100 bp, Homo sapiens
gttcagttttcttcagaagaaggacttcggaatgcactacaacaggaaaatcatattatagatggagtaaagaaaattttcagagaatccacatgtttac

SEQ ID NO: 81633 - DNA, 75 bp, Homo sapiens
ctcttacgtctgcggaagtgcagctgcctcagttcttagcgcagaaaccgaaacttcattgccccttcaatgtgg

SEQ ID NO: 81634 - DNA, 82 bp, Homo sapiens
ctgcggaaaggataggggggaggaagacttaacactgcaacaacagataaactcaagccatggagggattactgcattacat

SEQ ID NO: 81635 - DNA, 75 bp, Homo sapiens
acgtgggcggtgggccccagccccacagaccagcccagcattcagaggcctgagggagctcaatcctggtagcaa

SEQ ID NO: 81636 - DNA, 76 bp, Homo sapiens
acccgtccatcatagtcaactgcgtggaagagaagaaatgcactcggtgatggaaagagagccactattctgaaga

SEQ ID NO: 81637 - DNA, 82 bp, Homo sapiens
cagaaagcaggcgaacccgcggcgcaataacgcccgagcgggaagaagttccgcagcaagccgcagctggcgcgctacctgg

SEQ ID NO: 81638 - DNA, 83 bp, Homo sapiens
ggaaagtctctctcaacctcagatgctaatagtttcagatattgaagggaactcttgcagcagacaagaatgagattttgttt

SEQ ID NO: 81639 - DNA, 75 bp, Homo sapiens
tccggcttccgtcccggacagagcccgtggtcgcgcaggaatagccaggccagaagaaggaaggcctgtggtgag

SEQ ID NO: 81640 - DNA, 100 bp, Homo sapiens
gtgtgaaagagctagacgccttcaagctaaaatgatgactaatttggttatggccaaggaccgcttacaacttctagagcatgagaaagaccacctgtgt

SEQ ID NO: 81641 - DNA, 136 bp, Homo sapiens
atcatgactttttctgctagagtgtctagtgaatatcagctcctgggtcatttttctccctgaggacaacctgagatatcgggaggcaattcagaagtgggatgaagcactacagttaactccaaatgatgctacc

SEQ ID NO: 81642 - DNA, 90 bp, Homo sapiens
tggccacagcatctttgtctagccccagtgcagaggcgacaggaagaagggtattacagccgcctggaagccgagaggcgcagacagcac

SEQ ID NO: 81643 - DNA, 96 bp, Homo sapiens
ccttctgcccctgatcgcttggttttccttgcagtcgcctgctgctgtcgtcgggagcctagaacattccatattctgcttcacacacggtgactc

SEQ ID NO: 81644 - DNA, 75 bp, Homo sapiens
tatgaaaaaacctgtcagagtacctgctgaaccacaaacaatgcccaggagttctgtttccgaagaaagagccag

SEQ ID NO: 81645 - DNA, 50 bp, Homo sapiens
gaagcccgggaccgtttaaaaaactggcattcccatcaagagcaccatgg

SEQ ID NO: 81646 - DNA, 100 bp, Homo sapiens
tggacacggccatcgggcagtggctccgctgggataaggcaagaggcgcagatgttccagagattcctggagatcttactcttaagacgtgtggcagtac

SEQ ID NO: 81647 - DNA, 75 bp, Homo sapiens
atcgccgtggcgtcttggtgttctccacgctggttcgcaggtgtagaatgagccaaggagactcaaacccagcag

SEQ ID NO: 81648 - DNA, 50 bp, Homo sapiens
caaagtgcccggacccaaaacaggaaatttattcaggagattgagcatgc

SEQ ID NO: 81649 - DNA, 107 bp, Homo sapiens
cttgacgaggctgcggtgtctgctgctattctccgagcttcgcaatggaatcagagatcattgatttcttcctgggggcctctctcaaggatgaggttttgaagatt

SEQ ID NO: 81650 - DNA, 50 bp, Homo sapiens
gccccggtaccggaccctgcagccgcagaggttgcagtgagccaagatcg

SEQ ID NO: 81651 - DNA, 100 bp, Homo sapiens
caacagcaccaactggaatatggtgacgctctgcttcttctgcctgctctacgggaagtacgtcaggtacctgggccagctggacgacagtgagtttgag

SEQ ID NO: 81652 - DNA, 90 bp, Homo sapiens
cgggagtataaatctgtaaaagaaagaggagtacacattgtttccgagcactggcttttagatcttcttggacacttaatgattgttggc

SEQ ID NO: 81653 - DNA, 100 bp, Homo sapiens
tattatccaccgggacctgaagggcatgctgttgaagcgaagtggcaaatcgttgaataaagagtggaaaaagaaatatgtcaccctgtgtgacaatggc

SEQ ID NO: 81654 - DNA, 83 bp, Homo sapiens
gggagaagagcagtctggggcctggctggacaggcaaacctctactctggagccccttcttgcagaggcctctgcataaaagg

SEQ ID NO: 81655 - DNA, 72 bp, Homo sapiens
ggaagagtggctggaggaattcagtttcttgggggtgagaattatgaagatgatgacctagtaaattctgat

SEQ ID NO: 81656 - DNA, 98 bp, Homo sapiens
ggcgtcttcagcagggcagtgaccgagtacaccttgcagggaggacacattcagctaacgtattttagcaggtggagtgaggttgaagattcctgtga

SEQ ID NO: 81657 - DNA, 100 bp, Homo sapiens
tacttcctggattgttctttctagtcgaagaattgaattttacaaagaatccaagcaacaggctctgtccaatatgtccataaaagaattccaatcagaa

SEQ ID NO: 81658 - DNA, 51 bp, Homo sapiens
ttacctccgagacgctcataggcaggggcccagaagacacctgctttgagt

SEQ ID NO: 81659 - DNA, 73 bp, Homo sapiens
ttgcttcccgagtatttcctccagagattgtggagcagatggccgccaccggcaactaacctatgaccttctg

SEQ ID NO: 81660 - DNA, 74 bp, Homo sapiens
tgaaccggcacctgcacacctggatccaggataacggaggctggatttttcggacgccgcccgatactacattc

SEQ ID NO: 81661 - DNA, 98 bp, Homo sapiens
cggcctccagcttcaccacccgcacggcgcagtgccggaacactgtggcggccatcgaggaggttcccgtgtcagtggctatgatgacacctcaagtt

SEQ ID NO: 81662 - DNA, 90 bp, Homo sapiens
ctgctccaggcggtcttattggccgagacgcatccagagctttcgtgaccggggactgttctgaagcaggcctcgtggatgacgtatccg

SEQ ID NO: 81663 - DNA, 75 bp, Homo sapiens
acgatctcattgacagctgcattcaatcttttgtatcctggtgtgaaccagctatcctccagtataggaggattg

SEQ ID NO: 81664 - DNA, 74 bp, Homo sapiens
attaaacaactacctgctgaaattgaatgagaagactttgggacatttcatgagtcattcaagcaacatttcta

SEQ ID NO: 81665 - DNA, 90 bp, Homo sapiens
ccgaaatcaacttggaaagtcaaattacgtgtggcatatggactcctgacgaccaacaggtttttagaacttcagccataaaaatgggca

SEQ ID NO: 81666 - DNA, 90 bp, Homo sapiens
agctgctggagtgctccgggcggcaggtcagccccgaagcgctggaagggaagatcctggctgttgaacacagcttgaaggggaccgaag

SEQ ID NO: 81667 - DNA, 51 bp, Homo sapiens
agcgacacagttcaggctgatccccaaacgcctgtagccaccaatgtttca

SEQ ID NO: 81668 - DNA, 100 bp, Homo sapiens
ctgctgtctcctgcaagaactggctcaagaaatttgcctcgaaaaccaatgtactaatggtcacttgatgtgcgctggctgttttatccacctactagca

SEQ ID NO: 81669 - DNA, 99 bp, Homo sapiens
ttcagatattcacggttccttcacttcatttatgacattaacagagaacaggactatgtcaagaattctgagggtatacttggtgaaaatgaattaaga

SEQ ID NO: 81670 - DNA, 82 bp, Homo sapiens
cgagacccacgaggcgctggcccggaggctccagaaacgggtcctgctgctcaccaagggagtgaggattctttggacacca

SEQ ID NO: 81671 - DNA, 100 bp, Homo sapiens
tgcctattttctctccaaggagaggataaaggactccctggaggaaaagcggaagcggcagcggtctgaacgcctggaacggattttccaacttagtgag

SEQ ID NO: 81672 - DNA, 75 bp, Homo sapiens
aatgcatcagaaccatgcacggtctcacagtagtaacccgctctccagacagcaataatgtagccagcagtgctg

SEQ ID NO: 81673 - DNA, 83 bp, Homo sapiens
atccttgtgggcatgatccataatcggtttcaaggctctccaggacatgtttgcactacttgggggagtttggagaagaccag

SEQ ID NO: 81674 - DNA, 75 bp, Homo sapiens
gggaggttacgcagcaaaccatccagaagtgtactaatggtcacttgatgtgcgctggctgttttatccacctac

SEQ ID NO: 81675 - DNA, 98 bp, Homo sapiens
ctgcgtgggggctctgcgggagaatatctgcttgctcaacttttgcacgatctgattttctggagagatgtgaagaagactgggtttgtctttggcac

SEQ ID NO: 81676 - DNA, 75 bp, Homo sapiens
cacgccctcaggtaaaggtggaagtaaatggccacgctgtattgacagagataacgaaggaggcccaacttcatt

SEQ ID NO: 81677 - DNA, 83 bp, Homo sapiens
gtgaagaaaggaggtcattgaaggaggccctggcttaggcatgtcctctgacctgcctagagctggaacgttacctccagagc

SEQ ID NO: 81678 - DNA, 82 bp, Homo sapiens
aagacttgaacttaatacagcaagaaagaccatcaagtttaccatgagtgtgtccgcttgaaaccaactgacatacagcccg

SEQ ID NO: 81679 - DNA, 74 bp, Homo sapiens
attgctagcaatgagctcccaaagccatccagtgacagctatattgtgcgtgtcaaggctgtggttatgaccag

SEQ ID NO: 81680 - DNA, 100 bp, Homo sapiens
gttgcgatgcatgcaagtcggaggaaacgctagtgcagaggacccattggacccccgggctggctgcagggcccacacctgggttagacctcgcacaggg

SEQ ID NO: 81681 - DNA, 82 bp, Homo sapiens
atgagattccccacaaaacaagaaagtcaactccgtaatgaagtggctattttacagaatgaaattaaagctctgtctgagg

SEQ ID NO: 81682 - DNA, 98 bp, Homo sapiens
gggaccggctgcagagacaggcgttcgaggagatcatcctgcagtgtcagttgtacccgaggcgttctcagcagcagcaagtacctgtggtggatttc

SEQ ID NO: 81683 - DNA, 75 bp, Homo sapiens
cagcagacccagctacgtggactagaggtatgtcgagagtaccaacgtggcaattgcaaccgaggagaaaatgat

SEQ ID NO: 81684 - DNA, 98 bp, Homo sapiens
tgggagattggcttcggggcgtctaccgctttgccactgataggaatgacttccggagtgtgtaaatatgttgctgtggagctgaagtcagcctttga

SEQ ID NO: 81685 - DNA, 90 bp, Homo sapiens
gacagcaacctagtcagtctgcatttggctctggaacaactcctaattctagtgcggtggctactaaagttcgaaggcacgatatgcgtg

SEQ ID NO: 81686 - DNA, 100 bp, Homo sapiens
tggagatatggcgcaactgcggcgcgtaacggaaggccattggaaatggggcggcgtcacagtccaagtgaacagtgcctttttcacaggcatctatggg

SEQ ID NO: 81687 - DNA, 98 bp, Homo sapiens
tgctccccaggacctgagcaggaacctggagttttcagaatttatccagttggcgaaggactttgaggatttccgtaaaaagtggcagaggactgacc

SEQ ID NO: 81688 - DNA, 96 bp, Homo sapiens
catgctgcgcggccttcccatcaccatcacagagagcgatgtctctaattaacagaagatggcaaagcccagccacagcagctatgtccttcagca

SEQ ID NO: 81689 - DNA, 75 bp, Homo sapiens
gtccacccaaggtctcctcggatcgcctggagaggcactcggacctggatctgcaggcccaagaccgagctcacc

SEQ ID NO: 81690 - DNA, 99 bp, Homo sapiens
cacattttacagaataagtcagatgactttctgtggctgggagagggttctgccctccttcatccagacagcaggtctcatcctaggtccttagagaaa

SEQ ID NO: 81691 - DNA, 83 bp, Homo sapiens
ggcggatggcccccggtgcaagaggcgcaaacaagccaatcccaggaggaaaaacgcaagagtgagccatggagctacgtgtg

SEQ ID NO: 81692 - DNA, 73 bp, Homo sapiens
ttatatcgcatcctatggctcaaagaaagatgattatctggtaatgaatcttgccctcagcctcagacatcgg

SEQ ID NO: 81693 - DNA, 75 bp, Homo sapiens
gatccagaacttgcagcaacaataggttgggggccgtcccgctcctaaggcaggaagatggtggccgcaaagaag

SEQ ID NO: 81694 - DNA, 83 bp, Homo sapiens
tggagcaaaaagaggttgattacagcggcctcagggttcaggcaatgcaaataaggaatcacctcctcatgtagaaaattact

SEQ ID NO: 81695 - DNA, 112 bp, Homo sapiens
cagcctcggtaccatggccgggatcatcaagaaacaaatcttgaagcacctctccaggtaactataactacccaatattgcagccatggagtccatgcttaataaattgaag

SEQ ID NO: 81696 - DNA, 74 bp, Homo sapiens
tcagcacatggtgggggccacaccatttgccgtggccaggctagagcacttattttagaggagattgcaattga

SEQ ID NO: 81697 - DNA, 50 bp, Homo sapiens
aagaggaccaggagcagaagaggaagagaatttacatagtacatgacgaa

SEQ ID NO: 81698 - DNA, 76 bp, Homo sapiens
aaataacccagagccctggaacaaactgggtcccaatgatcaatacaaggtgcccctgggcgctgggattgctcta

SEQ ID NO: 81699 - DNA, 50 bp, Homo sapiens
gccgcgggcgcccgaggggccgagcgagtggaggtgaagccggtgctgcc

SEQ ID NO: 81700 - DNA, 75 bp, Homo sapiens
ggagatgggcagacggattcatttagagctgcggaacaggacgccctctgataagcctccccagctttctgagga

SEQ ID NO: 81701 - DNA, 82 bp, Homo sapiens
gccgagcagctggcccggctgggcccggggcgcgcagctgcccgccggggcgggcacttgcacctcctgcgccgccgccccc

SEQ ID NO: 81702 - DNA, 82 bp, Homo sapiens
gacagcaacagctctgccggctggaaggcctgctggtgggtacccttgatgttgtgttggactccagcgcccgggtcgctcc

SEQ ID NO: 81703 - DNA, 101 bp, Homo sapiens
caacaccacaataatccacagccaagacctacgtctaccagtggccctggacgctcctgctcctggctgtcagcggcttctgtaactttgcccagaatgtt

SEQ ID NO: 81704 - DNA, 101 bp, Homo sapiens
ttctagtctccctcagctgttgagcagatctctgacatctacattagtggagaatcaggggatatgtcagccaaggagaaactactcctgtggacccagaa

SEQ ID NO: 81705 - DNA, 100 bp, Homo sapiens
ctacacatcttgccagcccaccagcagccccactcacagctgctgcaccaccaccttccgcaggatgcacagactccattcagaagagagaagaggggag

SEQ ID NO: 81706 - DNA, 98 bp, Homo sapiens
tgtctgataagaagtgttctgtcgaaaagaaatcagaaatggaaagtgttttggcccagagagaaaaggaacagttccgtaagctctttattggtggc

SEQ ID NO: 81707 - DNA, 100 bp, Homo sapiens
ctgtggtctctgcacctcctttctgacatctgtgttaaggcttatctagcccttcgtcatcacacaaacctactgatcatcctgttctccatgatgctga

SEQ ID NO: 81708 - DNA, 82 bp, Homo sapiens
gcgccagatggtggaggaatacacttatttatgaaagatggctccgaagtcaaaaaagaaggggcaccccgggagggagcag

SEQ ID NO: 81709 - DNA, 97 bp, Homo sapiens
cttgtgtcaaccatccattccaggagccagctatctgagccgggggccattgagactgccatggaagacttgaaaggtcacgtagctgagacttctg

SEQ ID NO: 81710 - DNA, 75 bp, Homo sapiens
tatgagtgatgacaaaccctttctatgtactgcgcctggatgtggccaggaggaacaagtgtttcatatggcctg

SEQ ID NO: 81711 - DNA, 83 bp, Homo sapiens
ccatcgggtaccgaggcacgcgccgggcgtcacgtgagaagccctaccactgcaactgggacggctgcggctggaagtttgcg

SEQ ID NO: 81712 - DNA, 74 bp, Homo sapiens
tgagaaaggagctcggggactcccccaaagacaaggtcaaaatgtgggtacagctcctgattcccaggatagaa

SEQ ID NO: 81713 - DNA, 100 bp, Homo sapiens
cccagctcagcgcccggcagccttcgacgcgatgttccgccggagcttgaatcgttttaaagccattgatctggtgacgaaagccacagaggaggacaaa

SEQ ID NO: 81714 - DNA, 90 bp, Homo sapiens
tcggccgcaagaagcagagccgcgtcacggagcaggacaaggccatcctgcaggttcaggagaagtggcacctggtggaggacctgtcgc

SEQ ID NO: 81715 - DNA, 75 bp, Homo sapiens
ctcctgcaaaagtggaagcgaagccgaaaaaggcagcagcgaagtttatgatgtctctggagcagcaagtgacag

SEQ ID NO: 81716 - DNA, 90 bp, Homo sapiens
gggattacagagtataacaatcagtgccgagcaattgtgatgagatattctgctgagtggaagaccactctggctcacatcatagccagc

SEQ ID NO: 81717 - DNA, 80 bp, Homo sapiens
aatgagcccggctttgcggctgggtcctaaactgcgttgcagagtgggcaggatcttaagacccgataggtgcagaaccc

SEQ ID NO: 81718 - DNA, 100 bp, Homo sapiens
gttgctttctgagagatgcaggtggattcttgggcatttgctaaatggtggagtcaatgaagaaagtagcagggatggatgtggagctgacagttgaaga

SEQ ID NO: 81719 - DNA, 82 bp, Homo sapiens
ggggctctgtggctgctcctggctctgcgcaccgacctcctgccccccgaggtctgcagtctcctgaacccagcagccatct

SEQ ID NO: 81720 - DNA, 100 bp, Homo sapiens
gtaggagtgaatataaaaggacttcatctcctcaacatggaaactaaggatattgggagtgtgtggcatgcatcctcatcatcaggaaactctaaaaaag

SEQ ID NO: 81721 - DNA, 75 bp, Homo sapiens
tatattgttacaattttttttcaagaactgccgtcttctttgcctgcactaatgatcttgagccagatgattgtg

SEQ ID NO: 81722 - DNA, 97 bp, Homo sapiens
caggcttcgggcccgggaatcgccgccgccgccgccgcagagctgcagctcggggccgagggcgggaagcacctcctgggacgggtcgctgagtccc

SEQ ID NO: 81723 - DNA, 88 bp, Homo sapiens
tcacatctcattttgcaaaggggcagactgccagattcacttacagccccagctaattccaccaaacatggaggagtacatgaacagc

SEQ ID NO: 81724 - DNA, 90 bp, Homo sapiens
aacgaatcatccacgcacctgcagctctgctgagagagtgcaagccgtgggatgccatggacaatattaccaggcagaaccaattctacg

SEQ ID NO: 81725 - DNA, 80 bp, Homo sapiens
gcgatggccgcgtcccctcccgctgcggacgggtcctttggtacatgcagtccgaggtgtcgtgaaaactacccctaaaa

SEQ ID NO: 81726 - DNA, 101 bp, Homo sapiens
aagtccaagaagcaaaaaagggactgctaagaagataccaccagctctcgtggcattatccttcagtggggctattggactgacttttcttatgctgggat

SEQ ID NO: 81727 - DNA, 75 bp, Homo sapiens
gcaggtgaccggcgcgcgggagcgctacggccccaacgccttgaaaagatcttttgaggtcgaggaggtcgagac

SEQ ID NO: 81728 - DNA, 74 bp, Homo sapiens
gatcgtcgccacctggatgctggagccaggtgctgcccacctacgacagcctggatgagccgtcagtgaaaacc

SEQ ID NO: 81729 - DNA, 76 bp, Homo sapiens
cgcctagccccgcgcctgggcctcgccgagcccgacatgctgagggtttttaatgaccacaacaagcaagcatgca

SEQ ID NO: 81730 - DNA, 100 bp, Homo sapiens
agaagcatatacttttgaaggtgcaagatactatataaaacaaaaagtaaccttcctgaagaggacatgtgattggaagttgtcaattgttgaagcattg

SEQ ID NO: 81731 - DNA, 75 bp, Homo sapiens
gtgcggatcctgctggtgggagaacactctcaaagatgaagacttttgtaaacgtgtatctttggctactgtgga

SEQ ID NO: 81732 - DNA, 75 bp, Homo sapiens
tgaatgccaagcagaaaattacctaaatgcactctttcgaaagaaaggttgggggccgtcccgctcctaaggcag

SEQ ID NO: 81733 - DNA, 75 bp, Homo sapiens
tgcgtacattcggggtgccagaaggaaagcataggagctagagttaatgccaaagacagcaaatggttgacacct

SEQ ID NO: 81734 - DNA, 83 bp, Homo sapiens
acgagagcccggcccgcctgtgtggacgatctggtggctggacccagagctgacctatggctgcgccaagcccttcgtcttca

SEQ ID NO: 81735 - DNA, 142 bp, Homo sapiens
caagtatgagccccagccatggaatgaatatccacaatttagcatcaggcaaaggaagcaccgcacatttttcaggtacaggtttgcagattccgccagcagcacagcaagctctacagatgagtggctctttggcatttgg

SEQ ID NO: 81736 - DNA, 50 bp, Homo sapiens
tgtgtttaaagctatccagccggaggctcgcttctcatatgtgcggatga

SEQ ID NO: 81737 - DNA, 83 bp, Homo sapiens
cctggcggccatcgtcatcctgctgctgaagatctggaagacgcgctcctgcgccggcaccatgactcctgtgaggatgcagc

SEQ ID NO: 81738 - DNA, 75 bp, Homo sapiens
agcctcatcattggttatgccagttctcagcacagatattctacacctcacgccttcacctttaacacctccagt

SEQ ID NO: 81739 - DNA, 75 bp, Homo sapiens
gctggagaagctggagttcgaggacgaaggttatcaatactctggctgaccatcatcatcgtgggactgactttg

SEQ ID NO: 81740 - DNA, 90 bp, Homo sapiens
caagctcatcgagaagtgctggaccgaggacgaagtgtgattctaccagaaaggaatgaagaacagaaccttcaggaattgagtcacaat

SEQ ID NO: 81741 - DNA, 85 bp, Homo sapiens
acctcagagctctcaagcatgaacttgcctttaagctgcagcttcatccaattctgtgacaacatatgaaacctgccagacctac

SEQ ID NO: 81742 - DNA, 100 bp, Homo sapiens
attcatctcaaaaacaaaattctgaactcaggacttggcaaattgatgtacagctatatattttgtcctttctttcacctcatgatctgtgtcagttggg

SEQ ID NO: 81743 - DNA, 100 bp, Homo sapiens
tgaggaggtggaagaagagccagaggtgatccctgggcctccatcagagagccctggcatgctgactaagctccaggcattcactcatacggcacaatat

SEQ ID NO: 81744 - DNA, 75 bp, Homo sapiens
atggcttttgtgctcattttggttctcagtttctacgagctggtgtcagtgctgggctttgacaaacttcctctg

SEQ ID NO: 81745 - DNA, 122 bp, Homo sapiens
cacctctggcccccagcacaggaaagcagcgtggtcaggaggggttaaacttcggctgaagcacaggtgggtttggaggatttgggacaacatctacaactgcaggttctgcattcagcttt

SEQ ID NO: 81746 - DNA, 82 bp, Homo sapiens
caatggtcccggctgccggtcgacgaccgccccgcgtcatgcggctcctcggctggtgtgccctctggtggtcagaagatgc

SEQ ID NO: 81747 - DNA, 96 bp, Homo sapiens
tggttagtgtgctctgagggagggtccgagccagccgctgttttgccggaggagcccctcaggccagtttccaggatggcttctgcatcaacttct

SEQ ID NO: 81748 - DNA, 80 bp, Homo sapiens
taacccaactccattaataaaccccttggctggaagagctccttatggaactgtggctgcaccatctgtcttcatcttcc

SEQ ID NO: 81749 - DNA, 82 bp, Homo sapiens
ggaagcagccgatccagcctgcggagcctgtggggcagggcagccccgagaaccacaggtgtacaccctgcccccatcccgg

SEQ ID NO: 81750 - DNA, 140 bp, Homo sapiens
ctccccgtcaggtgtggcacggatcctgacccacgaggcgggaatcactgacattgtggtgttacaggacccttgaacatctgtgaagaaatgactattctgcatggaggcttcttgctggccgagcagctgttccaccc

SEQ ID NO: 81751 - DNA, 75 bp, Homo sapiens
catgatacagttgataaaattgttgggaagcagtgcgttatatcaatgaaaacctaattgttaacacagatgaac

SEQ ID NO: 81752 - DNA, 75 bp, Homo sapiens
cactgacacctggacagtcctcgttgtgttcggggtgggaagcccacggcctctgcagagatgtgggcagctggt

SEQ ID NO: 81753 - DNA, 51 bp, Homo sapiens
cccggatctggtaacatggcaaaagatggtgataaaagaaaatgtggctga

SEQ ID NO: 81754 - DNA, 98 bp, Homo sapiens
ctgcaccaccagcgatggcagacagaccacatataccacgaggatccatctcgtctgctccaggggcaggctggctcttgcagccaatgccggaacag

SEQ ID NO: 81755 - DNA, 100 bp, Homo sapiens
tgaaccttgggtgatttgttctgtatcagaagacaatatcatgcaagtgtggcaaatggcagtctgggcactgggaaacatagctggagatagctctgtt

SEQ ID NO: 81756 - DNA, 100 bp, Homo sapiens
cttgagtagagtctgccagcgccacactgatgcccaggcacaggcatctgcaggtgctgatccgcagtggccgggtgcccattgtgtccttggagtgtgt

SEQ ID NO: 81757 - DNA, 50 bp, Homo sapiens
gtgatttgctttctcggagcaaaagtgttgtatggttcctggagctggtg

SEQ ID NO: 81758 - DNA, 51 bp, Homo sapiens
cacgccgccatccgggaggcccagggaaggccgagacgcatccagagcttt

SEQ ID NO: 81759 - DNA, 74 bp, Homo sapiens
agaagacatactggcagcaggctctctgatgtaaaggatggagtaaatcaagcagcacctgcatttggatttgg

SEQ ID NO: 81760 - DNA, 98 bp, Homo sapiens
tctaggccttttagaaaacatgcattctcctggtgtgcagcctgcagatgtgaaggaagttgttgagaagggtgtacagactcttgtgattggccgag

SEQ ID NO: 81761 - DNA, 100 bp, Homo sapiens
tggacatccaggtgctgagccaggagcggcagcctttctacgtgaatgtggaccagccagatgagaagtcaatcattacctatgtggctacttactacca

SEQ ID NO: 81762 - DNA, 80 bp, Homo sapiens
ccctgagtgcggatttctgctatgatgacagacaccttcagcagtaaacaagataaaacaacttcttaaagataagcctg

SEQ ID NO: 81763 - DNA, 100 bp, Homo sapiens
aagaccagcgcgagggccctgggcaaggcccgacagtgcaccaattccagctggacatcactgtgaaaatgggacgggataaagtccgagaaatgtttat

SEQ ID NO: 81764 - DNA, 96 bp, Homo sapiens
cattgagcaggctacagtccactccagcatgtgtaatggagagagggctaaagaagaagcaattacacattttgaaaagctctttgaagttctgga

SEQ ID NO: 81765 - DNA, 100 bp, Homo sapiens
gccagctgcagccctggccgcgcactcgcctcagctgagcctggagactgatggagaggcagaaacggaaggcggacatcgagaaagggctgcagttcat

SEQ ID NO: 81766 - DNA, 75 bp, Homo sapiens
ttcctattgaaaaccgggatgtattgggtgagacacagggccactgtgcatgtgcgggtcaacgatgtgaacgag

SEQ ID NO: 81767 - DNA, 83 bp, Homo sapiens
catcattttctaatcatcagcatttacatgacagaaatcacctatgtttacagcgacaggaaatatatcctggacaattccag

SEQ ID NO: 81768 - DNA, 74 bp, Homo sapiens
acggagtcgcttcccctactgcgtggtgtggacgcccatcccggtgctcacgttcaggagctccatgaggagga

SEQ ID NO: 81769 - DNA, 138 bp, Homo sapiens
tggctcaggaacagggacagcacctcatcccctggatgggggaccacaagatcctcatcgacagatagcctgggctggaagctcttctacgtcacaggctgcctgtttgtggctgtgcagaacttggaggactgggag

SEQ ID NO: 81770 - DNA, 96 bp, Homo sapiens
ctgctacacggcgaactggaacccactcggggactctgccttttaccgcatatgtaagtggaactcagaaggcaacattccctgaacatactcttc

SEQ ID NO: 81771 - DNA, 96 bp, Homo sapiens
gcactacaaggagaaaaacgatattatagtgatcctcgatttctcaatctctggcttaaattagtaaacctagcctttaagcaacctggaaagagg

SEQ ID NO: 81772 - DNA, 75 bp, Homo sapiens
gacctggatagtagttgttcttcaggctcttgcagccaatgccggaacaggatttgctgttgctgagcctcaaat

SEQ ID NO: 81773 - DNA, 90 bp, Homo sapiens
cttctgcagatggacagaagaggcctactcaaatcctttctgaggagccaaacttgcttcctgctgtgatgctgttcaaaactttgttgt

SEQ ID NO: 81774 - DNA, 101 bp, Homo sapiens
ccggagattctcagggcaacccagatcttttgtgaagaaatatgggaacctttttagcttggagcttggtgacatatctgcagttcttattactggcttgc

SEQ ID NO: 81775 - DNA, 75 bp, Homo sapiens
caagcatggagttggcaccccaaaagaaaggaatgaatctgaagtctgctgcagtaaaacacagaaggctttaaa

SEQ ID NO: 81776 - DNA, 75 bp, Homo sapiens
tggatttatgcaaacttgggccaaaggacagttagaagacagtaggaaaatggcattcctatgaagaaagcacga

SEQ ID NO: 81777 - DNA, 75 bp, Homo sapiens
caagaagattccgataagaaacacgatcagtgtactgttacccggacatacctattccttcacaagttctggttc

SEQ ID NO: 81778 - DNA, 100 bp, Homo sapiens
gtctgaggcccgagcacgcgcgagagcggttgcaggacgactcggtggaaacagtcacgtccatagaacagggctattgtggcgttggtgtacaatgtgt

SEQ ID NO: 81779 - DNA, 75 bp, Homo sapiens
gcattgatgaagatcatgacattgtagtacagtatccaagtggcaatagagacccatctattttggatagtttag

SEQ ID NO: 81780 - DNA, 82 bp, Homo sapiens
gaagttaatgtttacggcgaagtctactcaacgtttccaaggattggtagcttatgtcgatcttgatgaaagagcaattgat

SEQ ID NO: 81781 - DNA, 100 bp, Homo sapiens
acaacatttcctctcgggaagagatagatcatgcagagtattacctttacaagagaagaaatatcaggctctgatatcagtgggtcagaggaagatgatg

SEQ ID NO: 81782 - DNA, 85 bp, Homo sapiens
caaagagaattttctgttcttaactccagactgcaagtccctttggaatggtggaatgacagaggaagaggaagacaaacttctg

SEQ ID NO: 81783 - DNA, 100 bp, Homo sapiens
gacacaagcttcttgcctgatcgagaccgtgaggaagaggagatcccagaactggagattgacgtggatgagctcctggacatggagagtgacgatgccc

SEQ ID NO: 81784 - DNA, 100 bp, Homo sapiens
cttgaacctgggaggcggaggttgtggtgagccaaggtgtggaaaaagaagctctcggcggccgtggaggtgggcgacgcggctgaggtgaagcgctgca

SEQ ID NO: 81785 - DNA, 51 bp, Homo sapiens
ctccttggtcgccgcgtccttggctggcgtaggtctcggcatctcgtccac

SEQ ID NO: 81786 - DNA, 82 bp, Homo sapiens
tatactcaattacacttcgactctcaaagcaataccaggatagctgttgtttcagagaaagagacggggtttcactgtgtta

SEQ ID NO: 81787 - DNA, 96 bp, Homo sapiens
cgctgacggccgcatcgagcccggcgacatgttgctgcaggatggggaatttagcatggatcttcgtaccaagagcaccggtggggcccccacctt

SEQ ID NO: 81788 - DNA, 83 bp, Homo sapiens
gccggagaccgagcccgaacagcagcttccccgggcgctgcctggacaggcctgcctgcgtgctgggacatgtctggcctcca

SEQ ID NO: 81789 - DNA, 100 bp, Homo sapiens
tgtcatgaatcttgacaaattgagatttgctgatggaagcataagaacatgagaactgcgactcagcatgcagaagttacaacattaaagcctgaacttg

SEQ ID NO: 81790 - DNA, 106 bp, Homo sapiens
gcggcggaggatgagcctgcagagcgcgcagtacctccgcccagaagaatcagtgcggtttctgtggcagagcgagttgcatttgaaagaggagaagagcctggaa

SEQ ID NO: 81791 - DNA, 107 bp, Homo sapiens
cggaagtgcagctgcctcagttcttagcgcagactgggactcttcaattaatctgacatttcacaaatccaaaattgccgtggatgaactctttacttcacttcggg

SEQ ID NO: 81792 - DNA, 100 bp, Homo sapiens
aagccgccatggcctaccacagcttcctggtggagcccatcagctgccacgcctggaacaaggaccgcacccatctttgcagattatcctgtggaaggaa

SEQ ID NO: 81793 - DNA, 83 bp, Homo sapiens
ctgggtcagtccgccgctcaccccgcggccgcaccttcccgccttctcagctggagaagaagcaggcgctccctccattccag

SEQ ID NO: 81794 - DNA, 95 bp, Homo sapiens
gggtcatcgtcacctccttccagaaagccaacatgctggaccagcatcacaccgacctgatcttaaaggactcagaattcatgattgaagaaatg

SEQ ID NO: 81795 - DNA, 90 bp, Homo sapiens
accacccagccttctgggccctccccccatggccaatggaaaacctggcgaccctaagtcagcggctgcatttcaacaaggaaagatacc

SEQ ID NO: 81796 - DNA, 75 bp, Homo sapiens
gcagcagcccagacgcggcacagagagggcctgggagcttgctgcagcttcaggcctgaggtcctttcgagactg

SEQ ID NO: 81797 - DNA, 82 bp, Homo sapiens
gcttcctgccctgcttcgcgttcatgtggctcctggacaagagagcacttgcacctcctgcgccgccgccccccatccaagg

SEQ ID NO: 81798 - DNA, 82 bp, Homo sapiens
ggaaggcagctattctcaggatatgacaggggtaacacccttccagatgatttttgagggcccaatgtaaaggctgttgcta

SEQ ID NO: 81799 - DNA, 100 bp, Homo sapiens
ggcgtgcaggactcgggtggctctgaggtcgcctggggaccccagaaggtctacaccagctctcagcccctgcgtgtggggtactatgagactgacaact

SEQ ID NO: 81800 - DNA, 50 bp, Homo sapiens
aatgggaagatttactttcgaagctataaatactagagtaaaaggatggt

SEQ ID NO: 81801 - DNA, 98 bp, Homo sapiens
gagttatggatattctggtggggagatgaacccaacctagtgggtgtaatacatcatgaactgcagggacatttgggcttccaggacagttttgtcac

SEQ ID NO: 81802 - DNA, 100 bp, Homo sapiens
gcgggagcccggccggagctgggtctggagacgccgtggcagcctgaacggagtgtgcgacggattgggaggtgtcatggagaaactccagctgggccca

SEQ ID NO: 81803 - DNA, 98 bp, Homo sapiens
ccttcctcagagccctcctaccttgccgcagccaccactgccgtctatgaggccatgactgcagggagtgcctgcagggcaccatccgcaacagccag

SEQ ID NO: 81804 - DNA, 98 bp, Homo sapiens
gccgaagatgatgtggtgactccaggaaccagcgaagaccgctataagtctggcttgacaactctgctttgggacatccggaagaaagcagccatcca

SEQ ID NO: 81805 - DNA, 88 bp, Homo sapiens
aagacctcatcctgagtcttcgcgctgtgctggcttctacaccacgatttgctgagataaaataccatgaggagtttgagaagagccg

SEQ ID NO: 81806 - DNA, 82 bp, Homo sapiens
aagagaccacatcagaggcagacaaaaacctttccaagcaagcatgggacaccaagaagggggatatgagactttctactcg

SEQ ID NO: 81807 - DNA, 82 bp, Homo sapiens
gaccgagaccgcggccgggaccgaggaataactctgtgtcaccctcggaaagcctccgggccagtgagaagcaccggggctc

SEQ ID NO: 81808 - DNA, 74 bp, Homo sapiens
tgaaacctcaccttgtggctgctttaaaggaagctgcccaaacccgagcctcagcaccccaatcagatgaaggc

SEQ ID NO: 81809 - DNA, 96 bp, Homo sapiens
cggccaaaagatgaagtatactccaaatactacacaccagttccctgcgagtctgctactggttctcagctgctgcgggagttgaaaaagatggac

SEQ ID NO: 81810 - DNA, 100 bp, Homo sapiens
tcaaagataaatccaaatactgcatatcagaaacaacaggtggataagattgtggaccagctgcagcagttaatgcaggtgtatgacttggctgcccttc

SEQ ID NO: 81811 - DNA, 75 bp, Homo sapiens
tcccaatgtaccccactatgctacagggcatatacttctcttgtcttggttggatgcacaaatctgtgtgcagtg

SEQ ID NO: 81812 - DNA, 89 bp, Homo sapiens
ccgctcctcagcggatgtggcagccccgagccatggctctcgccgtccgagtcgtttattggttgctgtgagtctaggtactccaatta

SEQ ID NO: 81813 - DNA, 90 bp, Homo sapiens
cgaccgagggaatgatccttactaaccacgaccatcaaatccgtgtcggagtccttacagactacatgaggaaataattgacttttataa

SEQ ID NO: 81814 - DNA, 100 bp, Homo sapiens
cttttcttccgcttggatattcgcatgggcctactttacatcacactctgcatagtattctaccttgtaaatactgttatttgtatatactgtaaatgat

SEQ ID NO: 81815 - DNA, 87 bp, Homo sapiens
ggagcctcagttggaagcagccgatccagcctgcggagcctgtggggcaggaagctcttcgtgggcggtcttgactggagcacgacc

SEQ ID NO: 81816 - DNA, 75 bp, Homo sapiens
ttttgtgtttcttgccatcttacaagggctggttgatatgtgaagagccaacctgtcgcaatcgaactcgtcacc

SEQ ID NO: 81817 - DNA, 96 bp, Homo sapiens
agaaattccactgggatgacactatcagcaataatgacgatgaggacctgacaccagagcagaaggcagagcgtgagaaggagcggaggatggcca

SEQ ID NO: 81818 - DNA, 94 bp, Homo sapiens
ggcaagtattgctgtgggtgctgggacttcccgtccgcggcgtggaggagctcttcagaaaccaggctgctttcaggaacattgctgtggattc

SEQ ID NO: 81819 - DNA, 90 bp, Homo sapiens
tcaacagcagaaacgcttgttgaatggcttcagagtcaaatggcctatatgaacccaatagcaatggcgagatcaaggggtccaatccag

SEQ ID NO: 81820 - DNA, 73 bp, Homo sapiens
catgtttcctcagatttgcagggaacaaactccagaaggccaaatgttcctccgtgtcacaaagcagtacctg

SEQ ID NO: 81821 - DNA, 96 bp, Homo sapiens
cagcagagcttggaaggatgcttcagctcatcttaggctgtgctgtgaactgtgaacagaagcaaggtccctttctagagataggagaagagagag

SEQ ID NO: 81822 - DNA, 52 bp, Homo sapiens
gacagcattatccaacggctgctggaaggccgacggtcgcaaggtcctacgg

SEQ ID NO: 81823 - DNA, 50 bp, Homo sapiens
tgttgctgctgtactccttctccggttacctgtcctgctgccgattcctg

SEQ ID NO: 81824 - DNA, 100 bp, Homo sapiens
gccagatatttccttcaaaacctgtctcaagagaagaccaatgttcatataaatggtggcagaaataccagaaggaaagaaaccttgactggttccccag

SEQ ID NO: 81825 - DNA, 83 bp, Homo sapiens
gccgggcccacctccccaccaaggaagggaaatcctcattgacgattcaatttgttgaaggccaatttgtggactcctacgat

SEQ ID NO: 81826 - DNA, 50 bp, Homo sapiens
atgaccttcacctcattaacaagctgatgttcctggagaccagcgctctc

SEQ ID NO: 81827 - DNA, 75 bp, Homo sapiens
gcctcaccaagtcacatgacaagcagttcagccgtctgtatatctccccagatacctgaaactgaccacctgagt

SEQ ID NO: 81828 - DNA, 100 bp, Homo sapiens
gctctggctggtctcccctctgctgggagagaagatgactgaggaggaggtggagaccgttctggcaggacacgaggacagcaacggctgcatcaactac

SEQ ID NO: 81829 - DNA, 88 bp, Homo sapiens
tgggcacagctgaatggaaagccagtaggacacgaaggtggagagaagatgactgaggaggaggtggagaccgttctggcaggacacg

SEQ ID NO: 81830 - DNA, 99 bp, Homo sapiens
accatacaggaacagggcagacgttagcgtgagtgatcactctcaatcccgggtacggattttcaaatatgcgctatatttcttcgctaattagtggtg

SEQ ID NO: 81831 - DNA, 101 bp, Homo sapiens
ctccaggatactccttggatcaagcccaccatcttcccattgaaatggatccattaatagaatacttcagagagtcagagttgtgccagaagtctcttaat

SEQ ID NO: 81832 - DNA, 75 bp, Homo sapiens
cctgatgatgaagactgaaggtgtagactcagcctcactctgtacaagggaagccagtttattaggaaccatttg

SEQ ID NO: 81833 - DNA, 100 bp, Homo sapiens
ctggggctcgccgtcaacgtggtcaccacgctcgtgctcatctcctactgtcccacggccaccgaagaggagtgcatcatcgacgaggactgtgggccca

SEQ ID NO: 81834 - DNA, 107 bp, Homo sapiens
cacaaagaatgtacaacagacagtgagtgctaaaggcccccctgaaaaacggatgagacttcatgatcctggtggagggattgaaatgtctgagttcatccgagagg

SEQ ID NO: 81835 - DNA, 75 bp, Homo sapiens
gctagggtcgccgccactgccgcaggaggcgtgagctggctggaggcgtgatcctgggtgtggccctgtggctcc

SEQ ID NO: 81836 - DNA, 83 bp, Homo sapiens
ggaattcctcaagacaccattccagtgactgggccaactccaaatgtggactattactttttgccaactggaacctgctggtg

SEQ ID NO: 81837 - DNA, 100 bp, Homo sapiens
acctagacctgaatgggcttgaccatctcacaactgctcgcgtgacgaccgcattcgtggcaggatgagttagatgaactccgtgctgagatggaagaga

SEQ ID NO: 81838 - DNA, 83 bp, Homo sapiens
ctctctttctggcctggaggctatccagcgaacggagctttgactgtaagatctgtgggaagagcttcaagaggtcatccaca

SEQ ID NO: 81839 - DNA, 100 bp, Homo sapiens
gaagagcagtacttccagttcctggccaagtttgagatcgccctgcccgtcgccaatgacaggtcatacttacctggttgcttgcgcatctagtaatgtt

SEQ ID NO: 81840 - DNA, 74 bp, Homo sapiens
acccatgtgctgtctgagggggtcaagaagaccatcatggagcagttcaaccctagcctccggaacttcatcgc

SEQ ID NO: 81841 - DNA, 72 bp, Homo sapiens
tttccagccttgtttttcagcagctttgaggaaaagtataggttacaggaggttccagtggcatcgggaagt

SEQ ID NO: 81842 - DNA, 100 bp, Homo sapiens
taaaatcatctccatattctcaggcacagagaaagggaacctcagaacctgttctggatccacagcaaatccaagcatttgatcagctttgccgtctcta

SEQ ID NO: 81843 - DNA, 100 bp, Homo sapiens
tcatctgctccgacaagacgggcacgctcaccaccaatcagatgtctgtctgccgggagcacgtgaattgcctctgcttacgttcaggccctgtcctaaa

SEQ ID NO: 81844 - DNA, 101 bp, Homo sapiens
tcctattgtggaacatttgggacttcagatacgctttaacttgaaatcaaggaatgtagaaatcagggagtcttacacatataaagacccaattacagaat

SEQ ID NO: 81845 - DNA, 82 bp, Homo sapiens
tccgtcagtccctaggtatccgcactgctcaggggtggctttttctcaagtatattttccagtctgtttggaactcgggaaa

SEQ ID NO: 81846 - DNA, 90 bp, Homo sapiens
tcaggaatttatggtcgcctttttgaatgagctcaaactttggaacaaataccgaatttccaacattccatcactaatattcctcgacgc

SEQ ID NO: 81847 - DNA, 100 bp, Homo sapiens
tgatgatagcagatcctatctgttcaattcttatagccattcttatagttgtaagggttacattccgaaaagcaaatgggagatggacacatctgaggca

SEQ ID NO: 81848 - DNA, 75 bp, Homo sapiens
ccggaactgcggcagtctctccctgccaggctcttcatccaagattatggtgacaagctgaacatggagctgagt

SEQ ID NO: 81849 - DNA, 82 bp, Homo sapiens
gtggatctcaagtactaccggccaactgaagtggtcacagaacagaaagtgctggtggacatctcttcttgccccaagatct

SEQ ID NO: 81850 - DNA, 86 bp, Homo sapiens
attgagctctgcacgctggggagtttgttgggggcagccgatgaagtgcaaccttcacatgaatgggaatgttatcacctcagacc

SEQ ID NO: 81851 - DNA, 99 bp, Homo sapiens
ctcacagtcaccgctgtcattgtgggagatatgtcagtattgaattctcccagacatcagagctgtataatgcatgttgatatggattgcttctttgta

SEQ ID NO: 81852 - DNA, 51 bp, Homo sapiens
ggagacagcaatctcaacttcagtcaagctacaacttcaagcagaagagag

SEQ ID NO: 81853 - DNA, 100 bp, Homo sapiens
ggaaattgaagaacgagaacggcgtagagaggaagagagaagacttggcgatagttccctttctagaaagttaaacacagtgggaatatcacttttgatg

SEQ ID NO: 81854 - DNA, 82 bp, Homo sapiens
ctgtgggacctgctggaagggaaggaaaaacctgtatgtggaaccacctggcgaaatgaccctgaatgtgacctgtgtggtg

SEQ ID NO: 81855 - DNA, 96 bp, Homo sapiens
ctcagggctttaccagcaactaccccagtgccggggagggttctgctgcttcgaaagctgatctgcattaccgttggaaaacagcagcctcagaac

SEQ ID NO: 81856 - DNA, 89 bp, Homo sapiens
cagacattggagaagggattagagaagtaactgttaaagaatggtggagccgccaccaaaatgcagattttcgtgaaaacccttacggg

SEQ ID NO: 81857 - DNA, 50 bp, Homo sapiens
ccgggctccgcgtacttcctgttcagatgtggcaaaatctggcaaaggca

SEQ ID NO: 81858 - DNA, 100 bp, Homo sapiens
tgtctgggaggataattgggatgatgacaatgtagaggatgacttctctaatcagttacggtttatttatgaaacagagcatcataatggcatagcagag

SEQ ID NO: 81859 - DNA, 49 bp, Homo sapiens
cggaaggagcggcccacggcaaaggctcaaagatttggaaagagacagc

SEQ ID NO: 81860 - DNA, 82 bp, Homo sapiens
aagacgtccaatctgagcgtgctgcggacggcgctgcggtacatccaggcgccatgtcagaaccggctggggatgtccgtca

SEQ ID NO: 81861 - DNA, 100 bp, Homo sapiens
gtggggcggtcccggccccgcagataaggatgacattcggctgctgccgtcagcattgggtgtgaagaagagaaaacgaggacccaagaagcagaaggag

SEQ ID NO: 81862 - DNA, 100 bp, Homo sapiens
gaacctgtccaggagctggcatgacgtgcaggtctctagcgcacgagccaaactcaggctgtaccttgagcagctcaagcaactggtgcccctgggcccc

SEQ ID NO: 81863 - DNA, 78 bp, Homo sapiens
ttgagagacagaggcaccccggacagagacgtgaagcactgaataacccaccagcgaagccagaattgggatgggagc

SEQ ID NO: 81864 - DNA, 98 bp, Homo sapiens
tggatatgtttcctctcacctgggttttcttagccctctacttttcaagacaccaagtgagaggccaaccaggccgccatggcatcagatgaaggcaa

SEQ ID NO: 81865 - DNA, 90 bp, Homo sapiens
gtttgcagaaaaaacttcagcatgtgccaggaacacaacctcaccttgatcagcttatcaaatatggagttattagcactaacgttctga

SEQ ID NO: 81866 - DNA, 100 bp, Homo sapiens
ggggtagtaaaaagaatcattcctgcagtagcttccacaaatgcagtcattgcagactgtcaagaacaagtatgccacatcgaagcatgctaagatcagc

SEQ ID NO: 81867 - DNA, 97 bp, Homo sapiens
aggccagaccctctgggagcttctcagccattttccacagatcaggcaaggtgcccggcgacgactgcccgctggtgtggggccagtgctcccactg

SEQ ID NO: 81868 - DNA, 100 bp, Homo sapiens
gcaccgagaacatctactctttcaactacaccagccagcccgaccaggtttatctggcaagactgaggcaaataagactacagaatttcaatgagcgcca

SEQ ID NO: 81869 - DNA, 82 bp, Homo sapiens
acggaatgctggagtcagtggaagacggagctggtcggcccgaagcttttcctccgcaaccatgtctgacaaacccgatatg

SEQ ID NO: 81870 - DNA, 100 bp, Homo sapiens
agataatgatgaagaagatccttcaaaattaaaagaggagcagcatggcatttcagtcactggtttgcagagtccagagctctgcgtgcctcttgctgtg

SEQ ID NO: 81871 - DNA, 49 bp, Homo sapiens
gtacctataaggatgatttcaatgttgcagttgcaccaccagcaccacc

SEQ ID NO: 81872 - DNA, 98 bp, Homo sapiens
gcccacatatcaggaccgagtggccccgccagcacccgacagctacaaagtgcaagataagaaaaatgcctccagccgccctgcctctgcaatttcag

SEQ ID NO: 81873 - DNA, 51 bp, Homo sapiens
agaacagtcgttcccgcctcacaacctggcggtcaagaagcagatcgagac

SEQ ID NO: 81874 - DNA, 90 bp, Homo sapiens
ggacgtcgtgcttcagcctcaccaactgcgggcacgtgtactgcgacgcctgcctcggcaaaggctggagggcagtggcatgatctcggc

SEQ ID NO: 81875 - DNA, 55 bp, Homo sapiens
ggagacacggccagatctgccctccagttctgggaagttctggattgtttaataa

SEQ ID NO: 81876 - DNA, 75 bp, Homo sapiens
ggaggaaactgatgaaaattttcacaatgtctttggtgcaacactaacaaggcttgtctggactacccagttaca

SEQ ID NO: 81877 - DNA, 75 bp, Homo sapiens
tcgggttctgtgtactccaaaacccaggactggacctacagagacatctgggattttctgcgtcagctgtttgtc

SEQ ID NO: 81878 - DNA, 98 bp, Homo sapiens
ccaccgccggaagacagacgtcccccaaaacccctcgcctggctcggacccacggagccggcagcccagcactccggcgtcctgcctctgcggctctg

SEQ ID NO: 81879 - DNA, 50 bp, Homo sapiens
ggactcccgacagcagaatcccagcctcctgctcttcatggatgaagcag

SEQ ID NO: 81880 - DNA, 86 bp, Homo sapiens
cctggagaatgcctggactgttctccccatggaagttcttcaagtgctttctcctgctcaagacagccacacgaacacggatctcc

SEQ ID NO: 81881 - DNA, 100 bp, Homo sapiens
tctctgatgagctgagaaacaaagccacccagccaatgaagtctcttcaagaaaatgaggaggaggagattgggaacctagagcttgcctgggatatgct

SEQ ID NO: 81882 - DNA, 74 bp, Homo sapiens
gcggcagtcacaggcacatcagcaaagagctctttgctgaagagcaagcagagggtcccaaccgcctgctgtac

SEQ ID NO: 81883 - DNA, 100 bp, Homo sapiens
cagatattatcatagttgctgcagatctgcaaagcccctgagcccaaaacagtctcctactgcagcccgtccgtgcccgtgcactttaacatccagcagg

SEQ ID NO: 81884 - DNA, 51 bp, Homo sapiens
ggaagccaacgaccacacgcagaacaacaacctgaccttcctgcggccgta

SEQ ID NO: 81885 - DNA, 82 bp, Homo sapiens
ctggacagatgaagagtgacttgtttctggatgattctaagagttttaagacaattatctcctatattgatgagcaatttga

SEQ ID NO: 81886 - DNA, 100 bp, Homo sapiens
ccggccttgatgaggcaatggaatggaagaaggtagataatgactataatgcccttcgagaaagactcagcaccttgcctgataaattgtcttataatat

SEQ ID NO: 81887 - DNA, 82 bp, Homo sapiens
gccgcgtgtcctcggagcgcggtccctgtattggtctcctgctcctagaggcccagctgagagccagcctggaggttaccca

SEQ ID NO: 81888 - DNA, 80 bp, Homo sapiens
catggaggctgagcatttattcagagttcaccgaacagcagaaagaatttcaagctactgctcgtaaatttgccagagag

SEQ ID NO: 81889 - DNA, 100 bp, Homo sapiens
tggccctctgctcctgtgcacaaggttgcagaagatcattcaccgcaatgacggggcagagaattcctgcacagaacgggatgggtggtgcctccccaag

SEQ ID NO: 81890 - DNA, 100 bp, Homo sapiens
ctctactgtcagaccacacacagagatagcactggctttcacagggattagccttctggtggtgggcacaactgtggtgggatacttgccaaatgggagg

SEQ ID NO: 81891 - DNA, 90 bp, Homo sapiens
cagcgacacaattgtctgtgacagtaacagtacttgggatcccccagttccaaagtgtcttaaagatgaagaacttcctgattacattat

SEQ ID NO: 81892 - DNA, 97 bp, Homo sapiens
ggaagctggtaggcacgggcggctccgcagtgaccggactcgggggagatgcagacagacatgctgaactatctggaagtccactgaaaagcaaaag

SEQ ID NO: 81893 - DNA, 50 bp, Homo sapiens
gtcctcgccggacagcgtgaagcaaacaatggactattgactaagctttc

SEQ ID NO: 81894 - DNA, 73 bp, Homo sapiens
aaaggatatgctatataagatgctctcagaaaatttcatgtcactccaggctcagcagggagctgctggatga

SEQ ID NO: 81895 - DNA, 98 bp, Homo sapiens
accaattgttttacagtctgttccgcatgatcgttataataaggacccaattcccttggaacatttaagaaaacattgatgtcaaaggcagctctcac

SEQ ID NO: 81896 - DNA, 74 bp, Homo sapiens
ctgagcgtgctcccctctgagactggagtgagagggtcttctgtctatccttcactggagtctgatgatgatga

SEQ ID NO: 81897 - DNA, 75 bp, Homo sapiens
gccagatccgctgatctagtgcttctcgaaaaaaaccttcaggcggcccatgggaccagatctttatggaaaatg

SEQ ID NO: 81898 - DNA, 90 bp, Homo sapiens
cgagaatgaggctaccatgtgccaggtgacctcacagtgactcaagctaccacttactgttgattgtgacgaaatgccagctgaggcaca

SEQ ID NO: 81899 - DNA, 98 bp, Homo sapiens
acccgtgagcaagcagcgacgccagcggcggagaaccgacgaaaggtgcgttcttcacaaaggtggtggatgtgggtgccacctctctgaagcttgag

SEQ ID NO: 81900 - DNA, 100 bp, Homo sapiens
aagacgaatttaggagacataagaccgttggttctgacgaggcacagcgtttcttgcaagaatgggaggaacattttagtggacaaaccaaatgaccaat

SEQ ID NO: 81901 - DNA, 75 bp, Homo sapiens
ctagaacagtttcaggcagatataaaagacactggcttcatgtcctattgaccgtaaaccttttcaggcagtgtt

SEQ ID NO: 81902 - DNA, 100 bp, Homo sapiens
taaaaggtagttttaagcaaacttaccttgtctgtctttgtacatcatcaccaaatggaaagttaatcgaagaggtgatggggaagataaccgtccagga

SEQ ID NO: 81903 - DNA, 101 bp, Homo sapiens
aaaacagctctggaaaatgacagccttcatttctctgaacatactgccttatgggacagatcaaaaacctctgtagaggagcaggatgcaaccgacaggct

SEQ ID NO: 81904 - DNA, 89 bp, Homo sapiens
ctcgtctcccgctccgccctcccttttccctgaacctggagctggttgaaaaaggcttcagtaacttgaagaaacaaattgaaaatgcc

SEQ ID NO: 81905 - DNA, 74 bp, Homo sapiens
cttctgtggggacacatagatttgtccaaaaggtgaacggaagagtccttatgttgcagtatgctgtatagtaa

SEQ ID NO: 81906 - DNA, 89 bp, Homo sapiens
gcacttctatgagcttgtggaagacacaaaagatggcatctggctggttcagagttgtctctgtgggaagtttgtcctccgtccattgc

SEQ ID NO: 81907 - DNA, 97 bp, Homo sapiens
atctcaggaccgggaattccaggccggttcaccaaggaggcagggacccttgcctactatgagccaccaattaccctagttatgggcccatcatctc

SEQ ID NO: 81908 - DNA, 100 bp, Homo sapiens
gttttggtcatcggaagtggtgccttcagcacaggaatagccaggccagaagaaggaaggcctgtggtgagtgggacaggaaatgacatcaccaccccac

SEQ ID NO: 81909 - DNA, 100 bp, Homo sapiens
caaaggtcacctggaaattgccttattggaaaaacatttcttacgctcagtagatgaaggcgtttctgagggcttgcctacacttcaaagcacgtctagc

SEQ ID NO: 81910 - DNA, 75 bp, Homo sapiens
cgctcttccacaccgttcagtcaacagagaaacagggcgatgagacaggtgtgatggacagtcttctagaagccc

SEQ ID NO: 81911 - DNA, 96 bp, Homo sapiens
ccctgagggccttcgagagctaccgcgccagacaggcctccggtgtggctgtctctgatggtgtcatcaaggtgttcaacgacatgaaggtgcgta

SEQ ID NO: 81912 - DNA, 100 bp, Homo sapiens
ctgttcatgagtggaatccatgtttctggacgcggatttttggcctcatactctgttatagataaacaagatattgatgatgttaagaagttcaaaccgg

SEQ ID NO: 81913 - DNA, 87 bp, Homo sapiens
tgcagatgcagtgtggctctggatagcaccttatggacagctgaccatgccactgcctcggtacggctccgggcagcagccactgat

SEQ ID NO: 81914 - DNA, 83 bp, Homo sapiens
ggagcagtggtcggagatgtggcgaccgaggctgggaggcggcagaatgcagccagaggagggcacaggctggctgctggagc

SEQ ID NO: 81915 - DNA, 98 bp, Homo sapiens
cgaactgtcccctacacggacccagatcatgccagaagatgattgaagaatcactgaagattaaaataaaaaaggaattagaaatggaaaatgaatta

SEQ ID NO: 81916 - DNA, 75 bp, Homo sapiens
acttttcagccatggccacaagccaaagtcatacactggctatcagaaaattatgctggaagaattgcagtggaa

SEQ ID NO: 81917 - DNA, 100 bp, Homo sapiens
cgaattcctgtgccgaagaggcctgcagtgggagagcaggggtggtgagaagctgcaggatgcctactacatcttccaggagatggctgacaagtgctcg

SEQ ID NO: 81918 - DNA, 75 bp, Homo sapiens
ggtggagcgggacacgaacgtgatcaggatcctcatgaccagccaaagagaagaagaattaggaagcataaatca

SEQ ID NO: 81919 - DNA, 50 bp, Homo sapiens
tcccaggaatacagctttgcattaggtctgctgagaacagacccagtccc

SEQ ID NO: 81920 - DNA, 49 bp, Homo sapiens
ccgcaccgcaccctccacctcaggatgcttgaagcccacatgcagagct

SEQ ID NO: 81921 - DNA, 75 bp, Homo sapiens
agtggagcgcaggggaggcagaagtcatgacaggcgaggaccctttagatcctacaagatcagtgattgtgatcc

SEQ ID NO: 81922 - DNA, 74 bp, Homo sapiens
gcaccgacatctgcctgctcaaagacatccacgacagcgatggcagttccagcagcagccaccagagcctcaag

SEQ ID NO: 81923 - DNA, 50 bp, Homo sapiens
gcccctcatcgagctcttcgtcaagggtttccaggcctgaggtgcccgcc

SEQ ID NO: 81924 - DNA, 100 bp, Homo sapiens
ctgtcatataactcctgagaatagtggttcttaactctgtaaaggccgaggggcaaagaaaaggaaagcatctggctctgaaaatgaaggcgattataac

SEQ ID NO: 81925 - DNA, 100 bp, Homo sapiens
acacagtacggtagtcaaacccccaggggccattgcaatttagagatgtggccatagaattctctctggaggagtggcattgcctggacatggcacagcg

SEQ ID NO: 81926 - DNA, 90 bp, Homo sapiens
atctttacctttccccagtggcccagagccaggagttctctggccgctctctggacaggaagagagaagggcacagttacctaagtatca

SEQ ID NO: 81927 - DNA, 75 bp, Homo sapiens
ctgcgtcagaggctggaggaactgaagaagctgtgtctccgagaagctgtgagtgctccagttgtaacatctacc

SEQ ID NO: 81928 - DNA, 74 bp, Homo sapiens
tgcgctaggtggcatctcctctcacggatgcctcggaagaggagcaggacttggatggtgagaaggggccatca

SEQ ID NO: 81929 - DNA, 100 bp, Homo sapiens
ccctcttcgacagctacacaaatctggaacgggtggccgattactgcgagaacaactacatacagagctctcagcatggcggctcctctacgtcacttgc

SEQ ID NO: 81930 - DNA, 100 bp, Homo sapiens
cggtcagtaaaacaaaaccttccccttcccagtttatgcctttggtgggaggaaaagactgagcagttgttggattgtaaacaagaacttgagcaaatgg

SEQ ID NO: 81931 - DNA, 100 bp, Homo sapiens
gtggtttacgacattactaatcaggcggcttacagggagaacacagttggcctccaccgtttctgccccacagaaaacgtagcaaagatcaaccgagagg

SEQ ID NO: 81932 - DNA, 76 bp, Homo sapiens
ttcctgcacacagccaaagtctgcaaaggctgaagggtatgtgattggcagctgtattaaacacattccaatcgca

SEQ ID NO: 81933 - DNA, 49 bp, Homo sapiens
atcggagagaataaataccgggtctctgacccctcccaaggatcatgcc

SEQ ID NO: 81934 - DNA, 90 bp, Homo sapiens
tagcatcttctgtcatgagaagtggcgatcaaaattgcgggacgaccctgggacagtctccactggggcagatccagctgaccatccggc

SEQ ID NO: 81935 - DNA, 90 bp, Homo sapiens
cttgctgctgaacctgagctgcaagttggaattgatataatgaagactagttttccaggtaatagcctgcagctggtgttttgagaagcc

SEQ ID NO: 81936 - DNA, 75 bp, Homo sapiens
ctgggaaggaaaaacagaatcagctgttccctgcgaaaggactactttggtgagtgttcagaggctgcaattaag

SEQ ID NO: 81937 - DNA, 100 bp, Homo sapiens
ctggattgtccggaattcatggggtgaaccatgggatttccagactgtattaccatcatttgagctcttctcaaagtatggaaaattatattcaaaagct

SEQ ID NO: 81938 - DNA, 98 bp, Homo sapiens
gtgccatggagacgcttaacggtggtattaaagataatcaaacattatcaagaagaaggacaaggaactgaagttgttcaaggagtgcttttgggtct

SEQ ID NO: 81939 - DNA, 98 bp, Homo sapiens
ccggggaccctgtacgtgtacatcatttacggcatgtacttctgcatgaacatctccagccagggcctcaggcccaggcccaaggccaagtgagagag

SEQ ID NO: 81940 - DNA, 100 bp, Homo sapiens
agctggagaaggagctgatctccgtggtgatcgctgtcaagatgcagccacacccactcgcccgggtctatggccacggtcggagagtggtcctgtgtgc

SEQ ID NO: 81941 - DNA, 83 bp, Homo sapiens
gcaaggtcggcagagcaaggggcttacgcagaaggacctggccacgatggccaccatgtctgggagatggaagcgaaaactga

SEQ ID NO: 81942 - DNA, 99 bp, Homo sapiens
ccacaggaggctgtgcgggccccgctccgcttcgaatggatggcaagattattttatcataaaccccagtttgccattttggatgaatgcacaagtgca

SEQ ID NO: 81943 - DNA, 82 bp, Homo sapiens
agtgggtggtcaaggagtcgggcatcctggtgctgggcgccattgctgagggaattgaatgatctggcacgggaccctccag

SEQ ID NO: 81944 - DNA, 75 bp, Homo sapiens
agctctattacatgggccggtggaaactgggaagttaaaatctccagcccggattacaaagactgcaactcggca

SEQ ID NO: 81945 - DNA, 100 bp, Homo sapiens
caacgtgtggcggctcgcgacccccggcaacccggagaaggtctacagagcggcctgcgccagcgatcaccttcaggccattcagaggaggaaagagagg

SEQ ID NO: 81946 - DNA, 98 bp, Homo sapiens
gaagtgccatggcaatgtatgcatattttgtaatgacacgccagggttaaagcacgaattgggagctctcagcgacatcaccagtcagcagccaaaga

SEQ ID NO: 81947 - DNA, 83 bp, Homo sapiens
aagctgtctctgatccgcaagcatgctcagaccttcattgctctgtgtgccaccgatgagagtccggagtgttgtcatgtgaa

SEQ ID NO: 81948 - DNA, 101 bp, Homo sapiens
gtgatgaggatgacaaaagaaaccaaggaaatttgtatgataaggcggtcaggctgctgaggaaacaccacaggctgaacgggggaggaatgcacatgcca

SEQ ID NO: 81949 - DNA, 75 bp, Homo sapiens
gcagagtgttctgttcttcacttccagcaagccaggctttcttctagtcaagatgagtgataaaccagacttgtc

SEQ ID NO: 81950 - DNA, 50 bp, Homo sapiens
gaagcttttggatcgtatccacaatcctgtatctggagtccatctttcac

SEQ ID NO: 81951 - DNA, 131 bp, Homo sapiens
caaccgcagccgctgttcccaggatggtgatccgtgtatatattgcatcttcctctggctctacagcgatcagtgtgcgtgtgaccaccatggatgcagagctggagtttgccatccagcccaacaccacc

SEQ ID NO: 81952 - DNA, 100 bp, Homo sapiens
caaaatcatgcgagtggggacagcttcttcctaggaattacatgaatgacagtcttcgaaccaatgtgtttgttcgatttcaaccagagactatagcatg

SEQ ID NO: 81953 - DNA, 75 bp, Homo sapiens
gctgtcacaggacctggccctggttccttagctcctggagcaaactgtgctcacaggagaaactagaggaatgga

SEQ ID NO: 81954 - DNA, 101 bp, Homo sapiens
aactctgcagtggaccacagcattcctgaaatacatccaggaaagacatggagattctcttaaaaagttattagaggaagtaacacaaggggatatgagtg

SEQ ID NO: 81955 - DNA, 110 bp, Homo sapiens
cagcaccgcagccttgggcctcgcgccggctatggccgtgccctggggctgagccctcaggtcgcgtggggcaggcagtggcgctgcgggccaaggccttcggcttcaac

SEQ ID NO: 81956 - DNA, 100 bp, Homo sapiens
cccttctcatggcaatcgagttgagtacttggatagacttatacctcagtgaggaagggaaactgtctacctctcaagatgctgcttgtaaagacgcaga

SEQ ID NO: 81957 - DNA, 100 bp, Homo sapiens
tgcaaagaagtccgaggcatctggcttctgttacgtcaatgatatcgtcttggccatcctggaactgctaaaggcagcggcagtgatgacacggagctgc

SEQ ID NO: 81958 - DNA, 107 bp, Homo sapiens
cagacaaggcaaagcgaaattggtcattctcgctaacaactgcccagctttgagctctggattaatcgaattacagctgctagccaggaacatggactgaagtatcc

SEQ ID NO: 81959 - DNA, 113 bp, Homo sapiens
gaacgggcggcccctggagatgattgagccgcgcacgctacagtacaaggccatcaccatcgaggctgagccaagagctgatggcagccgccggaccacccgctatgacatcg

SEQ ID NO: 81960 - DNA, 87 bp, Homo sapiens
gagaggcgtcctctgggagagcatggatcctgaggtcccagcttattgtcccaacaaatgtggtgagtctggattacagaagttaac

SEQ ID NO: 81961 - DNA, 90 bp, Homo sapiens
agctggccaaagcctgcccagacggctcacctgtgcgggatggaacaaaagagagcgcctgctcgctgtgcccccgggttatgacgaccc

SEQ ID NO: 81962 - DNA, 100 bp, Homo sapiens
gcgaaccgcagtatcatgctggccaagaagatcatcattaaggacggaggcacgatgaggaaactgaggcttggtgaagttacgaaacttgtccaaaatc

SEQ ID NO: 81963 - DNA, 100 bp, Homo sapiens
gtgtcgccggccttggtccctgcggcgcggacgtccggcgcgggagagaaagtccggttccagttgttggcaaaggagaggaagaggaagaggaagatgg

SEQ ID NO: 81964 - DNA, 100 bp, Homo sapiens
gcgcgacctggccagctgccgcgactgggaggagcgccggaacgccgaggcccaggtcctggctataagtcaccatggcacagcaagctgccgataagta

SEQ ID NO: 81965 - DNA, 108 bp, Homo sapiens
ggcggcgacgcggacctgcggactagcgaacccggaggtgctggagaatctggtaaaagcaccattgtgaagcagatgaggatcctgcatgttaatgggtttaatgga

SEQ ID NO: 81966 - DNA, 74 bp, Homo sapiens
gctcaattcccatacatgcactagaggtgtggacactgcaagagacttgcacctgagtatgaagctgcagctac

SEQ ID NO: 81967 - DNA, 75 bp, Homo sapiens
acctgaccagcaggacaaagtccagtaacatgcaaggaggcactaaactccatggtcagctgggccatggagaca

SEQ ID NO: 81968 - DNA, 100 bp, Homo sapiens
tttaattttagggtcctttatatagaagggagagtgtctattttagaaaggcgcaacacagcaggaagggtggtgtataaaaccctggaagacccttgga

SEQ ID NO: 81969 - DNA, 96 bp, Homo sapiens
atagagctggaatcgccagctcccggcactgctacctctgacccaaagcagggcgtgatggtgggcatgggtcagaaggattcctatgtgggcgac

SEQ ID NO: 81970 - DNA, 101 bp, Homo sapiens
gcaccgctgcgttacccggaaccgccgggccgaacagcatgacgtccgctttggagaactacatcaaccgccttcaataatctggagaatcttgtctttgg

SEQ ID NO: 81971 - DNA, 75 bp, Homo sapiens
tgaaatcatgaaagtagacaggactaaactgaagaagacacctactgaggctgatgaagtgtcctcttgctagca

SEQ ID NO: 81972 - DNA, 100 bp, Homo sapiens
cctcttgaaattaattttttcccaggagagagatgtcttatcaggggaagaaaaatattccacgcatcacgcagatataatttctacagtagaatttaat

SEQ ID NO: 81973 - DNA, 98 bp, Homo sapiens
ctgtccctgctgctaatggagcaatacgtttccattgtgatcccaccttctgggcaaagaatgtagtcaatttaggcattatattgtacttctagcaa

SEQ ID NO: 81974 - DNA, 100 bp, Homo sapiens
ggaaacttgatgcttctgggccaccatttgccagggcctcgctcgagaggacggctaagcaaattttctcatgtatgaagctgagcagaagtcagaagtt

SEQ ID NO: 81975 - DNA, 75 bp, Homo sapiens
acagacattttgctgctgctacaaaggttttgactctgggaggagggctgccttatttggagcaccttaatctct

SEQ ID NO: 81976 - DNA, 75 bp, Homo sapiens
ggagcagcaccaaatccaagatggcggccagcaggaggctgatgaagctgctcctgtttttcacatccaaggttt

SEQ ID NO: 81977 - DNA, 120 bp, Homo sapiens
acggagccagcggctgaggaggggccccagcagcccccgaaggccctatcaggacatggagtatgaaagacggagagctcaaaggatggctactgacatgcagaggaagagaagcagcga

SEQ ID NO: 81978 - DNA, 100 bp, Homo sapiens
caaagagaagggaaccgtatacttcaagggagatacttcaggggattaccggaagattctgctgaagatctgtggtggcaatgactgaacagtgactggt

SEQ ID NO: 81979 - DNA, 100 bp, Homo sapiens
gaagaaacacgtcatctttccaaagaagagtgagtagcttggttggtggtaccctaaaattagggcatgattaagacgttgagaaagaagggccttaatg

SEQ ID NO: 81980 - DNA, 90 bp, Homo sapiens
gaagttttccaacccacagctggtccagtggcattgcagagcacggatggttgcaggagccaacttttacattgttggacgagaccctgc

SEQ ID NO: 81981 - DNA, 100 bp, Homo sapiens
caatgtagaggatgacttctctaatcagttacggctaggcagctggaagagaaagaccgagtgctaaagaagcaggatgcattctacaaagaacagctgg

SEQ ID NO: 81982 - DNA, 75 bp, Homo sapiens
cggcgagctacgtgcagttgctggagaaatgagccgtcagactgctacagcattacctaccggtacctcgaagtg

SEQ ID NO: 81983 - DNA, 83 bp, Homo sapiens
tggctatgaacccagaggtcgtggaggtggccgtggaggcagaggtggcatggggtctgccctggccgtgaaggccccatctt

SEQ ID NO: 81984 - DNA, 75 bp, Homo sapiens
gctgccaagctctgggggtcatcacagagaaggagacccaggtggttaaacccatccagagtaatggctgcggcc

SEQ ID NO: 81985 - DNA, 75 bp, Homo sapiens
ctggactccctggacatgctgccagcagtgaagaggatgttaagcaagtttttggacagaccacaattcatcaac

SEQ ID NO: 81986 - DNA, 123 bp, Homo sapiens
aaaatggcgaccggcaactactttggattcacccacagcggggcggcggcggcggcggctgcggcccaatataggactcagcccaaaaccatgtttgcccaagttgaatctgatgatgaggaa

SEQ ID NO: 81987 - DNA, 100 bp, Homo sapiens
tggacatcgtcacagaggagatgcctgagacttcacagagaatgcagttgtcttgacttcaggtctgtctgttctgttggcaagtaaatgcagtactgtt

SEQ ID NO: 81988 - DNA, 100 bp, Homo sapiens
agacgacaagcacacactatggcgctgaaacggattaataaggtgatggcttggacaacagtgtagcttcccccagcacaggtgacgatgatgaccctga

SEQ ID NO: 81989 - DNA, 50 bp, Homo sapiens
gaaaaatctcctggctgcagctgcaagcttcgtttagaggcacttcatca

SEQ ID NO: 81990 - DNA, 100 bp, Homo sapiens
gtttatgatgatgagacttatatgatgcaagatgtggcagaagaacaagaagttgagaccgagaatgtggaaacagcagccaagagtttgttgaagaaac

SEQ ID NO: 81991 - DNA, 74 bp, Homo sapiens
catgtgtgttgagagcttctcagactatccacctttgggtcgctttgacagggaggtagatattggaattcctg

SEQ ID NO: 81992 - DNA, 82 bp, Homo sapiens
caaaactttctctcttgataagataacaacgaacttgatgcaagtgataggtttgccaaggtcagacctctcatcatccgga

SEQ ID NO: 81993 - DNA, 98 bp, Homo sapiens
agagacatgagatgattgccaaatccccaggattttgaagcagaagaaactaacgaaggcagacactttccagacaacttatgtcctttttggaacaa

SEQ ID NO: 81994 - DNA, 83 bp, Homo sapiens
gttgagcctgtgggacacttcgggcaatactgaacactgcgcagcttgcagaggtctcctggcagccctcattaggaattctg

SEQ ID NO: 81995 - DNA, 83 bp, Homo sapiens
cgccgacccgcgccctgctccctctcagcacctgggcggacgatatctccggagcatttggataatgtgacagttggaatgca

SEQ ID NO: 81996 - DNA, 82 bp, Homo sapiens
cattatcagatgttcttgacagagtgtcagggcctctgaaaaatggaaccaaattctctgaggactaaagtcccagctttct

SEQ ID NO: 81997 - DNA, 87 bp, Homo sapiens
aaaggacattaaggaaatagtgccccttttcagaagacgccaaaagactcatgtacccatgttacaggtatggactgctgataaacc

SEQ ID NO: 81998 - DNA, 101 bp, Homo sapiens
ttgcttattcccccaccatgggactctacctggggatatacatgcatgcaccaaaacgaggacaggtggtcagaatggcttcaacattcctcaagtcaccc

SEQ ID NO: 81999 - DNA, 82 bp, Homo sapiens
gcccgtcagtccctgctctgtgcgcgcctccatctgggccatggatggataacgaaggaggcccaacttcattcaataagga

SEQ ID NO: 82000 - DNA, 74 bp, Homo sapiens
gaagctgcctgcccggtgtctgcccctgaggaggtctacatgttcaagtgcgtgtggcggtgctacagattgat

SEQ ID NO: 82001 - DNA, 105 bp, Homo sapiens
caagagtaacagcagcgccgtcccgtccgacagccaggcccgggagaacagcccctgtcaaagggaacaggaagcagtccacggagggtgacgccctagacccac

SEQ ID NO: 82002 - DNA, 90 bp, Homo sapiens
cggaggcagagcggctgccatgtattgcctaagtgtaatcttgaacatgggcggtgctgtgagtgctggtgaagacaatgatgagctgat

SEQ ID NO: 82003 - DNA, 100 bp, Homo sapiens
gatatttccaaagtttgcagaaaagaatatgaggtgggcttggtgcttgcatttcctgcgttgcagtgtcaggatttttcagggatcagccttggcactg

SEQ ID NO: 82004 - DNA, 73 bp, Homo sapiens
ctgccctggggggcacagctagttggatggcaagcatgtggtgtttggcaaagtgaaagaaggcatgaatatt

SEQ ID NO: 82005 - DNA, 90 bp, Homo sapiens
tggtataccaaggttacctcagtggtggtagatgttgtgcctcggcagctgggaggtgcaccctgaagaccacaaattaaataaatatca

SEQ ID NO: 82006 - DNA, 83 bp, Homo sapiens
gaaactgtacacaacaagcatcttgatctagaaaatataacggtttttcgttggaatatacgttgcacatttatggcgattct

SEQ ID NO: 82007 - DNA, 74 bp, Homo sapiens
caatgcagaagtggtattacaaagatcctcagggagaaattcaaggttctaaggcccagcagctactacaagga

SEQ ID NO: 82008 - DNA, 100 bp, Homo sapiens
ggtgctgctcacctaccgcgtcggggagggacccgggtctcgcccaagaacttcaaggtgaaaatgatcatgaagacatcagttctgctcagctgggagt

SEQ ID NO: 82009 - DNA, 100 bp, Homo sapiens
tccagaagtagcatggaaatggagggcatcttcaaccacaaaggggacggcaaaacagaacagaaaggcggagataaaaagaggggtgttaaaagaccac

SEQ ID NO: 82010 - DNA, 80 bp, Homo sapiens
aaaatttcgatattgaagtgtcaaaatccatagatggaaaagatgagccataagtgtgatccttggtgacaggtggaaga

SEQ ID NO: 82011 - DNA, 100 bp, Homo sapiens
gtgtcaccttgtcccgctgcagccgagatgccgggggagcggggccttccacaccccctccgtgggtgtgtgggggggctgtcggggggctgttaggtgc

SEQ ID NO: 82012 - DNA, 95 bp, Homo sapiens
gggtcgcgatgctgcccggtttggcactgctcctgctggccgcctggacggctcgggcgctggagagccgagactgtctgaagctgggcccacct

SEQ ID NO: 82013 - DNA, 98 bp, Homo sapiens
gggaaatccatcatggactgtgggctgctcagtggatgtcagaactgcagctgaatatgtaaaatctcgactcccagaggcccttaaacagcatcttc

SEQ ID NO: 82014 - DNA, 98 bp, Homo sapiens
aaattaagtgaattgatttggttggaatgctcttttaccgatgctttaacatacagccactagcatcagaggctccttgaaatgctagatacagagaa

SEQ ID NO: 82015 - DNA, 100 bp, Homo sapiens
ttctgggcggcagggaccgcggctgcccgaggttcagccgtctgtatatctccccagatacctgaaactgaccacctgagtacgttttcccattgctgag

SEQ ID NO: 82016 - DNA, 82 bp, Homo sapiens
cattcccaacagccaccaccaccaccagatgccaaaacaacttcccgacaagtggcagcacgatcttttcgacagtggcttc

SEQ ID NO: 82017 - DNA, 88 bp, Homo sapiens
aatgcagattccagaaaaattacagcacatctcagtgaatttgcaagtggttcgggcttctaatttacaagatttagtttacaaaaat

SEQ ID NO: 82018 - DNA, 100 bp, Homo sapiens
aggattccaagtaactcttatttggaatctgatgcttccaccagatgtctggatgaaaataactatgacagggaaaggtgttccacttacttcttgaggt

SEQ ID NO: 82019 - DNA, 50 bp, Homo sapiens
acaaaaaaagttccagttctttgagacggagtttcgctcttgttacccag

SEQ ID NO: 82020 - DNA, 50 bp, Homo sapiens
gaagaggatgatgtttttggtgaaggatcatgtatatgaacttctcaaca

SEQ ID NO: 82021 - DNA, 98 bp, Homo sapiens
catgttcctgagcttgagatgctaggaagacttgggaaaatgtttataggaggccttagctgggacactacaaagaaagatctgaaggactacttttc

SEQ ID NO: 82022 - DNA, 82 bp, Homo sapiens
tgggctacagttagagtctgaagttgttaccaatggtgaaactacatgttcagaaaaatttacatagtacatgacgaagtta

SEQ ID NO: 82023 - DNA, 100 bp, Homo sapiens
gtgagatgcagagccccagctcctgtctggtctgtgagatgtcctcactgtttcaggagagacctccaggaaaccactgtgctgtccaacctcaagatta

SEQ ID NO: 82024 - DNA, 100 bp, Homo sapiens
aaaaaaattattagaaattccgcgggcggtgtagaggcggcggacgggccggagggaggatgttaaagccccgcggaaaatcatcagcgtgttagcattt

SEQ ID NO: 82025 - DNA, 80 bp, Homo sapiens
acgatgatgacagtgacaaggaaaaggatgaagaggacgaggtcattgacgagaaaatgacagatggcgagacctggaca

SEQ ID NO: 82026 - DNA, 88 bp, Homo sapiens
ctgaagcgactgagtccgcgatggagaaaattttaagagcttgcattgaacaagtgaaaaagtattcagaattctatactctccacga

SEQ ID NO: 82027 - DNA, 98 bp, Homo sapiens
tccgggtcgctggcggcgtggacacctgagtcccggggtaggggtctcccgcgagggggattcccgaagtcttccgttttctgagaatgtgagtgctg

SEQ ID NO: 82028 - DNA, 97 bp, Homo sapiens
ccgaagatgccggactccggaacagcaagaactgcaccgaaccagagattcgtcagcgaactgcagctcaaagaaacctttctccaacaccagcaag

SEQ ID NO: 82029 - DNA, 100 bp, Homo sapiens
cgcctgcgatggggcgagaaaggtcccactgcagccctccaagcagacttcccaagtaagaagcggaagaggagccgctggaaccaagacacaatggaac

SEQ ID NO: 82030 - DNA, 101 bp, Homo sapiens
cttccggctccgtcgtggaagcaggactgcgccgcgtcttcctcaagggggatatgagactttctactcggaatatcctgagtgttgcgtggatgtaaaac

SEQ ID NO: 82031 - DNA, 50 bp, Homo sapiens
taaaacaccagaactcaacctgtgatgtaaattggagtcaaccaggtgaa

SEQ ID NO: 82032 - DNA, 75 bp, Homo sapiens
aagaaggcaagaaaaatccaggtgccggaggagcagaaggggatccagttcttggtggagaatgaactgctgcag

SEQ ID NO: 82033 - DNA, 82 bp, Homo sapiens
cagaggatggcgcctgtgggcacagacaaggagctcagtgacctcctggacttcagcatggccgccatggcatcagatgaag

SEQ ID NO: 82034 - DNA, 50 bp, Homo sapiens
tcccaaatagctgggactacagatggagtctcgctctgtcacccaggctg

SEQ ID NO: 82035 - DNA, 90 bp, Homo sapiens
tcgtgaaggttgaagtctgggatgtagtagacaaaggtcatcatcagatttgaaatatttaaagtggatacaaaactatttcagcaatgc

SEQ ID NO: 82036 - DNA, 98 bp, Homo sapiens
cttctgaccatgtaccatggatgggttctcttcagcggaccaggagaggagaaattgaaacatgctgctgctaccttttgcagtaaccaacctttcgc

SEQ ID NO: 82037 - DNA, 75 bp, Homo sapiens
cagcgagctcctgggcatcccgctggaccaggccaaatttgagtttcatcatggtgactatgaaaaacagtttct

SEQ ID NO: 82038 - DNA, 100 bp, Homo sapiens
tggtggcaagcatcagctgaccaagatcaaacagatgatggaggcagcaacacgacaaatcgaggagaggaaaaaacagctgagcttcattagcccccct

SEQ ID NO: 82039 - DNA, 75 bp, Homo sapiens
ccacggtgatgagccgggcctggcggacgcggcgccatcgcagtcagaggctgggaggcggcagaatgcagccag

SEQ ID NO: 82040 - DNA, 109 bp, Homo sapiens
cttgtgacagaatatgccaaaaatggagaaatttttgatcttcaaagctgctgcgggcattctatgtccccttcctgtcagatcagtatacagtgtacgtaaactacac

SEQ ID NO: 82041 - DNA, 100 bp, Homo sapiens
tccagtgtgatccattattgaccttcaagaactaaggttgtggcagcactgcctgaaggtatgagaccagattctaatctttatggttttccatgggaat

SEQ ID NO: 82042 - DNA, 82 bp, Homo sapiens
tggccctcaggccttgcccaaacctgcaagccccaagaagccaccccctggcgagcggagtgtatcgcattaagttcaagga

SEQ ID NO: 82043 - DNA, 50 bp, Homo sapiens
ttggactcatagtcactgccagaaagaatgtgagaacttcctggatgttg

SEQ ID NO: 82044 - DNA, 101 bp, Homo sapiens
tggctgcgtcaccgccgcccccccagacaagatggacaccgcggaggaagaggctgcctaccacaaggactttagcttactttttaaagattgaagaaaaa

SEQ ID NO: 82045 - DNA, 83 bp, Homo sapiens
ttcaacaagaggacccaggagaaattcgccctcaaatttttcagaagaagtgaagtcaagatgaagaaccatttgcttttctg

SEQ ID NO: 82046 - DNA, 96 bp, Homo sapiens
ctggagccaagtggctgcttctggactgcgctctgtcttccctcattgctatggacagtgctatcaccctgtggcagttccttcttcagctcctgc

SEQ ID NO: 82047 - DNA, 73 bp, Homo sapiens
gatgatcctggccatgaatgaaaaggattgggtactagtacagctaaagaagcaaaggaatattttgctgata

SEQ ID NO: 82048 - DNA, 100 bp, Homo sapiens
tcatccaccagcagctgagcaagagagaagaagaaggaggttcctgctgtgccagaaacccttaagaaaaagcgaaggaatttcgcagagctgaagatca

SEQ ID NO: 82049 - DNA, 75 bp, Homo sapiens
gatttcttaaggaaacggttgcagaaaggggttccagagttctaaatctggaaagatctacctccatagagacgt

SEQ ID NO: 82050 - DNA, 51 bp, Homo sapiens
gcctgcgggagcagccccatggcgggaaacgctggggccagtcttcacctt

SEQ ID NO: 82051 - DNA, 100 bp, Homo sapiens
ccccgctatgacgtgctgggggtcatcgacagctgcaaggaggccgtcaccttcaaggccgtcagacaagaaacccgggatggacgtggccgacgcctac

SEQ ID NO: 82052 - DNA, 75 bp, Homo sapiens
ctggatcccgggctcgcgggggcgcggagaagaggatccaggaaaggatatacgtggcatttcaagtgatcagtt

SEQ ID NO: 82053 - DNA, 100 bp, Homo sapiens
gggcgagaggtgccaagggagcttctgtcccgaggaccaggggatgcgaaggggccacccgttcatcgtgcagttcaatgatggaaatgccgccgtggtg

SEQ ID NO: 82054 - DNA, 90 bp, Homo sapiens
gcagccagttccggcccgaggacaccgactaccagcagggccagtactgtgacatctgcacggctgccaacagcaacaaggcacaccccg

SEQ ID NO: 82055 - DNA, 98 bp, Homo sapiens
tccagatattagcacagcagaccttggtgatgtgctacaggtagaagaatacatgttcacttccagtgaacaagagcatgttcccaaactcaattttg

SEQ ID NO: 82056 - DNA, 101 bp, Homo sapiens
tgtcgcaaaacttatgtgaccccgcggagacccttcgagaaatctcgtctcgaccaagagctgaagctgatcgggcgcggatggcgtcggggcgccccgag

SEQ ID NO: 82057 - DNA, 76 bp, Homo sapiens
cgaagggctccgtggtgcccgggaggtggcgtcatcacctacattggctccagtggctcctccccaagccgcacca

SEQ ID NO: 82058 - DNA, 74 bp, Homo sapiens
tcagccacagaaggcagccacaggtagaagaagaaaggtgccactccggcatgaagacagactcgcttagtcgc

SEQ ID NO: 82059 - DNA, 82 bp, Homo sapiens
caggacaacatagcggtgaaggcgaacgcggtctgcaagctgacgtatgaatgtcggattgcacatcctattgtaaaatgta

SEQ ID NO: 82060 - DNA, 74 bp, Homo sapiens
tggagtgggggcacccgtgtacatggccgccgtcctggaatacctgacagagcgctgtcggcttcaatgaaatg

SEQ ID NO: 82061 - DNA, 100 bp, Homo sapiens
ttgggccattaccttgccctggtctgcaggtggagtcttcatgtaagaatgtacctgaacttccggacactacagagcattctagaacggacctgtcccg

SEQ ID NO: 82062 - DNA, 100 bp, Homo sapiens
atcgcggactatgagagcggacgggccatacccaataaccaggtgcttggcaaaatcgagcgggccattggctgtgagctctccggccacacccgctcct

SEQ ID NO: 82063 - DNA, 105 bp, Homo sapiens
atttaagagagctctggacaagctggaatgcatccaagagaatccctcaacatgctgaacaccttccaccatgaccacctcagcaagttcccacttaaataaagg

SEQ ID NO: 82064 - DNA, 132 bp, Homo sapiens
cccgccgccccgcgggggagggcggagctggcgcggcccctagctttctccttctggtgtggggcccgagctgatgttctaatcatgtcagataaagatgatattgagactccactgctaactgaagcagcc

SEQ ID NO: 82065 - DNA, 100 bp, Homo sapiens
cgaggaacccggctgaggcggcagatgagctttgatccaaaccttctccacaacaatggacataatgggtaccctaatggtacttcagcagcactgcgtg

SEQ ID NO: 82066 - DNA, 75 bp, Homo sapiens
tgagcttgtggaagacacaaaagatggcatctggctggttcaggttcgttccaccagtcataaaccagatgaaat

SEQ ID NO: 82067 - DNA, 75 bp, Homo sapiens
tgtcattgagtttcttcaccgagtggtggacacatttcaggtgtggcatgcagcattttggaaggaaaattgaag

SEQ ID NO: 82068 - DNA, 82 bp, Homo sapiens
tagccccggcggagcccgcagcttccctgccgtggtattggaaggaactggccctgggcctctggaggcagcagtattctgg

SEQ ID NO: 82069 - DNA, 100 bp, Homo sapiens
gccggtgctggctgggagttctggtctcaggcaaggtggggactgggcacatcatcaatacgtttgctaatccagactttacacaacctatctcagaagt

SEQ ID NO: 82070 - DNA, 80 bp, Homo sapiens
ggctcgcgacccccggcaacccggagaaggtctacagagcggcctgcgccagcgataagactttgaccccgacgcaggct

SEQ ID NO: 82071 - DNA, 75 bp, Homo sapiens
gggttgcttctggcggccatggtgttgctgctgtactccttctccggcccgatacttctccccacaagctcgccg

SEQ ID NO: 82072 - DNA, 75 bp, Homo sapiens
ggagatctcctcaaagaagtttgtccttctgctattgatcctgaaggaacagacaacgcaagctggggacgaaac

SEQ ID NO: 82073 - DNA, 82 bp, Homo sapiens
gggtttccaccgttcgttcaaggttttggctacgggcctccacctccaccgccagatcagtttgcccctccgggggttcctc

SEQ ID NO: 82074 - DNA, 73 bp, Homo sapiens
gaccccgctgctgctggaggcaagctattcaggattatgaaactgctcaggaacacaatgaaaatgatcagca

SEQ ID NO: 82075 - DNA, 75 bp, Homo sapiens
ctatgaccggcgtcgagaatttcaactggattttgtgaaaatggaaaattatgaggcattggtaggctttgatct

SEQ ID NO: 82076 - DNA, 75 bp, Homo sapiens
gccatcttcgaacttagacttccggaaggactttggcgaggtcagagcaccataacatggtgtgggaagtgaaga

SEQ ID NO: 82077 - DNA, 83 bp, Homo sapiens
aagatcaagatctcattctagaaagaagcgatacaggaaggtgggagtcaatcattttgacaagtctcctgaaaggaacagct

SEQ ID NO: 82078 - DNA, 101 bp, Homo sapiens
cctactgcagccacgcgggcgagcggctgtgtggatgtcggcgaagccgcgggcgagctgggattctgtccctgaccgtcttcacagtccaggtgatcttg

SEQ ID NO: 82079 - DNA, 100 bp, Homo sapiens
gtgaggattgggaacgagttggagaaaggcttaatccccaacaagagcagatttccacaagacggcaccctatgtcgtcactggcagcgtagatcaaaca

SEQ ID NO: 82080 - DNA, 83 bp, Homo sapiens
cgccaagaccgctgcagccgctggctgagcctccccatggccacccatggaccagtcggcattcacttcctcccttctgcggc

SEQ ID NO: 82081 - DNA, 82 bp, Homo sapiens
cggtgctgcagacggcgagacctcctgcacagattttgcaagaacgaggctcaaggatgtgagggacacagtattgacagct

SEQ ID NO: 82082 - DNA, 100 bp, Homo sapiens
gggcctgcaggtctctgtcgagcagcggacgccggtctctgttccgcaggatgcaaaattcctgcctttctaaatgtggtggatattgctggccttgtga

SEQ ID NO: 82083 - DNA, 123 bp, Homo sapiens
tggttcttcatcgtgctattcctggtctacatcctgcgggtgcctttgaaaatcaacgacaacttgagcacaggtgcaactgacatgggtgaaccccagggatccatgcggattctagtgaca

SEQ ID NO: 82084 - DNA, 83 bp, Homo sapiens
cagaaatttgccagcagtggtacactcagagttcatatccggagccacacaggaacctagaaagattgtacaatgaatggtga

SEQ ID NO: 82085 - DNA, 100 bp, Homo sapiens
ctttattatgccattatatgatgccagatgaagaaactccattagcagtgcagggagatatacttcccaattcatcagattataagtcctcactcatagc

SEQ ID NO: 82086 - DNA, 75 bp, Homo sapiens
tggagccttgccttgctgctctacctccaccatgccaaggttatcaatactctggctgaccatcatcatcgtggg

SEQ ID NO: 82087 - DNA, 100 bp, Homo sapiens
tcatcttgttctcgagttttctctgccatgttgctattgcaggacggagagcagcatttctttctattactactatctatgctgagactggttcaggttt

SEQ ID NO: 82088 - DNA, 50 bp, Homo sapiens
gggtactgcattcctaccggtgtgacagtgaccaggctgaggcccgcagg

SEQ ID NO: 82089 - DNA, 100 bp, Homo sapiens
ctgaggctggcgttcaaaaacagtggacagctctgattcgtagcacgcttgcttgcatcctggaatattctcaaccagtgtcgacttcttccactacaaa

SEQ ID NO: 82090 - DNA, 100 bp, Homo sapiens
aggatctgtcctcccggggccgaggccggaaccatgaccatgaggagaccacagatgatgaacttgggaccaacattctcgggttcatgacgctctcgat

SEQ ID NO: 82091 - DNA, 74 bp, Homo sapiens
ggagacatccgctaaaacatcaatgaatgtaaatgaaatattcatggcaatagtctcgctctgtcacccaggct

SEQ ID NO: 82092 - DNA, 75 bp, Homo sapiens
ccgcctttgatcgtcttcctcttcagccatccagtttgtgtttaaggagaaactaacaatgaaaacggcctcgtt

SEQ ID NO: 82093 - DNA, 100 bp, Homo sapiens
aggccaccaaggcctctctgaaggcctccagaggaagaagtccaagttccgcttgtccaagatctggtcaccaaaaagcaaaagcagcccctcccagtag

SEQ ID NO: 82094 - DNA, 98 bp, Homo sapiens
ccagttagaacatacaggagtttttttggttttctgtctcaactggtctctgacaagcctctgactgaatgtatccgtgctggccactatgcagcaag

SEQ ID NO: 82095 - DNA, 80 bp, Homo sapiens
gcctgcagcgggagctggacggcgagcgcgagcggcgcgagaaattttctttttaaaagcggaaggagagttttacatgg

SEQ ID NO: 82096 - DNA, 74 bp, Homo sapiens
catttcctcagtcacgggcctagaactccaaggagaaaggcggcgatgagcagcaccagcagtaagagggctcc

SEQ ID NO: 82097 - DNA, 76 bp, Homo sapiens
gcgtacgtggtggagctctgcgtgtagcggttctggtgaggttggaaggatgcagccacccggttgtcatgaaagg

SEQ ID NO: 82098 - DNA, 100 bp, Homo sapiens
cttgttccagagcttcgcgaatgggaaaggaacacaggtctggaagaagaaaggagccatctatgagggggactggaagtttgggaagcgagacggctac

SEQ ID NO: 82099 - DNA, 74 bp, Homo sapiens
gcaagttggccctgtcggttggtacagataaaactttaagaaatgattctggggaccattctgaccacatgcat

SEQ ID NO: 82100 - DNA, 101 bp, Homo sapiens
gaacagaaacacctaggaagggagaactggagctttcaagttgtggatggaataaaaaagaaaaatatagttctgcaccaaatgcagttgccttcacaaga

SEQ ID NO: 82101 - DNA, 100 bp, Homo sapiens
tcctataaacgggaaagattgactagtttcacaggaaatgggtcctgatgaatatgaagagatggaagaagaggaggaggaggaagaggaggaagacgag

SEQ ID NO: 82102 - DNA, 75 bp, Homo sapiens
gctactccaacccaaacaacaaccaagccagtttaatgcagggtttccaggcctgaggtgcccgccctggcccca

SEQ ID NO: 82103 - DNA, 51 bp, Homo sapiens
aaccacagtttatcatcccttcctgggaggacgaggaagaaacgaacgtga

SEQ ID NO: 82104 - DNA, 100 bp, Homo sapiens
cacttttaagccaatagctccgtcaggtcagaacgccacttgcacaagatacagatatgcttcttctgtaaaggatggctcccagtattttgtgcttctg

SEQ ID NO: 82105 - DNA, 75 bp, Homo sapiens
actgccccggcaactccagggtgtctggtccacgacctatcctaggcgccatgattttaacattatggcagggag

SEQ ID NO: 82106 - DNA, 75 bp, Homo sapiens
gctaatggcaggcattttacaagattgaatttagtggaagcttttgtagaagatgcagaattgaggcagacttta

SEQ ID NO: 82107 - DNA, 74 bp, Homo sapiens
ccatcacctacccgcagggcctggcactggccaaggagattgagtgtgaacatggctacgcctcttcattcccg

SEQ ID NO: 82108 - DNA, 100 bp, Homo sapiens
gcttttctctctgattctccagcgacaggacccggcgccgggcactgagcaccgccaccatggggaagggggtctctaattaacagaagatggcaaagcc

SEQ ID NO: 82109 - DNA, 100 bp, Homo sapiens
gaagattccatccctgaatgtagattgtgcagtgctcgactgtgaggatggagtggctgcaaacaaaaagaagctgtacattggaatgcgtttacagtca

SEQ ID NO: 82110 - DNA, 82 bp, Homo sapiens
gaggggtttgtgtggatggggtcaacacttacaactgccgctgtcccccacaatggacagatgtggaattagaagaagctat

SEQ ID NO: 82111 - DNA, 78 bp, Homo sapiens
gagtggcagaaaggctgatgcagcagaaatactacccgccggactttgacccatcaaagatccccaaactcaagctcc

SEQ ID NO: 82112 - DNA, 50 bp, Homo sapiens
gtggtccttctccatattcgagtttggaaattttagcattcaggtgccag

SEQ ID NO: 82113 - DNA, 100 bp, Homo sapiens
cagaaaactaaagacattcatggaaattactttggaagaggatagcattgaaaggtacgaagatgccctggtgctcctgctcacagaggtgttgaatcga

SEQ ID NO: 82114 - DNA, 75 bp, Homo sapiens
ctgagatatagtgactgtaagctgtgatctcagtatacaaaggccgggtgctcgtccactgccgggaaggttata

SEQ ID NO: 82115 - DNA, 98 bp, Homo sapiens
gactcccggggccatggccggaatgcagtaccctcagcagcaggccgctttgaagaggaatttatcaaaatgcgcatggagagacttcaggcctggat

SEQ ID NO: 82116 - DNA, 99 bp, Homo sapiens
gaaagggatgctttttggcctcaagtgtaaaaactgcaagttaaacatattgctgaggaccctccttgtagttgttctcatcgattttctattgagtat

SEQ ID NO: 82117 - DNA, 100 bp, Homo sapiens
aaagacaaaaggagattctgatgaagaagttattcaagatggtacaaacccgtagtgctgatgaaccaatgacaacatttgttgtctgtaatgaatgtgg

SEQ ID NO: 82118 - DNA, 51 bp, Homo sapiens
gccaggacatcctggaacctgggaaaggtattggtaaaggttttcaaggtg

SEQ ID NO: 82119 - DNA, 100 bp, Homo sapiens
aataaagaccctttttcctctgattgaagccaagaaaaaggatcaagtgactgctcaggaaattttccaagacaaatccaaacgatcaaagatgttgctg

SEQ ID NO: 82120 - DNA, 88 bp, Homo sapiens
tctctcctctggcaggatgaggcgtgcaggcctggactgggctggcttagatgaagatgaagatgcacatgtctgggaggataattgg

SEQ ID NO: 82121 - DNA, 48 bp, Homo sapiens
ggtcggtgccggctcaggagccggggacatggatttgattgacatact

SEQ ID NO: 82122 - DNA, 75 bp, Homo sapiens
actcaagttgtttggctaaattcttcaggtatctttaggtggtgttgatcttacagtccgggtgctcacgacagg

SEQ ID NO: 82123 - DNA, 82 bp, Homo sapiens
gattgttcagtcccagcctgtggaggtcatctatgatgctaaactaatctggattcactccctctggttgatacccactcaa

SEQ ID NO: 82124 - DNA, 100 bp, Homo sapiens
aacctggtgtattaccagtaccacagggacacttggggcctctcggatgagcacttccagcccagacctgtttgctggttggctcccgagcagacagcag

SEQ ID NO: 82125 - DNA, 100 bp, Homo sapiens
aagagagaaagagtggatttcagcctgcacggatggtcttgaaacacaaatggtttttggtgctggagaatctggtaaaagcaccattgtgaagcagatg

SEQ ID NO: 82126 - DNA, 74 bp, Homo sapiens
tcaggagcgaagagctgcttctgtatcttaagggcggcgactggcggcgcgatggacctgaccgggctcctgct

SEQ ID NO: 82127 - DNA, 82 bp, Homo sapiens
gatacgatagaaaatgtaaaggccaagatccaggataaggaagggaagtttggttggcttagtggattatccagatgatgaa

SEQ ID NO: 82128 - DNA, 100 bp, Homo sapiens
tttgacgtggttcacgtgaaagatgccaatggcaacagctttgccactcgactttccaacatttttgttattggcaaggccctggccaacgtcaacattg

SEQ ID NO: 82129 - DNA, 76 bp, Homo sapiens
ggtttatcaaaatcacgttataatcagattttgaccaagcattttgtaagacatggcccatgaacatggacatgag

SEQ ID NO: 82130 - DNA, 75 bp, Homo sapiens
tggccacatatatgcgaatctataagaaaggtgatattgtagacatcaaggcactacctggcagcaccatctaaa

SEQ ID NO: 82131 - DNA, 95 bp, Homo sapiens
gattgttgcttttacgggcgcctgcattactcaagttgtaggtggcctagatatccacaaaaagatggtggtagatgtgtgactcttatcagaga

SEQ ID NO: 82132 - DNA, 82 bp, Homo sapiens
agcccgcccgaccccgtcccgaccctggccgccccgagcggagcctggaggaggccccgtgtgggccgcggcccggccctca

SEQ ID NO: 82133 - DNA, 51 bp, Homo sapiens
caccgggacacccgcgaggccggaaaatggaagcaaggcagcgaagacaac

SEQ ID NO: 82134 - DNA, 100 bp, Homo sapiens
gaaactcatcaggacggaagcacaggggccactcagagtcgcccgagaaagacctcatggcctatgacagaagagggagacctggagaccgttacgacgg

SEQ ID NO: 82135 - DNA, 87 bp, Homo sapiens
agaaggactaccgcatggagcgcccagaaggctgcccagagaaggtctatgaactcatgcgagcatattgctgctaaaattgattca

SEQ ID NO: 82136 - DNA, 75 bp, Homo sapiens
cggtggcgctcaagtaccagcagcaccaggagtccctctccgcccagttacaagacaagttggatggcttgagga

SEQ ID NO: 82137 - DNA, 100 bp, Homo sapiens
agggcaaacactccagccacgaagtcaaggctctgggggccatgtggaaactacataagttaacagccaggtccttgcctgctgtgcagtctgatgaaag

SEQ ID NO: 82138 - DNA, 98 bp, Homo sapiens
ccggcatgggttaccgctgctgcccctgctgtcgctcctggtcggcgcgtggctcaagctaggttctgtacagagtaatgagatgtgtgacggctgca

SEQ ID NO: 82139 - DNA, 83 bp, Homo sapiens
tcagcgaggggctgtgggagatcgagaacaaccctactgtcaaggcttccggctatcaggtggcgtcatcacctacattggct

SEQ ID NO: 82140 - DNA, 51 bp, Homo sapiens
cgcatctgggacctgaataaacacgacctgatgcctgcacctgctgacccc

SEQ ID NO: 82141 - DNA, 88 bp, Homo sapiens
gagatccgggagcggcagaagttacggcgacagctcctcgcgcagcaggtatgatgaagccagcagggcctttgggggccaccgccac

SEQ ID NO: 82142 - DNA, 97 bp, Homo sapiens
aattaaaagaggagcagcatggcatttcagtcactggtttgcagagtccagctgataccccaatgtccttctttgactttgtggttgatcctcattc

SEQ ID NO: 82143 - DNA, 75 bp, Homo sapiens
ttgaggcgaatggccgaatctctccggtcagtactcctgcatttgtaccaacgaaaactcacgtgctgcttcatc

SEQ ID NO: 82144 - DNA, 50 bp, Homo sapiens
gtgcagcccaacttccagcaggacaagatgccggtggccgtgggtcccta

SEQ ID NO: 82145 - DNA, 75 bp, Homo sapiens
agaatatttaatggaaaatcgcttggttaaaacctgacacttttaacagttcccagtgggaaaagctacagaaag

SEQ ID NO: 82146 - DNA, 100 bp, Homo sapiens
tattatcgctgattacagctggaaacaattgatttgctcttacgtatttgtgtgacttgactcttcaaacacaaagatgaagtggccattctgcctgccc

SEQ ID NO: 82147 - DNA, 74 bp, Homo sapiens
cacgctgtccgtccgcagtaccgacgcctgcaggtggctattatcatggaaaactaatttttcccagagaattt

SEQ ID NO: 82148 - DNA, 100 bp, Homo sapiens
ccagcacgctgtcacgtctcagcaatagactgctcttgaggtgacaaacagcatgtttggtgcttcaagaaagaagtttgtagagggggtcgacagtgac

SEQ ID NO: 82149 - DNA, 86 bp, Homo sapiens
cagagagggaagagattcagccagcacactcctcgcgagcaaggattttttatcaagcagaaatgcatcgaacaacgagaatcaag

SEQ ID NO: 82150 - DNA, 101 bp, Homo sapiens
tcatagctgcctgtacagaaaagaaaatccccgttgtttttcgattgcaagaggttcttgcatacactgagggacttcacggaaaatggatgttcagcgag

SEQ ID NO: 82151 - DNA, 98 bp, Homo sapiens
acgtgacttgctcctccttgccttctgccatgattgtgaggcttccccagccatgtggaaatacgcaaaatcgaatgaagctaatggccgacaactac

SEQ ID NO: 82152 - DNA, 75 bp, Homo sapiens
tctgcctcaacacatattgcatcttcactgggaattaatccacatgtcttacagtttcctttaggtcagatcaaa

SEQ ID NO: 82153 - DNA, 84 bp, Homo sapiens
tggggccagggaaccctggtcaccgtctcctcagttgatattcactgatggactccaaagaatcattaactcctggtagagaag

SEQ ID NO: 82154 - DNA, 75 bp, Homo sapiens
aagaaatcactaactgtttaaaactattagagtgtaagaagaagcttgggaagctgccacctcagtatgccctgg

SEQ ID NO: 82155 - DNA, 112 bp, Homo sapiens
gacgcgaggacccgggctgggctttcctcacccggtccaagccttatgcatttgatcgggtgttccagtcaagcacatctcaagagcaagtgtataatgactgtgcaaagaa

SEQ ID NO: 82156 - DNA, 109 bp, Homo sapiens
ccacccgcgctccctccgccgccgccgccttgctgctgctcaaagctgctgccgccccttgggctaaaaggtccggcctctttggcctacccccgttggctccgctgcc

SEQ ID NO: 82157 - DNA, 100 bp, Homo sapiens
gccaccgcgtccggcctttcaaatggtatttttgattttcctcttccagtccttaaagcaggtaaatgtgaatgtggcaaatgcacctgctatcctccag

SEQ ID NO: 82158 - DNA, 75 bp, Homo sapiens
taggtgagtcgcggtgggtcctcgcttgcagttcagcgaccacggaactgtggctgcaccatctgtcttcatctt

SEQ ID NO: 82159 - DNA, 90 bp, Homo sapiens
ctgccatcccggccacgcgggtggaggtgtccgtgtcctgcagatgccatggacaatattaccaggcagaaccaattctacgatacccaa

SEQ ID NO: 82160 - DNA, 100 bp, Homo sapiens
ttggagaagaagacggtcaccgtggagtttttcctggtgggacaagacaacgggccggtggaggtgtccacattgcagagacggggtttcaccatgttag

SEQ ID NO: 82161 - DNA, 75 bp, Homo sapiens
gccctggaatgtgaagagacatgagaccatagccaaacccccagaactgataaatttcaaacggaagagagtggc

SEQ ID NO: 82162 - DNA, 74 bp, Homo sapiens
gaaagctgggagtcctgagatccaaagagaaagtgaacggccggtttgtgggcgatgctgaccttgaaagacag

SEQ ID NO: 82163 - DNA, 75 bp, Homo sapiens
cagattcgcagtggtcgcttcttctccttggttgttcagaatgaagaaaatgaaaactgtttgaagaaagtggat

SEQ ID NO: 82164 - DNA, 90 bp, Homo sapiens
cgagaacctcggcatcaccagtggcttcgtgaagcccaagctggatcatcagtaacgtgccagcagacagcttgattcgtacagagcgcc

SEQ ID NO: 82165 - DNA, 74 bp, Homo sapiens
taataccaacctccacgcctgggaaatgaagccctatgcagtcatgttgtatcacggactgattcaccgagccc

SEQ ID NO: 82166 - DNA, 76 bp, Homo sapiens
gttttggccactggacatcagaaccacattttgggtttgaagaatcttctacatgttgcagagctattttgctgca

SEQ ID NO: 82167 - DNA, 96 bp, Homo sapiens
gcccttatggaattggacaaaggacacattcagctaacgtattttagcaggtggagtgaggttgaagattcctgtgacagcgatgccatagagaga

SEQ ID NO: 82168 - DNA, 75 bp, Homo sapiens
ctatacaacacaattataaaatgtcagcttttaagggttttaaaagcggatctagaaaagaaaaagcaatccatg

SEQ ID NO: 82169 - DNA, 75 bp, Homo sapiens
aaccaacgctgggatgcaattgttgcagaagtgaaggataggcagccaaggtatgttgagtctaaaaaggacaga

SEQ ID NO: 82170 - DNA, 75 bp, Homo sapiens
cacataacggggttcgggtgtctcgtgtgtgaacatcacagcaaaaacccgggcagctgacttgttggtgaatcc

SEQ ID NO: 82171 - DNA, 74 bp, Homo sapiens
gtgaagaagaatttcgatctccgccctggggtcattgtcaggaagctgatggacaagcagaccttctgctcttc

SEQ ID NO: 82172 - DNA, 100 bp, Homo sapiens
cctgaacaggcagggccagacccagggcagcgaggtcacaggccccacctttgctgatggcgagctcatccccagggaacccggcttttttcccgaggac

SEQ ID NO: 82173 - DNA, 100 bp, Homo sapiens
atcatgtgctccatgttggcttggttggagtgtaatgaacaagtctggggtgaatcgtgtagtttggaaacgacctcgactcactcacaatggacctgtt

SEQ ID NO: 82174 - DNA, 90 bp, Homo sapiens
tgcagcgccagcagctggactatggcatctatgttatcaaccagcaccggaagcagtactcagaacaagtcatacctaatgctgcaggaa

SEQ ID NO: 82175 - DNA, 76 bp, Homo sapiens
tgagtcagacctgtaggcctgatagactgattaaaccacagcaggaacagctgtgggccttggagcaggacaactg

SEQ ID NO: 82176 - DNA, 105 bp, Homo sapiens
cacaggtgctaaagagagcagtaccctgatggagtcccttgcagggggggccctcagcctcttggccttgaacgggctgttcatcttgattcacaaacacaacct

SEQ ID NO: 82177 - DNA, 100 bp, Homo sapiens
aatccttatgttatcatggacaagcagccggggcaggtgattggagccaccactcccagtacaggagatgaccaggatagtgaaaagtcaaaaccagcag

SEQ ID NO: 82178 - DNA, 75 bp, Homo sapiens
cttgcccttgtcctcccctttcatccctatgtggaaaacgtgagacggtttaagcggaagcatcttactgccatt

SEQ ID NO: 82179 - DNA, 76 bp, Homo sapiens
gggcccgccatggctgcgtcggagctctacacaaaggcactttggaaagacatgagacaggagaaagagcacgaat

SEQ ID NO: 82180 - DNA, 75 bp, Homo sapiens
cagacgttagcgtgagtgatcactctcaatcccgggccaggaatagttgctgaacaccccaggcctgctgaggtc

SEQ ID NO: 82181 - DNA, 100 bp, Homo sapiens
gagcacccatcggtgacgctcttccgccagtacctgcgtatccgcactgtccagcccaagcctgactatggttgtactcgtaaaacaaggatcatcgatg

SEQ ID NO: 82182 - DNA, 75 bp, Homo sapiens
ttccagtccaagtcaccatcccccatgccgccagaggcccccaaccagacatgtgcattgccattgcgatttctc

SEQ ID NO: 82183 - DNA, 100 bp, Homo sapiens
ttgtgttgcaacgagaacaaaggggcctctgaactagtggcagaattgagcacactttatcagtgtattagtgatgacgaggacgaggaggaggaggagg

SEQ ID NO: 82184 - DNA, 100 bp, Homo sapiens
cccaagcaaggttccttggaagaagatgtctgcagagagaagagcaagttagtaccttgtaccaaaacatcaaccttgtggagccaagattaattcagcc

SEQ ID NO: 82185 - DNA, 95 bp, Homo sapiens
tgccctggctcttcatctctataggggaggcaggcttttgcaagtgcctgaaacagtacatgcagctggcaatccgagaaggatgtgggtctccc

SEQ ID NO: 82186 - DNA, 100 bp, Homo sapiens
ccattttgttgcagttgactcacgattatagtcataggttcaggaacaagtgcatcccactctctcagctaatgaagagtctctctattatattgaagag

SEQ ID NO: 82187 - DNA, 75 bp, Homo sapiens
aagaaaccgtgctcagaaactagccagattgaaggtgggaaatacaccaagagtgatttcaaggagtatgaaaaa

SEQ ID NO: 82188 - DNA, 50 bp, Homo sapiens
aaacagaaattctggaacacctatatgaaagacccaaatgggaccagtag

SEQ ID NO: 82189 - DNA, 98 bp, Homo sapiens
gcttccggcccctgcacgtccgcaaccttctcagcgcctatggcgaggtcggacgcgtcttctttcaggctgaggtcactcaagactgcttgcaactg

SEQ ID NO: 82190 - DNA, 101 bp, Homo sapiens
gcattgcagctttctatggcggagaacaacaaacagggaagtcgagacaacatgagtgtgattttgatctgttttccaaatgcacccaaagtatcgccaga

SEQ ID NO: 82191 - DNA, 98 bp, Homo sapiens
acccgccaagctgtcatcacaaaagagttgattgaaattatctctggtgctgcagctctgtgtacaaagataatcaatgctgattcggaggacccaaa

SEQ ID NO: 82192 - DNA, 98 bp, Homo sapiens
tcaggcttcatacgctattgtcctgcccataccgtcatgaatttaagtcaaacgagttatggactgaaattaagcttgttctggatgcctttgctttg

SEQ ID NO: 82193 - DNA, 82 bp, Homo sapiens
ggcgagtttccgatttaaagctgagctgcgaggaaaatggcggcgggagctcttgaggctagtgcgcctctaggcaagatgt

SEQ ID NO: 82194 - DNA, 90 bp, Homo sapiens
gtggagaagatggagctaaaggaactgcttatttaatacatttgaacaacttttggggtacttagaaggaccctgatgctcccataagac

SEQ ID NO: 82195 - DNA, 100 bp, Homo sapiens
cacctcgcgtcgcgcccgggaggaaggaacgaggcaaggagctaaagcagcgtgcgttcagccctggggcgatcagtgggtgaccgcggctgcgagggac

SEQ ID NO: 82196 - DNA, 75 bp, Homo sapiens
cgagacttcctcttctcagtgatgtttgagcaaatggaacgtggatctccttacgtagcagccaaaataaatgaa

SEQ ID NO: 82197 - DNA, 51 bp, Homo sapiens
cttttgtggtagaccgtctaagagaagggtccttttgtacaagtggatgaa

SEQ ID NO: 82198 - DNA, 107 bp, Homo sapiens
agccgcaccatgccgctcctaagcctgcacagccgcggcggcagcagcagtgagagaattcagaaggagctggcggacatcactttagaccctccacctaattgcag

SEQ ID NO: 82199 - DNA, 75 bp, Homo sapiens
ttaatggaaggcttcttaccattcagcaatttagttactcatctgcataagatgcacatttttctgctctggagc

SEQ ID NO: 82200 - DNA, 75 bp, Homo sapiens
ccttttgacccaatcatatagtggggctcagggccagtgctcactcttattgatggcccactgcgtgaccttggt

SEQ ID NO: 82201 - DNA, 80 bp, Homo sapiens
cagcctgcggagcctgtggggcaggtgagaattatgaagatgatgacctagtaaattctgatgaggttatgaagaaacca

SEQ ID NO: 82202 - DNA, 74 bp, Homo sapiens
gcgagtacgaccctcggagacaccgatatgaccatcaccagagtgtgaagcctcagtttaggtcatctggtggt

SEQ ID NO: 82203 - DNA, 50 bp, Homo sapiens
cgagaaccgtcagtttgagccagatggttgtatcagagtaagatggacgg

SEQ ID NO: 82204 - DNA, 89 bp, Homo sapiens
gggcggcgcggcggctccgcaggttcatctctaacaagtatttagtgaaacgacagagcagagactatgatgtggaatggggctatgct

SEQ ID NO: 82205 - DNA, 90 bp, Homo sapiens
cagcagcagccgcggagcagtagccgccgtgggagggagccatgaagcattacgaggctattgagggcacctacattgacaagaaatgcc

SEQ ID NO: 82206 - DNA, 50 bp, Homo sapiens
ccgcccggctccgggaccgcgggagatatttggagttcttacaacatggc

SEQ ID NO: 82207 - DNA, 83 bp, Homo sapiens
caaacagcaagctttcatcaagtatcagtgcttcaaatcggcctggatgtttgaggtgtttcataggggcttttcgtttcctg

SEQ ID NO: 82208 - DNA, 102 bp, Homo sapiens
caaggatgttcgtcgtggcaacgttgctggtgacagcaaaaatgacccaccaatggaagcagctggcttcactgctcagagagaaactcaaggagcggaaag

SEQ ID NO: 82209 - DNA, 50 bp, Homo sapiens
cttttgcctcagatactattttgaagggaggtgttgtagcaggaaatgtg

SEQ ID NO: 82210 - DNA, 107 bp, Homo sapiens
aacgcaaacccggaagcggatcgggtggagtgtaggtcatatcgccgcgggagtgcatccgccccaacccttttccccctcgtctcctgtgagaattccccgtcgga

SEQ ID NO: 82211 - DNA, 100 bp, Homo sapiens
gtatgagggattcatctcggctcaggattctcaaagttggattggtggaaacaatgaaccattgacaggctttacatggcgaggtggctgtgaaagagaa

SEQ ID NO: 82212 - DNA, 101 bp, Homo sapiens
ctccagacggcgcccggacccccgggcgcgggatccagccaggtgggagccccgcagatgaggtctctgaaggtggtggaggtggatacagcagtcggaga

SEQ ID NO: 82213 - DNA, 75 bp, Homo sapiens
agaaagcagaggctcagagcttggagacagacgcttttctgggagaagaggctacaaggacttagtgcatcagat

SEQ ID NO: 82214 - DNA, 75 bp, Homo sapiens
agcttcttcctatttgccatgggttgattgtacacagcactatgaactctgctccggaaaccaggttcgtggcta

SEQ ID NO: 82215 - DNA, 82 bp, Homo sapiens
cgcagaaaggagattctacgagcagatgaacgggcctgtggcaggtgcctcccgccaggaacttgctactaccagcaccatg

SEQ ID NO: 82216 - DNA, 82 bp, Homo sapiens
ggcgctggaacagttgcagggtcacagaaacatcggaactgtggctgcaccatctgtcttcatcttcccgccatctgatgag

SEQ ID NO: 82217 - DNA, 100 bp, Homo sapiens
ctgttgtggggcttttacagcctttgggcctatatgaacccaatagcaatggcgagatcaaggggtccaatccagtcttcagggccaacaatacaggatt

SEQ ID NO: 82218 - DNA, 98 bp, Homo sapiens
tcagactagtctgaaagggaaaacccccattcattctggattggtggatctgaagtacaaaatattttccagccctggtacctgacagtgtaaagaag

SEQ ID NO: 82219 - DNA, 147 bp, Homo sapiens
tactgtacaccccatcccagacgaagacagtccctggatcaccgacagcacagacagaatccctgctaccagtgtcatggagaaactccagctgggcccagagattctgcagcgggaaaatccaaggcttatttatgccaggctgag

SEQ ID NO: 82220 - DNA, 115 bp, Homo sapiens
aaatatggaaacaaatactatgaagacaacaagcaattttttgtatgaagtgtaacagaacagactttaccacctgaaactgctgcttcaagttcagatcaggcaaggaacaaac

SEQ ID NO: 82221 - DNA, 75 bp, Homo sapiens
aggagcgccagatggtggaggaatacacttatttatgaaccagaagatcagctgccatgttacttgactcacacc

SEQ ID NO: 82222 - DNA, 74 bp, Homo sapiens
tggaagccctggcagccctggtcctgatggcaaaactggcccccctggaccatgcctggccggatgctgccgcc

SEQ ID NO: 82223 - DNA, 90 bp, Homo sapiens
aaaacataccaatattgttgcacagactaccttcaaagaaaaacctcggtatccaccaagtcaggctcaagcagctcttcaagacagtcc

SEQ ID NO: 82224 - DNA, 75 bp, Homo sapiens
gaaccaggacctggacccggacccaaagtgccatgtctttaatgtatgaaaatgaaagtcttcagaatggaagga

SEQ ID NO: 82225 - DNA, 75 bp, Homo sapiens
gactccaagaaagttaaagtacaaaaagtacagtctgtcaggaactgtggctgcaccatctgtcttcatcttccc

SEQ ID NO: 82226 - DNA, 90 bp, Homo sapiens
cttcatcaacagtttgaaacatttattccatattctcaggagatatgtcagtattgaattctcccagacatcagagctgtataatgcatg

SEQ ID NO: 82227 - DNA, 82 bp, Homo sapiens
gctcgcacttgctcaacaagggcctgccgcttggccagctgcgggccgtccagcggctgtgccacttctacagcgccgtcat

SEQ ID NO: 82228 - DNA, 83 bp, Homo sapiens
gctccgcgcccggccggacccgggcccgaggcttcttccccgggagctcgcagggctgcgacgccttcctgcggcataagatg

SEQ ID NO: 82229 - DNA, 99 bp, Homo sapiens
atttgtatagagatgtgatgttggagaactacagaaacctggtctccctaggtcctcagaatggttggaatgaccctccagctttgaacagagtaccca

SEQ ID NO: 82230 - DNA, 75 bp, Homo sapiens
ctgcttcccaataaggaaacaatgcctggaatgatgtcgtcagtaatgcctggaatgatgatgtctcatatgtct

SEQ ID NO: 82231 - DNA, 97 bp, Homo sapiens
gccgagacgctggcagagaccgagccaggtttttgaccaatatctcaattttattactttggaagatgatatgtttgtattatgtaatcaaaataag

SEQ ID NO: 82232 - DNA, 83 bp, Homo sapiens
ctctaagatacccaagatatgattctcattcagattgtggatgcctcgtcagtcatcacttgggatttcgacgtgtgcaaagg

SEQ ID NO: 82233 - DNA, 98 bp, Homo sapiens
cgagccgggatctcaggtcctcgggggcggcggccacgccaaggacggctctttcgacgtgtagcagcagctttgccgggaatggaaagcacacagga

SEQ ID NO: 82234 - DNA, 100 bp, Homo sapiens
tgaaggaagagtgcaaagactttgtggacagtctcagccggtcgtcgcgacgttcgcccgctcgctctgaggctcctgaagccgaaaccagctagacttt

SEQ ID NO: 82235 - DNA, 100 bp, Homo sapiens
actttcttcatgtgttcctgtagctctgatgagtgcaatgacaacatcatcttctcagaaggagcaggagcagtgacttcacctgagaacatcccagcgg

SEQ ID NO: 82236 - DNA, 75 bp, Homo sapiens
cccggcccggctcgacgccaatggatagcctgggctggaagctcttctacgtcacaggctgcctgtttgtggctg

SEQ ID NO: 82237 - DNA, 75 bp, Homo sapiens
aagccctaggaaagcatcctgtttcttgcaaggtacatcaggaacgtctctatcaagaatacaatttcagcaagg

SEQ ID NO: 82238 - DNA, 75 bp, Homo sapiens
tccttggctgttcaagtgtagaggaacttctgcaatgtcccatcaacctctcagctgcctcactgaaaaggagga

SEQ ID NO: 82239 - DNA, 82 bp, Homo sapiens
ccgagacagcgggagccggcgtgcgagcggcagcaaccatgtccaagggacctgcagttggtattgatcttggcaccaccta

SEQ ID NO: 82240 - DNA, 75 bp, Homo sapiens
ctgatgacacagccctcagcgagagtgccaaccaggccttcctgagtccctgcaggaagcatcacccaggctggc

SEQ ID NO: 82241 - DNA, 100 bp, Homo sapiens
ccgtagcagcgcaggccgggaagcttctgcgagccctagcgctgcggccccgcttcctggcggccgggtcccaggaatggtcctcgtccgaagtgagaat

SEQ ID NO: 82242 - DNA, 133 bp, Homo sapiens
ttcatgtccaaaggaaaatgcatcttctaagtttttggcaccatatactactttttccagaattcatacaaagagtgaattatccagactgccttgccactagatgaatggaagacaatgatttgaactaagg

SEQ ID NO: 82243 - DNA, 72 bp, Homo sapiens
agatcatcattaaggacggaggcacgtataccaaatactacattcaccgaattccaagaagccgggaggttc

SEQ ID NO: 82244 - DNA, 82 bp, Homo sapiens
ctcttctgagggctcccagacatatataatgatgaaaataaacccatctggatgcatgctgaagaaagagaagaatgcaaag

SEQ ID NO: 82245 - DNA, 100 bp, Homo sapiens
agtgttgccgactgcttggactctgcaggaccggaacagggacctggccactgccctggagcagctgctgcaggcctaccctagagacatggagaaggag

SEQ ID NO: 82246 - DNA, 51 bp, Homo sapiens
taaaggcctgggcctgagaactgaatcaggaaacctgtaggaagtgtcagg

SEQ ID NO: 82247 - DNA, 50 bp, Homo sapiens
gtcaggtctggagctcgaccgggccaggaagctcataaaatggtgagaga

SEQ ID NO: 82248 - DNA, 82 bp, Homo sapiens
caggggtgtcctccacagggcgacggcggcaggagctcgggaaccgggactgcgagcggcaaattgtggctactaatttgcc

SEQ ID NO: 82249 - DNA, 97 bp, Homo sapiens
atgagagtcaggagccccagagccaagtgcgagcccagcgggagaaaatcaaggaggtgtcatggagaaactccagctgggcccagagattctgcag

SEQ ID NO: 82250 - DNA, 88 bp, Homo sapiens
gagcacaacctccagggccgcatcgggggcgactcaggcctgtccagccggggcaagaaggtgtgcctaccgcatgttgccgctgctg

SEQ ID NO: 82251 - DNA, 101 bp, Homo sapiens
agggagccacctccgggcgcagaggcctacatcccacagagatacccagacaacaggatcgtctcgtccaagtgtgtgacgttcctctgtatgacatttgt

SEQ ID NO: 82252 - DNA, 90 bp, Homo sapiens
catgaggcaccatctcaggagcagaagaacttggctgccattcaagttctcagaggcactgtgactgacttccctggatttgatgagcgg

SEQ ID NO: 82253 - DNA, 100 bp, Homo sapiens
gccggcgacaggactttgggtctgggtgagccttctcgtggcggcggggaccgtccagcccagcgattctcagtcagtgctgggcctaaaggagataaca

SEQ ID NO: 82254 - DNA, 74 bp, Homo sapiens
tcggaatcttcctcttcctccaccaccaccacctagagggggctgtgctgtcgtcatgcctcaaacccgatccc

SEQ ID NO: 82255 - DNA, 90 bp, Homo sapiens
gttcattttttgcttggtttggaaaaatttcattagaggattaagttgtcatcattctgggaagaaaaaaaaaacattaatgaagaggcc

SEQ ID NO: 82256 - DNA, 83 bp, Homo sapiens
ctcgggagctcatcttcgtggggcgtgaggagtgtgagctcatgctacaggtgccagaaccctgtggagcatcatgaactggg

SEQ ID NO: 82257 - DNA, 98 bp, Homo sapiens
ctggaatctatgggattttcagctcgatacaatttcacacctgctggaaatggagaagcttcagctacaagcccttgagcaagagcacaagaagctgg

SEQ ID NO: 82258 - DNA, 139 bp, Homo sapiens
cgggacggcgggctgacgcacttcgccgccggccgacgggcgccattgtgcggcgcgcgccggaagcaaccgtgacaagtggtgcccgaccagggacctgaacgaggaaggtctgccagagcagagaaagtgaaactga

SEQ ID NO: 82259 - DNA, 72 bp, Homo sapiens
ctttccgacttagtcctcgggaagaagtttcagactacaaggtatgagaaagtgccagtcatcttggttggg

SEQ ID NO: 82260 - DNA, 82 bp, Homo sapiens
ttgcgctccatccgtccagataacatgtcggagtacagcaagcagatgcagagatgtgtgaacgagtccccgatgatgacct

SEQ ID NO: 82261 - DNA, 50 bp, Homo sapiens
cttcagttcacatactatttatgggtctcgtctacagaggactggtcttt

SEQ ID NO: 82262 - DNA, 82 bp, Homo sapiens
gacgttcgagaggaagattcttacctctttgatctcgacaataaggcagtcatggatcaggtaatgcagtttgttgagccaa

SEQ ID NO: 82263 - DNA, 100 bp, Homo sapiens
cttcgccgcgccccacttgctcgtgcactttacacacatgaggtcatgctttcagaacgaaaaggcacagatgagctctatgctgtgaagatcctgaaga

SEQ ID NO: 82264 - DNA, 105 bp, Homo sapiens
cgcccccgccggccgccgcgccgcccggcagcctcggcaggaatatgaagacaaggctggaagacctagcaagccaccctctccaaagcagaatgtgaggaagaa

SEQ ID NO: 82265 - DNA, 100 bp, Homo sapiens
gacgggatcatgaagcgctcggtagccgtctggctcttggtcgggctcagcctcggtgtcccccagttcggcaaagtccctggctctacctcttctgcca

SEQ ID NO: 82266 - DNA, 100 bp, Homo sapiens
cagcttttccggcctgacaacttcatctttgtgccagaagtagaaggggaggcagagagcatcagctccctgtgctcacagatcaccaatgccttcagca

SEQ ID NO: 82267 - DNA, 82 bp, Homo sapiens
cggaaggaagccggccccctgcctgcccgcgcctagaccccattcacagaaaaatatggctcaggagactaaccagaccccg

SEQ ID NO: 82268 - DNA, 100 bp, Homo sapiens
aagaacgtcaaacactccaacgattgagagcatttaaagataatgtgacagtgatgataacatgggtgccaaaaatacttcaataggagaagaatttata

SEQ ID NO: 82269 - DNA, 100 bp, Homo sapiens
caaagaagaagttggtgcattggccaaagtattgcgcttatttgagccacccaggctactttgggaaagttggtatgaagcattaccacttaaagaggaa

SEQ ID NO: 82270 - DNA, 74 bp, Homo sapiens
acaagattgaccacattgatcacaatgctactatcattcacgatggccatgaggagaagatggaaaatggtcag

SEQ ID NO: 82271 - DNA, 118 bp, Homo sapiens
tctgcactatgtatttgcttgtttgtttctccaaataccatctgttgcagactggggtgcatgacattttagattgttctctggggccggactgagaaatgcctgaaggagacgacgg

SEQ ID NO: 82272 - DNA, 74 bp, Homo sapiens
tgcagtccgtatgctgagaacctggagcaggaatgcggggaagctggtataagcagtttagccaaattttgaag

SEQ ID NO: 82273 - DNA, 99 bp, Homo sapiens
ggcatcgagtcaccaaaacgcaggaattacatgaacgacagccttcgcaccgacgtcttcgtgcggttccagccagagagcatcgcctgtgcctgcatt

SEQ ID NO: 82274 - DNA, 83 bp, Homo sapiens
aaaaggtcccggaccccccggatctgacggggcgggacctggcgccaccttgcaggttcaagcgtcctcagtaagccttgttc

SEQ ID NO: 82275 - DNA, 100 bp, Homo sapiens
aggttgggcccgttctcagactccatctccggccgggccgcgcgccccgcgccctcgtgggctggtgtctcgcagctgttggtccaggcgcaatgttcag

SEQ ID NO: 82276 - DNA, 129 bp, Homo sapiens
tcagccctggactttgatgtgtccaacaaccacatctactggacagacgtcagcctgaaggacacatgacggaagtgtgtatttttgggccactccacggcaggtccctagcctgcaacatttatgtcg

SEQ ID NO: 82277 - DNA, 50 bp, Homo sapiens
tggttggggagatcggcgcttggccgctacggagccgagatggctctgag

SEQ ID NO: 82278 - DNA, 82 bp, Homo sapiens
ctctggacagggacagtgggcagtgctcccggaacacaagctgtgaaacactaggtgtctgcctgtatcccagtgttcaggc

SEQ ID NO: 82279 - DNA, 75 bp, Homo sapiens
acatggaggctcaagctgggtctactcaagtctttcccagggaactccgatgaagtgttccaacaaaatgagcga

SEQ ID NO: 82280 - DNA, 98 bp, Homo sapiens
gcgactccggagacagcccaaatatcctcggaagagcgctcccaggagaaacaagaattgctgacgcaggtgtgtggggatgtactctccacctgcga

SEQ ID NO: 82281 - DNA, 74 bp, Homo sapiens
acagaatcaggggaggcatgcttcaggaggttcagcaacatcagatgaccatgaatttgatccatcagctgaca

SEQ ID NO: 82282 - DNA, 120 bp, Homo sapiens
agagcgagctgagtggttgtgtggtcgcgtctcggaaaccggtagcgcttgcagcatggtgtggacactgccagcggctgcagccgacttggaatgacctgggagacaaatacaacagca

SEQ ID NO: 82283 - DNA, 75 bp, Homo sapiens
atggctataatgggtatggaggaggacctggagagcctcagctcaaaggcatcgtcaccaaactgttctgccgcc

SEQ ID NO: 82284 - DNA, 75 bp, Homo sapiens
ataataaactcaagcagcgagtcatccagatagtgccaaatcttgctgaagaatgatcttgcagaaatctgattg

SEQ ID NO: 82285 - DNA, 100 bp, Homo sapiens
cgaaacgtgataagaagcacctggatgagacatttgctacagcatcccacattaagtcaacgtctgcgctcctcagaccaccggcaggtgaacagcctga

SEQ ID NO: 82286 - DNA, 75 bp, Homo sapiens
attttgtgactgcagatctcactgctgaaccagaaatgaggggcagaccgggccgttccagtgctgatcattggc

SEQ ID NO: 82287 - DNA, 73 bp, Homo sapiens
gaaaatggggagcaggaggctgacaatgaggtagcacagagtgaagctgaaaagaaattgaagaaggatgaca

SEQ ID NO: 82288 - DNA, 101 bp, Homo sapiens
gagcaaaagccccttgccatccctgtgtgacagcaatgaggtgaacccaggggccgaagcccacccagggagttgatgatgttccagtggatttgatcgtc

SEQ ID NO: 82289 - DNA, 75 bp, Homo sapiens
cagcaagactctcgagcccatctaatcttccagtaccaacaattgcagcaatagatggactcgctttaggtggtg

SEQ ID NO: 82290 - DNA, 74 bp, Homo sapiens
aggggctgcggccggagcgggcggctgagacaaaggcgacggtatgaagctaaaatgcagcggctaagaacgcg

SEQ ID NO: 82291 - DNA, 100 bp, Homo sapiens
ggcatacctggaggcaagggagaaaagggtcttactgaagtaacacaaagcttaaaaatggaaaatgaagagtttaagaagaggttcagtgatgctacat

SEQ ID NO: 82292 - DNA, 80 bp, Homo sapiens
agaccctggagcctcagttggaagcagccgatccagcctgcggagcctgtggggcagccttcaataccccaggtcccaaa

SEQ ID NO: 82293 - DNA, 74 bp, Homo sapiens
ttccacaccccctccgtgggtgtgtgtaaagatgacggcgccttgaggtaagctacaggcaacaccacttccgc

SEQ ID NO: 82294 - DNA, 100 bp, Homo sapiens
tgagctcctgacagcccagcttcagtacgagctcaactggaggcagtcctgtgcggaaatctgaagaaaaaacagatacaaagcgaactgtgattaaaac

SEQ ID NO: 82295 - DNA, 83 bp, Homo sapiens
cctggagcctcagttggaagcagccgatccagcctgcggagcctgtggggcagaaagaaggggatcaacctgaaagagtccaa

SEQ ID NO: 82296 - DNA, 100 bp, Homo sapiens
gcattttctttactacctcatgaacagaagtcaacagtgggggcaaaatagccctgagtgaagagtttgcccaggtttattccttggcagatgggattcg

SEQ ID NO: 82297 - DNA, 100 bp, Homo sapiens
aggtcaacaaggttctggacaagatgaagtctttctgccaggttggatggcaagcatgtggtgtttggcaaagtgaaagaaggcatgaatattgtggagg

SEQ ID NO: 82298 - DNA, 100 bp, Homo sapiens
gatttgttaaggattccaagtaactcttatttgcttgtagattttcagtggaaactgggtatggctgtgagctcagacacttgcagatctcttaagtatc

SEQ ID NO: 82299 - DNA, 90 bp, Homo sapiens
cagcctggaaggtgcgtgtggggctgggtctcggagtgggagacgtggagtgcaggacagtcattttgtttactcattcagccctgttgc

SEQ ID NO: 82300 - DNA, 82 bp, Homo sapiens
tggaaacctaaggaaaaacgtctgacctgcggaggatggctgacttcaggctgcggaaactgaaggcaataatgttggcttt

SEQ ID NO: 82301 - DNA, 80 bp, Homo sapiens
ttgcctcggattccgacagcaggtcacttttacaaagagaaagtttggattaatgaagaaagcctatgaacttagtgtgc

SEQ ID NO: 82302 - DNA, 75 bp, Homo sapiens
cgtgactgtggatctcaagtactaccggccaactgaagtgggtgagctccacaagtactgcactgcttgggatga

SEQ ID NO: 82303 - DNA, 76 bp, Homo sapiens
tgaattatggcatagatcttgggaaaattgcggaactgttgaaaaaatgtcatcaatgtgtcgaaaccattgtgaa

SEQ ID NO: 82304 - DNA, 74 bp, Homo sapiens
gaaaaaggccctcttcaagcctggccataaaattttgagtagaaaaatccagaaatttgaaaatcagtatcgtg

SEQ ID NO: 82305 - DNA, 50 bp, Homo sapiens
cggcgggagtcctggcgctctgcaggcataatcaccagcaacacccggga

SEQ ID NO: 82306 - DNA, 100 bp, Homo sapiens
atcgccccacctcagcagcaagggcaggggcagccgggatgcgctggtctcgggagccctggagtccactaaagcgatgaagaagatgactttatgtgta

SEQ ID NO: 82307 - DNA, 98 bp, Homo sapiens
caggcatccccagttgctgtacgagagcaagctctataagattcttcaaggtggggttggcatcccccacatacgatctgagtgggacatacttttga

SEQ ID NO: 82308 - DNA, 82 bp, Homo sapiens
gagactgtaatttgggagatgaagcctcgagcctaaggcgctctcaggtccattgtactaatggtcacttgatgtgcgctgg

SEQ ID NO: 82309 - DNA, 51 bp, Homo sapiens
cttcagctataaggctggatgtaacaggtgctctagttcacagctataggg

SEQ ID NO: 82310 - DNA, 97 bp, Homo sapiens
aagtcttctgaactttttgagagtccagtatatttggaggaagctgcagatgtactttgtattttacaagcagggtgtgtccgcagccggccaggtg

SEQ ID NO: 82311 - DNA, 114 bp, Homo sapiens
ctctccctctgcccccccttccccacgcaaccccagatccatttacactttacagttttaaaatcaaagatgggaaaatcggagaaaattgcccttccccatggccagcttgtt

SEQ ID NO: 82312 - DNA, 50 bp, Homo sapiens
ctcggggtctccctacaccaacgaaggaagacagcctcctccaggagcat

SEQ ID NO: 82313 - DNA, 75 bp, Homo sapiens
aagaccttgaaatgcatccgctggtcgctgccggaaatggccaggtctgttgcggttctcccacttttccataag

SEQ ID NO: 82314 - DNA, 75 bp, Homo sapiens
cttttggatcctttgaaaaatcacatgaagtgtgccggtccaacaaaagcccttgggtctgtttgacttgttcaa

SEQ ID NO: 82315 - DNA, 100 bp, Homo sapiens
acttgaagaattcagatctataaatactgaagtggtagcatgctctgttgattcacagtttacccatttggcctgttggattggatgctgctggcaagac

SEQ ID NO: 82316 - DNA, 100 bp, Homo sapiens
aagatgcagttttttgatgctgaggagctcctggtcgatgaagaggatgatgtttttggtgaagatgcctgtgaggagccaccaacatttgaagctatgg

SEQ ID NO: 82317 - DNA, 100 bp, Homo sapiens
tccgatgccacgaacatacagaaatccttaccttggcttcagctgttctggaggctgtggaaaacaatactctaagcattgaaccagtgggattacaacc

SEQ ID NO: 82318 - DNA, 50 bp, Homo sapiens
gcggcacctggacgacctgtcgaaactggacatcgataaagttgatgagt

SEQ ID NO: 82319 - DNA, 100 bp, Homo sapiens
agcactcgctaggtgccaggtatctgttaatctctttgcagctgactggaaataccggcatgcaggattgatggccttatctgccattggtgaagggtgc

SEQ ID NO: 82320 - DNA, 100 bp, Homo sapiens
ttgacaatggaccaaagacgatcaatcaaattcgtcaagatgcagtaaaagacttggcgatgtacatcaatgaagttaaacgggacaaggagaccttgag

SEQ ID NO: 82321 - DNA, 96 bp, Homo sapiens
ggacggggaaggcggagcttggacgagccgagaggcggggctcaaagttcctacccgcgagagggaagaagcagccaagtacatcgtgcaagtgga

SEQ ID NO: 82322 - DNA, 108 bp, Homo sapiens
gcggaggcagaggtggaggcgctttgaaagaactgataaatttcaaacggaagagagtggcagcatttagaaagaatctaattgaaatgtctgaactggaaataaaac

SEQ ID NO: 82323 - DNA, 86 bp, Homo sapiens
gggagggagttgtcggcgccgcggccgctgcggacggacgctcgcctgccggctgaggtgtcctcatgacttctcttgtggaccat

SEQ ID NO: 82324 - DNA, 90 bp, Homo sapiens
ccgagtcccaggtcaagagcctctgcgagaaggatctgtctggctccattgatgacctccccacgggaacggaagcaactttgagctcag

SEQ ID NO: 82325 - DNA, 98 bp, Homo sapiens
ttgccagtgtttccacaatggaaccaattgttttacagtctgttccacatgatcattgtaataaggggaacgcccttttgcttgtgactggcagggct

SEQ ID NO: 82326 - DNA, 89 bp, Homo sapiens
tgtactttatgaagctcctccaagacgttgttaagagagaggacattcagcagttctttgaagagtttcagtcaaaaaagagaagaaga

SEQ ID NO: 82327 - DNA, 80 bp, Homo sapiens
ataccaagtctcccaacaacagagacagtgcttggcatcaagaaaatacagcaaaaatgtaataatggaggagctcatag

SEQ ID NO: 82328 - DNA, 90 bp, Homo sapiens
gtgccactgtcaccattggaggaatccgccctggagggagggccagcgtggacaccaaggaggctgagggcgccccccaggtggaagccg

SEQ ID NO: 82329 - DNA, 100 bp, Homo sapiens
cgggactctggggaaaatggctgcgtcttcgagtggtacccactgatggtaatgctggcctgctggctgaaccccagattgccatgttctgtggcagact

SEQ ID NO: 82330 - DNA, 99 bp, Homo sapiens
cagatacaagatttccttactgaaaccctctacaaaggcattagtcctatcttgtaagaaagccaaacttggccctgctggcaacaaagtcatcagtcc

SEQ ID NO: 82331 - DNA, 83 bp, Homo sapiens
aagccattcagtcctcaatctccttttccttggctaccctggtatgttcaagccacttgtgcaacacaaggaactggtctgta

SEQ ID NO: 82332 - DNA, 83 bp, Homo sapiens
cacagctgcctgggggccgtgtgatgcccaagtgtaaacaggaacatcgataagtagtgtaaaaacttgcacaatgaaatccg

SEQ ID NO: 82333 - DNA, 100 bp, Homo sapiens
atctcgccagcagcaacagattgaagcccagcaacaattgctggcaactaaggtagatgacattaatgctgataagaatatctcttctgcacagattgtt

SEQ ID NO: 82334 - DNA, 80 bp, Homo sapiens
agccgatccagcctgcggagcctgtggggcaggcactaaaacaggtgcagatcttagtgatggtacttgtgagcctggac

SEQ ID NO: 82335 - DNA, 75 bp, Homo sapiens
tccccgcaagatggacggtttcgccggcagtctcgaaactggcgatggaatatgagaggagccctctggaaagaa

SEQ ID NO: 82336 - DNA, 90 bp, Homo sapiens
gacatggacatgagccccctgaggccccagaactatcttttcggtggtgcggttgtgtcagaacccaaagctggcgctaaagaatagccc

SEQ ID NO: 82337 - DNA, 100 bp, Homo sapiens
aaaaaagaaaagttgtttcctccaacattgatgttcctccagcaaggcatttggtttcaaccctctggaagattattatgtctccaagtctgcagtggtg

SEQ ID NO: 82338 - DNA, 100 bp, Homo sapiens
ctggagatctgcctgaaggacctggaggaggaccacgcctgcatccccatcaaggccacatccacgtcctccgagcctacatcaagacccaagtgaacaa

SEQ ID NO: 82339 - DNA, 100 bp, Homo sapiens
ctcttggaccaatcctaaagaaaatcatttgtgatgggtcagctagtatgcaggctaggcaaactaataactgaagtgaagtgatggactccgatttgga

SEQ ID NO: 82340 - DNA, 74 bp, Homo sapiens
tggtctggaagggacgcccatgtggcacctcgcatgttcaaaggcaattgaaggaacagactaaaaatcgtgtc

SEQ ID NO: 82341 - DNA, 51 bp, Homo sapiens
tgaggtggtaaagaagcatatcaaggtaacacaagtggcaagacagccggg

SEQ ID NO: 82342 - DNA, 82 bp, Homo sapiens
ccccgagccgcccgcagagcaagcgcggggaaccaaggagacgctcctggcactgcaggcgtctacggtgacgtgcagcgcg

SEQ ID NO: 82343 - DNA, 90 bp, Homo sapiens
cacgagggcgcgctcgagacgctcctgaggtgctccatacttgcttgcagtgcctacgtggctctggctttgggtgataacctcatggct

SEQ ID NO: 82344 - DNA, 100 bp, Homo sapiens
ctggacaagcacatggaggctcagcgggccgaggaggcccagctgagagccagcctggaggttacccagcagcaggccacccaggccgaaggccagctac

SEQ ID NO: 82345 - DNA, 98 bp, Homo sapiens
ctgctgcaaccccaagatgtcggagacacggtggaaacgcttatggcaatgtggctgaaggtggggggcctacttcgggggaccggtggacagctggg

SEQ ID NO: 82346 - DNA, 75 bp, Homo sapiens
ggccatctgcgttcctgcaggcttcatctggccctatggtcccctgttgcccagaagattgttgccacaaggaag

SEQ ID NO: 82347 - DNA, 100 bp, Homo sapiens
gatcaatccagatggcagccagtcagtggtggaggtcactgggaataaaatgacatctctaaacttagccaccatatttggacccaacctgctgcacaag

SEQ ID NO: 82348 - DNA, 100 bp, Homo sapiens
atcatgtctgcgagccaggattcccggtaaaatgtcggttccaggaccttaccaggcggccactgggccttcctcagcaccatccgcacctccatcctat

SEQ ID NO: 82349 - DNA, 100 bp, Homo sapiens
caccacccaccctgtctcagaacctgtcgggctctccactcattacggtccacctcaagcacagattgatatggccgcgtggaaagtgtcaaaattcttc

SEQ ID NO: 82350 - DNA, 83 bp, Homo sapiens
gcaaagcaagcgagaagtcgcgggcccagcccacagcagggttacgggcaggacttgagtggcttcggacagggcttctcaga

SEQ ID NO: 82351 - DNA, 89 bp, Homo sapiens
cgctcccagtgcctgcaggtgccagagagagaggcgcaggacgctcagtttaggtgtggcgctttccagaggtcatgggaaatatttct

SEQ ID NO: 82352 - DNA, 90 bp, Homo sapiens
cggcgcggaggccccgggcgcggcgcagggcccggcaggaagatgggctcccgtggacagggactcttgctggcgtactgcctgctcctt

SEQ ID NO: 82353 - DNA, 75 bp, Homo sapiens
tgacatggaggatgatttcatgtgcgatgatgaggaggactacgacctgagactctacaggggcaggtaattcac

SEQ ID NO: 82354 - DNA, 100 bp, Homo sapiens
gtcggtgtccccggctgaggcagcgcggccgcagcagccctactggtcaaacaaatggattttacagaggcttacgcggacacgtgctctacagttggac

SEQ ID NO: 82355 - DNA, 75 bp, Homo sapiens
tggagattgacgcagagtgggcggcggtggtgagtatggtgtttgcgaaaacttgcggaagctggagatcacagg

SEQ ID NO: 82356 - DNA, 50 bp, Homo sapiens
tgtggatcgctgtgatcgtcacttgggcctgggttccaataaataattgc

SEQ ID NO: 82357 - DNA, 50 bp, Homo sapiens
cgcggagcccgcgcgccgagccccacgtgtggaaacaggaagagaactag

SEQ ID NO: 82358 - DNA, 100 bp, Homo sapiens
atgaagtcaggcctctggtatttctttctcttctgcttgcgcattaaagttttaacagggaaaaagacctcgatgaagttctgcagacccactcagtgtt

SEQ ID NO: 82359 - DNA, 88 bp, Homo sapiens
gacgcgcacgctgtaggaaaactgtggcagcgttcctccctctgaaactaagacgtctaggccagcagaacgtaatgtcgtgggaaca

SEQ ID NO: 82360 - DNA, 80 bp, Homo sapiens
agttggaagcagccgatccagcctgcggagcctgtggggcaggtcagctggccgccggcacctgtgagattgtgaccttg

SEQ ID NO: 82361 - DNA, 82 bp, Homo sapiens
ggcgctggcgtccggcctgaggcaagtgtccagagaatggctgggatgaaagtacacttgaactctttttacatgaacttgc

SEQ ID NO: 82362 - DNA, 98 bp, Homo sapiens
gatgaaactccttcggatggccctcagtggacagcaggagcgcctgccaacggtaccgctgtccggcatgtacaataaatctggaggaaaagtgagac

SEQ ID NO: 82363 - DNA, 98 bp, Homo sapiens
gatgatcgtgtgtcggatgaggagaagaagaagcagactacagtgcctttggtacagacacgctaataaagaagaagaatgttttaaccaacgtattg

SEQ ID NO: 82364 - DNA, 98 bp, Homo sapiens
ttccttagaacacgagaaactcacagtggatgaatggaagcgtggactttcactgctggatgtgtgggaaaaactgcaacagtgagaagcagtggcag

SEQ ID NO: 82365 - DNA, 75 bp, Homo sapiens
gccggctgagctgagtctcgctgctcggtgcgaggcggcggagagcgaggcctgttgaaatggatgcagtcagaa

SEQ ID NO: 82366 - DNA, 75 bp, Homo sapiens
ttgcctgaatacatgatttaaacaagagatttccacagaaggtgatactgtgcttgtccaccgagttcacagtta

SEQ ID NO: 82367 - DNA, 96 bp, Homo sapiens
ggaagaagtagaggactgttataacaacgaacttgatgcaagtgataggtttgccaaggtcagacctctcatcatccggatgaactgcaatttcca

SEQ ID NO: 82368 - DNA, 90 bp, Homo sapiens
cgccatgaccccatcgaggcttccctggttgcttagctgggtctcggccacggcgtggagagcggcaaacatttctcttgggaagttgtg

SEQ ID NO: 82369 - DNA, 75 bp, Homo sapiens
ggtgaactggaggagcgatttgccatcgtgctggggatcatggaagctgataaagatgacacacaacaaattctt

SEQ ID NO: 82370 - DNA, 83 bp, Homo sapiens
cgacgtcttgcctgtgtcccacttgttcgcggcctatagcggagctggagtttgttcagatcatcatcatcgtggtggtgatg

SEQ ID NO: 82371 - DNA, 100 bp, Homo sapiens
ctcaaatgcaagtccaagaggaggaggaggcggaggtccaagcggaaaggtctatgctccatcagcaagcactgccgactacaatagggactcgccaggc

SEQ ID NO: 82372 - DNA, 100 bp, Homo sapiens
cagggacccggtgacagcgtgagaggttcgcagaagccctatgagtttgtctctctggaatggctgcaaaagtggttggatgaatcaacacctaccaaac

SEQ ID NO: 82373 - DNA, 82 bp, Homo sapiens
cgccgcgagcctccggacagacgccagagcgaggagggcgctacgcgcttccgccctgcgctgccagtctcctacctgcagg

SEQ ID NO: 82374 - DNA, 98 bp, Homo sapiens
tccagtaacaccgagacggtacacatcttcaagctggaacaggtcaccaacagtgacttttttgaacgaaccattctgtgcaacagccttgtgtggag

SEQ ID NO: 82375 - DNA, 100 bp, Homo sapiens
ccactgctggctgcttccagtgttcgccgagaggtaccgggggtgacagctccgggaccggccgaaaggcgaggaaccgaaaaccagtctatccaagacc

SEQ ID NO: 82376 - DNA, 101 bp, Homo sapiens
gcgcaatgggctgcctgtggacatcaccaagaaaccagcctggacaccaagtctgtgtcagaaggccacctcaagaggaacatcgtggtgaagaccgtgga

SEQ ID NO: 82377 - DNA, 100 bp, Homo sapiens
tccccatcatccaagacgtcatgctagccgaggcccagccgtggtccttcagcatatctctgtgctgcagacaacacaccttcctgatggaggtgcccgg

SEQ ID NO: 82378 - DNA, 83 bp, Homo sapiens
gtaaagttggaagttaagggagacaaagttgaaaacaaagtgctgagaaagcatgggattatggcaaccacagaatctcagta

SEQ ID NO: 82379 - DNA, 100 bp, Homo sapiens
ccgggttgagctgcggcacacgtgcgacggccgtgatgaagttcgcttaccgggtttggtgcacctcgatttggaggaagtagggcagggcccttatctg

SEQ ID NO: 82380 - DNA, 131 bp, Homo sapiens
ccaaatccccctgtctgactgccttggatacaactgggaaagccgtctacactctcacctatgggggtgatcgctgagctgaaggtgcgcagggacccccaggtgagccccatgcactgcctggacgagga

SEQ ID NO: 82381 - DNA, 100 bp, Homo sapiens
ctgaaactaaaagatgtcacaaaggaaaacgaggaaagtcccaggatgactactgtgtcaaaaagcttatagcttcattgcaccatgtgtggcatttggg

SEQ ID NO: 82382 - DNA, 74 bp, Homo sapiens
ccgcagtatcatgctggccaagaagatcatcattaaggacggaggcacgacacttggagaccagaaagcttctt

SEQ ID NO: 82383 - DNA, 90 bp, Homo sapiens
tggaccacctaccatcctcctaggtcttgtcctgggcaccacggggactcggagacaggtggaacaggaggattttgtaatggaagggca

SEQ ID NO: 82384 - DNA, 100 bp, Homo sapiens
ttgcaactagggtggagatcaagctggaacaggagttccgatcgacccggtaccaagaaggggagtgcccgcggcagggcccagcactagaagatttcag

SEQ ID NO: 82385 - DNA, 82 bp, Homo sapiens
ccagcaccgcagatgttgtcaaggtggcctaccaggaggccaggggtgtcgccatgatgctcactttaggactatgccctgc

SEQ ID NO: 82386 - DNA, 83 bp, Homo sapiens
caggagttcattgaactcatccggcagaataagagactggacgctgtgagggggatatgagactttctactcggaatatcctg

SEQ ID NO: 82387 - DNA, 75 bp, Homo sapiens
cttacgaggagcagtttaagcagctcctgtccaaatatgacccccagaaggaggcagagctccgcacctggatcg

SEQ ID NO: 82388 - DNA, 51 bp, Homo sapiens
cctcctttgactccacaaaatctgcaaaatgaatgttcaccgtcgatgtga

SEQ ID NO: 82389 - DNA, 96 bp, Homo sapiens
gtagctgcagctggagcagtggcgtttggaggagactcgttttctggatatgccgcagaaggatccgtgccagaagcaagcctgtgagatacagaa

SEQ ID NO: 82390 - DNA, 100 bp, Homo sapiens
ttgcaagaaacctcaggacttgagtaacagcaacatggtatgatctcgtgaaatcttgagagaaactgaatgacgaatgaaactattgttcctgtttcac

SEQ ID NO: 82391 - DNA, 96 bp, Homo sapiens
gaagggacgccggctgcgacagttacagcagctacagcagctgcgagacagtggcgagaaggaattagcttaccgaaaggagatggtgagagctga

SEQ ID NO: 82392 - DNA, 82 bp, Homo sapiens
tcggcagtccacccaccgccgccgcctcccaggtatggcctcacaagtcttggtctacccaccatatgtttatcaaactcag

SEQ ID NO: 82393 - DNA, 58 bp, Homo sapiens
tccattcaagagcagcattcataaatttccaggaaaatgtttataggaggccttagct

SEQ ID NO: 82394 - DNA, 95 bp, Homo sapiens
ccctgtcttgcgttcctgtgttttctaatgcacgcccgaggactgagcagggggaggaacatttaagctgatggaagtggaagtggaagttgctg

SEQ ID NO: 82395 - DNA, 83 bp, Homo sapiens
tggaattgctcggaagttacacagaggacaatgcttcccaggctcgagttgatgcccacagggagcctgacggccttggtgtg

SEQ ID NO: 82396 - DNA, 83 bp, Homo sapiens
gaagaggcgttcgctgcgcgtgcacattccggattttttatcaagcagaaatgcatcgaacaacgagaatcaagatcactgag

SEQ ID NO: 82397 - DNA, 74 bp, Homo sapiens
gaaggccggcagcatcaatgtctggaacatctgtcccctgttcaaagagatccagaagctggtgctggagggcc

SEQ ID NO: 82398 - DNA, 82 bp, Homo sapiens
ggtggcctcccgcgtgctggccatgaaggtgcacaggatctaccgaggggctggcggaagcttccagaaggcacagacggag

SEQ ID NO: 82399 - DNA, 75 bp, Homo sapiens
ttcaagaagcctgctgagttcaccacagtatgaggagctgcagcagacagctggccggcatggcgatgacctccg

SEQ ID NO: 82400 - DNA, 73 bp, Homo sapiens
gatccattacaggcccagcccactgggaggtgattgctggcttcaaccgccttcggcaggaacagcgaggcct

SEQ ID NO: 82401 - DNA, 50 bp, Homo sapiens
ctgagatgattggagaccttcaagtttgcctgagaatacagatcaaccca

SEQ ID NO: 82402 - DNA, 82 bp, Homo sapiens
ctgggatttcagggacccctccatccactcggtgaatgttttccagggacacacggagcagaatccagagaccacatttgaa

SEQ ID NO: 82403 - DNA, 100 bp, Homo sapiens
tgctttccactcggctcctgtcgtccgttctctcaggctcccgttcaggtggatcatccatgccatggagtatgaacttcagatccgtggcggagacaag

SEQ ID NO: 82404 - DNA, 100 bp, Homo sapiens
ccggcggcagccgcgcctctcgcttgcttccctcggccgggccgtcctcggcggcagtgtcagggtgaaggttggaaaccacactgcagaaggaacgggc

SEQ ID NO: 82405 - DNA, 75 bp, Homo sapiens
actggggctgctcccatcattgatgtggtgcgatcggatgccgaggaatgtgacagggctgggagtgtggccacc

SEQ ID NO: 82406 - DNA, 75 bp, Homo sapiens
acgaaaaagccctggtggagctgaaggttgcagcctcttagcaaatatccggctgtgatcaatgatatttcattc

SEQ ID NO: 82407 - DNA, 75 bp, Homo sapiens
catccatgtaccagaagtgtaccactgtggatgaagcaggtgctccagctgctgctcctgcccctgcctcagtcc

SEQ ID NO: 82408 - DNA, 100 bp, Homo sapiens
gtcatcaatggcgaggtggctaccttaaccctgcctgactcggaagattatcaagaatgatctgtgggttaaccctctacgctactacctgagagaaagg

SEQ ID NO: 82409 - DNA, 100 bp, Homo sapiens
gatcccagactggctccaggcgatccagaattacatgaagaccctacaccctgaaaagcaaaggcctcatctccatggcacaggtgatgaaacaggaaga

SEQ ID NO: 82410 - DNA, 82 bp, Homo sapiens
cttcaagttctacgccaagccatactttctcaggcagttcaattaacctccagaagatggctgaacctgcaggaataccaga

SEQ ID NO: 82411 - DNA, 100 bp, Homo sapiens
ctaccccgcggcggccggggaccctgccagcctggacttcgcgcagtgcctggggtactacggctacagcaagatatgtttgacgacttctcagaaggca

SEQ ID NO: 82412 - DNA, 96 bp, Homo sapiens
gaaaggtgtgctgtgcctgaggccagaggtgctgatactcaaagaaggtttaagttgtctgatctctctataaattccactgaatgtctacatgtg

SEQ ID NO: 82413 - DNA, 98 bp, Homo sapiens
ccaacacacacctgaagtctgagaatgacaagctgaagattgccttgacgcagaggtgcagcttcaagcttaggaccacccaccatgcctatccaggt

SEQ ID NO: 82414 - DNA, 82 bp, Homo sapiens
caagagtccacaaagggacctgatgaagcgaagatcaagaatgtactcaagactgatcttctaagttcactggaaatgattt

SEQ ID NO: 82415 - DNA, 75 bp, Homo sapiens
tagcaagccaacaggtgaagtttcgacacacctcctttaataaaggtatgaacgctgccgtccgtgccgtggtgc

SEQ ID NO: 82416 - DNA, 98 bp, Homo sapiens
agcgccacagcctccattaaactgtccacctggattagaatatttaagtcagtcattatattttggagagaacagattaagaagtacacaggctgcta

SEQ ID NO: 82417 - DNA, 50 bp, Homo sapiens
atgcttggagaagctgaggacacacaggtttaaaaggatgcttaatcggg

SEQ ID NO: 82418 - DNA, 50 bp, Homo sapiens
cctgagccgcccctacacccacagaaatgactgctgtccatgcaggcaac

SEQ ID NO: 82419 - DNA, 100 bp, Homo sapiens
ctgcctccaaatgcccccatcgctatacaaaatgatccgggccaaggtggtggggaagaagctggtaaaggaggggcccttcggcacgctggtctacacc

SEQ ID NO: 82420 - DNA, 75 bp, Homo sapiens
tccccgcggacgccacagcgctgtgtccctacctgcaccggacgacgggggacacagaacgcaagtaccacctgc

SEQ ID NO: 82421 - DNA, 83 bp, Homo sapiens
cggacgcggcgccatcgcagtcagactaatagggatgccaaaggaaaaatatgatcctccagatcctcgcagaatttatacca

SEQ ID NO: 82422 - DNA, 82 bp, Homo sapiens
gttttgcagatcttcaacaagaggacccaggagaaattcgccctcaaagttttaaaatcaaagatgggaaaatcggagaaaa

SEQ ID NO: 82423 - DNA, 83 bp, Homo sapiens
cctgccaatttaccagagataattgataacaccctgtaacagctgacttctcttttaaaaggactaaaacatgctaacatagt

SEQ ID NO: 82424 - DNA, 100 bp, Homo sapiens
gttttaagaaagtggacaaagagaggagtcagacattcagtcccctgaagctgaatatgtagatttgcttcttaatcctgagcgctacactggttacaag

SEQ ID NO: 82425 - DNA, 98 bp, Homo sapiens
cgcagcctccgcggatccgggcccgctcggcccctcccatgggtgagaactctgtctcagtcgacgggaagtgcagtgactccacgctactgagcaac

SEQ ID NO: 82426 - DNA, 98 bp, Homo sapiens
ccagctaggagcgctctgtggtgcctggggctgaacgcggctttctgtgacaaccatgagtggaaaaaactaattatggttcagcactggcctgagac

SEQ ID NO: 82427 - DNA, 90 bp, Homo sapiens
gttgttaaccggaggggcagccgcagtcgcgcggattgagcgggctcgcggcgctgggttcctgatcatgtttgagaccttcaacacccc

SEQ ID NO: 82428 - DNA, 88 bp, Homo sapiens
ggctggttgttccgttgcgagctgcagctgcgatctctgtggtaggcccagaaactagacacaatgtgcgacgaagacgagaccaccg

SEQ ID NO: 82429 - DNA, 134 bp, Homo sapiens
caggccggagagagccgtaggcaggaccccgggacaccctggaagccaggaaatggactctgaagacctactgggtgagcaaaggcagtgcctttagtaccagcatctccaagcaagagacagagctgagccca

SEQ ID NO: 82430 - DNA, 75 bp, Homo sapiens
ggaggagattctgaagataaggagctccgggttgacaaatggtggggtaacagaaaggaactggctaccgttcgg

SEQ ID NO: 82431 - DNA, 75 bp, Homo sapiens
gtgcggcccgaatgccagcgcctcttctaccggggcaagcagacttcccaagtaagaagcggaagaggagccgct

SEQ ID NO: 82432 - DNA, 100 bp, Homo sapiens
ctctgctgcccgctgtgagggaaaaggagactcggggctcggagcccgcctgagcgagccccccggagatggcggccccctatcccggcagtggcggcgg

SEQ ID NO: 82433 - DNA, 98 bp, Homo sapiens
aaggtctcacctgaggtgaaccttcgaccttggacttctcagcctccagaatgtccaaaagaaactcttccttcaaaacctgtgaagaaagagaagga

SEQ ID NO: 82434 - DNA, 83 bp, Homo sapiens
caaggagctaaagcagcgtgcgttcagccctgggtttcatgatcaacatgggagactcccacgtggacaccagctccaccgtg

SEQ ID NO: 82435 - DNA, 82 bp, Homo sapiens
tcagatgccaagtgtgtggctgaactgcagaaagagtaatctcaggggcgatataatcaatgaggtggtcctaaagttgctc

SEQ ID NO: 82436 - DNA, 108 bp, Homo sapiens
cgcgggcgccaggaccggccgaacgcagagatatggctcgtggacagcagaaaattcagtctcagcagaaaaatgccaaaaagcaagctggacaaaagaagaaacaag

SEQ ID NO: 82437 - DNA, 90 bp, Homo sapiens
cataaaaattatttatccaacagctcctcccagattctggaacttttcaaagcctgactctcttcttgaaacagtggagcatcatacaga

SEQ ID NO: 82438 - DNA, 98 bp, Homo sapiens
aaggaactggaagaaatgatagaaaatctagagccccacattgatgatccagatgttaaagatgcgtctgttactagagtggagagtctaccttcgtc

SEQ ID NO: 82439 - DNA, 75 bp, Homo sapiens
ttaccaagctgtttcctaccaggtcacacactgttgcagcgcagggctgtgggctgcatactggccgagctgctg

SEQ ID NO: 82440 - DNA, 75 bp, Homo sapiens
tttagtgtgacgactgttgacctgaaaagttattcctagacatggcttacagagtcttgggaaagttgctgcagc

SEQ ID NO: 82441 - DNA, 50 bp, Homo sapiens
ccagaaccgtgagaagtaaatttctgtttccacataaagaagatccctaa

SEQ ID NO: 82442 - DNA, 100 bp, Homo sapiens
cgaaggggacggacgtcctcccacgtaccatttagaaggaaatctactttcttcaatgtgttaaccaatagtcaggcttcagcagaaaacttcccgttct

SEQ ID NO: 82443 - DNA, 100 bp, Homo sapiens
gtggaatagtcctctccaaactttgacctgaggtgtgactattgccgtgtaggagactcaccaatacctggagctggagcctatgctgacgatactgcag

SEQ ID NO: 82444 - DNA, 96 bp, Homo sapiens
catcggaaatcagctctacagttcaggtgattacatggatccaacacctgatccccaagattgaagatggaaatgattttggggtagcaatccagg

SEQ ID NO: 82445 - DNA, 125 bp, Homo sapiens
tagagaccctacagaccaggcactccgtcagtgagatggcctccaacaagcactgcctcctaaaccaccaaaacctactactgtagccaacaacggtatgaataacaatatgtccttacaagatg

SEQ ID NO: 82446 - DNA, 80 bp, Homo sapiens
cttgtggaagacacaaaagatggcatctggctggttcaggcagatgatgttgagggcaaaattagacaaatcattccacc

SEQ ID NO: 82447 - DNA, 100 bp, Homo sapiens
gcagacctccagaactacctgtaaattatgtgaaacctccaaatgtgggaacctgtgaaatttgtagatttgcttggtgaccatgggaaacatgtcagtc

SEQ ID NO: 82448 - DNA, 83 bp, Homo sapiens
gctcctggccctggccctgatcatcctgctgggcttcgtccagatcgggaaggcacggggtcactctggtgcccattgaggag

SEQ ID NO: 82449 - DNA, 90 bp, Homo sapiens
atccagcccttctggtgtcacctcccagggtgactcaactccaggagcttgaagaaatccgcaaatgtgggatgaaaaacttccgtaaca

SEQ ID NO: 82450 - DNA, 100 bp, Homo sapiens
caggtggtgctgaccctgtaacccaaaggaggaaacagctggctaagctcatcattgttactgaatacctcctctgaaaaatggcagaagcagttttcca

SEQ ID NO: 82451 - DNA, 75 bp, Homo sapiens
gttctgggttccctagaagctctggaggggaaaacatatccatttcggggcgcctttccaccagtatggaatccc

SEQ ID NO: 82452 - DNA, 98 bp, Homo sapiens
cggccctccctttcatcagtcttcccgcgtccgccgattcctcctccttggtcgccgcgtccttggctggcgtagctctgcgtgcctcttgctgtgcc

SEQ ID NO: 82453 - DNA, 83 bp, Homo sapiens
catgtgttaccaagctgtttcctaccaggtcacacactgttgcagcgcaggcattcctcaggccttatctctctggttctttc

SEQ ID NO: 82454 - DNA, 74 bp, Homo sapiens
caagattgccttcttgggtgatgatgaatctgcattggataatgatgttggtcaaagaaaaagtgatgtatgaa

SEQ ID NO: 82455 - DNA, 100 bp, Homo sapiens
gacctcaagaagcagctccacgaaaggcagccgcggatcgccgcgctcagcgacaaacaagctcacagaacatttcctgcctgttgctcacactctgttg

SEQ ID NO: 82456 - DNA, 83 bp, Homo sapiens
ctttccagaagcgcagcagctgcttgaagtactgccaaatctgtcgaaagggagataatgaagaactgcttcttctttgtgat

SEQ ID NO: 82457 - DNA, 51 bp, Homo sapiens
gtcgtattgaatggtgttgtagacttgtggaagaaagcaaactgatcccac

SEQ ID NO: 82458 - DNA, 100 bp, Homo sapiens
tatctctcaggctgctgtggttcatgccacagccaaaggaaatgctgtctatgatttcttcattggccgtgaattaaaccctcgaattggtacttttgat

SEQ ID NO: 82459 - DNA, 100 bp, Homo sapiens
agcgtcgtcctgagaggagtgaaggcggcaaaatggcggaccgcttctcccgcttcaacgaagaccgagactttcagtcctacaagattatcaattttgc

SEQ ID NO: 82460 - DNA, 75 bp, Homo sapiens
gaggacttccctttggatgtagcaaggaagaaattgttcagttcttctcagaccgcaacagatgaccaaggaagt

SEQ ID NO: 82461 - DNA, 99 bp, Homo sapiens
tcaccgcaacctccacctcccagaaatttggagacagacaacttgtcacgcatacagggaaaatgacatttgaagacaaagtcagacatctacaagcca

SEQ ID NO: 82462 - DNA, 98 bp, Homo sapiens
ttacgccccctatcctatccgcaaacaacactcgcctatggggacatgaaccacgagtggatcggcaacgagtggctccccagcctgggcctccccca

SEQ ID NO: 82463 - DNA, 75 bp, Homo sapiens
cttgattggaatgttctccctgcagcagtcagcccaaaggaagaatgtgacagtgatgataacatgggtgccaaa

SEQ ID NO: 82464 - DNA, 74 bp, Homo sapiens
gcaagatcttaaggcttctttgtacagtgtactcctgaaacaggataataccacacaattggtacaagatgacc

SEQ ID NO: 82465 - DNA, 100 bp, Homo sapiens
tgcatggtgtttcaaagggtggtgaagaactaaggcctgaccgccgctgcctacagagtcacactcaatcctccgggcaccttccttgaaggagtggcta

SEQ ID NO: 82466 - DNA, 75 bp, Homo sapiens
gcctgtacctggagcagcaagtgcaattttacgaaacgtgttttccaagcagtgaagcacttgccgtgttgaact

SEQ ID NO: 82467 - DNA, 110 bp, Homo sapiens
taacagcagcgccgtcccgtccgacagccaggcccgggagaagtacgtttgcgggagcacatgggtgaaaagtatacaacttacagtgtgaaagctcgccagttgaaatt

SEQ ID NO: 82468 - DNA, 75 bp, Homo sapiens
ctgcgggcccgggccatggccgccgccgatgccgagaaaagcacttggttctgcttcgagatggaaggacactta

SEQ ID NO: 82469 - DNA, 83 bp, Homo sapiens
cttttccaataaggaggctggcatttacatcctgtaccacggaaaccccgttgtgagtacaaatggtgatgatcatcaggtca

SEQ ID NO: 82470 - DNA, 100 bp, Homo sapiens
cagtgcctcccgctcaacaccccaacccctgcccaccaggctatgagcccgacgatcaggacagctgtgtggataagtatgctgtgcgcttcatccctcg

SEQ ID NO: 82471 - DNA, 98 bp, Homo sapiens
acatcagcgccatccccgagcagcggtggaagctggttgtggcagcactgcctgaaggtatgagaccagattctaatctttatggttttccatgggaa

SEQ ID NO: 82472 - DNA, 90 bp, Homo sapiens
catctggatttacccaacacctgagcacaaagaagaggaagcagggggcttcattgcaaacctggagttaagtgggcagaccaacatcca

SEQ ID NO: 82473 - DNA, 100 bp, Homo sapiens
ctgtccagcatcctttagaagaatccagggaactcaaagttggcattcccgtcacggatgagaatgggaaccgcttgggggagtcggcgaacgctgcgaa

SEQ ID NO: 82474 - DNA, 96 bp, Homo sapiens
ttaatgaagtaaagcccacagagatctacaaccttggagcccagagccacgtcaaaatcttcaaggctaaccacttggaagataaaattaacatca

SEQ ID NO: 82475 - DNA, 99 bp, Homo sapiens
ttagaatctgggactttcttcgttgccatgaggaaagaattctccgagacaccagagaagcctatgatgacaagcaggtggtcacagagatcatggcaa

SEQ ID NO: 82476 - DNA, 82 bp, Homo sapiens
agcagccagggacctttgactatcaggactggttgccataaaggaagcccacgacatagagaccaggcttaatgaggtggag

SEQ ID NO: 82477 - DNA, 75 bp, Homo sapiens
tccccttccaggcccacagccgggagatccgagagctcttcagtactatactggcaattgctggagaagattttg

SEQ ID NO: 82478 - DNA, 100 bp, Homo sapiens
tgactgaggaccactggattttgaggaaactttggtcttgatggcactggatctttaaaacgcagtggttcctttagcaaactccgggcttccattagac

SEQ ID NO: 82479 - DNA, 100 bp, Homo sapiens
caaagctgaggtccagatgaaagagaagtttctggtcactccccaggattatgcgcggtttttcgttggaatatacgttgcacatttatggcgattctga

SEQ ID NO: 82480 - DNA, 99 bp, Homo sapiens
gccagggcttcctggcccgaaaggagagcctgtgcggcggcagcacatggagcgttgtaccagcttcctggtggatgagctgggcgtggtggatcgatc

SEQ ID NO: 82481 - DNA, 100 bp, Homo sapiens
cgcatacacaatcccgggcatgggcggcaactctttgatgtactactataatgggaaagcggcgcgagggctggacttgtcccgagtgaggacctgcgtg

SEQ ID NO: 82482 - DNA, 74 bp, Homo sapiens
ttcaccaatgtaagtctgccttatgttcctccagccaattgcaaaggactgggcagtttgacccttaagcctga

SEQ ID NO: 82483 - DNA, 98 bp, Homo sapiens
tcctggtcctcgatccgcccacagacctcaaattcaaagtgttttccaagcagtgaagcacttgccgtgttgaactgaatgcactactggagaatgtt

SEQ ID NO: 82484 - DNA, 75 bp, Homo sapiens
cgactacaagaagagggcggagcggagacgggagtattatgaaaagatcgtgctgctgcatgaggaggcgggtga

SEQ ID NO: 82485 - DNA, 74 bp, Homo sapiens
agggttcggccgtgccctccgacagccaggcccgcgagaatatatttgccttccctccatgatctccaacacta

SEQ ID NO: 82486 - DNA, 75 bp, Homo sapiens
tttaaacaatttctcaggttcagggcgatgccagtccctccactccagaggagaacgaaaccacgacaaccagcg

SEQ ID NO: 82487 - DNA, 107 bp, Homo sapiens
tctaatcaaaatatgcagtctcttttaccagcaatatggtccggaaaaagaacccccctctgagaaacgttgcaagtgaaggcgagggccagatcctggagcctata

SEQ ID NO: 82488 - DNA, 100 bp, Homo sapiens
caggctccgggctgaagattgcttctcttctctcctccaagggttcggcaaaagcagaacaaatatccgatactatttttaactcaaggaaaatctgaga

SEQ ID NO: 82489 - DNA, 100 bp, Homo sapiens
gggacacctttcacagctatcagggaaggtgaccaagaatatggcccaggtgaccaaagccctggacaaggccctgagcaccatggacctgcagaaggtc

SEQ ID NO: 82490 - DNA, 74 bp, Homo sapiens
gggaccacagcatgcacttccttccagcagctacacagccctttggagtgaatcaacctggaccttatatcatg

SEQ ID NO: 82491 - DNA, 75 bp, Homo sapiens
ccgaatcttccttcaggatatcaagggcctgacacatttagggaagggcacccttaccctctgcccctaccacag

SEQ ID NO: 82492 - DNA, 98 bp, Homo sapiens
ttgacttcttgatcctgcataaaaccaagatcttcagtgtctattggatttttccaagagaaagtttgtaaaattccttacactgtagatgtggatca

SEQ ID NO: 82493 - DNA, 75 bp, Homo sapiens
taaatgaggaatgtctttcctaccatctaaaatacgaaggtttctggctgggactatcggacaaaacctttctgc

SEQ ID NO: 82494 - DNA, 74 bp, Homo sapiens
ggacccagccctgcgtgaggccgcggagcgccagctcaatgaacttagtgaaatcagtgggattcctttggatg

SEQ ID NO: 82495 - DNA, 75 bp, Homo sapiens
tatgacaaggatggaagaggtcctatgacaggatcaagtgacaatgtcagtgcctactgcctgcatattgctgag

SEQ ID NO: 82496 - DNA, 100 bp, Homo sapiens
ggaaaattactgatacagagacgatggtcggaatcagatttgaaaatgaaagtgcaaatgaagatgtgacacagattgtggagattctccattctggacc

SEQ ID NO: 82497 - DNA, 97 bp, Homo sapiens
cgaggcagcgaggcaagggggagatcactcccgctgcgattcagaaggtgggacaatccttcatcccatcatcggtgcctgcaacctttgctccttc

SEQ ID NO: 82498 - DNA, 75 bp, Homo sapiens
atggaagttgattactcagtctctaaaaagctaaggttctatttcaccaattggcatggaaccaacgacaatgag

SEQ ID NO: 82499 - DNA, 75 bp, Homo sapiens
tcaggaaaccttactgtgccttggattacagggtgttctagaaaaagagcagtgtagagaggagagagagtgaac

SEQ ID NO: 82500 - DNA, 96 bp, Homo sapiens
tcttcaatttctatccctttttgcaaaggtttctgcagccccaccaaagagtgcaactgcagatagaagacctgactcgtaaactgcgcacaggag

SEQ ID NO: 82501 - DNA, 74 bp, Homo sapiens
taagaaatagcctccccaaagtcttgattcttgccagctctcattactgcagttctgaccaatcatcttgcctg

SEQ ID NO: 82502 - DNA, 75 bp, Homo sapiens
ccgctatccagaacctccactctttcggtgcgcgcggagccatggttatcatgtcggagttcagcgcggaccccg

SEQ ID NO: 82503 - DNA, 82 bp, Homo sapiens
tccgagcccaaggcaattgatcccaagttgtcgacgaccgacagggtggtgaaaggaagaaggtagataatgactataatgc

SEQ ID NO: 82504 - DNA, 82 bp, Homo sapiens
caaggcaaaccccagcacttaagcaaacgggaattctcgcttggtgaggtaacatacgtggagctcttaatggacgctgaag

SEQ ID NO: 82505 - DNA, 83 bp, Homo sapiens
ctcccaccttctttcttcagccgaggccgccgccgcctctccttgctgcagccatggagagcaggccgggctctcgccatggg

SEQ ID NO: 82506 - DNA, 101 bp, Homo sapiens
gaaattttgagaagagcagcaagagctttacctatctataccacatcagcttcaaaaagtgccagcgagatttcagattcctgtaaacctctaaagaaaag

SEQ ID NO: 82507 - DNA, 90 bp, Homo sapiens
ggccatcggccatcggaactaccatgcaggtgctggagaatctggtaaaagcaccattgtgaagcagatgaggatcctgcatgttaatgg

SEQ ID NO: 82508 - DNA, 75 bp, Homo sapiens
gacgaggatatcgtgtctggagcagtggagcccaaagacccctggagacatggttgccaacgtcgagctctgtta

SEQ ID NO: 82509 - DNA, 73 bp, Homo sapiens
cagcatatgcatgaccgagatgacctctatgctgagcagaatggcattgtgcccatcgtggagcctgagatcc

SEQ ID NO: 82510 - DNA, 75 bp, Homo sapiens
aggaagttctcgtcctgacagatctccagctattgaagggtgtgatgatgatcagatgtctaacgataaggagcg

SEQ ID NO: 82511 - DNA, 80 bp, Homo sapiens
gcgacgttcggccaccggaggagcgggagccaagcagatgaaggatttgggggcagagcacttggcaggtcatgaagggg

SEQ ID NO: 82512 - DNA, 100 bp, Homo sapiens
ccgggcgcgcggcgccgccacaagttgcgctgctcgcgacgaggattttttatcaagcagaaatgcatcgaacaacgagaatcaagatcactgagctaaa

SEQ ID NO: 82513 - DNA, 98 bp, Homo sapiens
aagattgcagaatacatcttcaagacctggaatgtatccgttcacaaagatgtccaaaactaatggcttatcagaagatttgatatggcactgtaaaa

SEQ ID NO: 82514 - DNA, 101 bp, Homo sapiens
ctgcccacttccaccagagacacattgagaaggaggaaactatggcctccaggcttccgacggcctggtcctgtttttaacttctagtcatggcgaatgat

SEQ ID NO: 82515 - DNA, 75 bp, Homo sapiens
ctggtgaagtggaaaggatggcccccaaaaggatgccttctccgggacagattggatgttggagaaaatggattt

SEQ ID NO: 82516 - DNA, 74 bp, Homo sapiens
cgggcaatgtggttcccagtgacaccaacattctggacacgtgggcggctcgattccttttgtccaaagtgaac

SEQ ID NO: 82517 - DNA, 74 bp, Homo sapiens
attcagaaacacaaagctgttcttttcaaaatgggtggcgacatgtctaagaatgtgagccagtcacagatggc

SEQ ID NO: 82518 - DNA, 83 bp, Homo sapiens
caccttccgcccgcatgaggaggagacaatgcagatcttcgtgaagactctgactggtaagaccatcaccctcgaggttgagc

SEQ ID NO: 82519 - DNA, 116 bp, Homo sapiens
agcgtggatgagggcgcctgcagatcccggctagggcacggaccgcctaggccgagactactgtcagaggatgtaggaatggacatcccctttgaagagggcgtgctgagtcccag

SEQ ID NO: 82520 - DNA, 123 bp, Homo sapiens
ctgggtcagtccgccgctcaccccgcggccgcaccttcccgccttctcagtctctgctttctatccgtcaagatgataaagtcgtgtgcccgagaaccaaagaagtcttccacttctcacaag

SEQ ID NO: 82521 - DNA, 83 bp, Homo sapiens
gctatgcccccgtggccaccgcctccagcttgccaccaaagacctgcgactttgctcaggttttggctacgggcctccacctc

SEQ ID NO: 82522 - DNA, 100 bp, Homo sapiens
ggccgtgcagagcagcacctccatcaggtacaacctcgaggagctctaccaggtagagcagagccggagccaggtgcaggccattggagagaaggtctcc

SEQ ID NO: 82523 - DNA, 83 bp, Homo sapiens
gttgtcccagctcggcccgcgggggagccccgggagccgcacggaaagatgaatgggagggctgattttcgagagccgaatgc

SEQ ID NO: 82524 - DNA, 74 bp, Homo sapiens
gtcccagatttttgctcattaacagaaaagaagaggagaatgctaagcagaattatctgactccagaaaaagaa

SEQ ID NO: 82525 - DNA, 101 bp, Homo sapiens
ttggaataaaaagattcccaggatgtgagcaacacgggaccgggacagagcagaatgggctgatatagatccggtgccgcagaatgatggccccaatcccg

SEQ ID NO: 82526 - DNA, 97 bp, Homo sapiens
agcctcccgagcggctgggattacaggctcgacaacctggtgtttcatccagaagagccagaggtgcttgctgtccttgactgggaactttctacct

SEQ ID NO: 82527 - DNA, 83 bp, Homo sapiens
gcggtacatcgcctcggtgcagggctccaccccgtcgcctcgacagcaaacggggattcagcgtccgatcctttggaacaggg

SEQ ID NO: 82528 - DNA, 100 bp, Homo sapiens
cttgtccatctgtaacttcattaagatctgtacccccgatttggtggtattcctggcttgtgctaatcagagactcaaagaaagattactgaagcgtgca

SEQ ID NO: 82529 - DNA, 74 bp, Homo sapiens
caggaagatttgaacgctttgaccttttttaagaaatgtggcatcattcttaacaaagaagttaaatattggtg

SEQ ID NO: 82530 - DNA, 100 bp, Homo sapiens
ccgtacttctgtgactgtgaaggtggtcatcatccagccccatgatgacggctcgccccgaaggcttcccagctggcgtgtatgttgtaaagagagttct

SEQ ID NO: 82531 - DNA, 100 bp, Homo sapiens
gtctgcttcaggaagaaagtgcctgccattcttatcatttctaagcaggttcatgccagcccagaacagagaatcaggtggttatccaaatgccaaccca

SEQ ID NO: 82532 - DNA, 99 bp, Homo sapiens
tgcacggagcgtcccttccatcaggagagtgaactttgaggcgctgatcatcaccatgtcggtagtcgggggaaccctcctcctgggcattgccatctg

SEQ ID NO: 82533 - DNA, 74 bp, Homo sapiens
ggaatgtacacgataattaaagagtaaagttgtgctcaacggcgggatccacagcaccattgtttactgaccag

SEQ ID NO: 82534 - DNA, 75 bp, Homo sapiens
atggacaacactgttgtgatggaggaaatcagaatgccatatggcagccgagagaactccctcctctactctgag

SEQ ID NO: 82535 - DNA, 83 bp, Homo sapiens
gctcgcaagcgcttctccattctcccaacgtctcgggcctgggggatatgagactttctactcggaatatcctgagtgttgcg

SEQ ID NO: 82536 - DNA, 100 bp, Homo sapiens
cacatttccaatttgctggaaaaaatgacatccagcgacaaggactttagagttgtggaaagtaaaaatgtagccctaccaaaaggaactattgtactgg

SEQ ID NO: 82537 - DNA, 54 bp, Homo sapiens
tgggcacgttaccaggaagtgacttaaagtgcttttatgggaccaacgctgggt

SEQ ID NO: 82538 - DNA, 83 bp, Homo sapiens
cttgtggttgggactaacagctggagagaacagttcattgaagctatcactgtcagtgctgactttggctgagcaaaacacta

SEQ ID NO: 82539 - DNA, 100 bp, Homo sapiens
gtggctaccagatttgccgattttgttggcatcgaattcgcactgatgaaaatgggctttgtcctgcatgtagaaagctttcggaaaatgtgattgatcg

SEQ ID NO: 82540 - DNA, 90 bp, Homo sapiens
gtgctgcagaaccagatccgggagcacgtcatcgccatcgaaggaccatggccaacctggagcgcaccttcatcgccatcaagccggacg

SEQ ID NO: 82541 - DNA, 50 bp, Homo sapiens
ctgctattgaaagagagtatgcacagtgcacgatctgattttctggagag

SEQ ID NO: 82542 - DNA, 100 bp, Homo sapiens
ataccttaaaagtgttttacgggaactggtcacatacctcctttttctcatagtcttgtgcatctatgagaccccgctttctacaccaaccgcaagagac

SEQ ID NO: 82543 - DNA, 98 bp, Homo sapiens
cttcttctctaccagtttcctgaccagtacagtgacattctcaggctgcttatgcaaagtacaggtttgcagattccgccagcagcacagcaagctct

SEQ ID NO: 82544 - DNA, 90 bp, Homo sapiens
agataagcccttgagcatccatcctcaaggaattaggtacagtaaattatcagaagtcaccgttacttcatccccaatccgaggagcagg

SEQ ID NO: 82545 - DNA, 75 bp, Homo sapiens
gaaagactcagatggttattaatacgttttagcggataatttcttgagaggagataactcccgtaaagttcagca

SEQ ID NO: 82546 - DNA, 100 bp, Homo sapiens
caaagtgcccggacccaaaacaggaagttctgcttggattctgctagacagacccgacaaagactgtctatcaactggtccaattttagcttgaaaaaag

SEQ ID NO: 82547 - DNA, 50 bp, Homo sapiens
agagaagcaggatggatcttgcgagcctgagaagccaggccccggcagca

SEQ ID NO: 82548 - DNA, 75 bp, Homo sapiens
gaacatcctttgactggttagccagaattatatccagatcgagagacagaagattctgaaagggttcaatgaaat

SEQ ID NO: 82549 - DNA, 101 bp, Homo sapiens
gccagtggatacgttcagggtataaatgatctcgtcactcctttctttgtggtcttcatttgtgaatacatagtgatgtcttggcattgcccattttcaag

SEQ ID NO: 82550 - DNA, 75 bp, Homo sapiens
agatgtaccggaccctgttcttcaggtgaaaggtgtagcagtcactcggcctacacccacagcatcgaccttgtg

SEQ ID NO: 82551 - DNA, 74 bp, Homo sapiens
cagcagccgtccggagccagccaacgagcgagagaagtggagatcctgatgtttctcagtgccattgtgatgat

SEQ ID NO: 82552 - DNA, 83 bp, Homo sapiens
cgaggaggcagccaagctcgtagcctgccactccgtgcgcatcacgttgggtggtttccatttagaccgaggccggttcagaa

SEQ ID NO: 82553 - DNA, 100 bp, Homo sapiens
ctgcggtagcagcgactcatgagagcgcggccggaggacaggcgcacctatgttggcagcatgcctggtcgcatcatcaacggcttgaagactgtgggag

SEQ ID NO: 82554 - DNA, 98 bp, Homo sapiens
gctgtgcgtgtggacttctacaatgcagacgagctcaaggtgacagagctgaatgaacctctctccaatgaagatcgaaatctcctctctgtggccta

SEQ ID NO: 82555 - DNA, 100 bp, Homo sapiens
ggattgtgagctatttcagaactgttctcaggactcattattttaacatttgggagaaacacagccagaaggttctgccgccagaccttccactgccatc

SEQ ID NO: 82556 - DNA, 75 bp, Homo sapiens
gggggcccacagcggacagccaggacacagtggctgattcctggtcgggtggcttccagtggtcttcagtctgtc

SEQ ID NO: 82557 - DNA, 97 bp, Homo sapiens
gactgtcttccaccaactccagcaggttcccaccttcacccctggcttctaagcccacagatagggccagatttgagtgtgtgaatttttgagtgaa

SEQ ID NO: 82558 - DNA, 101 bp, Homo sapiens
acgggagaaaaccgggcgcaagagttgctggagaatgtaaccctaatccataaaccagtgtcgttgcaaccccgtgggctgatcaataaagggaactggtg

SEQ ID NO: 82559 - DNA, 80 bp, Homo sapiens
tctgttcaagggaattttgatctaaatagggcatatcgatgcatttacttcaaaactttttctactggaagaaattacct

SEQ ID NO: 82560 - DNA, 75 bp, Homo sapiens
gtcctgtttcgacagcgaacatgtcgcggcctgtcagggtttggaaatcccttgtctccaggttgctgggattga

SEQ ID NO: 82561 - DNA, 96 bp, Homo sapiens
cttgtcccgctgcagccgagatgccgggggagcggggccttccacaccccctccgtgggtgtgtggcagacctcaacaccaacatcgaggatgaag

SEQ ID NO: 82562 - DNA, 75 bp, Homo sapiens
cgcgcgaaggagcggaagaatggcagtgctcaaactcaccgaccagaggaatgttacggcatccggagtcatccc

SEQ ID NO: 82563 - DNA, 100 bp, Homo sapiens
tggcacacatggttaaggaacaggaggaaaccattcagagagtcacttatttcagcaattcaaggtgatattgaagaagctaagaaacgactagagttac

SEQ ID NO: 82564 - DNA, 76 bp, Homo sapiens
ctacaagaaatactgaagatagtttaagcatggaggatgaaaaggaagatagtaaagttatacctacagaatgtgc

SEQ ID NO: 82565 - DNA, 51 bp, Homo sapiens
actgacgaagcttggaagttgcagaaggtggtattaaagataatcaaacat

SEQ ID NO: 82566 - DNA, 73 bp, Homo sapiens
tgaggcagagggtggcccatgagccggttgcgccacccgaggacaaggacaagattagatgcaccccggttgg

SEQ ID NO: 82567 - DNA, 83 bp, Homo sapiens
ccgggggcccgtactgcacatcgtggtggtcggatttcaccacaagaagggctgccagaaattggcgtgttagccaaggcttt

SEQ ID NO: 82568 - DNA, 75 bp, Homo sapiens
gtcgaacagttttttctaatggctattcaagatgctgcacaacaaacatgtcatggtccgtgtgggaggaggctg

SEQ ID NO: 82569 - DNA, 80 bp, Homo sapiens
attccgaaactgtcaagattggcaaggtgttatacaaagagaacctggggaaagcaacccccacaccctttactcctgag

SEQ ID NO: 82570 - DNA, 103 bp, Homo sapiens
atttgttaaggattccaagtaactcttatttggagttgatccctgaattttattatctccctgagatgtttgtcaacttcaataattataatcttggagtgat

SEQ ID NO: 82571 - DNA, 88 bp, Homo sapiens
taagtcaaatatacttggagctttaaaaattaaaaggagagagattcgagccagagactgctgctactttgaaacgtacgatagaggc

SEQ ID NO: 82572 - DNA, 106 bp, Homo sapiens
ttcacacagctgcttccattggccagtatgaagtggtgaaggagtgtgtgcagcggattgacttctaaggactcttggtacatgaggaagaaacccggaaggggaa

SEQ ID NO: 82573 - DNA, 90 bp, Homo sapiens
gtgggagaaggttctgtctatcagtgctgcgagaaaggaaagaaacaagtttgctctcagcggattatgtctggccactacctagatatt

SEQ ID NO: 82574 - DNA, 98 bp, Homo sapiens
ctgaaagcattgaagctataagagaatatgaagaagagttttttcagaattcaaagctcctaaacttgctcacttccgacagagaaaaacaaaaggtg

SEQ ID NO: 82575 - DNA, 83 bp, Homo sapiens
gccgcgaaccgcagtatcatgctggccaagaagatcatcattaaggacggaggcacgcgctggccgcgcgccgaacccgagtc

SEQ ID NO: 82576 - DNA, 74 bp, Homo sapiens
gtgacctgactgatgccttcgtggagatttctctatgaatcatcatcaagaactctgggagaacttttgaattc

SEQ ID NO: 82577 - DNA, 75 bp, Homo sapiens
ccgtgaccgagagcgtgaccgagagcgcgaatatcgtcatcgttagaagatgctctctgtgtgggtatgtgtgta

SEQ ID NO: 82578 - DNA, 75 bp, Homo sapiens
gtgattctgaagagggtctggaggagccttctcaagaacagagagactctccaacatgtgccttctgaccataca

SEQ ID NO: 82579 - DNA, 90 bp, Homo sapiens
caaaatcaccaaagatggtacagcccagaagagatggttactttgaagattcagaacaatttgtgggcaggaaatgcaagtggtggttct

SEQ ID NO: 82580 - DNA, 82 bp, Homo sapiens
cccgaggaagccaaccgcgacttcattgatgcacccattccagtggtgtaacgatattgaaatggattccaggcgtgtgcct

SEQ ID NO: 82581 - DNA, 75 bp, Homo sapiens
ccacctcagcgagataggaccctgcttcctagagcactgtcagagatggctttggattccccgttctgtgtgctg

SEQ ID NO: 82582 - DNA, 100 bp, Homo sapiens
gttgcacatccccacatcaatgcactgccaatggatattggtgctggaaaaggcaaatactatgctgtcaattttccaatgagagatggtatagatgatg

SEQ ID NO: 82583 - DNA, 126 bp, Homo sapiens
cagcgggaggaggaagacccgaggcatctccctaggactcttcgccctctgcctggccgcagcccgctgtctgcagaacttaattcagtgcacaaatgagatgaatgtgaacatcccacagttggc

SEQ ID NO: 82584 - DNA, 82 bp, Homo sapiens
aggcggcgggctggagacatggaccgcggcgagcaagagtgtgaacatggctacgcctcttcattcccgtccatgccgagcc

SEQ ID NO: 82585 - DNA, 87 bp, Homo sapiens
ctggggaacctgctcaaagccctgggtcgcttggaagaagccaaggttgttcagaatgaagaaaatgaaaactgtttgaagaaagtg

SEQ ID NO: 82586 - DNA, 100 bp, Homo sapiens
ctgaagggcggccgcgagcacggcgagccgctggtcatcaccaaggctgtggaaaatctctgttctcacaaagtctccccaatgctctacaagcaactgc

SEQ ID NO: 82587 - DNA, 75 bp, Homo sapiens
tggttcctggggaggagtcatgacactatcaatgcctctggacactggaagaattgtcttaccaagctcttgccc

SEQ ID NO: 82588 - DNA, 82 bp, Homo sapiens
cgccggcctcggcggctgaggaaagcaggaggaggtggcggcggcgggaagatcagcctcccgcgacgatgcccctcaacgt

SEQ ID NO: 82589 - DNA, 51 bp, Homo sapiens
acgctatgctggaagaatttaagaaagggactgttgacatttagggatgtg

SEQ ID NO: 82590 - DNA, 101 bp, Homo sapiens
accaaaacgtgccagaactatgacctggagtgcatgagcatgggctgtgtctctggctgcctctgccccccgggcatgttggcccgccacaataaactgtt

SEQ ID NO: 82591 - DNA, 98 bp, Homo sapiens
ggaaggacccccagcggtgcacgctgctggtcagccagttccgctcctgtcaggttctgcggggagtgtctccagccctgcctgcaggtgccatcccc

SEQ ID NO: 82592 - DNA, 95 bp, Homo sapiens
ggaagcttcaggtggagacagcccgaagggccccgtgaagcacgtgtacagagtcctgcagtgtcaggaagaagagctcacgcagatggtgtcca

SEQ ID NO: 82593 - DNA, 83 bp, Homo sapiens
gacgaattccagttcctgcaagctcagtatcacaggaactgtggctgcaccatctgtcttcatcttcccgccatctgatgagc

SEQ ID NO: 82594 - DNA, 90 bp, Homo sapiens
taaactgcagaaggaatttaaacgtcatataaagatgacggcgccttgaggtaagctacaggcaacaccacttccgcgtttctcttgcgc

SEQ ID NO: 82595 - DNA, 100 bp, Homo sapiens
ctcgggggtaggcaagacctgcctcctgttccgcttctcagaggacgccttcaacaccaccttcatctccaccatcgacagccgctcaggaagcaatctt

SEQ ID NO: 82596 - DNA, 117 bp, Homo sapiens
ccgctgccgacgccgcctggacggccgcactctccctgcccgagacccgatttgaacatggaattcaatccttcagatcatcctcgggccagcacaatattcctcagtaaatctcag

SEQ ID NO: 82597 - DNA, 74 bp, Homo sapiens
acgaagcctatacgctagaagaatttcaacatcttctaccaaaaatgaaaggtgaactccagaaagccattgac

SEQ ID NO: 82598 - DNA, 83 bp, Homo sapiens
cgcgagtgggagcaccaggatctcgggctcggaacgagactgcacgaaagcctcacattgtgcagtggagaagctgagagaag

SEQ ID NO: 82599 - DNA, 80 bp, Homo sapiens
agatcttcacagcacagttcctgggaaggtggagccaccagcctctccttggatggtgaagtggatgctgaagaacttca

SEQ ID NO: 82600 - DNA, 74 bp, Homo sapiens
cacaactgaagactttaaacatctggctcgcaagcgcacagtgcagaaaaacgccaagtacatctgcctggcta

SEQ ID NO: 82601 - DNA, 100 bp, Homo sapiens
cggcgcccgcgtcgccgtcgcgaagccccccgccccgcttccgccgcgtcggaatgagctcccggaaagttctgctaagccaatattctctagaatgagc

SEQ ID NO: 82602 - DNA, 98 bp, Homo sapiens
cagagctgcagctcggggccgagggagccggcatcatggattccttcaaagtagtgctggaggggccagcaccttggggcttccggctgcaagggggc

SEQ ID NO: 82603 - DNA, 100 bp, Homo sapiens
gcgggtcttgggtcctccgagagcagcagcggaagtggttctgaaagatggaagaattgaaagactaaagttagagcttgaaaggaaagatgctgaaatc

SEQ ID NO: 82604 - DNA, 51 bp, Homo sapiens
gatagcccatcagctccagacaactctccagaaagagcaacagtaatggag

SEQ ID NO: 82605 - DNA, 82 bp, Homo sapiens
ctctcagccactccctagcactcacagggtgtccagggtggtcgagccaaacgctattcatcccagcggcaaagacctgtgc

SEQ ID NO: 82606 - DNA, 76 bp, Homo sapiens
ccgcgctatggctgcgttcggccgtcagatctcacattcttgaaggtggcattgaagagcactaagatcggaagat

SEQ ID NO: 82607 - DNA, 75 bp, Homo sapiens
caggcgcgacttggggacgaagccaagttcattcccagctccagaaacatgacaaggaggactttcctgcctctt

SEQ ID NO: 82608 - DNA, 75 bp, Homo sapiens
agcagagtggctatggtgggcaaactaagccgattttccggaaaaagggcattgagcaagtgcagcaaagtagag

SEQ ID NO: 82609 - DNA, 74 bp, Homo sapiens
cctgagaccagtggtcatcgatgggagcaacgtggccatgaggtcaacaggacatactgctgtggcacctaccg

SEQ ID NO: 82610 - DNA, 133 bp, Homo sapiens
caagcttggaatgatcatcaaacagctatggtgatgattagagacatactaatgtacatgtatcctaagaaatccggtaaccaataagaagcattacagattgtatgtgatttataaagttccgcaagtcaga

SEQ ID NO: 82611 - DNA, 100 bp, Homo sapiens
gtctgctggtgggactcaatgttctcgatgccaatctctgcttgaaaggagaagacttggattctcaggggccttcagaaggaagaagttgttttgctta

SEQ ID NO: 82612 - DNA, 100 bp, Homo sapiens
tacccatggtgggcaggaagaggaatgatgacaggcacaatagaaacaacggggaacatttctgcagagaaaggtggctctatcatcttacaatgtcacc

SEQ ID NO: 82613 - DNA, 75 bp, Homo sapiens
ccactgttcctggaggaatccgagaagagcagagcggagggagccccagacacgatcctgcccggcctgtacatc

SEQ ID NO: 82614 - DNA, 100 bp, Homo sapiens
cgctactcccgctggtttctcagcatctggcgaggccccaatgtgaactgcacagacagttcgggttacactgctttacaccacgcagccttaaatggac

SEQ ID NO: 82615 - DNA, 82 bp, Homo sapiens
gaactggctaggcaaataagctttaagggccctggaaatacaaggataaatggaggatggtgctcatcttgaaacttgaaac

SEQ ID NO: 82616 - DNA, 82 bp, Homo sapiens
ctcaagcactgtttgcaaaggttgcagcaaccaaaagccaggactccaagccccctgatccttgatcagaactacattaaca

SEQ ID NO: 82617 - DNA, 100 bp, Homo sapiens
aaagaatgccacagaatcaggggaggcatgcttcagttgaatgcatgacctgcaatggggagagttatcgaggtctcatggatcatacagaatcaggcaa

SEQ ID NO: 82618 - DNA, 97 bp, Homo sapiens
gccggccgtgagcctcccgcccaaggagaatgcgctcttcaagcggatcttgtgggagattcttcacagtcaagctcccagttgctcttgatcctgg

SEQ ID NO: 82619 - DNA, 124 bp, Homo sapiens
gaggcggaagaccgcgcgcagggcctgcagcgggagctggacggcgagcgcgagcggcgcgagaaacagcctcccgcgacgatgcccctcaacgttagcttcaccaacaggaactatgacctcg

SEQ ID NO: 82620 - DNA, 90 bp, Homo sapiens
cgcgatcctgggctaccggtctgtggaaagatgtagcacttaagcctcaggaacgtgtggagaaacgccagacgcccctgaccaagaaga

SEQ ID NO: 82621 - DNA, 97 bp, Homo sapiens
aacaagtccaaggatgaatcccagtccctgttacggcaatcatttggggaagaatctacagttgctgatggacagagtggatgaaatgagccaagat

SEQ ID NO: 82622 - DNA, 100 bp, Homo sapiens
cccccccatggaggcgaggtagagttggggtcgcagatgttacaagaacgattccgggagtttgcccgagacaccgggaacattgggcaggagcgcgtgg

SEQ ID NO: 82623 - DNA, 100 bp, Homo sapiens
ttaatgactttggtgccctcaacatctctcagagacgaaaggtaaaatctgtaaaaactgggtcagttttttggacaatgtgctgctgcttatcctattt

SEQ ID NO: 82624 - DNA, 100 bp, Homo sapiens
aagtgctccactcgaacagatgtgagcgagaaagccgttgcctccagcaccacttctaatggtacggattttcaaatatgcgctatatttcttcgctaat

SEQ ID NO: 82625 - DNA, 75 bp, Homo sapiens
cccggttccgcctggccatgagcctggctcaggcctgcatgtggagacctttggcgacttggcctttggcgacat

SEQ ID NO: 82626 - DNA, 82 bp, Homo sapiens
tttcctgctttatggcgaaggcctactcaatttgaagacattgaggatgaagacctttatgatgatccacttccacttaatg

SEQ ID NO: 82627 - DNA, 95 bp, Homo sapiens
gacgaagcttggaagttgcagaagttcttccctgtggaacagtagagacctagtctgccttctttcacaagataatccttcaattatttgaaggt

SEQ ID NO: 82628 - DNA, 80 bp, Homo sapiens
aacaagttccgatcagaggtgaaaccaacagccagtgatatgctatacatgacaatgcagatcttcgtgaagactctgac

SEQ ID NO: 82629 - DNA, 83 bp, Homo sapiens
ctccgccactcatcaccaatgtcacggtggaacagaggctgaagttgttcaagttggcgtctgagaagcatcagcatatgtat

SEQ ID NO: 82630 - DNA, 108 bp, Homo sapiens
gtaatttagtggaagggatggattttcaccgattctactttgaaaatgggccggtgcataaacttctcccgagttccatctcagtaaaagggaagcaggaagaccaag

SEQ ID NO: 82631 - DNA, 75 bp, Homo sapiens
gctacaaccatccatcatctttatagatgaaataggtggagtattgctcctggaaaatccaaaaggtgacaatag

SEQ ID NO: 82632 - DNA, 88 bp, Homo sapiens
gccggctggatcctcacagagctggagcagtcagccacggtgatgaagtcattgtattcaaagaagaataagcaagaaagaaaagaag

SEQ ID NO: 82633 - DNA, 78 bp, Homo sapiens
tggccaatggtgtgatgaattccttgcagggcaccagcaccaagtacagtccgcagcgggtgggcctgacccacacca

SEQ ID NO: 82634 - DNA, 99 bp, Homo sapiens
cactcatgcatttagacattgcctctgcagatgtacttgccaccccacaagaaacttacttcaagtctcaggttcgatctggggctaatgttctaattt

SEQ ID NO: 82635 - DNA, 51 bp, Homo sapiens
tgaacatccacgccctcctggcaggtctacaggtccaactgctgccactgg

SEQ ID NO: 82636 - DNA, 75 bp, Homo sapiens
cccttggcatcagggctgaagtggctgcgatttatgagccacctcaggtcatcatcctgaaccacccggggcaga

SEQ ID NO: 82637 - DNA, 75 bp, Homo sapiens
ttcaactgctggaagatgaaggctacaaaggcttcgtgggctgctgtgcccggtggtgccctcagaactcctcgt

SEQ ID NO: 82638 - DNA, 75 bp, Homo sapiens
gctagatgttgtggttgaaaataatctagatattgatggctttggtggggacccaaactgtatgcattgttccag

SEQ ID NO: 82639 - DNA, 75 bp, Homo sapiens
acatgatacaatctgcaaatggtactccaaagattcaggtttactcacgtcatccagcagagaatggaaagtcaa

SEQ ID NO: 82640 - DNA, 100 bp, Homo sapiens
gatgatccttacggaaaaggaacagattgttcctaaaccagaagaggaggttgcccagaagaaaaagcactatgttggccatggaaatgctatcaatgag

SEQ ID NO: 82641 - DNA, 75 bp, Homo sapiens
gtccatgggaaaccttcggtggtgtacagatttttcacaagacttggacagctgcggataaccgtctggtccttg

SEQ ID NO: 82642 - DNA, 50 bp, Homo sapiens
tctcgatacttcctgtggccactccagccctggtacctgacagtgtaaag

SEQ ID NO: 82643 - DNA, 100 bp, Homo sapiens
ccctggactaccgcctggatcctcagctccagctgcactgctcagacgaggttgctaggaagaggctcaatgtttgtgttttcaccagatcagtttcaga

SEQ ID NO: 82644 - DNA, 80 bp, Homo sapiens
gtggagatcgtcccgcgcctgccggttacgggcaggacttgagtggcttcggacagggcttctcagaccccagccagcag

SEQ ID NO: 82645 - DNA, 100 bp, Homo sapiens
gcacttttttttttgcggaacctgaaaaattcaagaagttgaaaaacgcttttcacgtcacctggagagatgcacaggatgacagtgatgggattccgtg

SEQ ID NO: 82646 - DNA, 100 bp, Homo sapiens
tgcgggcccgggccatggccgccgccgatgccgagatgaggacggggacttggttgccttttccagtgacgaggaattgacaatggccatgtcctacgtg

SEQ ID NO: 82647 - DNA, 74 bp, Homo sapiens
cggatagaaggctgtatcattaaaccgaaccctcaccaaacagatctgcttgcacatccacttgcacgtagacc

SEQ ID NO: 82648 - DNA, 100 bp, Homo sapiens
gttctgcagaaggtgtgacgggagctgccacttcccctagtacaaatggtgcttctccagtgatggataaaccaccagtcaccaggagactaaagtccat

SEQ ID NO: 82649 - DNA, 95 bp, Homo sapiens
gtacatactgaatgatctctacatctcagactactgtgtgtggattcagaaagtcaagttgattcttcaccacactgaaaccattaggaaaaatc

SEQ ID NO: 82650 - DNA, 75 bp, Homo sapiens
gcctgtcgaatgccccccagccaccagctcgaccacagcaagctcctggggtataaagactaccgagagccgccg

SEQ ID NO: 82651 - DNA, 100 bp, Homo sapiens
aagactttgatggccaccataccatcactactcataaagctacatctggaatagtcaaatgatttcagttcgtgaagccaaagccattccaaggcctgat

SEQ ID NO: 82652 - DNA, 82 bp, Homo sapiens
caggcgggcctcccgtttctggctccgggctgagcttcctggagaagaggaagttcaaatctgaacatcaatgatgtactag

SEQ ID NO: 82653 - DNA, 75 bp, Homo sapiens
tggtctggaaaaattggctaggtgtaaaaaggcagccggacagagcgggatgccaccagcttgtccaaagggaag

SEQ ID NO: 82654 - DNA, 100 bp, Homo sapiens
gacaccaagttggatgccatgctggaggagttcaagaaggctgtggaaatacaaagaactctgaatcaacttggaacacctcaagattcacctgaattga

SEQ ID NO: 82655 - DNA, 75 bp, Homo sapiens
tgtttatctacaattatttctcctctgtttgcagaggagtgtctggaaaaattcaccgtgagcctgaaccacaag

SEQ ID NO: 82656 - DNA, 101 bp, Homo sapiens
caacatcaccgtactgcatgtgaagctcaccgagacggcgatccgggcgctcgagacttaccagagccacaaggtagtggaggacatgctagaggacgagg

SEQ ID NO: 82657 - DNA, 75 bp, Homo sapiens
tacagtggcactcctgggtctggtgcaccactcctcaggagcatctcaggaggatttgacagctaaggatattga

SEQ ID NO: 82658 - DNA, 100 bp, Homo sapiens
acatccagaccatcgagctccagatcaaaaagctcaagcatggtgttagtctgtatattcaagataaagaaggcttgtcagctttggatcttgtaatgaa

SEQ ID NO: 82659 - DNA, 100 bp, Homo sapiens
agggcttcagaattacatttgcttgaaactcctcttgtagttaagtgtctcaatgagatcttggagtcagcagatgcacccttagaagtcactgaaggat

SEQ ID NO: 82660 - DNA, 100 bp, Homo sapiens
atttatttctcttgacaaccaagggcctccgtctggatttccaaggaagaatttcctctgaagcaccggtggagattctggacgcaaagacaagggagaa

SEQ ID NO: 82661 - DNA, 100 bp, Homo sapiens
cgcaacaagttcaaccaggtggagagtgataagcttcgaatggacagagccatccctgacacccggcatgaccagatgaatttgacaagctgaggcctct

SEQ ID NO: 82662 - DNA, 100 bp, Homo sapiens
cacagccacagacttctcagcacagagtggggactgccttccattgtgaagtctgttcaaaccttgtactactcagctgatcacaagctgcttgatggga

SEQ ID NO: 82663 - DNA, 82 bp, Homo sapiens
ttgtatgcatactccacagcacctggtgggagacctccacagaacccttccagcaagctgtcttctaaagcaaacaagaaaa

SEQ ID NO: 82664 - DNA, 75 bp, Homo sapiens
ccagaagaccaagtacctgcagatcctgacctctctgatgagatggatcgaaacgcttcgttaagggactcaggc

SEQ ID NO: 82665 - DNA, 80 bp, Homo sapiens
ctgtctgcatcttctaaagctctgtttcctagcacagcacaagtactaggttttgacaagcttgcatcatgcgtgagtat

SEQ ID NO: 82666 - DNA, 100 bp, Homo sapiens
cagtgagaaggcgacaggaaccagctcgggggccaactctgaggagtccactgcagcagctggacgcacagaacagtctctccgtgggaggagacattat

SEQ ID NO: 82667 - DNA, 74 bp, Homo sapiens
gcggagagaccatatatgtcattgggcagggatcaggatgacagcatggaagagaaaccactaaaagtgaaagg

SEQ ID NO: 82668 - DNA, 96 bp, Homo sapiens
tgcactgctacaggactctactatggagtctgcagacctgctggaaatgaaatctggtgctcctgcgagacaggttatgggtggcctcgggaaagg

SEQ ID NO: 82669 - DNA, 100 bp, Homo sapiens
atgatgccccagctgcagttcaaagatgccttttggcctagaacattccatattctgcttcacacacggtgactcactcactactgctttgtaccagtgt

SEQ ID NO: 82670 - DNA, 75 bp, Homo sapiens
ggagagcggccgccgccgctgccgcttccaccacaggtctggttggtttccaatacggtagatgcatcagtaggt

SEQ ID NO: 82671 - DNA, 151 bp, Homo sapiens
attctaagcatcgctgccatgatgcagatccagaatatctttgtggtccccccaaaccagaagtctcacgcagggcctttatcatctgctggactcctggattggttttgttacttctagacgtgtgctgtccacagtgcgacgtgctggc

SEQ ID NO: 82672 - DNA, 51 bp, Homo sapiens
cttccagaccaggctccgacggacctgctccacaatatccacaccaagtgc

SEQ ID NO: 82673 - DNA, 90 bp, Homo sapiens
cagaaggatacagttcatgacaatgactttgagccctaccttactggacagtcaaatcaggctgaccggttccctgatgtgttacctgct

SEQ ID NO: 82674 - DNA, 82 bp, Homo sapiens
tgctcagcgtcctcatgtggggggtaaaccactcgacctgcctagagctggaacgttacctccagagcgagccctgctatgt

SEQ ID NO: 82675 - DNA, 74 bp, Homo sapiens
ctggtccaggccttccagtacacagacgagcatggggaagttgtggcaatttatgactatacaaaagacaagga

SEQ ID NO: 82676 - DNA, 74 bp, Homo sapiens
cgcagtgaagccagccgaatactagccgagcagcgagccagggaggcgggaagagatgccctcggaggacagcc

SEQ ID NO: 82677 - DNA, 50 bp, Homo sapiens
gccgccatgaaatctcccatgagaggacaccttgactaacctccaagggc

SEQ ID NO: 82678 - DNA, 96 bp, Homo sapiens
gagacctagcacccagaagatgagaccgcaattcgagaatcaaagggccgggagcgatggttatgatgtgattgctcaagcccaatctgggactgg

SEQ ID NO: 82679 - DNA, 98 bp, Homo sapiens
ttgtatcatgagcattggatttgatcacatgggaagttgttgacatgaagtctgagggacaggccactgtaattcagcagctggaacagactattgag

SEQ ID NO: 82680 - DNA, 75 bp, Homo sapiens
gcggcgggaacgattgggctgagcagaggacgacatgttgcttttcgtggagttgattatggaagattcccacaa

SEQ ID NO: 82681 - DNA, 100 bp, Homo sapiens
acacgctgtcatcaactatgatgcgtctacggatgagcatttagtgaaggatttgggcagcctcaatggggctgagtcatcactagagagtgggaagggc

SEQ ID NO: 82682 - DNA, 97 bp, Homo sapiens
cagggctgatctcccaccctgtggagcctgcattactggaagacaatgcagatcttcgtgaagactctgactggtaagaccatcaccctcgaggttg

SEQ ID NO: 82683 - DNA, 78 bp, Homo sapiens
gcagcttcaagcttaggaccacccaccatgcctatccaggtgaccagtatgcactgaagatgaggtttgtggaccatg

SEQ ID NO: 82684 - DNA, 75 bp, Homo sapiens
tctgttgtgagctgcacactcaagggtgtgataaggccacattgtccacaactggaaggcgcgatggttcatcct

SEQ ID NO: 82685 - DNA, 113 bp, Homo sapiens
acaggattcgttggctgccgtccccgctgctgtgcattgggctggacgtaaagaaagaagtgatgcactcaattctgcaatagataaaatgaccaagaagaccagggacttgc

SEQ ID NO: 82686 - DNA, 89 bp, Homo sapiens
gttgagtacttggatagacttatacctcagcctcaccctgtgatcccactttcatcctgggctgtgctccctgcaatgtgatctgctct

SEQ ID NO: 82687 - DNA, 82 bp, Homo sapiens
cgccatcgagcgcccctccgagctggggttggacgctgccagtttgcacagcagcaggtgtcgtgaaaactacccctaaaag

SEQ ID NO: 82688 - DNA, 75 bp, Homo sapiens
cagacagaagtggggagaagcggaggcctgggcggatgatgtggagcggtttcagaaaatgttcagacacccaag

SEQ ID NO: 82689 - DNA, 75 bp, Homo sapiens
gcggaggacagctctgatgaggaggttggtgttcgaggaagagacattgttgttcttggtgtggagaagaagtca

SEQ ID NO: 82690 - DNA, 87 bp, Homo sapiens
cggacaaggatagttttggctgatgtgaaaagaatgcctcagccagatgaggaatactgtcttgtgtaaatatattcaaggaaaaca

SEQ ID NO: 82691 - DNA, 89 bp, Homo sapiens
cgcgccacccgctaggatgccggtggccccagcgccctcagccgacggaggcgccaagcccatctttgtgtgcttgcatccaactgtga

SEQ ID NO: 82692 - DNA, 50 bp, Homo sapiens
tgattggagctgtaaaacatcatcaggtgctggcccagcagggggagtac

SEQ ID NO: 82693 - DNA, 75 bp, Homo sapiens
gcccagaaggccaagaacccccaggagcagaagtccttcttcgccaaatacgtcgcaatggaagaagagatcgcc

SEQ ID NO: 82694 - DNA, 74 bp, Homo sapiens
ccttcagccatgcttcctatctaccctgccattgatattgatgcacagacatgaagccattattatatcaggaa

SEQ ID NO: 82695 - DNA, 82 bp, Homo sapiens
ccagatgatgcggtggtgggggacctgccggcacgcgactccccccgggcccaaaatagcctgggctggaagctcttctacg

SEQ ID NO: 82696 - DNA, 138 bp, Homo sapiens
gttcaggcgatcatgtcaaaaaagtttcttttaaaggaattgaaaattctcaggcaccaaaaattgtcaggtggcctttttgaagatgtaactattagagctgggcattctcctcccccggcagacagctctcaagca

SEQ ID NO: 82697 - DNA, 49 bp, Homo sapiens
cgcggatggccgtaaccccgaaggaaatctatgctgggactcatgtatg

SEQ ID NO: 82698 - DNA, 100 bp, Homo sapiens
agggctcctcccttcagctttggtccctcggggcgtctgggcagcctacgctttccgtacgctacttcctgaagaataaggtcagccctgatttgtgcaa

SEQ ID NO: 82699 - DNA, 100 bp, Homo sapiens
ggagtgcaagcagcttccaagccctcaaagtttgaaaggcaaaattctagtgaagtggaaagctcatgatggcattattttaaaagtagattggaactcg

SEQ ID NO: 82700 - DNA, 97 bp, Homo sapiens
gcccgaggccggaggaacccggactccggcgtagcggtgtcatggagaaactccagctgggcccagagattctgcagcgggaaaatccaaggcttat

SEQ ID NO: 82701 - DNA, 98 bp, Homo sapiens
ccagccaaccccttgcagagtggcagctttgcaaggcatccgtgtccagagggatggcttctggaaacttacaccagaactgggacttatattaaatc

SEQ ID NO: 82702 - DNA, 50 bp, Homo sapiens
caatgcctaccccgtcagttcagcaggaagccttggaagatcgtttggaa

SEQ ID NO: 82703 - DNA, 75 bp, Homo sapiens
tcactctacgtggagttgggccctgcaggaaggacggacttcaggggcagttaagtgggcagaccaacatccacc

SEQ ID NO: 82704 - DNA, 100 bp, Homo sapiens
gtttacaacatcatcggtggacttgatgaagaaggtccctccttgtggtccatttctgggcaccatgggctccacagtgtgcacagatgaacgaagttat

SEQ ID NO: 82705 - DNA, 100 bp, Homo sapiens
cgatgaaatccaaaggtgaatcttttggttggtgattttgatgatagccacaaagcaagcagggaagcactacagttcgtaaggagatcatcaggaataa

SEQ ID NO: 82706 - DNA, 100 bp, Homo sapiens
tgcttttccagcatgcttactgaccctgatttacctcaggagtttgaaagggtgttcctgaaaagccccatagtgattgagtcttcaaaaccaccgattc

SEQ ID NO: 82707 - DNA, 98 bp, Homo sapiens
gtacgacgtgatcgtgctgggcaccggcctgacggaaacttggatttaactggccagaagcaggtattcaaagcagagaacaatccctgggtgacccc

SEQ ID NO: 82708 - DNA, 75 bp, Homo sapiens
gccgaggggctgtcaaagctccaactggaggccaccctgtggttcaggaacaagatcactcaaggtgaaggataa

SEQ ID NO: 82709 - DNA, 101 bp, Homo sapiens
gtctttctagaaatgactggaaagtttcaagaggcataagatacagtactatactggcaattgctggagaagattttgcaattgttgcttctgatactcga

SEQ ID NO: 82710 - DNA, 74 bp, Homo sapiens
gtggaccacatagacatttacgcggatgtcggcgaagagttcaaccaggacatgttggctctagggatggagca

SEQ ID NO: 82711 - DNA, 98 bp, Homo sapiens
caggatccgcttctcagactccaatggcagtgtcctgtttgagcaccctgcagcccccacccaagatggcctgacctatgccagatttactggtgctc

SEQ ID NO: 82712 - DNA, 100 bp, Homo sapiens
gaaggagagacttaccgataccactgtgctattcctggaagcaagaagacaatccttatggttacaaatagcttctccaaacaggctggtgtacagggag

SEQ ID NO: 82713 - DNA, 78 bp, Homo sapiens
tcctatccctacaaagccatgaacccgaaaacagtggccaaatgtcaggtaactcccagaagaaatgttctccaaaaa

SEQ ID NO: 82714 - DNA, 100 bp, Homo sapiens
gcggaatctgggtgcagttcctgcagtaccccactctacgatcagaaaaacctatacctgctgaacgccaccgagggtcaagtcacagacaagaagctgt

SEQ ID NO: 82715 - DNA, 100 bp, Homo sapiens
tggatgttggatctacactttctcaagcactgtgatcttcaaatttcttatcaggagaggatcaatggaagtgaaagcaaatgattttcattcaccttgt

SEQ ID NO: 82716 - DNA, 74 bp, Homo sapiens
tgatgcccttcgaaaaatgatcaactattgaccatataggttctaagctggtctatgtccatcaccttcttgga

SEQ ID NO: 82717 - DNA, 125 bp, Homo sapiens
aaggatgttctgaatttggtttatctctgtgaggctctgaatttgccagaagtagctcgttattggcagcaggatgaagctggaggcagattcgtcgctttctctggagaaggacagtcattgcg

SEQ ID NO: 82718 - DNA, 100 bp, Homo sapiens
actggttccaaatactaaaatccagatgtcatattcagaatcagagaagatcattgctgagttgaatgaaacttgggaagagaagcttcgtaaaacagag

SEQ ID NO: 82719 - DNA, 100 bp, Homo sapiens
gcagctggactggcaggcccgagggcgaggtgtcatggagaaactccagctgggcccagagattctgcagcgggaaaatccaaggcttatttatgccagg

SEQ ID NO: 82720 - DNA, 74 bp, Homo sapiens
aaggcagctgtgactgaggcagtgcgggccctgctgctccagaaacgcttcatcctgaatctgccaaccttcag

SEQ ID NO: 82721 - DNA, 88 bp, Homo sapiens
ttgactggatttaatattacttacaggtttctaagcatgaattgaggaacagaagaagcagagcagatgatcggagcagcatttgttt

SEQ ID NO: 82722 - DNA, 90 bp, Homo sapiens
ctggattactatcaactatctgctgggcaaattcagtcagagtgagtgtcgtggttggggtgctggacccagagtgcctaccctcgcctg

SEQ ID NO: 82723 - DNA, 97 bp, Homo sapiens
aagcaggcgactacagccacgtgaaggtgaatccgccatactacatcccgctggttgagctggtcccccacccggagacggcccctacgacagtgga

SEQ ID NO: 82724 - DNA, 100 bp, Homo sapiens
cctctgtctgcctgtgtccctgaccatggctccctgcagtaccctttaacggcagtggagctactgctgtggttcaggcagccctatgcaaacccaggca

SEQ ID NO: 82725 - DNA, 83 bp, Homo sapiens
aaaacggcgagagtgggcgagaacgtccactgcgggccggcgaaagctgacctgatggccaaaagaaaggaagaaaatttttc

SEQ ID NO: 82726 - DNA, 97 bp, Homo sapiens
cttcgccgtccaccaggtccctctctctgtccccggccgccatggagcagccgccggcgcctaagaggtggtattaaagataatcaaacattatcaa

SEQ ID NO: 82727 - DNA, 88 bp, Homo sapiens
cgctcggccggcgcggcgcagaagaaacccgcggcgaccacagccaaagcgggccggggatctgatgagcttctttcttctggcatca

SEQ ID NO: 82728 - DNA, 100 bp, Homo sapiens
ggagtgtgtctgtggactctggagagcagcgagaggctgggaccccatccctggattcagaggccaaagagctggcggagttgcctttgatacggttaga

SEQ ID NO: 82729 - DNA, 82 bp, Homo sapiens
cagcttcaaagactgctgccctagaggggattgcagaatctccaacaactttacagggcgcaaaccagaagaagagggtgtg

SEQ ID NO: 82730 - DNA, 75 bp, Homo sapiens
taaggattccaagtaactcttatttgcaagtgaagatgttaaagagatctttgccagagccagaaatggaaagta

SEQ ID NO: 82731 - DNA, 100 bp, Homo sapiens
tgcaaactctgcctgtgtgagcagtctctggacaagatgaccacactccaggaatgccagtgcatcttttgcacagctgactgcaatgtgccgatcttag

SEQ ID NO: 82732 - DNA, 100 bp, Homo sapiens
gaggacgcggccaggcgattcggtgaagcgattcctgcaggcgttggttcccctctttgacctgtaaacctatgatggacttgttgatattcctttgtgc

SEQ ID NO: 82733 - DNA, 82 bp, Homo sapiens
gacatggaccgcggcgagcaaggttactataacaacagtaccaaggtggctgtgaaaaccctgaagccaggaactatgtctg

SEQ ID NO: 82734 - DNA, 75 bp, Homo sapiens
aggagagcatgtcggaggctgatcgcgcccagaagacccaacatgagtgaagtttcctgcaagaaacgggacgac

SEQ ID NO: 82735 - DNA, 127 bp, Homo sapiens
ctcaatgttctcgatgccaatctctgcttgaaaggagaagacttggattctcaggttatgaaggacagaatctggcaaagatcctcaaggatttagagatgagtaaagtggtacatatggatcgatg

SEQ ID NO: 82736 - DNA, 82 bp, Homo sapiens
ggagcggtacatcgcctcggtgcagggctccaccccgtcgcctcgacaggtcatcatcagatttgaaatatttaaagtggat

SEQ ID NO: 82737 - DNA, 100 bp, Homo sapiens
tagagatgtgatgttggagaactacagaaacctggtctccctagactttatattcagagcaccaatcaaattaagcaagcctggggaacttcgtgaggaa

SEQ ID NO: 82738 - DNA, 83 bp, Homo sapiens
gctaaagcagcgtgcgttcagccctgggaacatggtccaagacaattcctgggaaagttcagttcttctcaagtgagggttct

SEQ ID NO: 82739 - DNA, 83 bp, Homo sapiens
tgagacgcagagtgtaccaggggatgctggactgcatggtggccactaacacggacaccagccgaaatgccggaaatgcggtc

SEQ ID NO: 82740 - DNA, 73 bp, Homo sapiens
aaaaagcacctgacttccttcctcttctgaacaaagctctggatgagggggatattgccttgttgaaaactta

SEQ ID NO: 82741 - DNA, 90 bp, Homo sapiens
gctcgaaatcctggatactgcagggacaggtcttactgaagtaacacaaagcttaaaaatggaaaatgaagagtttaagaagaggttcag

SEQ ID NO: 82742 - DNA, 90 bp, Homo sapiens
gccgcgcgaccaggaggcggcggcgccgccggctttgcaggatgaagttaaaggaagtagatcgtacagccatgcaggcatggagccctg

SEQ ID NO: 82743 - DNA, 95 bp, Homo sapiens
tgtgtgctcgttaccctatcgcttgcgcaaatagcattggactcttatgtaccataccttacaccaggagagccttgaacttaggaattcttcga

SEQ ID NO: 82744 - DNA, 100 bp, Homo sapiens
ctgagagagggaagtcgcctctgtgctccactgtgacttctgccgtgttcaccgtgggagacaacgtggtttcaggcagcgatgaccgcacggtgaaagt

SEQ ID NO: 82745 - DNA, 89 bp, Homo sapiens
gccctgcatatgattggctctttagctgaaatacttctgaaggtatccagatggttcccatcagctggtgtgagatgcagtgccctaag

SEQ ID NO: 82746 - DNA, 90 bp, Homo sapiens
ggaggcgccgctctagcggccgggactctgaactatggcggtgatttgtggagctatgatttcttcagtggtgaatttgtggtgtcacct

SEQ ID NO: 82747 - DNA, 98 bp, Homo sapiens
ctgctggtggcaaccgcctacgagacactcaagagttgtggaaagtaaaaatgtagccctaccaaaaggaactattgtactggcttctccaggctgga

SEQ ID NO: 82748 - DNA, 100 bp, Homo sapiens
cagcatcggggcagacaccgccctgaacactatcaccgactggattgggccgtggaacaggcccacttcgccctgttcttcaaccagggccagtgctgct

SEQ ID NO: 82749 - DNA, 125 bp, Homo sapiens
aatggcagccagtttggattttcactggacttccacaaggacagccatgggagtgcaccaattccagctggacatcactgtgaaaatgggacgggataaagtccgagaaatgtttatgaagaatg

SEQ ID NO: 82750 - DNA, 74 bp, Homo sapiens
gagatgctattgcccggctcaaggagtgaaactggaacgccaagctgaagaagaacgaatacggaagcacaaag

SEQ ID NO: 82751 - DNA, 87 bp, Homo sapiens
cttttgaacagtccattgaagctgtgcaagctatatccaaaagttttggaaggtctccatcaagaaaacaaaattattcatcaaaaa

SEQ ID NO: 82752 - DNA, 82 bp, Homo sapiens
gcggtctgacatcgcgacgctgctcaaaacctcgctccggaaaggggacacctgacttcccaagtaagaagcggaagaggag

SEQ ID NO: 82753 - DNA, 74 bp, Homo sapiens
aggaggccatgatggatcctcttatctcaatagtgttgaaagtgaacagcagagaatttcaaaggaccttgcta

SEQ ID NO: 82754 - DNA, 74 bp, Homo sapiens
cgtgttgcaaaatgacagatcttctagaagaaggtattactggttcaaaccttgtactactcagctgatcacaa

SEQ ID NO: 82755 - DNA, 122 bp, Homo sapiens
caggacctccctggatgccctgaagatcagcatccgccagctcaagtggaaggagacactgccctaaccatcatggaggtggccgaggtggaaagtcctctgaaccccagctgtaagataat

SEQ ID NO: 82756 - DNA, 73 bp, Homo sapiens
ccgaccctgccgcctccctcacggagccagcggccggattgtggtggtgccatgcagcaagaatcagagagat

SEQ ID NO: 82757 - DNA, 100 bp, Homo sapiens
atgtgccttagaggattatggttggctgattgcaattctggcccaactcaaccctctctttggaccgcaattgaaaaatgaaaccatctggtatctgaag

SEQ ID NO: 82758 - DNA, 50 bp, Homo sapiens
gagcactagtgtctagaaggcactaaggcaaaccagtccagctacggggg

SEQ ID NO: 82759 - DNA, 83 bp, Homo sapiens
ctccccctaaaccagctcacagaaatagcaaccctgtcattgattttccgcagatttccagtggccccactgatcccttatcc

SEQ ID NO: 82760 - DNA, 82 bp, Homo sapiens
cagcctgcggagcctgtggggcaggcacagtttgaacttcgggcatttcatatccggggcgagcatgcaatgataacagcga

SEQ ID NO: 82761 - DNA, 51 bp, Homo sapiens
ttgtgtggcacccaccaccttccagggcagagcggcttgggtaaatccacc

SEQ ID NO: 82762 - DNA, 51 bp, Homo sapiens
ggatgcaggaggagagcctgcaggaatcattgatcagcgattcgagaaggt

SEQ ID NO: 82763 - DNA, 76 bp, Homo sapiens
cgcgggcggtgtcgctgtggggagctggtgctgttctcaggatggctcgcttcggggaggcggtggtcgccaggcc

SEQ ID NO: 82764 - DNA, 100 bp, Homo sapiens
atcttcacttggcaaactcaacaaggaaatcatggatcggatctacaaaaatgtcatgaataaagtcagtgaaatgagtagttttcaacgtaatctgttt

SEQ ID NO: 82765 - DNA, 75 bp, Homo sapiens
gttgcagccatggtgcattgcagttgcgtgttgttcagaaagtgataacctcctaaggagagcagcctgtcaaga

SEQ ID NO: 82766 - DNA, 100 bp, Homo sapiens
cgttgaccaactctttgatgatgcatccagtaacaaatgtggcaattattttggatctatcacctgtcatcataactggcttctgcttgtcatccacaca

SEQ ID NO: 82767 - DNA, 103 bp, Homo sapiens
cggatggccactcatcagaaggactgctcgctgccatatgctacggaatccaaagaatgcagggtgcagcccggaatcccgaggatgtggaccgggagcggcg

SEQ ID NO: 82768 - DNA, 90 bp, Homo sapiens
cgcacataaagacgtacgaagccgtcgccaaaccagaagggaaagatttcagcattcatcgacttgtcctggggacacacacatcggatg

SEQ ID NO: 82769 - DNA, 76 bp, Homo sapiens
aggaccagtacctgcccaggaaactggatgaatttacaggaattgaacccttgagcgaggatgccattatcacagg

SEQ ID NO: 82770 - DNA, 100 bp, Homo sapiens
gtccctcccgctggtcaccactccggcaccagatgtcatttgtcagagtgaaccgctgtggtccccgagttggtgtaagaaagacaccgaaagtaaagaa

SEQ ID NO: 82771 - DNA, 100 bp, Homo sapiens
ccctcctccagccaagcggcccaacacatccccagaccgagagggagcagcctgtggccagagcctagaggagagatcaaagaccctggccgaagtgaag

SEQ ID NO: 82772 - DNA, 100 bp, Homo sapiens
cagatgtcgtgtacaccgattggaaaaaggatctccagaaagccgcctgtccttccagcatgaccctgagacctctgtgttggtcctgcgcaagcctggc

SEQ ID NO: 82773 - DNA, 82 bp, Homo sapiens
agattagcaagcaatgtggcaaaacgaaaaagctcaatgcctcagaaattcattggagccagtgtcctgggctaaacacaag

SEQ ID NO: 82774 - DNA, 75 bp, Homo sapiens
tgcagtgacatgtccagcatgaatcccgaatagtcacagccaggggctttgggccgctgttacagtttgcctaca

SEQ ID NO: 82775 - DNA, 82 bp, Homo sapiens
gcggaagatcgtcgccacctggatgctggaggtgaccagaagtcagcagcttcccagaagccccgaagccggggcatcctcc

SEQ ID NO: 82776 - DNA, 101 bp, Homo sapiens
tccacgttcccaaggttgtgagtgcttatggccacattcctgcatcagctcagccatcgcgatcatcgggacaactctccttttgatggacctggaggaaa

SEQ ID NO: 82777 - DNA, 90 bp, Homo sapiens
cggctccgtcgtggaagcaggactgcgccgcgtcttcctcaagatcaggatcctcatgaccagccaaagagaagaagaattaggaagcat

SEQ ID NO: 82778 - DNA, 83 bp, Homo sapiens
gaaggattcaaatgctagcagacacggtggctactctgcctcggggacgaaagcaggaatactcccccagttgcaagaggcgc

SEQ ID NO: 82779 - DNA, 82 bp, Homo sapiens
cggaactggagccgaggcgcaggtggcgctggatagcctgggctggaagctcttctacgtcacaggctgcctgtttgtggct

SEQ ID NO: 82780 - DNA, 76 bp, Homo sapiens
agaaaagagccctacaatgtgaagatacataagatcgtagccagacccccagaaaccatcaatagatgtctcacaa

SEQ ID NO: 82781 - DNA, 111 bp, Homo sapiens
tggtctggagaccatggagaccctcacggagctgggcgacgagctgaccctgggagacatcgacgtgcaccaattccagctggacatcactgtgaaaatgggacgggataa

SEQ ID NO: 82782 - DNA, 90 bp, Homo sapiens
tggaggagatgtactgtgcttggctggaaaaccccaaaagtgtacataaggattggattcagcatcaaaatacatctactcatattgaga

SEQ ID NO: 82783 - DNA, 90 bp, Homo sapiens
gctattcatacaccatgcaaaacagaaccttccaaatttccttttccaactaaggctttcctcggagacgggtggcatggggagcagcta

SEQ ID NO: 82784 - DNA, 100 bp, Homo sapiens
cgctgccgggcaccgaggaccagctcaatgacaggtactaggttttgacaagcttgcatcatgcgtgagtataagctagtcgttcttggctcaggaggcg

SEQ ID NO: 82785 - DNA, 50 bp, Homo sapiens
tatacccttagaaaaaatgtggcagtgaaatgggtcctgatgaatatgaa

SEQ ID NO: 82786 - DNA, 100 bp, Homo sapiens
gtcagagggacttcagcttaattttcagcagctgaacatactgacttgtggagtcattggctcctattcggtggttttagccattgacagttactggtcc

SEQ ID NO: 82787 - DNA, 100 bp, Homo sapiens
cgacaattgggattgtggatggcattttcacaaggttagcactctacgtatatgaatatctgctccatgtaggagctcagaaatcagctcaaacattttt

SEQ ID NO: 82788 - DNA, 83 bp, Homo sapiens
ctttcatgagcacaggcatcagtcaggcagatgtttgtcgactggaatggagtccctgtgaagcaggaagagtgagggcaggt

SEQ ID NO: 82789 - DNA, 88 bp, Homo sapiens
ttcgcagtggtcgcttcttctccttggatcacagtcaccttctatatagcaccatccccaggatgcaggagccggggcagattgtgga

SEQ ID NO: 82790 - DNA, 83 bp, Homo sapiens
cttgccttgagtcagtgcgccgctctccagcccgcttgaacggcaggatggactccaacactgctccgctgggcccctcctgc

SEQ ID NO: 82791 - DNA, 98 bp, Homo sapiens
agaggaatgttccctgacaatttcgttaagacttgtcagcttgtgggaaagtgacatcagcgtccacccgctaaccctgccctctgcaacctgcttgg

SEQ ID NO: 82792 - DNA, 51 bp, Homo sapiens
tggtggtgggctgttaactgaagttatggaggttttgatgactatggtggc

SEQ ID NO: 82793 - DNA, 108 bp, Homo sapiens
caaagcctgcccagacggctcacctgtgcgggatggaacaaaaggtactccaaagattcaggtttactcacgtcatccagcagagaatggaaagtcaaatttcctgaa

SEQ ID NO: 82794 - DNA, 51 bp, Homo sapiens
cagattcgcagtggtcgcttcttctccttgccattccacagattttgaagt

SEQ ID NO: 82795 - DNA, 96 bp, Homo sapiens
gacaaatccgcgatcccagtcatgcattcctggaatcaagatgtgagaccaagaaattatttctgaagaaagaaatttatgaaatagaatcaaccc

SEQ ID NO: 82796 - DNA, 100 bp, Homo sapiens
ctcagtatctctttattaaactgtatgaggctgggctggcctatcaaaaggaggactctgcccacttccaccagagacacattgagaaggaggaaactat

SEQ ID NO: 82797 - DNA, 101 bp, Homo sapiens
tctggtcagtgaagaatttccagaagaggtatgcccccacctgttccacgtcctggaattcctccaatgactcaagcacaggctgtttcagcgccaggtat

SEQ ID NO: 82798 - DNA, 98 bp, Homo sapiens
ttccgtctgatctatgacaccaagggtcgctttgctgtacatcgtattacacctgaggaggccaagctgtgtgagccgctcccatccctggcagagtc

SEQ ID NO: 82799 - DNA, 80 bp, Homo sapiens
acacaagaccttcgtggaaaaatacgagaaacagatcaagcactttggttgcctgttcactctgatcgtagtattggaag

SEQ ID NO: 82800 - DNA, 100 bp, Homo sapiens
cacagaaggccgacaccctgcacctgagtcaacaaacactcgggtcctatacttcagcatcttttcaatgttctgtctcattggactagctacctggcag

SEQ ID NO: 82801 - DNA, 100 bp, Homo sapiens
ctgagcctcctgcaacacctgcggcctcactgggacccccaggaggtgaccctgcaggactcacaccacccggcaagaactgctcactacggctccctgc

SEQ ID NO: 82802 - DNA, 75 bp, Homo sapiens
acaaaatggctgaagatgaagttgaggttggatggcaagcatgtggtgtttggcaaagtgaaagaaggcatgaat

SEQ ID NO: 82803 - DNA, 97 bp, Homo sapiens
tgagagctgggttctattttccctcctcaaactgactttgcagccacggagagtattgctgacagacagaacgccttggaggctgagtggaggacgg

SEQ ID NO: 82804 - DNA, 100 bp, Homo sapiens
aacttcaggatgttcagctcacagagatcaaaccacttctaaatgataaggtgaactccagtttgcttttgtgtgcttcctgctggggaatgtgtacgag

SEQ ID NO: 82805 - DNA, 98 bp, Homo sapiens
agcaatgagtgggctaaagtgaaacattcagcatccctgtctggtatgccttctcggacgatttcctgttcagtgtctccattttaagtgggattctt

SEQ ID NO: 82806 - DNA, 100 bp, Homo sapiens
gagacttaaaaggccctcagaccacaggattaatgaataatccagaatggctactctgatctatgttgataaggaaaatggagaaccaggcacccgtgtg

SEQ ID NO: 82807 - DNA, 88 bp, Homo sapiens
ctccctctgcccccccttccccacgcaaccccagatccatttacactttacacactgccagtgaaagatgtagaagataaacctgaac

SEQ ID NO: 82808 - DNA, 100 bp, Homo sapiens
gcagttttcttctttgagaaactatcccagatatcatcatagagtcttctgctcttcctcaactaccaaaggtttggtgcacctcgatttggaggaagta

SEQ ID NO: 82809 - DNA, 82 bp, Homo sapiens
ggggctggaacacctcgccaaagcagagaaatactcacacatatgggtgtaaatccgctagaagctgaagaactcatccgtg

SEQ ID NO: 82810 - DNA, 90 bp, Homo sapiens
ccgggaagccacatgcagccactgcaagagtcaggttccgatgatcgcgctgcagaaagtcattgggtggtacagattccggcgcaatac

SEQ ID NO: 82811 - DNA, 75 bp, Homo sapiens
aagctggggaagtaacgtttgcggatgcacaccgacctaaattaaatgaagggaacagaatgggtagacccagag

SEQ ID NO: 82812 - DNA, 100 bp, Homo sapiens
gcagctctatgagggatgtgtggacactgcactgaagacagcatcagcgagagctttctaactgtcaaaggtgctgccctttttctaccacggggaaatg

SEQ ID NO: 82813 - DNA, 100 bp, Homo sapiens
cctggaccacggcgcagacgcgggcgagctgcggctcggacgccagcggacacgcgggcgagcctcctctattggcccaggaagcccacccagccccgcc

SEQ ID NO: 82814 - DNA, 100 bp, Homo sapiens
cgaactcaacggcgacataatcaccaatcttttcagtgttcccaccgaggaggagagctgggaatttcccttcgtccagacggaagggttgacattagag

SEQ ID NO: 82815 - DNA, 50 bp, Homo sapiens
aagtgctccgtcgcccttgcctccaggcatgacagcaagcgctgtggcgg

SEQ ID NO: 82816 - DNA, 97 bp, Homo sapiens
cctgccctcagccgcccgctggccgggagcggagcccctgtggctcacccgacgactgccacccatcaaagaagctaagcctcggttacagaagctc

SEQ ID NO: 82817 - DNA, 95 bp, Homo sapiens
ctacaagaagagggcggagcggagacgggagtattatgaaaagatcgtatggcgtcatcattgtgggcaacccgaaggcactatcaaagcagccg

SEQ ID NO: 82818 - DNA, 88 bp, Homo sapiens
cggctggagtcggaggcgatatttctaggggtgtacttgttggggtcagggtcctggtccgcgccagagcccagcgcgcctcgtcgcc

SEQ ID NO: 82819 - DNA, 75 bp, Homo sapiens
tttcgcctgcagctgctcaccgactccccatccccaggatgtcaacctcagtccctcaaggccatacctggaccc

SEQ ID NO: 82820 - DNA, 100 bp, Homo sapiens
ctcaatgagcacatgaccagcttagcttctgtcctaaaggtgaaaggtgtagcagtcactcggcctacacccacagcatcgaccttgtgaacccagcgac

SEQ ID NO: 82821 - DNA, 101 bp, Homo sapiens
agtgtcagtcatcccacccacggctctcaacagcatcgactccgatgacagaagccctgcagcagctgcagaaggactctgaggccatccgcagccagtac

SEQ ID NO: 82822 - DNA, 74 bp, Homo sapiens
agaaattgtatacaggacctggcttagctattcattgcatgcagaaaaactgcttaaggttgaaaagagaaatt

SEQ ID NO: 82823 - DNA, 99 bp, Homo sapiens
ttcgtcctacattcattggaactgagaatgacatcttcgagtggtccagggaccaccgagcccaccacaagtactcagagacggatgctgacccccaca

SEQ ID NO: 82824 - DNA, 75 bp, Homo sapiens
actgttcagggatgggggcccatctgatgaccatcagcacggaagctgagcagggatcttgctgcctttgacaaa

SEQ ID NO: 82825 - DNA, 100 bp, Homo sapiens
acatcaggaatatttgtgttttggctcatgttgaccatgctagagatgatcgctatggaaaatcctgcagacttgaagaagcagttgtatgtggaatttg

SEQ ID NO: 82826 - DNA, 100 bp, Homo sapiens
aaacagattgagccagaaggaagacaatgctgggtggagtttgtgaaactggccagtgagcatgacgtcgtgaacttgggccagggcttcccggatttcc

SEQ ID NO: 82827 - DNA, 85 bp, Homo sapiens
gagctctccaggaaagccaagctggcggccaccgcaggggccctccacattctggccgttttaagaagaggagaggtcactcaat

SEQ ID NO: 82828 - DNA, 100 bp, Homo sapiens
gcaagttagtggattaaaatctcccaagaggaatgacaaacaaccagctcttcaggcattcgtgatgagttcccctgaggtaacaggagaatccccagag

SEQ ID NO: 82829 - DNA, 75 bp, Homo sapiens
atgggcacggccgaggacttcgccgaccagtttctgtgtttgaagaacatacgcaccttcctgaaagtctgccac

SEQ ID NO: 82830 - DNA, 107 bp, Homo sapiens
ggattcctcagctacgaggaggcgctgaggagagattcggagttgggagatggaaatgaaggcagcatttctcaaagccaggtcgtctagcaaggaagccaactgtg

SEQ ID NO: 82831 - DNA, 76 bp, Homo sapiens
cacgacctaccctgatggtttggaagttgtgcagtttcttaacaagcagacagtgacttttttgaacgaaccattc

SEQ ID NO: 82832 - DNA, 75 bp, Homo sapiens
gagatatggcgcaactgcggcgcgcggctgccgagtgatagagcagaaggaggttcccaatgggctcagggacga

SEQ ID NO: 82833 - DNA, 118 bp, Homo sapiens
tcgctccgtggccttagctgtgctcgcgctactctctctttctggcctggaggctatccagcagatgccctgtatccaagcccaatatgggacaccagcaccgagtccgggaccccgt

SEQ ID NO: 82834 - DNA, 100 bp, Homo sapiens
caaggatgtcaggcagttctggagcaatgtggagaagattctgctgaagtgatccagtctcgagtgaacgaccaggagggccgagaggaattctatgtac

SEQ ID NO: 82835 - DNA, 100 bp, Homo sapiens
tgatggcaataatttgcttgatggcttagaactctccacagccatcactcatgtccataaggagagaccacaccgctgttccagaccctctccatggatg

SEQ ID NO: 82836 - DNA, 100 bp, Homo sapiens
gagctgaagcacctctccagcggggacctgctccgggacaacatgctgcggggcacaggtctattattagcagaagatttttctgcatagttggcacgct

SEQ ID NO: 82837 - DNA, 74 bp, Homo sapiens
tggagaagctgcaggcgcgcctggccgcgaacccggaccctaagaagaaagagctcttggaggaagttggccag

SEQ ID NO: 82838 - DNA, 82 bp, Homo sapiens
gtgttctccaaataccagctcgacaaagatggggttgtcctctttaagaagccgcggcgagtcctttgcacatgttggcaac

SEQ ID NO: 82839 - DNA, 75 bp, Homo sapiens
cctttctctgctttaacgtacttttaaaagcagcctcgtcttacagcgtgactgcaaagaaaaagacttttgttt

SEQ ID NO: 82840 - DNA, 100 bp, Homo sapiens
ctcgaaggcccgcggcgccccgtgctgcagggaagccctatggggcggatgacttcctgcctgtgctcatgtatgtgctggcccgcagcaacctcacgga

SEQ ID NO: 82841 - DNA, 75 bp, Homo sapiens
gcagtcaactcctggaccactagtgccctgtctctgcccctggtggtcatcgtccatggcaaccaagacaacaat

SEQ ID NO: 82842 - DNA, 75 bp, Homo sapiens
ttggcattgacatttaattttagggtcctttatatagaagggagagtagatccggacgctgcggctgaagatctt

SEQ ID NO: 82843 - DNA, 96 bp, Homo sapiens
actatcctcctggtggttctgtataaatacaggtgctataaggacatcaccttgaagatacagtttttgaggcttcttcagagcttcagtgaccac

SEQ ID NO: 82844 - DNA, 75 bp, Homo sapiens
ctcagaagactagaaggaagttcctggccattcaggtgtcccgacccaggctaagcttgagcatggctgagcagg

SEQ ID NO: 82845 - DNA, 75 bp, Homo sapiens
ggcccgtactgcacatcgtggtggtcggatttcaccacaagaagggctgccaggaatctgcaagcagaatatgac

SEQ ID NO: 82846 - DNA, 101 bp, Homo sapiens
gcgccaccccccgcgggccgcaggggctcatgcagccgccaaggtggctattatcatggaaaactaatttttcccagagaatttcctttcaaacctcccag

SEQ ID NO: 82847 - DNA, 75 bp, Homo sapiens
ccctggagtaaccctcactggagaatccagagacagggtgttggtgacagtcttccggcagactgtggttccgcc

SEQ ID NO: 82848 - DNA, 98 bp, Homo sapiens
cgactgtggcaccacccacagccgtgcggccagagtgagcagcggttccatcgcagtgaacgccgactcttcggtgcagttgttggccgaagaggccg

SEQ ID NO: 82849 - DNA, 100 bp, Homo sapiens
tgcgtttcatcaatctcttgctcatttcttctgtcttgacgtctgcctcccagatgaccaaagtgacacaggccggaaggtggtggtcgtacgctgtgaa

SEQ ID NO: 82850 - DNA, 83 bp, Homo sapiens
agggtggacctgaggcccccatggagaagggacgggcaggatgtgtgaagatgccttaagaaaaaataagagcttaattgggc

SEQ ID NO: 82851 - DNA, 100 bp, Homo sapiens
atcgtctgtttgtgcctcggcttctggcgatatcagttttagagaatgtggcgtggagaaattctcaaggaaagagtaaaatgctggtgatgtgctgagg

SEQ ID NO: 82852 - DNA, 83 bp, Homo sapiens
gcggcacggagacggcggcagcgctggactaggtggcaggcttcaacggaccacaccaaaatgccatctcaaatggaacacgc

SEQ ID NO: 82853 - DNA, 129 bp, Homo sapiens
ctttcttgatgaccttggaacaaatctaaaagaagctgccagacttggtattcacaccattaagatgctgcagttggagaagaaacttgaacgtgaacttgaggatgatgcacgagttattgcttgccg

SEQ ID NO: 82854 - DNA, 98 bp, Homo sapiens
actttaaagtccgcttctttgtgttaaccaaagccagcctggcatactttgaagatcgtcatggggtagcagcaattgcagagacagatgaatctgca

SEQ ID NO: 82855 - DNA, 100 bp, Homo sapiens
gagctgtcactttgggagcggttctgtgccaacatcataaaggttcagcagactgtacaggatctttttggcagagccccaagtaaagctgtcaatcctg

SEQ ID NO: 82856 - DNA, 100 bp, Homo sapiens
agactcgggctgagtttgcggagaggtcagtaactaaattggagaaaagcattgatgacttagaagacatggagattaagtagcttgcccaagatcaccc

SEQ ID NO: 82857 - DNA, 100 bp, Homo sapiens
cgtgtctctggattcaagtcccaggagtcctgaccagagagcaggatttaccgaggagcattatggatcctgggagaatactgtagtaccaaggaagaca

SEQ ID NO: 82858 - DNA, 89 bp, Homo sapiens
tgatattgaaagggctgtttatctgctcaggcaatcctttatcacaggatattctcaacttataccaggacccagatggaacccgaaag

SEQ ID NO: 82859 - DNA, 82 bp, Homo sapiens
ccgagcccggtactcagccttttaaaaactggagtttcgccgtgaggaagatgcggaaaaggctgtgattgacttgaataac

SEQ ID NO: 82860 - DNA, 50 bp, Homo sapiens
tttaaatttccttgtctcaagagaggaggcaggtggaagtcatcataaag

SEQ ID NO: 82861 - DNA, 75 bp, Homo sapiens
ccaggacccactggaagcctagaaatgggttcacctttagatgttcttaaagatgaaagggttcagtactggatt

SEQ ID NO: 82862 - DNA, 75 bp, Homo sapiens
gaggaagaaggtggggaggaagaggaggaggaagaagaaggtgatggtggcggcagagcgacgggccagcgagga

SEQ ID NO: 82863 - DNA, 100 bp, Homo sapiens
cgcccgtggtggaggatgaggagatggaggcgtcgggcgtgagcggaaatgaggaggagatggtggaggaggctgaagggggaacacacctgaaactaga

SEQ ID NO: 82864 - DNA, 100 bp, Homo sapiens
ccacgacgaggcggtgcaggcgttgaagcgcgcgggcaaggaagtgctgctggaagaattcagcttagagaactatcaacacaggacaatgcaagcccat

SEQ ID NO: 82865 - DNA, 99 bp, Homo sapiens
agagagaggtggacagatctgagagatactgagcaataccttctgacacaggcccagccagggccctgggagtaccacagtgcagtcctcactagccag

SEQ ID NO: 82866 - DNA, 90 bp, Homo sapiens
taaactgccagaattttcaaaccggccaccagccgaccgctgtaaggaggtacagcagatccgcgaccagcaccccagcaaaatcccggt

SEQ ID NO: 82867 - DNA, 82 bp, Homo sapiens
tcctctgctgccagtcccctgccccgggcaaagcccatctggtccgccgagcaggcttcttctcatatcggtaattccactc

SEQ ID NO: 82868 - DNA, 75 bp, Homo sapiens
ggccgagctgcaaccgcctccgcctattacagaggtcacgagaagagaatgccttctagatgcaaaatcacctcc

SEQ ID NO: 82869 - DNA, 100 bp, Homo sapiens
agcttttgtagagaagtgctgcaaggctgacgataaggagacctgctttgccgaggaggcaactttggctttggggattcacgtggtggcggtggaaatt

SEQ ID NO: 82870 - DNA, 100 bp, Homo sapiens
tggggaggtggcctgcgcttgtagagactgcatccccgagacgatggcggagggagataatcgcagcaccaacctgctgaccacatggttgagaaaggag

SEQ ID NO: 82871 - DNA, 97 bp, Homo sapiens
ccagtgttcaccatcctggccccggaagctgtatgacaaaattaacacaaagtcttcaccacaaatcaggaatcctccaagcgatgcagtacagaga

SEQ ID NO: 82872 - DNA, 118 bp, Homo sapiens
aggattggttcatcaccctctacaacgtgctgtacaccagcctgcccgtgctcctcatggggctgctcgaccagagaaaatacggtacatgtccccatggaggatatggcttgggctt

SEQ ID NO: 82873 - DNA, 83 bp, Homo sapiens
gccgacatgacgcccgaggacccagaggaaacccagccgcttctggggcctcctggcggcagaaagcgtggatacccatcaac

SEQ ID NO: 82874 - DNA, 101 bp, Homo sapiens
tgtgaaaccagtaacaacggaacctattgtcagtggctgctatgcagcaggtgcagcctggtctctcactgagtctctactccacaaaggcaacgactggc

SEQ ID NO: 82875 - DNA, 98 bp, Homo sapiens
ggatgcagcagataaccgcaagataactcctcttatggcagcatttagaaagatatgtcttgtcgttcaagacttgcaacactaaacgagaaattgac

SEQ ID NO: 82876 - DNA, 95 bp, Homo sapiens
cagctcccagtttcttcttttcgaggcataaacttggaggaggcagtggagagagcatcctggtatcacagcttcagcatggactgacgttagag

SEQ ID NO: 82877 - DNA, 75 bp, Homo sapiens
gagcacagcccccagcgagaagggagccacctggaacgtcctggagttgtaagacgttcatcgccgtgttatcct

SEQ ID NO: 82878 - DNA, 100 bp, Homo sapiens
gtataattttcctcacacacagttacttgccaagacgattgaagaagccaccattcttcagagggcaatgaaggcacagaaatggaagtaccagcagaag

SEQ ID NO: 82879 - DNA, 99 bp, Homo sapiens
gaaagacgctcgtcaccaggacccaaggaaccactgtggaaagaaataacttgatgaggttatcacagagcattccatttacacctgtgcctccaagag

SEQ ID NO: 82880 - DNA, 80 bp, Homo sapiens
accatcctgctctcaactacaacatcgtttcaggggaattgcaacccagtgaagaagttacctggaagtaaagactggct

SEQ ID NO: 82881 - DNA, 101 bp, Homo sapiens
gacctctgagaaagtgagccagaaacatgctgagcctttgacagcagggagaaggttttaaggtgaaaacgaagaaagaaatccggcatgtggaaaagaag

SEQ ID NO: 82882 - DNA, 82 bp, Homo sapiens
ccttcacctacagcatcgtgggcgccggctcccagtttggggtcccctggaagtgacgctgactcagccagtgaggagcggg

SEQ ID NO: 82883 - DNA, 83 bp, Homo sapiens
acatcagtttctggaagaagaagaagagcatgatcggcatgtccaccaagatataacacgtgggaaccggaggagaacatcct

SEQ ID NO: 82884 - DNA, 75 bp, Homo sapiens
gagaatgagatgaccacaattcactatgatagaattacttctctacagctactggtcagaagttatatgtaaggc

SEQ ID NO: 82885 - DNA, 75 bp, Homo sapiens
ggcagaagtgggccctgtgaccagctgcactggtttcgtggaaggtccccttcccctgagcccatctacaatagc

SEQ ID NO: 82886 - DNA, 100 bp, Homo sapiens
caaggcactgctttttcatgacgagtgatagattcgtgtggcctttcaaatgattgtgaagtggtggaaatggatccaaaataataagtgacttctctac

SEQ ID NO: 82887 - DNA, 100 bp, Homo sapiens
ggcaagtgctccaacccagcagtcgttgagcagcggttccatcgcagtgaacgccgactcttcggtgcagttgttggccgaagaggccgtgacgctggac

SEQ ID NO: 82888 - DNA, 60 bp, Homo sapiens
ggcagctgctgagttctcggtgaagggctccacgtgttccccacgtttgtggcgtacgag

SEQ ID NO: 82889 - DNA, 97 bp, Homo sapiens
tgagggcacgtgtttgcggttcagccctttgatgaccgcagcaggattctcatcgctttggaaggcacctgaaagaagcaatgactgacatcatcac

SEQ ID NO: 82890 - DNA, 90 bp, Homo sapiens
agcagtaccagcgagacacagagcagctccgcaggagcatgcaagatgcaacccagatgctggagagcatgattaccaagccccggccaa

SEQ ID NO: 82891 - DNA, 71 bp, Homo sapiens
cggcctccatgacctgcgctctcagctgaccatcatcccgcagcctagagtcctggggagcttctgtccac

SEQ ID NO: 82892 - DNA, 74 bp, Homo sapiens
catcttcgactccttcccgacctactcgccgaccttcatccgcgggaccagtccaacgtcaggcggatgcacac

SEQ ID NO: 82893 - DNA, 75 bp, Homo sapiens
gacgccttcaactccacttttatctccaccataggctgaaggtgatgtggccgccctcaaccgacgcatccagct

SEQ ID NO: 82894 - DNA, 115 bp, Homo sapiens
tggttctgtgggctccgtggcaatgaattcttctgtgaaacaacatgcaggccatctatgtggccttgggggaggcagtagagctgccatgtccctcaccacctactctacatgg

SEQ ID NO: 82895 - DNA, 49 bp, Homo sapiens
gcctcccaaatagctgggactacaggttttggtatcaggatgatgctgg

SEQ ID NO: 82896 - DNA, 100 bp, Homo sapiens
tcctacttcgagcctccggtggaggagagcgccttggaacgccgacctgaaaccatctctgagcccaagacctagtaacacaagtggcaagacagccggg

SEQ ID NO: 82897 - DNA, 100 bp, Homo sapiens
ctttgtgtgaagttgacctggtcaagggcgggcactggtggaaggcgctgattcccagttctcagaatgttcttcggaaagtgcaacatcaagatgcttt

SEQ ID NO: 82898 - DNA, 90 bp, Homo sapiens
tgaaaacgttaaatttgattcctaaaaggactcaacatgattatgatatgagggtggatgatttccttcgtcgcacacaagctgttgtca

SEQ ID NO: 82899 - DNA, 82 bp, Homo sapiens
tgggcggtgggccccagccccacagaccagcccagcattcagacaatgcagatcttcgtgaagactctgactggtaagacca

SEQ ID NO: 82900 - DNA, 82 bp, Homo sapiens
atgggggccaccgttgttatgtacctgtgcctgaaggctggattgacggtggacccagtgattgtggaggcgttcttggcca

SEQ ID NO: 82901 - DNA, 99 bp, Homo sapiens
gtgatgacaagaaggagagatctctgctgcctgcattgagggaattaaggaagttcactggagtaaaatggaggcctcagtaatattacccattctgaa

SEQ ID NO: 82902 - DNA, 96 bp, Homo sapiens
tctcttgcccaaaccacgatgggaatcttcacagcgaggtggagaagcccctgatgaacttccgtgagaacttcaagaaagacatgaagaagtgcg

SEQ ID NO: 82903 - DNA, 98 bp, Homo sapiens
aacttaggtatttaagtactgaaagtgagaaagatcagtctaaagaaaaggagaagaaagtgaaaaaaacaattccttcctgggctaccctttctgcc

SEQ ID NO: 82904 - DNA, 87 bp, Homo sapiens
gtccttctccactttcgccagcccgtgccgcgagcgcggcctgcaggagattttgcaagaacgaggctcaaggatgtgagggacaca

SEQ ID NO: 82905 - DNA, 83 bp, Homo sapiens
tggaagcagccgatccagcctgcggagcctgtggggcagatcgagacgctccctccggagctcttccagtgccggaagctgcg

SEQ ID NO: 82906 - DNA, 82 bp, Homo sapiens
cacagttcctaccttatgagctcggttttcttatgcttataagagtggaacaggccagctgcgggccgtccagcggctgtgc

SEQ ID NO: 82907 - DNA, 75 bp, Homo sapiens
gacgagcctacttcaagagaaataaggtccagtggcattgcagagcacggatggttgcaggagccaacttttaca

SEQ ID NO: 82908 - DNA, 83 bp, Homo sapiens
ctgaaacgccgagcgcaagcccaccctccagcacctcctcgcataaaaaaggccggggtcagaaagaaaaaagagggtcccgg

SEQ ID NO: 82909 - DNA, 83 bp, Homo sapiens
tgcgaaggtggcggcgctgctgctcgggctgctcttggagaatccacattcatctcaatggaaggatcctgccttaagtcaac

SEQ ID NO: 82910 - DNA, 75 bp, Homo sapiens
ctgagggccttcgagagctaccgcgccagacagggactggtgattgcagctggaagtgcccatgaccgagctggc

SEQ ID NO: 82911 - DNA, 99 bp, Homo sapiens
agcacgggatcccagcctcaggcctgcacggacggtgttggttgggaggccacaagaggaagctgaatgaagaggacgccgccagcgagtccagcaggg

SEQ ID NO: 82912 - DNA, 90 bp, Homo sapiens
atgctccagtttgagaaacctggatctgcgatctgtttgtgaataagaaagccttgagttttgtgaaaaaccggagaagagaaactaaaa

SEQ ID NO: 82913 - DNA, 80 bp, Homo sapiens
aggtgttcgagaacgaccccgagacggtgaccctggcaaagatgagagtgcacatttcgtcctgcctgaaggtccaggag

SEQ ID NO: 82914 - DNA, 100 bp, Homo sapiens
gcggagcttcgccaaggctggcgcagtcggtggcttctggcacagcagcttaattgaccggaacctcattgattattttgttcccttcctccccctggaa

SEQ ID NO: 82915 - DNA, 103 bp, Homo sapiens
aaataccatcttcaactgtacaagaagctttacacaatttccttaaggttcaacagagtttggaaaagatttctaaactggagcaggaaaaagaacattggat

SEQ ID NO: 82916 - DNA, 82 bp, Homo sapiens
gggacgagatctagaatcaactgagagagatgcttaaaaatcaccagttactttaatgagctggagtgcagtggtgccatct

SEQ ID NO: 82917 - DNA, 101 bp, Homo sapiens
gcgtgaccgagagcgcgaatatcgtcatcgttagaagatgacagcgcttctgctgcaagtagcatggaggtgacagaccgcattgcttcactggagcagag

SEQ ID NO: 82918 - DNA, 100 bp, Homo sapiens
gttggaagcagccgatccagcctgcggagcctgtggggcaggttgtggcagcactgcctgaaggtatgagaccagattctaatctttatggttttccatg

SEQ ID NO: 82919 - DNA, 104 bp, Homo sapiens
gggaagcccaccgactttgaggatctggaggacggagaggacctgttcaccagcactgtctccaccctagagctctctatcaatatcagctcacatcattgaaa

SEQ ID NO: 82920 - DNA, 100 bp, Homo sapiens
atgcccatgcgagtacctgaggaagaggctgataaaataccagtaatgcgtggacagtggtttattgacggcacttggcagcctctagaagaggaagaaa

SEQ ID NO: 82921 - DNA, 100 bp, Homo sapiens
acaaattcatcaaggagctcatcaaggacgggaagtcactcataagcgcgctcaagactggagagatttaccagcatgagaattaagaaggagaaggaaa

SEQ ID NO: 82922 - DNA, 101 bp, Homo sapiens
caagcctggaggactccccagagaagcagccaccaccttcctaccagaatcggcagtcctgtgtgacgggggctgttgggggccagcaggaggatgaggac

SEQ ID NO: 82923 - DNA, 100 bp, Homo sapiens
attggaggccgtgggcacgctctttactccatgtgtgggacattcattgcggaataacatcggaggagaaggggctaagtgatggatcttgtactccgtg

SEQ ID NO: 82924 - DNA, 98 bp, Homo sapiens
ggcgcgcctgccgcgcggggcaggtgaccaagtcagccatcggggtgctctaactgggggttattatgacacaaggaagtctcgacttgaattgcaaa

SEQ ID NO: 82925 - DNA, 73 bp, Homo sapiens
tccatctcaggatgcccactgtatcataacctctcagctgacgaatgcaagtttggatttaggtggcgagtag

SEQ ID NO: 82926 - DNA, 83 bp, Homo sapiens
atttgcggagagctccctggtgactgccagcccaagatttctataattggcctgatgaatcctttgatgaaatggacagtaca

SEQ ID NO: 82927 - DNA, 75 bp, Homo sapiens
cacatcaagggcagccaattactgagctgctgctgttcttgaagggtttttcagagtcggagaggaacaagctag

SEQ ID NO: 82928 - DNA, 88 bp, Homo sapiens
tctagcacatcacctacactaccacggccacactcaccactccatggccacacagctgataggaagatgtcttcaggaaatgctaaaa

SEQ ID NO: 82929 - DNA, 82 bp, Homo sapiens
gcagcctcttcgagcgccgcggacgcgtcatcgagtgtgacgtggtgaaagagtcatcttagtgggatttggggaagcaaca

SEQ ID NO: 82930 - DNA, 98 bp, Homo sapiens
ggaaacaaaacctacacagcttacgtggacctggaaaaggactttgctgctgagtctggagaggtgttggtgaatgttaaggagcactcccggcagat

SEQ ID NO: 82931 - DNA, 100 bp, Homo sapiens
ccaaaatgcacagaattaccaaaaacttctgcatccatattctggtgtaactgtggacatcaccattcaggaagtcattatttagaagcaaggtccttga

SEQ ID NO: 82932 - DNA, 100 bp, Homo sapiens
ccagccacccccggagcgcagtccccgaagttgattatggaagattcccacaagagtaccacgtcagagacagcacctcaacctggttcagcagttcagg

SEQ ID NO: 82933 - DNA, 90 bp, Homo sapiens
gaaggagcagttggttcaatctctgggtgtggccgacgacgatgccctcgctgaggagcgcatgcggagaggccagaacgccctgccagc

SEQ ID NO: 82934 - DNA, 90 bp, Homo sapiens
ggtgtagagaggaccccgggacatctgaaagccaggaaatggatgtacagttacccagcacgtgtacctcctcctcctcctattgctcgg

SEQ ID NO: 82935 - DNA, 100 bp, Homo sapiens
ggctctcctgatactaacagttttacgatttaaaacttcgccagaatttggatctggacaactctcctctgtccccaccttcaccaaggaccaaaagcag

SEQ ID NO: 82936 - DNA, 83 bp, Homo sapiens
ataaattcccggaaccgcgattcggcgtgtcagctctaagcgaaagacatgaggcctcagcctgaaatgaggttgttttgagg

SEQ ID NO: 82937 - DNA, 100 bp, Homo sapiens
gctgatagcaccatcttcaaatttgtggaagcttatactggtcgaattgacaaatcttaccctacagtatgtggccacacaggaccagtgctggacatag

SEQ ID NO: 82938 - DNA, 75 bp, Homo sapiens
ctgagcgcggctgcccaggttgacctttctgcgggaggtcaaaatgcagatcttcgtgaaaacccttaccggcaa

SEQ ID NO: 82939 - DNA, 74 bp, Homo sapiens
gcaggctgagcagctgcaaacccccgaaaaagaatgtgaaagatgttgcagaagtgttccagaagtggctgaag

SEQ ID NO: 82940 - DNA, 83 bp, Homo sapiens
atttgaaccatgtttggattgaagccgcctctgtattacttaccaggaactgtggctgcaccatctgtcttcatcttcccgcc

SEQ ID NO: 82941 - DNA, 100 bp, Homo sapiens
gagatcgtcaagtctcccagcgaccccaagcaataccggctgagtcatcactagagagtgggaagggcagcagcagcagagaatccaaaccctaaagctg

SEQ ID NO: 82942 - DNA, 83 bp, Homo sapiens
ggcgaagggaatcgcaaggctcttccctgaccattttctactgtccctgcgcgagaggaggggataccaactggagcctgacc

SEQ ID NO: 82943 - DNA, 75 bp, Homo sapiens
gcccacccaacgcgaagacggtaacccgtgtgactttgactgggtaggtggagagttttcaaacactgttatcgg

SEQ ID NO: 82944 - DNA, 75 bp, Homo sapiens
agcagaaaattacctaaatgcactctttcgaaagaaaggtgcaatggatgagcttcatagtctggatccaagaag

SEQ ID NO: 82945 - DNA, 87 bp, Homo sapiens
actgcatggaaacccacactcgggcctgtgttgagcaaccacgtttgaccaagctctactccaggaagtgaaaatgtgctgcctcga

SEQ ID NO: 82946 - DNA, 51 bp, Homo sapiens
ttacaacccccaggaactagtggtgctggagaatctggtaaaagcaccatt

SEQ ID NO: 82947 - DNA, 75 bp, Homo sapiens
ctctttggacctagcaggttcggcggccggggatactgaggaagatgaggaggaagatgagaaggacaaaggaaa

SEQ ID NO: 82948 - DNA, 100 bp, Homo sapiens
ggagcggctgaagcgcgtgcgcatggacagtcattttgtttactcattcagccctgttgcaggtcccaataaactcttcataaggttgacagaagcaccc

SEQ ID NO: 82949 - DNA, 83 bp, Homo sapiens
aaaactgtcacttcaagtacagaaaagggcttgattgttccagtctcatcagattttccatgtcctggtggtggcagcagcct

SEQ ID NO: 82950 - DNA, 100 bp, Homo sapiens
tggatgctttgaaatctgataagaaagtacggaccataataatcaggagtgaagtcccagggatattctgtgctgagacaaagcatggaggacacaagaa

SEQ ID NO: 82951 - DNA, 100 bp, Homo sapiens
aggcctggaatttgattaactcattcaaggttacccagttgtggcactaaggaaaacagatcatctctccctagacaaagccaccatcccgcccgaaatc

SEQ ID NO: 82952 - DNA, 96 bp, Homo sapiens
aaacgggcagccatggccctccacagcccgcagtacaagttgtgcaaagtgaggaagattactgtgggagtgaagggaatccctcacctggtgact

SEQ ID NO: 82953 - DNA, 100 bp, Homo sapiens
tttggccaaattgggcgagggcacaaaataaccacttaccccttctcaccgaggaagagcgggagaaaggttgccagagtctgccctccgagacctcatc

SEQ ID NO: 82954 - DNA, 83 bp, Homo sapiens
aggcttcgcccggctttgcagcggggacttcggcggcggcgcctcaggcacctcggcccggggtttccaggcctgaggtgccc

SEQ ID NO: 82955 - DNA, 49 bp, Homo sapiens
gcggattctacattgcctccggaggtcctgcagacattcgctttgtctg

SEQ ID NO: 82956 - DNA, 74 bp, Homo sapiens
cgcggcttaaatgatgtattttgtgatcgcagcgatgaaaggcaaaaactgattattccaagtggaagttgccc

SEQ ID NO: 82957 - DNA, 75 bp, Homo sapiens
ctgtggatgaatttgcttttctggaagccctgtatgatgagattcgtcagtttcgcaaggcctgtggggaggctc

SEQ ID NO: 82958 - DNA, 51 bp, Homo sapiens
agatggacggtcactcagcctatggagaaaaagcttgtggtgaaggggggc

SEQ ID NO: 82959 - DNA, 83 bp, Homo sapiens
cgacatatttcctgtcaccaacaaagatttcaggggcaagattcttgccaagagaattaatgtgcgtattgagcacattaagc

SEQ ID NO: 82960 - DNA, 100 bp, Homo sapiens
cacgtggagagcggaagaagagtgtagttgagagctcggccccaggagccaataacctgcaggaatgatgagaagacagcagctgattacaagattttag

SEQ ID NO: 82961 - DNA, 50 bp, Homo sapiens
aatgctggcaaagtggaaaaatgtgcggtatcaacttgaactgaaggatg

SEQ ID NO: 82962 - DNA, 75 bp, Homo sapiens
ccacgttccactttcctcaccccaaatatgtggacctgtacaaggtgaagatcttcgaggaggacttccagaggg

SEQ ID NO: 82963 - DNA, 82 bp, Homo sapiens
gagtcggaggagccgcgggcggcgcggcccagctcgttccaggttttaaaatcaaagatgggaaaatcggagaaaattgccc

SEQ ID NO: 82964 - DNA, 83 bp, Homo sapiens
ctacttttcaagacaccaagtgagaggccaaccagatctgagtgggacatacttttgaaggatgtgcaatgttcaatcataag

SEQ ID NO: 82965 - DNA, 83 bp, Homo sapiens
cggacagcgggctggagcctgacgagctggcgggtactccaaagattcaggtttactcacgtcatccagcagagaatggaaag

SEQ ID NO: 82966 - DNA, 82 bp, Homo sapiens
gctcgatcttgggacccaccgctgccctcagctccgagtccagggcgagtgtggacgaatgtggaacctcgctctgtggctg

SEQ ID NO: 82967 - DNA, 51 bp, Homo sapiens
ggcgcccgccatggtgaacagctcggcaggagtagcccatcgaagccagag

SEQ ID NO: 82968 - DNA, 89 bp, Homo sapiens
tattctacttcattcagaagatcaggtacacaaatgcacgcgacaggaaccagtgttcaaagcttctttcagacaccagtgttattcag

SEQ ID NO: 82969 - DNA, 75 bp, Homo sapiens
attgacttggcaagggcttattgttcctagcctgctcagcctgccggtctgggtgctgatggatgaggacgtccg

SEQ ID NO: 82970 - DNA, 50 bp, Homo sapiens
gtgatggggaaggatctaataaccatttgtagaagactatgaacctacca

SEQ ID NO: 82971 - DNA, 90 bp, Homo sapiens
gtgcgaacaatggtggatccaaactcacgcagtgaccccaagcttcaagaactgatgaagatgccggtggccgtgggtccctacggacag

SEQ ID NO: 82972 - DNA, 75 bp, Homo sapiens
ctgaagaataattctgagctgcttaacaacctgggcaacttcatcaacaggggaagccatatgtttttgaccgtg

SEQ ID NO: 82973 - DNA, 50 bp, Homo sapiens
gtcaggcggagagacccgccgccaggtgtttgagaagtcccccctgcggg

SEQ ID NO: 82974 - DNA, 95 bp, Homo sapiens
gattcgtggtgaaggtccggggcttgccctggtcttgctcggccgatgaagtgcagaggtttttttctgatcgagacatgtaagcagcatcatgg

SEQ ID NO: 82975 - DNA, 100 bp, Homo sapiens
agaggtttcagaagaagatatttgcaatattctgcatctttgcacccagaatgtctacatattcaactttccccgccggggtgcctgtctcagaaaggag

SEQ ID NO: 82976 - DNA, 50 bp, Homo sapiens
cgactggggaaacagcaggatccagaatttcctgttgagatataaaggcc

SEQ ID NO: 82977 - DNA, 75 bp, Homo sapiens
tgtgggctggcactgtggtcgcatcagggatgcttgaagatggaaagaaatttgattcctcccgggacagaaaca

SEQ ID NO: 82978 - DNA, 100 bp, Homo sapiens
ggtctggctgtggcggaggagcataagaaggttctgctccagacgagcccttaccacgttgactcactcctgcagctcagcgatgcctgccgctttcaag

SEQ ID NO: 82979 - DNA, 98 bp, Homo sapiens
cgcttctacagatacatgggcagaggggaagagagtacaactacaaattacttagtgtttgcaagagcagacccttggacctggtgtttatcattgat

SEQ ID NO: 82980 - DNA, 82 bp, Homo sapiens
ccgcgaggaggcgcgggaggtgttcgagaacgaccccgagacggtgagcacctgcggatctgtccccagggctacacctgct

SEQ ID NO: 82981 - DNA, 101 bp, Homo sapiens
ctacagccaagctccaagtcaatatagccaacagagcagcagctacgggcagcagaaggcttcgtgacggagttatcagagacattgagaggcaaattcgg

SEQ ID NO: 82982 - DNA, 83 bp, Homo sapiens
tcaagatggtcttcagagagcaactatcctccccagacacacgatagtaaggagcatttagcaatgatggaaaggattcttgg

SEQ ID NO: 82983 - DNA, 100 bp, Homo sapiens
aatgatgccaggggcagtgccaggcagcgggcacccaggcgtggcggacaaggtgctcatctactctgtgcaaccgtacacgaaggaggtgctgcagtca

SEQ ID NO: 82984 - DNA, 90 bp, Homo sapiens
gctgcactcactctacgtggagttgggccctgcaggaaggacggacttcaggggcagactggcacagcctccaggttggcgggctcatct

SEQ ID NO: 82985 - DNA, 100 bp, Homo sapiens
cacatccccgtcccagcgcagaggccagttttaccaggaggtgctctggggatctccagcagcatcagatgacggcagacgcacgctgagggttcagggc

SEQ ID NO: 82986 - DNA, 100 bp, Homo sapiens
taaaatcattggaccatttagtaagaagaattccagtcttataaaatggttaagaaggaaacggatggaaaaaatggcagagcaacaagctgtcagagag

SEQ ID NO: 82987 - DNA, 98 bp, Homo sapiens
agcggcaagagcatgaacgcagcatcctggccagaacaagccaaggagccaagacgagagggacacacggacaaacaacagacagaagacgtactggc

SEQ ID NO: 82988 - DNA, 100 bp, Homo sapiens
gcccagcggacaccggcagcgcgcggtcgacgcgggcctgagctccctccagagctccactggttcaacagcctctcctccagtttcgaccccagtcaca

SEQ ID NO: 82989 - DNA, 101 bp, Homo sapiens
atacgccagctgagcagtctgaggtgtgattaggcccactgggggatacgctgtcatgctacactggtcaatgtcttccatatacggacttcaacccggag

SEQ ID NO: 82990 - DNA, 100 bp, Homo sapiens
atgattggccgaccgcaggagaagcccccagaaccaggcccccaactcagccatctgcggaggtcaaggtgtcatcaatcttacagaagaagtgctgtgg

SEQ ID NO: 82991 - DNA, 100 bp, Homo sapiens
aaaatcaacaccaggactacagtaaggctgaaatcattgaagtgcttggagtgcagaactgaaagaggtttctgggtgtctctggggagcccctgggcca

SEQ ID NO: 82992 - DNA, 50 bp, Homo sapiens
aaatctccccggtgactttcaggatcttagaaatgaagttgaaaaattac

SEQ ID NO: 82993 - DNA, 90 bp, Homo sapiens
gcagaaggtggtggtccaccccctggtgctgctcagtgtggtggatcatttcaaccgaatcctcactatggatgggctcattgaggacat

SEQ ID NO: 82994 - DNA, 95 bp, Homo sapiens
atcaagagctgcgagatccaacagcacgagtacacgagacaggattgagaaaggagagattcaaattgtgacttcagattcaaaggcaattaaag

SEQ ID NO: 82995 - DNA, 75 bp, Homo sapiens
aaaataatgaggtttcttcgccgctgtcgccacagacatgcacatgatggtgtccaagccagaacagtgggtaaa

SEQ ID NO: 82996 - DNA, 75 bp, Homo sapiens
agcaggaggaggtggcggcggcgggaagatgtgtcgtgaaaactacccctaaaagccaaaatgggaaaggaaaag

SEQ ID NO: 82997 - DNA, 90 bp, Homo sapiens
caccccgcggccgcaccttcccgccttctcagataaactcatcctgaaagtcgctgttgttctcctgctgagcaagaatggaggccccac

SEQ ID NO: 82998 - DNA, 100 bp, Homo sapiens
tgggtttcccgggagatcccaggcggtgacagagtggagccatggctagaggtaagtaaggaggtctctgtaccatggctcgtacaaagcagactgcccg

SEQ ID NO: 82999 - DNA, 100 bp, Homo sapiens
ggccactagcagccagttccggcccgaggacaccgactaccagcagggactttgaacatgtcggggatcgccctcagcagactcgcccaggagaggaaag

SEQ ID NO: 83000 - DNA, 75 bp, Homo sapiens
aaggaggccttccagctgtttgaccgaacaggagtatgctgtgaactgccatgtgatcacctgggagaggattat

SEQ ID NO: 83001 - DNA, 82 bp, Homo sapiens
acatggtgggggccacaccatttgccgtggccaggctagaggtttacccaaggtccagcctagcccctaggcaccatgtcgg

SEQ ID NO: 83002 - DNA, 100 bp, Homo sapiens
ccctggacaacccctggcagagctgcagccacagtgccggctgcacctatgcagctcttcaatggagtcaccgagacttggagccagaatctgagcctca

SEQ ID NO: 83003 - DNA, 101 bp, Homo sapiens
cttcgccatcgccagcatcgccaacccggactggatcaacaccggggagtctgcgggtgtgaatgacagaggtggtgccatccagcgcgctcagcgaggtc

SEQ ID NO: 83004 - DNA, 75 bp, Homo sapiens
ggctcctggaactcttatgtggattataagatattcctccatggttaaagcacgaattgggagctctcagcgaca

SEQ ID NO: 83005 - DNA, 80 bp, Homo sapiens
attgaccccaaagttgcatttcctcgtcgagcgcaacccaagttcctccgtgtcacaaagcagtacctgccccacgtggc

SEQ ID NO: 83006 - DNA, 116 bp, Homo sapiens
caggtattgggagatccacagctaagacaccgggacctcctggaagccaaaaatgtctctgctggatgaaccgaatcctaacagtccagccaatagccaggcagcacagctttatc

SEQ ID NO: 83007 - DNA, 101 bp, Homo sapiens
tgtggttggcaccatgttacgttgttcaacagatgggagaatgcaaagcaactgctcattaggataacgtggaaagggcagatgctttacagctgtctgtg

SEQ ID NO: 83008 - DNA, 100 bp, Homo sapiens
aaaggagaagacttggattctcagctaccagagattcactgactgctataagtgcttctaccagttgcagcctgcgatgacacagcaaatctatgacaag

SEQ ID NO: 83009 - DNA, 101 bp, Homo sapiens
caggcctatgccaatcagcatttcacattcctcatggttggttcaaagagaatgtaactggtcactacatttccccctttcatgatattcctctgaaggtg

SEQ ID NO: 83010 - DNA, 100 bp, Homo sapiens
ctgaaaacaaattggggctcagagcttcttccacctgcccgttaacattcgaaaatgtcaagtatccctcgggatcgtgtccctgggaggcggataggat

SEQ ID NO: 83011 - DNA, 98 bp, Homo sapiens
agaatcacgcggacatcgtctcctgtgtggcgatggtcttcctgctggggctcatgtttgaggcctgatcacttgaacggacatatcaagcaggtgca

SEQ ID NO: 83012 - DNA, 75 bp, Homo sapiens
cagcgtttcacctaccttcccgccaacgtctacgagaacgaagaccagctgctctgggaccccagcgtcctccct

SEQ ID NO: 83013 - DNA, 90 bp, Homo sapiens
cctcaaaaacaatggcagaggaagtcccctggccttttatcatgtgcagaattctctagtgatccctgaaaagttccagcatattttgcg

SEQ ID NO: 83014 - DNA, 74 bp, Homo sapiens
tcctgaaccgcgcggccgaaccctccgcacctgggctgtcccccatgcagaccctgaaggtttctgtgtctgca

SEQ ID NO: 83015 - DNA, 87 bp, Homo sapiens
aagtgaatccccctaaacaggagcacctgctggcgctaaaagcctcattgatgctactcacagagacgtggatgtgctgttactgct

SEQ ID NO: 83016 - DNA, 115 bp, Homo sapiens
gcggaaagaagaaagccacagtcaagtatctgtctgagaaatgggtcttagcctccacctcagatatatgacaagcagttggatgaaagagaacacacaattgaagaatggaaag

SEQ ID NO: 83017 - DNA, 90 bp, Homo sapiens
ctccgcccggcagccaccccatctgggaagttccaaataagtttcgctatccattctactatgagatgtgttggtatgtgttggagcgct

SEQ ID NO: 83018 - DNA, 82 bp, Homo sapiens
agccgcgcagccctcggagcacggtctcggcgcggaagatggccggcggcgtggacggccccatcgggatcccgttccccga

SEQ ID NO: 83019 - DNA, 50 bp, Homo sapiens
caggaaccaccagtgacagagcaggggaaatggaaggtgatgcagtcgaa

SEQ ID NO: 83020 - DNA, 80 bp, Homo sapiens
cacaccccccgccgcagcagcaccggcgacagctgtgccctccccgagaggattctgtcctttcgtggacgcttctccct

SEQ ID NO: 83021 - DNA, 83 bp, Homo sapiens
cctggtgcccacgcccaatgtgctctgggacctggttgacaggataggcaaaatgatgcttcaacacccaggccaggtctctg

SEQ ID NO: 83022 - DNA, 75 bp, Homo sapiens
ctggggttggacgctgccagtttgcacagcagcaggtaataaggttagagagtcaagtatcacgttacaaatcag

SEQ ID NO: 83023 - DNA, 100 bp, Homo sapiens
accctctgccgagtctcaatatctgtcttcggtggactccttcggcagtccacccaccgccgccgcctcccagactcccgaagcccagacagctcctccc

SEQ ID NO: 83024 - DNA, 143 bp, Homo sapiens
aagatctttgctgtactttatatgatatgcttgcttctattaaaagtggtgatgaacttcaggatgagaaatggcgaaaagtcttttgaagacagcctctctgtctggaaggacaaaattgctacatcaaacaggattgtcac

SEQ ID NO: 83025 - DNA, 100 bp, Homo sapiens
ttctgataactcaggatttacttgaaacaaaaggagaccctaatcttcagatttgtaacagatggagccatgacattttgaattctccccatcataccgt

SEQ ID NO: 83026 - DNA, 101 bp, Homo sapiens
accgggaggtgatgctggagaactacagcagcctggtctcactgggcatgttttccacaaatcctgcgtggatccctggcttagtgaacattgtacctgtc

SEQ ID NO: 83027 - DNA, 98 bp, Homo sapiens
aacagattcagcagcggcagcagctggagaaggtcgtggagcagcaccttgcctgcagtaatctatgccagcaattatgacaatgttagcagaccatg

SEQ ID NO: 83028 - DNA, 80 bp, Homo sapiens
tgcttggaaaaacgtgtgggtacgaccttggtgattatcctgaaccatccaggccaaataagcgccggctatgcccctgt

SEQ ID NO: 83029 - DNA, 75 bp, Homo sapiens
aaactgtatgaggctgggctggcctatcaaaaggagctggacaagatcgagggcgtgttcgagcggccgagcgac

SEQ ID NO: 83030 - DNA, 100 bp, Homo sapiens
gggccgtggcccctgcagcggaaccggacccagtccctgagccgcccctacacccacagagtcactttgtggcatgtatgacagccatcttaaaccagat

SEQ ID NO: 83031 - DNA, 85 bp, Homo sapiens
cccgcctctccagcttcacccagcaccaccggcccgtcatcgccgtgcacagcgggccccaggccagcccaagatcgaccacctg

SEQ ID NO: 83032 - DNA, 59 bp, Homo sapiens
tttgccggtcacactggggtccccaaagaggtcaaggttcagcggcagtggatctggga

SEQ ID NO: 83033 - DNA, 89 bp, Homo sapiens
tatctgcaggtattgggagatgcacagctaagatgccaggaccacctggaagcctagaaatggctgatgaattcatccgagcaaatgcc

SEQ ID NO: 83034 - DNA, 100 bp, Homo sapiens
ttaaatactcatctactaggcaagcatggagttggcaccccaaaagaaagggggacagccgcgccgctgctgcttttccgaagaggtgacttcgaccgag

SEQ ID NO: 83035 - DNA, 75 bp, Homo sapiens
ggctcccgctggccgcctcgatgcaggaggacgaacagaataaggaagaagtgatggctgtgaggcttcgggaag

SEQ ID NO: 83036 - DNA, 100 bp, Homo sapiens
ttcccgccgagggcccggaccccgaatatgacggggaaggtgtggctcattgactttaatccatttggtgaagtcacagattcactgctgttcacctggg

SEQ ID NO: 83037 - DNA, 100 bp, Homo sapiens
cggccgagacgctcacggatatagtgctctcctggatgaccggaaagaagggatgaccgcgtttgtggaaaagagaaaggccaacttcaaagaccagtga

SEQ ID NO: 83038 - DNA, 75 bp, Homo sapiens
tgacaacaacaggcatgcaaccaggcaccagctctgggacattgggggacagccgcgtttccgcagcatgtggga

SEQ ID NO: 83039 - DNA, 75 bp, Homo sapiens
aagtgaactacatgtgtcccctcaattcagatggctatcctgacagcagtgttgtactgctacttctataaacgg

SEQ ID NO: 83040 - DNA, 101 bp, Homo sapiens
gaagcgagatgtcgaagccgccacccaaaccagtcaaaccagaacatacatatgatagttgagaaagacacatattctgatcatgaagaaataaacacaag

SEQ ID NO: 83041 - DNA, 80 bp, Homo sapiens
gaaaaaataagaaggaacccaaagaaccatctcccaaacaggatgactgtgccctgtccacggtgcctcctgcatgtcct

SEQ ID NO: 83042 - DNA, 75 bp, Homo sapiens
actatcctggccgagggccttcacttcagtccctctccaagatcctggatgtggccagtttggaggtgctgaacg

SEQ ID NO: 83043 - DNA, 51 bp, Homo sapiens
ctgctcttctccaggctctgtgaccccaggcaggcacagtcttccccgccg

SEQ ID NO: 83044 - DNA, 89 bp, Homo sapiens
gtggaatattggggggctcggctgcagacttggccaaatggacgggactattaagatcatggaagggaagtggttgctgtgtatgttac

SEQ ID NO: 83045 - DNA, 90 bp, Homo sapiens
agacaatgagcaaaagcccttccctttcatccagagccagtgctggtattgttgcagcatctggcagtgagactgaggatgaggacagca

SEQ ID NO: 83046 - DNA, 76 bp, Homo sapiens
gccgtctccaagatgtagctaatgaccgtggttcccactgaggagatcatgcacgccctgaagatgacctggcacg

SEQ ID NO: 83047 - DNA, 83 bp, Homo sapiens
tgaaccttagggacaacaccgggacacccgcgaggccggaaaatggtaactaaatgaccatggaatctggagccgagaaccag

SEQ ID NO: 83048 - DNA, 75 bp, Homo sapiens
gtcacttgtggctgcagaccctgcgggagatgctggagaagctgaagacccactgctaaggagttattgaagcac

SEQ ID NO: 83049 - DNA, 97 bp, Homo sapiens
acagaaaggaactggctaccgttcggactatttgtagtcatgtacagaacatgatcaagggtgttacactgggacaagatccaccagctcctcctgt

SEQ ID NO: 83050 - DNA, 100 bp, Homo sapiens
aatctgataggtcaacaaacaatgtggagaggcatactccaaggaccaagattagacctcaacaggtgcagcagcaagactagtgtcaggatacgacagc

SEQ ID NO: 83051 - DNA, 98 bp, Homo sapiens
acattgaagaccttcagaatggtcctatcagaaagttgaccagtatctctaccacatgcgcctctctgatgagaccctcttggagatctctaagcggt

SEQ ID NO: 83052 - DNA, 75 bp, Homo sapiens
aggatgtgcgttcttccactagaagctcttctgagggaggtgtgtccagggaggaactactgctatccctggagc

SEQ ID NO: 83053 - DNA, 98 bp, Homo sapiens
ttgtagactttgccccattcctatctcgtacacttcttggcagtcatggacaagagctattgatagaagcatgggagatgcatgccctgaagagcagg

SEQ ID NO: 83054 - DNA, 75 bp, Homo sapiens
agcaacgtgatgcgggagagcgggttaacattcaagatggtacatgctgaagccttttctcgtcctttgagtcgg

SEQ ID NO: 83055 - DNA, 97 bp, Homo sapiens
cggtactcagccttttaaaaactggaggtttcagcacagccagtcccacaggagcccagcagaaaagattacgagacctaccagccatttcagaatt

SEQ ID NO: 83056 - DNA, 96 bp, Homo sapiens
gaaggccagcaggaacaggctctagcgaaatgggtgctgtgtccccttcctgcatgtggcagaaagttgcaaaggctggagtgcaatggcgtgatc

SEQ ID NO: 83057 - DNA, 100 bp, Homo sapiens
cattattcttcttgactaaaaagcgaagacagagacagcggcttgcaggttgtactcgtaaaacaaggatcatcgatgttgtctacaatgcatctaataa

SEQ ID NO: 83058 - DNA, 100 bp, Homo sapiens
tgcctttctggacacagaagtatttgtgacagggaaatccctaagtcagccaacccctcctcccatgccaatcctttcacagtctgaagcaaaaaaccca

SEQ ID NO: 83059 - DNA, 82 bp, Homo sapiens
ggggcctggcggagcccgagcgcggcccggcccgcagcgtggggccccgagcgcggaactgtggctgcaccatctgtcttca

SEQ ID NO: 83060 - DNA, 75 bp, Homo sapiens
ggaccacgcctgcatccccatcaaggaaaaaagggttgctcattttgggtatcactggagtctgatggaaagaga

SEQ ID NO: 83061 - DNA, 96 bp, Homo sapiens
aagctgctaacccgacccggattggcgctgaggtggcccgtggggcaggagcaccatactggaccaacacagaaaagatggaaaagcggctccatg

SEQ ID NO: 83062 - DNA, 75 bp, Homo sapiens
ggccgggctgctgtgcggcggcggggtctgggccgcgcgagtataacactgcctttaaattcagatgtccccaag

SEQ ID NO: 83063 - DNA, 88 bp, Homo sapiens
ttgtcagggctgagagcgacggagccaaaaacctgtatatcatctccgtgaaggggatcaagggacggctgaacagacttcccgctgc

SEQ ID NO: 83064 - DNA, 83 bp, Homo sapiens
ctgctgagcttggcctcggcgtcctcggatggcagtggcagcaccatgatgcaaaccaagaccttctcctcttcctcctcatc

SEQ ID NO: 83065 - DNA, 83 bp, Homo sapiens
caagaaggcaacgacgttccatctgtggaaggacctaccaaccagataacaacgaacttgatgcaagtgataggtttgccaag

SEQ ID NO: 83066 - DNA, 101 bp, Homo sapiens
tgtgctagtgatgtgagcaaatgcctcattcagggctgaaaacacagttaaatcactttcaaagttaaaagactattaagaacacaagatggggactcctg

SEQ ID NO: 83067 - DNA, 75 bp, Homo sapiens
cacttcaatatcactgaagacatgctccggggcatctttgagccctttggtaaattctggatgcgggtacccttg

SEQ ID NO: 83068 - DNA, 101 bp, Homo sapiens
ccgagatgtctcgctccgtggccttagctgtgctcgcgctactctctctttctggcctggaggctatccagcgaatgaccatacctgaagaagacgctgat

SEQ ID NO: 83069 - DNA, 75 bp, Homo sapiens
ccaaatatttcactcccagctccctcgcaattccagccttctgtaggcaaaagaatggaccccagcaggaaaagc

SEQ ID NO: 83070 - DNA, 74 bp, Homo sapiens
gcctgcaaagccttcttcaagaggaccatccaggttccagggtcacccccgagaggacaacaggcatctggaag

SEQ ID NO: 83071 - DNA, 83 bp, Homo sapiens
gaaccaggagaagtttttatcaacaaaggcaaaggattcggatttattaagctttattcaagtcaaacaacgttgaaatggat

SEQ ID NO: 83072 - DNA, 99 bp, Homo sapiens
catggctgctgctcttcatcctcttctgcattgggatgagccgctcccgaggccccggcgcggcgcgagggcgcggggcgcggcgtccacaggcgccga

SEQ ID NO: 83073 - DNA, 89 bp, Homo sapiens
agaagagtcaaatgttcagccagtatcaacaccagtaacagtgtgtggagatatccatggacaggtgggatttgatccacaccatcaca

SEQ ID NO: 83074 - DNA, 100 bp, Homo sapiens
tccaagattctcaggcaatcaaaggtacctcaataataatgagttgacagcggtaccatccctgggcgctgcttcatcacatgtcgtctctctctttctg

SEQ ID NO: 83075 - DNA, 82 bp, Homo sapiens
ttgaagacagagatttattcgtaatgcgactcaaagctgcacggcagtctgtttatgaggttacacggtgtgggcacacaac

SEQ ID NO: 83076 - DNA, 88 bp, Homo sapiens
cgggcaccggagccagccccgcagcgggtcagtgaccttatacagctagtgaaggagctgtatacagacaaccagcacctgaagaaaa

SEQ ID NO: 83077 - DNA, 90 bp, Homo sapiens
caaggccctgaaggtgcggggtctaaatcaggactgctgtgtggtctaccgactcatcaaggggcgctgcttgcagattctggctgcagg

SEQ ID NO: 83078 - DNA, 98 bp, Homo sapiens
tgcacagcagggaacaaagtcagcaaggaatccagtgtcgagcctgtcagctgtccagctcaccaagctcctgtatctactggaaaatggaagtccag

SEQ ID NO: 83079 - DNA, 50 bp, Homo sapiens
gaggcaggtgtcattggagagagagaggcgttggggctgaacctctgctc

SEQ ID NO: 83080 - DNA, 75 bp, Homo sapiens
gctcagctggaggaggccagctctacaggcgttctgacccagtgggtgatatatgccatccgaaaccttaccgaa

SEQ ID NO: 83081 - DNA, 97 bp, Homo sapiens
ctcgatggcaattgaaaagtaccctctggttttctcaccgcagatggtgggtatctggagtccatctttcaccatcttctcctgagattgtactgga

SEQ ID NO: 83082 - DNA, 100 bp, Homo sapiens
cggaagcgcagggagaaggaagaggtgtttgaaaaggaatgtatcctgtcaggtataatgtcagtgaatggcaagaaagttcttcatatggatcgaaacc

SEQ ID NO: 83083 - DNA, 87 bp, Homo sapiens
gccagcctgcgaaggtggcggcgctgctgctcgggctgctcttggaggccagattacctgtccctaatactgagcagaagctggtga

SEQ ID NO: 83084 - DNA, 96 bp, Homo sapiens
cagattcgcagtggtcgcttcttctccttggctgtgctcctggcggacatcctccccacactcgtcatcaaattgttggctcctcttggccttcac

SEQ ID NO: 83085 - DNA, 105 bp, Homo sapiens
cggatcgatgctacgctaacctatcgggttctctctccgcgcgttcaggttttgacacaagggcgcatatcttcaaagcacctagtacctcctaccattgtcaac

SEQ ID NO: 83086 - DNA, 100 bp, Homo sapiens
ggaggtgtttccaaagaattttttcagctggttgtggaggaaatcttcaatccagatattggtcttcggataaactcaaccaactgtcaactagaaaatg

SEQ ID NO: 83087 - DNA, 101 bp, Homo sapiens
aagaggaagcgtagacttgaggatgcattcattgtgatatccgatagtgatggagaggtttttcgttggaatatacgttgcacatttatggcgattctgag

SEQ ID NO: 83088 - DNA, 100 bp, Homo sapiens
ctcaaccaaatattgaactgaaccagcaggctggcgcggagatctccaccgtgaacccagaacagtattcaaagcgctttttggactttattggccacat

SEQ ID NO: 83089 - DNA, 75 bp, Homo sapiens
gcgtgaccagctgaacgtctgtggaatgtggaggctgtggacccacgaggtcgaacattattgcatcttgctgtt

SEQ ID NO: 83090 - DNA, 91 bp, Homo sapiens
ctgcagcgcaggaggtctggaggcttagccagccccgcggagagtggaagacttataaccctgccttctcccggttggaaatctggttccg

SEQ ID NO: 83091 - DNA, 51 bp, Homo sapiens
cttcaagagccattccttttggaacaatggcctgatcacttgaacggacat

SEQ ID NO: 83092 - DNA, 50 bp, Homo sapiens
gatttcttgatgcaaacgtccacgacagatggagcacagggaaatgtgtc

SEQ ID NO: 83093 - DNA, 50 bp, Homo sapiens
gcgagagaaagagcctccgtcaccacataagacgagttgtactgctgtca

SEQ ID NO: 83094 - DNA, 76 bp, Homo sapiens
agaagatcatcattaaggacggaggcacggctgttgtacagtggcctgattatagctcactgtagcctcgaaattc

SEQ ID NO: 83095 - DNA, 75 bp, Homo sapiens
ggactgtggatgattatcgattacggtttcctgactacttgccctgttcagtgatgttgcagccagctccacaag

SEQ ID NO: 83096 - DNA, 100 bp, Homo sapiens
cagaaaatagcagccaggaaccaagaaaacttgaaaataattctgaggtaggggcctctggctatggtgttcctgggcccacctgggaccgaggagccaa

SEQ ID NO: 83097 - DNA, 88 bp, Homo sapiens
tcctcaactcagcgatgacatccctttccgagtcaactggcccggcaccgagttctctctgaactgataaatttcaaacggaagagag

SEQ ID NO: 83098 - DNA, 74 bp, Homo sapiens
aaccacagctttacctccctgaaggacagacaaggaacccataaagatgctgatgatggtggtgctaccccagt

SEQ ID NO: 83099 - DNA, 100 bp, Homo sapiens
agcactccttgcccgaggacagagatggcgagcgcccggattggggatgagtatgcggaggacagctctgatgaggaggcccatggacagaccttcacgt

SEQ ID NO: 83100 - DNA, 100 bp, Homo sapiens
tgaccacccctgaagaaattgcacaggtaatcctcccacttcttaaaagtgatctttatgaagtgattcagtccaccttagatggactgctctgcacatc

SEQ ID NO: 83101 - DNA, 80 bp, Homo sapiens
agcagatcgaatgtttgacatgggatttggaagagagaagggcacagttacctaagtatcaacgtaatcttcctcggcca

SEQ ID NO: 83102 - DNA, 96 bp, Homo sapiens
agagaaacccggagggcgccgggggtggatgtgaacactgaccggaagatcagtgccaaggagatgcagcgctggatcatggagaagacggccgag

SEQ ID NO: 83103 - DNA, 100 bp, Homo sapiens
cagatatgcctgctaacatggataagcatgccctgaaaaagtatcgtcgagaagcctatcatcggaagatcccagtgtctgagtgaactaacagtcctgc

SEQ ID NO: 83104 - DNA, 99 bp, Homo sapiens
tcttagtgcttggcagattagtactaatacctcctctgaaaaatggcagaagcagttttccatgccccaaagaggaaaagaagagtgtatgagacttac

SEQ ID NO: 83105 - DNA, 75 bp, Homo sapiens
acaagtgcctggaagagttctatgcactctgtgaccagctggagctgtgcctggatgggactgaggaagacccac

SEQ ID NO: 83106 - DNA, 99 bp, Homo sapiens
cccggacttcctctcagaagaggaccgcggaagcagcccgacggccatggaggctgaagagacgatggaatgccttcaggagttccctgaacatcataa

SEQ ID NO: 83107 - DNA, 100 bp, Homo sapiens
catttgcccctctggattggggagcctcgtgggactcagctgtgtcacccgtttcagagattaccttctccttctgccgtctgtttgagaagcgcccagc

SEQ ID NO: 83108 - DNA, 82 bp, Homo sapiens
gcgccccacttgctcgtgcactttacacacatgagaagcggccagcttgatgtccgggagctgatctctctctaccccttcc

SEQ ID NO: 83109 - DNA, 105 bp, Homo sapiens
ctgttggagtgcgttcggtgtgccgtgggtccgcgctgcttccacccaacttcctgttagacaatgcagatcttcgtgaagactctgactggtaagaccatcacc

SEQ ID NO: 83110 - DNA, 75 bp, Homo sapiens
accaccgtcatcgacaatttctacatctgcccgaccaacaagaggaaggtaaagaaggcgtataggcagaaggcc

SEQ ID NO: 83111 - DNA, 75 bp, Homo sapiens
ttgcaggatgcagaagaagccaaaaacattctgggcacattgcaagcaacccgtgccttgatggtggttggcatc

SEQ ID NO: 83112 - DNA, 98 bp, Homo sapiens
cgggcagctccccaaagacaggagcacaggtgctggagaatctggtaaaagcaccattgtgaagcagatgaggatcctgcatgttaatgggtttaatg

SEQ ID NO: 83113 - DNA, 95 bp, Homo sapiens
cgcagactccttctccagcatgggctcgcctgtcaacgcgcaggtgcagattcactttataggaacagcttcagcttcagtgatgaaaaactgaa

SEQ ID NO: 83114 - DNA, 75 bp, Homo sapiens
cctggagcacatctttagagccatcctgatcaagaaaaccgacagattagaaatgatatttgccaaatttgatga

SEQ ID NO: 83115 - DNA, 100 bp, Homo sapiens
cgatggagcagcgaaaacgtggttgtagagttccgtgactcccaggtagttcttccaacgtttattcttgaaagaagatctcttttagaaatgtatgcag

SEQ ID NO: 83116 - DNA, 100 bp, Homo sapiens
cgaccggagcagagagctggcgagcaagaaatcaacgaccgggagcagaagttgcatgcccttaaggaggtattaaagaaatttccaaaggaaaaccacg

SEQ ID NO: 83117 - DNA, 100 bp, Homo sapiens
tgtagcaccgtcgtctgcgtgatctgcttggagaagcccaaataccgctgtccagcctgccgcgtgccctaggtaaatgttgtccagactcagagtttaa

SEQ ID NO: 83118 - DNA, 97 bp, Homo sapiens
gaaaccaagaccacctcctgctctgggaccggaggagacatcggcctctgcaggcttgccgaagaagggagggacaagaatccttcaagaaacagga

SEQ ID NO: 83119 - DNA, 100 bp, Homo sapiens
agagcgtgaagatcaagatcggaggccccgtgtgggccgcggcccggccctcaccatggagtccatgttcgaggacgacatcagcatcctgacgcaggag

SEQ ID NO: 83120 - DNA, 54 bp, Homo sapiens
agaatggagttggcgactcgctaccaggctcatgagaggctagaagattccaaa

SEQ ID NO: 83121 - DNA, 75 bp, Homo sapiens
gggccaggaggagcgaacacctgccgcggtcctcccgccggcgctgggaaacaggagggcgttagtggatcagaa

SEQ ID NO: 83122 - DNA, 75 bp, Homo sapiens
tgaaccaattgcagattatgctgcaatggatgatgtcatgcaagggtgatctggaccctctggcatctctcaaat

SEQ ID NO: 83123 - DNA, 90 bp, Homo sapiens
tgcgaggaaaatggcggcgggagatggctctgagagattcctctgcgaatctgtttttagctatcaagtggcatccacgcttaaacaggt

SEQ ID NO: 83124 - DNA, 111 bp, Homo sapiens
cggcagcgatggctactacgtggcgctggcctggacctcatcggcgctcatgtacttcattgtgaaatgacaatggatgctctgttggctcgattgaaacttctgaatcca

SEQ ID NO: 83125 - DNA, 75 bp, Homo sapiens
tggctttggcaatgtggaagagattcctgagaatgacagcattgatatgaaccatggacaagtatattctgctgc

SEQ ID NO: 83126 - DNA, 100 bp, Homo sapiens
cggcgcgcgaggacccgagccaggcggggacaggacggcggggcgagccaggtactccaaagattcaggtttactcacgtcatccagcagagaatggaaa

SEQ ID NO: 83127 - DNA, 90 bp, Homo sapiens
gcctcaccctcctgagtagataggactacagaagaagcacagcgtgctgatgtctgtgattgccggggaggctgtcgcatccgtgaggac

SEQ ID NO: 83128 - DNA, 83 bp, Homo sapiens
caggcgccgcgggctccgcgcccggccggacccgggcccgagttcgtgtttagtaggagcacagtagctgtttggggaacgac

SEQ ID NO: 83129 - DNA, 74 bp, Homo sapiens
gaaaaacggagacttggatgaggtgaaagactatgtggccaagatgaggtggaaagtgagaaatggtacctgtc

SEQ ID NO: 83130 - DNA, 100 bp, Homo sapiens
atcatatatcacctgcaggaagtatcgctaggaatagtgctgccgctaagtatttgacaaacagagggatgttgagtcctatatccatcgctctggacgc

SEQ ID NO: 83131 - DNA, 82 bp, Homo sapiens
tatcacccataatcggaatgtgatcacagagcctatttacccagaagtagtccatatggagccttcacgtaaatgggtccag

SEQ ID NO: 83132 - DNA, 144 bp, Homo sapiens
ggacgggcgctttggagccggccccaggcagcgtgtgtcggtcgcctagtctggagaactagtcctcgactcacgaagtgcatcagcagaggggagctccaggtgtctctgtcatatcagcctgtggcacagagaatgacagtg

SEQ ID NO: 83133 - DNA, 90 bp, Homo sapiens
cgaaaggtggttttgatcaccggggctagcagatacacgataagaatactccatggaagtctttccttgtcattgtagatggctcgccca

SEQ ID NO: 83134 - DNA, 78 bp, Homo sapiens
taataagtattttcaatgtggagttctatgcagttacttgctggacagaagaaaagctcccccttctggacatttgaa

SEQ ID NO: 83135 - DNA, 100 bp, Homo sapiens
tcgaacttaccctgaaggccgagcagaaattccttgagctcataggcattgctcagggtcagatgacagttctgagactcactgagttgctggaacgagg

SEQ ID NO: 83136 - DNA, 82 bp, Homo sapiens
cgacgagcgctgcactaacgcaggatccggctgccgaaggtcctcgccagatctctcaaaggccttggttctgacagaaatt

SEQ ID NO: 83137 - DNA, 82 bp, Homo sapiens
ctttcgaagccattcagtcctcaatctccttttccttggctacccaatctatgtactttcatcagcgcggccagtaagtttg

SEQ ID NO: 83138 - DNA, 75 bp, Homo sapiens
ccttaaaaattcatcagattcggtcaataactgggagatggacaaactagagatggaagatgcagtcacattttt

SEQ ID NO: 83139 - DNA, 90 bp, Homo sapiens
gcacaggaatatccatgtcggcttgtagagagattgcagctaggaagtgatgatacccattttgaggttagcatggccaacaacggatgt

SEQ ID NO: 83140 - DNA, 75 bp, Homo sapiens
gaagctgatgcgaggtcttctccagtgcatgatgagacaggatggagctatgacattgaagagaggaaggttcca

SEQ ID NO: 83141 - DNA, 51 bp, Homo sapiens
caccccaggatgatgaagcagaagagggtacgtttcagcccaaacctggac

SEQ ID NO: 83142 - DNA, 51 bp, Homo sapiens
gtcatcggaagtggtgccttcagcacagctgagatctgtatctgtggacct

SEQ ID NO: 83143 - DNA, 100 bp, Homo sapiens
cggcgacggaggaacgcaggtctgctgccagcaaattgttttctcaagcaaaaccccatttgtggcaagaagtctcttagagaagctttctaggcagatc

SEQ ID NO: 83144 - DNA, 83 bp, Homo sapiens
cttgtgcctgggagagtgggatgaaacgccacagagcagcctgtgcttcgggagagacaaaggcagcgctgccctcgggggag

SEQ ID NO: 83145 - DNA, 50 bp, Homo sapiens
ggttttgatatggattatacccttgctggcacagaaaactgaatctgtag

SEQ ID NO: 83146 - DNA, 100 bp, Homo sapiens
tgactacaccctgtccttctgccccgacgaagacccatcatgagcaaccacacagctacgcacattctgaacttcgccctgcgctcagtgcttggggaag

SEQ ID NO: 83147 - DNA, 90 bp, Homo sapiens
ttccttacctgtttttccagctcacccactgccagcagagcagtcccagctatctgacttcatgtgaaagatggctaatgcagaagtgag

SEQ ID NO: 83148 - DNA, 100 bp, Homo sapiens
cttcgacaggaaaaaaatttgctggatattgatgcgccagtcactgaatgacagcccatatcaaggcggtgtattctttttgacaattcattttcctaca

SEQ ID NO: 83149 - DNA, 75 bp, Homo sapiens
gtggattcttcagaaagtgaacttggcattttagatctaattcaagtcattcctgtcccaatcagctgctctact

SEQ ID NO: 83150 - DNA, 90 bp, Homo sapiens
tgaagatgctgttctgatggatggaatgactgaatctgatacagcttcagttaatgaaaatgggctagggatgatgcagtgtgtgattgc

SEQ ID NO: 83151 - DNA, 82 bp, Homo sapiens
agcagatggcggatgccctgcagtacctgcagaaggtctctggagacatcttcagcagattcttcgctgctgctgccttacc

SEQ ID NO: 83152 - DNA, 83 bp, Homo sapiens
tgaaaaccttcagaagatggaaaatgtgcttgatctttggagttcaggtcttaaggccagaagcggactcctagaagagggga

SEQ ID NO: 83153 - DNA, 83 bp, Homo sapiens
aggctcaagttaaaagtggagcagcacgtggagctgtaccaggtgccctgctctgttggtggttggggacagctcgcctgcag

SEQ ID NO: 83154 - DNA, 120 bp, Homo sapiens
gacagcggcaccgccagacggccagaaagttccgccatgagctggggcacggagctgtgggtaatctatttaaagaagacaccagaagaagcctacagagcactcctgtctggctcaaac

SEQ ID NO: 83155 - DNA, 58 bp, Homo sapiens
agatggtccttaaaaccgaagaggaggacgattcagcattcccatatttgaaatggga

SEQ ID NO: 83156 - DNA, 97 bp, Homo sapiens
cacttgagaaaattaatgtggcaggtcgtcacgctgtggtacagagcacccgaagtcttgctccagtccagctacgccacccccgtggatctctgga

SEQ ID NO: 83157 - DNA, 98 bp, Homo sapiens
cagggacatgatcacccgccgctccttgggctacgcgtatgtgaacttccagcagccggcggacggtgctactttgaatgataaggatgatgactctc

SEQ ID NO: 83158 - DNA, 100 bp, Homo sapiens
tgcaaacagcttttacctgatttcaccgaagcgcatttggtcacctcctctggtgcattgtgggcaggcatcaagactgaaggtggattgtcacagtctc

SEQ ID NO: 83159 - DNA, 125 bp, Homo sapiens
gctccgggcgcggggaagtcatgctcgcttcacggaggcaatagctagccgatttgaacatggaattcaatccttcagatcatcctcgggccagcacaatattcctcagtaaatctcagacggac

SEQ ID NO: 83160 - DNA, 114 bp, Homo sapiens
tatgactgcaacagaaatgaggtgtgttggccgcagcttctatatccatggactcagtattatcaagtttattaaccttgcaagaactcttcaggcacatatggaagatctcga

SEQ ID NO: 83161 - DNA, 100 bp, Homo sapiens
gacatgttgataaaaaatgatggtagcagcaattgcagagacagatgaatctgcagaatcagaaggtgtaattgattctcataaacgtagagaaatcctt

SEQ ID NO: 83162 - DNA, 74 bp, Homo sapiens
ataagctcatcagcgtggaggacctgtggaaggcatggaagtcatcagaagggtgatcagcccatgacctaaac

SEQ ID NO: 83163 - DNA, 75 bp, Homo sapiens
actcagcaccctctgcttaccacagccagattgattataccggaacagagccttccagtccctgtaataaatgtt

SEQ ID NO: 83164 - DNA, 90 bp, Homo sapiens
gtggaattgaaatcccataaagatatgaaaaacagtagctccgtatcgaatacattgacaaatggatgtgtcatcaatggacatttggac

SEQ ID NO: 83165 - DNA, 75 bp, Homo sapiens
ggcctgacaacttcatctttgaacctcttaaaagcctctgtacaaagaagatatttctatacaagcaagtctttc

SEQ ID NO: 83166 - DNA, 100 bp, Homo sapiens
tttgtcctcaatgtgcccccatactgcacagaggaaaatcaggaaaatgtttccaacctggtgattgaggacacagagctgaaacaggtggcttacatat

SEQ ID NO: 83167 - DNA, 75 bp, Homo sapiens
aacacacacagtccaatgagaagagacgactaaatacgttgaacaagtgtgcctcaatgaaacttgatgtgaact

SEQ ID NO: 83168 - DNA, 82 bp, Homo sapiens
cgacgcgctcatctgctggagcccggaggtggagatcgccagtgtggacgcctttcagggacgcgagaaggacttcatcatc

SEQ ID NO: 83169 - DNA, 90 bp, Homo sapiens
cgtctgtgtcgcagcttggtctcagaggagcatcgctgggacacgatgaggcgagtggtacgacagagcaagtttcggcatgtatttggg

SEQ ID NO: 83170 - DNA, 74 bp, Homo sapiens
ttttccttgtcgagcacggtgcaaccccagatgatagtatttctgctgcaagtacttctgatgttcaagatcgc

SEQ ID NO: 83171 - DNA, 98 bp, Homo sapiens
ctgctagatctcggtgcacaaacttgttggcagcaaggcttcatatcctgaacgctgggatcccccaggacattccctggcccccaggccccaggtcc

SEQ ID NO: 83172 - DNA, 90 bp, Homo sapiens
gtcggtggccggcagtcatctcgcggccgttcagactgtgacaaagacatgctgatcaacattctgactcagcgctgcaatgcacaaagg

SEQ ID NO: 83173 - DNA, 75 bp, Homo sapiens
cccatacaatgcaacatccggaatgaggaggaggcattcactcatacggcacaatatgatgaagcaatttcagat

SEQ ID NO: 83174 - DNA, 109 bp, Homo sapiens
ggcggctgcagtgctgacaccactcagggcaagggtgtccgacggctggagcggtactccaaagattcaggtttactcacgtcatccagcagagaatggaaagtcaaat

SEQ ID NO: 83175 - DNA, 97 bp, Homo sapiens
agagatcatacagattactactggctccaaagagcttgacaaactacttcaaggtcatacttacctggttgcttgcgcatctagtaatgttggatca

SEQ ID NO: 83176 - DNA, 75 bp, Homo sapiens
cagccatgtcatcttatctacgaaatgattcaggaccgcagctgaatgcacagctagaaggttggctttcacaag

SEQ ID NO: 83177 - DNA, 100 bp, Homo sapiens
ttaatttctcaattcctttttggcaagaatatcaagcaaggtatgtgcaagaggtgaaataattggcgtgaaagttctaggcatattggctatgattgac

SEQ ID NO: 83178 - DNA, 46 bp, Homo sapiens
gactgcagcctcggcggtcagcagagctgcccccatctgagttcct

SEQ ID NO: 83179 - DNA, 100 bp, Homo sapiens
catcaggatttcaaccagagatggaatgccgtatatgtagtagcacttttcaaagaaggaagaaaggtgggagtcatttccagggtaattttgacaagag

SEQ ID NO: 83180 - DNA, 90 bp, Homo sapiens
gaatgaaacccttccagctcgatctgctcttcgtctgcttcttcctcttcagtcaagaaactggcaagatgtttacctggggccgagcag

SEQ ID NO: 83181 - DNA, 75 bp, Homo sapiens
cctgacacatttgtgagaactatttatgcaggtgaacacacagtgttcatcccctcaggaggacacagcttttga

SEQ ID NO: 83182 - DNA, 96 bp, Homo sapiens
tcctcgcccacatctgtgccagctcgccgcctgcagctcagcccatgggagagcagcgttgttaacagactcctgacgcccacacattcgttcctg

SEQ ID NO: 83183 - DNA, 98 bp, Homo sapiens
ctcttcgcagcctccgacctgctgttcatcttctgcttcctgccagagacgctgcccctggagaaacggaaaccctggttctatgacatgaagaaagt

SEQ ID NO: 83184 - DNA, 100 bp, Homo sapiens
ttccccccccgcccagagtcatggcggcagcagccgctctgagggcgcctgctcaggagcgcctggaccatgctgctgagcgcctactggcacggcctcc

SEQ ID NO: 83185 - DNA, 75 bp, Homo sapiens
tgccaggaactaggcacactgctaatgtgtctgatccacatcttcaagtctgagcaccagcctccctacatcatt

SEQ ID NO: 83186 - DNA, 90 bp, Homo sapiens
atgaatttatacaaggagaagcactggatccaaagcatgtctgcaacccagccattttcagggtgatcagcccatgacctaaacctccag

SEQ ID NO: 83187 - DNA, 75 bp, Homo sapiens
cagtgctgttccgtgagcttcttgaatgacatcgtacagtatctccgacgcacaaccctacagcttggggcctgg

SEQ ID NO: 83188 - DNA, 90 bp, Homo sapiens
cccagggggagattcgtgtcggtcctagtcatcagttcaaacgatatgtcaataaacttcgaagcaagagtacagttttcaaaaagaagc

SEQ ID NO: 83189 - DNA, 113 bp, Homo sapiens
gtgctgtaaccacctcacagattccagcttcggaacaagagaccctggagctcactgacccaaagatttgcaccgtgtgggtctgacctcatcatgtggagtgcagagggccc

SEQ ID NO: 83190 - DNA, 82 bp, Homo sapiens
cttggggcttccccaaagccagaggtgatgtgtccaatctagatcccaacttctcatttgaaggcaccaaactggatgtggg

SEQ ID NO: 83191 - DNA, 82 bp, Homo sapiens
aattctaatttgaaccatgtttggattgaagccgcctctgtattacttaccagaaatgagccgtcagactgctacagcatta

SEQ ID NO: 83192 - DNA, 75 bp, Homo sapiens
atgaaatgggagttcactagctgggaaaccagcctggacaccaagtctgtgtcagaaggccacctcaagaggaac

SEQ ID NO: 83193 - DNA, 95 bp, Homo sapiens
actcttggcatttggctttgcctttctggacacagaagtatttgtgacaggaacatcatcttcagcgggctatttcagcacagcaggtgtatggc

SEQ ID NO: 83194 - DNA, 100 bp, Homo sapiens
aaggacccccagcggtgcacgctgctggtcagccagttccgctcctgtcaggcctgtgcagtgggactgattgccgtgggtgtcggggcacagcttgtcc

SEQ ID NO: 83195 - DNA, 100 bp, Homo sapiens
atcagagtcaggtgaaggctgatggatttcagaaactgttggagtttatatacacaggaactttaaatcttgacaggggccatcgggttttacttttctc

SEQ ID NO: 83196 - DNA, 78 bp, Homo sapiens
cggagacagcccaaatatcctcggaagagcgctcccaggagaaacaaggaccagttactctccacaagaaaattcaca

SEQ ID NO: 83197 - DNA, 123 bp, Homo sapiens
agtgactggtatgagcaacatcggaaatatggagcattaccggatcagggaatagccaaggcagcaccaggagctattcccattctccttataccctactttctgttattcagtaagttctgg

SEQ ID NO: 83198 - DNA, 100 bp, Homo sapiens
cttggaagtgcctgaagccagtgggctggggactcacggccgggacactcagggcagaggtggtttgtgctccccctactgcctatatcgacttcgcccg

SEQ ID NO: 83199 - DNA, 100 bp, Homo sapiens
ctacataaattttataatgtggatctctttcagagaggatacttggagatgaagttcaacttttttcacttgatgaagaatttgattatgacaatgtgat

SEQ ID NO: 83200 - DNA, 100 bp, Homo sapiens
cggttctacagcagggcaccagagttgggacggcagccctcagtgcctgccatggactggatggtgattgctcacaccaaagccttggacccctcccagc

SEQ ID NO: 83201 - DNA, 88 bp, Homo sapiens
ttcaagcgattctcgtgcctcagcctctccagcagctgggattacagtaatagttatgcacgagtgcgagctgtggtgatgacccgag

SEQ ID NO: 83202 - DNA, 75 bp, Homo sapiens
ccgctggacaagcacgagggcgcgctcgagacgctcctgagatcatggggaatttcagaggtcatgccctccctg

SEQ ID NO: 83203 - DNA, 75 bp, Homo sapiens
aaaaaaataaaaaaaaagccaaaaagataaaagcccggatgaacttcaggaaccctctggatattgatgcctcgg

SEQ ID NO: 83204 - DNA, 76 bp, Homo sapiens
gggacagccatggtttcagacgggcaacgggcatgaggaggtagttgcatgcgcctgggatggacagacatatatc

SEQ ID NO: 83205 - DNA, 98 bp, Homo sapiens
tcagtgcaaaactcctattatccaccgggacctgaaggttcaactccttccacccggacacgcgcaagccgatgcacagagagtgtggcttcattcgc

SEQ ID NO: 83206 - DNA, 75 bp, Homo sapiens
cagcgaccgatatagctcgccaggtgccttgatgacttacaagccctcaaggggaagcattttctcctggactcc

SEQ ID NO: 83207 - DNA, 100 bp, Homo sapiens
ggcctataaaatgcttcaagtagtcctgtgctcaacattgcttatcgatgttccatttaagcagacctcttccatagctgtagctggagcggtaattgga

SEQ ID NO: 83208 - DNA, 75 bp, Homo sapiens
gaagagccggggccgtggctgacatggagcagggtgaggtggctttgaccccgggttgcccggccagcacgaccg

SEQ ID NO: 83209 - DNA, 80 bp, Homo sapiens
cctgggtggttgttggcgtgtccctgcagcgaaggatcctggaaggatgcctgtggccctcggagagcacagtgtcaggc

SEQ ID NO: 83210 - DNA, 100 bp, Homo sapiens
cgccgctctccagcccgcttgaacgcgtttgcctcagcatggagggcggggccgcggcagccacccccacagcactgccttactacgtggccttctccca

SEQ ID NO: 83211 - DNA, 100 bp, Homo sapiens
ggaatgttaagttgattgccctttcaatagacagtgttgaggaccatcttgcctggagcaaggttcgttttaaaaatttagcatccagaccgtattctct

SEQ ID NO: 83212 - DNA, 96 bp, Homo sapiens
cgccgaggaggttgggatcttcttcactgcctctggcatggatgaggactgcctggacagatcctttcgggcacaggtgttcagctgccctgcctg

SEQ ID NO: 83213 - DNA, 75 bp, Homo sapiens
acaaacttcccagaggcattagataaagccctaatttgtttagaactgtaatatgcacagttaaaacaacttgtc

SEQ ID NO: 83214 - DNA, 98 bp, Homo sapiens
ctctaggacaagactgtatgatagtgttagttccacagatggggaggacagtctagagagaaaggaggagatgttaaagtaacccatcttgcaggacg

SEQ ID NO: 83215 - DNA, 100 bp, Homo sapiens
tcgtctgcttcatttaatgtcatagagtttccttataagaatcttccaattgaggatatcaccaactccacattggattgtcaccagacctgcaatctat

SEQ ID NO: 83216 - DNA, 75 bp, Homo sapiens
gaaggtccttagggaggaccccagacaccggagactgggaaatgcaatgtctcaggctgtgcagacaaacggaac

SEQ ID NO: 83217 - DNA, 82 bp, Homo sapiens
cctctcatcattgtgttaatggtgaagcacagcgattcccacaatacaatggtgggtgaagagaagatgtctctaagaaacc

SEQ ID NO: 83218 - DNA, 95 bp, Homo sapiens
gcgaagctggccaaagcctgcccagacggctcacctgtgcgggatggaacaaaagttggaatcgaagcctcttaaaatggcagatgacttggact

SEQ ID NO: 83219 - DNA, 83 bp, Homo sapiens
aaccaaccctgccagcacctggaccttggacattcagacttcagaatggacttgtttacactgggcatgtaaacgaaaccatg

SEQ ID NO: 83220 - DNA, 100 bp, Homo sapiens
acttcctcacctccttcgtggggctcatcgtgatcccggcgacatactacctctggccccgagatcagaatgccgaactgccattggatgtccagaatcc

SEQ ID NO: 83221 - DNA, 75 bp, Homo sapiens
cttggagagaggagaacgaacatcttctggacctttgtccaggaactgtggctgcaccatctgtcttcatcttcc

SEQ ID NO: 83222 - DNA, 75 bp, Homo sapiens
caaaaagctccgcaggggctgtagggagaatgttggctcaattaagaaacatcagggagataaattcaacccagt

SEQ ID NO: 83223 - DNA, 83 bp, Homo sapiens
acaggatcagagcatgaaggaagggcaattctgtggtgttcttggtcacacatttatggagtttctgaagggcagtggagatt

SEQ ID NO: 83224 - DNA, 98 bp, Homo sapiens
agagaatgtgtcagccgatgcaccgagtccagcccaggaaaatggagaggcatccattctggacttgcactcaggggccctgtctgtcgggaagcact

SEQ ID NO: 83225 - DNA, 95 bp, Homo sapiens
gtttgaatctcagagtgaagatgagttgacaccttttgacatgagcatccagaaatccttcggtgacatttcggaacgactgcagctgagggaac

SEQ ID NO: 83226 - DNA, 100 bp, Homo sapiens
cccagatgatgcggtggtgggggacctgccggcacgcgactccccccgggcccaaacccgagcgggaagaagttccgcagcaagccgcagctggcgcgct

SEQ ID NO: 83227 - DNA, 87 bp, Homo sapiens
agattctacaagtgacttaagaagcaaaaaattcaagaaactgactaaagctatatgtggactgtcgttccccatcaggaagtcctc

SEQ ID NO: 83228 - DNA, 100 bp, Homo sapiens
aacgcggctaaagttctgatggaaacctatgagaatatcccaggccagtcaaagatcacattcctcttacaagccatcagaaatacaacagctgctgaag

SEQ ID NO: 83229 - DNA, 100 bp, Homo sapiens
cgaatggaaaggctggatgcaacttgtgattttgatttatcacatttctggagcaagtacagctattgattactatttgaaagcgctaaggtcattggga

SEQ ID NO: 83230 - DNA, 98 bp, Homo sapiens
tccgcccccacctgctggaccccaggacagttcggcatggttttcctcatcagcccacagcattagcctttgatccagttcagaaaatcttggctatt

SEQ ID NO: 83231 - DNA, 90 bp, Homo sapiens
ggcggatctggaggagcagttgtctgatgaagagaagattactttctatgaagacaaaaattttcaaggccgtcgctatgactgtgattg

SEQ ID NO: 83232 - DNA, 100 bp, Homo sapiens
aacgaaagtgaccgaggagctccttttcgagcttttccaccaggaatacggggtgctttgcattcaggaatacagaaaaaacagcaaagtggagtcaagt

SEQ ID NO: 83233 - DNA, 101 bp, Homo sapiens
attggttcaggcaatcttcagcggtgatccagaggagatccggatgctcatccataaaactgaagatgtgaatactctgcaacagccaactcagtttataa

SEQ ID NO: 83234 - DNA, 103 bp, Homo sapiens
tgaactgaagaagcttgggctcacttccacaaatgtcaaaagaaatagactggcaaccttattttactacacgcattgtagatgactttggcacacacttacg

SEQ ID NO: 83235 - DNA, 100 bp, Homo sapiens
gccggtcatcgtcctgcagcgcggagcctgcggccaaggtgaaaggtgtagcagtcactcggcctacacccacagcatcgaccttgtgaacccagcgacc

SEQ ID NO: 83236 - DNA, 95 bp, Homo sapiens
gcccgcccctccggctcctggaacggagccctctgccggctgctcctgctgaccctcgcgggagagtcccgtattctcagagtaaaagttgtttc

SEQ ID NO: 83237 - DNA, 75 bp, Homo sapiens
gcggtgctgaggcacctggagaccttcgagcaccccaacgtggtcagggtctgaaaagccctcaagaaagcctca

SEQ ID NO: 83238 - DNA, 90 bp, Homo sapiens
ggaaatcgagactcatgactcccagagaggatggcatctagaagaggcggggtttcaccatgttgcccagactggtcttgaactcctgag

SEQ ID NO: 83239 - DNA, 51 bp, Homo sapiens
tatatgagagtcgcgagtgtgcagcagccactgccaaaaaatatggtgtct

SEQ ID NO: 83240 - DNA, 75 bp, Homo sapiens
gataccaagtctcccaacaacagagacaggataaaagaatcagagtgtctcaacccttgacaagaggaccaagtg

SEQ ID NO: 83241 - DNA, 90 bp, Homo sapiens
aaaaagcaagagtttgttatatagcaggtcctgacttgtcctgggcaagccaagtccattgcttctgctcctgggaagtgccaagattct

SEQ ID NO: 83242 - DNA, 100 bp, Homo sapiens
ttgcccaggaactgtggccaaagaccttaggagagacgagcagccttcagggagcgtggagacaggtggaaatggatattgttgaaaaactggtgaaaat

SEQ ID NO: 83243 - DNA, 75 bp, Homo sapiens
gtcgtcatggagacaggtgctctcggttgcacaataaaccgacgtttagccagtcttgccacttgcctagtgagg

SEQ ID NO: 83244 - DNA, 75 bp, Homo sapiens
gccctgtctcctcgcagatgaggtgtatgcaacagcgttattgcaacaggctaacgaaaacagacaaaattcaac

SEQ ID NO: 83245 - DNA, 96 bp, Homo sapiens
tgcggctgctggacgacagcgagtacacctgcaccatccaggattactacagcatcccatttcccacacccactactccgctgactgggagggatg

SEQ ID NO: 83246 - DNA, 51 bp, Homo sapiens
gacagacgggaaaaatagtagcaccaaaacctctgcgccatgagagccaag

SEQ ID NO: 83247 - DNA, 100 bp, Homo sapiens
ggactacttagttgtagacatgccaccaggaactggagatgtgcagttatcagtctcacagaatattcctataacagtgccatcagctcacacttgcaaa

SEQ ID NO: 83248 - DNA, 85 bp, Homo sapiens
gtggccctgctggaggagctctggagctgcggtgcaaccctgggcagtttgcgtgtcgcagcggcaccatccagtgcatccccct

SEQ ID NO: 83249 - DNA, 88 bp, Homo sapiens
attcgcagtggtcgcttcttctccttggtagggactgaaggttggagaagcatattaactgctccagggtcatttgaagctgggctgc

SEQ ID NO: 83250 - DNA, 90 bp, Homo sapiens
tgaaccttcatcttcctcaaacagaagaagctaaagcagaggcccttgttctgatggggatcctccaggtcctattgacaatactaagat

SEQ ID NO: 83251 - DNA, 90 bp, Homo sapiens
ccacggactacaataacaatccctggtacctgacagtgtaaagaaggagctcctacaaagaataagaacattccttgctcagcatgccag

SEQ ID NO: 83252 - DNA, 74 bp, Homo sapiens
ctggcgcaggggccgctgcggcaaggtgaaaggtgtagcagtcactcggcctacacccacagcatcgaccttgt

SEQ ID NO: 83253 - DNA, 100 bp, Homo sapiens
cgaaggccgggacccggttccccggcccacagtgggggtgtgcaaacccgagagaactggttcatagccctgatgaagcaagttactctgctctcctaat

SEQ ID NO: 83254 - DNA, 100 bp, Homo sapiens
agctcaatgagaaaatctccctgctccgcagcgacatcaccaagctggaggtggacgccatcgtcaacgccggagctgaagaagaagctgttcaaacgcc

SEQ ID NO: 83255 - DNA, 83 bp, Homo sapiens
ctgccgctgtcgctgctgctcgttcgagtcgcaggtacatgtcccagagcaagcacacggaggcccgggagctcatgtactcg

SEQ ID NO: 83256 - DNA, 100 bp, Homo sapiens
aaggattccaagtaactcttatttgtctatcaggtgtttgaaagtgtggctaagaagtatgatgtgatgaatgatatgatgagtcttggtatccatcgtg

SEQ ID NO: 83257 - DNA, 100 bp, Homo sapiens
aaggtggctcaagcgaaactgaaggaaattggtccagatgacatgaatatggaagagtacaaggaatggtcctcgtccgaagtgagaatgggcagttgtt

SEQ ID NO: 83258 - DNA, 75 bp, Homo sapiens
caaagaccatcatgcacctcatgatcaacaatgatcctggcttcctggacaagcaggctcgctgccactacctga

SEQ ID NO: 83259 - DNA, 100 bp, Homo sapiens
tgatcaagaggcagaagcagagtttggagtatttggagcaagagctgacctccgggccaaggccgtggagctggaacatgagacattccggaacgccaag

SEQ ID NO: 83260 - DNA, 100 bp, Homo sapiens
gaaaggagagctaccatcactaaggtgtttctgcccagttttccttcatagtcagatgctctgggagctggtgctgttgggggagccccttgtggttatg

SEQ ID NO: 83261 - DNA, 50 bp, Homo sapiens
aacatgatcaagggtgttacactggtgggtgacatcaccatcctggtgaa

SEQ ID NO: 83262 - DNA, 101 bp, Homo sapiens
ttcaaagaacagaatgctaaggaagctgtggcaagtttctaagcatgaattgaggaacagaagaagcagagcagatgatcggagcagcatttgtttctccc

SEQ ID NO: 83263 - DNA, 83 bp, Homo sapiens
caaggctgcagaagccaaagccacgcccagcctggaagcacgggtgcgcgacatcgccatagcaacaaggaacaccaagaaga

SEQ ID NO: 83264 - DNA, 100 bp, Homo sapiens
gttggagccggcgggggctggggactggcctcggggcgacttgagcatctgggctgatgggccgtaccctgcaccgtgagccacccgcaggagaccagga

SEQ ID NO: 83265 - DNA, 75 bp, Homo sapiens
ttatctactcccagatgaccaggatgatagacctactggaggctaaggcatcatcttcataaggactcctggaaa

SEQ ID NO: 83266 - DNA, 75 bp, Homo sapiens
aagaatttgaagacaaagagtggacatttgtcatagaaaatgcctgcactgcccaaagtcttggaaacttgctgg

SEQ ID NO: 83267 - DNA, 75 bp, Homo sapiens
tatggacacaagcctcattttggaatattgcaggaaagctgtgtgaagagacaaagggagaatgccatgtgaaga

SEQ ID NO: 83268 - DNA, 89 bp, Homo sapiens
aggattccaagtaactcttatttggttaatgatgaaatggcaggtaattcacacttttggacagagcgcaccgcccccgtggaatcacc

SEQ ID NO: 83269 - DNA, 126 bp, Homo sapiens
cggacagtatgagaatttcagggtgcagtatacagaaacagagccgtatcataattaccgataatctcaggggcgatataatcaatgaggtggtcctaaagttgctcaaggctggatggtcccggg

SEQ ID NO: 83270 - DNA, 107 bp, Homo sapiens
agaaggttggctttcacaagtacagtctacaaaaagacctgctagagccattattgcccctgccggtggtggtgtgcacattgagccccggtatagacagttccccc

SEQ ID NO: 83271 - DNA, 97 bp, Homo sapiens
atgcttattatttgttgaaggattttgcactcaccattaaatctatcaggagttctcagcctgaagttgactggaactttcagttaacaagtattta

SEQ ID NO: 83272 - DNA, 82 bp, Homo sapiens
cgagtgctttgtgatcgaaaccctgaccggatcccataaacactgtcgaattaaatgtgagggagtctgacgtaagagtttg

SEQ ID NO: 83273 - DNA, 80 bp, Homo sapiens
gtcaccctggagaacagcccgttggtgtggaaggaggggcggcagcttctccgacaggcactgcacttggctgtgattca

SEQ ID NO: 83274 - DNA, 87 bp, Homo sapiens
tgacaaactaaagaaagacttgtgttacgctttggaagtgataaagcagttaaaagagaaaatgaagatagaacgtgctcacatgag

SEQ ID NO: 83275 - DNA, 87 bp, Homo sapiens
tcatggcggcagcagccgctctgagggcgcctgctcagccaaggccacctttgatgccatttctaagacctacagctacctgacccc

SEQ ID NO: 83276 - DNA, 75 bp, Homo sapiens
ttcagaattcaactgtggagttcattgcttcttcagattacatggttcaacagagtttggaaaagatttctaaac

SEQ ID NO: 83277 - DNA, 101 bp, Homo sapiens
gcagccctggctaccagctgcaccccagccaggcctactgcacaggttctgtggatggagttataaaggaagtgaatgtgagcccatgccccacccaaccc

SEQ ID NO: 83278 - DNA, 50 bp, Homo sapiens
cagattaccacactgtgaatgttgatgatctagtgaaaagccatttgatg

SEQ ID NO: 83279 - DNA, 50 bp, Homo sapiens
acccgtgggtgatgcagacgcaagctttttccagaaaggaggagtcaagg

SEQ ID NO: 83280 - DNA, 74 bp, Homo sapiens
gtcccggatagcgagggcggccgcgccggctccagcacccaccaaggctccggatgtgttccccatcatatcag

SEQ ID NO: 83281 - DNA, 100 bp, Homo sapiens
cgaggagctcactgcggtcctaaccccgccgcagctcctcggacgcaggtggaaactaattctaagccagactgctggagatcaccctgttctagtgtgt

SEQ ID NO: 83282 - DNA, 80 bp, Homo sapiens
gcaggcagtggccacaagagcgaggagaagcgagaaaagatgaaacggaccctgaactgtggctgcaccatctgtcttca

SEQ ID NO: 83283 - DNA, 98 bp, Homo sapiens
tgagttaatgtcaaatgacagcaaagcactgtgtggctgaataagcgatattgttaatcctgccagtctttctcttcaagccagggtgcatcctcaga

SEQ ID NO: 83284 - DNA, 100 bp, Homo sapiens
aaatcttgcggcaacgcccccgggacatgcatcgtcccctggactctctcaagtaagaatgattgatgttggctgatattggagtgctcattcacatgaa

SEQ ID NO: 83285 - DNA, 75 bp, Homo sapiens
tgggaggagtatgccaaccagcatggccctggacagtcactatgaacaagaccgtagtgcacttaaaaaaaggga

SEQ ID NO: 83286 - DNA, 101 bp, Homo sapiens
cccgaacaccctatgggatgccatatcttgggcctttgaggggagggactgcacctgagtacagcacccaggcgtcttctgcagcccacagaaggttcagc

SEQ ID NO: 83287 - DNA, 75 bp, Homo sapiens
acaaatccaagcagttctgcaaaggtgctcctgggcgctttgtctacaccggaagcaaaatgtggattcagcaaa

SEQ ID NO: 83288 - DNA, 98 bp, Homo sapiens
gcaagcacgcgggacccatcgtctccgtgtggcaccgcgagctccgcaaagaatagcctaacatggcagaccagagacagcgctcactgtctacctct

SEQ ID NO: 83289 - DNA, 90 bp, Homo sapiens
cagctgcgcagggcctgccaggtggcgctcgcggccctccaggcactgaagcgtaagaagaggtatgagaagcagctggcgcagatcgac

SEQ ID NO: 83290 - DNA, 142 bp, Homo sapiens
atccccgcaaggatgagtgctgccagagagtctcacccgcatggggtgaagcgttcagcctccccagacgacgatatgagaatcctgaagcacagatcacagagtgagatgccagcaaatctcaaactggaattcaaggagg

SEQ ID NO: 83291 - DNA, 75 bp, Homo sapiens
ttcgttatggacagcatccaaacattatcactctaaaggatgatgaatttttagatgtgatctactggttccgac

SEQ ID NO: 83292 - DNA, 73 bp, Homo sapiens
cagcttgggaggtgctgccaccacagtatgttcatgcggatgctcctaccaataaaacactggctgggctggt

SEQ ID NO: 83293 - DNA, 100 bp, Homo sapiens
gagctgagatcctacaggagtccagggctggagagaaaacctctgcgaggaaagggaaggagcaagccgtggctcccagccaacctctgataaaccctcc

SEQ ID NO: 83294 - DNA, 75 bp, Homo sapiens
agttcttccagtcctcctaggcatcttattgatcctccagtcgagattgacgagatgcctgaggctgccgtgaaa

SEQ ID NO: 83295 - DNA, 113 bp, Homo sapiens
cctccattggatttaaaagacagtcctcgtcagcactgactttcagctatggaatcgattggcggcagtaagcacacaatgaatgatcacctgcatgtcggcagccacgctca

SEQ ID NO: 83296 - DNA, 100 bp, Homo sapiens
gaagcaagcagttcagaagagccaaggaataaacatgcaatgaacccaaaagggatgaagcctgctgggagcgtgaatgacatggccctggatgccttcg

SEQ ID NO: 83297 - DNA, 75 bp, Homo sapiens
ctggatctgaggatgtgaaacttaaatttgaagaggtgtatgaaaacattatagactggtattttcaattttcat

SEQ ID NO: 83298 - DNA, 100 bp, Homo sapiens
cacgtggttcgatggctgccgcggctacgctgaggctctccgctcaggcaattaagttggaatatgcaaggttggttaagttggcccaagaagacacccc

SEQ ID NO: 83299 - DNA, 75 bp, Homo sapiens
ttgaatctggtgttatcaacttaaaagatgccacctctaagtctcccatcaaaggacgtgcacagccttatgatc

SEQ ID NO: 83300 - DNA, 49 bp, Homo sapiens
cgtctacaaggcgaggcggaaagatgggctgtattcatcaccaaagaaa

SEQ ID NO: 83301 - DNA, 50 bp, Homo sapiens
ctcagcccccggatcagcctgcctctggcattttctgcattagcaaatat

SEQ ID NO: 83302 - DNA, 100 bp, Homo sapiens
ttttctagtccctcttacttgaagcatgtctttcagagcccggcaccacccatcttgagtatctggtggcgtcccccaggtgttcctgacagcatcatct

SEQ ID NO: 83303 - DNA, 100 bp, Homo sapiens
caaaaacgcaggaccattgagagctactgtcaggatgtcctaagacgccaggaggagtttgagcataaggtgatgtactgcagtgcagaatgtcggttgg

SEQ ID NO: 83304 - DNA, 100 bp, Homo sapiens
aaaaaattattagaaattccgcgggcggtgtagaggcggcggacgggccggagggaggatgttaaagccccgcggtcaccatccttgtcagcctggccct

SEQ ID NO: 83305 - DNA, 75 bp, Homo sapiens
cggcgcgcggacccaggcgcggatggcgaggccagcagccctgggcgctgcctatggcacagccaagagcggtac

SEQ ID NO: 83306 - DNA, 75 bp, Homo sapiens
cgggtgcgtctgccgcagagtcggcacctgaaggacatggagagtgtgaacatggctacgcctcttcattcccgt

SEQ ID NO: 83307 - DNA, 74 bp, Homo sapiens
aaggcggcacaagaaaagatgatccagcaggagcatgagcggcagggtaccgtgagggttttctctggaagcgt

SEQ ID NO: 83308 - DNA, 113 bp, Homo sapiens
ggagccatcagcttcagctccagctccgctctcttcggctgccccaatccccggcagctctctcagattaatactgaggaacacgtggatgcagctgatcaggaggttatctt

SEQ ID NO: 83309 - DNA, 75 bp, Homo sapiens
gctttctcgcttgtcaccttgccatgtggaagaaactgggcttacagtggaacacctctaacagaagaaaaggag

SEQ ID NO: 83310 - DNA, 80 bp, Homo sapiens
gaacagcaatattgcatatcaaggttgactatagtcaatggggccaatggagccaagtgtatggaaacccacaacagtat

SEQ ID NO: 83311 - DNA, 97 bp, Homo sapiens
acacaccctccagacccccgtccagtgaattctcacggggtcactctggtgcccattgaggagttcagcccggagttcgtggagccccgggtcagct

SEQ ID NO: 83312 - DNA, 75 bp, Homo sapiens
agactgccgggactggtcagatgaacccatcaaagagtgcgccaatgaatttccctgtttgccaaagcaagtggc

SEQ ID NO: 83313 - DNA, 100 bp, Homo sapiens
gaggaggaagaaggcgagaagcacagacactcttgcactcctgtaatgagcctggcactgtgatgaaacacttttcccgtgtcgtttgagtgcatcttct

SEQ ID NO: 83314 - DNA, 75 bp, Homo sapiens
cctggacaattcacctgcctcctatgtcttccatccagacaatgctacctacatcggctctgtgctcatctctgt

SEQ ID NO: 83315 - DNA, 100 bp, Homo sapiens
tcagggcatcggagagtgccacattaatggctgcagcaaaaaattattcctgatcaggaccaactgatggcaatagcactagagtgcatctatacctgtg

SEQ ID NO: 83316 - DNA, 100 bp, Homo sapiens
ttaggttcgccatccaggacatctccgtggaagattcttctgatgtagagcgactggaaagattcttcgactcagaagatgaagactttgaaatcctgtc

SEQ ID NO: 83317 - DNA, 119 bp, Homo sapiens
tcactgggactttaccttctcatactttgttagaaaagccaccaggctgttgaagctcaaatccgaagttttggacagactccttctcaactactcatagagccccatcctcccagagg

SEQ ID NO: 83318 - DNA, 50 bp, Homo sapiens
tggaagtcgcctggtgtgaactgcagctcttgaatgtcgtctctcaacta

SEQ ID NO: 83319 - DNA, 100 bp, Homo sapiens
acaaatcagatcgcactcctgaaattaggaaaattgccactgctttataagtttgatgaagaatttctggaaacaaaagaacagttgtacaagttgcagg

SEQ ID NO: 83320 - DNA, 86 bp, Homo sapiens
gcacgccggaccggagagcgcggaggcagccatggtgcggttcaagcacagtctatcaggtgtttgaaagtgtggctaagaagtat

SEQ ID NO: 83321 - DNA, 100 bp, Homo sapiens
caggctctttggagagaaaacttgtcagttcctctcagcaacatttcatacaccatttagtcacctaggccaaagtccggaaggatgctcctcttacact

SEQ ID NO: 83322 - DNA, 98 bp, Homo sapiens
agttgattgactatggtctctccggctaccaggccctgagcctgtgcaattatttcgagagtcaaaatgtggatttccgaggcaagaaggtgatcgaa

SEQ ID NO: 83323 - DNA, 74 bp, Homo sapiens
tcagaagacaatatcatgcaagtgtggcaaatgatttctaacgacccaagtccaggatacaacattgaacagat

SEQ ID NO: 83324 - DNA, 100 bp, Homo sapiens
gaaatgtcagctcttccgcagtgattgaagctttgataaatgaaatcttcctaagtatagtttccatagcaaggcgtgtacaagatccattagctgagct

SEQ ID NO: 83325 - DNA, 100 bp, Homo sapiens
gcggccgcgccgcagagatgtgactcgggccgaaggccagctggagcgtcggcgctgcggggccgcgggggtcggccctgaagcgccagagctcgttggg

SEQ ID NO: 83326 - DNA, 75 bp, Homo sapiens
gttgcattgcctgagaggagcggagtctgccaggtggtgtccatcatgggtctgcggaagagggagctgctgaag

SEQ ID NO: 83327 - DNA, 97 bp, Homo sapiens
gatcccacacctccggaccgagggacgcggggggaaatttgcagtggtgagaaaatgtataaagaaagattctgggaaagaatttgctgcaaagttc

SEQ ID NO: 83328 - DNA, 100 bp, Homo sapiens
gtagtgtagtcctggcgccccgctggaggagctccccagctggtggctggagcgaccccttgttctttggtggcgctgccaggcccagacatgtccgtcc

SEQ ID NO: 83329 - DNA, 75 bp, Homo sapiens
catcgccgccctgctctacacacctgtgctcatcaggtttgaccccaggactcccctacccacaccagactcccc

SEQ ID NO: 83330 - DNA, 87 bp, Homo sapiens
aagacatgttttctgagaaacaggacatacctttcgtagagtctactgttagcagacttggccgatggattgactttgacaatgact

SEQ ID NO: 83331 - DNA, 100 bp, Homo sapiens
gcggccggcgggaccataagggcttaactcatatatttaacccccctccaaaaattggtgaggtaacatacgtggagctcttaatggacgctgaaggaaa

SEQ ID NO: 83332 - DNA, 100 bp, Homo sapiens
ggcctcgcgccggctatggccgtgccctggggctgagccctcaggtcagcccaaggccaaccccactgtcactctgttcccgccctcctctgaggagctc

SEQ ID NO: 83333 - DNA, 75 bp, Homo sapiens
gcttcatcaaaaatagtgatagctttgataatactaaggctcgtacgtctgcatcgattatcttacgtggggcaa

SEQ ID NO: 83334 - DNA, 75 bp, Homo sapiens
ctggactcatggaggctgagcatttattcagtgaaaatgcctcgtgtaaaagcagctcaagctggaagacagagc

SEQ ID NO: 83335 - DNA, 75 bp, Homo sapiens
agctattatcagcaagttgacagatgctagttggtataccgtggacgccctcctgcaaaacggcccaactacgtt

SEQ ID NO: 83336 - DNA, 98 bp, Homo sapiens
gggaaagttattgaacggctgggccagagcgtggttgctgaccagttgaaagattctggctacattggagattggttgctttctaaaactgaaggaga

SEQ ID NO: 83337 - DNA, 80 bp, Homo sapiens
gggccatggaactggcggacgtgggggcggcagccagctcgcaggggtgtgtggacaaaattgacttgtgagatgtctgt

SEQ ID NO: 83338 - DNA, 87 bp, Homo sapiens
gcaccgcagccttgggcctcgcgccggctatggccgtgccctggggctgagccctcaggatgatcggctgaatgtaacagaggaact

SEQ ID NO: 83339 - DNA, 82 bp, Homo sapiens
tatcctataagacttcatccactgcataaaagagaggccaaagagccagagcaacagaacaaaatccagtctcatagcagag

SEQ ID NO: 83340 - DNA, 88 bp, Homo sapiens
ggggagccggcgaggatcaaaatcttcgaaggagggcaaaatacatatctcagtgcattgatgagatcaagcaggagctgaagcagga

SEQ ID NO: 83341 - DNA, 90 bp, Homo sapiens
aagacgacgagtttgaagagttccctgccgaagggagtgccttggtgaagcacatgagccttgtgactgccaaacatggaagaattggct

SEQ ID NO: 83342 - DNA, 96 bp, Homo sapiens
gtggagagggagtgatgtcttccagactcggtgctgtacccgcctttccatagcaaggcgtgtacaagatccattagctgagctagtgaaaattga

SEQ ID NO: 83343 - DNA, 75 bp, Homo sapiens
aaaaacacaaatgaattctataagaccattccccggttttattataggggaagacatgtaaggaatttgcataag

SEQ ID NO: 83344 - DNA, 83 bp, Homo sapiens
ttcagccacagcagccaccatatacaggagctcagactcaagcaggtcagattgaaggttggttaaatctagacttaagaggc

SEQ ID NO: 83345 - DNA, 83 bp, Homo sapiens
atattggggggctcggctgcagacttggccaaatggacgggactattaaggtttactcctggcttgggggcattaggaagcac

SEQ ID NO: 83346 - DNA, 100 bp, Homo sapiens
ccgggcacggcggccgagctgcggcagagcgtgtctgaggtggtgcgcggctccgtgctcctgaatcctgttacacctgggatttaggcactttcaatct

SEQ ID NO: 83347 - DNA, 75 bp, Homo sapiens
cgtcttcaccctgatgggacagtgctgtatgggctcaggtggtgatgatgtccagcaactctgtgaagcaggaga

SEQ ID NO: 83348 - DNA, 100 bp, Homo sapiens
ctgaagaggaacggggacgggagcctgctctacagcgtggtcaacacggccgagccggacgctgatgtaaaagcagtctgggcgcaggctggggacccag

SEQ ID NO: 83349 - DNA, 83 bp, Homo sapiens
gaaggagagtattctggccgataaatccctggctactagaactgaccaggtatgagaaagtgccagtcatcttggttgggaac

SEQ ID NO: 83350 - DNA, 100 bp, Homo sapiens
ctgaatggaaagccagtaggacacgaaggtgacacgatgaggcgagtggtacgacagagcaagtttcggcatgtatttgggcaagcggtgaaaaatgacc

SEQ ID NO: 83351 - DNA, 100 bp, Homo sapiens
caaaacagcagatttcccaagagcagcggaaaatgatccagtcacaggttctctacttaaaagacaatgactactgatgaaggtgccaagaacaatgaag

SEQ ID NO: 83352 - DNA, 75 bp, Homo sapiens
cgaagctctagaaatgaatgtttccatctcttcagagatgaaccagcctccagtgagaaggagaacactcagccc

SEQ ID NO: 83353 - DNA, 100 bp, Homo sapiens
gtgaccgaggcctgggccccggaatcatgaataaactggaggataagcaggaccagatgataccatgaagagaagtttacaggccctctattgccaactg

SEQ ID NO: 83354 - DNA, 51 bp, Homo sapiens
tgccttcatcctctataacaagtatatcacattgaaacatcccaattagag

SEQ ID NO: 83355 - DNA, 100 bp, Homo sapiens
caaactgactttgcagccacggagagatggagtttcactcttgttgcccaggctggagtgcaatggcgtgacctcggctggctgcaaccttcacctcccg

SEQ ID NO: 83356 - DNA, 100 bp, Homo sapiens
aaggacaaaagccaagaggaggacagttcgctacacagcaatgcatcgaggtaacctttatcaaaaggatggagttgggaaaaggaaaactactcaggac

SEQ ID NO: 83357 - DNA, 100 bp, Homo sapiens
gtcggcgagcccccgcggcgacaggatttggagttccatggagtgatgagattttattttcaagataaagctgctggaaactttgcaacaaaatgtattc

SEQ ID NO: 83358 - DNA, 104 bp, Homo sapiens
ctgtcggcagactggtgacttcacttttgagtgcaactgccttccagctctttgccgagggcgtgtggtgagagtccccacagcgaccctggttcgagtggtgg

SEQ ID NO: 83359 - DNA, 89 bp, Homo sapiens
ttgacactatgggaacctaccatggtatgacactgaaatctgtaacggaacttggcattagaattcctcgaccactaggacagggacca

SEQ ID NO: 83360 - DNA, 90 bp, Homo sapiens
attggatttaaaagacagtcctcgtcagcactgactttcagctatggaatcggttgaagcttgtagattatataccaagttctctgcccg

SEQ ID NO: 83361 - DNA, 100 bp, Homo sapiens
caaggagaaaaaagacagaggagtgacgagggaatttgaagcctacattaatgcttctggagaacatggaattgtggttttctctttgggatcaatggtc

SEQ ID NO: 83362 - DNA, 96 bp, Homo sapiens
ttagcgcggcgtgagaagccatgagcacctggctgagcacgcagacactgtgcagctggtgtccggcttcgaggccaccatcaacaagtttgacaa

SEQ ID NO: 83363 - DNA, 77 bp, Homo sapiens
attgggtctcagaagagaggggctggcttaccagaaaccgatctgctcctccgtataaaggacatcagtcatttctt

SEQ ID NO: 83364 - DNA, 75 bp, Homo sapiens
tgtgagcatcacttggttccatttgttggaaagtttctgtagaaaatgtttcctgactgcaatgagggaaagcgg

SEQ ID NO: 83365 - DNA, 82 bp, Homo sapiens
tcatccattctcctgccacccccagacctcctcagctccagtgggccccatgctgattgagtttaacatgcctgtggacctg

SEQ ID NO: 83366 - DNA, 96 bp, Homo sapiens
gtcgagcagcggacgccggtctctgttccgcaggatggacattcactgaacaatgccagggatacaagtgccatggatactctaccgctaaatggt

SEQ ID NO: 83367 - DNA, 100 bp, Homo sapiens
tggacctttatacgtattgtaaagctctggattaatcgaattacagctgctagccaggaacatggactgaagtatccagcgctcattgggaatttagtta

SEQ ID NO: 83368 - DNA, 100 bp, Homo sapiens
ggaagtgggactcttcagccatcgatgatccgctgtgcggccacagctctagaggacaaaatcccagtccttggcacaaactcaggaaatggaagccgga

SEQ ID NO: 83369 - DNA, 100 bp, Homo sapiens
ggggttccctatgcaaatgccaaaggaattggttatccaggaaatcattcaccagattactaatgtggaagctctcattgccagagctcggtcactaaaa

SEQ ID NO: 83370 - DNA, 75 bp, Homo sapiens
gagttctccagcctgctgcgcaggataaaaggcaaactcttcacctgtgcctgatttgagatggggtcccaggtc

SEQ ID NO: 83371 - DNA, 82 bp, Homo sapiens
gatcatcgaggaaggcactgcgtttcgggtcgcaatggaagaagagatcgccgcgctggtcattgacaatggctccggcatg

SEQ ID NO: 83372 - DNA, 100 bp, Homo sapiens
cgaacccgcggcgcaataacgatcatcaatgctgtggtactgttgattttattgagtgccctggctgatccggatcagtataacttttcaagttctgaac

SEQ ID NO: 83373 - DNA, 99 bp, Homo sapiens
cctggagcagcgccaggctgatgtcgagtatgagctccggtgcctcctcaataagccagcctccctccccctcgctcaccaccacctctacttcgcagt

SEQ ID NO: 83374 - DNA, 100 bp, Homo sapiens
caagatggtgttggaaagcactatggtgtgggctttgttcgcgggggtcacagctctcatggctgcagctagcgtgaccccccctggctccctggagttg

SEQ ID NO: 83375 - DNA, 73 bp, Homo sapiens
cagtggtcgcttcttctccttgaatggcaacatcacagagctcctcctgaaggaaggtttcgcacgctgtgtg

SEQ ID NO: 83376 - DNA, 100 bp, Homo sapiens
ttttaaacttgtcattaataaaatagcatatgatgtgcagtgtccaaagagaggttcccagtctaagtgggtgactttccaagatagaggcagatcattt

SEQ ID NO: 83377 - DNA, 83 bp, Homo sapiens
gagtgtgagcggaaaggggcccggcgtctgcctcgagactgaagaccgatgccatggacaatattaccaggcagaaccaattc

SEQ ID NO: 83378 - DNA, 75 bp, Homo sapiens
gagggatccttcacccgtgtctgtacatcgacgccatcagcaacaagcagggcgagctggagaattacgtgtccg

SEQ ID NO: 83379 - DNA, 100 bp, Homo sapiens
cccagacgcggcacagagagggcctgggagcttgctgcagcttcaggacctgaaggagaagaaggagaaggtggaggagaaggcaagccggaaagagcga

SEQ ID NO: 83380 - DNA, 74 bp, Homo sapiens
gagcacgtcctcaagcagctggagcgggtcaaggtgggagctgctatttctatgacgtacatcacaagcaaacc

SEQ ID NO: 83381 - DNA, 100 bp, Homo sapiens
gagaaccaggcgctggcgaggttttactgctacactgagaggaccattgcgaagcggctcgtcttgcggcgtcaagtccatcatctccagaaccagctag

SEQ ID NO: 83382 - DNA, 100 bp, Homo sapiens
tccccatcaccggcacacattgtcaaatgagccgtcagactgctacagcattacctaccggtacctcgaagtgtccaccatcccagagggtgcctgccct

SEQ ID NO: 83383 - DNA, 100 bp, Homo sapiens
aatgatgtggacactgcattgagtttttaccatatggctggagcatctcttgataaaggttgttttccagtctcagtattatcacagagctaactcaccc

SEQ ID NO: 83384 - DNA, 50 bp, Homo sapiens
cgaagacgcggtgggccgcccctccgaaagtgaaattcgttattctacat

SEQ ID NO: 83385 - DNA, 87 bp, Homo sapiens
ggattccaagtaactcttatttgctgtagtagaatcagaggttggttggaaggtacctttactatacaagtctattcagcagcccca

SEQ ID NO: 83386 - DNA, 100 bp, Homo sapiens
agagcttgttctcgagtcatcacatgctcttggattaggaacagtgattctttcttaaaaatggattggtccaaaggaagattttttccattgtttgaaa

SEQ ID NO: 83387 - DNA, 82 bp, Homo sapiens
ctcagttggaagcagccgatccagcctgcggagcctgtggggcagcaccgacagtaaatggttcacggccgacatcatgtcc

SEQ ID NO: 83388 - DNA, 90 bp, Homo sapiens
cgaaggtttccggaagccgaggccttgagcccagagcaggctgctcattacctaagaatgaggacctaatttgcttcaaagatatcaaac

SEQ ID NO: 83389 - DNA, 75 bp, Homo sapiens
cctccaaggagttcaatcacttggcgtgacttcactacttttaagcaaaagagtcccctcttgctgttggctgca

SEQ ID NO: 83390 - DNA, 75 bp, Homo sapiens
cactgaatcaacatgggcaatgagaacagcacctcggacaaccaggactctcagcatgtcagttctgtaacccaa

SEQ ID NO: 83391 - DNA, 75 bp, Homo sapiens
ccaaatgttgaaggtgctgccaaactgctgtggtctgagtggacagggattacaagggccagaagctagctgaac

SEQ ID NO: 83392 - DNA, 100 bp, Homo sapiens
atcaccaccaagggtagccccagaggggagctccgagggcagctggttgtcttcttgcctgccctgtgtcgtaaaatgggggtcccttactgcattatca

SEQ ID NO: 83393 - DNA, 90 bp, Homo sapiens
gatcttttggaggaggaggatgaatttgatagagagctagcatgcccaccagcgagactgagtctgtgaacacagagaacgtcagcggtg

SEQ ID NO: 83394 - DNA, 98 bp, Homo sapiens
ggcctagcgctatgcctgcggcggagactgcatcaggctctcgaggcagaagaggcctggaccttggcgcacacagacccaggaacagatgagcaggg

SEQ ID NO: 83395 - DNA, 98 bp, Homo sapiens
atacatccacccagcccaagatgaccggtcaacgtggaggtaccaggccaccatgctcagtctcaagctgccccaacttcttcaagtccaccaggtcc

SEQ ID NO: 83396 - DNA, 50 bp, Homo sapiens
ctggaccctaatttgagaagtgcaggtggcagaactggtgaagccattgt

SEQ ID NO: 83397 - DNA, 100 bp, Homo sapiens
caagcattataccttgtttcacctacagaaatccagagacttacttatagtcaagagacctgtgaaaatcttcagcctgcttgaatttcttgaaactgtg

SEQ ID NO: 83398 - DNA, 75 bp, Homo sapiens
ttcctatgttttcttcatataatccaggggaaccaaacaagattctgctcctaagtgtaggagagaacttggtgc

SEQ ID NO: 83399 - DNA, 90 bp, Homo sapiens
agacttttataaaaaatttctttatgaacctttcccagtagaatcaagtttgcaatggattttggataaacaagatctgttgaaggagcg

SEQ ID NO: 83400 - DNA, 78 bp, Homo sapiens
ggtgactcttctcaaatgccttctcatccccacatagtgtgcggccgcctgagcccgagccaggagcactagagaggg

SEQ ID NO: 83401 - DNA, 82 bp, Homo sapiens
gttagtgagaccaaaaacccaccaattctggacacattgggattaaaggtcaaaatgcagatcttcgtgaaaacccttaccg

SEQ ID NO: 83402 - DNA, 75 bp, Homo sapiens
ttggggcttgatgaaggcgtggatagcctgaaggcagccattcagatcacaaaatttgtccaggatagacataga

SEQ ID NO: 83403 - DNA, 121 bp, Homo sapiens
gacgacgtgaaggagcagatttacaaactggccaagaagggccttactccttcacagatcgtttcaccagtgatcattaaagaatgggcagcttacaaaggaaagtctcctcaaaccccgg

SEQ ID NO: 83404 - DNA, 82 bp, Homo sapiens
aagaaatttggagtgtgcgtgcgcgccgagcgggatcgcttacacctgagacgaactacagaacagcacgtaccagaggtgg

SEQ ID NO: 83405 - DNA, 100 bp, Homo sapiens
catgatccttgtaggactctggttaattcagtggctgctcttaaaatacaaacctccagcaacacgtgtgagtgataaagtcatgattccacaagatgag

SEQ ID NO: 83406 - DNA, 74 bp, Homo sapiens
aaaagtctcagcaggcagtactcacgccacaatttttgcacgtcattacaagagcaatatactttgctgcttat

SEQ ID NO: 83407 - DNA, 82 bp, Homo sapiens
gtcgtggaagcaggactgcgccgcgtcttcctcaagagatgggggtcttgctctgtcactccagctagagcacagtggtgca

SEQ ID NO: 83408 - DNA, 100 bp, Homo sapiens
ccagcgcagcccgacgttccgctgctgggattggagctggagtgagccttccaggaattttggctgccaaatgtggtgcagaagtaatactgtcagacag

SEQ ID NO: 83409 - DNA, 82 bp, Homo sapiens
gaactgggacccctgctagaagagaagggcaaacgggtaatcgccaacccacccaaacatttcagcaggaacttgatgcaag

SEQ ID NO: 83410 - DNA, 90 bp, Homo sapiens
accatcggcaccgtgctggtgcccatcctgctggtcaccctggtcttcaccaagaacttcgcaggggaagtcatctacaataagaccgac

SEQ ID NO: 83411 - DNA, 88 bp, Homo sapiens
gtggagttctgctcggcgtgcgcccggaaggcgtcgtcttctcttaaaatatggggcattctcttctcccaccctcgggactttaccc

SEQ ID NO: 83412 - DNA, 127 bp, Homo sapiens
aaatcatcagggagactttccatttggtatctaagagagatgaaaatgtttgtaatttcctagaaggaggattggccctgttagcgtcccagctggaaccaacatttgccaggtatgttttcccttg

SEQ ID NO: 83413 - DNA, 90 bp, Homo sapiens
gaagcctttggtggagaaaggggagctccccagttaaagatctcagatgaccggctgactgtggttggagagaagggctactctatggtg

SEQ ID NO: 83414 - DNA, 75 bp, Homo sapiens
gggcttcctggcccgaaaggagagcctgcacccagattggctgaaaacttctgtgtctgccatttagctactggg

SEQ ID NO: 83415 - DNA, 82 bp, Homo sapiens
gtggcggcgaacgcggagagcacgccatgaaggcctcgggcacggtattagaaaactactcggatgctccaatgacaccaaa

SEQ ID NO: 83416 - DNA, 100 bp, Homo sapiens
cctctacttagctcagcaattcttacctttgtgaagcctcagtttaggtcatctggtggttcagaacactcaacagagggctctgtatccttgggggatg

SEQ ID NO: 83417 - DNA, 98 bp, Homo sapiens
ctgaggagccctcgttttcgagatcaggcctgaccgggataagctccagagctggaggccgaggagtggtgcaagcacctctgcatggagtgtctggg

SEQ ID NO: 83418 - DNA, 75 bp, Homo sapiens
ctgctgcctctgtcactcctggtgaccagcattcaaggccgactgcagcagtggcccagggcaaagagtgtgcgt

SEQ ID NO: 83419 - DNA, 75 bp, Homo sapiens
agaaggccctggacacagcaatatctctgggctttcacagatgctagttctcaagactgctatgatattccacga

SEQ ID NO: 83420 - DNA, 82 bp, Homo sapiens
tgggacagcattaccgacaagcaaggttggtttcatcgactacattgtccatccattgtgggagacatgggcagatttggta

SEQ ID NO: 83421 - DNA, 100 bp, Homo sapiens
gctgggcagcagcggccgaggaggaagaagcagctgcggcggccacaccctggatgaggacaggcgacactaacaggtgaagatctcgggagaccatgac

SEQ ID NO: 83422 - DNA, 98 bp, Homo sapiens
aactggtggtggttttcggaggcacagggcctcgtcctcctgcctaagacggagtgcgacgtgcgggaagtggagctgatgcggtgcctgcggctgcg

SEQ ID NO: 83423 - DNA, 75 bp, Homo sapiens
gaccataactctgccaaatatagaagctggtggaggacaccttcaccatagatgaagtctctgaagtcctcaatg

SEQ ID NO: 83424 - DNA, 82 bp, Homo sapiens
cggagagcgagagaggggagcaggcctccccatggccacccatggaccagtcggcattcacttcctcccttctgcggcccat

SEQ ID NO: 83425 - DNA, 80 bp, Homo sapiens
cagttggaagcagccgatccagcctgcggagcctgtggggcagatggtctgtcttctgctgatcccaactctgattggaa

SEQ ID NO: 83426 - DNA, 78 bp, Homo sapiens
cgctgagccctacaacacccccagcggccgccggctcccccacgagatgaggacggggacttggttgccttttccagt

SEQ ID NO: 83427 - DNA, 101 bp, Homo sapiens
tttatttttgtggcaggcatctgtgggatctgtaatagaaatctgtgatgcagatccatccgccctagcaaaatatgttctggctttggtaaagaaagaca

SEQ ID NO: 83428 - DNA, 100 bp, Homo sapiens
gtcctcaagaagttcctaaaaggcctgtagtggtggagacacgcccagtggatgatcctactgctcccagcaacctctacatccaggaatgagtccctag

SEQ ID NO: 83429 - DNA, 100 bp, Homo sapiens
cgaccttgagctccaggagttcgtctcttacgtctgcggaagtgcagctgcctcagttcttagcgcagaacttactccagcaaaaggactgtaaacatgg

SEQ ID NO: 83430 - DNA, 83 bp, Homo sapiens
atcatgtcgcgttacgggcggtacggaggagggtaacaagatgctcaactatagtgctcccagtgcagggggttgcctgctgg

SEQ ID NO: 83431 - DNA, 90 bp, Homo sapiens
tggctcactccccggtgcagtcgggcctgcccggcatgcaggatgtgctgatggagctccttgagcagtgcgcagatggactctggaaag

SEQ ID NO: 83432 - DNA, 74 bp, Homo sapiens
aaatctattgatgcagaagtaagggagcttgttacagtgacagtgatgaaaagcctctcaaaggaagccttcgg

SEQ ID NO: 83433 - DNA, 82 bp, Homo sapiens
gtcttctttgcctgcactaatggcacaattctgctttcccaggaactgcatcactcaggactctgcaagtttccagaagtaa

SEQ ID NO: 83434 - DNA, 108 bp, Homo sapiens
tcactgagacctgtcaccccgactcaacgtgagacgcaccgcccggactcaccatggtttttcgttggaatatacgttgcacatttatggcgattctgagtgtgaggg

SEQ ID NO: 83435 - DNA, 101 bp, Homo sapiens
gctgactgcgcacttggaatagtagcaggcggcggcggcggaacgccaggcagtggaatcaactatgaaattataatcatagatgatggaagcccagatgg

SEQ ID NO: 83436 - DNA, 74 bp, Homo sapiens
tgcctctcagctgccacctgcctttgacctttttgaagcctttgcaaaacccgagggcaacatccttcgagacc

SEQ ID NO: 83437 - DNA, 101 bp, Homo sapiens
tgctaggcattgaggagaaggcagcggacaaagaggcgagtatgggctccggaacaaacgtgaggtctggagggtcaaatttaccctggccaagatccgca

SEQ ID NO: 83438 - DNA, 97 bp, Homo sapiens
aagatcctcttcagaaataccactatcttcctgaagtactctgagatttgcccacctgatgaccttgccagcttgccatcatgcaaagaaaatcctg

SEQ ID NO: 83439 - DNA, 85 bp, Homo sapiens
cctgttgagttggctttggttgtcatgaaggatcttagtcagaattttcctaccaaagccagatggagtctccctcttgttgccc

SEQ ID NO: 83440 - DNA, 74 bp, Homo sapiens
cggactccatcgactcccccggctcttagactatattcaagtcaaacaacgttgaaatggattgggtgttgaag

SEQ ID NO: 83441 - DNA, 82 bp, Homo sapiens
agacgattcacctgtccagcatccgaccaccgaggctggagggggagaacacccagacaaagccacagacccaagcatgtcg

SEQ ID NO: 83442 - DNA, 51 bp, Homo sapiens
ttaaacttgtggcctcagaacagttgaacctgtctccagagaagattttcc

SEQ ID NO: 83443 - DNA, 76 bp, Homo sapiens
gactggatgacgtcgctgttcattactacagattgtataagcttgatgtagttttagagaccaatctggcaacaat

SEQ ID NO: 83444 - DNA, 75 bp, Homo sapiens
cgagggtggccctaggggcagcgagcaagacagcaagcaggatttttagactctgaggagcagttggagctaatc

SEQ ID NO: 83445 - DNA, 100 bp, Homo sapiens
cgctgatgagctggtctgcgatcctgaatgggggcggcgtgcccgccggggggctagtggccacgctgcagagcctcggaaaatgttctgctgctgccct

SEQ ID NO: 83446 - DNA, 75 bp, Homo sapiens
gcgtgtcaggcggagagacccgccgccaggcttctcgtcagtgcctcgcaggatggtaaacttatcatctgggac

SEQ ID NO: 83447 - DNA, 109 bp, Homo sapiens
gaggatatcgtgtctggagcagtggagcccaaagacccctggagacatggtcaaaatgcagatcttcgtgaaaacccttaccggcaagaccatcacccttgaggtggag

SEQ ID NO: 83448 - DNA, 98 bp, Homo sapiens
cgtggccaccgcctccagcttgccaccaaagacctgcgactttgctcagaaccacaccttcatcaagcggtccgaggtggaagaagtggattttgccg

SEQ ID NO: 83449 - DNA, 100 bp, Homo sapiens
agctcatcagcgtggaggacctgtggaaggcatggaagtcatcagaaggaaaacagttcctcctgaggatttcagagaagagctggacttcctggctgac

SEQ ID NO: 83450 - DNA, 98 bp, Homo sapiens
aacggcccccagcgcccctggtaactgacaaggaggccaggaagaaggttctcaaacaagctggatctaccatgaaagacttgtgaatccaggaagag

SEQ ID NO: 83451 - DNA, 100 bp, Homo sapiens
accacagatcccagccagtctctactcagcctggagcaaggattttttatcaagcagaaatgcatcgaacaacgagaatcaagatcactgagctaaatcc

SEQ ID NO: 83452 - DNA, 100 bp, Homo sapiens
cgccatcctgtctatcctcctggccgtcctcctcacggtcctcctggctgtgctcatatacacctgttgaagcatatgtcctgtgagcttaggggtgcta

SEQ ID NO: 83453 - DNA, 100 bp, Homo sapiens
cgaggggatagctggttaccagaaggacttctttgcagggccagtggtttctgtcagattttcgccgtgttcggtgaccagtgacttggattttccaaca

SEQ ID NO: 83454 - DNA, 101 bp, Homo sapiens
taagctcaaatgggaaaaatgttaggattttgaggaacgatggcactgaatttggaggttctatctaccagaaggtgaatgagaagattgaaacatccata

SEQ ID NO: 83455 - DNA, 100 bp, Homo sapiens
gaaggaactttgggtcctgaatcttctgggagctgaggaaccagatatcttgaaaagctgccagaaaggtgaccctggcagcaaccccaacaaacgccag

SEQ ID NO: 83456 - DNA, 80 bp, Homo sapiens
gacactgaacgaggagccagtggtgggtgaggcagtcttggaaaatgcccggctcatgctgcagacagaaactatccagg

SEQ ID NO: 83457 - DNA, 99 bp, Homo sapiens
gaagtgatcagtcactcctttgatgacaagagcacctcaaaggcagcagcctcaaggagcagccatggccccagacttgtcgcacggatgcagaaaact

SEQ ID NO: 83458 - DNA, 88 bp, Homo sapiens
cgcgacaccatcttcgacaacatcctcaaggtatttctgggaaaagccagcttctgtttgcactggtcttcacaactcgttacctgga

SEQ ID NO: 83459 - DNA, 102 bp, Homo sapiens
aacctcacctcctggggggagctgatgaagtccaagtactcagacatcaccatcatgtttgagcatcccggcggcgcaggcgcagaggagagcgagctgcag

SEQ ID NO: 83460 - DNA, 83 bp, Homo sapiens
tagagagtgagttgtcaaggtggatctacccagaacgccaatctgaattgccaacgcaaagcaaagcgagcttccccagtatt

SEQ ID NO: 83461 - DNA, 75 bp, Homo sapiens
gggatactacacctggccaaattctggaggtccatcagttctcaagagacgccagtgtggccgaggcctggctgc

SEQ ID NO: 83462 - DNA, 89 bp, Homo sapiens
tctaatgagattggagctattgaaaaggctgtagaatgtgttcagtgcagagccttcaataaaggagaaaagaaagacacatgcacaca

SEQ ID NO: 83463 - DNA, 112 bp, Homo sapiens
tcctggggaacccgttcagcacaccagtggggcagtgcctcgataaccagcccgagtcatgcagtcttttcgagaaaggtgtggtttccatggcaaacaacagaactaccag

SEQ ID NO: 83464 - DNA, 100 bp, Homo sapiens
ccgggtcatcctctcaggaaaggccagtaacaatccaatggcgtcccatgtagagtgccgtcctctgggagtgtttgagtgtgaactctgtaccttgaca

SEQ ID NO: 83465 - DNA, 100 bp, Homo sapiens
cgctgccgccctgagtcactgcctgcgcagctccggccgcctggctccccatactagtcgccggcagcagtgaggatgccagagttcatgggtttctaga

SEQ ID NO: 83466 - DNA, 100 bp, Homo sapiens
agggtcggactcccggggccatggccggaatgcagtaccctcagcagcagtgatcctgccatgaagcagtttctgctgtacttggatgagtccaatgccc

SEQ ID NO: 83467 - DNA, 75 bp, Homo sapiens
aatatagccaacagagcagcagctacgggcagcagaatcccaccaaatattttggttgtgagctgggagcacaga

SEQ ID NO: 83468 - DNA, 100 bp, Homo sapiens
cacagcctagatgaagtcaatttcatacagaaccttgtgttttacattgaagctgcatataaaactgctgctaaagaattacctccaaagccattgtcaa

SEQ ID NO: 83469 - DNA, 100 bp, Homo sapiens
cttgagtgcagctccccctataagcctcggcctccacaggtgaccatgctttgggattttcatagtttgagtaattcctatgggctctaccacccagcga

SEQ ID NO: 83470 - DNA, 98 bp, Homo sapiens
ccgcccgccccgcccgcagagtccggctgccgcgcatcgtccgcagacgccgccaccgccatgggctcctgaggtgccaacatcgcctctggtgagga

SEQ ID NO: 83471 - DNA, 100 bp, Homo sapiens
caagcctggttcagttaaacctactcaaactattggttgctccttgagggcaggacagttcttatggctttatccgttgcgtaagcacagagaggtctgc

SEQ ID NO: 83472 - DNA, 95 bp, Homo sapiens
cctggcaggacgtgaaggggaagaggcccaccctggagtaaccctcactggagaatccagaggtctgtgggttctggcaccacctgagcccactg

SEQ ID NO: 83473 - DNA, 87 bp, Homo sapiens
gtgtggacgttgtctaaatttcggtagccatggcacaagaatatagtaagaatgattgatgttggctgatattggagtgctcattca

SEQ ID NO: 83474 - DNA, 75 bp, Homo sapiens
ctgtggactgcagcctcggcggtcagcagagtggagactgctgcacggactctggaaccatgaacatatttgatc

SEQ ID NO: 83475 - DNA, 96 bp, Homo sapiens
actgcttggagtgcctcaccgagccagggatcgcttacacctgagacgaactacagaacagcacgtaccagaggtggaagtccaagtcaaacgcag

SEQ ID NO: 83476 - DNA, 100 bp, Homo sapiens
tcatccaagtggaggttcctacagagattcatatgagagttatggttgaatcgctcctagctgacccctcacgtctcttatgatacgtacagaaagcaag

SEQ ID NO: 83477 - DNA, 101 bp, Homo sapiens
caggggaccagaggaactcagccctgattgcggtacgtcagcctgtcatatgcatcaacaaccatgtattttgttcgatttgtattgatttgtggttgaag

SEQ ID NO: 83478 - DNA, 101 bp, Homo sapiens
gctagtgtcgctgttgctgctactgacccgtgtccagcctgggacagacgtggcgttggtaacggaaagcgacctgtaaaacaagaaccaagtacgctgga

SEQ ID NO: 83479 - DNA, 101 bp, Homo sapiens
cggcggcggctgcgggctgagcggcgagtttccgatttaaagctgagctgcgaggaaaatggcggcgggagctgagctgactgctgcccactttggaggag

SEQ ID NO: 83480 - DNA, 100 bp, Homo sapiens
tgctccggggaggtcacctgacgaggaggggcacccacgggtacatggctccggaggtcctgcagaagggcgtggcctacgacagcagtgccgactggtt

SEQ ID NO: 83481 - DNA, 100 bp, Homo sapiens
ccaagatgtctgacatggaggatgatttcatgtgcgatgatgaggaggactacgacctggtgtgcaactgaggaacatggctcaagaaactaatcacagc

SEQ ID NO: 83482 - DNA, 97 bp, Homo sapiens
ctaagattctctgctccaatccaaacacaggagaggatgggactgaggaagacccacaggcagaactggccatcattcatggtcagatggcttatat

SEQ ID NO: 83483 - DNA, 100 bp, Homo sapiens
ttcctgtacagcctgcagaactggaggaagagatagtcgctctggatcacccatggctagacgctgaaaacccacctggttccggaatcctgtcctcagc

SEQ ID NO: 83484 - DNA, 101 bp, Homo sapiens
gacggtttcgtccgcatcgaggacttcatccagtttgctacggtctacggggcagagcaggactcacaccacccggcaagaactgctcactacggctccct

SEQ ID NO: 83485 - DNA, 90 bp, Homo sapiens
gctacgctcctccatcacgtgttctttattggtgaaaacatgaatccagatggcatggttgctctattggactaccgtgaggatggtgtg

SEQ ID NO: 83486 - DNA, 100 bp, Homo sapiens
cttctcgctctgcttcatcccactattattttggcacaacaggaaggttgttaaactgaagcaaatagagcatactttgaatgagaaaagaatattacag

SEQ ID NO: 83487 - DNA, 100 bp, Homo sapiens
agcagaagaagaagccagaaggagaatagaggaagaaaagaaggcgtttgctgaagcaaggagaaatatggaagggcctgtcccagtcggctttacccta

SEQ ID NO: 83488 - DNA, 91 bp, Homo sapiens
tcagcctccggagtagctgggactacagtgccagaacctactaagacctgttcaagccagccccaacctgccggtaccagtaccagtactt

SEQ ID NO: 83489 - DNA, 100 bp, Homo sapiens
gcgtgtgcctggtgttcgtcggtcaccctctggacacggtcaaggtgggatttgatccacaccatcacatgcgtgtgccagcaatacctccaaacctgac

SEQ ID NO: 83490 - DNA, 90 bp, Homo sapiens
cattattggtggtttttgggagactatctttggcaacaggattaaactgcaaatatctcatgaagctgctgcctgtatcactggtctccg

SEQ ID NO: 83491 - DNA, 83 bp, Homo sapiens
agccaaagaactggctaggcaaataagctttaaggtcattgctgtattcaaggatgtgtttggttcaaattccaacccataca

SEQ ID NO: 83492 - DNA, 100 bp, Homo sapiens
aaaacatgcagcaaccactattttcttcctgcccctcgttgatgagagcattcgaagtgacctcagcagggcatccagtgtctcagtttgaaactgaatt

SEQ ID NO: 83493 - DNA, 74 bp, Homo sapiens
taaagtcagcatgagcaaaaactccaaactcctctccaccagcgccaagagggaactctaatgatccaggacaa

SEQ ID NO: 83494 - DNA, 98 bp, Homo sapiens
acagcattcctgaaatacatccaggaaagacatggagattctcttaaaaaggtggaagttaaacgagctgagcctcgggacagcaagagccaagcgcc

SEQ ID NO: 83495 - DNA, 50 bp, Homo sapiens
caaggacatggagaagatgttcaagcaatgctgggctcttgcactgtttg

SEQ ID NO: 83496 - DNA, 102 bp, Homo sapiens
gaatgggcggcggctccacctggggattcctgaggccgtgtttgtgagccctcatcctgcaagtctctcggaaacacctccctgagtggcccctccatccac

SEQ ID NO: 83497 - DNA, 100 bp, Homo sapiens
agtgactcactcggaactgcttgggaatcagtgacttgggatatcaacttacgagtgaagtggcccaacgatatttattacagtgacctcatgaagatcg

SEQ ID NO: 83498 - DNA, 98 bp, Homo sapiens
attttactgggataattatccaaataaattgcaagcattctatccaaatggtctaccctgaactgcagatcaccaatgtggtagaagccaaccaacca

SEQ ID NO: 83499 - DNA, 100 bp, Homo sapiens
gtccgagcccaaggcaattgatcccaagttgtcgacgaccgacagggtggtgaaagggaatgcagagagcaaccaatgtcacctaccaagcccatcatgt

SEQ ID NO: 83500 - DNA, 98 bp, Homo sapiens
aaacgtaatgaggatgaagattcaccaaataagctatatactttggttacctatgtacctgttaccactttcaaaatagagacggtgtttcaccatgt

SEQ ID NO: 83501 - DNA, 50 bp, Homo sapiens
aggccatcctgcacctcgtagtggcaggcacgtgtggttctcaaatatag

SEQ ID NO: 83502 - DNA, 83 bp, Homo sapiens
tactctctctttctggcctggaggctatccagcgctgaaggggatgctaagggagataaagcaaaggtgaaggacgaagtaag

SEQ ID NO: 83503 - DNA, 100 bp, Homo sapiens
tcatcactttcattgtctcggacgtgcggggcctgggcctcccggtccgcaagcaggtcacaatccaaggtccggctcctccgcgtcccagggccggacg

SEQ ID NO: 83504 - DNA, 82 bp, Homo sapiens
ccgccgcgccacggagtcccgtgacctcagcaagtacaactttgagaacaagctgccagccttgccctggctctgaatggcg

SEQ ID NO: 83505 - DNA, 90 bp, Homo sapiens
aagaaataggaaatgtccagcttgaaaaggctcaacagctcttcctgcagactcttttttcccgaggatcctgttaagattgtccgggcc

SEQ ID NO: 83506 - DNA, 101 bp, Homo sapiens
gcacgcagaaggtttgaggagcattgcttctcatacagtaaggtcatcctgtacagttctacagcatgaataggcctgcctctcgccatactcccccaaca

SEQ ID NO: 83507 - DNA, 96 bp, Homo sapiens
gtaaaagtagagaaggatcaaggacggatgatgaagtagtacagagtggtagacggaggagaagtccatccccaccacccaccagaaggcgacggt

SEQ ID NO: 83508 - DNA, 98 bp, Homo sapiens
ttcgggaaatacttgatttagtatgtaaaagatgttttggatatacgtggcatttcaagtgatcagttgcatagagtactaaaaagtgtggaatcaga

SEQ ID NO: 83509 - DNA, 100 bp, Homo sapiens
tcttccagggcctaagggtgacagagggactcgggcaagggtgccgaagatagacaagaggcacacagagacagaccaactggcagccaggcagccccag

SEQ ID NO: 83510 - DNA, 75 bp, Homo sapiens
ccgaagttggaagtgtctcttagcagcgcgcggagaagaacggggagccaggcactgattgtggggtacgcattc

SEQ ID NO: 83511 - DNA, 90 bp, Homo sapiens
ggcccggatgagtacgataccgaagcgggctgtgtgccccttctccacccagagtgaccctggaaacagacgggggattcttataagtca

SEQ ID NO: 83512 - DNA, 80 bp, Homo sapiens
ggaggttcgagcgctgttctcgctccggagccgctgcacatttcgggggatatgagactttctactcggaatatcctgag

SEQ ID NO: 83513 - DNA, 74 bp, Homo sapiens
gattcgcgctgctgggcacccacggagcctccggggctgctgccaaggggccaagggatgagctggggccctcc

SEQ ID NO: 83514 - DNA, 100 bp, Homo sapiens
ttcagggtttccaccgttcgttcaaggatctcagaccgtggtggaggaatcgctcacaaagatctggaccgggtcatggactaccacttcactactgctg

SEQ ID NO: 83515 - DNA, 100 bp, Homo sapiens
atcggtcccaccaaggcaactgtgcccgctgtgccaggtggagcagctcctgtacgaaagccctgagcggtactcccgctcagtgcttctcatcacccag

SEQ ID NO: 83516 - DNA, 101 bp, Homo sapiens
gccctctgcagctgaataacccttttaacgagtattccaaatttgatggcaagatcttaccaatatatttgagtccttcctgcctcagttattggcctatc

SEQ ID NO: 83517 - DNA, 80 bp, Homo sapiens
caggctcggagcctacggggctggcctcggactggatggggacaacaagggaggtgtcacagttttccatttagatcaac

SEQ ID NO: 83518 - DNA, 100 bp, Homo sapiens
gccagggcactgcagcagcaaggtcacctcaggatccatggtctgggaggggctgaacgtggtgaagacaggccgagtgatgcttggggagaccaatcca

SEQ ID NO: 83519 - DNA, 101 bp, Homo sapiens
agccccggcccgccgcggtcccgtctcctgggcctgtcccgcccgcgccctccgccggccctcagggattcgataaacaagtggatgtgtcatatattgcc

SEQ ID NO: 83520 - DNA, 98 bp, Homo sapiens
cgggatagacggggacaatgaggaggagacggagcacgccaaaggaacgtgctggccaaagcgctctatgacaatgtggccgagtccccggatgagct

SEQ ID NO: 83521 - DNA, 100 bp, Homo sapiens
cctcaatttaagcctgatctaacccctagaaacagggttgaaaggaggagcaggaggtactgatggacaaggaggtaccttccggtacacctttcatggc

SEQ ID NO: 83522 - DNA, 97 bp, Homo sapiens
ggaaaataaagattacagagaaaaaaccaacaccttcctgtgcagtcctgttggaatttcctccaccaggcggtgtgaagatgcctaatgtacccaa

SEQ ID NO: 83523 - DNA, 75 bp, Homo sapiens
ctgagctggaccactggagcctcgcttcggaaccaaaaagaagcttcccagagccggggccaggagccccaagcg

SEQ ID NO: 83524 - DNA, 75 bp, Homo sapiens
cggtcatctcgcagaacgccatcaaccagctgttcttgggtgtctctggggagtccctgggccagaccttcctcc

SEQ ID NO: 83525 - DNA, 100 bp, Homo sapiens
gttccatcctggaggaaggacccaccaagagctgacacccctatcagagtgcagctgtctgcttcagaaagtgagggctccaggaatgaggagaatcttc

SEQ ID NO: 83526 - DNA, 83 bp, Homo sapiens
gtggccctaggggcagcgagcaagacagcaagcagcaaattgtggctactaatttgccccctgaagatcaagatggctctggg

SEQ ID NO: 83527 - DNA, 51 bp, Homo sapiens
cttcatggtgcggctcatcttcgagaggccaagtcctgtatctgccatgtc

SEQ ID NO: 83528 - DNA, 100 bp, Homo sapiens
tcctggggctgtgctccatggcgagctgggtatctccaaattatccaaggccatgccagccatgtcattgcgatccaattggttccttaaatgaagtctg

SEQ ID NO: 83529 - DNA, 50 bp, Homo sapiens
cccaaagacccctggagacatgctgcatcttcctcccgtgaggctggccg

SEQ ID NO: 83530 - DNA, 75 bp, Homo sapiens
cgaagaagatcgaaaattaaacctcaggttgtaggctcatcagcaaagaatgagaggaatttttccatgtctctt

SEQ ID NO: 83531 - DNA, 82 bp, Homo sapiens
ccggcttcggagcgggagtgttcgttgtgccagcgactaaaaagaggtgggtttggaggatttgggacaacatctacaactg

SEQ ID NO: 83532 - DNA, 95 bp, Homo sapiens
gacattgtcaaaggcataaatagcagcaatgtggaaaatcagctccaagctactcaagctgccaggaacccgtctctcaagcagcagctcttctc

SEQ ID NO: 83533 - DNA, 96 bp, Homo sapiens
ggcatgaagggattggtctatgaaacatcagttcttgatcctgatgaggaacccttctctgaagcaacagctcttctcctacgccattctgggctt

SEQ ID NO: 83534 - DNA, 50 bp, Homo sapiens
aaatagatgacatcaataccagtgataagttattgggccagttcaattgt

SEQ ID NO: 83535 - DNA, 84 bp, Homo sapiens
caagaacgtgagcaagcccaggcacagccgacgccgcggggttgggcccgaaggcatcctgcagaacggggctgtggacgacag

SEQ ID NO: 83536 - DNA, 88 bp, Homo sapiens
aatctggagctgtcattttagaagacagcaccagttgcccttgaagcagaaaacagaggtgaaatgaaactagctctccagtatgtcc

SEQ ID NO: 83537 - DNA, 50 bp, Homo sapiens
ctggtgtcacctatcagtaaaagatctgaacagaattaagacgaacgagc

SEQ ID NO: 83538 - DNA, 90 bp, Homo sapiens
cctgagagatggaaactactatgcatgtaaacaaatgaagcagcgctttgaaaggacattctgagcatgtgagacctgaggactgcaaac

SEQ ID NO: 83539 - DNA, 88 bp, Homo sapiens
aagggaccttgttatagaagccttaaagatttgggccaggcttagtcatctattggtatggatttatccaggagctggactgcaaccg

SEQ ID NO: 83540 - DNA, 75 bp, Homo sapiens
agtctccaccaggactgaccgctgccgcccagcacgtccagctgtgattgggttattatacccctgcattgacag

SEQ ID NO: 83541 - DNA, 82 bp, Homo sapiens
cgtccggccggggacccggcccgggaccggcggcgcgcggcggccgaggccaggttttaaaatcaaagatgggaaaatcgga

SEQ ID NO: 83542 - DNA, 75 bp, Homo sapiens
gcgggagcgggatccccagcaggagcaggagcgggagcggttccagggtctccctccactgctgtagtaacccgg

SEQ ID NO: 83543 - DNA, 88 bp, Homo sapiens
cctcacctcacgcagccgcaaagtgtgttgttggtggctgcaatgccagctttgcttctcagggagggctagctcgtcatgtacccac

SEQ ID NO: 83544 - DNA, 89 bp, Homo sapiens
cactaaagggcagagcaaagactccagtaacactcaagcaaagaagagttgagcacaatcaggtctctgttctaggatgtcccgaccca

SEQ ID NO: 83545 - DNA, 100 bp, Homo sapiens
tttttcgacgcctccgccgccgcctgaggaggcgagctagccgggagttacaccgccaccgccaggatgtctggagaatgtgccccgaacgtgagtgtgt

SEQ ID NO: 83546 - DNA, 75 bp, Homo sapiens
atatgatacagatgtattcaaatggatcttcaaagatcggtcgcttggttatcggacagaatggaatcctctcca

SEQ ID NO: 83547 - DNA, 100 bp, Homo sapiens
gtcagggggactgcaaaggccaatgttggtgctggcaaaaagatgggaaccaacaaatgtgccagccaggcaggtatgacagcttacgggactaggaggc

SEQ ID NO: 83548 - DNA, 50 bp, Homo sapiens
gggcgcccgaggggccgagcgaggtacctttgacaggagcgtgaccctgc

SEQ ID NO: 83549 - DNA, 75 bp, Homo sapiens
gattgtgcatcgttacgtggagctgctggacaaatattttggaaatacttgtgtatgcggatacctgcttcagta

SEQ ID NO: 83550 - DNA, 123 bp, Homo sapiens
caagtacgagcgacaggagttcatctacccggagaagcaggagccctactcggcaggctctgacgcccgctctgcggcttcggtgtttgaacaggccacagtccaggagcgcttacattcagg

SEQ ID NO: 83551 - DNA, 75 bp, Homo sapiens
ccagaagtccagagctgaggactgcctgtttgcagttcagacttggttccttcaacctagagaaagttgaaaacc

SEQ ID NO: 83552 - DNA, 87 bp, Homo sapiens
ctctaccacgagcagcgccctgggagccctcacgagtcccggtctggcgtgctcctgatcagagttactctgatctgaagattttgg

SEQ ID NO: 83553 - DNA, 74 bp, Homo sapiens
cggagccgcagccgcccagaccgcgcagcgcgggaggcaggttccgcacgactgatgggaagaagagttactat

SEQ ID NO: 83554 - DNA, 96 bp, Homo sapiens
gccgaggcaggtggatcacgagataaagatattcactgaggctttggtgtgtgatattataatgtgaatttatacctgtgggtgattttgatcaag

SEQ ID NO: 83555 - DNA, 100 bp, Homo sapiens
ctgttttgccggaggagcccctcaggccttaagggaagaaagtcggaggctggctttggctgcgaaaagagaaaaaagaaaagagaagagaaggaagaaa

SEQ ID NO: 83556 - DNA, 90 bp, Homo sapiens
caagtgattcttctgcctaatcctcccaaagttcttagattacaggttgctgtagtaaaactaaaaaatgcagataaagtgtttgccatg

SEQ ID NO: 83557 - DNA, 98 bp, Homo sapiens
tggacgacgtgaaggagaaattcgactatggcaacaagtacaagcggcgggtgccccgggcctggcatgcgtgggcagtgatgaacttcgaagctgtg

SEQ ID NO: 83558 - DNA, 100 bp, Homo sapiens
cgacaaaggtcttttatattggcctgagaggagagtggactgaggctggagcattggatttgctaaaggagcttaagaatattcctatgaccctggaatt

SEQ ID NO: 83559 - DNA, 83 bp, Homo sapiens
cagagacactctagtgaaagccttcctggatcaggtaaggttgataacggcaaaacaaaggatctatatcgcgacctgataaa

SEQ ID NO: 83560 - DNA, 75 bp, Homo sapiens
acctgtgcgggatggaacaaaagggcctgcttccgcgaggccaacatcccaacccacttcgggagaagaaccgac

SEQ ID NO: 83561 - DNA, 97 bp, Homo sapiens
agccagaatggagaaggaactgttggagatgagacccttccggtcttcttttcagatcttggaaaggactttggaacctgatagctcggatgaagag

SEQ ID NO: 83562 - DNA, 100 bp, Homo sapiens
ctctgcaaggtggtgttccagtggcaaacagctgtataaactcttgtaaacagagtgttgcggagataggaacatgggagagaaacaatctgggtaacat

SEQ ID NO: 83563 - DNA, 97 bp, Homo sapiens
tcacaaggaccgtgatgtattcccaggaagactgttgccaagaatttacatagtacatgacgaagttaaggataaagcttttgaactagaactcagc

SEQ ID NO: 83564 - DNA, 90 bp, Homo sapiens
tggacagtggagatgaagcctaagaatatgatcaggttcagcagctccacagaacagagcagtgcctcacgcctgatgagaagacacaag

SEQ ID NO: 83565 - DNA, 75 bp, Homo sapiens
ttggacacgctgactttgtaggctccgccaagaggcgccgcaggaggaagaaggtagataatgactataatgccc

SEQ ID NO: 83566 - DNA, 90 bp, Homo sapiens
cttttctccaatattacagatgtctgtgaggcaagcaaaaagtgttgcagcatccctggaagtgtcagagagccctgggagtatccaggt

SEQ ID NO: 83567 - DNA, 124 bp, Homo sapiens
acagtcaagatgttgccaacattcgtaaggtccattcctgatggctctggttcacggctgaggcccggcagcagcaccggcccttcacgtacctgcccttcggggccggcccacggagctgcct

SEQ ID NO: 83568 - DNA, 82 bp, Homo sapiens
gatggaggcggtggccgtgctcgtcgggcccccttcgggaggattgtcagtggcttcgccccgaggagagctgactgccctg

SEQ ID NO: 83569 - DNA, 82 bp, Homo sapiens
ggagtcatgagcgacagcggcgagcagaactacggcgagcggattggatttgtcctgtatccccccagtggaggtcctgcat

SEQ ID NO: 83570 - DNA, 75 bp, Homo sapiens
tctcttacgtctgcggaagtgcagctgcctcagttcttagcgcaggctaccaagcagtttctcgaagagattaac

SEQ ID NO: 83571 - DNA, 80 bp, Homo sapiens
actcccttagtaactatgcagttttaatgggaccatggctaaacctcctggatcattagccagaagcagcagcctgtgcc

SEQ ID NO: 83572 - DNA, 76 bp, Homo sapiens
agaaaaagacctgtggctattaagataggagattacctggggcaattgatgttatcggtcagactataactatcag

SEQ ID NO: 83573 - DNA, 100 bp, Homo sapiens
gggcgagcgaggaggatggcggagtcggggctcctgacgggcagctgcaatgactctccgcacggtattattgtcattgcaagcactattggcagctgca

SEQ ID NO: 83574 - DNA, 100 bp, Homo sapiens
gaactggcttcggatggcgtcccgcgtagacgcagtggcctccaaggtgcagacagctgtgactatgaagggggagagaagtggatgggccctatacctc

SEQ ID NO: 83575 - DNA, 75 bp, Homo sapiens
cgctgccttgtggaggagttgagaaaaaccaaggacggaagtgaaaatgtgacaggattggacctttcagatttc

SEQ ID NO: 83576 - DNA, 100 bp, Homo sapiens
gaggtgttcacccccgtggtgcagcgaatcctcaagcataacatggagatctattgggaaactgattataaccactcgggcaccatcgatgcccacgaga

SEQ ID NO: 83577 - DNA, 74 bp, Homo sapiens
tggtggaagtggttggaaatggcacctatggacaagtctataaggtattgtcttctaagaactctgaagcaatg

SEQ ID NO: 83578 - DNA, 90 bp, Homo sapiens
gtcctcaagaagacaggcaaggaggtggtgctggagggtgagccctattcccagaggcaggtggtgctgaccctgtaacccaaaggagga

SEQ ID NO: 83579 - DNA, 75 bp, Homo sapiens
gtgtatcccaccgagaaagtcaactgcctggataagttgagccccatatgggggttggcaggcagcagagaggcc

SEQ ID NO: 83580 - DNA, 98 bp, Homo sapiens
gtagatggtggctttctttggacccttgacatcaaccagttactatttggtggaaagcggtgacacgccaaaggaccctgcggtgatctccaagtccc

SEQ ID NO: 83581 - DNA, 83 bp, Homo sapiens
aaaacagtctgtggagagaatctgcctcctttaacttatgaccagtgtcctggtgaagacctagttcttgccggagacaattc

SEQ ID NO: 83582 - DNA, 100 bp, Homo sapiens
cttgactcccccaaggccgaggtccgcggccaggtgctggcgccgctgcccctccacggaggctgcctgctgtttcccggggagatcatgaaacgaggtc

SEQ ID NO: 83583 - DNA, 100 bp, Homo sapiens
gcttcaaagcatggggctaactccagaatcccccattggaactcttggtgtaataacagaagctacaataaaaatcagaccagtccctgaataccaaaag

SEQ ID NO: 83584 - DNA, 90 bp, Homo sapiens
ggatgcctatgtattccctggggatggcgcatcacacaccaaaggcccgcaccgccgccatgatgtgcgaggtgatgcccaccatcagcg

SEQ ID NO: 83585 - DNA, 96 bp, Homo sapiens
ggatgaagttgttcattgtttgtcaccacaaaaaggacaggatattcttggtgatcttggaagtgtccgtatcatggaatcaatctctatgatggg

SEQ ID NO: 83586 - DNA, 100 bp, Homo sapiens
gggaatgatattcagtggtgtttttctcaggtgaaaggagcagtagatgatgatgtagcagaagataacggcaaaagcttctatcatttttgttactctt

SEQ ID NO: 83587 - DNA, 100 bp, Homo sapiens
ctctgttcttgaacccgttttggagaggtgtacacctgatcagctgtatcgcatagaggaatacaatcattttaagtgctgtggggctgctaactacaca

SEQ ID NO: 83588 - DNA, 102 bp, Homo sapiens
gctgatcctgtggtccggatccagagaaagtagctacagcaagctgggtagcaggcagatccaaaggatatcatgaagtttccagggcctttggaaaaccag

SEQ ID NO: 83589 - DNA, 75 bp, Homo sapiens
gcacccaagcctgagccggttcctgttcaaaaggaaaccacccctactcctaatcccccgactacagaagaggag

SEQ ID NO: 83590 - DNA, 83 bp, Homo sapiens
ggacattattgcgcgtggaacggctgcttttggaaggggttgcagatggtgtaggaggctggagagactatggagttgatcca

SEQ ID NO: 83591 - DNA, 83 bp, Homo sapiens
gcagatttcgggacagctctctagaaactcgctctaaagacggaaccgccacagcactcaaatgccatggacaatattaccag

SEQ ID NO: 83592 - DNA, 100 bp, Homo sapiens
gagcccctgctcctgcctcccccgtcccaccactgaggctgttgggccaggccagtcatgctagaacagcactgcagtttcctcctgaaggctggctccg

SEQ ID NO: 83593 - DNA, 101 bp, Homo sapiens
ctgaaaggaaatgacggattttctcattatttgtggacttggaaagatagatgttaatgactggaaggtaaacacccggttaaaacactgtacaccagaca

SEQ ID NO: 83594 - DNA, 100 bp, Homo sapiens
ggaaagtagagaattactgcaaagatcctgtgttgccataagcccttggcccacatttaagtgggaatgcagctagcttggatgtctgaaactttgtagg

SEQ ID NO: 83595 - DNA, 80 bp, Homo sapiens
tttgtggatcgctgtgatcgtcacttgcctcccgcgacgatgcccctcaacgttagcttcaccaacaggaactatgacct

SEQ ID NO: 83596 - DNA, 75 bp, Homo sapiens
aggcattttggggcagaatacagagatatggaatcagtcttgccacttgcctagtgaggcttttccgaacctgga

SEQ ID NO: 83597 - DNA, 75 bp, Homo sapiens
gtgctcagttactggcatggcactcccaagattgctccagagcaccgattccttggaatgccttgaacgtctcat

SEQ ID NO: 83598 - DNA, 90 bp, Homo sapiens
tgaccgagaccgcggccgggaccgaggctttttggagaccacggcatatttcttcatgaaaccaaaacttggagagaaggaggtgtcccc

SEQ ID NO: 83599 - DNA, 82 bp, Homo sapiens
gccccggcggccgaacgcccgcggcgcgggactccatcgtcagagggagacgctgttgcggcagctggagacgaaccagctg

SEQ ID NO: 83600 - DNA, 100 bp, Homo sapiens
cgaagtggttacaagtacagactctggagccagactgcctgggtttgaattgtgcggtttcagatttgaggcttaagcaacttcttccggggaagagtgc

SEQ ID NO: 83601 - DNA, 100 bp, Homo sapiens
ggcgctgccgcctgaagtgcgggcgcagctggcggagctggagctggagctctcggaggggttatcaatgccgggaagagcacacacaatgaagaccaag

SEQ ID NO: 83602 - DNA, 96 bp, Homo sapiens
gaaaaactgaatgaacggcttgcaaaactttcagatggagtggctgtgctgaaggtggtggaagctacaatgattttgggaattacaacaatcagt

SEQ ID NO: 83603 - DNA, 90 bp, Homo sapiens
cagagtcacacacggtcctaagagctgggcaccaggaagcgaaggctgcactctcgagtggaccctgaggagctcttcaccaagctcgac

SEQ ID NO: 83604 - DNA, 74 bp, Homo sapiens
tttgcaaaacctaaactgcagcgggttcaagacaaatggtggcccggagtttgctcgataccttgagggaagtc

SEQ ID NO: 83605 - DNA, 100 bp, Homo sapiens
acagggctcgtccaactggtccctcagtcacacatgccagagattgctcaggaagcaatggagggaggtggggaagacagggctccagctaccacaggac

SEQ ID NO: 83606 - DNA, 135 bp, Homo sapiens
accccacagcaagaccatcagtgagagcgagctgagcgccagcgccactgagctgctgcaggactacatgctgacgagcctgggcgtggtgctgtacgtcctggtctgcggttctctccccttcgatgggcctaa

SEQ ID NO: 83607 - DNA, 75 bp, Homo sapiens
caacttcaaggtcaagatggtggacgagcttaagagagagacgagttgtactgctgtcacaggaaatggacgctg

SEQ ID NO: 83608 - DNA, 90 bp, Homo sapiens
gggctttcgcccgggtcctcctagaaattccccccgaagaagactcccccacatctggcaggatcctaaggcctttgtagtccttcagcc

SEQ ID NO: 83609 - DNA, 90 bp, Homo sapiens
aactccttcaagcatataagtggtcaaacaagcgcaaatctgtccaaggctgcctggggagcattggagaagaatggcacccagctgatg

SEQ ID NO: 83610 - DNA, 100 bp, Homo sapiens
ctgatcccgctgagcgcccaggaccctgttccatccaaactcttgccctttgagggaccagagcaaatttttcagaacataaaacaagaatatagtcgtt

SEQ ID NO: 83611 - DNA, 129 bp, Homo sapiens
caattgttcagttgcaaaaagaaactggagccaccatcaagctgtctaagtccaaagatttttacccaggtgtggatgaagcaaccatcattgacattctaactaagcgaaacaatgcacagcgtcaac

SEQ ID NO: 83612 - DNA, 83 bp, Homo sapiens
cccaggtgtaagcgcagaaagcaggcgaacccgcggcgcaataacgcattttgaaagcgaagcagaagccgtagaatcagcgg

SEQ ID NO: 83613 - DNA, 100 bp, Homo sapiens
cggacgcaaagctgtcatcgtgaaggccttggacaagattcgctatgagagcctgacagacccttcgaagttggacagtggtaaagagctgaaaattgac

SEQ ID NO: 83614 - DNA, 83 bp, Homo sapiens
gccagtgggacgtctgagactttctccttcaagtacttggcagatcactctcttagcagctggaagctctttgacatcctttg

SEQ ID NO: 83615 - DNA, 51 bp, Homo sapiens
gggaagtgatttgcctcagcttgtactagctcaggccagcctgtgcccctg

SEQ ID NO: 83616 - DNA, 100 bp, Homo sapiens
aagagtgacttgtttctggatgattctaagagatcctggggcagagtccagggcagctcaaggctcctccacacacacacccgctgaaccctgagcaccc

SEQ ID NO: 83617 - DNA, 100 bp, Homo sapiens
aagctggcaacttctatgtacctgcagaacccaaattggcgtttgtcatcagaatcagagggaattcctcctgatcagcagagactgatctttgctggca

SEQ ID NO: 83618 - DNA, 75 bp, Homo sapiens
agctgaacatttcagaaatacagaagttgaagcagcagcttatgcagtccaaacccctgatacctcttcaaaaag

SEQ ID NO: 83619 - DNA, 101 bp, Homo sapiens
atgaaccgacgtcaccggatgcctggatatgagaccatgaagaacaaagacacaggtcactcaaataggcaggtcactgctggactgcctcttcccaaggc

SEQ ID NO: 83620 - DNA, 87 bp, Homo sapiens
ctagtctgaccctccgccaggcaaaaggaagtttgaagaaaacaggtctgaaacaaggtcttacccccagctgcttctgaacacagt

SEQ ID NO: 83621 - DNA, 100 bp, Homo sapiens
gcgctgcgaggtggcggcctgaggatcagtacaagttctgctacgaggtggccctggaatacttgaattctggctgatggtgtaaacagctctgcaaaca

SEQ ID NO: 83622 - DNA, 75 bp, Homo sapiens
cctacactgcctcctcccacgccgtgcttaggacaaagaaccggcgctgcaaactgctgcccctggtgatggctg

SEQ ID NO: 83623 - DNA, 100 bp, Homo sapiens
ggccatagaatggccgggcgcctaccccaaactcatggaaattgatcaggttgaaggggcccggccaggactcggggaagggtggcctgagagcagcgat

SEQ ID NO: 83624 - DNA, 87 bp, Homo sapiens
accggcgacagcagccaggagtcatgagcgacagcggcgagcagaactacggcgagcggatgttagtaggcaggaagaggcggaggg

SEQ ID NO: 83625 - DNA, 82 bp, Homo sapiens
ctccgggtgacgcatacggcaggatcgggattgagaggctgaaaaaatgaaattgtgctccaagtgttttccaaggttccgt

SEQ ID NO: 83626 - DNA, 75 bp, Homo sapiens
tccaggggcggcggtatcggtggctgccctactacagcgactggcacagcctccaggttggcgggctcatctgcg

SEQ ID NO: 83627 - DNA, 75 bp, Homo sapiens
ataaaactgaccatagccagagaacagccctccatcttgcagcccagaaggtctccctgacttggtcccagaccc

SEQ ID NO: 83628 - DNA, 76 bp, Homo sapiens
attttttaccaaggaagaatggttaaagggaatgacttcattacaatttggaacttggccacaaatcgcctcactt

SEQ ID NO: 83629 - DNA, 78 bp, Homo sapiens
cagccatgagcaacaggagtagcttttcccggctcacctggttatgcaatggtctctgcaagatggtttattcttgaa

SEQ ID NO: 83630 - DNA, 90 bp, Homo sapiens
gggaaatccatcatggactgtgggctgctcagtggatgtcagaggggcatagatatggacgcatttcaggagcgtgaggaaggccatgct

SEQ ID NO: 83631 - DNA, 100 bp, Homo sapiens
cacgggaatgttcactggagtttgcattgtcttggctgttgagtgaagaaaaagagcaggaagtcattacatggtggcctttttgaagatgtaactatta

SEQ ID NO: 83632 - DNA, 73 bp, Homo sapiens
acaccagccttgcacctgaagaccccacctttcctgtcgagttgaactgaaaagattatgtgaaattttcaca

SEQ ID NO: 83633 - DNA, 100 bp, Homo sapiens
gcctcgggaagagatgcgaggatgacaaggagagcatatagattattgtggatattctgttcttcctatggctgtagaacaagatgtgctaatagctgta

SEQ ID NO: 83634 - DNA, 82 bp, Homo sapiens
aacaccagcaccgcagatgttgtcaaggtggcctaccaggaggccaggggtgtcgccatgaaagatccccagcaggccctca

SEQ ID NO: 83635 - DNA, 82 bp, Homo sapiens
tgcccagtggggcattcgtcttggtaaacttggtggcccaagggatgcagacagtgatgaaaacgacaaaggtgaaaagaag

SEQ ID NO: 83636 - DNA, 100 bp, Homo sapiens
tggacaacatgatggtcagaaaaggggacacggcggtgcttagccctgcctctttcttgtcgcagtcagtttcatcatcagatagaaacagtgttacagt

SEQ ID NO: 83637 - DNA, 80 bp, Homo sapiens
agagaccaataaaaataaactgcttgaacatcctttgactggttagccaggcagaatggctaatgcggatctggtgaagt

SEQ ID NO: 83638 - DNA, 75 bp, Homo sapiens
ccgctttccgggagactggagtcgaaggccgtgagggaaatgaggcaagttatcctttggaaatgtgctcacact

SEQ ID NO: 83639 - DNA, 83 bp, Homo sapiens
tccgactccagctctgacttttttcgcggctctcgaatgtctgtaaacctgtggaggagacacagcgcccgcccacactgcag

SEQ ID NO: 83640 - DNA, 83 bp, Homo sapiens
ttttgcagatcttcaacaagaggacccaggagaaattcgccctcaaagctgggccagtaataaaggtgaaaattccaaaagat

SEQ ID NO: 83641 - DNA, 99 bp, Homo sapiens
ggtggcttccgtttgttggtggaggaggtggcaggcctcggcgccaccttctgggtgaaccctcagttcaagatccggctggatgagacggatgacccg

SEQ ID NO: 83642 - DNA, 88 bp, Homo sapiens
ggaggcggaagcatccatggcggagggcggcagcccagacgggcgggcagggccgggctccgcaggtccagcaagactatgaatctct

SEQ ID NO: 83643 - DNA, 100 bp, Homo sapiens
agagattgaatccattgtcaaagatatggctcgtggacagcagaaaattcagtctcagcagaaaaatgccaaaaagcaagctggacaaaagaagaaacaa

SEQ ID NO: 83644 - DNA, 75 bp, Homo sapiens
acatcagatgggagaatgattgtgatggcagaagattttttcatttaatgtctggggtaaaattgcaactttttg

SEQ ID NO: 83645 - DNA, 88 bp, Homo sapiens
taattcactcaggaagaataccattttgccaaaaattcttcagacatttgtcttcaccgacagcccagacaaaggcctccaggagaga

SEQ ID NO: 83646 - DNA, 51 bp, Homo sapiens
ggcagagtcagcagctgcagtgtggaaggtgccagcgagatttcagattcc

SEQ ID NO: 83647 - DNA, 75 bp, Homo sapiens
gaagcctttgaagaattaagactccagggttccttgaaaagaaaacaggtagttaacctatctcctgccaacagc

SEQ ID NO: 83648 - DNA, 80 bp, Homo sapiens
gtgacaaaactcacacatgcccaccgtgcccagcaccctcctccctggccggtgcaaagtacagggaggtaaagcaggac

SEQ ID NO: 83649 - DNA, 100 bp, Homo sapiens
caaggaggacgagggccggttgccgggcgcgggcgagaaaggacttgacccaatgaaagaagcatatggcacttgtgaagataaatgttactcctccctt

SEQ ID NO: 83650 - DNA, 87 bp, Homo sapiens
cagcccgggccacctccaggagggaagtgatcagggccaaagcggtcagtgagaaggaagtggactctggaaacgacatttatggca

SEQ ID NO: 83651 - DNA, 100 bp, Homo sapiens
gaaaagagcattttaccgatggtatcaacttgagaagacaaaccctgacctcctgccccccgaggtctgcagtctcctgaacccagcagccatctacgcc

SEQ ID NO: 83652 - DNA, 100 bp, Homo sapiens
gtccgagttgccgccggagaggagtggcctcgcccgcttggctgctatccatgtccagggccaaacatgaatcctattgctcttgggagccgctggcttg

SEQ ID NO: 83653 - DNA, 98 bp, Homo sapiens
aaaattctattcagaagaatgcaggccttgcttttatcgaacttgtcaatgaaggaaggtgtcatcaatcttacagaagaagtgctgtgggtcaaagt

SEQ ID NO: 83654 - DNA, 96 bp, Homo sapiens
taatgaaggaagaaaacacaggagccggagcagaagcaaagagctcagagtcaagatctccactgaagttggcatcacaaatgttgatctttccac

SEQ ID NO: 83655 - DNA, 100 bp, Homo sapiens
atagaaagaatggagaactattaaccaccattcttcagtgggctgtgattttcagaggggaatactaagaagttatggaggttttgatgactatggtggc

SEQ ID NO: 83656 - DNA, 100 bp, Homo sapiens
ggtgcctcggtaggtcgtcagaaagttacagtcgcccatctgagcgtttgtaagagatggaggcaggagtggtgaggtaacagagattcaaaggtacctt

SEQ ID NO: 83657 - DNA, 100 bp, Homo sapiens
cattccgagtggctgcctacaacaaagccaaaaaagccatggacttctatgatccagcaagtaccttctccaggcaaattccgttcccctgcagcaccat

SEQ ID NO: 83658 - DNA, 75 bp, Homo sapiens
gggtgggagccacctgtgtgatgatgcctgagttcagccctcagcagtattctaccttgtaaatactgttatttg

SEQ ID NO: 83659 - DNA, 73 bp, Homo sapiens
ccatcatcatgaaggacgtgcccgactggaagaaaaagcttgtggtgaaggggggcaaaaaaaagaagcaagt

SEQ ID NO: 83660 - DNA, 90 bp, Homo sapiens
gtaagatggaagatgaggaggtcgctgagagctgggaagaggcggcagacagcgggagcctggagacacaggccccatccttcccaatgg

SEQ ID NO: 83661 - DNA, 82 bp, Homo sapiens
tcaagatgatggccgcaggaaaccgggtataggaggaagaggtggtcttcaagctgacagagaagctgacggaacagaagga

SEQ ID NO: 83662 - DNA, 101 bp, Homo sapiens
caccgcgggcgccaatggggagcagaaggactcggacacagatgggagcttgcctgattgtcaacccatcggcctggaccccagagcccacccagttgagc

SEQ ID NO: 83663 - DNA, 75 bp, Homo sapiens
ggattccaagtaactcttatttgggtgtaccagtgatggcaataagaaacaaaatgatatcagaaggactagacc

SEQ ID NO: 83664 - DNA, 98 bp, Homo sapiens
ccttcttatggattggattgaggttcagatcaacaacgaggaaatatttccaacatgcgtgggtttatggttggctgtgggagatgtgatgactggtt

SEQ ID NO: 83665 - DNA, 74 bp, Homo sapiens
caccatcgtctccgccttccagttcggagagacttggattctcacttgcatttatcttcagctgctcctattta

SEQ ID NO: 83666 - DNA, 98 bp, Homo sapiens
gccagagcccagggcctgtacgagacgatcaacgtgacggaccagaggagcgagagcagcaagaaccacacccagcagcaatgtcagcggaagtggaa

SEQ ID NO: 83667 - DNA, 97 bp, Homo sapiens
aagccccctgcaggaactctacaacccaatccagcaatgtctcaggctgtgcagacaaacggaactcaaccattaagcaaaacatgggaactcagtt

SEQ ID NO: 83668 - DNA, 75 bp, Homo sapiens
ccgccctcagctcgaagtcagccaccatggaggcgcaggcacaagtgacaccacagccaaagccctatgggaagc

SEQ ID NO: 83669 - DNA, 83 bp, Homo sapiens
ttacatattcacttgatgcagctttctcaagatggtggccagcagagatctgcaaccccaggtctgtgccactgaacatccag

SEQ ID NO: 83670 - DNA, 98 bp, Homo sapiens
acaacttctggcagaaacagaggactaattttggcagttctaaatttgaatttgaggaattgcagtgcaacaaagtacgtgaaaatcaggtttcaata

SEQ ID NO: 83671 - DNA, 100 bp, Homo sapiens
tgagaaggaggggtatgagccacacatccccgaccacttgcggcctgagtatgggcttgtcaatgaggcagatcagattcaggttcgacgggcagccaat

SEQ ID NO: 83672 - DNA, 80 bp, Homo sapiens
gaagatggctttaaagaatacacttcaaaattacaaacgccatatggacggcatgtacgggcccccagccaagcgccacg

SEQ ID NO: 83673 - DNA, 51 bp, Homo sapiens
agattcgcagtggtcgcttcttctccttggagagtgccattctgcagtcat

SEQ ID NO: 83674 - DNA, 75 bp, Homo sapiens
ctcgcctttgccgatccgccgcccgtccacacccgccgccaggctcgggacgtgtacgaggaggccatccggaca

SEQ ID NO: 83675 - DNA, 106 bp, Homo sapiens
cgggccgcgaaccgcagtatcatgctggccaagaagatcatcattaaggacggaggcacggtgtcgtgaaaactacccctaaaagccaaaatgggaaaggaaaaga

SEQ ID NO: 83676 - DNA, 75 bp, Homo sapiens
ccctgctttaaccatcgaaaatgagctctttcgacgtgtagcagcagctttgccgggaatggaaagcacacagga

SEQ ID NO: 83677 - DNA, 96 bp, Homo sapiens
aaaatccgcagcaggaagcttgggggtccctgtgttcatgatgaggactctggcctatcgctcattggaaaacctgcccttcaggctcttttatat

SEQ ID NO: 83678 - DNA, 74 bp, Homo sapiens
aacgaatcatccacgcacctgcagctctgctgagagagtgcaagccgtgggagaggagtctgcaatgccgagtg

SEQ ID NO: 83679 - DNA, 83 bp, Homo sapiens
tgtggctgtaacttacgtgtactttaccaacgagctgaagcagcctagtggaggccagtataagattcagatctttgagaaag

SEQ ID NO: 83680 - DNA, 124 bp, Homo sapiens
aaaaagagaagacgctttacccgactctttgggccgttatctcacatccagacatttaatgtggatgcaccatgccagaccgtggaagatttaacgaatggggttgtgatggcccaggttcttc

SEQ ID NO: 83681 - DNA, 100 bp, Homo sapiens
agatgctcagaacagagcagaaatcaaattgaagagagcagttgaagaagtgaagaaattattggtacctgcaggtggtgattccactgaagcaactgcc

SEQ ID NO: 83682 - DNA, 118 bp, Homo sapiens
cggccaagaaattagacaagaaacattggaaaagaaatcctgataagaactgctttgtaaaaagcagcttcctgattcaaatgagattgtggaaaaattgcttctaagaagaaagttc

SEQ ID NO: 83683 - DNA, 100 bp, Homo sapiens
gctactactggtgcatgatttacagctaaaccagaggctgctgtcaagcaaactcaggacttcaagcaactgagaaatgaaaagaaaatacttgaaaagg

SEQ ID NO: 83684 - DNA, 100 bp, Homo sapiens
gtcgtgcggcaagtgagcgatttggtgaacagacactcccttctgtagcccgtgttcccaagaaaatcctcaagtgcaaggcagtgtctcgagaacttaa

SEQ ID NO: 83685 - DNA, 75 bp, Homo sapiens
ttaaggatggtttagaaatggaaaaatgtaactaaagatgactcagagccatctggagaagaaacagtagaaagg

SEQ ID NO: 83686 - DNA, 80 bp, Homo sapiens
tcaaggcccaggctgctttcttcggtagctaccgaaacgctctgaaaatcgagccggtggatttcgccttcacagtgtgg

SEQ ID NO: 83687 - DNA, 101 bp, Homo sapiens
agaaagtgacctctgagaaagtgagccagaaacatgctgagcctttgacagagtggagcctttcaggctggcatggagagcttaaggggcaactgaaggag

SEQ ID NO: 83688 - DNA, 105 bp, Homo sapiens
tcgcgccccccactctgaactcaagtcaccgtggagctccgccgccccgaaactttcaccgcgagcgggaatactcccccagttgcaagaggcgcaggaccgtgg

SEQ ID NO: 83689 - DNA, 100 bp, Homo sapiens
aggagaactaaatgggagaagaggaatgttccctgacaatttcgttaagttgtatcacggactgattcaccgagcccaaccgtactcaactcacatattt

SEQ ID NO: 83690 - DNA, 83 bp, Homo sapiens
caccgggcacccagtctcctttcttcctgctgctgctcctcacagtgcttacagatgatatcatcaagttgaatcgaaaggaa

SEQ ID NO: 83691 - DNA, 87 bp, Homo sapiens
ggaaatggcacctatggacaagtctataaggttgggccatgcaggctgctgcctatatcttcattcataggaaatggaaggatgaca

SEQ ID NO: 83692 - DNA, 88 bp, Homo sapiens
ggcgcggcagggattcgcgggcgaccacccggcgcaggagcggccgcgtttcggcctcagaagtgccgtgagcgatgtggagatgcag

SEQ ID NO: 83693 - DNA, 87 bp, Homo sapiens
agtccccaggatacctacccaggccccacacctcccagcatcctgcccagccgacgtggggtgaatttaggaggacttttactccaa

SEQ ID NO: 83694 - DNA, 90 bp, Homo sapiens
aagatggcgtctcccacagacggcaatctttggcagccagacactacctaactccaatttatggacaatgaataatggtgcaggttgtag

SEQ ID NO: 83695 - DNA, 100 bp, Homo sapiens
ggaactagtcacagtgttgctgcaacatagagctgacattaactgtcagcctcaagtactacagccttccagcagccttcccagacccacagatcacacc

SEQ ID NO: 83696 - DNA, 100 bp, Homo sapiens
gctggttctatcggtggacagtgggacattctgaagggaggcaaggaggcggactgagcgctcccaattggggctccagcccccttttggacatcgttgg

SEQ ID NO: 83697 - DNA, 95 bp, Homo sapiens
aagacctggatgtgtgacacacagttttggaaaaagcaatggctgccatccggaagaaactggtgattgttggtgatggagcctgtggaaagaca

SEQ ID NO: 83698 - DNA, 100 bp, Homo sapiens
cgcgcctccatctgggccatggatggaattcaattcgtcataatctgtccctacacagcaagttcattcgtgtgcagaatgaaggaactggaaaaagttc

SEQ ID NO: 83699 - DNA, 82 bp, Homo sapiens
ccgcgccgtgcaactgctcatcctggcctacgtcatcgggcgttacatagccatgtgccgcgagaagcagcccatggtgcca

SEQ ID NO: 83700 - DNA, 100 bp, Homo sapiens
acgccattatcctctgtttctctgctgcaccgacctcgacgtcttgcctgtgtcccacttgttcgcggcctatagcattgcagtgtcgagatggctatga

SEQ ID NO: 83701 - DNA, 82 bp, Homo sapiens
aagaagcagctatgctcgagagcctcacttcggcaaacgtggtccttgcaacaaacacaggaatgaaatggaaaggcatttt

SEQ ID NO: 83702 - DNA, 100 bp, Homo sapiens
ccttcccaaacctgaaggacttcatctcccgatttgagacaggcaaatgtacactggggaccaccatgttcacgtgacatcaagaggaagcggaaaccag

SEQ ID NO: 83703 - DNA, 88 bp, Homo sapiens
gcgaggtcacctttgcattgcactcagatttcgatggggtcctctatcatatttcaaatcctaatggagacaaaacaaaagtgatggt

SEQ ID NO: 83704 - DNA, 123 bp, Homo sapiens
ttgtcccgctgcagccgagatgccgggggagcggggccttccacaccccctccgtgggtgtgtgggtgaatttggaagtgaaaagaaaactgctttgcatgaaaaagaggagacacttcggct

SEQ ID NO: 83705 - DNA, 98 bp, Homo sapiens
gacggaagaaaaggtctggccggtcccaggcaattcagaaagacgggacatactcatggacaagttggcccccttgggaaggccatatgaatcactga

SEQ ID NO: 83706 - DNA, 51 bp, Homo sapiens
aggcggctgaggtgcgagccgccaagaaatatttttcttcatggccctgat

SEQ ID NO: 83707 - DNA, 82 bp, Homo sapiens
taaagcagcgtgcgttcagccctgggctattactataacaagcgcattctgcacaagaccaaggggaaacggttcacctaca

SEQ ID NO: 83708 - DNA, 82 bp, Homo sapiens
cgagacttttctcagatgttggatatttgcttggaaaaacgtgtgggtacgaccttgggagaagcatgacactggccaacac

SEQ ID NO: 83709 - DNA, 82 bp, Homo sapiens
cccgaacgggttgcttcccccgctgcgagagacacctatggctgccgatgaaggctcagcagagaaacaggcaggagaggcc

SEQ ID NO: 83710 - DNA, 75 bp, Homo sapiens
gcagaaatgctcactgcaaaagtgaaagcctcaaggaataggttctcctagtgtctatcatgcagttatcgtcat

SEQ ID NO: 83711 - DNA, 98 bp, Homo sapiens
cccaaacccaaattcttcgttctgtgcggcgacctcatccacgccatgccaggccggcgaccaccaggggcctgaggatgaagccaagtctgctgtgc

SEQ ID NO: 83712 - DNA, 100 bp, Homo sapiens
aaaagactgggacttcttgctggatttgcattccttacaggatttgctcgaatatttgggtacccagtaggtatcgttggaaacaacggagttctctttt

SEQ ID NO: 83713 - DNA, 50 bp, Homo sapiens
gctggacccggaccggttttggtgtatcctactcagtacatgtatctgaa

SEQ ID NO: 83714 - DNA, 50 bp, Homo sapiens
aaccaggccccagacatgctgcatagactctgtttgctggctacacggac

SEQ ID NO: 83715 - DNA, 75 bp, Homo sapiens
tcaaaagtagagaaaatgaaaggagagcaagaatctcataggttacctgtgcatgacagatgagtggttctctga

SEQ ID NO: 83716 - DNA, 100 bp, Homo sapiens
tcaagttgaatgaaaatgccatctccaggctccaggctaaccaaaagtctgttctggctgagcaacagaaaaaggcggccatcatctctgctgagggcga

SEQ ID NO: 83717 - DNA, 100 bp, Homo sapiens
gctaccccaagcccgggagcttctcagagctcacaatgtctctctgcaccaagctccatgactcaggatttgcctggagttcctgggaaagaccagttgt

SEQ ID NO: 83718 - DNA, 90 bp, Homo sapiens
ggcagagaggaggtcctttttggccccaggtgactcttaactcccaggacagaggtggagtttgtccatatgctcaatgctaccatgtgc

SEQ ID NO: 83719 - DNA, 75 bp, Homo sapiens
cagaagatgatccatatttgggaaggcctgaacaacacaaacgtgcagatatctgatagccctttccgttgcact

SEQ ID NO: 83720 - DNA, 74 bp, Homo sapiens
cgtgaccgagagcgcgaatatcgtcatcgttagaagatgaggacgatgtgcacagatgcggccgctgccaggca

SEQ ID NO: 83721 - DNA, 88 bp, Homo sapiens
gaattgacataaaacagttgatagcaaagaagataaagttgacagcagaggcagaggagtccaatgtgctgattgctgctaacagtca

SEQ ID NO: 83722 - DNA, 100 bp, Homo sapiens
gacagagtatggagagagctgagagccccacaccaggaatggcccagggaatggagccagcgtctgaccaaacacaccaagttcgtgcgggacatgattc

SEQ ID NO: 83723 - DNA, 100 bp, Homo sapiens
cacttttcctgcaactcggcggcgccacgcggcccgccggccacgcgccctgggacaaccacgtctccggccacggcagatcgggagcggtgccgagaaa

SEQ ID NO: 83724 - DNA, 75 bp, Homo sapiens
ggccagatcggcttcatgctgtgcagcaagaacccgatccggaccatcgccatcatagctgaaggcatccctgag

SEQ ID NO: 83725 - DNA, 75 bp, Homo sapiens
ctaaaatatgaccctgatccagggcgatttgatgaaactgttatcgaagagagaagacaatgtgctgaagacctg

SEQ ID NO: 83726 - DNA, 100 bp, Homo sapiens
tctgctgatgatttcttccaaggaaccaaggcggccctggctgggggaaccactatgatcaggttttgcaatcccaagaagagtcagcgtttgaattttg

SEQ ID NO: 83727 - DNA, 100 bp, Homo sapiens
attcgagattggagctatccttatgaacattcatatggtttggaaggtggaaagcaatttcttgaaaagagattacaggacatcctgaaccacgtgttcg

SEQ ID NO: 83728 - DNA, 100 bp, Homo sapiens
cctggaaagatgtaaatctcccaagtccaaagggtgtgatgaatgcagactctgctaccattttggctgtttggatcctcctttgaaaaagtctcctaaa

SEQ ID NO: 83729 - DNA, 75 bp, Homo sapiens
ggagtcatgagcgacagcggcgagcagaactacggcgagcgggcttcagggatgacttcttagggggcaggggag

SEQ ID NO: 83730 - DNA, 75 bp, Homo sapiens
tgctcgcgctactctctctttctggcctggaggctatccagcgttattcagcttctcaaggctggaaaagcgaag

SEQ ID NO: 83731 - DNA, 82 bp, Homo sapiens
gacggagttctacgtgtcccccgaggatctggaggcacagctgcagtctgacgagagggaaaaatggctacaaacttcctag

SEQ ID NO: 83732 - DNA, 99 bp, Homo sapiens
gccctcagtggtggggttactgctgtttcggaggaaggtggacttttaaatattctccactgaagcaaatgctgcaacaatttgcatttccttcaccaa

SEQ ID NO: 83733 - DNA, 50 bp, Homo sapiens
cgagaaatggccgcgtcggcagacagagtttcgctcctgttacccaggct

SEQ ID NO: 83734 - DNA, 75 bp, Homo sapiens
gtgcaaacccgagagaactggctccccagttaaagatctcagatgaccggctgactgtggttggagagaagggct

SEQ ID NO: 83735 - DNA, 100 bp, Homo sapiens
ccgagtatgcttcgtttttcgccgtcatgggcgcctcggccgccatggtcttcagcggagcggtggtgccccccccgggcacggggccatgtacaacggg

SEQ ID NO: 83736 - DNA, 100 bp, Homo sapiens
cctggagtctgcgaaggccgggacccggttccccggcccacagtgggggtgtgcaaacccgagagaactggctcttttctgctgagcatgctgcctacgg

SEQ ID NO: 83737 - DNA, 51 bp, Homo sapiens
gggcgggacagtgattccagcccttcagggtactgctactataagctccag

SEQ ID NO: 83738 - DNA, 95 bp, Homo sapiens
tatgaattgccctgaaatctgaaaaatttcaattccaatcgaatattccctgggcttttgaggcaataaagcaagcaagtgaatgggtaagaaga

SEQ ID NO: 83739 - DNA, 75 bp, Homo sapiens
cacccacctgctctttagcctgggagctgtgtgtctggacagtatgagaataatgttatcactattgatctggtt

SEQ ID NO: 83740 - DNA, 50 bp, Homo sapiens
cgcctcctaatccctagccactatggggtttgattcaggagatgagcggc

SEQ ID NO: 83741 - DNA, 75 bp, Homo sapiens
gttcgggcagctggtctaccctgctggaggcgcccaggacaggctgcgcctgcccaaaagacaagcaggtgcagg

SEQ ID NO: 83742 - DNA, 82 bp, Homo sapiens
ccagagaaaagtgaaacaattcaggacactagctccttaataagcatttatagtcagtttttggcagcaatagaatcactaa

SEQ ID NO: 83743 - DNA, 101 bp, Homo sapiens
tggaaaaatcctacctaggtaatgtgtagttctcaatgcatcatgtcaggcagcttatgatgccaatttgtcccatgctccattcaacccaaataaagatg

SEQ ID NO: 83744 - DNA, 100 bp, Homo sapiens
cagccatctcacatttccaagtacattctcaggtggagacctgttggtcacagcagatgtagctttttacactggaaatcttcaagccttaaaaggcctt

SEQ ID NO: 83745 - DNA, 100 bp, Homo sapiens
gagaactaaatgggagaagaggaatgttccctgacaatttcgttaaggaaataaagtctttgcttttgctttttggaggtcagtttgccagcagtcaaga

SEQ ID NO: 83746 - DNA, 102 bp, Homo sapiens
gcacgagcagatcctggtcctcgatccgcccacagacctcaaattcaaagccagcagtatctgttggaaatgttggccagcttgcaatggatctgattattt

SEQ ID NO: 83747 - DNA, 51 bp, Homo sapiens
acagagttgtccttggaggatggagacagtagaaacggggtttcaccatgt

SEQ ID NO: 83748 - DNA, 100 bp, Homo sapiens
gacaaccgcagccacagcgcccacttctttgagtttctcaccaaggagctagccctgggccaggaccgggctgcccagggattgccaggagctgttccag

SEQ ID NO: 83749 - DNA, 50 bp, Homo sapiens
tgaagacagtatttgccagctcattggcatgcccaagagaatcgtaaatg

SEQ ID NO: 83750 - DNA, 50 bp, Homo sapiens
cgaccagcttcatcctcagacaggtacctgtgccgggtggaggagatgcg

SEQ ID NO: 83751 - DNA, 75 bp, Homo sapiens
ctcagccactagctgcgatgcatgtgatcaagcgagtatacaattggaccgtggatgaggtggtacagtggctga

SEQ ID NO: 83752 - DNA, 75 bp, Homo sapiens
gcggttaagtatgcggcgccaggagctgcagcggaggaggaaatggcaggtcctaatcaactctgcattcgccgc

SEQ ID NO: 83753 - DNA, 98 bp, Homo sapiens
ccgtggtccttctccatattcgagaatggaggctccagagtgaaattaatgacactttgtcgatgaagatcttgattgtgacctctgtggaaaatgag

SEQ ID NO: 83754 - DNA, 96 bp, Homo sapiens
gatgaagaaaggaaggaacctgggatggttgtgagggaagggacaagaagatactgccctgttcgatcctttggtacagaagacagaccgacagat

SEQ ID NO: 83755 - DNA, 75 bp, Homo sapiens
gctggttcccgctgtagcaaacgtccgcggcctctcagtgagtgacctgcaggaagaaggcaagaatgccatcaa

SEQ ID NO: 83756 - DNA, 80 bp, Homo sapiens
tggtggtgcaggcgctgcgccgcaacgccgagcgcaccgacatctgcctgctcaaagggaactactggagaccacgtgcc

SEQ ID NO: 83757 - DNA, 100 bp, Homo sapiens
tggccgtcgtccaagtggccctgatggggcagcgagagaacatatccttaggcagagcatataggattggacaatgtagagatgtcaaagtgcttaggct

SEQ ID NO: 83758 - DNA, 87 bp, Homo sapiens
actgtccaattctgtttactctgaattaccatcagctgaagggaaaatgaagtttcggagcaacatcccctgtcacctggttgatat

SEQ ID NO: 83759 - DNA, 75 bp, Homo sapiens
tgataaggatacggatatgtttcaggatgaatctcttcagcgtctgcagaaggagtctgacatcttacagagaac

SEQ ID NO: 83760 - DNA, 100 bp, Homo sapiens
acgttgaccgcacactggatgaatggaagcacgcaggaggcgcaggtgctgaagcagctggcggagcggcgcgagcacgagcgcgaggtgctgcacaagg

SEQ ID NO: 83761 - DNA, 100 bp, Homo sapiens
gagacaactggtcccaaggcaaatgtggagttcatggattgttgataaggcagatgatgaagatgatgaggatttaacggtgaacaaaacctgggtcttg

SEQ ID NO: 83762 - DNA, 98 bp, Homo sapiens
gacggcgcggcagagtccccgtacgcctacagtaacggctttacaggaagtatggtgctggcatctgcttggcttctagagagtcttacaatcgtgga

SEQ ID NO: 83763 - DNA, 100 bp, Homo sapiens
gcctgtggggcctctcacgtgctggccctgtccactgagcgagaactatttgcctggggccgtggagacagcggccctcgggaccaaggatcacgtcatg

SEQ ID NO: 83764 - DNA, 50 bp, Homo sapiens
ctcctgagtagctgggattgcagtgacttttttgaacgaaccattctgtg

SEQ ID NO: 83765 - DNA, 118 bp, Homo sapiens
tcgcgggccggccccgcggggagcgcccccggcgcgatgcccttcaggaaagagctctgtgacgatgacccgccagagatcccacacgccacattcaaagccatggcctacaaggaag

SEQ ID NO: 83766 - DNA, 100 bp, Homo sapiens
acaacaaaaagaaccctcaattgatgaaaggaactcaacagaggcaattattatcccgactgcaaatcgacccagtaatggcagaaactctgcagatgag

SEQ ID NO: 83767 - DNA, 101 bp, Homo sapiens
cacggaccttggtcacggccgcaggtgaccccttagcccagctccagtgggcgggtggcaggttggtcaaagaaaaagtgatgtatgaaaaagaggcaaaa

SEQ ID NO: 83768 - DNA, 100 bp, Homo sapiens
gccaaacgcatcatgaagtgagcaaattggggtttcctggggacaagatcctactatgttgacagacatgatgaaagggaatgtaacaaatgtcctccct

SEQ ID NO: 83769 - DNA, 90 bp, Homo sapiens
gcggccggcgccgggacctggaggggacgctggggccgaagcagcatgtgacaccgaccagagtaaagctgctgctaaagctggatcttc

SEQ ID NO: 83770 - DNA, 140 bp, Homo sapiens
ttttggaagagggagtcaccactggacctccaaggaagccacgtgcagacatctacaaccttcgatctcctgacgaatcctatagcaatggaactcagcgatgcaaatctgcaaacactaacagaatatttaaagaaaac

SEQ ID NO: 83771 - DNA, 74 bp, Homo sapiens
cccggcaactccagggtgtctggtccacgacctatcctaggcgccatgcttattttgggagaggccagccgcca

SEQ ID NO: 83772 - DNA, 98 bp, Homo sapiens
agagcctcccaggtcccagcagagctgctgctggtcagttcaccgggacctggaggcccagattgcgatcgtgacggagaaccaggccctgcagcagc

SEQ ID NO: 83773 - DNA, 96 bp, Homo sapiens
ccgactgacctggatagtagttgttcttcaggatgggtcatcagttaaggaagttgaaacctaccaccggacacgtgctttaagatctttgagaaa

SEQ ID NO: 83774 - DNA, 95 bp, Homo sapiens
taagttatgctgtggaggaagaacatgcatatttgggtccaactgtgaagccagatgataagggctagtgccacgaggtttacttgactgttgtg

SEQ ID NO: 83775 - DNA, 100 bp, Homo sapiens
gatcatgttcctttagcaacgccaaatggagatgttttgatccgagaccttaattttgaagtcatcatggtcacaggagaccatccaatcacagctaaag

SEQ ID NO: 83776 - DNA, 74 bp, Homo sapiens
tcgggatcccattccttcacagggaccctagccagattatctgactccagaaaaagaacgcgtacaggaagatc

SEQ ID NO: 83777 - DNA, 87 bp, Homo sapiens
tcggcggaaagtttggctgcgcgggttcccccgaagttcagggggggccctcagcctcttggccttgaacgggctgttcatcttgat

SEQ ID NO: 83778 - DNA, 100 bp, Homo sapiens
gtctggatggaacctgagctgggtctctgactcacttctgactttagggcatccgcttcgatcctgaaattccgcaaacactacgactagagtttgctaa

SEQ ID NO: 83779 - DNA, 85 bp, Homo sapiens
aatgagatcacctttacttgcagaacctgcacttgttgccaagtcttccatcttactagatgtgaaaccttgggatgatgagaca

SEQ ID NO: 83780 - DNA, 100 bp, Homo sapiens
tgagtctagctgctctagtgaagaagatgaggaagatgactcggaatcagaagctgaaacagttgaacaagagatttttcaatcaagactttggaactac

SEQ ID NO: 83781 - DNA, 88 bp, Homo sapiens
aatgtggccctgagtgatggacacaacaccgcggaggaggacatggaggatggctagatgaactgcagaagcaactacaagaagacat

SEQ ID NO: 83782 - DNA, 100 bp, Homo sapiens
caaggttctggacaagatgaagtctttctgccagaacctggagctggttgaaaaaggcttcagtaacttgaagaaacaaattgaaaatgccagaatgttt

SEQ ID NO: 83783 - DNA, 87 bp, Homo sapiens
ccaccagcatgcgggattccctcattgacaggatcactactcttggaatcaaagataaatccaaatactgcatatcagaaacaacag

SEQ ID NO: 83784 - DNA, 100 bp, Homo sapiens
ttgtacaagagtccactgataaagaaggaaaggatgagttattagaggactatagggtatgaccccatcatttccccagaggtctcggcctcctttggtg

SEQ ID NO: 83785 - DNA, 75 bp, Homo sapiens
agtccatggctgcctttgtcccagctgccactgaagacctctcacacagcaagaaggaggccatcagcaaactgg

SEQ ID NO: 83786 - DNA, 90 bp, Homo sapiens
ctcccctttctcgcccagcgcccccaggccgctcccggggctcacggttcctaaatatttgtcacagcaatgggctaaagcctctggaag

SEQ ID NO: 83787 - DNA, 99 bp, Homo sapiens
ctgaacgtcttgcaacagtggccgcacgcataggtgctatacttggtagatcagaaactcaggagtgtcttttctttaatgctaattgggaaaaagaca

SEQ ID NO: 83788 - DNA, 74 bp, Homo sapiens
ttgaccgccacattaccattttttcacccgagggtcggctctaccaagtagggtcatcaagactcctgagatag

SEQ ID NO: 83789 - DNA, 90 bp, Homo sapiens
ggagcaagatgagttgcagcaagtcatacgggaggtgctcatgtgactatcacggatcgaaaagtagcattagaatttcttaaatcaaac

SEQ ID NO: 83790 - DNA, 100 bp, Homo sapiens
caaggcgcccacggcctccagcttcaccacccgcacggcgcagtgccggaacactgtggcggccatcgaggagatggctgagagctagcaaggaaaactc

SEQ ID NO: 83791 - DNA, 87 bp, Homo sapiens
gcccgctcgggccaccgcgggaaccgagcccgaggagttagccggttttgggatttgagattgacgcggtgaactctgtccagtttt

SEQ ID NO: 83792 - DNA, 75 bp, Homo sapiens
ccaagggcaagtgatttgacagactggatacacgtctgtttaactacgcaaaaggtaatgctggcatggcttact

SEQ ID NO: 83793 - DNA, 82 bp, Homo sapiens
aaacttcgaggcactcaagtcctggctcagcaagactctcgagcccatgttaatttggagtggcccctggagtcagtttcct

SEQ ID NO: 83794 - DNA, 98 bp, Homo sapiens
caaggagggctcttgcaaggattcaaggcaactccccatcagatgagtctgaggagcgggaaagagaccccaaggtgctgacattcccagaatacatc

SEQ ID NO: 83795 - DNA, 83 bp, Homo sapiens
gcacaggcatcagtcaggcagatgtttgtcgactggaatgggctatgactttgcagccgtcctggagtggttcgcggagcgtg

SEQ ID NO: 83796 - DNA, 98 bp, Homo sapiens
agcatcccccggctgccctaggggccaggaccggcgtgacagcctccaggccctggaggaagcactgagcatccaaaccccgccatcatctccaccaa

SEQ ID NO: 83797 - DNA, 101 bp, Homo sapiens
ggacgccaccctgacgccgtggcctgggccaacctcaccaacgccatccgcgagactgggtcacggtctagatcacattctcgatccagaggaaggcgata

SEQ ID NO: 83798 - DNA, 75 bp, Homo sapiens
gctcagcttcaccatcgtcagcctcatgtacttcgcctttaccaggtatcatgatattagctggtttgacatcaa

SEQ ID NO: 83799 - DNA, 75 bp, Homo sapiens
aaaagacaattgatgacctggaaggttgaaatagacaaaactgtgttagtgactgtgagggttcttggctcttcc

SEQ ID NO: 83800 - DNA, 75 bp, Homo sapiens
aagcgaagactttccagctcagagagtgaaggtttgcatcgccagcttctatatattacggcctttttttttgct

SEQ ID NO: 83801 - DNA, 75 bp, Homo sapiens
caccctcagcagatgataatatcaagacacctgccgagcgtctgcgggggctggagctgacggcgctggagcgcg

SEQ ID NO: 83802 - DNA, 50 bp, Homo sapiens
gagaggagctgctgctcggaccagcgcgacattgcctaagatactgagcc

SEQ ID NO: 83803 - DNA, 100 bp, Homo sapiens
ttttcctaagccatcccctggcggaaccgcccccagtaataaaagactagtggccttagtgcccatgcccagtgaccctccattcaatacccgaagagcc

SEQ ID NO: 83804 - DNA, 98 bp, Homo sapiens
ggacgtgtacttctgtttctcagtttatctggatgttatcagatcacagaccatggtctcagggttttgagctcatcttcatcattcatatgaggaaa

SEQ ID NO: 83805 - DNA, 95 bp, Homo sapiens
acctgggccttaacaagaagagaatcgcctacttcactttgcccaagactgactctgcttcttggacacttaatgattgttggcaagaaatgtgc

SEQ ID NO: 83806 - DNA, 82 bp, Homo sapiens
atctcagagaaggaggaggtgaccacgcgcgaggtgaaatgacaatggatgctctgttggctcgattgaaacttctgaatcc

SEQ ID NO: 83807 - DNA, 75 bp, Homo sapiens
gtggtgctggtcatcaatgttactcaggtagaggtgatctttagacagtgactgagtatggatcatttgaacgag

SEQ ID NO: 83808 - DNA, 83 bp, Homo sapiens
gcagcctccagcagggacctgtgacaggtttggtgcacctcgatttggaggaagtagggcagggcccttatctggaaagaagt

SEQ ID NO: 83809 - DNA, 80 bp, Homo sapiens
ccccactctttccgccctaatggaggtctccagtttcgattgacttgatgcaaaacatcacaaaggctccatgttacaca

SEQ ID NO: 83810 - DNA, 71 bp, Homo sapiens
ctgctggatggaggggattttgtcagcttgtcgtcaagccaagacaatgcaaactccagtgaacattcccg

SEQ ID NO: 83811 - DNA, 110 bp, Homo sapiens
agacctggacccgccggactcgcggaaaaggccgctggaagccccccctgaagccggcagcaccaagaggaccaatacgggcgattcactgcgtgctgtcctcacttgtt

SEQ ID NO: 83812 - DNA, 100 bp, Homo sapiens
attttggtgcagctagagaattagaagatgatgagcagtttgtttctctgtatggcacagaagaatatttggcaaagtgtttcatggatttcaaagctgg

SEQ ID NO: 83813 - DNA, 78 bp, Homo sapiens
atccacctcagctacttgacaggggacctgacttactacaaaaaggtatttgcgttggtctgtgactcagaaaatcca

SEQ ID NO: 83814 - DNA, 96 bp, Homo sapiens
ggtgcgcaaggtgaaatgttcactgttaaagagatgttccggaagctacacaactcctacacagacgtgatgtgcaaccccttctacaacccgggg

SEQ ID NO: 83815 - DNA, 100 bp, Homo sapiens
ccaggagagtgacagcagctttctggtcaagtggttcaactcataatgacaagagacagtgatggttatgaaaactcaacagatggtgaaatgtgtgaca

SEQ ID NO: 83816 - DNA, 50 bp, Homo sapiens
actggcccaagttctttgaaaaggttggatggcaagcatgtggtgtttgg

SEQ ID NO: 83817 - DNA, 75 bp, Homo sapiens
gcaagttccgctttctcaacgagctcatcaaggtcgtgtctcccaaggggacaggcaaatggtatgaattacaag

SEQ ID NO: 83818 - DNA, 80 bp, Homo sapiens
ttttatcaacaaaggcaaaggattcggatttattaagcttgtgggacagtgtgtggtggtcttcagccaggctcctagtg

SEQ ID NO: 83819 - DNA, 101 bp, Homo sapiens
attgctactgccctctgcgctcctgcatctgcctccccatcaatggctgccatccggaagaaactggtgattgttggtgatggagcctgtggaaagacatg

SEQ ID NO: 83820 - DNA, 82 bp, Homo sapiens
agccgcgcgctgagggtctcggggcgggcgccgcgggacctctccgggccatgggccagctgcgggccgtccagcggctgtg

SEQ ID NO: 83821 - DNA, 75 bp, Homo sapiens
cccccattcaagttcaagttcacaattggctgcctatgattacacaataccacctatggagaaagctgttgtgaa

SEQ ID NO: 83822 - DNA, 100 bp, Homo sapiens
tgcgcttctgcagcttccgcagggccagtgagcaggtgtggcatgtgctgtcacccacaaaagctgtatataatgccagacattggaatcatccagattc

SEQ ID NO: 83823 - DNA, 75 bp, Homo sapiens
cagatgctgacgctttccatcaccaggacgatgccccgaattcccaccctgaagaacctagaggatcttgttact

SEQ ID NO: 83824 - DNA, 75 bp, Homo sapiens
ccgtgaactcagtactgatgcccagtggggcattcgtcttggtaaacttggttttggggattctcagcagttgcg

SEQ ID NO: 83825 - DNA, 50 bp, Homo sapiens
ggcgaatggagcaggggcgcgcagggagtgcatccgccccaacccttttc

SEQ ID NO: 83826 - DNA, 98 bp, Homo sapiens
ctgctggtcaccgccaacgccatgtggctggttatagcggttggtctggtccgagcatacctggctaagggtagctaccatagcctttattattcaat

SEQ ID NO: 83827 - DNA, 75 bp, Homo sapiens
caaaattcgatttgcaaatcattcagtgaatcccaactgttatgccaaagatgatattgctgataggatgaggat

SEQ ID NO: 83828 - DNA, 100 bp, Homo sapiens
ttttgagagtccagtatatttggaggaagctgcagatgtactttgtattttacaagcaggacaacgtctgacatgagccgagtgttctgctcacactgtg

SEQ ID NO: 83829 - DNA, 87 bp, Homo sapiens
cagacggccggctctgtgagcgccaagaccggctgaagacctgcctagagctggaacgttacctccagagcgagccctgctatgttt

SEQ ID NO: 83830 - DNA, 84 bp, Homo sapiens
tcaccaaggaactggtgctgcagcgagaggttttaaaatcaaagatgggaaaatcggagaaaattgcccttccccatggccagc

SEQ ID NO: 83831 - DNA, 100 bp, Homo sapiens
ctgggtaacacacgtctgcggtgttacccacgactgcctgggacctggccaagggctccacacaccaagaccaaggatttctctctgatcaaacggacag

SEQ ID NO: 83832 - DNA, 83 bp, Homo sapiens
cacagaacttacctgcctcttcatgcagttctccatcgtgccaatgtgaagttcatttccaatccgccctccatggtggcagc

SEQ ID NO: 83833 - DNA, 82 bp, Homo sapiens
ccgtagtatcacctcatacttttcatttgcgacctcatcatccagtctataatgacggatctatactacctcagtcagacag

SEQ ID NO: 83834 - DNA, 51 bp, Homo sapiens
gacccaagacacccagagagggacagaagaatggttgagaccggtgatgag

SEQ ID NO: 83835 - DNA, 96 bp, Homo sapiens
cttttttcaggcagaaaacaagtctcgtctggacgatatattcgactttatgggagaaaatttagcaaagaagatcatgttctttttattaagtta

SEQ ID NO: 83836 - DNA, 75 bp, Homo sapiens
ctctttgacatccacaagcaagtcctaaaagagggcattgcccaggttttaaaatcaaagatgggaaaatcggag

SEQ ID NO: 83837 - DNA, 74 bp, Homo sapiens
tggaccgatctaaagaaaactgcatttcaggacctgttaaggcggctgagccagaggccaactgcagaggaact

SEQ ID NO: 83838 - DNA, 100 bp, Homo sapiens
agagacgtcatacttggaaatggctgcaggttcagagttcaatgtatctatgcctgcctacctcaatctgcaagggagtgtcagaaaggccccgcattcg

SEQ ID NO: 83839 - DNA, 82 bp, Homo sapiens
tgtaattgctgaacttaaaaagcagtctaaacctgtgaccacccctgaagaaattgcacagtactgccaaatctgtcgaaag

SEQ ID NO: 83840 - DNA, 100 bp, Homo sapiens
gcagatggagatgaaggaggacgacgtttcttttctcatggtcctgaccactggcatgaacttttcccaaatgccaagggggaaaaccagtcgcccgttg

SEQ ID NO: 83841 - DNA, 50 bp, Homo sapiens
gaaggtctctggagacatcttcagcaggcagcgtctatcccagactaccg

SEQ ID NO: 83842 - DNA, 90 bp, Homo sapiens
attttattagtcttctactgccctacagctacagagcaggttaatacaatctgttggaatgacactggagaatatattttatctggctca

SEQ ID NO: 83843 - DNA, 83 bp, Homo sapiens
taccagttcctcggggtgcagcaggcatttcttttgaagaagctcctgttttcttcggagaagtcttcttggcgggattgttc

SEQ ID NO: 83844 - DNA, 50 bp, Homo sapiens
ctcctgagcagctgggactacaggtggaacaggaggattttgtaatggaa

SEQ ID NO: 83845 - DNA, 83 bp, Homo sapiens
cttgaaaaagctgccctgagacggtgtcccgccgaaagctccctgtgctgtcaggaatctacaggacttggctcgtatttaca

SEQ ID NO: 83846 - DNA, 80 bp, Homo sapiens
cagcatcccacattaagtcaacgatcctgtttgaccaaactcagagatcaattaaggcacagcttcagaactttgttaaa

SEQ ID NO: 83847 - DNA, 95 bp, Homo sapiens
aaagcgctggcagtcctgcctggcccccagccagttccctgctgaagatggccagatccccttgtctggtagttgatgtcacttggcgatattcc

SEQ ID NO: 83848 - DNA, 83 bp, Homo sapiens
aggggagcccgggacccccgggggcgcaggttgatgataattagaagcatgctttccactgaacttcccgacaacatttgtta

SEQ ID NO: 83849 - DNA, 75 bp, Homo sapiens
gccatcgttgctgccttcttcgtcaagagtcgtgccccaatttctgcaaaacttgtggccaatatgctgtcggtg

SEQ ID NO: 83850 - DNA, 99 bp, Homo sapiens
ctttccactggagttgcttcacttagctctacaatcaacccatgtgactgtccttcatctacttggattcagttccaagacagttgttacatttttctc

SEQ ID NO: 83851 - DNA, 75 bp, Homo sapiens
tcatttgatggccgaaatattttaaagtgaagtaagaactctgctagagaggaaatggctgcttcatcatcatcc

SEQ ID NO: 83852 - DNA, 95 bp, Homo sapiens
agatctaactctagaagaaatgaaaaaacaggctgctgtccagtgtcttcgatctgcttctgatgaacaatggaagagttaatagttgaacttcg

SEQ ID NO: 83853 - DNA, 82 bp, Homo sapiens
ctgaaagagtcgaatggtttgttggcagttgatattcactgatggactccaaagaatcattaactcctggtagagaagaaaa

SEQ ID NO: 83854 - DNA, 82 bp, Homo sapiens
gccgcctggggtagcggcggcgggagtcctggcgctctgcaggggaacgcccttttgcttgtgactggcagggctgcgacaa

SEQ ID NO: 83855 - DNA, 98 bp, Homo sapiens
ttcaggctgcaacaaggagaagagccatggaaacaggaggaagaattcccaagccaaagctttccagggacccgtgacattaaaggatgttattgtgg

SEQ ID NO: 83856 - DNA, 83 bp, Homo sapiens
ctgaagtcggcgtgggcgtttgaggaagctgggtaaaatgtcggttccaggaccttaccaggcggccactgggccttcctcag

SEQ ID NO: 83857 - DNA, 98 bp, Homo sapiens
ggcacaagatcaccaagtacatcgactttgatcatgtttgtcccgctggctggaagcctggcagtgacacgattaagcccaacgtggatgacagcaag

SEQ ID NO: 83858 - DNA, 83 bp, Homo sapiens
ctggaccttggacattcagacttcagaatggtactggtcttcttggacattaatctttgaatacttgctgactgctaagaaat

SEQ ID NO: 83859 - DNA, 51 bp, Homo sapiens
tttctgggtgacactcaacaggattcccggccaggagtggtggctcacacc

SEQ ID NO: 83860 - DNA, 60 bp, Homo sapiens
gtggttggaaatggcacctatggacaagtctataagatgatggatttggacatgcttcta

SEQ ID NO: 83861 - DNA, 120 bp, Homo sapiens
cggagagtgcgctccaagagcgacacgccgtacctcgcagaggccaggatctcctttaacctgggggcaggtaatccatcagctgaggctctcagagaatgaaagtgtggccctgcagga

SEQ ID NO: 83862 - DNA, 80 bp, Homo sapiens
acggcgtacgccctcatggggaaaatctccccggtgactttcagatgggcttccccaaggatttattgacattgctactt

SEQ ID NO: 83863 - DNA, 100 bp, Homo sapiens
tgttgcttggcctggtgggcccagtcctcggtgcggcgcggccaggccagagatcctcagcaggagcctatggaagagatagaaaatttgaagaaacaac

SEQ ID NO: 83864 - DNA, 75 bp, Homo sapiens
tggcaatcgagttgagtacttggatagacttatacctcagatcagcaaagacccgatttttgtaccaggcgtctg

SEQ ID NO: 83865 - DNA, 100 bp, Homo sapiens
tcttacaacaagagtcctcaatccaacagcccagtgcttctgtctcgactgcactttgagaagagacgagttgtactgctgtcacaggaaatggacgctg

SEQ ID NO: 83866 - DNA, 82 bp, Homo sapiens
gctggccggatggaaatcctaatgacagtctccaaattcgcctccatctgtaccatggttctccttactatgacaatgtccg

SEQ ID NO: 83867 - DNA, 97 bp, Homo sapiens
cgagaagcagtacgaagactcctgccgcgtataccaggcatccagccccgatgaggatgggagcaaagtgtttacggcatcgtgtgataaaactgcc

SEQ ID NO: 83868 - DNA, 80 bp, Homo sapiens
cgagctggccgcgccgaccaccatcccggtcaccacgaggcctcaggcccaggcccaaggccaagtgagagagcccaggc

SEQ ID NO: 83869 - DNA, 100 bp, Homo sapiens
cagccaggaagggaggcagaagcatgctaagaacaacagtcaggccaagccttctgcctgtgatggctaagtcctatcagccatggaaacaccattgctc

SEQ ID NO: 83870 - DNA, 75 bp, Homo sapiens
ccgggagctggcgtaatgcctggccgcagtgtgtttttgtctgatgaaaatagtctggagtataaatattacaag

SEQ ID NO: 83871 - DNA, 74 bp, Homo sapiens
gcctgcgcagccaggatagcatgagctcagacaccgccagggtcctggtccagtggcgggaagctgtgtcagtg

SEQ ID NO: 83872 - DNA, 102 bp, Homo sapiens
ggcccagctcggccagtcacctctgccagcttgctgccaagccagcaccttccacggacagcgtcggctggagtgcaatggcaccatctcggctcactgcaa

SEQ ID NO: 83873 - DNA, 87 bp, Homo sapiens
cggtgtctgctgcgttcacggcaggattcggttaggttatgaagacagtatggagtttccagaccatagtagacatttgctacagtg

SEQ ID NO: 83874 - DNA, 83 bp, Homo sapiens
tccatcttctgcttagtatgtgtattcagacagatatgaatatcactgggcagatggtactaatattaaaaagccaatcaaat

SEQ ID NO: 83875 - DNA, 74 bp, Homo sapiens
aacttctttatccttcgaaggaagcctgtggagacttccattagtttgatgaatctgacttccacaccactatg

SEQ ID NO: 83876 - DNA, 100 bp, Homo sapiens
accacctcacacagggaaacggtaatgagagatccaaacaccaagcgctccaggggctttgggtttgtcacatatgccactgtggaggaggtggatgcag

SEQ ID NO: 83877 - DNA, 100 bp, Homo sapiens
cagtcttggatccttcagagcctcagccactagctgcgatgcatgtgatcaagcgagggaactgctcgcagaaagaagaaggtggttcatagaacagcca

SEQ ID NO: 83878 - DNA, 75 bp, Homo sapiens
ctctggtgagacatttttcttccttctgtcacatcacacccaatggactccctggaggaaaagcggaagcggcag

SEQ ID NO: 83879 - DNA, 100 bp, Homo sapiens
cccggttcctgggcccacgctaccgggagctggtcaagaactggaattgaatgatctggcacgggaccctccagcacagtgttcagcaggtcctgttgga

SEQ ID NO: 83880 - DNA, 82 bp, Homo sapiens
cattgaggaaagaagcagctatgaagaccagggggttcagctttccaagacaaagttggtagctggcagtgttgtgatggct

SEQ ID NO: 83881 - DNA, 113 bp, Homo sapiens
ccacgtccagcttcaccacgcggctgcacaactgcaggaacaccgtcacgctgctggaggaggtttaatacaacatggaagccaccaaggcttacagaatgtgctttccagag

SEQ ID NO: 83882 - DNA, 90 bp, Homo sapiens
ctcgcgaggacggacgccattatcgcatctccccgacaaacaccacgagaattccgcagcccacacggataacttcaaactaatgtgtac

SEQ ID NO: 83883 - DNA, 73 bp, Homo sapiens
tccgggcctccaaggaacttaagcaaagggacccagatggaaggatgctcttagatatttttgatgaaaatct

SEQ ID NO: 83884 - DNA, 88 bp, Homo sapiens
tgatgaggaaagctgtgaaagttctcaagatacttggagatgaagttcaacttttttcacttgatgaagaatttgattatgacaatgt

SEQ ID NO: 83885 - DNA, 80 bp, Homo sapiens
ctggggcaaagggaccacggtcaccgtctcctcaggatggccgagcctcgatttaacaacccctacttctggccccctcc

SEQ ID NO: 83886 - DNA, 100 bp, Homo sapiens
gaggaggcatggagcccgaggaggagccaagtgtggcagcagttcgtgaagtctgtgaggaggcttcgcccacgactgaagcgcaagacctgaaggaggc

SEQ ID NO: 83887 - DNA, 87 bp, Homo sapiens
cagccaagctcgtagcctgccactccgtgcccttatgccagcctggaccatcttggaggcagtgtaggatcatggaagaactttgaa

SEQ ID NO: 83888 - DNA, 100 bp, Homo sapiens
ctgcccacgggggctccgcggcgtcctcggcgctgaaggggttaattcaacagttcaccaccattaccgtgtcaacctaagaaaaagtctacgccactga

SEQ ID NO: 83889 - DNA, 75 bp, Homo sapiens
ctctgggcggcgaggaaggcgtctcccgggtactatttcttgatcatccaaaaaagaagattcgggacacacaga

SEQ ID NO: 83890 - DNA, 80 bp, Homo sapiens
cctgagaatagtggttcttaactctgaactgtggctgcaccatctgtcttcatcttcccgccatctgatgagcagttgaa

SEQ ID NO: 83891 - DNA, 89 bp, Homo sapiens
ctattacaggagtccctgacaacatacagaaggagctagattctggaaaccaaaatggaggaaatgatgataagactaagaatgctgag

SEQ ID NO: 83892 - DNA, 101 bp, Homo sapiens
attatggctgctgttgtccaacagaacgacctagtatttgaatttgctagtaacgtcatggaggatgaacgacaggaatgaatctgaagtctgctgcagta

SEQ ID NO: 83893 - DNA, 75 bp, Homo sapiens
tggtccatgaggtgtggactgctgtcatcccagagactgagaatgcgattcacacctttgtgcagtccggatctc

SEQ ID NO: 83894 - DNA, 75 bp, Homo sapiens
tctggaattttgccgatttcatgactaaccagtggttgccatctaccagacttggcacctttctagagaatcgtg

SEQ ID NO: 83895 - DNA, 90 bp, Homo sapiens
agagtgctgagggcacatctgaaaccactggaggttggcgacatggaggtcagattctacatcccaccagagacgtactcaactgctgac

SEQ ID NO: 83896 - DNA, 75 bp, Homo sapiens
aagcagaaaaacagtcatagattgcagcatctccagtgacaagttgggtatctacagccattggttgctgttcag

SEQ ID NO: 83897 - DNA, 83 bp, Homo sapiens
gttcttgtttgtggatcgctgtgatcgtcacttgtgtactaatggtcacttgatgtgcgctggctgttttatccacctactag

SEQ ID NO: 83898 - DNA, 100 bp, Homo sapiens
ggcttctccgccatgcaaggctggcgcgtctccatggagattgttgatccatttcagatacttgtggcagcaaacaaagcagttcacctctacaaactgg

SEQ ID NO: 83899 - DNA, 75 bp, Homo sapiens
acccaatggcctctggatgaaacgtcaggaatttactacacagacaacgtgtcctggagagacagcacaatgggc

SEQ ID NO: 83900 - DNA, 100 bp, Homo sapiens
aggtcgtgcgtctgaagcctacaagaaagctctcctatgtggacgccgagggcaaccctgtgggtgtggtacagatgaccttcctgcggctgctgagcgc

SEQ ID NO: 83901 - DNA, 100 bp, Homo sapiens
agaactcgtggggcactggcgaagatgtgaaggttatattgaaaaattctcagggagagttccaggaatggatggaggtgctttaactgatacaagtctc

SEQ ID NO: 83902 - DNA, 100 bp, Homo sapiens
ccggactctgggtgttttgctaccgtgaccgtttagggtctgcggaagagggagctgctgaaggagctgctaccagtcatcgggcagaacctccgattcc

SEQ ID NO: 83903 - DNA, 74 bp, Homo sapiens
ttcgcgtctctctgctgcggcgcggggaccgctgtgctctcggtggggacccaaactgtatgcattgttccaga

SEQ ID NO: 83904 - DNA, 75 bp, Homo sapiens
cgtctctagcagtggcagtggactcggctccggaggtggcagttaagtgttgctaacaaccacaagcagaatttg

SEQ ID NO: 83905 - DNA, 100 bp, Homo sapiens
cttcggtccgcgacgatcctctagagcactgtgtgtctccccggacgcgagcccgctcccctgagttgcatgatggaatttgaacattacttcaagaggt

SEQ ID NO: 83906 - DNA, 82 bp, Homo sapiens
caagtcggcccattccccgtttgcctcggaagtgagcagctactcttacagattttttatcaagcagaaatgcatcgaacaa

SEQ ID NO: 83907 - DNA, 75 bp, Homo sapiens
ttaactcagtggtcatcgctgtgaagctgcaggcacctattcagtgggaggagcggaacgtcactgccattcaag

SEQ ID NO: 83908 - DNA, 100 bp, Homo sapiens
ggaaatgcagccactgaagaagatacgtaggtaacctttccagagatgtgacagaagtccttatacttcagttgttcagtcagattggaccctgtaaaag

SEQ ID NO: 83909 - DNA, 75 bp, Homo sapiens
ctcgaggctgctaagagactaagtaatgaatttgggcatcctgaatggttagacttcccaagaaaaggaaataat

SEQ ID NO: 83910 - DNA, 101 bp, Homo sapiens
gaagtccaagtcaaacgcagaaggactgcctcactgagcaaccaagaattggagtatcctccttggagaatgttcactacagacaatcagcaaaaagctca

SEQ ID NO: 83911 - DNA, 83 bp, Homo sapiens
gactgtggaacttccgtgccccccaccctcaccaagttcctccgtgtcacaaagcagtacctgccccacgtggcgcgcctctg

SEQ ID NO: 83912 - DNA, 75 bp, Homo sapiens
cagatgtacaactccctcatgaaggtgtcccaagggtggggcacacctgctgcacacagggatgacaggtaccaa

SEQ ID NO: 83913 - DNA, 98 bp, Homo sapiens
cagcgcgcttttcaccgaggcctcaattctgggatttggcagctttgctgtgaaagcccaaggcgtctctggccgagcctctttttgtggaaaacgac

SEQ ID NO: 83914 - DNA, 97 bp, Homo sapiens
agaggaatggaggggctgtgggtgaacacgaggacagccgagattcgactctgcccacaggtaaaataccatgaagattttgaaaaaacaaagggga

SEQ ID NO: 83915 - DNA, 100 bp, Homo sapiens
aaatagcatccaaggttcaattgggtctgtccagggttttggtggctggcgaagctgagggcgtgtcagcaggcctttcgatccctgggaccaaccgcat

SEQ ID NO: 83916 - DNA, 82 bp, Homo sapiens
tttgtggatcgctgtgatcgtcacttgatgtctttggtggacttgggaaagaggttgctagaagcagcaagaaaaggccaag

SEQ ID NO: 83917 - DNA, 76 bp, Homo sapiens
gatggtgatggagattttgatgtggatgatgccaaagttttattagctttgagagagaaaagaaccacagtggttg

SEQ ID NO: 83918 - DNA, 97 bp, Homo sapiens
catggtggtctggggcaacgcggaagcttgttcagattattatcaatacaacacatttggagaaatcctgtaagtacttggaagaatttatcaccaa

SEQ ID NO: 83919 - DNA, 100 bp, Homo sapiens
aaacacgtggaagccgtatatatagacattgcagatcgaagccaagtgctcagcaaggaccctgctgggatctttgagcttgtggaggtggtcggcaatg

SEQ ID NO: 83920 - DNA, 75 bp, Homo sapiens
cggatgggcagagaaacctaagtggcaaggtgatcttgagagtgacagatattgatgatgttaagaagttcaaac

SEQ ID NO: 83921 - DNA, 75 bp, Homo sapiens
cgaggagctcactgcggtcctaaccccgccgcagctcctcggacgcagctcgagatgctgctgtgcagaagattg

SEQ ID NO: 83922 - DNA, 75 bp, Homo sapiens
tgagggtgagtgccgggagctctgaggctgttccatttcctccaagtcaccggcttacagcaaaagaagtgtttg

SEQ ID NO: 83923 - DNA, 82 bp, Homo sapiens
ccgcaccttcccgccttctcagactctttttgatcagaacaatgctgcaaaaaaagaagagtcagaaactgccaacaaaaat

SEQ ID NO: 83924 - DNA, 105 bp, Homo sapiens
gcacctgtcggcagactggtgacttcacttttgagtgcaactgccttccagcgaggacgtgggacttctcagacgtcaggagagtgatgtgagggagctgtgtga

SEQ ID NO: 83925 - DNA, 78 bp, Homo sapiens
atcccagcggaaaggagcgcgcctctttttggcttggggagctgcagcgttcggccatggaggaattgcaagaccaag

SEQ ID NO: 83926 - DNA, 74 bp, Homo sapiens
aggcccaccctggagtaaccctcactggagaatccagagctcatcaaggtgctgtacaagaccagccataccag

SEQ ID NO: 83927 - DNA, 98 bp, Homo sapiens
tgaaaggcaacaatgacattttaagtataactcagcctgatgtcatttaccaaatccataagctgctgataaagatgatagttcagaagacatttcag

SEQ ID NO: 83928 - DNA, 75 bp, Homo sapiens
ggacaagaagattatgacagattacgccccctatcctatccgcaaacaatttctctatgaatcatcatcaagaac

SEQ ID NO: 83929 - DNA, 110 bp, Homo sapiens
tcaaattcacattcttctaatccaagcaataacccaagcaaaacttcagatgcaaaaaggtcacggatcgcctacagtgacgaagtacggaatgagctcctgggggatga

SEQ ID NO: 83930 - DNA, 100 bp, Homo sapiens
cccatttgtgtccattgatctcttggagcagctggggatcatgtccgtagttcgtggtccttcgccggtgtccccggagcccagcggctgtggatggcag

SEQ ID NO: 83931 - DNA, 100 bp, Homo sapiens
cccagatgaagctgtagcgtatggtgctgctgtccaggctggtgtgctctctggtgatcaagatacagacagcaactctggaaagtggcttctaactcgg

SEQ ID NO: 83932 - DNA, 75 bp, Homo sapiens
tttctgcttcctgcttccacttccgtgaccgttagggacaagacaggaagaagccatggatttaataaatagaga

SEQ ID NO: 83933 - DNA, 83 bp, Homo sapiens
gaaaacatggtagagtggctaagaataatccgcaagatgggattatggtgaaactagttgtcaatttgttgcagttatccaag

SEQ ID NO: 83934 - DNA, 75 bp, Homo sapiens
agtccagagctgaggactgcctgtttgcaggtctctaattaacagaagatggcaaagcccagccacagcagctat

SEQ ID NO: 83935 - DNA, 51 bp, Homo sapiens
taccaccatgaacagcaagcattagcattgatggagtctcgcactgtcgcc

SEQ ID NO: 83936 - DNA, 100 bp, Homo sapiens
agcgggagattccctcatggttatgatcgccatgaagatggaggtaatggaacttaatcgatctgagagtttatgtcatgaaaactcattcttcatcaat

SEQ ID NO: 83937 - DNA, 82 bp, Homo sapiens
cacccgcccagcggggagtactttgttcacctctgggggacagaggaggttgctgcctggctggagcacctcagtctctgtg

SEQ ID NO: 83938 - DNA, 96 bp, Homo sapiens
agaggaggggaggaggaggaggattcagggaataggagctggggagcccttctgcgccacagttttcaaaaggtacatgggaaatactcctcagaa

SEQ ID NO: 83939 - DNA, 90 bp, Homo sapiens
ttttgtttatataactcaagttgtttggctaaattcttcagaagaagctcattcacacagaagacccatttaatgatgaacatcaggaga

SEQ ID NO: 83940 - DNA, 90 bp, Homo sapiens
tcggagttggcaggaagccaggttgcagggtgtccgcttcctcaggaccatggccaacctggagcgcaccttcatcgccatcaagccgga

SEQ ID NO: 83941 - DNA, 82 bp, Homo sapiens
gctcgagccccgccctgccgccagccagcagaaaaatatggctcaggagactaaccagaccccggggcccatgctgtgtagc

SEQ ID NO: 83942 - DNA, 83 bp, Homo sapiens
gaatccttgcagggccaagatctcttcaacagggcttcaccactggaacaagcacaagtgttctaagaacggaagcatctggg

SEQ ID NO: 83943 - DNA, 92 bp, Homo sapiens
gcccggcgcccctgagccggccgagcggcgacggaccgcgaggtgacttaagagattaaaattaatttggttgctgttggttctgaacaaat

SEQ ID NO: 83944 - DNA, 78 bp, Homo sapiens
aggagaagtggagaagaaatcagtcagccgcaggataatcgagttcacattggaccaaaaatggaaattcgggtcgtt

SEQ ID NO: 83945 - DNA, 51 bp, Homo sapiens
ccatggaggaggacgacagctacgattcagcattcccatatttgaaatggg

SEQ ID NO: 83946 - DNA, 96 bp, Homo sapiens
tcagccgctacgtgactcttttctccaggtaaaataccatgaagattttgaaaaaacaaaggggagaggctttactcccgtcgtggacgatcctgt

SEQ ID NO: 83947 - DNA, 100 bp, Homo sapiens
aaaacatgtactacagccagtcttctatgtttccacatcggtcagaaaaagatgattctttctgaactaccttttttcgggaatggatgatgatggtatg

SEQ ID NO: 83948 - DNA, 89 bp, Homo sapiens
tctgatcggtcaccaggattctgacaaaagtactctccgaagaggaattgacatagattcttcgctgctgctgccttaccgccgagaac

SEQ ID NO: 83949 - DNA, 100 bp, Homo sapiens
aggaaatgttctccttatgtttggtctactattgcatttagaagctgagaacggagaccaacctgggctgaagaaagaagattaaatgctgaaacatttg

SEQ ID NO: 83950 - DNA, 88 bp, Homo sapiens
caaccaggagctctgccggctcaacacgatggacttactgctgcctagtatcagaaggccaggcgagactgcaacactgctcatcacc

SEQ ID NO: 83951 - DNA, 96 bp, Homo sapiens
ggctgaacagtgagctccagcagcagctcaagacactcttgcactcctgtaatgagcctggcactgtgatgaaacacttttcccgtgtcgtttgag

SEQ ID NO: 83952 - DNA, 75 bp, Homo sapiens
gttaaggattccaagtaactcttatttgacatgccaccactgctctttgaggtgtcatccctggagaatgctttt

SEQ ID NO: 83953 - DNA, 100 bp, Homo sapiens
cgcgccgtccgcgccgcccgttctgatgccgacaaaaggatcaaggtggcgaagcccgtggtggagatggatggtgatgagatgacccgtattatctggc

SEQ ID NO: 83954 - DNA, 105 bp, Homo sapiens
caaatccagcagggaggtccagatgaaaaagaaaagactaccgcactgaaaggtgggaaatgaagaaggatgaaacactagaagaggaagaaaaagcaatactgg

SEQ ID NO: 83955 - DNA, 97 bp, Homo sapiens
tctcatccgcacgcacaatatcgggcagaaagataatcacgaaaacaagcatcgttgtgggtccaaggagacattttccgatccaaactgaaaaatc

SEQ ID NO: 83956 - DNA, 97 bp, Homo sapiens
tatacttcaatcatcgccgatgattttgcagcctttgttggacttcctgtagaagaggctgtgaaaggaactcaccacattgcctgtcctctacctg

SEQ ID NO: 83957 - DNA, 100 bp, Homo sapiens
agctttgtatttcttcgtttctttgctgtagccgtagtatcacctcatacttttcatttgcgacctcatcatccactcctcggtgggtggtacttctacg

SEQ ID NO: 83958 - DNA, 100 bp, Homo sapiens
attcgaggtgctctgtggccgcgagtgcatcttccacgtcatcatcagatttgaaatatttaaagtggatacaaaactatttcagcaatgcagacaatta

SEQ ID NO: 83959 - DNA, 83 bp, Homo sapiens
ctgcagctggtggacgaggtggtacgaggggtcgtggccgagggtgtgctggagtatctgtctgccttcgatgaagaaaccac

SEQ ID NO: 83960 - DNA, 100 bp, Homo sapiens
gcgggtccgtggagctggagcagatcccccagccggctgagacagcactattcctgatcagagaactccagttgcttcaacacacagtatcagtagtgca

SEQ ID NO: 83961 - DNA, 101 bp, Homo sapiens
cctgctctcagctctggtcgcggcggctatcgacgatctgaggctgtcagagatgactctggttctgtccatgaatagattctgcgagcccattgtctcgg

SEQ ID NO: 83962 - DNA, 100 bp, Homo sapiens
aagacaccttatcacccacacccacacgtgttcaatacacctcccacctgtcctcaggcatatcaaaggttagcactctacgtatatgaatatctgctcc

SEQ ID NO: 83963 - DNA, 97 bp, Homo sapiens
acgtttcaaaaattttagaaaatggacctgctgacagagcagatggcctggagattcatgacaaaatcatggaggaatggctttctaaaggacatgg

SEQ ID NO: 83964 - DNA, 100 bp, Homo sapiens
tggggacggtggggacatcaggctgccccgcagtaccagggagcgactgaagtgcccatgccgcttgctccggagaaggacagaataacgggctcccaga

SEQ ID NO: 83965 - DNA, 50 bp, Homo sapiens
gccggcgtcactctggatgaggccaggggattaaagcctgtggtttccac

SEQ ID NO: 83966 - DNA, 50 bp, Homo sapiens
ctccagcctgtgaagaagttaactgtacaaaactttttaccaacaaaaaa

SEQ ID NO: 83967 - DNA, 100 bp, Homo sapiens
cgggagcgagctcaaggcggcgcggcggccactgggcgcagcacccagagccccccaagatgaacccagtggtggagccactgtcctggatgctgggcac

SEQ ID NO: 83968 - DNA, 100 bp, Homo sapiens
aagttttccatggaggtgaaaagttcagttgagaaacaagggctcaatatggaggattacattgggaaaatgaggtacgttagtgttcgcgattttaaag

SEQ ID NO: 83969 - DNA, 98 bp, Homo sapiens
gttacgtactatcatcagatatttactggacactttgctcagcctgcttcatgcttctaatggtattgatgaagatgaccctactgctgatgatacca

SEQ ID NO: 83970 - DNA, 82 bp, Homo sapiens
gagaacttgaacaatgaggtcatgatgaagcaatggctgccatccggaagaaactggtgattgttggtgatggagcctgtgg

SEQ ID NO: 83971 - DNA, 100 bp, Homo sapiens
cgggacagcgcggcggggagcgacgactgtcgacttgctggagaagatgcttgtattggactcagataagagaattacagcggcccaagcccttgcacat

SEQ ID NO: 83972 - DNA, 50 bp, Homo sapiens
gttgtgagaagacgtctgtgtcgtgcgggtgaaggttgccgaactgtccc

SEQ ID NO: 83973 - DNA, 100 bp, Homo sapiens
aattgaaggctccaaatccttagctcagagctggaggatgaaggatcggctcctgagaaccatgtctatgcccaaaggtagagttctggataaaaacctg

SEQ ID NO: 83974 - DNA, 74 bp, Homo sapiens
ccctactccagcatcgcaccccaagaaaccagtcaccccagactatgtccctcctcttggaaactttgatgtgg

SEQ ID NO: 83975 - DNA, 75 bp, Homo sapiens
cagcagccctgtccggcatctgtcttgagctcccagcaagttgggagctgaaagtgccgacagcattggtgccgt

SEQ ID NO: 83976 - DNA, 73 bp, Homo sapiens
gaataccactattccaaccaagaagagccagaaatttctgaataaattggcagaagaacgcagacagaagaag

SEQ ID NO: 83977 - DNA, 98 bp, Homo sapiens
gtggagctccagagatgattactctcgggatgattataggcgtgatgatagagatgtcttcagtaaatgtaaaggtgacctcttagaagttaaagatg

SEQ ID NO: 83978 - DNA, 75 bp, Homo sapiens
cccgtacgtcactaccactgtctctgctcacagtgccaagggtgctgttggcccaaaggttgccctgaagccccc

SEQ ID NO: 83979 - DNA, 100 bp, Homo sapiens
ttggttatattgtgccaccagctccagaaaagagtatagtagaccccttgttgaaatgggacagttggcagcggctctgatgagcccgagaagaggcctg

SEQ ID NO: 83980 - DNA, 75 bp, Homo sapiens
cacatctacgtgctcaaccaggtggaccacttcaggtcagaagccaatgacctggccctgaggctggctcgccac

SEQ ID NO: 83981 - DNA, 100 bp, Homo sapiens
caagatgccgatgcctgagccctgtgagctggaggaaaggttcgccctggtgctggatcaagtcttccataccagggaccaggccaaaaccagactgcca

SEQ ID NO: 83982 - DNA, 101 bp, Homo sapiens
gagttacaatgcatcgcgaagatctcgtagttccagcaggaaatagccctcaagatagtccaagaaatttctcccccagtgcctcagcccatttttcattt

SEQ ID NO: 83983 - DNA, 100 bp, Homo sapiens
cgagccgggatctcaggtcctcgggggcggcggccacgccaaggacggacatccacgacagcgatggcagttccagcagcagccaccagagcctcaagag

SEQ ID NO: 83984 - DNA, 80 bp, Homo sapiens
agaagaaggagatgaggaaaatgatccagactatgacccaaaggtgaaagaacttgtcctggacaacagtcggtcgaatg

SEQ ID NO: 83985 - DNA, 75 bp, Homo sapiens
tggggagcttctgtccacctgtcctgcagaggagtcgtttccagcccggctggccacagatgctatggcccacgt

SEQ ID NO: 83986 - DNA, 98 bp, Homo sapiens
ggaaaagaagcccaaggatagcacaacccctttgagtcacggtaatctgtaagtcagatgctccaacaggggatgttcttcttgatgaagctctgaag

SEQ ID NO: 83987 - DNA, 100 bp, Homo sapiens
gcctatgtagctgatgtcactcaggagcacgagcgaagtacagcttatggatggctttgtatctggtggaggaggcttgggccgaagctggtaaaatgag

SEQ ID NO: 83988 - DNA, 90 bp, Homo sapiens
aatgccctcacaccagacctacggagggagctggaaattcctgacgttcattgatctggctgcaaggtgtgactgttgtaaatctcaagg

SEQ ID NO: 83989 - DNA, 118 bp, Homo sapiens
ggcgtgcccgccggggggctagtggccacgctgcagagcctcgagacagggtcttactctgtctcccaggctggagtgcagcggtgcaatcacagctcctgcagcctcgaactcccag

SEQ ID NO: 83990 - DNA, 75 bp, Homo sapiens
tgcagctgccgccgccgccaccgagccgccgcgctttatgaaggcaaagaacagatggagtttgaagaatccatg

SEQ ID NO: 83991 - DNA, 50 bp, Homo sapiens
tggaccattttacattcccactagcagggaagggaaaaggccgaggcatc

SEQ ID NO: 83992 - DNA, 101 bp, Homo sapiens
caaatacccctttgaattaattatggctgctggctgaaggcggtgcaggtcctcatggtgctctccctcattctctgctgtctctccttcatcctgttcat

SEQ ID NO: 83993 - DNA, 96 bp, Homo sapiens
tgatatctttctatttgatagactaacaaatggctgtttatatcactggaaaagaagttttcagcttcaaaatggtttcttacatggatgcaactg

SEQ ID NO: 83994 - DNA, 88 bp, Homo sapiens
ctaccgggaagatttacacagatggaaccagaaaagatacgaggctctaggagaggttattacgacctattgccctgctaacaacgag

SEQ ID NO: 83995 - DNA, 51 bp, Homo sapiens
aaaaatgatcaactattgaccatatagttcactgattaccaaagctatgtc

SEQ ID NO: 83996 - DNA, 96 bp, Homo sapiens
aacagagtgctgttttagagctggcagcagcatctcagcccaagagaaggagtcgtaagaaagcagtgggagttgaagtcattgtcaagtgcttgc

SEQ ID NO: 83997 - DNA, 50 bp, Homo sapiens
atgtggaggagatggactggctcatagagtgaagacatttccacctggac

SEQ ID NO: 83998 - DNA, 74 bp, Homo sapiens
gcgctactctctctttctggcctggaggctatccagcgcttcatccctccacccctcatcttcggggctggcat

SEQ ID NO: 83999 - DNA, 100 bp, Homo sapiens
acaaaggtgctgctgatcatctgaggttgcctgcatggcagtgaagaacatggacctttggttctgggaggtgatcagtgatgaacatggcatcgacccc

SEQ ID NO: 84000 - DNA, 82 bp, Homo sapiens
caggacgagacgggcaagaaccgccctgcctgcctggcgctggaggcccatgacagaactctatgctgtgccttatgtgctg

SEQ ID NO: 84001 - DNA, 83 bp, Homo sapiens
tgagcgggcggtcattcgcatcgcagcaggttacgggcaggacttgagtggcttcggacagggcttctcagaccccagccagc

SEQ ID NO: 84002 - DNA, 100 bp, Homo sapiens
cctatccccgacgaccggatcctgaggaggcagctgcggtggcagctgctgagttctcggtgaagacttaattcagtgcacaaatgagatgaatgtgaac

SEQ ID NO: 84003 - DNA, 75 bp, Homo sapiens
gcttccaggacatcaagcccatgcgggaccagatcatccgcgtgaagcgaacatacatatgatagttgagaaaga

SEQ ID NO: 84004 - DNA, 100 bp, Homo sapiens
cgtccccagaacgcagatcagaggtagtcggacctttcccgctggcgcgcagcctcagctagataatcagcaactgctgtgatgagatgctgcctttaat

SEQ ID NO: 84005 - DNA, 100 bp, Homo sapiens
tttgtgcaatgtttagccaacccaaattaccttaattaccaactgccagagttttctctgggtgttaacagcggttggactacagacaattgcttccggg

SEQ ID NO: 84006 - DNA, 75 bp, Homo sapiens
agttcctgctgacttacgcttgtttgagttcctggtccagaactttacacagaaaaggtgctcaaaggatatttg

SEQ ID NO: 84007 - DNA, 76 bp, Homo sapiens
gggacagcgagagcgtgccaggcgtgtactgcctatgtgtgctatttttcgaaagaaagcagtggaacttggggta

SEQ ID NO: 84008 - DNA, 75 bp, Homo sapiens
agtggaccacggggagccccacgaggacccactgatctcagcatgaagagacaattggcgactagctcaggatcc

SEQ ID NO: 84009 - DNA, 90 bp, Homo sapiens
aatggccaaaatgatggatcctagggttcttcatcacatggcatttgcaagtgaggaagcagcacaaccctgggttttagataatttcta

SEQ ID NO: 84010 - DNA, 75 bp, Homo sapiens
taaggccgcgttggggtgagaccctcacttcatccgcctcctgacaaggtgatccgggcgggccccgcaggaatt

SEQ ID NO: 84011 - DNA, 100 bp, Homo sapiens
gtacaaagaagttataccatggagagtactttatgtggctgtgatcagggaaaatacaaggttgtacatcctggagacctgaagaattctgttgaagtcg

SEQ ID NO: 84012 - DNA, 48 bp, Homo sapiens
gggcaatggcatcgtgggagcgcagaaactaattctgaagcaagccct

SEQ ID NO: 84013 - DNA, 96 bp, Homo sapiens
cagaggggccactgctgggccctgaggctgcaccaagtggcgaaggagccggctccaagaggagaattctgcctaagccaactcgaaaaagccgta

SEQ ID NO: 84014 - DNA, 100 bp, Homo sapiens
ggaaaatggcggacgggaaggcgggagacgagaagcctgaaaagtcgcagcgagctggagccgccggaggtgtcatggagaaactccagctgggcccaga

SEQ ID NO: 84015 - DNA, 82 bp, Homo sapiens
cgcgaggaaacgcaggcgagtgggaaggagctgtaaaattgacaagcttggcatgtggaaatcagcacatctgggcctgtga

SEQ ID NO: 84016 - DNA, 100 bp, Homo sapiens
gcggatggccccaggtgtaagcgcagaaagcaggcgaacccgcggcgcaataacgacttatgaaaatatgcatcagtttaatactgtcttggaattcatg

SEQ ID NO: 84017 - DNA, 51 bp, Homo sapiens
ccagcctcttcgtgcccccaagccatgagccaacagcggatgtaaactaca

SEQ ID NO: 84018 - DNA, 110 bp, Homo sapiens
atggctggtaatgaatatgttggattcagtaatgcaactctatgtgacctgagtgacctagaataccttgatgaagagttccatcagagcctgcagtggatgaaagacaa

SEQ ID NO: 84019 - DNA, 75 bp, Homo sapiens
gaggttgccgacgccatcaggctcaacgaggaactcaaagtggatgaggaaagttggacgtgataagtatgagcc

SEQ ID NO: 84020 - DNA, 100 bp, Homo sapiens
ctcaggagaaaaaatatggacctcttaaaattgtggaactggaagaggaggcaacagtatttggggcaagaagtttgaggatgaatacagtgaatatctt

SEQ ID NO: 84021 - DNA, 82 bp, Homo sapiens
aaaagagaaatcggcaaaagatgagcccaggaaaagggaatcccagctttggaaacatgatgagcaaggagaagcgagaggc

SEQ ID NO: 84022 - DNA, 90 bp, Homo sapiens
gttatgttctgggataccttctcacttggaaattaatactaactttcttcaaagctgcatcatcacagttctttctacaacttcaacagg

SEQ ID NO: 84023 - DNA, 74 bp, Homo sapiens
aagagggaagacacgcggaaacagcccatgcagaatgccaccaagtatggcaacatgacagaggaccatgtgat

SEQ ID NO: 84024 - DNA, 100 bp, Homo sapiens
cgcactcttgtcagacttaactaagcagatttcccgagactacggtgtgctgttagaaggttctggtcttgcactaagattcaattagcagagcctcaca

SEQ ID NO: 84025 - DNA, 101 bp, Homo sapiens
agaaaatcgagacctcaagtaatcattcccaaaacaaaatccagtctcatagcagaggagaatataatgtttacagcaccttccagagccatgaaccagag

SEQ ID NO: 84026 - DNA, 99 bp, Homo sapiens
gccatgggcctcactatctcctccctcttctcccgactatttggcaagaagcagatgcgcattttgatggtatgttcatgcggatgctcctaccaataa

SEQ ID NO: 84027 - DNA, 86 bp, Homo sapiens
ccgcatcgcaaccaccgccctggccatctaccatgtggttaacacagaaatctgcctcctgggccatgccgcttctaaggcctgtt

SEQ ID NO: 84028 - DNA, 75 bp, Homo sapiens
ctatgagcagtggctggagatcaaagctgtacaggaagaggcacatacaaagaaaagaatccccgaaagggcggt

SEQ ID NO: 84029 - DNA, 101 bp, Homo sapiens
acgtggacttctacaaggcccgcatggagtaatctcaggggcgatataatcaatgaggtggtcctaaagttgctcaaggctggatggtcccgggaagaaat

SEQ ID NO: 84030 - DNA, 100 bp, Homo sapiens
tgaagttgagcagttggattcaagagcacttcccctttgccttcatcaggccataggaaaaggatacagagtagagtttcatgaacctgaaacttggtgg

SEQ ID NO: 84031 - DNA, 100 bp, Homo sapiens
aagccaccagtggatagctttaaagcaaagggggctccccctcgagatggaaaagggcaaatttattcggatcaactttgatgtaactggctatatcgtt

SEQ ID NO: 84032 - DNA, 74 bp, Homo sapiens
gttcctcatggtcctgcactccatggactaaattgttgctacgatttctgcaaacggagacaaagaaattggca

SEQ ID NO: 84033 - DNA, 86 bp, Homo sapiens
aggattccaagtaactcttatttggtcagcccaaggccaaccccactgtcactctgttcccgccctcctctgaggagctccaagcc

SEQ ID NO: 84034 - DNA, 80 bp, Homo sapiens
ctggaaactggatgcagcaaggaaataggatttaaccgctctctgcctcccaggtggttgtgagacaacttcaacaagaa

SEQ ID NO: 84035 - DNA, 75 bp, Homo sapiens
cttttgcagagtcactcaggacaagcttgaagattttgaagatgtaactgagtttctggaagaggtcattgaagc

SEQ ID NO: 84036 - DNA, 128 bp, Homo sapiens
cggccccgcccccgccggttcgcgtctctctgctgcggcgcggggaccgctgtgctctcgaaacgaaatcctgaagttcgacatgtagatttggagatactgtgagtttgatggaatgaatcacctgg

SEQ ID NO: 84037 - DNA, 82 bp, Homo sapiens
gccgagaggccgtgcgggacgcgggcgccaggaccggccgaacgcagaggtgcgcgcggagccatggttatcatgtcggagt

SEQ ID NO: 84038 - DNA, 95 bp, Homo sapiens
agcttacgtctctgctcttcagtacaatcctctctcctacaagcttgtgtgccctgtaaccagtatgtatggtacaatatttacagcctggagga

SEQ ID NO: 84039 - DNA, 98 bp, Homo sapiens
tataatgaggataatggtatcatcaaggccttcagaaacatccctgtattgcctaagtgtaatcttgaacatgggcggtgctgtgagtgctggtgaag

SEQ ID NO: 84040 - DNA, 100 bp, Homo sapiens
tctcggctcaccgcattctccacctcccagggctgtatactttgcatgttactccaaagccaaagagcaatttaatggcattttcgtgcctaacagcaat

SEQ ID NO: 84041 - DNA, 100 bp, Homo sapiens
accgagagcgtgaccgagagcgcgaatatcgtcatcgttagaaggctccctggggaagggaatgcagggttgctggggctgggcccagaagcagcagcac

SEQ ID NO: 84042 - DNA, 99 bp, Homo sapiens
ttgcgttacaagctttgtctccttcgacttggagtctttgtccaggacggtaagaatgattgatgttggctgatattggagtgctcattcacatgaagt

SEQ ID NO: 84043 - DNA, 148 bp, Homo sapiens
atgaaaaacttccgtaacatccaggttgatgaagctaatttattgacttggcaagggcttattgttcctaataactgaagtgaagtgatggactccgatttggagagtagtaagacgtgaaaggaatacacttgtgtttaagcaccat

SEQ ID NO: 84044 - DNA, 101 bp, Homo sapiens
tgttcggtgcagctgccagatccgctgatctagtgcttctcgaaaaaaaccttcaggcggcccatgggctgtattcatcaccaaagaaaaaacttacacca

SEQ ID NO: 84045 - DNA, 82 bp, Homo sapiens
agcctcgggcaccatgagcgacgtggctattgtgaaggagggttggctgcacaaacgaggaggcatacacggaatacctgag

SEQ ID NO: 84046 - DNA, 75 bp, Homo sapiens
aaaccactgggaaaactgaagagagctagaacagttcaccgagactcaggaaaaagctcctcaatttctgaagag

SEQ ID NO: 84047 - DNA, 100 bp, Homo sapiens
cctctgcctttcaaggtcatgatgttggattctgttgcctgggtaccaccagagggaaagctggggcggaatgagagaggaaatgtcattaggatgccag

SEQ ID NO: 84048 - DNA, 90 bp, Homo sapiens
ggcattttgctgtctcctcctaatacgggaaagcattaacttttgagctacgtccagaatagcatcatcttcatgggtattccctactcc

SEQ ID NO: 84049 - DNA, 85 bp, Homo sapiens
caacttcgcggtggtcaagcgggccacgcacctcgtcaccaaggccaagaaggtgcttcctggaggggcctgccccactgttcct

SEQ ID NO: 84050 - DNA, 50 bp, Homo sapiens
aaacgtcaacaacagttttacgattcagaatggacagtttagaagaacct

SEQ ID NO: 84051 - DNA, 98 bp, Homo sapiens
tggaggacgccttatggagccagcatattccaggtgaaggcagagtctctggggattcctcagaaaatgcagctcaaagtcgacgttgagtctgggaa

SEQ ID NO: 84052 - DNA, 96 bp, Homo sapiens
agactgcacacctcagaaaggagcttctgattgctgccaaacacatcctcaccacagagctgagaaaccgagcatccccccggtccttcagaatcc

SEQ ID NO: 84053 - DNA, 75 bp, Homo sapiens
agggcatgttccgtggcctcgcccaggccgacggttgctgctgacacgccgaccgcctgctgcttcagctacacc

SEQ ID NO: 84054 - DNA, 100 bp, Homo sapiens
ctggagtcccagctgcaggacactcaggagctgctggcactgctgaagtgtgtggaggctgagattgcaaactatgaggcgtgcctcaaggaggaggtag

SEQ ID NO: 84055 - DNA, 90 bp, Homo sapiens
gaaaaagaaactaaaaaatggcagctctcagaatgggaagaatgagagaagtcatatgcccggcacaaatgtgacagtgatgataacatg

SEQ ID NO: 84056 - DNA, 90 bp, Homo sapiens
caatatcagcagaggtggcttgctattgatgctaatgctcgacgagaagtcaagaactatgctttcttcgagagtcacccagctccttca

SEQ ID NO: 84057 - DNA, 82 bp, Homo sapiens
cttggactgagtcctgcaggacacagggaggtcacaatcacattgagccaaaacgcatccagtgttttctccagttacaaat

SEQ ID NO: 84058 - DNA, 100 bp, Homo sapiens
ccggaatcccgcgcgctgcccacgattcgcttctgaggagtctcgctgtgtcacccaggctggagtgcagtggtgtgatcttggcttactgcaacctctg

SEQ ID NO: 84059 - DNA, 97 bp, Homo sapiens
cactgtcagacatctggatggtcacttactgagcaggaagcgatgaatgagatgaacgatgagctgcaggagaatgcacgtgagacagaactggagc

SEQ ID NO: 84060 - DNA, 100 bp, Homo sapiens
ggccaacgccgtgttcgacatcctggccgtgctgcaggtcaccgacgatgagggcgcacctgctgtcctggagcttccgatctctgttcggggaccctgt

SEQ ID NO: 84061 - DNA, 100 bp, Homo sapiens
gcgtgtcccccggacagctatgaaactcaagtcagactaactgcagatggttgctgtactttgccaacaaggggtgctttccagacaggccaaggacctc

SEQ ID NO: 84062 - DNA, 95 bp, Homo sapiens
acaagcccaccaagctaaagaggctgcccagaaagcagttaacagtgccaccggtgttccaactgtttaaagatgaagacttgtggatatggatg

SEQ ID NO: 84063 - DNA, 100 bp, Homo sapiens
cccgggcagagaccatgtttgacaagacgcggctgccgtacgtggccctcgatgtgctctgcgtgttgctgggtttattacccagaactctttgtctggg

SEQ ID NO: 84064 - DNA, 83 bp, Homo sapiens
ccatcctggttcttccaaagtgcccggacccaaaacaggaaagcactacaaacaccactggtttcccgaaaagccgtccaagg

SEQ ID NO: 84065 - DNA, 101 bp, Homo sapiens
agagcagtgaagaagtgtaccagatatattgactgtgacctgaatcgcatttttgaccttgaaaatcttggcgtttatgtcatggttggtgcagatgtccc

SEQ ID NO: 84066 - DNA, 49 bp, Homo sapiens
ggaactcctcaagaaccacgctgtggtcataccccggccctggcttgcg

SEQ ID NO: 84067 - DNA, 97 bp, Homo sapiens
ggccgcccagacgctgcccgcgggcccggccacggcggagccaagggtttccaggcctgaggtgcccgccctggccccaggagaatgaaccagccgc

SEQ ID NO: 84068 - DNA, 74 bp, Homo sapiens
gcagcgtgcgttcagccctgggctgctgtgacttactcgaagcctcgattggccacattttggtactacgccaa

SEQ ID NO: 84069 - DNA, 98 bp, Homo sapiens
tgggttcgttgtatttgtgacatctgtgggtttaatccaacagaagaagtgttgtacatcagtacacagaagagacggatgtgaagacaccaagagag

SEQ ID NO: 84070 - DNA, 75 bp, Homo sapiens
ggcccattctgtaaataaaggctccactagggtatcactgggatacatcagattggatgccaagcgttcctctgc

SEQ ID NO: 84071 - DNA, 106 bp, Homo sapiens
cccggggcgctacggaggtagtcaccgccacatccaggactccttccacagaggccaaagatgaagaggaagcctttctggattggagtgatgatgatgatgatga

SEQ ID NO: 84072 - DNA, 100 bp, Homo sapiens
agatcatcgagcatttcaaacgtttctccttggaccaagatgactgatggaaaactctccacctctacaaatggcgtagccttcatgggtattctggatg

SEQ ID NO: 84073 - DNA, 100 bp, Homo sapiens
ctgccggaaagtgctgcggaaggtgtgagttcttgatacgaatgaaaggccaagagtttgttgatgagattcaaggtagatatcctcatcttcttgaaca

SEQ ID NO: 84074 - DNA, 100 bp, Homo sapiens
aggcagtccctgacgtgtcggggaggagccgggcgcggaggtcgcaatggaagaagagatcgccgcgctggtcattgacaatggctccggcatgtgcaaa

SEQ ID NO: 84075 - DNA, 98 bp, Homo sapiens
gctgcttttctgagtgtttacaagcaattaattgaagcaccagggctccgtaggcaccaactgcaaggacccctccccctgcgggcgctcccatggca

SEQ ID NO: 84076 - DNA, 75 bp, Homo sapiens
cacgccctgctgggtcctacctgtcagagccccaaggttctgtacagagtaatgagatgtgtgacggctgcaaac

SEQ ID NO: 84077 - DNA, 100 bp, Homo sapiens
actagatccaggttggaatcctcagttacagatgaggacacagtaaagaggtattttgccaagtttgaagagaagtttttccaaacctgtgaaaaagaac

SEQ ID NO: 84078 - DNA, 90 bp, Homo sapiens
cccgaatccagaggctgaatgagctagaggccccaacaataagcccaagctacctgtggtgatctcgcagtgtggggagatgtagtccag

SEQ ID NO: 84079 - DNA, 82 bp, Homo sapiens
catgccgctcctaagcctgcacagccgcggcggcagcagcagtgagagacggccgaagccctgcagcccacgctacagccgg

SEQ ID NO: 84080 - DNA, 75 bp, Homo sapiens
cggagattggctgcctcatccgcttctatgcagatcttcttcagcagtatcgttctgctgtgtgcaaactagaca

SEQ ID NO: 84081 - DNA, 97 bp, Homo sapiens
ggtccgcggccggcaggaccatgctgctgaaagagtaccggatctgcatgccgctcaccgtagacgaggacaactacacctttgcccaacctgggat

SEQ ID NO: 84082 - DNA, 100 bp, Homo sapiens
tgagttgttgctcccgcctgagcccagcccccagaaaggattgtgacatatcgttggacccagaattgagagtgatcagcagctggactgtgccttggac

SEQ ID NO: 84083 - DNA, 101 bp, Homo sapiens
gacactgcagctgcagtcaacctcttccccaatttcaatgcggaaaggcagactacaagttactgagcacctccctgagaaaattgaaagtagtttacagg

SEQ ID NO: 84084 - DNA, 50 bp, Homo sapiens
cagccccagcagcaacagcagcacagtctgaccagtgcacaggacttcag

SEQ ID NO: 84085 - DNA, 75 bp, Homo sapiens
ctgccccgccgggatctccggcgccaactgccagtctaacaaagtgccagtggtgcagcaccctcaccatgtcca

SEQ ID NO: 84086 - DNA, 101 bp, Homo sapiens
gtgaaactttttgaaagtttagaagcgaacttactgtggggatgtggagagcatcttgtgcgcaccatactggctagagaatgttcacatgctttacaagc

SEQ ID NO: 84087 - DNA, 82 bp, Homo sapiens
tgatgacttgatctcagaatttcctgacaaatttggatcctgtgttcctcatcctgataacttaagtgactctctcttttcc

SEQ ID NO: 84088 - DNA, 100 bp, Homo sapiens
gttgaccggtttggttgaagttggagaagtatccaatagggatattgtagaaactgtctttaacctggacttccaatagtagtcagacattatcatcctg

SEQ ID NO: 84089 - DNA, 50 bp, Homo sapiens
tgggacttcccgtccgcggcgtggaggcgcctggttcgcatgaacatgcc

SEQ ID NO: 84090 - DNA, 101 bp, Homo sapiens
tggctttgcctttctggacacagaagtatttgtgacaggttggttcttacttgaaatctccaaaattccctatttggattgttggcagtgagactcacctc

SEQ ID NO: 84091 - DNA, 97 bp, Homo sapiens
caggcccgcgaccgtccgccagtcgtcccgagggctctgccagtggcctggcttgaacggacgatgcggtcagtagggctggaggtctacacgcaga

SEQ ID NO: 84092 - DNA, 74 bp, Homo sapiens
aaccggagttacctgagcccagaaggtggcagctgccaacaagaagcattagaacaaaccatgctgggttaata

SEQ ID NO: 84093 - DNA, 100 bp, Homo sapiens
acattaagaagatgagggaggagctggcggccagaagcagcaggttcgtgctggccgtgggcagcgccgtctttgatgccatgttcaacgggggaatggc

SEQ ID NO: 84094 - DNA, 100 bp, Homo sapiens
caaggggacccagtgcgcccgcatcgtcgagaatcctcactatggatgggctcattgaggacattaagcatcggcggtattatgagaagccatgccgccg

SEQ ID NO: 84095 - DNA, 50 bp, Homo sapiens
gtgagccactgcacctggcacagctttggcctatggtatcggggtaaagc

SEQ ID NO: 84096 - DNA, 100 bp, Homo sapiens
ggcgagaggaggccgtccagcagatggcggatgccctgcagtacctgcagaaggtctctggagacatcttcagcagggagcacctctccatccgaggctt

SEQ ID NO: 84097 - DNA, 100 bp, Homo sapiens
ctcccgggggcccccagcccgcctctgtgccactttgcatcccacgccggaggaggcattaacgagaccgggtgcatggctgcctcctaatcccatagtc

SEQ ID NO: 84098 - DNA, 80 bp, Homo sapiens
gagacaaatttaaacaaagagtctgtgagcccataatgctcacgggcttaaaagacaaccttcttgcttctgggacatcc

SEQ ID NO: 84099 - DNA, 138 bp, Homo sapiens
agcagatgccagccaacaactggaacgactgaggcaggacatgaaagtccagaaattaaaggagcaggcaacagatgccctttatgaggtgtttttgggaaacaggcttcgagcagctacgttccgactctttcctca

SEQ ID NO: 84100 - DNA, 76 bp, Homo sapiens
agagagaactcctcatgctcttctgggcacaccccacccacctgtggccaggtgctggagaatctggtaaaagcac

SEQ ID NO: 84101 - DNA, 98 bp, Homo sapiens
agagctggccacaatatgaggaagtattttgaaaaaaagtggacagatactttcaaaatatgggaaaatagtctccacaaaggcaattttggataaga

SEQ ID NO: 84102 - DNA, 98 bp, Homo sapiens
tcctccgaggtggcagctgcgtagcagaaccttctaagtctcagacacgtaaacccaagtgtggcaaaggaactcattgctctcgaaatgcatatatg

SEQ ID NO: 84103 - DNA, 75 bp, Homo sapiens
ccggagcctgaggacacttctctgtcgtcacagttagggagtgcatccgccccaacccttttccccctcgtctcc

SEQ ID NO: 84104 - DNA, 100 bp, Homo sapiens
taacccagcctgtttcacttcttgaggacgggaggggcaagctgcggccaaccaaggccaagagcgagcggaagaagaagagcttcggcctgctgccccc

SEQ ID NO: 84105 - DNA, 100 bp, Homo sapiens
ggagagcacgagagacccgagttcatcgcctacccccatctccgcatcaggaccaaggtctcggcgcggaagatggccggcggcgtggacggccccatcg

SEQ ID NO: 84106 - DNA, 75 bp, Homo sapiens
caacaagtccacaacctgcttctcacctacctgataggtcttagtggtgcaatggctagtataagcgtgcgttcg

SEQ ID NO: 84107 - DNA, 98 bp, Homo sapiens
ccgccgattcctcctccttggtcgccgcgtccttggctggcgtcccgagcgggaagaagttccgcagcaagccgcagctggcgcgctacctgggcggc

SEQ ID NO: 84108 - DNA, 75 bp, Homo sapiens
tgaaaacagaagttcacctgcacatcttgttttccctaacatcaagaatgtgattcgcctttgccagtctcatct

SEQ ID NO: 84109 - DNA, 100 bp, Homo sapiens
cagacacgggatgtggactgtgtcctcacaacagggtcccagtcctatgaggatatgagaggaatcctgtatgcagccccccagctccgctccattcggg

SEQ ID NO: 84110 - DNA, 100 bp, Homo sapiens
tggttggcccagctccttggggtttccggctgcagggcggtaaggatttcaacatgcctctgacaatctctagtaaagtgactgagaccgaagatgatag

SEQ ID NO: 84111 - DNA, 82 bp, Homo sapiens
ccatgagggaaatcgtgcacatccaggctggtcagtgtggcaaccagatcggtgccaaggttacttttcacatagaaccata

SEQ ID NO: 84112 - DNA, 50 bp, Homo sapiens
tggacacggacgtggtcaagctcacggatgataccatcggggaccttaag

SEQ ID NO: 84113 - DNA, 100 bp, Homo sapiens
gcgccatcctgcaccgccaccggcccgacctcatagctgtaggtaaaacttgcctactgatcagttacacaaccaatgcatttcctggagaatatatccc

SEQ ID NO: 84114 - DNA, 98 bp, Homo sapiens
gtggactcaacttcaaagacgttctcaaggagaaggcagacctggttcccattctgtgatggggctcacacaaaacataacgaagagactggagacaa

SEQ ID NO: 84115 - DNA, 100 bp, Homo sapiens
atgaagattcaataacagttgcatttgaaaacaaaaggcggtcaccttctccttactatagtcgtggaggatacagatcacgttccagatctcgatcata

SEQ ID NO: 84116 - DNA, 112 bp, Homo sapiens
acccgcgtgggcaccctgcaggtggtcagacatgtcatcaactcagctgttccagggtctccctccactgctgtagtaacccgggtccggggcctcggtggtgctcctgatg

SEQ ID NO: 84117 - DNA, 75 bp, Homo sapiens
caggaaaccaacagtcacacatgtacattacagggattttgctgtaggaatctgtaacaaaatcagtgaaatgat

SEQ ID NO: 84118 - DNA, 83 bp, Homo sapiens
ctgtgcatccacactggacgcgagctgcgctgcaaggatgccggaccagatctctgtctcggagttcatcgccgagaccaccg

SEQ ID NO: 84119 - DNA, 75 bp, Homo sapiens
tgccgcagagtcggcacctgaaggacatggaggaaggaggagacagttactgtctatcccgcagacgtggtgctc

SEQ ID NO: 84120 - DNA, 74 bp, Homo sapiens
gaacttcacaatcaagaaatgcagaaacgtaaagaaatgcaattgagattggtgtctccgctgtgcctggctcc

SEQ ID NO: 84121 - DNA, 75 bp, Homo sapiens
tgaccgtggggttcctcgcccagagcgtcttggcggagctggtggtggctctgagtcatcttgtggttcagtatg

SEQ ID NO: 84122 - DNA, 90 bp, Homo sapiens
gtggcctaccaggaggccaggggtgtcgccatgcaacagccaactcagtttataaatccagaaacacctggctatgttggatttgcaaac

SEQ ID NO: 84123 - DNA, 83 bp, Homo sapiens
ctgctgaacccctgtttggagaagagaaaggagaccaccaagaggcacttgtttttcacaggatttttagactctgaggagca

SEQ ID NO: 84124 - DNA, 50 bp, Homo sapiens
aaggattccaagtaactcttatttggtatggtctgaatatgcgttgcttg

SEQ ID NO: 84125 - DNA, 100 bp, Homo sapiens
tggagcaccgatgatgtgcagatcaatgacatttccctgcagcccggaggaaccacccccgccctcctcagcctgatcctggaagagactcggggccccc

SEQ ID NO: 84126 - DNA, 98 bp, Homo sapiens
tttatgcagacacacaagagattaatttgaaggcgaatctggctttgggggaagaggaagaaaagtcggattacaagatcaaccaccaccaacaacaa

SEQ ID NO: 84127 - DNA, 75 bp, Homo sapiens
ctcggtggtcatggtcacccaggagagtgacagcagctttctggtcaagacctgcaatgcttcttttgccacccg

SEQ ID NO: 84128 - DNA, 124 bp, Homo sapiens
agtggaaataattaatgaccgaacagaaacccctcctcccctagcttcactcaatgttagtaagcggatccgaggtcgcaaagccacgctagatgagatccagacagtgcactctgaataccac

SEQ ID NO: 84129 - DNA, 60 bp, Homo sapiens
agacttgaaagtcttgtgtaatgaagcaggaatggaaactgaaagtggaaatcaggaaaa

SEQ ID NO: 84130 - DNA, 128 bp, Homo sapiens
ctggcggtgagcgctggccctgtgccaacgccgcccgacaacatccaagtgcaggaaaacttcaatatctctcggaccacagcaccgggaagtccagtcagcggcagatggtgttcggggtggtcacc

SEQ ID NO: 84131 - DNA, 104 bp, Homo sapiens
gcagctggagctgagcaaagtgcgtgaggagtttaaggagctgaaagcgcgggacacactcaggacaccaacaccttctttctgtgccggacactgcgctccct

SEQ ID NO: 84132 - DNA, 75 bp, Homo sapiens
ccaccgaggctgaggatgatggtagattgccaggaacaagtacttgttactcaacaaccaggagctgaatgaact

SEQ ID NO: 84133 - DNA, 112 bp, Homo sapiens
acaagatggcggacggggagctgaacgtggacagcctcatcacccggctgctggaggggcttatttcaaaacctttgtccctcagttccaggaggcagcatttgccaatgga

SEQ ID NO: 84134 - DNA, 76 bp, Homo sapiens
ccagtccccaatgtagaagaggtgacacttcccaaaacagagtcttgctttgtcgcccaggttggagtgcagtggc

SEQ ID NO: 84135 - DNA, 100 bp, Homo sapiens
cccccttttcctggtgcatgtgaagttatcaaaaacagctggagaccatggccaaaatggaggtgaaaacctcacttctggacaatatgattggagttgg

SEQ ID NO: 84136 - DNA, 100 bp, Homo sapiens
tgccagcagggagacacatgtttgtctttcaggcccagtactacggggagattggcatcgggacgcccccccagtgcttcacagtcgtcttcgacacggg

SEQ ID NO: 84137 - DNA, 90 bp, Homo sapiens
tcgccatggagtttgtgatgaagcaggctctaggaggtgctggagaatctggtaaaagcaccattgtgaagcagatgaggatcctgcatg

SEQ ID NO: 84138 - DNA, 96 bp, Homo sapiens
tcaagcccctgctaatgctcatctgaaggacttggatgaagaaatctttgatgatgatgacttttaccaccagagtgttgccagggacggcagtat

SEQ ID NO: 84139 - DNA, 100 bp, Homo sapiens
acaatcgtgagtctttgatcacattgattgaaaaggtgattttcgagggcgaaatcggaaaaggaaaccttggtgggattgctgtggatgacattagtat

SEQ ID NO: 84140 - DNA, 120 bp, Homo sapiens
gaacgtgtttctcgcctacttcctggtgtcgatcgccggcctcctctacgcgctggtacagctcgaatatggaaggctccatgttgacaatcagctttggaagttggatggaactacctg

SEQ ID NO: 84141 - DNA, 100 bp, Homo sapiens
gcggctgcgggtgcggcgggtcctggccgaaggtattgttgcagcatctggcagtgagactgaggatgaggacagcatggacattcccttggacctttct

SEQ ID NO: 84142 - DNA, 82 bp, Homo sapiens
tttagagctgcggaacaggacgccctctgatgccctgggctgcatcttgtacctgctgtgcttccggcagcacccttttgag

SEQ ID NO: 84143 - DNA, 100 bp, Homo sapiens
acccctggaggagtgaagaactttgccgagaccagccactaactggggcgtacacagtgaccctggatggacgagggccctcaagggtcatctccaaaca

SEQ ID NO: 84144 - DNA, 83 bp, Homo sapiens
tcaatctctggaaaaacttcttgccaaccaaataaacctatgatggacttgttgatattcctttgtgcacagtatcacttaaa

SEQ ID NO: 84145 - DNA, 96 bp, Homo sapiens
ggatccagagacaagactattaagatgtgggatgtcagtactggcatgtgccttatgaccctctctgaagatgatgagaaactgaaaaagaggaag

SEQ ID NO: 84146 - DNA, 75 bp, Homo sapiens
catgagatggtagccaaacccccaggaattacatgaacgacagccttcgcaccgacgtcttcgtgcggttccagc

SEQ ID NO: 84147 - DNA, 83 bp, Homo sapiens
gattataattgcaacatgacgctggaagagctcgtggcgtgcgacaacgcggcgcagaactccctgtgctgtcaggaatctac

SEQ ID NO: 84148 - DNA, 75 bp, Homo sapiens
cgggtagtcgggaggaggagagcttcacctgtcggcttggagagatccaggtggctattatcatggaaaactaat

SEQ ID NO: 84149 - DNA, 100 bp, Homo sapiens
acaaacttacagttttaagaatggctgttcaacacttgagatctttaaaagaaatattattcatctgtgccagaggaaggaggggcaacccatgtctatc

SEQ ID NO: 84150 - DNA, 96 bp, Homo sapiens
ttatgctatgaggatgacaaactctggagtaattggagccaagaaatgagtatagtacgaattggagcaatgttggcttatacacctctggatgag

SEQ ID NO: 84151 - DNA, 51 bp, Homo sapiens
taaaggatattcatttgttcgggtaagaaggtggatggctctgtaaatgcc

SEQ ID NO: 84152 - DNA, 90 bp, Homo sapiens
ggagaacctgctctgcaaagtgaatgaggcagctccagaaaagccacaggttccgctttgattataccaatgagagggccctgcggcgca

SEQ ID NO: 84153 - DNA, 82 bp, Homo sapiens
gggcttcatagcattcgcctactccgtgaaggtgcccgtggttgacacgagctgtgtccccagctgttcccgtctacaatgg

SEQ ID NO: 84154 - DNA, 75 bp, Homo sapiens
ggaaatccttgtaatcttgaaggaatggacctcaaaagtgctgatggcagagattggtgaggatttggataaatc

SEQ ID NO: 84155 - DNA, 90 bp, Homo sapiens
ttgtgcctgcactggtgatgcttggtttggtggcaggcgcccatggtgacaccaactgggtacatggaaaactcagtctcctacagcgca

SEQ ID NO: 84156 - DNA, 98 bp, Homo sapiens
ctccatccagcagtttcttcaccaaggctggcagtgatggtgaaagcataggaaactgccccttttcccagaggctcttcatgattctttggctcaaa

SEQ ID NO: 84157 - DNA, 74 bp, Homo sapiens
atttgttaaggattccaagtaactcttatttgttgttgattgaaagcagacttgtgttgtagatgccagccatg

SEQ ID NO: 84158 - DNA, 51 bp, Homo sapiens
tctccaaattcgcctccatctgtaccatgcttctcccgttggcaacggtta

SEQ ID NO: 84159 - DNA, 100 bp, Homo sapiens
tgatgtgcgggttcaggaggtacccaaactgaaggtgctggacgtcattgctcctccttatacctctgacttcgtgcaacttttcctccccatcctggag

SEQ ID NO: 84160 - DNA, 100 bp, Homo sapiens
atggagaaatgtacattaccattgactggaaagcaatgtgtcaaccgcattattactgaaaagctggccaactcagccaatccgcacatttagctctcca

SEQ ID NO: 84161 - DNA, 98 bp, Homo sapiens
aggagtcagccgccggtccgagccttcctgctcatctccaccctgaaggacaagcgcgggacccgctatgaggtccagtccaggtgcagcagcaagga

SEQ ID NO: 84162 - DNA, 82 bp, Homo sapiens
cgggaacatcctcctggactcaatcatggcttgtgggcaacaccctccactaaagagtcaagccagccggacgcattctcat

SEQ ID NO: 84163 - DNA, 87 bp, Homo sapiens
aacttataaaaccagatcgctgccatcactgctccgtctgtgataacggttacgactttggctacttaatcaaaatcctaaccaact

SEQ ID NO: 84164 - DNA, 75 bp, Homo sapiens
ccgcgagcccgctttccaccccgacctctgcccaggccgcagatggagaaggacattcgtagtgatgtagaagaa

SEQ ID NO: 84165 - DNA, 75 bp, Homo sapiens
gaaggggaccaggaggttggacacagaccattgcaatggaaatggtctggatgtaccgactgcttttggaataaa

SEQ ID NO: 84166 - DNA, 74 bp, Homo sapiens
gacaaaactgcagtacaggtttttgaggatgaaaactttcggaagagaaagttgcctgtggtaagttcagttgt

SEQ ID NO: 84167 - DNA, 75 bp, Homo sapiens
gcctcctgagtagctgggactacaggatttaagcgagagcctcactggttcccaggacatcaacctgaactggat

SEQ ID NO: 84168 - DNA, 51 bp, Homo sapiens
ggtgaagactgggggctgcaggcgcgctagcacgagtacacgagacaggat

SEQ ID NO: 84169 - DNA, 87 bp, Homo sapiens
gcggacggcggggtccgggccggagtacgtcgttcccgctgcgctaggggaagcgggcaggtgctggagaatctggtaaaagcacca

SEQ ID NO: 84170 - DNA, 100 bp, Homo sapiens
gtcttacaccactcccaagaagaataagcacaagagaaagaaggttaagctggctgtcctgaaatattataaggtgggatgctatggaatatgatgagaa

SEQ ID NO: 84171 - DNA, 75 bp, Homo sapiens
tgggagtgcagcggcctctcctacaggttgctgcagcaactggtcacacagtagtgttggtagaccagacagagg

SEQ ID NO: 84172 - DNA, 100 bp, Homo sapiens
aaggattccaagtaactcttatttggttcaaaactggtcaaatcaatggtgatttgctgatataccatgtcttactgactttaaagccatattatgcaaa

SEQ ID NO: 84173 - DNA, 51 bp, Homo sapiens
aggaggacgcggtggaatgggcacaccaaatgaaaagctgttgggtcattt

SEQ ID NO: 84174 - DNA, 96 bp, Homo sapiens
attacccaaatccggttggagcatgacgtgaacatccagtttcctgataaggacgatgggaaccaggaaacttttgacgctgggctgcaggccttc

SEQ ID NO: 84175 - DNA, 98 bp, Homo sapiens
ctaaaaaaggcaaaagctgcagaaactagaaattcaggggattcccgaagtcttccgttttctgagaatgtgagtgctgttcaaaaattagacttttc

SEQ ID NO: 84176 - DNA, 50 bp, Homo sapiens
aggactgcctcactgagcaaccaagataccagagatgtctccaagagcac

SEQ ID NO: 84177 - DNA, 100 bp, Homo sapiens
gggtgggcgcctttcgccgtggacgccgaccgtccgggacgagtgtgcaggagaagagaattgggtggacagcaggaccatctacgtgggacacagggag

SEQ ID NO: 84178 - DNA, 74 bp, Homo sapiens
agccaaacatcaagcagaatgtgatttgcttgaagatatgagtgattctaccagaaaggaatgaagaacagaac

SEQ ID NO: 84179 - DNA, 74 bp, Homo sapiens
ttacacttcgactctcaaagcaataccaggatagctgttgtttcagagaaaggacgcgtgaccaaaaccaaaga

SEQ ID NO: 84180 - DNA, 51 bp, Homo sapiens
aacatctctctccagagcatgagaggcaaatttctggagatgtgcaatgat

SEQ ID NO: 84181 - DNA, 75 bp, Homo sapiens
aaggggagcccgggacccccgggggcgcagtaagactttgaccccgacgcaggcttcagtgattgccgcggatca

SEQ ID NO: 84182 - DNA, 75 bp, Homo sapiens
ggataaagtagccgttcttcaggcacttgcatccacagtaaacagggccataggaaaaggatacagagtagagtt

SEQ ID NO: 84183 - DNA, 82 bp, Homo sapiens
tctcccctctttgacagcggtttgcatctgaacggaaactccagtaccacagtaaagtcagtgataaatcttttgtttgctg

SEQ ID NO: 84184 - DNA, 100 bp, Homo sapiens
ctccatgttatggacacggtctttcttattcagggagaagagtggcagttgcattggaaacctgattagaatggaacatgtaaagatagtttgtgatggg

SEQ ID NO: 84185 - DNA, 87 bp, Homo sapiens
ggaccccgggctccggaggccatgccggcgttggcgcgcgacggcggccagctgccgctgctcgactagacgcttgaagcaaagctg

SEQ ID NO: 84186 - DNA, 75 bp, Homo sapiens
cacgtgtttgcggttcagccctttgatgaccgcagcagtgagccacgtattgttagtagaattttccagtgttgt

SEQ ID NO: 84187 - DNA, 90 bp, Homo sapiens
gctggggaacgggagctggatgaggcacgtgtggttctcaaatataggcattctgatgggaacttgtgtgttaaagtaacagatgattta

SEQ ID NO: 84188 - DNA, 101 bp, Homo sapiens
gaaggatcatcttcgtggaaatgcaaaaggaacaattaatatatatgctactggacattctagcaaggtgaccaagaatatggcccaggtgaccaaagccc

SEQ ID NO: 84189 - DNA, 75 bp, Homo sapiens
ctcagagatccgtgatgccttcgagagaggggtagaaatatttctgtcatggctcattcaaagactaggaccaat

SEQ ID NO: 84190 - DNA, 97 bp, Homo sapiens
atcccattcacctgaggcacccgaagaagagaccatccatatttccaggaaggcccttttgtctacttgtctttagtaggaaacgttgcaaattccg

SEQ ID NO: 84191 - DNA, 100 bp, Homo sapiens
agaggcagcaaagctgtatgaccttgccaagtctattatcctcccagtccacaacgctgaaccgtggctggacgaatgtttgaggtctgttttgcaacag

SEQ ID NO: 84192 - DNA, 74 bp, Homo sapiens
aactacagaaacctcgtctccctgggtttctaagcatgaattgaggaacagaagaagcagagcagatgatcgga

SEQ ID NO: 84193 - DNA, 75 bp, Homo sapiens
gagaactcggagggcaccggagttaccgaagtgcatgtttgggattttgttgaagaaagctggatacagtaaacg

SEQ ID NO: 84194 - DNA, 100 bp, Homo sapiens
caaagaagttgctgttggggactcggaaggccgtatttgggtctatgacgttggagagtgtactaatggtcacttgatgtgcgctggctgttttatccac

SEQ ID NO: 84195 - DNA, 50 bp, Homo sapiens
gccaaagtaaccagatctaacatgaggtgatttgaagatattaaagctag

SEQ ID NO: 84196 - DNA, 73 bp, Homo sapiens
ccgcagcctgtggctgtgcagggccccgagccggcccgggtcgagggctcaaaatttgggcggggaactggac

SEQ ID NO: 84197 - DNA, 99 bp, Homo sapiens
tccggggactggggggaccagtactctgccgagtgcggcgaaaacagacacatgaccctcattgagaactgcagcctgcagtacacgctgaagccacac

SEQ ID NO: 84198 - DNA, 100 bp, Homo sapiens
ggatgatgccaaagttttattaggcgatatgaaaggtgaggtctatccatttggcatcgttgggatggccaacaaaggggattgcctgcagaaaggggag

SEQ ID NO: 84199 - DNA, 98 bp, Homo sapiens
cgaaccctcctcctgctgttctcgggagccgtggccctgatccagacctgggcagctccatcaagtatgatggtgaaggatgaatatgtgcatgactt

SEQ ID NO: 84200 - DNA, 100 bp, Homo sapiens
cggaaaccgaaggggagccatggcggctgacagtcgggaggagaaaggaactgaagaggagtttggaggtcttgtatcagctaatcttatacttttgagg

SEQ ID NO: 84201 - DNA, 82 bp, Homo sapiens
tctccgccctggggtcattgtcagggatcttctagcagctgcaaaaacaggcagtggtaaaaccctggcttttctcatccct

SEQ ID NO: 84202 - DNA, 100 bp, Homo sapiens
ggttaaacttcggctgaagcacagctaaaagatggcggcaaggcagcccaggcaaatgtaagaataggcgatgtggttctcagcattgatggaataaatg

SEQ ID NO: 84203 - DNA, 96 bp, Homo sapiens
agtgaaacctcaggtgatattgctactgtgtgtgattcagaaaccaatagagccatggcgactccctctgctgccttcgaggcccttatgaatggt

SEQ ID NO: 84204 - DNA, 75 bp, Homo sapiens
ccagcgatggaagaggatcaggagctggagagtgtgcctgacgaggaggccaagacaaccaccacaaacactcaa

SEQ ID NO: 84205 - DNA, 113 bp, Homo sapiens
tccactcttcggcgaagctttacgttcatgtaaacagcatgacgtgaggccgtggatgcaggcattaagacttaattcagtgcacaaatgagatgaatgtgaacatcccacag

SEQ ID NO: 84206 - DNA, 100 bp, Homo sapiens
cgtccccagccctgcctctccctgggctctggagtgtgaggaagaggctgtctgtgtcattatgtgtgcgtcggtcaagtataatatccggggtcctgcc

SEQ ID NO: 84207 - DNA, 83 bp, Homo sapiens
accatgggaggccgcgtctttctcggtgctgcgacaagagactttggacaaaaattgacttgagtaggtgtaaggccattgtg

SEQ ID NO: 84208 - DNA, 75 bp, Homo sapiens
ggacgcgagagctcctggtgccatggctctcgaacagataatgagcttcagtccccaagatctgcgaagacgttt

SEQ ID NO: 84209 - DNA, 98 bp, Homo sapiens
ttgatgggcacctcccgggacgaccatcatctgcaaatagcataagcagcagcacatcttcaaatcatagcggccacactccagagcccccactccca

SEQ ID NO: 84210 - DNA, 50 bp, Homo sapiens
caggacgagacgggcaagaaccgaggagttttcttagacaccatccttcc

SEQ ID NO: 84211 - DNA, 74 bp, Homo sapiens
ttttaaacagatggattccagaagatatgtaccacttccgctgtcacggtaaagtccgccatcagaagactgaa

SEQ ID NO: 84212 - DNA, 100 bp, Homo sapiens
ccgcagggaggtggagagcctgccggccgtctgtcccagtgatggatgcacctggaaggggaccctgaaagaatacgagtactatactggcaattgctgg

SEQ ID NO: 84213 - DNA, 110 bp, Homo sapiens
tgtgcaccttccatttgaagggggaagtctcttgcaaattccagtcaaggccctaaaatatagaacaccttccaccatgaccacctcagcaagttcccacttaaataaag

SEQ ID NO: 84214 - DNA, 82 bp, Homo sapiens
caccaagtcttggagaaagcgccagtgaagaactggtggctgaagcacataacctctgcaccctgctagaaaatgccataca

SEQ ID NO: 84215 - DNA, 100 bp, Homo sapiens
tttgtggaacagaattggagcaggtgcgcttcccttcccacttcagctctgacttgaaggacctgctgcggaacctcctgcaggtagatctcaccaagcg

SEQ ID NO: 84216 - DNA, 96 bp, Homo sapiens
gagaagttcaagctctacctgaccatcatcctgctcctgggtgccgtggcatgtcgatttgtccttcactacagctctggattaatcgaattacag

SEQ ID NO: 84217 - DNA, 98 bp, Homo sapiens
aggagcctgaggcggcggcgggggtggctccgcgcgcggtggtctcgggggacagcatcgtggccgagctggaccgagagatgagcaggagcgtggac

SEQ ID NO: 84218 - DNA, 101 bp, Homo sapiens
ctgcgacctggggccctgggtgaagtgctccgccgcccttgcctccaggcaccacaccaaccccgtgggcactgagtggcggtggaagatggaccagcctg

SEQ ID NO: 84219 - DNA, 98 bp, Homo sapiens
gttccaaaagtggatggagcagtcagagcgattactatgcaagctattactccagccagtacgattatggaggatctcttgaatcgtgtagaagattt

SEQ ID NO: 84220 - DNA, 74 bp, Homo sapiens
gcgaagctggccgagcaggctgagcgatacgacgcggggatctgatgagcttctttcttctggcatcattaacg

SEQ ID NO: 84221 - DNA, 75 bp, Homo sapiens
tacccaggccccacacctcccagcatcctgcccagccgacgtgggggagatgaaagttgcacagcggatggcaca

SEQ ID NO: 84222 - DNA, 83 bp, Homo sapiens
cgcgtgtctaggtgagtcgcggtgggtcctcgcttgcagttcagcgaccacggctgtggatgagatgaacggaaaggagctca

SEQ ID NO: 84223 - DNA, 95 bp, Homo sapiens
agaacatctgggagaatatttaatggaaaatcgcttggttaaaacctgacacttttaacagaaatggtggagtcaatgaagaaagtagcagggat

SEQ ID NO: 84224 - DNA, 100 bp, Homo sapiens
tgctaataaagttgcagcgaggagaagcgcagcgacggcgtcgggagagcgcgcctagccggctcgcgagccagggagctggagagcagagaggcagagc

SEQ ID NO: 84225 - DNA, 74 bp, Homo sapiens
gttatacccaagtttacttgaaagaaatcctaatctccttttcacattaaagcacttaaggaaagcttcataaa

SEQ ID NO: 84226 - DNA, 96 bp, Homo sapiens
ctcgactgttctgtttgaggagctctgtgctttatcatagaaatggatctggtgttggagcgggccggagagaagtagagtgggctgcgaggagaa

SEQ ID NO: 84227 - DNA, 105 bp, Homo sapiens
caaatgtctgactctgactctcggactgagaaacgcaagctgaataccactagaaacatacctgtaaccagagacagctgattatagctttctgcagcaaggaag

SEQ ID NO: 84228 - DNA, 82 bp, Homo sapiens
gccgggcagccgggcgctgcggccgggcgactgcgaaggaacctctttcaggagctataaaagaaagggaggaatcatgtcc

SEQ ID NO: 84229 - DNA, 98 bp, Homo sapiens
gttttggaagttagagaaaagggctatgaacgattaaaagaagaactcgcaaaagctcagaggacggaagtgaaaatgtgacaggattggacctttca

SEQ ID NO: 84230 - DNA, 88 bp, Homo sapiens
ggcggcccaggcgcgcagctgggcgcctccttcctgcaggccaggtactccaaagattcaggtttactcacgtcatccagcagagaat

SEQ ID NO: 84231 - DNA, 100 bp, Homo sapiens
aactgctcaaaaaccttaatattgttggcaatatatcccatcacaccacaagaatggatcttggagaatgtctgaaagtccatgacctggctttaagagc

SEQ ID NO: 84232 - DNA, 100 bp, Homo sapiens
acccaaaaccattggctgtagtaagaacttcccaggaaaaacagctcttgctactcgggaacagatttggagtggtatgagaagtccgaagaaactcacg

SEQ ID NO: 84233 - DNA, 83 bp, Homo sapiens
tctgctcttcctcccttcgctcgcaccatgagtaatcaagtcagaggattatatgacttttatctgcctagagaagaactatg

SEQ ID NO: 84234 - DNA, 90 bp, Homo sapiens
cgagaccgcggccgggaccgaggagacacctatggctgccgatgaaggctcagcagagaaacaggcaggagaggcccacatggctgcgga

SEQ ID NO: 84235 - DNA, 100 bp, Homo sapiens
cgcatggagaagttgaaccagctgtgggagaaggcccagcgagtacatgtcccagagcaagcacacggaggcccgggagctcatgtactcgggagccctg

SEQ ID NO: 84236 - DNA, 82 bp, Homo sapiens
ctgagaaggactgcctgtttgcagccatggtctgaaaaagttcttttcttgtcgtggaattgcaattgcagttgaatatttt

SEQ ID NO: 84237 - DNA, 107 bp, Homo sapiens
taggagtgatgacaacagagagagcttggaaaagaggtggtcgttctcgttaccggaccacttcttcagccaacaatcccaatctgatgtatcaggatgagtgtgac

SEQ ID NO: 84238 - DNA, 88 bp, Homo sapiens
aagcggctggccaagtccgaccccatggtgcagctaccactgctaagagccatctccaccagaagcctggccagacctggaagaacaa

SEQ ID NO: 84239 - DNA, 100 bp, Homo sapiens
tcacggccaacgccttggcactagggaagcaggctgtgagccaaggggaaggcagaggacagaaatgaatgtgtttccaggctttcctggtggtttatgg

SEQ ID NO: 84240 - DNA, 82 bp, Homo sapiens
cctagaccggtttttagtccattgactatgcagcctaatgaaaaagttgcctttgacaacactggctcagtgtctgatggag

SEQ ID NO: 84241 - DNA, 75 bp, Homo sapiens
gcgacgcggacctgcggactagcgaacccggagcaaatgcagccctgaggatttggctactgcatataacaacag

SEQ ID NO: 84242 - DNA, 90 bp, Homo sapiens
agtgggcgtctggcggggtccgcagtttcagcagagccgctgcagccatggccccaatcaagggaagacccttcgcacagtggagccgct

SEQ ID NO: 84243 - DNA, 82 bp, Homo sapiens
cgtccccggcgcgaagaggctggactcggattcgttgcctgagcatttgacattgtgcagcaaagaaatggttatggagaag

SEQ ID NO: 84244 - DNA, 83 bp, Homo sapiens
atttcttgataaagtcttggttgctgccaacaaggctttcatagaaaccatgttcaccagtaaagcccctgtggaagaagcct

SEQ ID NO: 84245 - DNA, 76 bp, Homo sapiens
cctccccagacatgtggaactgtctgctgctaccagctagtccaagccaccaccagctctgccatggagcctttta

SEQ ID NO: 84246 - DNA, 50 bp, Homo sapiens
ccagcacactcctcgcgagcaagatggtcagtaggacagaaggtaacatt

SEQ ID NO: 84247 - DNA, 100 bp, Homo sapiens
ccaggtggttcagctcgcatagtggtcctgaacgaggctgtgggggccctgatgtaccacaccatcactctcaccagggaggacctggagaagttcaaag

SEQ ID NO: 84248 - DNA, 75 bp, Homo sapiens
tgccgatccgccgcccgtccacacccgccgccagggtctccctccactgctgtagtaacccgggtccggggcctc

SEQ ID NO: 84249 - DNA, 97 bp, Homo sapiens
gcgccggcaaggggacccagtgcgcccgcatcgtcgagctcttccaccaaagccacctaagccaatgacttcagcagttccaaatggaatgaaggac

SEQ ID NO: 84250 - DNA, 75 bp, Homo sapiens
ggactaaacaggtcacctgcagggactggtgattgcagctggaagtgcccatgaccgagctggcgtcctccgggg

SEQ ID NO: 84251 - DNA, 82 bp, Homo sapiens
tggcttcatcactattccttggagatgtatcaaaaaatgcagtcccctcatgccaagggccgctgtcccgaggttcatccag

SEQ ID NO: 84252 - DNA, 75 bp, Homo sapiens
aaggagattgacagtcacaattttgtaataaggagcatgtatcccgtttggaaatcttttctcgagggaacaatg

SEQ ID NO: 84253 - DNA, 90 bp, Homo sapiens
cgattcggtccctaccttcaggtcggggagcacgatctgcacttcgtctcaaaggttgctcaggcctccctcaaactagccaatgagaag

SEQ ID NO: 84254 - DNA, 98 bp, Homo sapiens
tgggaaacgtcctagtcaggaagaggacacacagagtattggtcctaaagtccagagacagagcactaattaggttgctccttgagggcaggacagtt

SEQ ID NO: 84255 - DNA, 100 bp, Homo sapiens
accagtctatcaacctgctcactgctgttggcaccaccacccgagactccttaaccgagatcaacctgtctggtccctatcactgttcagtccatcgtca

SEQ ID NO: 84256 - DNA, 97 bp, Homo sapiens
ggtggaagctgggccagggattgggaaaatctcttcagggtgggccatgcacagacacagctcatgtctcattaatcacaccaacaaaaagatcctg

SEQ ID NO: 84257 - DNA, 90 bp, Homo sapiens
tggctttccaagaagaagtggccaagcatctggcagctacccaaggaattctggggtcctgcagaatccaagtttacaaaccaccagaac

SEQ ID NO: 84258 - DNA, 90 bp, Homo sapiens
cagagcaggagttgccgcagccccaggctgagacagagatcctacagtaaggaattgtttgaagaagttatttcaaagatgcggaaggca

SEQ ID NO: 84259 - DNA, 75 bp, Homo sapiens
aaatagtggcaggtgacagtctgcatgtgcagttttcagcttcctgcctgacacagctcacttcaagaagtgcac

SEQ ID NO: 84260 - DNA, 100 bp, Homo sapiens
ctgacaaaaacgggatcgctttggaaacatctttaccctgttcattgggccagaggatcagagtgacagttgatggcgaatttctgcattacattttccc

SEQ ID NO: 84261 - DNA, 100 bp, Homo sapiens
cgggcgagtggagctacctgagaggagagctggagtggctggatgtggagcaccgcaccgtggctggagtcctgagcagcaccttctggacagggggcgt

SEQ ID NO: 84262 - DNA, 98 bp, Homo sapiens
cgggactccctgtgccttgcttggagctgacgccgacggcacttttccagccattaactccaggctctcgagaatttgaagatgttgtaaatattctc

SEQ ID NO: 84263 - DNA, 50 bp, Homo sapiens
gtctactggacagtggcgtgtggtgactattatatggttaaaaagatttt

SEQ ID NO: 84264 - DNA, 115 bp, Homo sapiens
cagtgttaaaggaacctctacaacgaaggtgaagccacggaagataagtggctgaaggacccggggccgcggacggagaagcggacactgtgctgcgacatggtgtgtttcctgt

SEQ ID NO: 84265 - DNA, 121 bp, Homo sapiens
atcacccaggtgaccaaccccaaggaggacgagggccggttgccgggcgcgggcgagaaaggttgaaatcacaaagattagacacctttttagataggtgttcttcagcaccactgacaac

SEQ ID NO: 84266 - DNA, 90 bp, Homo sapiens
tgttttttggaggaggaggaaggatgcagagagaaaggagaggtaaactgaaggaacttaatggaactgcacctgaagagaagaagttaa

SEQ ID NO: 84267 - DNA, 80 bp, Homo sapiens
acctgtgtgatgatgcctgagttcagccctcagcaggctttccatctgatggtcccctggtgtgtgccctggaacaggag

SEQ ID NO: 84268 - DNA, 98 bp, Homo sapiens
cggagacctcgctgcgctcatggcgtcgcccgggttcttgggtgtctctggggagtccctgggccagaccttcctccagactccagcccacctcttcg

SEQ ID NO: 84269 - DNA, 100 bp, Homo sapiens
cctacatttggagcctggacacgcagtacagcaagacagccagctaaaggtgtggatgagcaaatacggctggagtgccgacgagtcggggcagatcttc

SEQ ID NO: 84270 - DNA, 89 bp, Homo sapiens
ccttggcggcctcccggaagacgtcctccacattctcccgaaacttggcggaacattccaggtacaggtttgcagattccgccagcagc

SEQ ID NO: 84271 - DNA, 74 bp, Homo sapiens
accaccggagaattcctggggcgcaccgccaagagctggggcctccggtgtggctgtctctgatggtgtcatca

SEQ ID NO: 84272 - DNA, 50 bp, Homo sapiens
attgtttgtcaccacaaaaaggacagccgaattaagaaagtggtttccat

SEQ ID NO: 84273 - DNA, 90 bp, Homo sapiens
aggacttcgaccagcgcgcgcgcgaggagttccgccccaccatctacagcaacgtgatcaaagagcagcccgacggccatggaggctgaa

SEQ ID NO: 84274 - DNA, 82 bp, Homo sapiens
gcctggctcggagcagcagcctctgagtgaataaccctataccttccaatttgaaatcagaagcaaaaaaggctgccaaaat

SEQ ID NO: 84275 - DNA, 75 bp, Homo sapiens
atgctgaggatcgaggaacgttgtctgggaaatcctcattgacgattcaatttgttgaaggccaatttgtggact

SEQ ID NO: 84276 - DNA, 82 bp, Homo sapiens
gcaacatcctgtcacaggccatgctctggcaaaaactacctggagtagaacagaaaaattattatgtctgtgttcccttggg

SEQ ID NO: 84277 - DNA, 100 bp, Homo sapiens
ccagacctgcagttgctctacactttcagttgtggaagctgatcgaggaagcctaagcaggctctgtgaagtgggaatagtggtatttgagtcaaggttt

SEQ ID NO: 84278 - DNA, 75 bp, Homo sapiens
tggagctgcccactctagaggagctgaaagtagatgagctcggggagtacagacagtgaggaaagtacagactct

SEQ ID NO: 84279 - DNA, 101 bp, Homo sapiens
gtctggggtacacctggacaggtgtatgatgtggaggaggtggatgtgaaagatcctaactatgatgatgaccagtttgctgctttgtggtgcacaagcgg

SEQ ID NO: 84280 - DNA, 50 bp, Homo sapiens
tcgtcatcaccttattctggtcccgggaaatggccagtgatgaactgagg

SEQ ID NO: 84281 - DNA, 100 bp, Homo sapiens
accgagagcgtgaccgagagcgcgaatatcgtcatcgttagaaggtgttacacataatattgcattacttcgagaggtgataatcaactcacgctttgta

SEQ ID NO: 84282 - DNA, 76 bp, Homo sapiens
acagggcagacgttagcgtgagtgatcactctcaatcccggatgtctttggtggacttgggaaagaggttgctaga

SEQ ID NO: 84283 - DNA, 98 bp, Homo sapiens
acatttgtagcattgatttcccggatctggtaacatggcaaaagatatgccttcaattaagttgcagagttctgatggagagatatttgaagttgatg

SEQ ID NO: 84284 - DNA, 75 bp, Homo sapiens
agaggaaactctgcattctcgcttcctggagggaactgctcgcagaaagaagaaggtggttcatagaacagccac

SEQ ID NO: 84285 - DNA, 75 bp, Homo sapiens
atccagcggcacctggacgacctgtcgaaactgcagctgtgcctcctgctgaatgcggagaacatcttccactca

SEQ ID NO: 84286 - DNA, 74 bp, Homo sapiens
atttagaattcaacaaatataagtatacagcatctgtcctcatagcaggtatttctgggaaaagccagcttctg

SEQ ID NO: 84287 - DNA, 99 bp, Homo sapiens
cgcactggtcgtgggagtcacctgaaaggcaagaaatgtagcctctagttcgttagtcaaaacgtgaaaaaaaagacctgctttgccctgggaaatagt

SEQ ID NO: 84288 - DNA, 90 bp, Homo sapiens
cgcagtggtcgcttcttctccttgtttcaggtttagctgtgcctcccagtgactataatgacaaggaagctgtaaatgtatttgagttaa

SEQ ID NO: 84289 - DNA, 75 bp, Homo sapiens
ctttgcccaaatccaaatggatgaatgtagaccatcccattcatctaggaggtggttgtgtcaaaccgattggtg

SEQ ID NO: 84290 - DNA, 75 bp, Homo sapiens
cagctcgaccacagcaagctcctggggacagctggcctgaagctcagagccggggcgtgcgccatggccccacac

SEQ ID NO: 84291 - DNA, 82 bp, Homo sapiens
tcaagaagatcttcgagttcaaagagaccctcggaacgttaattatagaaaatgccaagtaggaaatttgccgatggtgaag

SEQ ID NO: 84292 - DNA, 100 bp, Homo sapiens
tcacgggcgtgcggttcaaggctcagctgaaggacccgcagggccccgggccagctccaaatgagaagatgaagcaagtgttaaagaagactatagaaga

SEQ ID NO: 84293 - DNA, 79 bp, Homo sapiens
cgtccgccgattcctcctccttggtcgccgcgtccttggctggcgtgtatctacgagaccccagcaggcaccatccttt

SEQ ID NO: 84294 - DNA, 100 bp, Homo sapiens
tccaggaaagggccttcttcctcttcgacaaccttctcgtctactgcaagcggaaatccagtttgagttcatgatcgagtccatcctgtatgcccgggat

SEQ ID NO: 84295 - DNA, 75 bp, Homo sapiens
cagccttgactccccagggaagcaggtgcggccgggtgtgtggcaacattacttcatgatgcagccatgaaccct

SEQ ID NO: 84296 - DNA, 50 bp, Homo sapiens
cgagtcatggctgagacctacggcatccgtgtcattctggaccttactcc

SEQ ID NO: 84297 - DNA, 90 bp, Homo sapiens
atcagattcagaggatgacagttgcaaagagacaagagagacacctccaacttcgacaaagagttcaccagacagcctgtggaactgacc

SEQ ID NO: 84298 - DNA, 75 bp, Homo sapiens
aaagcagcgtgcgttcagccctggggaatgttttaaaggaagttgggctactcacaagttactacataagaaagc

SEQ ID NO: 84299 - DNA, 82 bp, Homo sapiens
agaaaaatggtggtgatggcgcgactctcgcggcccgagcggccggaccttgtcttcagacaagaggagcagcagcggcacc

SEQ ID NO: 84300 - DNA, 82 bp, Homo sapiens
tcgccctccctacgggcagcccccgggggttggcgaccgaagtctaggttttcgagaaatctccagcgttctagacatggag

SEQ ID NO: 84301 - DNA, 133 bp, Homo sapiens
ctacggaggacttcatgaggcgcattgagtgctatgagaactcctacgagtcgctagatgaggacctggatagcacgtggtgaggtgtgtatggcttcccgtggactcagcctcttccccgagtcctgtccag

SEQ ID NO: 84302 - DNA, 82 bp, Homo sapiens
ccaagggacaaggtgtcaacaatgtgccgtggatatcttgacctacgtggcttggaagataagtggttttcccaaaaaccgt

SEQ ID NO: 84303 - DNA, 100 bp, Homo sapiens
aaaacactgcctcagtatctgaacacaaggtgaaggaaatacaggtgctgcagaatcttctttttctcaggaggtttctagagaacaacagccatcatca

SEQ ID NO: 84304 - DNA, 82 bp, Homo sapiens
cccttccccacgcaaccccagatccatttacactttacattgggacagaaataacccagagccctggaacaaactgggtccc

SEQ ID NO: 84305 - DNA, 50 bp, Homo sapiens
attctggaaactgtacattgaagcagagtcatgcggaggaatccctttgg

SEQ ID NO: 84306 - DNA, 97 bp, Homo sapiens
cagataccggtgagataacatcctacatcactgaagatgatgtggtctacagaccaggaggaaattcgcccccgtctgcagcatctgtgaaaatccc

SEQ ID NO: 84307 - DNA, 98 bp, Homo sapiens
tggccttaatgagcatgttgacagcatcgatgctagacagacatgacttctgacagctctctccatggaaggaggcggcggccgcgatgagccttcag

SEQ ID NO: 84308 - DNA, 100 bp, Homo sapiens
gtggatcccgccgggaggtactttgctgcactttgttgaacgtggtggtgagagcacacgtcctcgtctcattcctgatcgaacgcggtggtgagagcac

SEQ ID NO: 84309 - DNA, 100 bp, Homo sapiens
caccatttctggccaaaactacaaacaagacttcgcagaatagcctaacatggcagaccagagacagcgctcactgtctacctctggggagtcattgtac

SEQ ID NO: 84310 - DNA, 96 bp, Homo sapiens
aaacaagtaaatatggaactggccaagatcaagcaaaaatgcccactttatgaagccaacggacaagctctccagcctcagacgacgagggcagta

SEQ ID NO: 84311 - DNA, 95 bp, Homo sapiens
tggacagtctgcaccttctcttactgctggcctgatggttccttcatcagcttcaggccaagttcgaagtcactatgtagactggagaatgtggc

SEQ ID NO: 84312 - DNA, 137 bp, Homo sapiens
ctgagcagtcaactcaaatgcaagtccaagaggaggaggaggcggaggtccaagcggaaaggtgtcatggagaaactccagctgggcccagagattctgcagcgggaaaatccaaggcttatttatgccaggctgag

SEQ ID NO: 84313 - DNA, 83 bp, Homo sapiens
tctacaagagcgattgctacacatggacagtgatgatgaaattcctatcaggagcacgtttgccgtggacgggaaagattgca

SEQ ID NO: 84314 - DNA, 122 bp, Homo sapiens
ggagctctcggtcctggccgcgattttctgcaggccccacgagtgggaggtgctgagccgctcaggacatccaggcagaaattgatgcccacaatgacatatttaaaagcattgacggaaac

SEQ ID NO: 84315 - DNA, 75 bp, Homo sapiens
ctcgttcgccctaaaggtaccaatatggcggaggtgagcgagtgctgtgctttcatgggcctcttctttatgaag

SEQ ID NO: 84316 - DNA, 75 bp, Homo sapiens
ctggatccaggataacggaggctggaagccctacaggtggcaactactagcccaactgccaatactactggtact

SEQ ID NO: 84317 - DNA, 75 bp, Homo sapiens
cagtatcactgtgaaaactgtggaatttgtagccaagagtcgaagctaaaccagaagttcaatctcagccacctc

SEQ ID NO: 84318 - DNA, 97 bp, Homo sapiens
tttagagaaaggacttgaaccagagccgcaggaatgttcttaatgagtcgccagttcaattaccgcctctgccaccgaggaattggccttctctaga

SEQ ID NO: 84319 - DNA, 82 bp, Homo sapiens
cccgcatctgcctccctgccccagcccatcctctctaaccaagaggagaaggcagagcccccccaggctatgaatgccctga

SEQ ID NO: 84320 - DNA, 76 bp, Homo sapiens
tcatttacagagcaacttgatgaaggtacacccaatagagagcttagaccatgctcagcctccaagcagccttgtc

SEQ ID NO: 84321 - DNA, 83 bp, Homo sapiens
aaatgattcagatgaattagcaaatggagaagtgggagaagacccttttgaggacttctttgggaatcgaaggggtccccgag

SEQ ID NO: 84322 - DNA, 100 bp, Homo sapiens
cttcgtcaaagtctacccctcctgtcggggaggcaaggtggttttggaccagacaggcgtgtctaagtattggttgctctggcatctgaagaacttgcca

SEQ ID NO: 84323 - DNA, 75 bp, Homo sapiens
cttctgggagctgaggaaccagatatcttgaaaagctgccagaaagtcaacaagtggaagaagctgtactcgacc

SEQ ID NO: 84324 - DNA, 100 bp, Homo sapiens
atcataattcctgcagctaccacctctttaataaccatgcttaatgcaaaagaccttctacaggacctgaaacatcattcagtcgaggtttcacaaagaa

SEQ ID NO: 84325 - DNA, 88 bp, Homo sapiens
cggctgctgctgcacgctggaaccatgtgtgggtcggcaccgagactgggatcttgaaagagcagcccgacggccatggaggctgaag

SEQ ID NO: 84326 - DNA, 75 bp, Homo sapiens
gagcctgagaacagcgtggcatgcaagggtaccatgcatttcacggtggccttgtggagacaacgccttaaccca

SEQ ID NO: 84327 - DNA, 94 bp, Homo sapiens
ggagaagtatgagcttgctcacccaccagaggagtggaacacttgcacctcctgcgccgccgccccccatccaaggatatgccttcaagcctcc

SEQ ID NO: 84328 - DNA, 95 bp, Homo sapiens
tgaagatccctgtggtagagagaaaaatcctggatctgtatgctttgagcaagggagagtcccgtattctcagagtaaaagttgtttctggaatt

SEQ ID NO: 84329 - DNA, 50 bp, Homo sapiens
tctggagcttttcccctccccgggtcatcatcagatttgaaatatttaaa

SEQ ID NO: 84330 - DNA, 90 bp, Homo sapiens
ggaattagaactacaaaaggcctggtgcatagcagcctggctggaagcattctgagtgctctgtctgccctggtgggtttcattctcctg

SEQ ID NO: 84331 - DNA, 83 bp, Homo sapiens
agatggccagctttcccccgagggtcaacgagaaagagatcggtgctcttacagcctgttccaagtgtggcttaatccgtctc

SEQ ID NO: 84332 - DNA, 100 bp, Homo sapiens
cggaagaggccctgcggaggcggcggtgcagcgctccggttgagactgagctaaagttaatctgttgtgacattctggatgtactggacaaacacctcat

SEQ ID NO: 84333 - DNA, 100 bp, Homo sapiens
ggaccagcgggcgggggcccacgagaaggttgtgcaggaccagcgttccctgtgcaggcgccactgcgtttcctgcagattccgaccggcactgcaacgg

SEQ ID NO: 84334 - DNA, 75 bp, Homo sapiens
tccatcttcggcaccgagaaagacaagtggtccagctgctcacctgtgacctgctactgtcgctacggacagcgc

SEQ ID NO: 84335 - DNA, 83 bp, Homo sapiens
agagtcgcagggagcccaccgggcgggcctggccaaggagcacagaaaatggttctgccccctccacagctcccacagaccag

SEQ ID NO: 84336 - DNA, 98 bp, Homo sapiens
tttacttttaattttgcaaagaatccaggacaaaaaggattaggtgatgctgaacaggagcttggcccccctccatctgtagatgaggcagcaaacac

SEQ ID NO: 84337 - DNA, 75 bp, Homo sapiens
cggcgacgcggacctgcggactagcgaacccggaggatgaagtacattgagacagagctaaagaagaggaaaggg

SEQ ID NO: 84338 - DNA, 100 bp, Homo sapiens
ccagtccccagtgagggtgtacaaatacccctttgaattaattatggctatttggactgagcaacaaatttgaatctgaattcccttcttcattaactgg

SEQ ID NO: 84339 - DNA, 100 bp, Homo sapiens
aaaacttcggacatagaggccaaccaacctttggagggctgtcacatggtgactgaagaacttcattccataacgtttgaaacacagatctgcctctatg

SEQ ID NO: 84340 - DNA, 99 bp, Homo sapiens
cctggatgagacatttgctacagcatcccacattaagtcaacggctcctggatttggatttggaattgcaatatctggtggacgagataatcctcattt

SEQ ID NO: 84341 - DNA, 74 bp, Homo sapiens
gaaacaactttagatatggatcaggcagaacagattatatttgatcatttttctgatcctaaatttgttgagca

SEQ ID NO: 84342 - DNA, 100 bp, Homo sapiens
ccgcacaggcctgctgaactgggtgctttatataggacccaacatgagtgaagtttcctgcaagaaacgggacgactatttggaatggccagagtatttt

SEQ ID NO: 84343 - DNA, 100 bp, Homo sapiens
gccaccgcgcccggccaatttcctttcttagttgcctctgcccacctcttctcttctgcttccatattacagttgtgaagcactggagcctgacatggac

SEQ ID NO: 84344 - DNA, 87 bp, Homo sapiens
gccatgaagaagcagttcaaccgcatgaagcagctggctaaccagaccgtgggcagaccacagagtattcagccatggcctcgctgg

SEQ ID NO: 84345 - DNA, 82 bp, Homo sapiens
gtcaccgccggaacctggcgcaggtcaaaatgcagatcttcgtgaaaacccttaccggcaagaccatcacccttgaggtgga

SEQ ID NO: 84346 - DNA, 100 bp, Homo sapiens
cacaagtgaaatcactgacacaaaaagttcaagctggtgcctatcctacagaaaaggtggttatcactaggctaaaactggacaaagaccgcaaaaagat

SEQ ID NO: 84347 - DNA, 100 bp, Homo sapiens
gagcgccgaggaggctttcctgctggtggcaaccgcctacgagacactcaagctgcagcagaaggccgtggctagtgagatcttcaagggcaagaaggat

SEQ ID NO: 84348 - DNA, 100 bp, Homo sapiens
ttgaaatgcctactgtgtgtaccactattaaggtgtcaaaagatggacagtacattttagcaactgtcatggccagtccaggaggtcttagtgctgtgcg

SEQ ID NO: 84349 - DNA, 100 bp, Homo sapiens
aaggtgaaagccaggttgaccattgctgccgttctgtacttgcttttcatgattggagaacttgtagtcttattgccagcagttttgaagatgactcccg

SEQ ID NO: 84350 - DNA, 100 bp, Homo sapiens
gcttctccttttcatgagtgttcctgtggtctctgcacctcctttcttgatatcagtatcaagataaaagtttggaatgggagaaaaattctcaaagcct

SEQ ID NO: 84351 - DNA, 82 bp, Homo sapiens
cgaaggccgacacgctggccctgaggcaacggctcatcaggatctggtggaacgagactgcaatggggacacgccaaacctg

SEQ ID NO: 84352 - DNA, 100 bp, Homo sapiens
ggctctggtgcggaaccccccagtcctcatcctggatgaagccaccagcgctttggatgccgagagcgagtatctggtacaggtttgcagattccgccag

SEQ ID NO: 84353 - DNA, 82 bp, Homo sapiens
aattgcaacatgacgctggaagagctcgtggcgtgcgacaacgcggcgcagaacggtatctgacctcagaggcagaggaaca

SEQ ID NO: 84354 - DNA, 51 bp, Homo sapiens
acgctggactctccctttgcaggtcctgggaactccaacaagggagcaaat

SEQ ID NO: 84355 - DNA, 90 bp, Homo sapiens
agacaacctgcagcctcctggcaccaaagagcagaaagaccatgggtttgaggtggcctccacttcccctgaagacgagtcccctggcag

SEQ ID NO: 84356 - DNA, 89 bp, Homo sapiens
cagcgggagctggacggcgagcgcgagcggcgcgagaaatgtccccaactcctgcccagccagtccacgcggtgccggctcctccagtt

SEQ ID NO: 84357 - DNA, 100 bp, Homo sapiens
cggacctgtctgatctgcgagcggcagcgcggcagtgacccgccctgggagctgcccccagcggtagagaccttggagtgtcgggaaatgtggaaaggct

SEQ ID NO: 84358 - DNA, 75 bp, Homo sapiens
cggcccagagctcccgggtcgtctttcgtgtggccgcgaggtgtaagcttcctgcaaagctgcaaaccactgtac

SEQ ID NO: 84359 - DNA, 83 bp, Homo sapiens
ggagattataggagaactgggcgacggagcctttgggaaagtgtacaaggttgtggcagcactgcctgaaggtatgagaccag

SEQ ID NO: 84360 - DNA, 93 bp, Homo sapiens
taacagcagcgccgtcccgtccgacagccaggcccgggagaaatgccttcaattaagttgcagagttctgatggagagatatttgaagttgat

SEQ ID NO: 84361 - DNA, 98 bp, Homo sapiens
cgagttcgatgacttcgtcacctatgagggattaaagcctgtggtttccacagaagcaccacctatcatatttgccacaccaactaaactgacctccg

SEQ ID NO: 84362 - DNA, 100 bp, Homo sapiens
cagtccctcatctccgggacactaagaaaaccatccagtttgacttccagatcctcaggatcaagcgcatggcaggcatgaaggaatcgcagatcagcgc

SEQ ID NO: 84363 - DNA, 100 bp, Homo sapiens
ccgttcttgcctcaggccagtcgcctccaggccaagagggatccttcacccgtgtctgcgagtgatagacagccaagcagagaaactgaaggagcttgac

SEQ ID NO: 84364 - DNA, 100 bp, Homo sapiens
cgaccgcggccgggaggctcctgggggccggggctccgagagttaatagagtggatacaaccttgctgaagatgaagaatatacaatattgaggatattt

SEQ ID NO: 84365 - DNA, 148 bp, Homo sapiens
ttggcatactcgctggtttgtgctcaagggggatcagctctattatttcaaagatgaagatgaaaccaagcccttgcctgcgtatcagaatctgagacagcgtgttgacaactttgttgcaaatcacttggcaactcacacatggagt

SEQ ID NO: 84366 - DNA, 100 bp, Homo sapiens
caaaaatagtgatagctttgataaacggaagctcctcagtcttagagagttctgaaggtggatttctcagccacgttcaacctgatgagttcactgcttc

SEQ ID NO: 84367 - DNA, 80 bp, Homo sapiens
gcgacgctagaggaagctctgtcagagaaggcggcttcaatgatccatcctaaagaggtgccccctgaggccatcttgct

SEQ ID NO: 84368 - DNA, 100 bp, Homo sapiens
cggcaccgagacctcaaggccaacatgcgggcactggagctggcccaccgggagctgcagggccggaagcagtgcatcgagctggagcagcagtttgact

SEQ ID NO: 84369 - DNA, 50 bp, Homo sapiens
gactccagttatgcaaaaagagatccttcctgggcatcagtaaatagggg

SEQ ID NO: 84370 - DNA, 120 bp, Homo sapiens
tggaccattatcagaattgcaaatagcctatgtatgcagagaaaccttacaggtacctccagatcatcagtcactagatgtaaaccaggagccaactgccccagttcacacagtggcatc

SEQ ID NO: 84371 - DNA, 75 bp, Homo sapiens
gtgaagggtccctatgaatacctcacacttgaagactatcccttgatgattatccatccttttacaatccctgct

SEQ ID NO: 84372 - DNA, 100 bp, Homo sapiens
tacagcatggaccagcgggggcagaagcctggagacctgtacagtcctgacagcagcccccaggacagagcgggatgccaccagcttgtccaaagggaag

SEQ ID NO: 84373 - DNA, 75 bp, Homo sapiens
cggcgcactgcaacctccgcctcccggggccaagtgatccagttctaagtgtcatcttttattatgaagacaata

SEQ ID NO: 84374 - DNA, 98 bp, Homo sapiens
tcccgcccagcagttcctccacgcaggggctccggaatcgcccgaccgcacacgttgccaccctgagaaattgcttcccaagaagaaggtgctactat

SEQ ID NO: 84375 - DNA, 76 bp, Homo sapiens
taccactaccaataaagaggctgatccaagcaattttgccaacttcagtgctggttcctcacacggaggggcagtc

SEQ ID NO: 84376 - DNA, 100 bp, Homo sapiens
aggggaaggcaggcagcggactccgccaatattatctgtccaagattgaagaactccagctgaggagaagaaagtggaagcaaagaaagaagaatccgag

SEQ ID NO: 84377 - DNA, 51 bp, Homo sapiens
atatcttgaaaagctgccagaaagaaattgcatctgatggtctcaagggtc

SEQ ID NO: 84378 - DNA, 100 bp, Homo sapiens
aggatttgcaccacgagatgtcactccagaggtgtgggctaacaaagccaaaggagaaacggcaagtgaaggaactgaagcaaagaagcgaaaacgtgtg

SEQ ID NO: 84379 - DNA, 100 bp, Homo sapiens
ctcctccctccgtccacctgtcacttcgggtagctgggaggccaggggtcagatatagaaatgttgaattctgtgacccccactgacagctgtgagcccg

SEQ ID NO: 84380 - DNA, 90 bp, Homo sapiens
cgtcatcctgctgctgaagatctggaagacgcgctcctgcgccggttggatggcaagcatgtggtgtttggcaaagtgaaagaaggcatg

SEQ ID NO: 84381 - DNA, 87 bp, Homo sapiens
gcggccgcggggaggaggatgggggctaaccagttagtggtgctcaacgtgtacgacatgatggtatagctgcatgctgggaaagaa

SEQ ID NO: 84382 - DNA, 83 bp, Homo sapiens
tcaagattatttgcaacagctcacgggagcaagaacggtatggcctcacaagtcttggtctacccaccatatgtttatcaaac

SEQ ID NO: 84383 - DNA, 100 bp, Homo sapiens
caagaactcaggcttcaagcgttctcgaacccttgaggggaagttaaagaaggagcttcaagagcagggggagatcagaatcgtccagctgggcttcgac

SEQ ID NO: 84384 - DNA, 75 bp, Homo sapiens
gaagaatcaatatcgtgaaaatggccatactgcccaagcaattaccagctctggctgggtcgccacaacttgttt

SEQ ID NO: 84385 - DNA, 87 bp, Homo sapiens
attatgtccgcgaaaccaagttggacttacagagaggtggaataacactcccatggatgaagcactgcactttggacaccatgatgt

SEQ ID NO: 84386 - DNA, 74 bp, Homo sapiens
ttttagggtcctttatatagaagggagagtagggattccagcagaagttcaccttccacagcaaggagattgtg

SEQ ID NO: 84387 - DNA, 90 bp, Homo sapiens
gcagcccccggccgcagcgcaggcagcccagcagaccacggtgtgaacacatgaacagaagacgaaaatttcttctagcctcagtacttg

SEQ ID NO: 84388 - DNA, 100 bp, Homo sapiens
cggtggtcaagcgggccacgcacctcgtcaccaaggccaaggcgcagcccagcctcgaaatgcagaacgacgccggcgagttcgtggacctgtacgtgcc

SEQ ID NO: 84389 - DNA, 75 bp, Homo sapiens
cggaaggctccctcggtcgcgagtatctccgtttcctggatgtgaacctgcaagctttcttcctggtggcagatg

SEQ ID NO: 84390 - DNA, 83 bp, Homo sapiens
cagcgggagctggacggcgagcgcgagcggcgcgagaaagcacattcaggaccccgcgagccagcggctgacgtggaacaagt

SEQ ID NO: 84391 - DNA, 101 bp, Homo sapiens
gaggagcgtcaacagcagcaccatggggtttgggatgctctgacagacaattacatcccttcactctcagaagactggagggatccaaacatcgaggctct

SEQ ID NO: 84392 - DNA, 83 bp, Homo sapiens
gcgggtccagcttcaggagtactggcggaggggctggacgttccacgccaaagatgatcaagcggtgctgattcacgagagtg

SEQ ID NO: 84393 - DNA, 90 bp, Homo sapiens
ccatcaggggccttgataacacagagtttcaaggtcagtttacgttgcgagacatgtatgagcaatttcaaaatatcatgaaaatgggcc

SEQ ID NO: 84394 - DNA, 97 bp, Homo sapiens
cgcgtttagcccactgcagatgctatggtggcaacagatgtatgctcatcagtattatatgcagtactggctatgctgaggactacaccacgggagc

SEQ ID NO: 84395 - DNA, 51 bp, Homo sapiens
aacacattttcctatacctctgatcgtcagtatttaaacagatcacatcat

SEQ ID NO: 84396 - DNA, 90 bp, Homo sapiens
gagccacaatgcatcgctggaagtagccagtgattttacaacgagatgctgctctccatagggatgctcatgctgtcagccacacaagtc

SEQ ID NO: 84397 - DNA, 100 bp, Homo sapiens
tgacaggaacatcgagaagccaaggctagtggctgggttactgatggattactgatggattcttctcagaatgaagaagcagtacgacgtctcatctggg

SEQ ID NO: 84398 - DNA, 82 bp, Homo sapiens
accctggagcctcagttggaagcagccgatccagcctgcggagcctgtggggcaggatggcccagctgaggctggtgctggg

SEQ ID NO: 84399 - DNA, 100 bp, Homo sapiens
gcagggcgatcaaatggtcccggctgctgcagggcgggggcgtccccaggagccggacagtgagtccatgacagaagaaaccctgaaaagggcaaaggag

SEQ ID NO: 84400 - DNA, 75 bp, Homo sapiens
gatggatcggcacaggcctgctctgcactgaacagacccaggaaagcattcagcattttgagcgacaggcagggc

SEQ ID NO: 84401 - DNA, 100 bp, Homo sapiens
ggaagaatttccaaatgaaaatcaagtagtgtttgccagagttgattgtgatcagcactcgatggcaagccggcaggtggatattgcaactcagggctgg

SEQ ID NO: 84402 - DNA, 100 bp, Homo sapiens
ttcgcagctggacaaagcgtccatcatccgcctcaccacgagctacctgaagatgcgcgccgtcttccccgaagacttgtgcaccatggacaattttgct

SEQ ID NO: 84403 - DNA, 82 bp, Homo sapiens
gaaaagcctctgggagcagaagggaggctccaagacctcatcaacaattaagatgcagacagacatgctgaactatctggaa

SEQ ID NO: 84404 - DNA, 100 bp, Homo sapiens
cgcgtggtgggggaactgctggggaaggcgattggcatcgatctctccatcccttccgaggcccgacttcgaacccttaggagaaatcttgagagtggac

SEQ ID NO: 84405 - DNA, 75 bp, Homo sapiens
acaacagcaattacaaaaatgatgtcatgatcagaaaagaggtgattgtagagaaggctccaaaagccagggtgc

SEQ ID NO: 84406 - DNA, 74 bp, Homo sapiens
tgtcgcgttacgggcggtacggaggaggcaggtaaaaatcaaggtgaccccaagaaaatggctcctcctccaaa

SEQ ID NO: 84407 - DNA, 75 bp, Homo sapiens
ggaccacatagacatttacgcggatgtcggcgaagagttcaaccagattagtgatgatgaaccaggttatgacct

SEQ ID NO: 84408 - DNA, 100 bp, Homo sapiens
gctaccttaacaggaaacgcaccggcattcgagaacagcttgatgcggagctccttcgctattctgagagatgatgtggaaacctgcctatgattttctg

SEQ ID NO: 84409 - DNA, 83 bp, Homo sapiens
gcttggaaaaacgtgtgggtacgaccttgaaaacctcggatcaattctcagctggtggcacaacaagtggcacaacagtatgc

SEQ ID NO: 84410 - DNA, 100 bp, Homo sapiens
tgctgggcattaccatgatggtgatcatcattgccatcggagctggcatcatcttgggctactcctacaagaggttgcctgcaggagggaaggcggtgaa

SEQ ID NO: 84411 - DNA, 98 bp, Homo sapiens
ttggcaaaactgtggagtatctgcactcacaggggggaagtgttcgccagttactacatgaaaagataagagatgcttatactcacccacaatttgtg

SEQ ID NO: 84412 - DNA, 100 bp, Homo sapiens
gtctgtctctgcggcttctggttctcacttgtcggctatgaccagggccagagcactcagatctcagtcagaggagtctgcttctgcctttagtgctgat

SEQ ID NO: 84413 - DNA, 101 bp, Homo sapiens
ggataatcactaaattctgccgaaaggactgaggaacggtgcctggaaaaggggccagtgtcattcaaagatgtggctgtggatttcacccaggaggagtg

SEQ ID NO: 84414 - DNA, 75 bp, Homo sapiens
tcagttatcaagctttagagcctggctactcacagttgaagcctgattgcaggctcggacatcatcatgcagctg

SEQ ID NO: 84415 - DNA, 83 bp, Homo sapiens
ggcctctgctgcgtcctgctgaccttcgcaaccatgtccaagggacctgcagttggtattgatcttggcaccacctactcttg

SEQ ID NO: 84416 - DNA, 121 bp, Homo sapiens
ggcgcgaccaggccgggcacctccgagcgcaaggacagcgcgaggtccgcgcagcccagcgcagccatacctcctgccccccgaggtctgcagtctcctgaacccagcagccatctacgcc

SEQ ID NO: 84417 - DNA, 90 bp, Homo sapiens
gtcatcaagaagaatgacgatgagaaccatggagtctggcagtaccgccgccagtgaggaggcacgcagccttcgagaatgtgagctcta

SEQ ID NO: 84418 - DNA, 100 bp, Homo sapiens
atctccgccaccgtcttcaggccagggttatgataattcagagagcagtgttcggaaagcttgtgtcttctgcctggtggctgttcatgcggtaattggt

SEQ ID NO: 84419 - DNA, 101 bp, Homo sapiens
tccagttcgagatcaccttcgagtgcatcgaggacctgtctgaaggttcaaaccttgtactactcagctgatcacaagctgcttgatgggaacctactaga

SEQ ID NO: 84420 - DNA, 80 bp, Homo sapiens
acaaactttgtgtaaaagatgatgtgagtaatcaagtcagaggattatatgacttttatctgcctagagaagaactatgg

SEQ ID NO: 84421 - DNA, 100 bp, Homo sapiens
cctggatctcgcgccacaaggagatggtctcctctgagcctccggcctccataagacccaaaacagatgacacctcttcccagtcccccgcgccttccga

SEQ ID NO: 84422 - DNA, 98 bp, Homo sapiens
tatggcaagcactaaaccactatgcttaccgagatgcggttttcctcgcagaacgcctttatgcagaaggccagtactaaagtggaagtggacatgga

SEQ ID NO: 84423 - DNA, 96 bp, Homo sapiens
aacccagtcagcgtgatgatatctctcgccttacagttcagatggaaaacacctatcagttgggttatcaatactctggctgaccatcatcatcgt

SEQ ID NO: 84424 - DNA, 100 bp, Homo sapiens
tcgagaggaagattcttacctctttgatctcgacaataaggcctcattgctacgatttcagagtaccctggtaatagctgagcatgcaaatgattcccta

SEQ ID NO: 84425 - DNA, 98 bp, Homo sapiens
aacactgaaaaccacgaccctgtcggatccatcttaatccagttatatgaagcctacagtaaagtctgtcgcaaacagcaggtggcggctgtggacca

SEQ ID NO: 84426 - DNA, 100 bp, Homo sapiens
caacaacacattcagagtggtgggcaggaagattcaggaccatcagccccattgacaaaccttcagattctctcagtatagggaacggtgataattccca

SEQ ID NO: 84427 - DNA, 75 bp, Homo sapiens
gcctggaggagcgtcctcagggtctccccgcgcccagatgatggtgtgagcatccccggggagtacacttccttt

SEQ ID NO: 84428 - DNA, 75 bp, Homo sapiens
cgcagctggaggcggcggagcggaagggtggccattcagggcaactggggccttcgtcagttgccccttcattcc

SEQ ID NO: 84429 - DNA, 83 bp, Homo sapiens
ggctaagtttgcatgaaaactgcactttattgcaagtagcaaaagatatggcagcggcagcagttagatgcatcagaaaggag

SEQ ID NO: 84430 - DNA, 83 bp, Homo sapiens
cgcacgctcaactcctgctcctcctcttcgcaatgagtaaacgacgcagtatcattgcccagtgcctaagatcttttatgttc

SEQ ID NO: 84431 - DNA, 75 bp, Homo sapiens
aagacactaggtcgggcgccacagtgccacccaaggagaagaaggtaagaatgattgatgttggctgatattgga

SEQ ID NO: 84432 - DNA, 100 bp, Homo sapiens
ataacagccaacgctgcaccaaccccatccccaaatcagaggatcgtaggacatcatggtgatgttggggctcccatagctgatgttattctcccaggag

SEQ ID NO: 84433 - DNA, 100 bp, Homo sapiens
cctagcttcactcaatgttagtaaggtgtcaccacagtgatggcagtggaggacagcacgctgcaagtagtggtacgggtgcggccccccacccctcggg

SEQ ID NO: 84434 - DNA, 101 bp, Homo sapiens
tatcgacatacacactgggtacgctgtgccaatgtggcccagagttgctcagaattggagcagagcctgagacgtatctgcagatcctgtcatcagctggc

SEQ ID NO: 84435 - DNA, 100 bp, Homo sapiens
cggcagtatccttggggcactgtgcaggatgataccatcttccaaaatcctatggtacaagaagctatacgaatggggttcagtttcaaggacattaaga

SEQ ID NO: 84436 - DNA, 80 bp, Homo sapiens
ccgatccagcctgcggagcctgtggggcaggattctgagaaacgaacccctcttcatgtggccgcatttctgggagatgc

SEQ ID NO: 84437 - DNA, 82 bp, Homo sapiens
agcagttctcgctgaccgcgctagctgggaccttgctgcaagaaactgcctggtaggtgaaaataatgttctgaaaatcagt

SEQ ID NO: 84438 - DNA, 83 bp, Homo sapiens
gcagggagcaggcacagccccgcaggatcccaagccctgcagactaccgcagccagcgaaaagcacttggttctgcttcgaga

SEQ ID NO: 84439 - DNA, 83 bp, Homo sapiens
agaagaaaacaaaggtagaacatggaggatcgtcaggctctaaacaaaattctggtattgggagagttgctgctacatcttta

SEQ ID NO: 84440 - DNA, 75 bp, Homo sapiens
cgtggagctggagcagatcccccagccggctgagacagatgaaggatttgggggcagagcacttggcaggtcatg

SEQ ID NO: 84441 - DNA, 100 bp, Homo sapiens
ctctggataaggaccagtacctgcccaggaaactggaccagtttggacaacatataaaatcagatgtacacttgaatttttatgtttattatggtcctga

SEQ ID NO: 84442 - DNA, 90 bp, Homo sapiens
cgaaagcgttggagaggtgttaccggaacggcggcgacaagggtgttcccgaactagagtgggttttcatactctgcacaccatcctcgg

SEQ ID NO: 84443 - DNA, 136 bp, Homo sapiens
gttttcttatttagccggagtgagaagcaagaaggccctggacacagcaatatctctgggctttcacaggcattatccaattggtttgctatttgatcttcttgcatcaagttcagctcttccttggaacatcaca

SEQ ID NO: 84444 - DNA, 51 bp, Homo sapiens
ggacaagcaggagctgggagccccaggctgaagaaaatcttggtatggtga

SEQ ID NO: 84445 - DNA, 75 bp, Homo sapiens
ggctttcaggagtcacctcaaacatacaacggctaaggtatggacctgtctgccaatcaggacgaggagaccgac

SEQ ID NO: 84446 - DNA, 100 bp, Homo sapiens
cggcaaccattgcctgcggaaagatcgtgtcgcacacgcacctcggagtgggcttctttcctgtcgttgttggctttattagaagagtgccagtccttgg

SEQ ID NO: 84447 - DNA, 75 bp, Homo sapiens
ttggttgactgtaatccctgcactttgtccaatgctgaaaggtaaaatccagtacaaggaatatatcattgaagg

SEQ ID NO: 84448 - DNA, 100 bp, Homo sapiens
agaaatgacactggttttatcagaaaagtgcaaggaggagtgttctctccctacagctaaacccacagttcagccctccccttctacaacttccaagaca

SEQ ID NO: 84449 - DNA, 83 bp, Homo sapiens
cgacaagccgctggcagccgcggatctcaccgccgctcaggtttgctggcctagacctgaactcttcagataatcagagtgga

SEQ ID NO: 84450 - DNA, 90 bp, Homo sapiens
cagatgtggtggaatatgccaaggaaaaactggagagcttcatcaaaaatagtgatagctttgataagggggacacagcgattgccacgc

SEQ ID NO: 84451 - DNA, 99 bp, Homo sapiens
caagacccgagtattttagaattactgcctccaacaggatgtattcactctgccggaggaactcaacagaggcaattattatcccgactgcaaatcgac

SEQ ID NO: 84452 - DNA, 100 bp, Homo sapiens
ccgctcgattggttctactgtgggtctggactgatctccatgtcctgttgtggggcttttacagcctttggagccccccaagatgaacccagtggtggag

SEQ ID NO: 84453 - DNA, 75 bp, Homo sapiens
gtcgcggagccgcgcagccctcggagcacgtgtcttgggacaaggtgcgcattcctggtgtgctgcagcgattgg

SEQ ID NO: 84454 - DNA, 76 bp, Homo sapiens
ccatcacacaaaagcacacaaagacctcctcctccacaggggagacagagagaaatggtcaatgcatggtttgctg

SEQ ID NO: 84455 - DNA, 75 bp, Homo sapiens
ccagccagagagggagtcatttcattggcgtttgagtcagcaaaggtgattatgggagtgctattgagacactgg

SEQ ID NO: 84456 - DNA, 100 bp, Homo sapiens
cagcgctctggggctcgccttgtatctcaacaccctgagtgcggatttctgctatgatgacaggttttgattcccaccatggccatcacccagtttcggt

SEQ ID NO: 84457 - DNA, 98 bp, Homo sapiens
gccggagtgagaagcaagaaggccctggacacagcaatatctctgggctttcacagacctgcaatgcttcttttgccacccgagaccgtctgcgctcc

SEQ ID NO: 84458 - DNA, 82 bp, Homo sapiens
gtctgcactacacgaggagagttggttttcgctctagaggacaaaatcccagtccttggcacaaactcaggaaatggaagcc

SEQ ID NO: 84459 - DNA, 100 bp, Homo sapiens
tgggggacaggaggctgcggggcctcagatgggatgtaatgaccgaatttccccaagaaagaagctccatcagtttggtcagcctggctggatctctgta

SEQ ID NO: 84460 - DNA, 90 bp, Homo sapiens
aaagcctcattaattgaatatataaagcaggtgcacctaggacactttgccaccatcaccttgaccttcatcgacaagaacggagagact

SEQ ID NO: 84461 - DNA, 75 bp, Homo sapiens
cttatatcagattctgcatatgttgcacagggcagccattctacaaaagtggaagctgtggtcagaactctgatg

SEQ ID NO: 84462 - DNA, 100 bp, Homo sapiens
ctcagctttaccatccctggaggagacctggcagcaggtatgcagtgccattcagaatcaggatttcactgtgatcgaagactactgcactggcctcaaa

SEQ ID NO: 84463 - DNA, 100 bp, Homo sapiens
gactacaaggcgcccacggcctccagcttcaccacccgcacggcgcagtgccggaacactgtggcggccatcgaggaggacttcattgacttaactagag

SEQ ID NO: 84464 - DNA, 82 bp, Homo sapiens
cccgcgtgctaatggtggaaacccacaacgactgtgccctgtccacggtgcctcctgcatgtcctgctgccctgagctgtcc

SEQ ID NO: 84465 - DNA, 83 bp, Homo sapiens
gcgcatgatgctggaggagcaggtgaaagaaaatggcccgaaccaagcagactgctcgtaagtccaccggtgggaaagccccc

SEQ ID NO: 84466 - DNA, 82 bp, Homo sapiens
cttgccctcatcctggttctggaatcctcagttcaagaggcaggagaggcaggtccgagaccgcggggtgacccggtccaag

SEQ ID NO: 84467 - DNA, 100 bp, Homo sapiens
ctggactgtgggctggtgtgtggaactgcttcgcctcaacagcatcaagaagctgtccaccatcgccttggcccttggggttgaaaggacccgaagtgag

SEQ ID NO: 84468 - DNA, 100 bp, Homo sapiens
ttttgtggggctggctattgggactcttttttcaaatgcaattttccaacttattccagaggtcaccatggggacagccgccctgggtcccgtctgggca

SEQ ID NO: 84469 - DNA, 100 bp, Homo sapiens
ggccggcggattcgggaactgactgctgtagttcagaagaggtttggctttccagagggcagtgtagaggttcgagaaatggctgctactaccttaagcg

SEQ ID NO: 84470 - DNA, 100 bp, Homo sapiens
cgactcagggtcgcccgcccctcctcaccgaggaaggccggtccttttggtgtgaaccatggggtggaacttcactcagatgtgatagagtatgcaaagc

SEQ ID NO: 84471 - DNA, 74 bp, Homo sapiens
agaacacagcagggcggaggaaagtgcaggaagaagaaattgtcgagacgaataacatgaggtcatatagaatc

SEQ ID NO: 84472 - DNA, 100 bp, Homo sapiens
gcgaactgcgcagccagaaatccaaggccaagagcaaggcccggcgtgaggaggaggaggaggggaaggatcgaatcatatttgtaaccaaagaagatca

SEQ ID NO: 84473 - DNA, 100 bp, Homo sapiens
aactttgagctggcagaatacatcaagaaccacaaggaaacagacattgggtaagcttgatgattaccaggaacgaatgaacaaaggggaaaggcttaat

SEQ ID NO: 84474 - DNA, 75 bp, Homo sapiens
cgctggtagcagaagtcagagcacagctgagggacatctgcttaaagtctcttcaagaaaatgaggaggaggaga

SEQ ID NO: 84475 - DNA, 108 bp, Homo sapiens
aaaactccaggctcagagaggttaaggaactcgtcctacgtaacacagccagttagggagtgcatccgccccaacccttttccccctcgtctcctgtgagaattcccc

SEQ ID NO: 84476 - DNA, 78 bp, Homo sapiens
attcttcatgagcatagacagtctgtgtaagaagtactccagggaaacctcccaggctccttcgagagcagtggatcc

SEQ ID NO: 84477 - DNA, 50 bp, Homo sapiens
gggagttcaagaagaacactccagagagatctcggctcaccaaattccac

SEQ ID NO: 84478 - DNA, 99 bp, Homo sapiens
catgggaaggaggccgagccgggatctcaggtcctcgggggcggcggccacgccaaggacggacaaggagccccaaactgtctcacagtcctcaaccac

SEQ ID NO: 84479 - DNA, 83 bp, Homo sapiens
cgcagagcattggcaggaggggcaaggtggaacagaacacaccacagccatcagcactggaatgcaaagaccagaacaaacag

SEQ ID NO: 84480 - DNA, 74 bp, Homo sapiens
catccttccttttctcggggctcccgtgggtcttctattactccacgagcatcttcgagaaggcgggggtgcag

SEQ ID NO: 84481 - DNA, 82 bp, Homo sapiens
tccatgcggaagatcgtcgccacctggatgctggaggggcctagaagacagttcccaggaggccgaggacgaggcatcgggg

SEQ ID NO: 84482 - DNA, 140 bp, Homo sapiens
ctcggttctccatacccgtgacctggggatcgctacggaccttaaaatacccgcaacagccccttcgtcccaagtgtggatgaggtcaccattgtcaacattttgaccaaccgcagcaatgcacagagacaggatattgc

SEQ ID NO: 84483 - DNA, 96 bp, Homo sapiens
tcacctcccactgcaccaaacgatcagaccccaacaccaacaagattcttgaaaaactgtgaagaagtgggtttgtttaatgagttggcgagtcca

SEQ ID NO: 84484 - DNA, 101 bp, Homo sapiens
tgcagccacgcgggcgagcggctgtgtggatgtcggcgaagccgcgggcgagatccagacatttaatgtggatgcaccatgccagaccgtggaagatttaa

SEQ ID NO: 84485 - DNA, 50 bp, Homo sapiens
ctacctctggccccgagatcagaatgccgatgccttcaattaagttgcag

SEQ ID NO: 84486 - DNA, 95 bp, Homo sapiens
tgcacacggcactcgagtgtgagaacccctgaacagtgcccaagtgttgtctctttgttgtcagagagttacaaccctcatgtgcgctacggagc

SEQ ID NO: 84487 - DNA, 100 bp, Homo sapiens
gcagctggagatgtccgagcccaaggcaattgatcccaagttgtcgacgaccgacagggtggtgaaagggaagagcatggaggaaatcaagaaggtgctg

SEQ ID NO: 84488 - DNA, 100 bp, Homo sapiens
tggacttcgcctttcccgagccctggaggtggggagaaaagagattctagactttggctacccacagaattccgagacaggcgcgctgaaaaccttcatc

SEQ ID NO: 84489 - DNA, 50 bp, Homo sapiens
atgaatcagactcttgaaggtcatagtgcttactgcagagtgggtctggg

SEQ ID NO: 84490 - DNA, 100 bp, Homo sapiens
tgacattcgctctgacacatcgttcatgttccagcgagtgctggtgtctctgtcagctgcagatggctcggtgagctgcaagaggacagactgtgtggac

SEQ ID NO: 84491 - DNA, 50 bp, Homo sapiens
gagctgaacattactcttccagaagagatgacaagagcacctcaaaggca

SEQ ID NO: 84492 - DNA, 100 bp, Homo sapiens
ctcggagcgcatgcagctgctgctgaccctggccttcaaccccgagccgctggtgctacagattttaccaaatgttgcaagaactctggagttcttatgg

SEQ ID NO: 84493 - DNA, 100 bp, Homo sapiens
cttcaacacccaggagaagagcgccaggcgccgcggggggtgtttgtgaaccgaagtttagcaatggaaaagataaagtgttttggttttgatatggatt

SEQ ID NO: 84494 - DNA, 97 bp, Homo sapiens
agagccgcgcccgccgcgcggagcgccccttcgcgtcccctgcaccatgagctggggcaccgagctctggtgaagatagtgatccggggagacagga

SEQ ID NO: 84495 - DNA, 88 bp, Homo sapiens
cgactccaaggaaacgcggctgaccctgatggaggaagtgctcctgctgggcctcaaggaccgcgagagacaaggtcttgctctgtca

SEQ ID NO: 84496 - DNA, 114 bp, Homo sapiens
agaactggattccaaagttgaagttttgacctataaaaaggcagatactgatctgaaaatgtcactgaaattcacaaatgcaaaacggattgaaggacttgatagtaatgtgtg

SEQ ID NO: 84497 - DNA, 75 bp, Homo sapiens
tggtgaagttgaagaagtactctcatggagacaagagccctgcctggctcccagcctggagcagcaagagcagga

SEQ ID NO: 84498 - DNA, 101 bp, Homo sapiens
cagaagatgagaccgcaattcgagaatcaaagggccgggagcgatgactcagattgatggacaacttttcttaattaagcaccttttgatacttcgtgaac

SEQ ID NO: 84499 - DNA, 98 bp, Homo sapiens
cgaaaacaggcactggaccacttcaatgcagatgggtctgaggtcagcctagcaacaaagaagatgtggatgatcttgtgagtcagctaagacagaca

SEQ ID NO: 84500 - DNA, 100 bp, Homo sapiens
cgcatccagaggagatatttccgcttcttcactgatgagagaatcttcatgctcttgaggttgactatagtcaatggggccaatggagccaagtgtatgg

SEQ ID NO: 84501 - DNA, 83 bp, Homo sapiens
tcactcctggtgaccagcattcaaggtggaggagaacagaaacagcttgttttttttcttattgtttttgagacttttcccca

SEQ ID NO: 84502 - DNA, 99 bp, Homo sapiens
tcattctttggagcgggtgtgtcattgtttgggaaaatggctaggacatcccgacaagagcccgaacccagccctcaccttctgcgtaaagacccatga

SEQ ID NO: 84503 - DNA, 88 bp, Homo sapiens
gattttggtagagaagaatgaacattgtattgagaacaatatagatttgcagctgcagaaccttggcctgaaaatgctacattatatc

SEQ ID NO: 84504 - DNA, 100 bp, Homo sapiens
ttttgatcaccattggctgggaaggaaaaacagaatcagctgttccctgcgaaagccggagcggttgcagggcacacattactcggtgcagtcggacatc

SEQ ID NO: 84505 - DNA, 99 bp, Homo sapiens
ggagactcatttcctatctagcctgtattcccagtgaggaggacatgtaccgtgctgcagatgaaatagaaaaggagaaagaattgcttatacatgaaa

SEQ ID NO: 84506 - DNA, 85 bp, Homo sapiens
cgaagtgttcaccaaaccccagctgtggccctgaggcccagctgtgggtcctgaaggagccttggtcatcatttgatatatacac

SEQ ID NO: 84507 - DNA, 100 bp, Homo sapiens
gatttccaagagatgttgcccaggctctatcttttgaggaccaagatgggccaaagagaaccaaagattcagcattctcaactgaactacaacaagcttt

SEQ ID NO: 84508 - DNA, 50 bp, Homo sapiens
gagcttatgcacttttgtacgagtgactcagattgatggacaacttttct

SEQ ID NO: 84509 - DNA, 100 bp, Homo sapiens
tggacggtgtggggcggtcccggccccgcaggtggccctcatgacactgacgctcttcccggtccggctcctggttgccgctgccatgatgctgctggcc

SEQ ID NO: 84510 - DNA, 98 bp, Homo sapiens
tcaagatacgccaatgcgctcaaaggcaaaaaggtctcagaccagtatccttcaggggttctcttactctgatttgcggaaatttggcatcgtcttgt

SEQ ID NO: 84511 - DNA, 136 bp, Homo sapiens
ccatctgggagccttcctgatccgggagagtgagagctccccaggggagttctctgtgtctgtgaatcaccttcaggccattcagaggaggaaagagaggggaatatgaagtcagccaagccccaagtgaaccaca

SEQ ID NO: 84512 - DNA, 90 bp, Homo sapiens
gaataaggagaaggataagtcgaaggggaaggcgcctgaagaggacgaagcgtctgcttctgcgctttgcctgggagaggccctggtggc

SEQ ID NO: 84513 - DNA, 89 bp, Homo sapiens
ctcagccagtctgagtcaggtttctccagggaaagaaacagatttggatccttatgactatgaaatgattgaagttgtcttgaaagtta

SEQ ID NO: 84514 - DNA, 90 bp, Homo sapiens
aaagagatacagggcagaggaaaatgcaagaagactgatggagcaggcttgcaatattaaagtgtgtgcagtggcctcagggatccggaa

SEQ ID NO: 84515 - DNA, 82 bp, Homo sapiens
gtttaatatctgattgggacaacattcagacccatttccagtcatgacctctacggcagacacatgcaggccaacccagaac

SEQ ID NO: 84516 - DNA, 96 bp, Homo sapiens
ctgaaaagaaaagtaagaacaaacaaagaaacactggagatattcagaaggcaattgaaggaacagactaaaaatcgtgtcctggaaggaaactac

SEQ ID NO: 84517 - DNA, 75 bp, Homo sapiens
acaagttcacgaaagcctacaaaagtgtggagaggttccttcaggaggatcagattcatgatgttgctatcaaaa

SEQ ID NO: 84518 - DNA, 83 bp, Homo sapiens
cggatcaggatcggaagcctgcgtaactttctcccttgatccgggagtctttccactgggttgtgaccgagattcccgacgag

SEQ ID NO: 84519 - DNA, 80 bp, Homo sapiens
gacctggctgtcctgcgggagcctgtgcctgctgggattctgctgaagtgatccagtctcgagtgaacgaccaggagggc

SEQ ID NO: 84520 - DNA, 100 bp, Homo sapiens
gagcattttggaagaggaaccacaagaaaatcaaaagaaacttttgcccttatcagtaacacctgagtatcaccttttgccatgatagcatttctttcat

SEQ ID NO: 84521 - DNA, 100 bp, Homo sapiens
gccccgtgtcctgcaggtattgggagatccacagctaagacaccgggacctcctggaagccaaaaatggcaccgcatgcgtggggagaccaccctgtgga

SEQ ID NO: 84522 - DNA, 90 bp, Homo sapiens
agctcccgtagggagccgtgggcgctcggtgcccgggccgggcaggatgaccgagtgggagacagcagcaccagcggtggcagagacccc

SEQ ID NO: 84523 - DNA, 98 bp, Homo sapiens
ccggttccgcctacaggccagcaagataagggagctgctggctgacaagaacttgaaggtgcacattcttgatactgaaagttttgaaactacatttg

SEQ ID NO: 84524 - DNA, 100 bp, Homo sapiens
ggcatgaggaagctgggggcatcttctccccagcggagctgcccaagccctccatctccagcaacaactccaaacccgtggaggacaaggatgctgtggc

SEQ ID NO: 84525 - DNA, 87 bp, Homo sapiens
cgcggccgcggcgccatattgcggccctcagcggccgcgaccgagtcatggctgagacctacgctgctacaggagctgagagaccct

SEQ ID NO: 84526 - DNA, 100 bp, Homo sapiens
tgctttattactcaattatcttcacgatttcctaaagaaaacttgaacttggcactgaactctgcttctgccattgggtgtcatgttgtgaacattggtg

SEQ ID NO: 84527 - DNA, 49 bp, Homo sapiens
cctgtataatgaatccagaagttgtaattctgcttggtcagaatcgtga

SEQ ID NO: 84528 - DNA, 101 bp, Homo sapiens
gccgccgccgccccagcggggaacagacccagatgatgtggtaccagttggccaaagaagagcctggtgttggtgcatgtgctttggactagcatttatgc

SEQ ID NO: 84529 - DNA, 75 bp, Homo sapiens
gttttgcgcaccctgccgggagttgtagtcctggacccgaaggtacaaagtagatttcatagaagagaaggcatc

SEQ ID NO: 84530 - DNA, 100 bp, Homo sapiens
gtctgccaggagctgcggccccgtccggcccgggctggtccccttcccctgagcccatctacaatagcgaggggaagcggcttaacacccgagagttccg

SEQ ID NO: 84531 - DNA, 98 bp, Homo sapiens
accgacttaagttcggattcggcttccaccgcttcttagtgattggctgcaatgccgtcagctgggcccctgctgttgtacctggaagcctcatagac

SEQ ID NO: 84532 - DNA, 51 bp, Homo sapiens
ggtcccccttcctggtggctgtgaagctggatctaccatgaaagacttgtg

SEQ ID NO: 84533 - DNA, 89 bp, Homo sapiens
gaagctggtcctctggcttctgtccctgctcagtcggccaagaagccctgcccagcttcgagagctgtgcccaggagtgaacaaccagc

SEQ ID NO: 84534 - DNA, 100 bp, Homo sapiens
tcaagacgctgcagcgggactgcctggtgaccagaagtcagcagcttcccagaagccccgaagccggggcatcctccactcactcttctgctgtgtctgc

SEQ ID NO: 84535 - DNA, 100 bp, Homo sapiens
tcactacagcgtctgcctaccgtgttcaagcgatcctcccacctcagcctgttgagcaaccgggaccccaggtgaccactgactgggaccttcagaaggg

SEQ ID NO: 84536 - DNA, 51 bp, Homo sapiens
tcttgcgtctcctttctactctgcaagataagtttataccatggatagcac

SEQ ID NO: 84537 - DNA, 100 bp, Homo sapiens
gtggaggccatcaggggccttgataacacagagtttcaagctgggagtgtccactcgccttccaccagcatggcaacgtcttcacagtaccgccagctgc

SEQ ID NO: 84538 - DNA, 100 bp, Homo sapiens
ggttgggattcgtgtctggctctggaattgctactgctgcctctgtcactcctggtgaccagcattcaaggctgtgtttgatgtggacaagaagaaaggg

SEQ ID NO: 84539 - DNA, 100 bp, Homo sapiens
gtcgtacgggacgtgtaggaaaccttgatctctatcccagactgtatccagagctctctcaatacatggggctgagtttaaatgaagaagaaatacgtgc

SEQ ID NO: 84540 - DNA, 100 bp, Homo sapiens
gctgggattataggcgtgagccaccgtgcctggctgaagatgaggtggaaagtgagaaatggtacctgtctacagacttcccttcaacatccatcaagac

SEQ ID NO: 84541 - DNA, 90 bp, Homo sapiens
ttggcatggattttttcttccagagaaaatatcttcaactctcaaagtagaaccctgactatagtgataaaaacctgtgctacacatcca

SEQ ID NO: 84542 - DNA, 90 bp, Homo sapiens
agaagctacgctggtattgccagatgtgccagaagcagtgccgggacgagtttccaggaatatggatctactggaacagcccatgctgat

SEQ ID NO: 84543 - DNA, 51 bp, Homo sapiens
ccaccatgctcgccctggaggctgcacaggtcgcggcgagcgcgcctatga

SEQ ID NO: 84544 - DNA, 100 bp, Homo sapiens
ctgatttctctgccacctatcttcgctgtcaactacttctcatcaagggaacactgactatgccaaatggagactacattgaaggttattttagtggaga

SEQ ID NO: 84545 - DNA, 101 bp, Homo sapiens
agcaaggaagaaattgttcagttcttctcagatcccaccaaatattttggttgtgagctgggagcacagacccagtttgatgttaagaatgaccgttacat

SEQ ID NO: 84546 - DNA, 83 bp, Homo sapiens
tgaagtgaacactgcagggccatttggaaaagaagcccatctgtgtccagagatcagaatagaagatacgaccaaagggaaga

SEQ ID NO: 84547 - DNA, 90 bp, Homo sapiens
aagaggtgctactgagcaatatcaagcccattcaaacagaggcatggaacaaagatacttatgagcctttctgcaaggtccctgtgatca

SEQ ID NO: 84548 - DNA, 87 bp, Homo sapiens
ctgtttctttggggacaagcactttatatcatcgcaaaactcctggaatagctctccagacccccagctggccatgtggtgagttca

SEQ ID NO: 84549 - DNA, 83 bp, Homo sapiens
gtgggaacatgacgcaggtgcaggtgtctcttctcgccctggcggggaaggttcattttccagacactgaaagagcagaatgg

SEQ ID NO: 84550 - DNA, 100 bp, Homo sapiens
cggagaaccattaatcatctctaaggcattggttcctgtcaccattgaagtagaggtgccctttgaccttcaccgttacgttattgggcagaaaggaagt

SEQ ID NO: 84551 - DNA, 100 bp, Homo sapiens
gaacgaagattcgaaaagccacttgaagaaaagggtgaaggaggcgaattttcagttgataggaggaagaagccagacgacagtcaggagctcagtatgg

SEQ ID NO: 84552 - DNA, 76 bp, Homo sapiens
gattatatttttcctggtatgctctactttgacacatgtggctttctcagaagctgctagtctgtctccaaaaaaa

SEQ ID NO: 84553 - DNA, 82 bp, Homo sapiens
tgcctacagaaccgtcccaaaatatggcaaagaaacctattctgagtgcccagcagaggagcacgcagctgaacaagaagag

SEQ ID NO: 84554 - DNA, 100 bp, Homo sapiens
atcagcagacagttccaggaagtgaacaagtccaagaggaccttctgattagtccacagtcttcctctataggcccgatgagagaaagggaaagttaagg

SEQ ID NO: 84555 - DNA, 99 bp, Homo sapiens
tgggctttaccatctttgtggctgtgcttgccaggcctggctccagtgtcatggagaaactccagctgggcccagagattctgcagcgggaaaatccaa

SEQ ID NO: 84556 - DNA, 100 bp, Homo sapiens
caaggagcctcagagagggatgggttacatgcccaagaggggacttgatgttaacaaatgtgagattgccaggttgaagctccattcataccaaagttta

SEQ ID NO: 84557 - DNA, 96 bp, Homo sapiens
gaacaattggaggagacctggtggaaaaggttgatctcatagacaagtttgtacatccaaacaactccgatccaatatccgagaaattgagaaact

SEQ ID NO: 84558 - DNA, 74 bp, Homo sapiens
atctcgatgttgctgacaggaccaaatttgataagccacgatatttgctgaagtttgaacaaatttatctttcc

SEQ ID NO: 84559 - DNA, 90 bp, Homo sapiens
gtacctgttaccactttcaaaagatagtggccaaagcctccaagaacctcatgtccacgcaaagcttggggattgtatttggacctaccc

SEQ ID NO: 84560 - DNA, 100 bp, Homo sapiens
ccagcgctttggatgccgagagcgagtatctggatcagggagcttccaaggcatttgatacctttttgatgggaagaagggctctgaggagctccaagat

SEQ ID NO: 84561 - DNA, 100 bp, Homo sapiens
ccgccagtagccgcagcaccgcagccttgggcctcgcgccggctatggccgtgccctggggctgagccctcaggtggatggtctgaagcatttgctggag

SEQ ID NO: 84562 - DNA, 106 bp, Homo sapiens
ggactgggcacagcatgagatccaaaggcagggcaaggaaactggccacaaggccaattcctgtccccccagcagcatggcatcgtgtgctgaaccctctgagccc

SEQ ID NO: 84563 - DNA, 50 bp, Homo sapiens
ccagcctgcggagcctgtggggcaggtgtaaagatttctctctgtgttac

SEQ ID NO: 84564 - DNA, 76 bp, Homo sapiens
tgagaaaggagctgtttccagtcatgaggctgtggtggatctttctgatgtgtatgtactgaacctccaaacccca

SEQ ID NO: 84565 - DNA, 100 bp, Homo sapiens
gtttgaggatgacaaccgtacccggctgtaccggcagatcctcaggggcaagtacagttactctggggagtacctggagtagaacagaaaaattattatg

SEQ ID NO: 84566 - DNA, 74 bp, Homo sapiens
gaatgcaagaggcgtttctataagaattgtctctggatggtcgtcagatccgtgtggatcatgcaggcaagtct

SEQ ID NO: 84567 - DNA, 50 bp, Homo sapiens
gacacaatatctatattctggcccatcagcctttctgagaaaagtctaca

SEQ ID NO: 84568 - DNA, 78 bp, Homo sapiens
acaaaagcgttaagattgaggaacgggaaggcatcactgtctattccatattcagaatggacagtttagaagaacctc

SEQ ID NO: 84569 - DNA, 100 bp, Homo sapiens
ttagtaaggctggtggttttcatggaatatatgctggcgttccttctgctgctattggatcctttcctaatggcagcacaacaagattcgcagcgtggag

SEQ ID NO: 84570 - DNA, 83 bp, Homo sapiens
attccaagtaactcttatttgattggtttttcagcagcagatgctgtaacaggactgaaattggtagaagagggagtacccaa

SEQ ID NO: 84571 - DNA, 78 bp, Homo sapiens
cctcttcccggccgccatcacatctaggaagagaactacgatgacccgcacaaaacccctgcctccccagttgtccac

SEQ ID NO: 84572 - DNA, 89 bp, Homo sapiens
atgcgctgcgggcagccgtggtggaccggaaagacatccacaagcgctgggccctcgtgtggctggcctgcctactctttgccgctgcg

SEQ ID NO: 84573 - DNA, 98 bp, Homo sapiens
ctcagcatggtcagtgccgtttaacctttattgtggtggagtccaccccgctgtgggtgagaactctgtctcagtcgacgggaagtgcagtgactcca

SEQ ID NO: 84574 - DNA, 100 bp, Homo sapiens
ctaactcgagtcctgccgcctcccgggagtgccgtgcgccgcagcccgggcccaggccccggcagcgcctgggacaaggctcggggcccccagttcccgc

SEQ ID NO: 84575 - DNA, 97 bp, Homo sapiens
cgcgagccccgcactctctcgatgagtcggagaagtcccgtgagtgtgtgtgtgtcagtatgggaatcctttaaataaatatatcagacattatgaa

SEQ ID NO: 84576 - DNA, 97 bp, Homo sapiens
gctgtgcagccgcgaggaggcgcgggaggtgttcgagaacgaccccgagacgtcccggcccaggcccctgagctggagggatggaaaactcctctgc

SEQ ID NO: 84577 - DNA, 96 bp, Homo sapiens
aaagtgaagtacatcttgcaattcctaatgtgatgccatggacaatattaccaggcagaaccaattctacgatacccaagtcatcaaacaagaaaa

SEQ ID NO: 84578 - DNA, 50 bp, Homo sapiens
ccttaaccgagatcaacctgtctggaacccggtttggggccatgctggac

SEQ ID NO: 84579 - DNA, 100 bp, Homo sapiens
gtttcaaggttaattcgaaagtcttgtggaagatctggaagaaacaggagagaaatatgagttggagggaaggaaaagtggttctactaatgttccaaaa

SEQ ID NO: 84580 - DNA, 74 bp, Homo sapiens
agcctcggtcccggcccccatcctccccgccccatcggttgttgtctgggcggagactctccaacatgtgcctt

SEQ ID NO: 84581 - DNA, 101 bp, Homo sapiens
cgcaggcccaaccgccgccagcaccatggccagcaccatttccggtcttgagtcaccacgtccgaatataattcttgggttagtaatctgccaaaaaatca

SEQ ID NO: 84582 - DNA, 82 bp, Homo sapiens
cgcggacctcgccccgggacagcgaggagctgagggaccctgtcctgaacgaggctgtgggggccctgatgtaccacaccat

SEQ ID NO: 84583 - DNA, 85 bp, Homo sapiens
gactgcagcctcgtgcggacgctcgtgcacagatacgtctaccccgagccccggagcgagagcgagtgcctgagcaacatccgcg

SEQ ID NO: 84584 - DNA, 76 bp, Homo sapiens
cagatgctgccagggtccctgaagagggaagacacgcggaaacagggagaaactctggaaaccttgacaatggcaa

SEQ ID NO: 84585 - DNA, 76 bp, Homo sapiens
tgatgttggagaactatagaaacctggtatcactgggttgctccttgagggcaggacagttcttatggctttatcc

SEQ ID NO: 84586 - DNA, 127 bp, Homo sapiens
gaatgaaggaatcctctccatctggttcgaagtctcagcggtattctggtgcttatggtgcctcaggtcgtcaaagtcctacattttagctttcagtgctgaacttccttctcccttaaattattat

SEQ ID NO: 84587 - DNA, 76 bp, Homo sapiens
acttgaagcatcagatcttgcctaaagagcagtggaccaaatatgaagagaaaagttgccagacggccagcattgc

SEQ ID NO: 84588 - DNA, 75 bp, Homo sapiens
tgggtccaggccgtggtcagccgcttcgacgagcagagtgcttgtgatttcacgtatttttgctgaactcgtaaa

SEQ ID NO: 84589 - DNA, 100 bp, Homo sapiens
gcgggtccagcttcaggagtactggcggaggggctggacgttccacgccaaagagttgcatgctgagaatttgaaaaatgaagatgatgtagacactgga

SEQ ID NO: 84590 - DNA, 75 bp, Homo sapiens
catggcagatggcaacagaggatgtcaacaattttttggagtgttcagactgcatcacagtgcttccgatacaag

SEQ ID NO: 84591 - DNA, 100 bp, Homo sapiens
cttgaatctgcagaaagcagctccgagccccagaccagctctcaggatgactttcgagaattagaactgcagcgtcagcgtgacttgcataagatcaagc

SEQ ID NO: 84592 - DNA, 98 bp, Homo sapiens
cgggacccggttccccggcccacagtgggggtgtgcaaacccgagagaactggcttgcattgaaaggctctagttacagtggacttcttgaacgacat

SEQ ID NO: 84593 - DNA, 51 bp, Homo sapiens
tccttcgtacccacagtgcttcatgagaggctccataaaaatacagactca

SEQ ID NO: 84594 - DNA, 100 bp, Homo sapiens
gaagtggagcaccgatgatgtgcagatcaatgacatttccctgcagagacgagttgtactgctgtcacaggaaatggacgctggattacaagcatggcag

SEQ ID NO: 84595 - DNA, 88 bp, Homo sapiens
ctctaacctaccagctgccactttccaggaagcagagtcttttgtgtagaggaagaggacagtgaaagcagtcttcaaaagagaagaa

SEQ ID NO: 84596 - DNA, 88 bp, Homo sapiens
acagactgctccctactacgctgccctgggtgctgtaggagcccatctgactcaccagctttcaccaacaatcaccagtggtttacac

SEQ ID NO: 84597 - DNA, 128 bp, Homo sapiens
gggaagatgaacaacggcggcaaagccgagaaggagaacaccccgagcgaggccaaccttcaggaggaggagcttcccgtgcggcctgcgacccatggaaggagagtggtgacatctcggacagcggc

SEQ ID NO: 84598 - DNA, 90 bp, Homo sapiens
cccaaaccatgttccctgtgaaggtgaaagtggagaaatcaggttatcaatactctggctgaccatcatcatcgtgggactgactttggt

SEQ ID NO: 84599 - DNA, 50 bp, Homo sapiens
tcccaggcactgagtgactgcatacttttctctgcaggtggatattgttc

SEQ ID NO: 84600 - DNA, 74 bp, Homo sapiens
tggtttgtaaagatgaaaatgggcagagaaagcaaccaaggaggaacccgttttcactagacaagacagcaatc

SEQ ID NO: 84601 - DNA, 95 bp, Homo sapiens
atgataaagcatgccgaaatggagaggacatctgtcttagagaaacaaattttgtggaagtataatactttgtcattatgagatgtcgtctctcg

SEQ ID NO: 84602 - DNA, 83 bp, Homo sapiens
gatgaggaaccaagacccagggaagatggtttttagaacttcagccataaaaatgggcagaattttccttgatcatatcggtg

SEQ ID NO: 84603 - DNA, 97 bp, Homo sapiens
gcacgcccccacatctgctcaaggagatcattctggtggatgacaacagcagtaacggtaggaatgaattgatagccagatacatcaaactcaggac

SEQ ID NO: 84604 - DNA, 75 bp, Homo sapiens
attgactgtatttgggctgcagcacagtccttgcctgcattaattgaacaaggagagggattttcccaagttctc

SEQ ID NO: 84605 - DNA, 80 bp, Homo sapiens
agctggggttggacgctgccagtttgcacagcagcaggtgctggagagtcatgcctgtgagccctgggcacctcctgatg

SEQ ID NO: 84606 - DNA, 100 bp, Homo sapiens
cccttcgccacgcctgaggagttctttctcaagtggccagcagccggcttcgagctcccagcctttgatccggagtctgctacaccatttttgatttggg

SEQ ID NO: 84607 - DNA, 75 bp, Homo sapiens
gagcagggtctgcacgaaataaagctcctgggcaaggggacgtctgcagctgactccagaaacatgacaaggagg

SEQ ID NO: 84608 - DNA, 98 bp, Homo sapiens
cggcggcggcggcggcggcggcggcgcaggtgctggagaatctggtaaaagcaccattgtgaagcagatgaggatcctgcatgttaatgggtttaatg

SEQ ID NO: 84609 - DNA, 90 bp, Homo sapiens
agaagctgcagaagaagccctggagaatggaccaaaaggaccatctgaatctgataatttttctcataacctgagaggagtaatcccacg

SEQ ID NO: 84610 - DNA, 100 bp, Homo sapiens
tcgaactaaacaaattcatcccagaaatctaagaggcttgttagcagtggcacaagatcttacagaggatgaagaaacagtagaagattccataattgag

SEQ ID NO: 84611 - DNA, 101 bp, Homo sapiens
ctgctggcaagaatctccagtttttgacgggggccattcagcaactgggtgggggctggagcagcttcaccactggagccagccggtttgcctcggcagcc

SEQ ID NO: 84612 - DNA, 75 bp, Homo sapiens
cgtggggctcggccgcgcggactgaaggagactgaaggagcggtggtgccccccccgggcacggggccatgtaca

SEQ ID NO: 84613 - DNA, 100 bp, Homo sapiens
gttaatgccctgctgcaggcccaccctttcctggatgaggatggctgtggcttcatcaatgaactgagccatgttcaaatccctgttatgttgatgccag

SEQ ID NO: 84614 - DNA, 80 bp, Homo sapiens
acaatgggaacatgtacacctcatccctgtacgggtgcctggcctcgcttctgtcccacacccagtttcatgtatttgaa

SEQ ID NO: 84615 - DNA, 75 bp, Homo sapiens
gctgaatccagtaccaaaaacgtcaacaacagttttacgggccatgaaatgacaagcattggactgctacttggt

SEQ ID NO: 84616 - DNA, 90 bp, Homo sapiens
caagccgccaaagtggagagtgcgattgcagaagggggtgcttctcgtttcaggtacttctactcccgaaggattgacatcaccctgtcg

SEQ ID NO: 84617 - DNA, 98 bp, Homo sapiens
agaaagaaaaaagaagaagtccccgagttcaccaaaattcagacattatggggtcgaggatttggtcttttgggttccatttttggaaaggatggtgt

SEQ ID NO: 84618 - DNA, 100 bp, Homo sapiens
aggatttctaaaccagtttactgaagataagccaactttgaatttcttctatcaacaggtaacagttaacctcttccacatgcagcatctgcaggctgct

SEQ ID NO: 84619 - DNA, 100 bp, Homo sapiens
gacccggggggagcgcggggcgacgctggctgcagggacccggtgacagcgtgagaggttgtctgcattcaaaagagcattctattaaagctaccttaat

SEQ ID NO: 84620 - DNA, 82 bp, Homo sapiens
gccgagggtggccctaggggcagcgagcaagacagcaagcagtattctaccttgtaaatactgttatttgtatatactgtaa

SEQ ID NO: 84621 - DNA, 95 bp, Homo sapiens
aaaataaactgcttgaacatcctttgactggttagccaggacagatgggagttttgtggttcatgatataccttctggatcttatgtagtggaag

SEQ ID NO: 84622 - DNA, 50 bp, Homo sapiens
ccgtgtgggagcgggagctgcggaaaggaccttgcctcatagtattcgat

SEQ ID NO: 84623 - DNA, 96 bp, Homo sapiens
gaatgtgaggagggtggaaagcatttcggctcagctggaggaggccagctctacaggcggagtgaaagggaagcaatgcagaaatcagagggctct

SEQ ID NO: 84624 - DNA, 75 bp, Homo sapiens
tgtgtgttgtcagaatgctcttaatgagctgcagaaccttggcctgaaaatgctacattatatcagcaattgaaa

SEQ ID NO: 84625 - DNA, 99 bp, Homo sapiens
agaagagccatgggtcctcgacctgcagggagcagaggggacagaggcaccaaggacctccaagacaggcctgatcacttgaacggacatatcaagcag

SEQ ID NO: 84626 - DNA, 100 bp, Homo sapiens
gtcgcaggacgaaggggccgacagcttccacagcttccaccaaagggaacgttggatagaatctcatataatggcagcaaaggctgtagcaaatacaatg

SEQ ID NO: 84627 - DNA, 74 bp, Homo sapiens
attaatcagaaggtgaagtttcaggaaacccagcgtttgctggcagaaccagttcctggcatcaaagccgaacc

SEQ ID NO: 84628 - DNA, 80 bp, Homo sapiens
gccgatccagcctgcggagcctgtggggcagggaagcatgctagagtgaaagaaagagagcacgaacgtcggaaacgaca

SEQ ID NO: 84629 - DNA, 50 bp, Homo sapiens
gggcgacttcgcgggaccgtggcgcatgacacagagattgactggaaggc

SEQ ID NO: 84630 - DNA, 82 bp, Homo sapiens
cggcctcctaaagtgctgggattacaggcgtgagcctccgcgcccggccgtacctggagtagaacagaaaaattattatgtc

SEQ ID NO: 84631 - DNA, 76 bp, Homo sapiens
ccagtatatacatcaagtcactgagaccaagatcactccatggatgaaatgacagctgtggtgaaaattgaaaaag

SEQ ID NO: 84632 - DNA, 75 bp, Homo sapiens
taaccaacaagatggggaagaaaaggattgagaactttaagagtggtgtgaacagcacatcccattataatgctg

SEQ ID NO: 84633 - DNA, 100 bp, Homo sapiens
taggggccagcagatgcaggaaaatttcgatattgaagtgtcaaaatccatagatggaaaagatgggtatgtctctgtgccagactgtcgtcgtgggctc

SEQ ID NO: 84634 - DNA, 100 bp, Homo sapiens
cttgcttttgcttcagcgttctgtggttgtcaacagttcaaaagaatgctgaaccgggagctgacacacctctcagagatgagccgatcagggaaccagg

SEQ ID NO: 84635 - DNA, 98 bp, Homo sapiens
ggctgatgcagcaggcatcatccgctatgcaattggggtcaaaagcgtcaggcagagagataagaaagcaagtgtgctatacatcgaaggacacatga

SEQ ID NO: 84636 - DNA, 100 bp, Homo sapiens
aagaacttgtacagagatgtgatgttggagaactatagcaatctggttttcttgggaatgaagccaagagtgatgaaagaagctgtatctactccatcac

SEQ ID NO: 84637 - DNA, 74 bp, Homo sapiens
ccagatttttgctcattaacagaaaagaagaggagaatgctaagcagagaattaaggataacctagacgacata

SEQ ID NO: 84638 - DNA, 82 bp, Homo sapiens
agagtccccgtacgcctacagtaacggttgcagtgggacctggggctaggccacctccctcgcttttttggaactgcggtga

SEQ ID NO: 84639 - DNA, 100 bp, Homo sapiens
gaccgaggagctccttttcgagcttttccaccagaaatgagaaaagtggtggaggttacatagttgtggaccccattttacgtgttggtgctgataatca

SEQ ID NO: 84640 - DNA, 95 bp, Homo sapiens
ctccagcgtctgcattgctccggactcagccaagttccccaacggctccccgtcgtcctggtgctgcagcggaaagagcatctacggtgagcgct

SEQ ID NO: 84641 - DNA, 90 bp, Homo sapiens
taccgcgtgctcacctgtatcagctggcccctgtcgagctgaggcttcgaagacctcagaggacttctctcagcactcacagaaacctcc

SEQ ID NO: 84642 - DNA, 73 bp, Homo sapiens
ggcgatccggggtctgggcgcggcgaggtgctggagaatctggtaaaagcaccattgtgaagcagatgaggat

SEQ ID NO: 84643 - DNA, 74 bp, Homo sapiens
tcctccactgccactacagggaagtgcatcacatgtcaggtacattttgaccaatttaaagaagcattaatact

SEQ ID NO: 84644 - DNA, 95 bp, Homo sapiens
acaagcaactgggattgagtcgttggaagtcaccaggagactaaagtccatcaaaaacatccagaaaattaccaagtctatgaaaatggtagcgg

SEQ ID NO: 84645 - DNA, 90 bp, Homo sapiens
gagaatcaaagggccgggagcgatggtgaccagcgccatgtccagccaggtggtgggcattgagcctctctacatcaaggcagagccggc

SEQ ID NO: 84646 - DNA, 75 bp, Homo sapiens
gtggatcagaactgtgttcgcaattcttacgatgtcttctctttgctacggtggcagtgctccttttggactttt

SEQ ID NO: 84647 - DNA, 100 bp, Homo sapiens
gagcctcgtggctgcgtcaccgccgcccccccagacaagatggacaccgcggaggaaggccccttcacagatgtagtcactacaaatcttaaattgcgaa

SEQ ID NO: 84648 - DNA, 73 bp, Homo sapiens
gcaagacgttgagttacatgttcagaaggtacccatatgaaaggatcgacggccgagtaagaggcaacctccg

SEQ ID NO: 84649 - DNA, 100 bp, Homo sapiens
ggcggaggaggaggaggctggagtgggcgcggaggcgaccgccatggcgttcctcaaactccgtgaccagcccttcccagcctggatcagaagaagcgtg

SEQ ID NO: 84650 - DNA, 75 bp, Homo sapiens
agagaggctccgggctgagaaggagatgaaggaactgcagagcccccatcacctcaggcttctcagttcccttag

SEQ ID NO: 84651 - DNA, 98 bp, Homo sapiens
aacaactggtcgtcttcagttaatggcaagacttgcagaggagcaacaagatatggatttggatatagaatttgatgtacaccttggaatagctcata

SEQ ID NO: 84652 - DNA, 75 bp, Homo sapiens
ctatgagctgctgcagattctctcagatgaccggaaggatgccttctccgggacagattggatgttggagaaaat

SEQ ID NO: 84653 - DNA, 90 bp, Homo sapiens
gcgagggacacggcggacgcggtggcggctgagggcgcctactacctggaacgaaacatgacagctgccctacaggcagctctgaagaac

SEQ ID NO: 84654 - DNA, 98 bp, Homo sapiens
ttgagctgtgcacgaccacaccgctgatgaagacaaggactcacagtggctgcaaggagcgtgaggatcatccccggagaggacgggaggatcggcag

SEQ ID NO: 84655 - DNA, 50 bp, Homo sapiens
cctggtggagctgaaggttgcaggagggcgctacgacccctcgctgactt

SEQ ID NO: 84656 - DNA, 98 bp, Homo sapiens
aggaagatcgcttgagcctaggagttcgagaccagcctggacaacacaaaattgatgcttcagatgaatgctaagcacaaagcagaagaagttgaaga

SEQ ID NO: 84657 - DNA, 75 bp, Homo sapiens
agaaaagaaaatagaagccatgtttcgaagacctgtattacagcctcttcagaagaaacttgactccttcccagc

SEQ ID NO: 84658 - DNA, 100 bp, Homo sapiens
cacaagttcgtcttcatgaagatgagcttcttcagttagtaacccaggcagatgtggaaacagagatgcaacaggtgattgcatactcggaacatcgtta

SEQ ID NO: 84659 - DNA, 88 bp, Homo sapiens
gcatctgatgcacgttccatccggcgctcagctgggcttgaggtatgggttcatagaagggcacgtggtgattccccggatccacccc

SEQ ID NO: 84660 - DNA, 80 bp, Homo sapiens
agcacatgcggagactccgaggtggaggaggagtccccaggaaagcgcctggacgcaggaagctcttcgtgggcggtctt

SEQ ID NO: 84661 - DNA, 83 bp, Homo sapiens
ttttacagtctgttccgcatgatcgttataataagtgcctccggagccagcgtggtggccatagacaacaagatcgaacaggc

SEQ ID NO: 84662 - DNA, 90 bp, Homo sapiens
gcggacatctccctggacgaactcatcaggaagcgcggggcggcggcgaaaggacgttttgatggcgacgactttgatgatgtggaggag

SEQ ID NO: 84663 - DNA, 100 bp, Homo sapiens
cgggaggggacctggatcatggctgccgcgccgccgctacgggaccgcctgagctttctacaccggggtggtgaaggaggagatctttgatgacaatgcc

SEQ ID NO: 84664 - DNA, 100 bp, Homo sapiens
cctcgagttctggcagctttacaggagcgacttgacaatgtccctcacaccccttccagctacatcgaaaccgcctgaattctgctattatctatgaccg

SEQ ID NO: 84665 - DNA, 82 bp, Homo sapiens
agcttccccccgcgcctctcttcgcctcgcctcgggacccgcggtccccgctcttgctgttccagggtctccctccactgct

SEQ ID NO: 84666 - DNA, 100 bp, Homo sapiens
ctggataatgtccaccccgagccgattcaagaaggacaaagagatcatagccgagtatgaaagtcaagtcaaaggaaggtggtgtgtcagtgtggctaca

SEQ ID NO: 84667 - DNA, 75 bp, Homo sapiens
gggaagcaccgagactctagaagaaatgccctccgggtcacaggataaggaatggaagttggatacactttgtga

SEQ ID NO: 84668 - DNA, 100 bp, Homo sapiens
ctgctgctactggccctgctgggctggctgctgctggccgaagcgaagggcgacgccaagccggaggtttcagagactcctccactctctgggaatgaca

SEQ ID NO: 84669 - DNA, 75 bp, Homo sapiens
attgaaaaaacaggaggtgttgaagctgttaaaaatgaactgcggaggcaaggaattaaggataacctagacgac

SEQ ID NO: 84670 - DNA, 80 bp, Homo sapiens
gctcctgctgctctggttcccaggagaataaaggcagccccgttgatgactgaaaatgacaaagcatccacctaacagac

SEQ ID NO: 84671 - DNA, 90 bp, Homo sapiens
atttattactttgaagtgaagattgtcagcaaaggaagagatggcctgtcactgtaccctcagatggccgccgaccccatccatggccac

SEQ ID NO: 84672 - DNA, 100 bp, Homo sapiens
tggatggagagatagaaaccgagggagggagagagacagcgatcgagagagaccggagaggtggagagacaaacctacctatcttcaagctaaaggagtc

SEQ ID NO: 84673 - DNA, 71 bp, Homo sapiens
tctccatggcctcaacacgtccctaacttgtggttccatgtaaacctgctgtgcggggaggagcagggctc

SEQ ID NO: 84674 - DNA, 117 bp, Homo sapiens
acgagaatagacacggcagcgcagtgcagatccgcaggcgcaaggcttcaggcgacccgtactgggcctactctgtgcctgatttgagatggggtcccaggtctcggtggaatcggg

SEQ ID NO: 84675 - DNA, 100 bp, Homo sapiens
caaaaggaatgaccctagccagactcagggatcaaagagcaaacagattcagtggcctgcattgacccttctcaggtgcagccagagagacactagccca

SEQ ID NO: 84676 - DNA, 50 bp, Homo sapiens
catttgtagtgtactgtgatatccgagccacaggggccactgaagcagag

SEQ ID NO: 84677 - DNA, 50 bp, Homo sapiens
cactgagctgccataccccgaaaggggaaggtgtggctcattgactttaa

SEQ ID NO: 84678 - DNA, 107 bp, Homo sapiens
agagagatgttatcatgagggaattccggtcagggtcaagtcgtgttctgatcactactgacttgttggtggaaccgtcccaaaatgtcccttgctcagaagaagga

SEQ ID NO: 84679 - DNA, 85 bp, Homo sapiens
tttctgttccatcagcgtttgtttgcactgaaagagaacagctcagaggttgtacagccttttttaatgggttgtggaaccaagg

SEQ ID NO: 84680 - DNA, 83 bp, Homo sapiens
ggaggcttcgagtgacccgggtgccgaggagcgggaagagttgctgggcagagtccccaggccccgtttgccgagctggctga

SEQ ID NO: 84681 - DNA, 100 bp, Homo sapiens
gtcacaggctccggctcatggcatcaagtggcatccatcataaggaaaccactgattgcttgtgtggagaaacagctattaggagaacatttaacagcaa

SEQ ID NO: 84682 - DNA, 80 bp, Homo sapiens
ctggggagtcctggcggtttttattaaggctgttcatgtgaaaggtatgagcattctccagggaaaggatgacatatttt

SEQ ID NO: 84683 - DNA, 75 bp, Homo sapiens
gaaactagagcaaataaccgttttgaaattgtactataagatctccgtggtgctcatgtgctttgtggtccccac

SEQ ID NO: 84684 - DNA, 100 bp, Homo sapiens
tgttaaagctggtctgttctaactgagctctctttaagaactgtgacctgatgtggaagcagagcatatggacatcgaccatctccagccatctggctac

SEQ ID NO: 84685 - DNA, 90 bp, Homo sapiens
acttcttgtatgcatactccacagcacctgatcaatgtaaccactgtgcgggaatatctgccagaaggagacttttcaataatgacagag

SEQ ID NO: 84686 - DNA, 98 bp, Homo sapiens
ggctggttggggtggtgaggcccgaggcagacaagttggatggcttgaggactggtactaaaaggaaacgtgactgggaggccattgccagcagaatg

SEQ ID NO: 84687 - DNA, 100 bp, Homo sapiens
gaaaggcactatcgagattggaaccacagaaggtcgttgaggacttccacatggagattggcacaggaccagactcaagacacacaactcataacagttg

SEQ ID NO: 84688 - DNA, 96 bp, Homo sapiens
acagagggccgagaaggacaggatcaggagttggaacaaaaattgaccccactttgtgccgggctgacagaatggtggggcaagtacttggtgcag

SEQ ID NO: 84689 - DNA, 100 bp, Homo sapiens
ccaaacattagaagaggtgcctgattatgtaaaaaagctgcagtgagaagaggagtttgttactttaaacagaggctgaagaaactatagaattagcaga

SEQ ID NO: 84690 - DNA, 89 bp, Homo sapiens
acggtcactgcagctgaagccgctgcccctgctacagttcaacagcatgatcctttactgtgtgcccaagctgcggctcatgggccaga

SEQ ID NO: 84691 - DNA, 83 bp, Homo sapiens
cgtccttctccactttcgccagcccgtgccgcgagcgcggcctgcaggaggctcttgtcaggatggtgaagctgttcatcgga

SEQ ID NO: 84692 - DNA, 100 bp, Homo sapiens
tgaccaatactgctgctctgacgtgctgaagaaatttgtgtggagcgaggaaaggtgtgctgtgcctgaggccaggttccagtgtgtgttccaagtgctg

SEQ ID NO: 84693 - DNA, 88 bp, Homo sapiens
cgccgggctcggggcctccgcagcgacaacatggaggccgtgaagaccttcaatagcgagcaacaaatggtcattcagaatgcttacg

SEQ ID NO: 84694 - DNA, 125 bp, Homo sapiens
ctctgctcgcggttagcccgtcagtccctgctctgtgcgcgcctccatctgggccatggatggggcgtctctggccgagcctctttttgtggaaaacgacagcagcagcagtggcctggaagacg

SEQ ID NO: 84695 - DNA, 85 bp, Homo sapiens
agctcctcactgtcaagcacgagctgcggactggtgtgagcgccactttgaagggcatccaacccgcggctatccatgtggaatc

SEQ ID NO: 84696 - DNA, 100 bp, Homo sapiens
tccaggcatcccagctacgaaggatggaatcttcaatcaatcatatttcacaagtccacgctgcttttatgagctgtaacactcaccgcgaagatctgca

SEQ ID NO: 84697 - DNA, 100 bp, Homo sapiens
ccgcaacctgcaggatctcacgcctctgaagctggccgccaaggagggcaagatcgaggttgcaaattcgtgaagaatcagcatcatgtttggcagctga

SEQ ID NO: 84698 - DNA, 100 bp, Homo sapiens
caccatctccatcacccaccaacaacaccacaataatccacagccaaggtggaatatgtgatcaagtgtgacatgtcagctctgcagaagattctgtatc

SEQ ID NO: 84699 - DNA, 100 bp, Homo sapiens
acttgtgcattcaaacatagcaactgagagttgatcaagaacttaatggaaaacaagatgaaccgaaaaatgaacagtaagtttggcatctagtccaaac

SEQ ID NO: 84700 - DNA, 75 bp, Homo sapiens
acccagcctgtttcacttcttgggaaaagcttcactctgaccatcactgtcttcacaaacccaccgcaagtcgcc

SEQ ID NO: 84701 - DNA, 73 bp, Homo sapiens
tgctatcgccgagttctacaacacgaagctgcacacatacatgtaagagaagcaaaaatgtcagatgatatca

SEQ ID NO: 84702 - DNA, 75 bp, Homo sapiens
aaatgagatggtagccaaacacccaggttgctccttgagggcaggacagttcttatggctttatccgttgcgtaa

SEQ ID NO: 84703 - DNA, 74 bp, Homo sapiens
gtgagcagagatggcacctttgatgctgaaggaacccagccagccggcggaatgcaagcagcagtaggaagcgg

SEQ ID NO: 84704 - DNA, 82 bp, Homo sapiens
attagcttcgcagtctggaaagctttaggagttcacagtgatcagcattgaggcccgcaagtcacccaagctgccccgggct

SEQ ID NO: 84705 - DNA, 75 bp, Homo sapiens
taaagacggaaccgccacagcactcaaggcgccctgcgtccggcagaggaggcgagcatcccgctcaggtgatga

SEQ ID NO: 84706 - DNA, 96 bp, Homo sapiens
agaggtgcaaaaacgaaagcaactggagctcaggcaggaagatgtccaagccccgcgcggtggaggcggcggcggcggcggcggcggtggcagcga

SEQ ID NO: 84707 - DNA, 96 bp, Homo sapiens
cgctggctccgggtgacagccgcgcgcctcggccaggcataatggttatgaaagcttctgtagatgatgacgattcaggatgggagctcagtatgc

SEQ ID NO: 84708 - DNA, 95 bp, Homo sapiens
gagcatctgggccgagaccattccgtatggagagccgggtgttcctccaagaaaagctggttatattgaagacctggttttgatgctgcctcaga

SEQ ID NO: 84709 - DNA, 98 bp, Homo sapiens
ccgccctgcgcttcgtgcaccggggcggtccgttgccaaagccaggtgagtgtggctgtgaagtgcctgaagcccgatgtcctgagccagccagaagc

SEQ ID NO: 84710 - DNA, 83 bp, Homo sapiens
tgctgctgcacattaggttgcagtatgtggccagttatttgcctcagtaaaagaggatatagctagtgcaataaaagaacttc

SEQ ID NO: 84711 - DNA, 100 bp, Homo sapiens
tcttgactttcagtttttcgagcgggtttcaagggacacagcaggtcaggagagattcaacagcattacctcagcttattacagaagtgccaaggggatc

SEQ ID NO: 84712 - DNA, 50 bp, Homo sapiens
gcgggcggcgcgggggagatgcccgttttacggagaagacttttactgtg

SEQ ID NO: 84713 - DNA, 136 bp, Homo sapiens
gcgagcgggcgggcgggcaagccagacagctgggccggagcagccgcgggcgcccgaggggccgagcgagaacattgacatcaccaatttcagcagcagctggagcgatggcctggccttctgtgctctgctccac

SEQ ID NO: 84714 - DNA, 99 bp, Homo sapiens
catctggacaagcaggaatggaatcctacgatgaacaaaaaccagttgcgaaatggtctgaggcagagtgtggttcaacggagtcttgctctgtctccc

SEQ ID NO: 84715 - DNA, 76 bp, Homo sapiens
gaagcaacttctatttagtgatcatggtattacaggaataacggaagccgttaaagagatcacactggaaaataag

SEQ ID NO: 84716 - DNA, 100 bp, Homo sapiens
ctggcgcgagccccgtcctccttcgccgccgcgcacaaccgcacgtgcagtggaatgcagtagccctctgggcctgggatattgtggttgataactgtgc

SEQ ID NO: 84717 - DNA, 83 bp, Homo sapiens
agatcagagagggcagacaccactttttagtaggcaaagacacttctaccacaacaatcagcatcggcgtgtcataagatcca

SEQ ID NO: 84718 - DNA, 82 bp, Homo sapiens
ctgctattccggcgcctccactccgtcccccgcgggtctgctctgtgtgccatggacggtctatcaggtgtttgaaagtgtg

SEQ ID NO: 84719 - DNA, 75 bp, Homo sapiens
cacatccctggttgttttgcttcagcctcagcttgccagtgtaatggacatagcacttgcatcaataataatgtg

SEQ ID NO: 84720 - DNA, 73 bp, Homo sapiens
aagaaccattgaaaaatttgagaaggaggctgctgagatggatgatgatgacgacgacgatgacgtaggagat

SEQ ID NO: 84721 - DNA, 80 bp, Homo sapiens
agcttggaatccctcagaacactattttggtgcagactttgctgagggtgacccagcctcttgttgctgtaccacataga

SEQ ID NO: 84722 - DNA, 104 bp, Homo sapiens
catgtcctcaactttctgggcgttcatgatcctggccagcctgctcatcgcctactgcaacctgcctagagctggaacgttacctccagagcgagccctgctat

SEQ ID NO: 84723 - DNA, 83 bp, Homo sapiens
gccgcggatctcaccgccgctcagggtatcacctcttctgggctcaagatggacaacaagaagcgcctggcctacgccatcat

SEQ ID NO: 84724 - DNA, 90 bp, Homo sapiens
cgaggactactacgggagcgcggccgagtggggcgacgaggctgacggcggccaggtgtcccgacccaggctaagcttgagcatggctga

SEQ ID NO: 84725 - DNA, 75 bp, Homo sapiens
aggacaagaccatcgagctcatggtcagttggtggtgtgtactttatgctcctgtgtcatgaaaacaaagcagat

SEQ ID NO: 84726 - DNA, 98 bp, Homo sapiens
gtgctgaaatgtttgacgacactgatggtttgggtccgcaagcaggtggtgaacatcccgtccttcattgtccgcctggattcccagaagcacatcga

SEQ ID NO: 84727 - DNA, 90 bp, Homo sapiens
ctgaagagcatcagcgtcatcgacagccccggcatcctttctggggagaagcagcgcatcagccgagctctagccggcccggtccttgga

SEQ ID NO: 84728 - DNA, 100 bp, Homo sapiens
cctgactaaagcttgaaatgctacatttccaagatggctatatgcatccagttcatcctcatgtagttagaagacttgcataccaacataatcagaccgt

SEQ ID NO: 84729 - DNA, 90 bp, Homo sapiens
caagcctttctacatgagggataatgaagatggccctcagcacacggacccagccgccgcctccatctctgacggagactgtgacgcccg

SEQ ID NO: 84730 - DNA, 82 bp, Homo sapiens
gacgggccgagcctgccactaacaagttgaaatcatcgcagaaggataaagttcgtcagtttatgatcttcacacaatctag

SEQ ID NO: 84731 - DNA, 101 bp, Homo sapiens
attctagtcaagaagaaagccagaggaagccattgcccactgctgccgcccagtgttgagctgtggccctcaagaatcttcaaattaaagaaaatgccctg

SEQ ID NO: 84732 - DNA, 75 bp, Homo sapiens
ggcggtgacccgctaccggaaggccatcgccaaggcagaactggggctcccttgcatcttccagttacaaattca

SEQ ID NO: 84733 - DNA, 82 bp, Homo sapiens
agttgccggagccgcggggcgcgggcggcggacagattgaccttcagagcgaggtgtcgtgaaaactacccctaaaagccaa

SEQ ID NO: 84734 - DNA, 100 bp, Homo sapiens
gcacaaactaattaaaggagtcgagagacttatctccggacaacaagtcatgacaagaaataattggcttgtgagaatcaacattgaagctggaaaaatg

SEQ ID NO: 84735 - DNA, 88 bp, Homo sapiens
ttgttgcctccatgcgccaatccaaaccgaaagccagaaggatatttggccttgacattaaaggcagagactgtggcaatgaggcagc

SEQ ID NO: 84736 - DNA, 100 bp, Homo sapiens
ctcttcgatgtgcgagactttggaaagatgacagatttgaagatctggaagaggcaaatccattctcttttagagagtttctgaagaccaagaacctcgg

SEQ ID NO: 84737 - DNA, 82 bp, Homo sapiens
tcttcaacaagaggacccaggagaaattcgccctcaaacgtcgagggcgaggcccccagcagtgagactggcacatccctgg

SEQ ID NO: 84738 - DNA, 90 bp, Homo sapiens
ggagtatctgccaaacgtagaccaaaggctcagcccacaactcttgtcctaccacctcacaaggaagatgtccgagcaactgaaaaagac

SEQ ID NO: 84739 - DNA, 101 bp, Homo sapiens
cgccgggcccgcctcgcctgtctcggggagcccaggtgtggaccactacaacgaggtgaagagcgtcaccatctgcgattacctgcccccccacctggtga

SEQ ID NO: 84740 - DNA, 85 bp, Homo sapiens
ccacaagggcttcctggccctctaccaaaccgtgggttttggcacaaataccagtgggaatagtatttttggaagtaaaccagca

SEQ ID NO: 84741 - DNA, 83 bp, Homo sapiens
aaagaaggggttcctggtcatacaccagtactaccaaggacagcttttttcctgcaaggaaaaggggaagatagtgatgtact

SEQ ID NO: 84742 - DNA, 96 bp, Homo sapiens
cagctccacccatcaccccagaacaccccgcagaaagtgcctgtgcatcaggggatggagtgttagatctctctacaaagaaaaccagcataaaat

SEQ ID NO: 84743 - DNA, 133 bp, Homo sapiens
gccaggcgagtctccgcgtctccctcgcgaactcggtgaaaggaattggcgccgttcgacaccaggcaccccagccaccgccatggaccgccttgcctacctccccaccgcgccccagcccttcagcagccgc

SEQ ID NO: 84744 - DNA, 75 bp, Homo sapiens
agacatgagatggtagccaaacccccaggtcggccacacacccggagcaccgtcatcacagcggtcaagttcctt

SEQ ID NO: 84745 - DNA, 75 bp, Homo sapiens
ggctgtgggtattgctgcggctggtgcgtcgtcgctctagagagaagaagaaggaggttcctgctgtgccagaaa

SEQ ID NO: 84746 - DNA, 100 bp, Homo sapiens
cgagcacataacggggttcgggtgtctcgtgtgtgaacatcacagaacaactctgctcatggtgattacatgcaaaataacgagagcagcttaatagagc

SEQ ID NO: 84747 - DNA, 90 bp, Homo sapiens
gctaccccagccagtgtcaacacgacaccggataaaccaaagacagcatctgagcacagaaagttgactaagataacacgcacaggtcct

SEQ ID NO: 84748 - DNA, 75 bp, Homo sapiens
tcccaggacagtcagtctggtactaacaatgcagaattgtattcccattggagagcagcttcagtcggtgttggg

SEQ ID NO: 84749 - DNA, 75 bp, Homo sapiens
gaccatcaacagtttgactacataataaggatgatgaattgtactctacaggccatctggatgatggaccccaag

SEQ ID NO: 84750 - DNA, 80 bp, Homo sapiens
gcatgctgggcctgccacggaggagccaggtccctgtctgagccagtgtccttaagtttgctcgcttggtcaagtcctac

SEQ ID NO: 84751 - DNA, 80 bp, Homo sapiens
gtcacagtaaggccaaaaatgtgcatactcacagagttagagagagggatggtggcaaccacacctccaaatcaaggaag

SEQ ID NO: 84752 - DNA, 74 bp, Homo sapiens
gactccaaagctcctgctctttctgctgctatctactgccccagacatagggcctgattacattccaacagagg

SEQ ID NO: 84753 - DNA, 101 bp, Homo sapiens
tccatcaacaggggcaaatcgaagtagagagcgaaaccatcttcaagttagcagcgtttattttacaggtaggaactatatccaagcatctggactggcat

SEQ ID NO: 84754 - DNA, 125 bp, Homo sapiens
ggggtccagccgtccccagaacgcagatcagaggtagtcggacctttcccgctggcgcgcagcctcagctagttgccaccttccagagaagaggtacgagatgacaagacaaccataaagtgtga

SEQ ID NO: 84755 - DNA, 100 bp, Homo sapiens
agatgttccagccttacagctccagtatgaccattgtaagatcagtacaatggaacatgaattttcaataaaggaacgtggatttgaagttcaattgaga

SEQ ID NO: 84756 - DNA, 100 bp, Homo sapiens
gggcagaaaggcggcaaattgtatgcagtaaaggtggtaaattcactccagcagcaacctcaggctgcatccccttcagtaccagagccccactctttga

SEQ ID NO: 84757 - DNA, 75 bp, Homo sapiens
cggagagccagctcaagaaaatggtgtccaaggaagcatagtgagtgtgggcgatcctaagaagaaatatacacg

SEQ ID NO: 84758 - DNA, 82 bp, Homo sapiens
tgcagtacctgcagaaggtctctggagacatcttcagcagatggcaggagaggagaacttcaaggaagagctcagatcccag

SEQ ID NO: 84759 - DNA, 48 bp, Homo sapiens
agctcccgctacggacacctcagctgggcgccgtgtacacagaaggtg

SEQ ID NO: 84760 - DNA, 87 bp, Homo sapiens
ggtctccccacatccctggttgttttgcttcagcctcaggtgactgcttagaaaactgcacagcatctgatgaaattagcgaataag

SEQ ID NO: 84761 - DNA, 88 bp, Homo sapiens
cgtgtcctgagcgctctccatgcgcccggcgcgaggggtcagatatagaaatgttgaattctgtgacccccactgacagctgtgagcc

SEQ ID NO: 84762 - DNA, 75 bp, Homo sapiens
ctgtggtctccagatgaagaggtttcccctgaagtactagcaaagtggatttggcatgataacatgcagtttctt

SEQ ID NO: 84763 - DNA, 51 bp, Homo sapiens
ctgccatggggatatgacattagccaggtgatgccaacgtccggcggtacc

SEQ ID NO: 84764 - DNA, 90 bp, Homo sapiens
ctgggatagattgcaccctggagaggatgagagagacctagagaaagatgatgaactggaactgaaaagaagtcttttatgtagagactc

SEQ ID NO: 84765 - DNA, 75 bp, Homo sapiens
ctgtgttcagtcggagccagtaaagcaatgccattctaaatatggtgaatattgctgctaatattctgggagcaa

SEQ ID NO: 84766 - DNA, 100 bp, Homo sapiens
ttaccgaatccggagatcctgaggaggctccttcctccaggatgtcggcaggaccctctctggaatgagggttagagtcctgcctgggcaggtgaacaga

SEQ ID NO: 84767 - DNA, 108 bp, Homo sapiens
ggcagtttggcatctgtggccgagttgctgttgccgggtgatagttggagcggagactgtgtcgtgaaaactacccctaaaagccaaaatgggaaaggaaaagactca

SEQ ID NO: 84768 - DNA, 90 bp, Homo sapiens
gatgttggagaactacagaaacctggtctccctagcccagcagaccgggttatcccagtccgaggtccagcgaaggattttatcccagcc

SEQ ID NO: 84769 - DNA, 90 bp, Homo sapiens
gtcctatacgttgcttgtggaggcgtgggattccagtaatgacaccgttcgttctcagctgctgcgggagttgaaaaagatggacgacaa

SEQ ID NO: 84770 - DNA, 100 bp, Homo sapiens
cgggcgtccgcggagcagcttccccccgcgcctctcttcgcctcgcctcgggacccgcggtccccgctcttgctgatcttctcactcagatatggcaaca

SEQ ID NO: 84771 - DNA, 100 bp, Homo sapiens
cggtgattgcagccccagacagccggcgctggctgtggtcggtgctggcggcggcgcttgggctctgaaatgagtggcttatactctcctgtcagtgagg

SEQ ID NO: 84772 - DNA, 99 bp, Homo sapiens
atggagaaaagcggatgtagtccatttccagtgtgttgggctaaaggtgtattacctgactgcttaaccgatggctctgatgtggtcagtgaccttgaa

SEQ ID NO: 84773 - DNA, 100 bp, Homo sapiens
cactcttggggctctacctctttttcaaaggtgaccatgaagagtttaaccagtgccagacgcagctcaagtcgctgtacgccgagaacttgcctggcaa

SEQ ID NO: 84774 - DNA, 100 bp, Homo sapiens
cttcctgggcagctcgtcggtgttctgcaaagactgcaggaaggtcaaaatgcagatcttcgtgaaaacccttaccggcaagaccatcacccttgaggtg

SEQ ID NO: 84775 - DNA, 98 bp, Homo sapiens
ggctgcgcggaaactgccctgtggacatcttttccacaagcatatctcacagatttcctctgccagtttgctcagcagccctgctacataatgttttc

SEQ ID NO: 84776 - DNA, 74 bp, Homo sapiens
gacgtggcgcgctggttcccgggccacatggccaaggatcaggatcctcatgaccagccaaagagaagaagaat

SEQ ID NO: 84777 - DNA, 96 bp, Homo sapiens
cctataaaggggtccaccctcacatcgtggagatggacaggagacctggaatcattgttgatgttcgaagaagaacaatttatgaataccaccgag

SEQ ID NO: 84778 - DNA, 100 bp, Homo sapiens
accttaaagatgctgaagctgttcagaagttcttccttgaagaaatacagcttggtgaagagttactagctcaaggagcttgcggtcccctcaggagcag

SEQ ID NO: 84779 - DNA, 88 bp, Homo sapiens
gaggtcgcacgcgtgagacttctccgccgcctccgccgcagacgccgccgcgttatcaagactctgattctgccccggctgcagcagg

SEQ ID NO: 84780 - DNA, 100 bp, Homo sapiens
cgccgattcctcctccttggtcgccgcgtccttggctggcgtagctgaagaagcaggtggagagtgccgagctgaagaaccagcggctcaaggaggtttt

SEQ ID NO: 84781 - DNA, 75 bp, Homo sapiens
gtgctgcagcagagcgcggcgcagaaggcaagaaaattggatgtatattttgaatatgaagaaaaaataatgagc

SEQ ID NO: 84782 - DNA, 82 bp, Homo sapiens
agaagaaaacaagggaggagaagacaagctaaaaatgattcgggaatatcggcaaatgtggatggaagcacagtatatgcag

SEQ ID NO: 84783 - DNA, 100 bp, Homo sapiens
ggtacagatctgattatgaccgagggagaacaccatctcgccaccgcagctacgaacggagcagcttgcattgaaaggctctagttacagtggacttctt

SEQ ID NO: 84784 - DNA, 83 bp, Homo sapiens
aataaaagatgaacctgacaatgctcaagaattacatgaatgacagtcttcgaaccaatgtgtttgttcgatttcaaccagag

SEQ ID NO: 84785 - DNA, 97 bp, Homo sapiens
ctgccagcacccgccgtgccgcatgagcatcgcggagcttgacccgtccatcgctgtggtccccaaggagcagtatcccctccttctcgtgaacccg

SEQ ID NO: 84786 - DNA, 100 bp, Homo sapiens
ccaccagttcgcccgtccccctgccccgttcacaatgatgcacaggaacaaacgagggaatatgcctcctatggaacatgatggggatgttatagaacag

SEQ ID NO: 84787 - DNA, 100 bp, Homo sapiens
ttagggcaatttgtctcaataaaagcccaggaagaagacgaggatgttgttgacctcctgtactggagagacattaagaagactggagtggtgtttggtg

SEQ ID NO: 84788 - DNA, 75 bp, Homo sapiens
ctcagttgtccatgaccctgaaggtccaggagtacccgaccctcaaggaaacctgtaggaagtgtcagggactct

SEQ ID NO: 84789 - DNA, 100 bp, Homo sapiens
tgaaccacagcaagttcatggtcacggagaaggcagcctacataggcgaggaggatggccgagaccagtccaggttggagacccaggtgtgggaggcgca

SEQ ID NO: 84790 - DNA, 75 bp, Homo sapiens
cttccacactgccacctgattaaaggaattggtgcagtagacattgttgcaatcatgatcggcaatctgaaaggc

SEQ ID NO: 84791 - DNA, 50 bp, Homo sapiens
gaacattcgaaaggacctggagatatgaaaccagttctacatcagctggt

SEQ ID NO: 84792 - DNA, 100 bp, Homo sapiens
ctgccagcctggacttcgcgcagtgcctggggtactacggctacagcaaggaagaggagttgtacgcatgtcagagaggttgcaggctgttttcaatttg

SEQ ID NO: 84793 - DNA, 50 bp, Homo sapiens
aaagagttatatgaaatcaatcctccagaactgcaagcacatgttgacca

SEQ ID NO: 84794 - DNA, 75 bp, Homo sapiens
cagatcggagacactgtgcacatcttagaaacatatgaaggtggttcagtcaggtggcaaaaacattgaacttgc

SEQ ID NO: 84795 - DNA, 100 bp, Homo sapiens
agagctctgccaggcagaaggcctctctcctgatacagcaggcgctcaccatgttccctggaggtgctttgaagaagagtctcacagccaagcaggtcca

SEQ ID NO: 84796 - DNA, 100 bp, Homo sapiens
atgaatatgagtccacctccaggcaatgctttgtgtccctggtgatgttggaacattaatgatggaacatggccaaacttcagtcatgatcctgaagcca

SEQ ID NO: 84797 - DNA, 87 bp, Homo sapiens
tcaggaccatgatggctcagtttcccacagctatgaatgtcctcctcgccctctgactaatatgaatgacaccatggttagccacat

SEQ ID NO: 84798 - DNA, 74 bp, Homo sapiens
gggccctgcccctacatttggagcctggacacgcagtacagcaagatggcgattttgctgacagctgccaagaa

SEQ ID NO: 84799 - DNA, 87 bp, Homo sapiens
cagaataatctgcttccatcccgccagtttggattgaagccttcagctgactgtggcccttttcgaggtctgcctctcttcattcac

SEQ ID NO: 84800 - DNA, 87 bp, Homo sapiens
tctgaatacacacagcccactccaatacagtgccaggaacatctggattatgagattatccagtctctaaatcctgaatttaacaaa

SEQ ID NO: 84801 - DNA, 90 bp, Homo sapiens
gatctttccggatcaatccagatggcagccagtcagtggtggaggtcgtgatgtctcgggagtcggatgttgaggctcagcagtctcatg

SEQ ID NO: 84802 - DNA, 115 bp, Homo sapiens
gctccgtggccttagctgtgctcgcgctactctctctttctggcctggaggctatccagcactagacgcttgaagcaaagctgccatcccagaagacgacatgctctcagcaacc

SEQ ID NO: 84803 - DNA, 100 bp, Homo sapiens
caaatggcacttcattggccacctacagaaacaaaatgtcaacaaattgatggaggccagtaatagtagccatgagtctcgtattggtctagctgagggg

SEQ ID NO: 84804 - DNA, 99 bp, Homo sapiens
cttggagctggtgctttgcgtgctggtcagcatccggaacaacaggtggcgacatgtctaagaatgtgagccagtcacagatggcaaaattgaaccaac

SEQ ID NO: 84805 - DNA, 83 bp, Homo sapiens
ctgggtaaaagtagagaaggatcaaggacggatgatgaagtagtacagagagctggactggccattatggaggaggagctgca

SEQ ID NO: 84806 - DNA, 96 bp, Homo sapiens
cactgtacccatggtttaaacaggactggctacctcatttgcagctttagcgtcacctccctcactgggcagcatgggggagaagtcagagaactg

SEQ ID NO: 84807 - DNA, 80 bp, Homo sapiens
ttcaggaaacttgcagcaaagccattcgggttggagtaattggaagggcctgtcccagtcggctttaccctatcgacgca

SEQ ID NO: 84808 - DNA, 75 bp, Homo sapiens
gcagcagcagctccagcaggcgctggctcctgctcagttggatgaaaaatctgacaaacagtatgctgaaaatta

SEQ ID NO: 84809 - DNA, 100 bp, Homo sapiens
gctagtgttttcttatttagccggagtgagaagcaagaaggccctggacacagcaatatctctgggctttcacagattataagcgccatggctatggcta

SEQ ID NO: 84810 - DNA, 110 bp, Homo sapiens
acttcgcattttggcattgacatttaattttagggtcctttatatagaagggagagtagatgaagcgccctcagttcagcaagccgccaggaggccaccacaagacccag

SEQ ID NO: 84811 - DNA, 100 bp, Homo sapiens
ttcctctgagaagcactatggtcgtgagagtcgtcagtgccctattccttcacatgtaattcagaaattagggacagttcctcagcactttgtttgcccc

SEQ ID NO: 84812 - DNA, 100 bp, Homo sapiens
atacttctggccccaccaactgttcaagctggaggaaagcaggaatgttcagaggcaaatgaagattctgcagaataagcaagctcagattgtcaaagag

SEQ ID NO: 84813 - DNA, 101 bp, Homo sapiens
cctgcatgtctggctacctcgtggacaagtttgcagatcgggagcgcaaggtcgccctcaaggccatgatcaaaacgcagcagcagcggaaccgcttaggc

SEQ ID NO: 84814 - DNA, 76 bp, Homo sapiens
tgctgtataagaacctggccaacaagattgtccccattgccatccaggtccaagacaactttgacaagattgaatt

SEQ ID NO: 84815 - DNA, 74 bp, Homo sapiens
gagaggtcatctcagttccacacaagatcatcacccaccttcgaaaagagactctgtttgctggctacacggac

SEQ ID NO: 84816 - DNA, 82 bp, Homo sapiens
gtgtctcgtgtgtgaacatcacagcaaattgtggctactaatttgccccctgaagatcaagatggctctggggatgactctg

SEQ ID NO: 84817 - DNA, 51 bp, Homo sapiens
cacctgtgcaagcacacgggggaggcttcaccatcatcatcgagccctttg

SEQ ID NO: 84818 - DNA, 75 bp, Homo sapiens
caccttgacaacacagcccatggcaacatggcctggacggagaggagcaggaggagccgcgtggcaaggaggagc

SEQ ID NO: 84819 - DNA, 50 bp, Homo sapiens
tttcctttgcagaaaaaaatgggtgtgtttgaccatcgaatgaagtgctg

SEQ ID NO: 84820 - DNA, 80 bp, Homo sapiens
aatttggagtgtgcgtgcgcgccgagcgggggatatgagactttctactcggaatatcctgagtgttgcgtggatgtaaa

SEQ ID NO: 84821 - DNA, 98 bp, Homo sapiens
aaaatgccactttcaacacataacagttgcatctataaaaaggtttgcccctttaatggtggctcttttttggttcaaccttctgcgtcagatttcca

SEQ ID NO: 84822 - DNA, 122 bp, Homo sapiens
gcaccagcttgtagaaatcattaacagacccaacacaccaaagacgttgttagagaatacagatttgtctaaagctgaaactcaggctttaactaattatggaagtggagaagatgaaaatg

SEQ ID NO: 84823 - DNA, 100 bp, Homo sapiens
gaagagccatggatcataaagagacacataccaaattggatctatccaggagcatctttccttgaagaagtacattattgacattgtggttgaaagtaca

SEQ ID NO: 84824 - DNA, 90 bp, Homo sapiens
cgcgatagaaacgtgttcgctgcccagaagaagggaaggcgcgagtgaggaaaggaggtactgtagtagtttatgccaacgtgacttcat

SEQ ID NO: 84825 - DNA, 71 bp, Homo sapiens
ccagacctgcgggtccggagtccccactacgtccattccacgagggacagatatggcttttctaaagactg

SEQ ID NO: 84826 - DNA, 100 bp, Homo sapiens
caagaacacatattctggcctacagcttattatcgtcatcctgccggggaagacaccagtgtatggctttcagttctgaaatggcaaagaggtccaagat

SEQ ID NO: 84827 - DNA, 50 bp, Homo sapiens
ggaagatggcgcctgttgtgacagggttgaagcactggacaatgccacat

SEQ ID NO: 84828 - DNA, 100 bp, Homo sapiens
tcatcatcaataccttctattccaacaaggagattttccttcgggagttgatctctaatgcttctgatgcctctaagaaatatgtctccaaagaacttgc

SEQ ID NO: 84829 - DNA, 87 bp, Homo sapiens
tcaccaaccccaatgccaggctgcgcagtgaagaaaatgaacgaagaatgctgttcaagctttgattgataagcaccaaagaatacc

SEQ ID NO: 84830 - DNA, 50 bp, Homo sapiens
aaactgctgtcgtctttcaagaaaagggaactctaatgatccaggacaaa

SEQ ID NO: 84831 - DNA, 75 bp, Homo sapiens
acgctctcgtctggtttgatcacaagacgggcaaggaggcgtctaaactggatccagtgggcttccctcctgact

SEQ ID NO: 84832 - DNA, 50 bp, Homo sapiens
ggcgagtccggtctcaaaatggagtcaccttcaggccattcagaggagga

SEQ ID NO: 84833 - DNA, 82 bp, Homo sapiens
cgggatcctcatgttcactacccttcatgcatgaaagacaaagctactcagtatgaaaacaaagttgcagtacgtgacagag

SEQ ID NO: 84834 - DNA, 117 bp, Homo sapiens
ctggtgtaccaggcgaagctggccgagcaggctgagcgatacgacggtgaaagaacttgtcctggacaacagtcggtcgaatgaaggcaaactcgaaggcctcacagatgaatttga

SEQ ID NO: 84835 - DNA, 50 bp, Homo sapiens
agagaatgagatagccgtcctgagaaaatcaatgaactgagccatgttca

SEQ ID NO: 84836 - DNA, 50 bp, Homo sapiens
caggttcctaggaatctcgttgccaaaagaatgcaatggtgtaaagattc

SEQ ID NO: 84837 - DNA, 75 bp, Homo sapiens
ttcaagggagtcgaccccaacagcaggaatagctcccggttttaaaatcaaagatgggaaaatcggagaaaattg

SEQ ID NO: 84838 - DNA, 100 bp, Homo sapiens
tttgggcagaatcatgaatgtcattggagaacctattgatgaaagaggtcccatcaaaaccaaacaaactgtagtgaaatgtagtattgccaagtcccaa

SEQ ID NO: 84839 - DNA, 100 bp, Homo sapiens
cgctggtgctgcgctactgcgagaacaagtttaacgacaagcacatcaccactctgcaggtattaacaagtaaaggtgacgcgtgggccaagtacatggc

SEQ ID NO: 84840 - DNA, 77 bp, Homo sapiens
taggattagatgatccaagtcaccaagaaattactgtctcaagtgatacgatttggactgagcaacaaatttgaatc

SEQ ID NO: 84841 - DNA, 79 bp, Homo sapiens
ccggacgacccaagcccgctgagcaggatgagggtctctgtgccttgcggagaatcctgaaaaaacagcctaacctccc

SEQ ID NO: 84842 - DNA, 114 bp, Homo sapiens
gcgcggcggacgcgcccgggacgcgcggcggcaccgggaggccgggccgagcgttctctcctgcgctatggtggaaacctgtccctccaaagtgccatgagtgtacgattcaac

SEQ ID NO: 84843 - DNA, 75 bp, Homo sapiens
cacggacttcttccagaagctgaatgtatccgttgcctacattgggatattaatcggtggagactacattttctc

SEQ ID NO: 84844 - DNA, 76 bp, Homo sapiens
ggcggacggtgtttccctcccgtgagttctggcacagggtggttctcttcccaaagtggaagccaaattcatcaat

SEQ ID NO: 84845 - DNA, 100 bp, Homo sapiens
caggaattctggtgctgattaacgatgccgactgggagctactgggccgctggcctagaaatggcctcaaatggaagctgccacccgatcctggtggagg

SEQ ID NO: 84846 - DNA, 100 bp, Homo sapiens
cttacggcttcacttgaggaagttcgcaaagaaagaaacttggatttaactggccagaagcaggtattcaaagcagagaacaatccctgggtgaccccca

SEQ ID NO: 84847 - DNA, 100 bp, Homo sapiens
cgacttcggcggggcccaggtgagaaaggcccacctgtgtcctggttgagggtctccagggttctttggggcccgagttggaggctggcagcgaagaaga

SEQ ID NO: 84848 - DNA, 100 bp, Homo sapiens
tgtggactcgggacagcatgatgagcagaaaggcccctctcctacccagataccgatgttatactgatgtgtttttccatcgacagccctgatagtttag

SEQ ID NO: 84849 - DNA, 100 bp, Homo sapiens
cttcttctcccgcataaacagcacggaagcgcggacggcgcacgacgagtactggcatgcgcacgtggacaagagctcccagctcctccagcagccgaca

SEQ ID NO: 84850 - DNA, 100 bp, Homo sapiens
cccagcctgacacatatggactgctcgacaggtcatcgacatcctgagggggaaggccacccggcctgcttccacctcccagccagacccctcccctgac

SEQ ID NO: 84851 - DNA, 83 bp, Homo sapiens
tgtccgccgcagacgaggttgacgggctgggcgtggcccggccgcactatggctgctagcttgactttgagtttaaacctcac

SEQ ID NO: 84852 - DNA, 75 bp, Homo sapiens
gagatcgtcagcgctgactccatgcaggctttacaggaagtatggtgctggcatctgcttggcttctagagagtc

SEQ ID NO: 84853 - DNA, 82 bp, Homo sapiens
cacatgaccttggagctgccgtggagcgccgaccgcgccatccagcagttcgcctggtccgacccccagtggcactaacgtg

SEQ ID NO: 84854 - DNA, 75 bp, Homo sapiens
tccccggcacacgcgcagccccggcctctcggcctctgccggagaaacaggtgtggacactgccagcggctgcag

SEQ ID NO: 84855 - DNA, 100 bp, Homo sapiens
gccagagcaccagcccagtgccatgagcctgctggccccgccatccagccgcagaaaggagtcttcaactccagaggttgatggagaaccttgtgacctg

SEQ ID NO: 84856 - DNA, 82 bp, Homo sapiens
tgaagaactcgcaagctcctacgaaagaaagctcatcgagatagcagaccccacgttagctgaaatgggaaaaaacttgaag

SEQ ID NO: 84857 - DNA, 74 bp, Homo sapiens
taaaactttccaaatggcagaatacctgaaactggagtttatcaaggtgacgatgcctggggagcctgtggacg

SEQ ID NO: 84858 - DNA, 75 bp, Homo sapiens
ttggtgaagtcggccagcctgagcaagcggaggacctacgccggcctgggtgagaagccctaccactgcaactgg

SEQ ID NO: 84859 - DNA, 100 bp, Homo sapiens
cggaaaaccgaagttggaagtgtctcttagcagcgcgcggagaagaacggggagccagatcctggtgaagaccatgatacgtaaacgctcctttgggaac

SEQ ID NO: 84860 - DNA, 100 bp, Homo sapiens
gcaaacgtctacactgtacatgctttttattacaagactacggagcataggaggaaaattcatcatctggttgcccccaagtttcctggcagtgtgtgat

SEQ ID NO: 84861 - DNA, 90 bp, Homo sapiens
gacagttatagtcaacatggttgacgttgcaaaggcgcttaatcggcctccaacgtcttcgccgacacgaggtgaccatctgcaattacg

SEQ ID NO: 84862 - DNA, 89 bp, Homo sapiens
ggacggcgagaaggcggcgcgcgaggtcaagctgctgctgctcggcaggaagttatgttcgtgatgatgcagtccccaatttaatccag

SEQ ID NO: 84863 - DNA, 51 bp, Homo sapiens
tggggaagcgggacaatcgggtgggaggaaataatgctggccatacagttg

SEQ ID NO: 84864 - DNA, 100 bp, Homo sapiens
gacagacggagtcctgttccaccttcagagcgtcacggcgtacgccctcatggggaaaatctccccggtgactttcagaatagcctaacatggcagacca

SEQ ID NO: 84865 - DNA, 76 bp, Homo sapiens
ccgggaggaaggaacgaggcaaggagctaaagcagcgtgcgttcagccctgggggcagaaatttagcatctggaga

SEQ ID NO: 84866 - DNA, 75 bp, Homo sapiens
ccaagaggaatgacaaacaaccagctcttcagatcgtcagtatttaaacagatcacatcatgcgtgagtacaagc

SEQ ID NO: 84867 - DNA, 100 bp, Homo sapiens
gcccaaccctcgtgcctccctgaaccactccactgcctttaaccctcagcctcagagtcagatgcagggtgctgggactctggtgcccccaaccctgggc

SEQ ID NO: 84868 - DNA, 51 bp, Homo sapiens
cgagggccctgggcaaggcccgacagcggatagcaggctccaagctctctc

SEQ ID NO: 84869 - DNA, 75 bp, Homo sapiens
ttagaagctgcagaagaaagacgcaaggttcgagaaatggctgctactaccttaagcggtctgctacagtgtaac

SEQ ID NO: 84870 - DNA, 82 bp, Homo sapiens
catgggcagcgcagaggacgcagtcaaagagaaactgctgtggaacgtgaagaaggaggccactcttcacctccaccatgag

SEQ ID NO: 84871 - DNA, 75 bp, Homo sapiens
aggaagaacgtgcaaggatgcgaattgtgaatcgcttctccaaacactacccactgctgaaactccccttgccag

SEQ ID NO: 84872 - DNA, 75 bp, Homo sapiens
gcatgctcagaccttcattgctctgtgtgccaccgtatggtttgaagtggtgaacatggatttttctcggcttca

SEQ ID NO: 84873 - DNA, 98 bp, Homo sapiens
aagaagatatgaacctgagccttcagtcaagaccctccagcttgccttggtttgagtccagccaatgacactggagccaaaaagaagaaaaagaaaca

SEQ ID NO: 84874 - DNA, 100 bp, Homo sapiens
cgaagctctagccaaattcctgagggattcgggttgactagtggtggatccaactactcgctggccagacatactttccaagtggtaagaagttcagaag

SEQ ID NO: 84875 - DNA, 100 bp, Homo sapiens
ctgctggtgttagcgctcagtcaagacaaatcttcctattttcaagctgaaagaatctactgttagaagaagatacagtgactttgaatggctgcgaagt

SEQ ID NO: 84876 - DNA, 75 bp, Homo sapiens
aaatacttgctttactggaaagacccagaatatgccaagtatctaaaggtttcgtgcacctgaagttgccagagg

SEQ ID NO: 84877 - DNA, 100 bp, Homo sapiens
gcaataaaacccagagtaaactcttagataaaatgacgacgtccttctggaagaggcgaaactggaagcaaaaggagggtaattttgatattgtctctgg

SEQ ID NO: 84878 - DNA, 98 bp, Homo sapiens
acacgttttgttgtgaatccacagattttcactgctcatccggataccatgctgggaagatgctctgaacgttcttctcatcatcgtggatgacctgc

SEQ ID NO: 84879 - DNA, 73 bp, Homo sapiens
tccgactgatccagctggtggtcctggtctacgtcatcgggcatggatgagttgatggaggtgtctttctcgc

SEQ ID NO: 84880 - DNA, 75 bp, Homo sapiens
ccagcaccagcaagcggcattggctgcggtgtggtatctgtgcgctttgaagaagatgaagacaggaacttgtgt

SEQ ID NO: 84881 - DNA, 74 bp, Homo sapiens
cagcaccctccagctccctacccatccgccaggagccctcttccttcagatgaagcgccctcagttcagcaagc

SEQ ID NO: 84882 - DNA, 100 bp, Homo sapiens
cctcagccccgatgagctggagctgctggccaagctcgaagagcagaaccgcatcccggcggcgcaggcgcagaggagagcgagctgcaggcctacatcg

SEQ ID NO: 84883 - DNA, 100 bp, Homo sapiens
ttttggggattccactctccagtgtaatgattattgacaacagtctgcgctcctcagaccaccggcaggtgaacagcctgatgcagaccgaggagtgccc

SEQ ID NO: 84884 - DNA, 121 bp, Homo sapiens
ggattcagagcagatgtgatctgcgctaggtggcatctcctctcacggatgcctcggtcaaaatgcagatcttcgtgaaaacccttaccggcaagaccatcacccttgaggtggagcccag

SEQ ID NO: 84885 - DNA, 100 bp, Homo sapiens
agccaatcccaggaggaaaaacggagatcccccgagacctcacgctggatgccctgctggagatgaatgaggccaaggtgaaggagacgctgcggcgctg

SEQ ID NO: 84886 - DNA, 74 bp, Homo sapiens
tttttactccttcattttccagtagttggggtgcaaatagctatgggcaacttggcctcggccataaggaagat

SEQ ID NO: 84887 - DNA, 96 bp, Homo sapiens
cgcagatcgccgtggtgggcggccagagcgccggcaagagctcggtgctcgagaacttcgtgggcaggtactggttttggattaggaattgttttc

SEQ ID NO: 84888 - DNA, 90 bp, Homo sapiens
ccgcaccatgcccgccgtggacaagctcctgctagaggaggcgttgcaggacagcccccaggttaagaaaacgactgaagccaccttgca

SEQ ID NO: 84889 - DNA, 82 bp, Homo sapiens
ccgaaaacaccctgcaatctttcagacagggttttggccaaattgggcgagggcacaaaataaccacttaccccttctcacc

SEQ ID NO: 84890 - DNA, 74 bp, Homo sapiens
caatgaaaaagtaccttttaatgatacaagctatcaagtactagctccaactgcctattatgatcagactggtg

SEQ ID NO: 84891 - DNA, 75 bp, Homo sapiens
cccagaaggagacaggcaagccccccgaggaggctcggccggcgagagaagtcgataaagtggccagtgtgtacg

SEQ ID NO: 84892 - DNA, 83 bp, Homo sapiens
atccgttcccctacaagaaactctccccgatcaccgaagtggccttggagtacaacaactgtcatggggaccaggtggtggag

SEQ ID NO: 84893 - DNA, 98 bp, Homo sapiens
gttatgtgaattatgtgctaagtgaaaaatcatcaacctttctaatgaagttccgccatggagtcatagttgcagctgactccagggctacagcgggt

SEQ ID NO: 84894 - DNA, 98 bp, Homo sapiens
attggcattaactttgacagactcacacttttggccctgtttgatagagtaaatgaatcatcacattatgatctagcctttacagatgtacactttaa

SEQ ID NO: 84895 - DNA, 74 bp, Homo sapiens
ttggttgcagttgtgtagtagttaaggcagttatacttaagcatgaacattgacgacaaactggaaggattgtt

SEQ ID NO: 84896 - DNA, 95 bp, Homo sapiens
ggactctcaattacatccaaacagtggaggcttccgccctgggacaccctcactgcacccttacagtggggcccagccagggcagaggaggagca

SEQ ID NO: 84897 - DNA, 75 bp, Homo sapiens
tcccaatcccactgatgaggatcagcccatggtgttcctgcatgaagccaccgtgcgcctgatggcaggagccag

SEQ ID NO: 84898 - DNA, 134 bp, Homo sapiens
ctcggcgattatggacccggccgaggcggtgctgcaagagaaggcactcaagtttatggtatggcgactacccgaagctccctgaccgctcacagcatgagagagatccatggtatagctgggaccagccgggc

SEQ ID NO: 84899 - DNA, 50 bp, Homo sapiens
cgcgggacaagaaaattcatgcgcacgtcagctaactgttcagatgatgc

SEQ ID NO: 84900 - DNA, 80 bp, Homo sapiens
gaagcaagaaggccctggacacagcaatatctctgggctttcacagggtgcatcatgctgcaagcgggcgggtactagaa

SEQ ID NO: 84901 - DNA, 90 bp, Homo sapiens
acgaacaccggtgaggtatatcgggggaagctcattgaagcagaggacaacatgaactgccaggacaaccctccatatgataagggagcc

SEQ ID NO: 84902 - DNA, 74 bp, Homo sapiens
ccgctcggagccagccagccgtcccgagctaccagcagttttctttttaaaagcggaaggagagttttacatgg

SEQ ID NO: 84903 - DNA, 75 bp, Homo sapiens
caccctcttctacggaggaaggaacgggcacagcagagggtggttctgggctggactccagccccttcctgtcgg

SEQ ID NO: 84904 - DNA, 93 bp, Homo sapiens
gaggaggcagccaagctcgtggcctgcctctgcgtgcaagtcggccagagcagcatgtggatctccactgatgccgccgcctcggtgctggag

SEQ ID NO: 84905 - DNA, 99 bp, Homo sapiens
ggacaagtgtgggatccccagtgtgctccccgaaaggacagggcggcgactggcggcgcgatggacctgaccgggctcctgctggacgaagaaggcacc

SEQ ID NO: 84906 - DNA, 51 bp, Homo sapiens
tgccatcccatgcaacaacaaggaattcaactgaaaaaggtgcaggagcag

SEQ ID NO: 84907 - DNA, 100 bp, Homo sapiens
acctttcagcagccgcccaatacctcccagcctgacaaggacatgaacaagctgagtggaggcggcgggcgcaggactcgggtggaagggggccagcttg

SEQ ID NO: 84908 - DNA, 52 bp, Homo sapiens
cggcggctgtagcggcgtgacaggctcttgcagccaatgccggaacaggatt

SEQ ID NO: 84909 - DNA, 75 bp, Homo sapiens
agatcttcacagcacagttcctgggaaggtggagccaccagcctctccttgctgtttgcagacaaggtcccaaag

SEQ ID NO: 84910 - DNA, 97 bp, Homo sapiens
agaaatggaacagaaacatagagaggaactggagcaattgaagctgactactaaggagaataaggcctacacgcccagacacacacatacccaacca

SEQ ID NO: 84911 - DNA, 51 bp, Homo sapiens
attgaggaccagtcaattctaaactcacctgtggaatcctctcaagaggaa

SEQ ID NO: 84912 - DNA, 98 bp, Homo sapiens
ctttggatagagaccaaaatcatactttgaagtcacgagaagagaatgccttctagatgcaaaatcacctccaaaccagaccacttttcttgacttgc

SEQ ID NO: 84913 - DNA, 90 bp, Homo sapiens
ggagaccaaagagaacaacctctctgaagaaggtgattccttcaacacccagaatgagccagaagacatgatgaaaaaagagaaaaagtc

SEQ ID NO: 84914 - DNA, 90 bp, Homo sapiens
aaaaaagcagaatggaatgggccttagcattgttgcagcaaagctgttaggcaattttcttcagtggtatggcattttctcaaataaaac

SEQ ID NO: 84915 - DNA, 100 bp, Homo sapiens
ctcgttcactccaccgccgccgccgccgccgccgctgccgctgccgctgccgcacctccgtagctgactcgcccgagcgggaagaagttccgcagcaagc

SEQ ID NO: 84916 - DNA, 50 bp, Homo sapiens
catgcggatgctcgataatctggcaacagcttacctttcacctgaggacc

SEQ ID NO: 84917 - DNA, 50 bp, Homo sapiens
gcctgactctgggagcacgcaagatctgttggtaatctgaggatttttat

SEQ ID NO: 84918 - DNA, 100 bp, Homo sapiens
gcgggctgcagcgcgccaaaaccgggacggacaagaccctggtgaaggaggtcgtacagaggggaaactgaggcctgagccgagaagggatggggaggct

SEQ ID NO: 84919 - DNA, 90 bp, Homo sapiens
gatggatttcagaaactgttggagtttatatacacaggaactttaaatcttgacagatggagtctcactctgtcgcccaggctggagtgc

SEQ ID NO: 84920 - DNA, 100 bp, Homo sapiens
ccggagatcagctgatgccagtcagagaagtttggcatataatcgaatagttgatgccctaaatgaattcaggcatatctttttcttgcacatcaaggag

SEQ ID NO: 84921 - DNA, 90 bp, Homo sapiens
cgacgaacccccaatgctgaccaaggaggagcctgttccagaactgctggaagctgaggaattgaatgatctggcacgggaccctccagc

SEQ ID NO: 84922 - DNA, 101 bp, Homo sapiens
cagagatctagcgactgaagcagcatggccaagccgtgtggggtgcgcctgagcggggaagcccgcaaacagatgccggtggccgtgggtccctacggaca

SEQ ID NO: 84923 - DNA, 100 bp, Homo sapiens
gcgcgggccagagcgcagcgccgagcgcggcccgggcgccatcgagccttggcggcggacgtgcaggttggatggcaagcatgtggtgtttggcaaagtg

SEQ ID NO: 84924 - DNA, 75 bp, Homo sapiens
gagtttcttcaccgagtggtggacacatttcaggaggagacatcacagctttcccagatcgggaggaaaaatatg

SEQ ID NO: 84925 - DNA, 100 bp, Homo sapiens
ctgcggacggcgctgcggtacatccagattgtaaaccatggctgtgtggatacaagctcagcagctccaaggagaagcccttcatcagatgcaagcgtta

SEQ ID NO: 84926 - DNA, 100 bp, Homo sapiens
gagacaccgctatcacagctgctgcaatcgcttgggagagctcctgggccacccctcctttcaggtcaagctgcatcttcctcccgtgaggctggccgag

SEQ ID NO: 84927 - DNA, 75 bp, Homo sapiens
gaggcgaaatgtgcaaatgtttatggatgtactttatgaaaaatcgtgcccggaggcaaggtattaacttaaaac

SEQ ID NO: 84928 - DNA, 99 bp, Homo sapiens
agacagccaagaaaacaggaagagggttggaggcaaagttccgaatagggatgaggcatacgtgtttctctacaataattggagttggtgttggagctg

SEQ ID NO: 84929 - DNA, 75 bp, Homo sapiens
ccaagaccgctgcagccgctggctgagatttgaatttgttgaaatgagcagtcgtaaatcaaagagtaacagctt

SEQ ID NO: 84930 - DNA, 83 bp, Homo sapiens
caccgagcgcttgatgtgcgcggagagcaatcgccgggacagctgcaagacaaatttacatgtattggagaccagaccagaag

SEQ ID NO: 84931 - DNA, 100 bp, Homo sapiens
cttacatgatgaacaaagtactgatgacagatctgagtgggacatacttttgaaggatgtgcaatgttcaatcataagtgtgacaaaaactgacaagcag

SEQ ID NO: 84932 - DNA, 100 bp, Homo sapiens
gagcggcggcgtcttatccaaccttgcgctgcatccgctcgacctcgtgaagatccgcttcgccggaaaatggttctcctgaagaacatgcaatctatgt

SEQ ID NO: 84933 - DNA, 75 bp, Homo sapiens
tcctggctggtgcggacacaacccaatagcatcagcgagcccatggagacccagttgctctgaactataccttct

SEQ ID NO: 84934 - DNA, 76 bp, Homo sapiens
ttttaccatcaccacccaccctgagagcaaccagggcatcctgacaaccaggaagttaagtgggcagaccaacatc

SEQ ID NO: 84935 - DNA, 100 bp, Homo sapiens
tcagatgtggtggaatatgccaaggaaaaactggagagcttcatcaaaaatagtgatagctttgataagtacctgtggaaaagtgaaaagccactctact

SEQ ID NO: 84936 - DNA, 75 bp, Homo sapiens
ggaataactggactcttttacactcaactaattggcatcatcacacaccctggaggagaagaggttctgctggaa

SEQ ID NO: 84937 - DNA, 82 bp, Homo sapiens
cggcgcggcggccgggccctcgagacggggacgctgtggaaagtgaagaaggcattgaagatgactattttttggagaggcc

SEQ ID NO: 84938 - DNA, 83 bp, Homo sapiens
gagcctcagttggaagcagccgatccagcctgcggagcctgtggggcaggtactattaccaaaggggtattctggcaaaagtg

SEQ ID NO: 84939 - DNA, 100 bp, Homo sapiens
cactggaaagtgaggaattttgaagtacaccgtggtgacattgtatcattggtgttaatgttcgtgaagaaattgaagagttttttccaagaatgtggaa

SEQ ID NO: 84940 - DNA, 58 bp, Homo sapiens
ttgactactgccacaattccgctttaggcagtgagaccctggcatcacgacaagaatc

SEQ ID NO: 84941 - DNA, 100 bp, Homo sapiens
caaggtcgtagcgctcattgccatcattgtcatgggccttgttaaactgtgccaggctcacggatgattgatatccagaccaggatggctgggcgagcat

SEQ ID NO: 84942 - DNA, 100 bp, Homo sapiens
caaccagctgtggaacatcagcgccgtcccttcctggtccaaagtgaaccagggtctcatccgcatgtataaggccgagtagagacggggtttcgccgtg

SEQ ID NO: 84943 - DNA, 98 bp, Homo sapiens
gcgctgccgagaagctttacctcgctgaccctatgaagaaggccagggatgtaccgcctacgacgtagctgtcaacagcgacttctaccggaggatgc

SEQ ID NO: 84944 - DNA, 82 bp, Homo sapiens
tccgggtcctgcaggaccgtgtggaagtgtatgcacatgcacgttccagtctcatcagattttccatgtcctggtggtggca

SEQ ID NO: 84945 - DNA, 83 bp, Homo sapiens
tgaaagaacactttgcacagttcggccatgtcagaaggtgcattttaccttttgtggcttctggcacagcagcttaattgacc

SEQ ID NO: 84946 - DNA, 100 bp, Homo sapiens
atatgctctgtctgcagttctggaccagaatacctcaaacgtctaccattacagtggccagcgatctgtacatgagacccaggaattatttccaaagcaa

SEQ ID NO: 84947 - DNA, 100 bp, Homo sapiens
cgaacagagccgggagttcaagaagaacactccagagcaacctgggctggctgagttatggggctttgaagggagacgggatcctcatcgtcgtcaacac

SEQ ID NO: 84948 - DNA, 100 bp, Homo sapiens
aagagctgtggcaaccggaatgagacgccctcagaccccgtcatcattgacaggttatacattggctcttcaaagacgttcacctcatcagagaaatccc

SEQ ID NO: 84949 - DNA, 101 bp, Homo sapiens
cctggagcctcagttggaagcagccgatccagcctgcggagcctgtggggcagcaatcatcctcttccagtggtagcgtgtttgggtctggaaacactgga

SEQ ID NO: 84950 - DNA, 82 bp, Homo sapiens
ctgcctctgtgtacgctgaggggggagcgggagatacagatgacccaccaagaattactcagaaccctgtgatcaatgggaa

SEQ ID NO: 84951 - DNA, 75 bp, Homo sapiens
ctttgcacatgtaacatccctgggaactgtggctgcaccatctgtcttcatcttcccgccatctgatgagcagtt

SEQ ID NO: 84952 - DNA, 75 bp, Homo sapiens
caacccgaccaccggagaattcctggggcgcaccgccaagagctgggaaggacagaataacgggctcccagattc

SEQ ID NO: 84953 - DNA, 75 bp, Homo sapiens
ggaagaggcccaccctggagtaaccctcactggagaatccagaggggatcatggaagctgataaagatgacacac

SEQ ID NO: 84954 - DNA, 75 bp, Homo sapiens
gggacaagttgcatgaagagcatatcaatgcaggacgtacagttcagagttgatctctctaatgtattagatctt

SEQ ID NO: 84955 - DNA, 100 bp, Homo sapiens
atgtgactaatttgtccaaagagaggttgctcaagaaacagatgtgagagcccagattcgtctgcaatttcgtgatgtcaatggagaacttatagctgtg

SEQ ID NO: 84956 - DNA, 87 bp, Homo sapiens
aaaagagggagcttctcgacctgctctataaagcctatgggatgccaccttcagcctctgcagggtcctctgaaggagttcaaagct

SEQ ID NO: 84957 - DNA, 101 bp, Homo sapiens
gccaggataatgcaaaggaaaagaggactggagtggtttgtctgtgatggctggaagttcctctgtaccaggaacaagcacatcatgattgacttggggac

SEQ ID NO: 84958 - DNA, 100 bp, Homo sapiens
tcattcaccattgacaattcaacttactctctcttcccacagctgaaactgatgtaaatgtggtcatgcttcaggaatcccaagtttgtgaaaagcgtgc

SEQ ID NO: 84959 - DNA, 75 bp, Homo sapiens
tctgctgcggcgcggggaccgctgtgctctcgggaaaagaatcccgcccactaagacgcgacccctcagacaggg

SEQ ID NO: 84960 - DNA, 100 bp, Homo sapiens
tctcaaatataggcattctgatgggaacttgtgtgttaaagtaacagatgatttagttcttttccttccctccatgagaaagaagccagctctgtctgac

SEQ ID NO: 84961 - DNA, 114 bp, Homo sapiens
cgcaggcagtggccacaagagcgaggagaagcgagaaaagatgaaacggaccctacaatgcagatcttcgtgaagactctgactggtaagaccatcaccctcgaggttgagccc

SEQ ID NO: 84962 - DNA, 98 bp, Homo sapiens
gtaatgcctgagattgcacaagctgtggaagagatggattggctgagtacctggccgtagtcgatgctcctcccctggacctccggttcaacccctcg

SEQ ID NO: 84963 - DNA, 50 bp, Homo sapiens
caggaagtctatgatgagtacaagttcatcctcagcagcaccggcttctt

SEQ ID NO: 84964 - DNA, 50 bp, Homo sapiens
tggtggtggagctgcagatccgggcgacagggcctcactctgttgcccag

SEQ ID NO: 84965 - DNA, 104 bp, Homo sapiens
cggcgggatgtggcgactacgtcgggccgctgtggcctggaaccaccaaactgttttccacagaggctgcatcaattgacattcccactagcaatggatgaggg

SEQ ID NO: 84966 - DNA, 73 bp, Homo sapiens
gggctgaaatccatcttcatcctaccgctccgcccgaacgtcaaggtcgtgggaaataaaaggcagttctaca

SEQ ID NO: 84967 - DNA, 90 bp, Homo sapiens
ctcagtgcctgttacttgggcaccccgaggaagctctatgcagaactgtgccaaggcatcgtggacatagccatttccagtgtcttccca

SEQ ID NO: 84968 - DNA, 100 bp, Homo sapiens
aaaaggctggccgaccagatgacaaagcaattgcagcagaacatcgagtgttggataacttctctgacatagtagaaggttcctgcgacctgaaatacac

SEQ ID NO: 84969 - DNA, 51 bp, Homo sapiens
ctccaccccgtcgcctcgacagacttcccaagtaagaagcggaagaggagc

SEQ ID NO: 84970 - DNA, 100 bp, Homo sapiens
taccttgtatgcctcaatttgctggatttaagcactgctgcactttatgaggttatacattggctcttcaaagacgttcacctcatcagagaaatccctg

SEQ ID NO: 84971 - DNA, 75 bp, Homo sapiens
ggccgtctctgtttgaacaatttggctgtagcagcaattcctgaaggtctccccattgtggtcacagtgacgcta

SEQ ID NO: 84972 - DNA, 50 bp, Homo sapiens
ctacccgggatacggaggagggctccccaggtgtgtcctggtagacaact

SEQ ID NO: 84973 - DNA, 96 bp, Homo sapiens
cagtggatgggccagcccgcctcgccgaggaggccttcttccgtggggttagccagatatgtgcagcgggggctacagcgagtggggctagatccc

SEQ ID NO: 84974 - DNA, 88 bp, Homo sapiens
gtcagggaattttgcaatgttattgattgtaatcaagtacgttttgccaacctatgaaatggccgtgaaaatgcctgaaaaagaacca

SEQ ID NO: 84975 - DNA, 82 bp, Homo sapiens
cgccccgcgagcacagagcctcgcctttgccgatccgccgcccgtccacacccgccgccagccgcttacaaacacgcagatg

SEQ ID NO: 84976 - DNA, 97 bp, Homo sapiens
tgtttcattcttacagtccatatgatcacaaggcaaaatttggtttctctaatattactggaattgattactctccttctgcaattcagctttctgg

SEQ ID NO: 84977 - DNA, 100 bp, Homo sapiens
tcttggcaagttatggcaatgtgatcgtcatcacagtcaactatcgacttggagtactcgatattgatgatgttaagaagttcaaaccgggttacctgga

SEQ ID NO: 84978 - DNA, 75 bp, Homo sapiens
tggcggcgctggaagggatgtcgtctcagcagtgctcgggcgcagggtttccaggcctgaggtgcccgccctggc

SEQ ID NO: 84979 - DNA, 98 bp, Homo sapiens
gagcggcgagtttccgatttaaagctgagctgcgaggaaaatggcggcgggagttgacattcgtgaaattaaggagatccgcccagggaagacctcac

SEQ ID NO: 84980 - DNA, 80 bp, Homo sapiens
ctgggaaagaggaagcaaatataataatggcagcacagagctacattcgagtgttgttaataacagtactggtagtggaa

SEQ ID NO: 84981 - DNA, 50 bp, Homo sapiens
cccggaccccggcgcgctgaatgcaggttaaacccatccagagtaatggc

SEQ ID NO: 84982 - DNA, 90 bp, Homo sapiens
ccaaggaagccacgtgcagacatctacaaccttcgatctcctgacgaagtgcctggtgaagaatgtgatgggatcactagcatgtctgcg

SEQ ID NO: 84983 - DNA, 82 bp, Homo sapiens
gtctctacagccaattcctctgaagtcagcaacagcaaaggttgcacgttttcaaaaaatacctaatggtgaaaatgagaca

SEQ ID NO: 84984 - DNA, 82 bp, Homo sapiens
aatgatccagatggacctcattcagacagaatctattaccttggtggatatggacaagagcggtgaagtacgacttatagaa

SEQ ID NO: 84985 - DNA, 98 bp, Homo sapiens
cacgccaggccgttgccgcactgtgtgcacttggaggcttcaaagagacaatcaagataggatccgaggttcagcgttccaatccacatgctgcctat

SEQ ID NO: 84986 - DNA, 83 bp, Homo sapiens
attcataacctgctccatgcttgaaaacatggggattggaattcggaaaaatgaggaagctgtgagtaccagtggaaggaacg

SEQ ID NO: 84987 - DNA, 83 bp, Homo sapiens
ggaaaacagagaaagaagtgataggagggctctgtaggggccaaaccagtgctcctgccacctctctggctgccccctagagc

SEQ ID NO: 84988 - DNA, 90 bp, Homo sapiens
ggcggaggcagaggtggaggcgctttgaaagggtcctgggcccagtctgccctgactcagcctgcctccgtgtctgggtctcctggacag

SEQ ID NO: 84989 - DNA, 98 bp, Homo sapiens
gaatggagtcgccttctgcctggtcgggatcccgccccgcccggagccccggcccccacaggagccaaaaacctgtatatcatctccgtgaaggggat

SEQ ID NO: 84990 - DNA, 98 bp, Homo sapiens
gctttccttggacatctccatcagaaaacatcggttgtgaagagaaagccaaaaagaatgccaacaagcctttgctggatgagattgtgcctgtgtac

SEQ ID NO: 84991 - DNA, 91 bp, Homo sapiens
tttatgaaccagtgtatcccaagtcaaaatgcagatcttcgtgaaaacccttaccggcaagaccatcacccttgaggtggagcccagtgac

SEQ ID NO: 84992 - DNA, 90 bp, Homo sapiens
gtcaatgctgtggatgagcttgacttcagtattgatgctcctccatcctttaagccagctaagaagtattctgatgtttcaggtctgctt

SEQ ID NO: 84993 - DNA, 98 bp, Homo sapiens
ttggacagtctgcaccttctcttactgctggcctgaatacagattctgttcatcttgctctgaaattaaataattctgaactcatggggagaaaactc

SEQ ID NO: 84994 - DNA, 140 bp, Homo sapiens
ctactgcacggtgaacctggaccaggaggaggttttcaggaccaaaattgtggaaaagtcactctggaaggaatcgtgtctcctagtgacctggaccttgtcatgtcagaagggttgggcatgcggtatgcattcattgg

SEQ ID NO: 84995 - DNA, 73 bp, Homo sapiens
catgtccatggaggaccccttctttgtggtgaaaggattgtgattgctagcattatgtgcagttacaataaaa

SEQ ID NO: 84996 - DNA, 88 bp, Homo sapiens
tggtttgcaaagtgctcagcaaagcaggctgtaggtttagttgagcaccggaaagaacgctgttcacggaagaccaggatgtagatga

SEQ ID NO: 84997 - DNA, 100 bp, Homo sapiens
ctgcgttgtgtcatccgccccccgctcaatggcgactccctcaccgagtacgaagcgggcgtttgcgaaggtaagaatgattgatgttggctgatattgg

SEQ ID NO: 84998 - DNA, 90 bp, Homo sapiens
gagctgctatggtgctgagtttcctggtagagccggccgagctgaggcggtcgcggccatgaaggccgaggctgagatgcaggagcgcta

SEQ ID NO: 84999 - DNA, 75 bp, Homo sapiens
ttcatcattactaacaggatattcctcatgacattgctgtctgggattgttcgtgtagagcaaaagaataacact

SEQ ID NO: 85000 - DNA, 98 bp, Homo sapiens
gccactggagcagaaggtggggaggataaaatttggagcaagattctcaaggaagcaacaagatcctaagcgagtggtggagtctctgaagcctcatc

SEQ ID NO: 85001 - DNA, 100 bp, Homo sapiens
cttctcgacctgcttcagcctccagctctactaaagatctgactgcagccatgagcagcaatgagtgcttcaagtgtggacgatctggccactgggcccg

SEQ ID NO: 85002 - DNA, 100 bp, Homo sapiens
tcttcctccggcccgggccctggcccagctagccggccatggaagggtgaggtggctttgaccccgggttgcccggccagcacgaccgaggaggtggctg

SEQ ID NO: 85003 - DNA, 100 bp, Homo sapiens
cagctgcggaatttgcggctttggcagtgccctacttgttttgctccaagacagcctgctagcaacagccagttctcccaaattctcagagcttgttatg

SEQ ID NO: 85004 - DNA, 75 bp, Homo sapiens
cgtgttcgacatcctggccgtgctgcaggtttttagaacttcagccataaaaatgggcagaattttccttgatca

SEQ ID NO: 85005 - DNA, 74 bp, Homo sapiens
gggtgacgttgccttcgtcaggcacacaaccgtctttgacaacacaaacggtaaaagtgcagttttaaagtgtc

SEQ ID NO: 85006 - DNA, 78 bp, Homo sapiens
tctgggaggcttaccgagagtttgaaagtgcgattgtggaagctgctcggatcgttctgtacttgcgcatgtgccttg

SEQ ID NO: 85007 - DNA, 73 bp, Homo sapiens
aggagtcttcatgaaggtggtgaagcccaagagccctcaggactgcccccggaccctgctctcacccctggca

SEQ ID NO: 85008 - DNA, 75 bp, Homo sapiens
ggagaagacccctggatggtggagagtggagttccccaaggcgcacatctcgctggtgaatgcatatgtgatgac

SEQ ID NO: 85009 - DNA, 78 bp, Homo sapiens
tcagccactccctagcactcacagcttcaagaatccagaggctttaggaagaagataaaacgccttgaggagtcaaac

SEQ ID NO: 85010 - DNA, 76 bp, Homo sapiens
ctcctctgagcatcatctttcgaaaaccctacagcttggggcctgggctcctctgaccatcctcattgagaaagga

SEQ ID NO: 85011 - DNA, 50 bp, Homo sapiens
gcgaagtggagagcgccagagtaatggccaaaactggacaagccaaggca

SEQ ID NO: 85012 - DNA, 100 bp, Homo sapiens
gagagaggtggacagatctgagagatactgaggctatgtcttgatagttggatttttcagctttgttgtttgttacaagcatgggccccttgcagacgac

SEQ ID NO: 85013 - DNA, 100 bp, Homo sapiens
gccaggaggcgattaatgctacttgcaaaggcgtgtcctactgcacaggaagcggctcagccccagggcagcacatcagagacaccatggaacacagcca

SEQ ID NO: 85014 - DNA, 100 bp, Homo sapiens
gcgggagccccggcgggccgcgcctggtgatcggctccttaccagctcacctctcaccgcgcatgtttggaggacatggacatcttccagcaacagatct

SEQ ID NO: 85015 - DNA, 101 bp, Homo sapiens
gcaggatcagatggtactgaactttttgatcagagtatctgactgtcttctctcagatgattgcatttcatgatccagagctgagtaatcatctcaatgag

SEQ ID NO: 85016 - DNA, 98 bp, Homo sapiens
ccagtctgagtgtctgtccccagagcctcagtttgtgcaggacaccgacatggaacagggactcactggggctccatcaagtatgatggtgaaggatg

SEQ ID NO: 85017 - DNA, 49 bp, Homo sapiens
cgccgtcgcgccactcctccgaggacaagaatccttcaagaaacaggaa

SEQ ID NO: 85018 - DNA, 100 bp, Homo sapiens
aaacggagccagcggctgaggaggggccccagcagcccccgaaggccctatcaggacatggagtatgaaagacgacaaatttacatgtattggagaccag

SEQ ID NO: 85019 - DNA, 98 bp, Homo sapiens
gagcaccgcccgcgtcccggcccccggcaccatggacgcgccgcgcgcctcggcggccaagcccccgaccggtctaacaaagtgccagtggtgcagca

SEQ ID NO: 85020 - DNA, 90 bp, Homo sapiens
aggccacaaagacagatgttactgtggttaggtttccactatttgaactgctgggacctgaaggacttgaacttattgagaaactcctcc

SEQ ID NO: 85021 - DNA, 50 bp, Homo sapiens
cggagaggagtggcctcgcccgcttggctgaccaactgactgaagagcag

SEQ ID NO: 85022 - DNA, 75 bp, Homo sapiens
tccaagaccattcttcaagtttgcaaagggatttatcaaagatgttcatgaagactcccttacagttgtttttga

SEQ ID NO: 85023 - DNA, 51 bp, Homo sapiens
gcgctggaggcagcggtgcacgtgcagattggctctaccagtgcacctgga

SEQ ID NO: 85024 - DNA, 100 bp, Homo sapiens
gtggagccccggcggcggcggcggcggcgcgcgggggcgacgcgcgggaacaacgcgagtcggcgcgcgggacgaagagactctgacctgtttttgttgg

SEQ ID NO: 85025 - DNA, 100 bp, Homo sapiens
cgcagggatggaccgccgaggcggcggccggggcggcggaggcggaggcggccggcccgggtttgtgaacgcatctgcagatgccgggggcggcagcgcc

SEQ ID NO: 85026 - DNA, 101 bp, Homo sapiens
ccgcacttccgggttcctctgcaatggatgcttaaatggcagaggccaagcccagactccagacggacatgcggataaggccctgctgcggcagatggaag

SEQ ID NO: 85027 - DNA, 100 bp, Homo sapiens
atcacacgtcggctgctgggaagatctggattctcgtttcaggctaaagtaaataatgccagcctgattggactgggttatactcagacccttcgaccag

SEQ ID NO: 85028 - DNA, 100 bp, Homo sapiens
atgggcccgtgggcatatttagtcattcatttttgatcaggagaaagaagacagccatcatttgaaaggggcgaatgtgaacatgaagaccaacaaccaa

SEQ ID NO: 85029 - DNA, 90 bp, Homo sapiens
cgccgggagcgagctgggagggagccgcgcgcctttgtgcgcgcgccgagggtgtggacgaatcaggagccagtagattcacagtgctgt

SEQ ID NO: 85030 - DNA, 90 bp, Homo sapiens
gctatgccgacttcactctcctctccatcccgtatccagatatgtcttgtcgttcaagacttgcaacactaaacgagaaattgacagccc

SEQ ID NO: 85031 - DNA, 101 bp, Homo sapiens
aacaactcgggcgccgacgagatcgggggagtacatcaagacctggcggccacgctacttcctcctcaagaatgatggcaccttcattggctacaaggagc

SEQ ID NO: 85032 - DNA, 120 bp, Homo sapiens
atgaaaagcagtttccagaaattcgaaaacaaagagaacagcaagaaagatttcagcggctgacttatccttgtataatgaattccgattgtggaaggatgagcccacaatggacaggac

SEQ ID NO: 85033 - DNA, 82 bp, Homo sapiens
actgaacctggaaaagagccggatagcattgaagctgaacttacaagaagagtagacatgatggaactgtgacaaaagccaa

SEQ ID NO: 85034 - DNA, 96 bp, Homo sapiens
gtttccgcacaagagaccaaataagaagaaagctgagagaggggggaaacgtttttggatgacaaaggatggggagcatgacttcggcaacttcac

SEQ ID NO: 85035 - DNA, 82 bp, Homo sapiens
cccaacaccctctacgaaggcggctacttcaaggtgtcgtgaaaactacccctaaaagccaaaatgggaaaggaaaagactc

SEQ ID NO: 85036 - DNA, 100 bp, Homo sapiens
tccagatcctccaaagacagatctgtctgcgggccaggcatcgacatccgcaacgactatcagcagctgaagcgcctggagaactgcacggtgatcgagg

SEQ ID NO: 85037 - DNA, 90 bp, Homo sapiens
ttccaaacttggtgtcttttctacaaactctgtgcctcaacaaccatttctaagtggcacaccgtccctgcagtctggtggaagaacgcc

SEQ ID NO: 85038 - DNA, 100 bp, Homo sapiens
gcagccaaattcgtctgcgaagaagaaagaggagaaggggaagaacatccaggtggtggtgagatgcagctttcagtgaaaggttacaatgacaagcagc

SEQ ID NO: 85039 - DNA, 99 bp, Homo sapiens
gccaccggtgttccaactgtttaaagtgagcttttccctctgtaaccatggacccaaacgtgttgagaagtgatgtcttcgttgagtttttaaaactgg

SEQ ID NO: 85040 - DNA, 100 bp, Homo sapiens
cagtctgccttcaagaaaagacagaagtagaaagggtggtggctgactgtctgacaaattgttatcaggtgtgggcccatcgctggatggatctgtcaga

SEQ ID NO: 85041 - DNA, 100 bp, Homo sapiens
ccggagctggcagacaagaatgtgcccaaccttcatgtcatgaaggccatgcagcccctcaagaccctctcccgagaacggcccctgcccaacatcttca

SEQ ID NO: 85042 - DNA, 50 bp, Homo sapiens
ttcaatggatgaggaacagtcaaaggagctgtgactgatgagaattaaag

SEQ ID NO: 85043 - DNA, 83 bp, Homo sapiens
aagctgaagaagagcaaaaggcggagctgtagccactgtagcagcaagcatgacagtgatatatcagcatatacttacgagcg

SEQ ID NO: 85044 - DNA, 98 bp, Homo sapiens
caaaggctttctcgcttgtcaccttgccatgtggaagaaactggatgatgaaacatgcttgggataactataggacatatgggtggggacataatgaa

SEQ ID NO: 85045 - DNA, 74 bp, Homo sapiens
cagtgtgaatgcccagtgcattgaagagaggcagggggatgtgacatgtgtgatcagtgtgcgtgtgaccacca

SEQ ID NO: 85046 - DNA, 75 bp, Homo sapiens
caggagtgtcaaggcacaattccttggtttatggagattcgtctttgtaaaggtcctaggcctacttacaagcct

SEQ ID NO: 85047 - DNA, 100 bp, Homo sapiens
cgaggacgtgttgcaccctgaagagcctcatcatcggtacttgaagaagcagaagctcaacatttatatcagtccatcttgcctgatatggtgaaaattg

SEQ ID NO: 85048 - DNA, 50 bp, Homo sapiens
tcacgcagctggctggcttcagtggaccattgttcctgaaaatgataggc

SEQ ID NO: 85049 - DNA, 100 bp, Homo sapiens
gctccctctggatgtggaattctccgtccctttccagggagggaacaaagcccacagcaccgcttggacagcttttagcagctacatgcaaagaacttcc

SEQ ID NO: 85050 - DNA, 74 bp, Homo sapiens
aagccatgcccctcaggctggaacttgccctgtctcctcgcagatgagtttcaccagtgatcattaaagaatgg

SEQ ID NO: 85051 - DNA, 90 bp, Homo sapiens
ctgcagagtgaagaaagctggtaatagatgtctgacaaactaaagaaagacttgtgttaccgagtaaccagctcataaatcacatcgaac

SEQ ID NO: 85052 - DNA, 100 bp, Homo sapiens
cggccccggttctggtgtttggcgtcggattagtgatgatgaaccaggttatgaccttgatttattttgcatacctaatcattatgctgaggatttggaa

SEQ ID NO: 85053 - DNA, 100 bp, Homo sapiens
tttttgttggatgtttggccggctatggagcttaccgtgtctccaatgacaaacgagatgtaaaagtgtcactgtcctccttttagaggactcagaagaa

SEQ ID NO: 85054 - DNA, 99 bp, Homo sapiens
gggaccctgactgccctgatgattcagacgagtctttagatacctctcagagtcaagatctccactgaagttggcatcacaaatgttgatctttccacc

SEQ ID NO: 85055 - DNA, 75 bp, Homo sapiens
ctggatcgccggtggaccctgggcgggatggtcaacaggcagcacagccgagacaaagagagacttgttgaaatg

SEQ ID NO: 85056 - DNA, 90 bp, Homo sapiens
ctgatggaagaggagctccagcagcagcagacagccgctcaggaagcaatcttgcatgcgtctggaaatggcacaaccaaggactactgc

SEQ ID NO: 85057 - DNA, 75 bp, Homo sapiens
ctttgaaggaggatgctccagcagatggactctcgtcctgtcacccaggctggagtgcagcggcgcaatctcggc

SEQ ID NO: 85058 - DNA, 101 bp, Homo sapiens
accagcattgccaccaccaccaccaccaccacagagtctgtggaagaggtggttcgagttcctggtccagaactttacacagaaaaggtgctcaaaggata

SEQ ID NO: 85059 - DNA, 50 bp, Homo sapiens
tggagaaggcgttgcgaggagaagcagtgtccgagctgcaggaggaggga

SEQ ID NO: 85060 - DNA, 75 bp, Homo sapiens
ggggctgcagcgagagtgcatgagcccgaggaggcagggtctgatgggttgcctttccccatcttcctggttctg

SEQ ID NO: 85061 - DNA, 85 bp, Homo sapiens
caaagccagactacagctggttcttgaagctgctggtaagttctcttctacgctgtatgagactggtggctgtgatatgtcactt

SEQ ID NO: 85062 - DNA, 100 bp, Homo sapiens
gggaccacaagatcctcatcgacagggtaatcctgggaatggtgacgcttgggaacatgctctcgtccctgcttgccgggaaggtgcagccgtcagacca

SEQ ID NO: 85063 - DNA, 82 bp, Homo sapiens
ccgcaagtcccccccggagaaaaagttgaagcgttatcgatagtactaatgagtacatggacatgaaacctggagtttctta

SEQ ID NO: 85064 - DNA, 90 bp, Homo sapiens
caacagaaaagattttgctgtcaaagttgtgtcagtgaatacaaacagaatcgcatgtgtgagtgcccctagtgtttaccagaaactcag

SEQ ID NO: 85065 - DNA, 83 bp, Homo sapiens
ctcggctgcagacttggccaaatggacgggactattaaggtgtggacactgccagcggctgcagccgacttggaatgacctgg

SEQ ID NO: 85066 - DNA, 89 bp, Homo sapiens
gcttttccctctgtctgagaaatcagtgccaaagaatcctttacttcatctaaaggcagcagtgaaagaaaagaaaagaaacaagaaga

SEQ ID NO: 85067 - DNA, 74 bp, Homo sapiens
gagctctgcatcaatgcgccggccatagcagttggaattgatcacaccttttcagttgtacttcaatcctgaat

SEQ ID NO: 85068 - DNA, 75 bp, Homo sapiens
cgcgcccaccgcgccgcatccatgttcgagacagtactgcttttaaagagacagtgttagggatcttggaagcac

SEQ ID NO: 85069 - DNA, 80 bp, Homo sapiens
ccgtcactctcactgccattgccgagagtcctgttattgagggctctgccagcagacagccttggcacacaggcacaagg

SEQ ID NO: 85070 - DNA, 153 bp, Homo sapiens
cggcggcagcggcgtcggctcggggttctccgggagagggggagtgcgcggcggccgcagctgccacaaaccaggtaagtaaggaggtctctgtaccatggctcgtacaaagcagactgcccgcaaatcgaccggtggtaaagcacccaggaa

SEQ ID NO: 85071 - DNA, 100 bp, Homo sapiens
cttgtctgtatccgctgctcttgtgacgttgtggagatggggagcgtcctggggctgtgctccatggcgagctggatcgtcagtatttaaacagatcaca

SEQ ID NO: 85072 - DNA, 75 bp, Homo sapiens
accagctcttgtcccatggcggacaggacctctcagcagatgcctttcacagcaaagaaatgatgactttattga

SEQ ID NO: 85073 - DNA, 100 bp, Homo sapiens
gggaggcgaggaggaagaggaggcggccatgtatgaggaggagatggaaagggaagactgggtggcgcgtttgatggcccaggcattcgagagctgccag

SEQ ID NO: 85074 - DNA, 98 bp, Homo sapiens
aatctttttggctgttagatgctcttgttggaagaatactaccaggtacaccaggggttggaaaaaccacactaggcaaagaacttgcgtcaaaatca

SEQ ID NO: 85075 - DNA, 75 bp, Homo sapiens
ctttttcaagggagctgataaagaacttcttcccaaaatggatcctgacattgatgctgccagtgccatgatgct

SEQ ID NO: 85076 - DNA, 50 bp, Homo sapiens
gggacccctcctcaccgtgcggtcacgaatgaagactattctcagcaatc

SEQ ID NO: 85077 - DNA, 98 bp, Homo sapiens
tggcatgctattttggacacagacaagtggtccaggatctgttgaaggtgaaaaacaagcagctactcatgtaagtcttgatcaagaatatgattctg

SEQ ID NO: 85078 - DNA, 73 bp, Homo sapiens
tccttgtcctccctctgcacaagggacatcgatggagtgttgcagcgagcaaatagtacagagtatggtttgg

SEQ ID NO: 85079 - DNA, 100 bp, Homo sapiens
cttcatcacagacaacagcctggtggcagcgacttggtcaggtactttcagggcctgggccccccaccgaagttccaggtaacactgaatttctgggaag

SEQ ID NO: 85080 - DNA, 82 bp, Homo sapiens
gggagctgcctctgaggaacacgccgcagtcacctttctctccagtgccactactgcgctttcgatgcagaataattcagta

SEQ ID NO: 85081 - DNA, 75 bp, Homo sapiens
ggctgcggcatcgccggcctcgctatggaaaacctcacagcacgggtagctctgaacggattcagctctcaggaa

SEQ ID NO: 85082 - DNA, 100 bp, Homo sapiens
ctggagctgttcaacagcatcgccacacaaggggagctcgtaaggtccctcaaagcgggaaatgcgtcaaaggtggaacaatccaaagttttaatcaaag

SEQ ID NO: 85083 - DNA, 83 bp, Homo sapiens
cgtagacaccagctccgaaatcaccaccaaggtgaccagcgccatgtccagccaggtggtgggcattgagcctctctacatca

SEQ ID NO: 85084 - DNA, 100 bp, Homo sapiens
ggagagtcttcgcagaatgcaatgatgaaagcttctggttcagatagagtcccacgaactggctgggtatacagaaatgtccagaggccggagagcgttt

SEQ ID NO: 85085 - DNA, 51 bp, Homo sapiens
ggggcagcgcaccggcaggcgggtaacggaaggccattggaaatggggcgg

SEQ ID NO: 85086 - DNA, 83 bp, Homo sapiens
gacccggcctggcgccggactaggttcatctgcagaagccagcggacgcctctgttcaacttgtgggttacctggctcatgag

SEQ ID NO: 85087 - DNA, 75 bp, Homo sapiens
acaaaattatggataataatggaatatcttggtggaggctccgcactagatctaatggaggagatgtataagaaa

SEQ ID NO: 85088 - DNA, 75 bp, Homo sapiens
agaggcctctcccaaagcacctgcgcagattgggctaatggatactacagacaacagagaaaacttgttgaagag

SEQ ID NO: 85089 - DNA, 75 bp, Homo sapiens
agtgtaattgtggcttgtatcaacactgttactttcgtacattgctcagggagccaatggtactctggagaaccc

SEQ ID NO: 85090 - DNA, 82 bp, Homo sapiens
ccctcccttgcatgatggaaacaccatggctgcggcggcccagctctctctgacacaggattttttatcaagcagaaatgca

SEQ ID NO: 85091 - DNA, 90 bp, Homo sapiens
atatcacattttgagcactactgctttaaggctaccaagcagtttctcgaagagattaacaagtggacagttcagtacaatgtttccccg

SEQ ID NO: 85092 - DNA, 100 bp, Homo sapiens
ccagactctaagcggagcctcagcaccaaggcggcgactggcggcgcgatggacctgaccgggctcctgctggacgaagaaggcaccttctccctcgccg

SEQ ID NO: 85093 - DNA, 100 bp, Homo sapiens
ctctcccaacgactttgccttatggaaggcctctaagcccggagaaccgtcctggccgtgcccttggggaaagaatctgaatctgaagctgaagaaggtg

SEQ ID NO: 85094 - DNA, 75 bp, Homo sapiens
aaggtcccactgcagccctccaagcaggagaacgtatttaccgggcagtcaaagatctattcctacatgagcccg

SEQ ID NO: 85095 - DNA, 100 bp, Homo sapiens
cgtgggcgagtcttcatctaagggaccaagctggatgctgacaaatatgagaatgatccagaattagaaaagatccgaagagagaggaactactcctgga

SEQ ID NO: 85096 - DNA, 97 bp, Homo sapiens
ggatttatcaaatcgagtcactgtcaagtgaaaaggagaacagcttgaagacagatgattatggccgagacctgtcttctgtgcagacgctcctcac

SEQ ID NO: 85097 - DNA, 100 bp, Homo sapiens
ccatgtggatacctacggagcacgagaaatacggcgtgggaaattgacaatggcccttcagctatgctaggtctataatgggaagtgtcacagttcggta

SEQ ID NO: 85098 - DNA, 75 bp, Homo sapiens
atctgctgtttctgcttcaagtgaaaggaagcatgtttacaccaatgccaaaaagcagatgctaatttctcttgc

SEQ ID NO: 85099 - DNA, 75 bp, Homo sapiens
gttttcgcctgcagctgctcaccgcatgtacagaagcatattcccaatctgatgagcaatatgcttgccatcttg

SEQ ID NO: 85100 - DNA, 100 bp, Homo sapiens
acactacaaccggacccgacagcaggaagagatgctggggcttcaagaccctgatgcttggtgtgacctgagtaaatttgacctccctgaggaaccatct

SEQ ID NO: 85101 - DNA, 100 bp, Homo sapiens
gtggaccacatagacatttacgcggatgtcggcgaagagttcaaccagctgaagaagcatctgtagggaatccagaaggagcgttcatgaagatgttaca

SEQ ID NO: 85102 - DNA, 95 bp, Homo sapiens
gtgattcccgtgattgcgttacaagctttgtctccttcgacttggagtctttgtccaggacgatattgaagcacagattcgagaaattcaaggca

SEQ ID NO: 85103 - DNA, 74 bp, Homo sapiens
agaaggcggcggctctctggtccgcagcggcaacagtaacgaaaaacagggctatgccttcaattaagttgcag

SEQ ID NO: 85104 - DNA, 82 bp, Homo sapiens
cggctggctgaggaaatcgcctcccgagaagaagttgaggcgctatctcattgctatggacagtgctatcaccctgtggcag

SEQ ID NO: 85105 - DNA, 100 bp, Homo sapiens
gcccgagttatcgggaccctgttggttggtggaccaactgggtgatccctgccatctctgcagtggccgtcgccttgatgtatcgcctatacatggcaga

SEQ ID NO: 85106 - DNA, 100 bp, Homo sapiens
ctcaaccggcccacccgccagccagccagcgccttcatcctggggctgcgatggactctgaggaggaagaaaatgagctggaagctattaacaggaagct

SEQ ID NO: 85107 - DNA, 100 bp, Homo sapiens
tgtgctggggctttgattgcaaaagactgggtgttgactgcagctcactgtaacttaacactatgtggctgccgtgtaagagtggaactgtcgaatggtg

SEQ ID NO: 85108 - DNA, 51 bp, Homo sapiens
atcatggacagagagaaagaagctatgtcatcgcaacagataaagaagacg

SEQ ID NO: 85109 - DNA, 83 bp, Homo sapiens
cgaacccaaatcctgagtccaaacactcaagatgtttgctgaggctaaacactatcatgccaagttggtgaatataagaaaag

SEQ ID NO: 85110 - DNA, 76 bp, Homo sapiens
gaaatctgccaggagggtgcctcccgccagtatctgatgaaggtaagaggacagccatggacctactctggatgcc

SEQ ID NO: 85111 - DNA, 98 bp, Homo sapiens
aagaatctgatgagccttttaggcctgttcagggatagtaaagctctgaaggatgaaaatctacctcctgtcatctgccaggatgttgaaaatctcca

SEQ ID NO: 85112 - DNA, 74 bp, Homo sapiens
agaataagattcctcaatcctgagagagagaattaaagtctaactctccaaatctctccacacaaggagatgca

SEQ ID NO: 85113 - DNA, 100 bp, Homo sapiens
atgagcaatgattatgttcgtgtgactcagctttactgtgatggggtggagctcttacaggcaaaacaggatcttcaagatctgctgattgccaaagagg

SEQ ID NO: 85114 - DNA, 75 bp, Homo sapiens
aggagctgtggatagtgaagagaggcctctcacatgctacctgtgcagggcgagccctgctgagacttactgaca

SEQ ID NO: 85115 - DNA, 100 bp, Homo sapiens
ttcggaacgctcctctgcattgccattgttctgaggttatcaatagtctggctgtctatcgtcatcgtgagactgactttggtgtaggagttcgagacca

SEQ ID NO: 85116 - DNA, 75 bp, Homo sapiens
ggagatagtgcagagactgaagaatggtaccaaaccaccactggatgcagatgtaaatttggaagcaattgctgg

SEQ ID NO: 85117 - DNA, 74 bp, Homo sapiens
gaccccccggatctgacggggcgggacctggcgccaccttgcagagaagatgattcatcacagtctccaaatgc

SEQ ID NO: 85118 - DNA, 98 bp, Homo sapiens
aaccccaaccttcagaacctggaggagacaattgaatacaacgagatcctagagtcgaggtcaaggagacattctcatagacgttacactcgatccag

SEQ ID NO: 85119 - DNA, 83 bp, Homo sapiens
gtgtgtggggtctcgctggacgttggaggaaagaaggaatatctcattgcagattctgaagacaggaataagatgaaggaatg

SEQ ID NO: 85120 - DNA, 90 bp, Homo sapiens
cagctttttgtgctgccagcaagaaatgatcagtagcaccagtgtttatggaaaatgtttataggaggccttagctgggacactacaaag

SEQ ID NO: 85121 - DNA, 100 bp, Homo sapiens
acagctcctcaagtgcaacaagtcccacttccgaaaccacaagtttgccgatctagtgatgacctggaacttctctaccacatcccagaattcatccctg

SEQ ID NO: 85122 - DNA, 83 bp, Homo sapiens
gttcccttgggaaccgcctgggaactccgccatgtcatccacttcgcccaacctccaggctgatttggagcaatataaaaaag

SEQ ID NO: 85123 - DNA, 75 bp, Homo sapiens
gtgattcttgatcagtcatacgggaagagagagtaagagggactttgaacatgtcggggatcgccctcagcagac

SEQ ID NO: 85124 - DNA, 75 bp, Homo sapiens
cgagctgtgcgaggtgatcggaaagtgaaaggtgtagcagtcactcggcctacacccacagcatcgaccttgtga

SEQ ID NO: 85125 - DNA, 83 bp, Homo sapiens
ctgcctcggcccggacgcgcccgcgcccccgcggctggagggtggcccagggccccggccagtgcccagccccgctgggagac

SEQ ID NO: 85126 - DNA, 83 bp, Homo sapiens
agagatgtggggggattctcgacctgctaacagaactggaccttttcgatgtgttcagagcaacattgttttgttgacacaag

SEQ ID NO: 85127 - DNA, 128 bp, Homo sapiens
cagaatgcttctcagcagcaacatccccaaacagcggcgtttcacggtggcacatacatgatatgaatctgaaaagcttcaacaggaaaattctattttgagaaatgaaattactactttaaatgaag

SEQ ID NO: 85128 - DNA, 129 bp, Homo sapiens
gccagggaggagatcccctcagttctgcgctgctcccgttccccctccccagagcaaggagctctgccagtgccggccgggagaaggcaattgctcctgctgtaaggagtgcatgctgtgtcttggggc

SEQ ID NO: 85129 - DNA, 50 bp, Homo sapiens
tgatttaaacaagagatttccacagaagatcatggaagggaagtggttgc

SEQ ID NO: 85130 - DNA, 82 bp, Homo sapiens
cgcgcgcagggcctgcagcgggagctggacggcgagcgcgagcggcgcgagaaagttgatgataattagaagcatgctttcc

SEQ ID NO: 85131 - DNA, 82 bp, Homo sapiens
cagccgcaccatgccgctcctaagcctgcacagccgcggcggcagcagcagtgagaggccctgggcagtgacggggttcggg

SEQ ID NO: 85132 - DNA, 96 bp, Homo sapiens
tgataaagaacttcttcccaaaatggctgtccccaatctcttcatgctggaaacagtggattctgtgaagttggcagacaaagtgaacagttcctg

SEQ ID NO: 85133 - DNA, 100 bp, Homo sapiens
aactttgtaagtggcagaacaaggatttgaagctggcagtctggttccagagcaaggtccgtggtcctgtcagtggaagcccggatagcatgaatgcctc

SEQ ID NO: 85134 - DNA, 99 bp, Homo sapiens
cgagacttcagtatcctcatcaacttgataaagcaacccgatagcagaagggtcaactcttctgttggattttctgttttgcagcatacaagcaatgac

SEQ ID NO: 85135 - DNA, 100 bp, Homo sapiens
gacatttggaccgatcttttacatgttccacaagaagtgcagcttataatccaagctattactcaggcgttggagaccagggccagccctggccacaccc

SEQ ID NO: 85136 - DNA, 83 bp, Homo sapiens
gtgcctcttcatattggcgatcctgttgtggcgaactttctgaccaagtatacaactacccagagggcctaggagaagtgctg

SEQ ID NO: 85137 - DNA, 75 bp, Homo sapiens
atttgcgtcctagagtgggaaaaaagcagaggccagggcgccgtgaagatagtgatccggggagacaggaacacg

SEQ ID NO: 85138 - DNA, 50 bp, Homo sapiens
gaaattttgtctcacctgtgaaaaatcagacgcaaacatgcagatctttg

SEQ ID NO: 85139 - DNA, 83 bp, Homo sapiens
agaccttcatcagtgacgtgctgcagcgggacttgcgggccatcactgtgcatgtccccatgccctcagcaggagtcgtggac

SEQ ID NO: 85140 - DNA, 90 bp, Homo sapiens
caaagtgatccgaagcgatggagccccagctgaaggaaagcggaatcgatctgacaccgagcagacggttgatgatgaagcgccggccgt

SEQ ID NO: 85141 - DNA, 75 bp, Homo sapiens
gaaccgggggagcgaggcacggttatcaatactctggctgaccatcatcatcgtgggactgactttggtggaagt

SEQ ID NO: 85142 - DNA, 98 bp, Homo sapiens
cacattgccagtgacatagcttcagacagattttcagctgaactctcatctctcaacactggcaaatattcataagatctaccacacccttaataagc

SEQ ID NO: 85143 - DNA, 90 bp, Homo sapiens
ttgttggattgccaaatgttggacacagggctgggtgactccgtatgctccagccccagtatctccagcaccaccagccccaagctcgac

SEQ ID NO: 85144 - DNA, 100 bp, Homo sapiens
ggaaagcagctgagatccagaggagtggaaggctcccccttgactaaagctctgcagaaccttggcctgaaaatgctacattatatcagcaattgaaagg

SEQ ID NO: 85145 - DNA, 100 bp, Homo sapiens
tcctgtggaacgttttccagagtgcctgagattgtgagggagacccaggacctaattgaacaaggggcactcctgcaagcccaccggaagctgatggacc

SEQ ID NO: 85146 - DNA, 82 bp, Homo sapiens
tgaaggggcccatgagcaggtggacttcaaggacttctacccggccatagcagtgcacagccagagaacaacacatcacaca

SEQ ID NO: 85147 - DNA, 88 bp, Homo sapiens
cgacaagcacacactatggcgctgaaacggattaataagatgccttcaattaagttgcagagttctgatggagagatatttgaagttg

SEQ ID NO: 85148 - DNA, 114 bp, Homo sapiens
cacaacatctccacatcgctgtccccacccagccagggcagcgccagcactagctcagacgcaaggtgaaaccagcccagagaagttacgggatttgcccccggggctcctgcc

SEQ ID NO: 85149 - DNA, 80 bp, Homo sapiens
ctggcgagcctgcaggatggcgcggccgagtccccgtacggccacccggcggcgggctgacgcacgaggcacacaggaag

SEQ ID NO: 85150 - DNA, 76 bp, Homo sapiens
atttgccatgaagtactcacaggcaaatgaacaggagtacagctgtgtagtaaagatgccttctggtgaatttgca

SEQ ID NO: 85151 - DNA, 73 bp, Homo sapiens
ctggatgctggtgccactaatattggggccagtgtcattcaaagatgtggctgtggatttcacccaggaggag

SEQ ID NO: 85152 - DNA, 100 bp, Homo sapiens
agcccctccaaagatttactttcccatccgtgactcctggaatgcagaggagcccaaggtgggcatcaagaccatcaaggtgtactgccagcgcatgcag

SEQ ID NO: 85153 - DNA, 100 bp, Homo sapiens
gcccctgggcatcaccaacatagccatcgacttcggggagcaggtgaatgaaaactttgccattgatttgatagcagagcagcccgtgagcgaggtggag

SEQ ID NO: 85154 - DNA, 48 bp, Homo sapiens
ctcttctcgccctggcggggaagggagaacgaggcaagccggggctcc

SEQ ID NO: 85155 - DNA, 100 bp, Homo sapiens
tggttttccttgcagtcgcctgctgctgtcgtcgggaggttgactatagtcaatggggccaatggagccaagtgtatggaaacccacaacagtatggaca

SEQ ID NO: 85156 - DNA, 106 bp, Homo sapiens
agctgtgctcgcgctactctctctttctggcctggaggctatccagcatgatgtgctgactaaagacgcgggtgagtgtgtgatctgcctggaggagctgctgcag

SEQ ID NO: 85157 - DNA, 74 bp, Homo sapiens
ttttctacaaactctgtgcctcaacaaccatttctaagtgcttattcagctgattctgaatcatcttacactac

SEQ ID NO: 85158 - DNA, 75 bp, Homo sapiens
atgtatttaaccaagttccaacaaaagaatgctgccgcagccaagacaatgcaaactccagtgaacattcccgtg

SEQ ID NO: 85159 - DNA, 100 bp, Homo sapiens
gggtgtgcaaacccgagagaactggctctctccttcctgcttcctccttgctgtggtggctgggatgcttcttccatgattttttgaatctagactgggc

SEQ ID NO: 85160 - DNA, 75 bp, Homo sapiens
acagctgcagtctaatagtaacacagagaatgttggctaccagggtatttagcctagttggcaagcgagcaattt

SEQ ID NO: 85161 - DNA, 94 bp, Homo sapiens
tctctgctattgtctgctgcatccaaatcttctccctggacctcgtgcatacgttaagtgggcagaccaacatccacctcagcaaaaacttctt

SEQ ID NO: 85162 - DNA, 75 bp, Homo sapiens
gaacggagaatagagtacattgaagctcgggcactggtcacctgggaaggtgatgtccttgtgtgtgtgcaaaag

SEQ ID NO: 85163 - DNA, 100 bp, Homo sapiens
gagagctcctcggccccgcaggacggggaggattctgtacagatgagcataacttttgccatctgcacgaggtcagagctggaggatttcctgagtgaag

SEQ ID NO: 85164 - DNA, 75 bp, Homo sapiens
tctcgctccccggccgcccacccccagcctggaatttggtgttcacttggcagaactgactgtagatccccaggg

SEQ ID NO: 85165 - DNA, 80 bp, Homo sapiens
ggaggaagaagcagaaatggaaattgacagaattctctttgaaattacagcagctggtgaaactgcgtgctgtaagctgg

SEQ ID NO: 85166 - DNA, 101 bp, Homo sapiens
cagcagcggcagcggcaagcaccccagcacaggccagccagaagatgacactgagactacaggtttggaaggcggcgttgccatgccaggtgccgaagatg

SEQ ID NO: 85167 - DNA, 52 bp, Homo sapiens
aatagcttctctcctcacagaaatttaactgctatgcttctggtgaagtatt

SEQ ID NO: 85168 - DNA, 80 bp, Homo sapiens
actcggtgcacctgcttttttctgcaaatcgctgggaacaagttggagttggatcacaggattgattttgaactcagaga

SEQ ID NO: 85169 - DNA, 100 bp, Homo sapiens
cgggagatgtcgaaccccgggacacgcaggaacggctccagcatcaagatccgtctgacagcttaacaaacaacagttgcagttactgaaagaacggttc

SEQ ID NO: 85170 - DNA, 98 bp, Homo sapiens
tacagatgagtggctctttggcatttggtgctgtggcagattttgaagatgtaactgagtttctggaagaggtcattgaagccttgatattggatgag

SEQ ID NO: 85171 - DNA, 100 bp, Homo sapiens
ctgaggaaggccgtgttgtttgtctacctgggactagcatggcaatgaccaacgcgtgttccgtttagagtttgtctcaaaccaagaattcaccgaaagt

SEQ ID NO: 85172 - DNA, 89 bp, Homo sapiens
ctccgggcccgggcagcccgctgtgtggcaccgtctggaggagctctacacgaagaagttgtctgcattcaaaagagcattctattaaa

SEQ ID NO: 85173 - DNA, 88 bp, Homo sapiens
ccgcagaacctccacagtcaagaggacggtctgctcaccaggtggccagataccgcccacgtgcccccatcattgctgtgacccggaa

SEQ ID NO: 85174 - DNA, 120 bp, Homo sapiens
ctctgctgctttttctctttgtggatttccacagtgcatttccagtccagcaaatggaaatctgggtggaagatagatgataagcctgtaaaaattgacaagtgggatggatcagctgtg

SEQ ID NO: 85175 - DNA, 51 bp, Homo sapiens
gaaatatcccgagatggacttggatgcagacctgttatcctaaactaggtg

SEQ ID NO: 85176 - DNA, 50 bp, Homo sapiens
gctcggagcagcagcctctgaggtacatgtgaagattttttggcagctta

SEQ ID NO: 85177 - DNA, 100 bp, Homo sapiens
gggagccgcgcgcctttgtgcgcgcgccgagatactgaacggctgtattcagtggtgtttcaagaaatatgtaatcgctatgacaagaaatacagctggg

SEQ ID NO: 85178 - DNA, 83 bp, Homo sapiens
cgtggaagcaggactgcgccgcgtcttcctcaagaggagcaggagcggcttcgcttggagcaggagcgagagcaggaacagaa

SEQ ID NO: 85179 - DNA, 100 bp, Homo sapiens
tccgtgaacatgccaacaaattgattgagttggacagcacctcagtgaggcacacagccttatcccttatttctgtcattttgaagagggcattaaaaac

SEQ ID NO: 85180 - DNA, 99 bp, Homo sapiens
gctggaggagctgcagagggaccttgatgggacatcctggagggatcgactgcgggccacctgcacactctcagggaaccgggacaccctctggcatct

SEQ ID NO: 85181 - DNA, 100 bp, Homo sapiens
aaaggagcagggaagaaggaatcatcgaggcatgggggtccacactgcaatgtttttgtggaacatggcgtaacattcatggggtaagcaaagaaaaaat

SEQ ID NO: 85182 - DNA, 80 bp, Homo sapiens
gaggaagacccaaggagaacaaggggaacagaaccaaccaggctttacaggtagaacgtcatgacatgaataccttaagc

SEQ ID NO: 85183 - DNA, 83 bp, Homo sapiens
agataattgataacaccctgtaacagctgatgctgtgctgtggctttcattgagaagctagacgcccagtctttgaatctaag

SEQ ID NO: 85184 - DNA, 74 bp, Homo sapiens
actaaagttgtcatccgtggagcaggaaaccaggacctcagcatggccctgccctcagggcaggtctgccacga

SEQ ID NO: 85185 - DNA, 126 bp, Homo sapiens
cccaatttttggactgtgctctcaaactttactttgcctcatttgaggagtgggaacaggcttcggcgaacacaaagatccagacatttaatgtggatgcaccatgccagaccgtggaagatttaa

SEQ ID NO: 85186 - DNA, 98 bp, Homo sapiens
tcttgcatgttggggaccacacggaatttgtcaaaaacctgctgccaaagtctataggtctcggcgcggaagatggccggcggcgtggacggccccat

SEQ ID NO: 85187 - DNA, 100 bp, Homo sapiens
caaggcaagcctattgagttaacacctctgccgctgctaaaagctgaacaggaagacacccagaagaaagccttcacgtgctggataaactcacagttgg

SEQ ID NO: 85188 - DNA, 100 bp, Homo sapiens
ctgcaagagaaggcactcaagtttatgatctgactgcagccatgagcagcaatgagtgcttcaagtgtggacgatctggccactgggcccgggaatgtcc

SEQ ID NO: 85189 - DNA, 100 bp, Homo sapiens
ccgcgaagtggcccgagaccccgctgctgctggaggcaagacaaggcgcctctgtcgaagagccttctgctggtccccagtgccctctccctcctgctcg

SEQ ID NO: 85190 - DNA, 82 bp, Homo sapiens
ggatggaggggattttgtcagcttgtcgtcaagaacccagacctggactcagaggcgctgctagccctgcccctgcctcagc

SEQ ID NO: 85191 - DNA, 87 bp, Homo sapiens
tcgatgagtcggagaagtcccggactttgaacatgtcggggatcgccctcagcagactcgcccaggagaggaaagcatggaggaaag

SEQ ID NO: 85192 - DNA, 98 bp, Homo sapiens
caaggcgcgccactcctcccggaggcgacatggggcacccggtgtaccgcggcgagaagccccagctgcactacgcgacaagcagatgcccagtgtcg

SEQ ID NO: 85193 - DNA, 100 bp, Homo sapiens
ggtaacaaagattcaaatggcgcaaaaaagaatcttcagtttgttggcattaatggagggaaatacaactggagcacgcaaagcaagcctttgtgcaacg

SEQ ID NO: 85194 - DNA, 98 bp, Homo sapiens
tggtgtgggtttcccaagcaaggttccttggaagaagatgtctgcagaggcagtgctcggaatgtgaccaggcagggagcagtgacatggaagcagat

SEQ ID NO: 85195 - DNA, 100 bp, Homo sapiens
ctttgggaagtggagcaccgatgatgtgcagatcaatgacatttccctgcaggagttcaaagaaggacgcagagccagccacacagccccacaggtcctc

SEQ ID NO: 85196 - DNA, 75 bp, Homo sapiens
gggccggggtcaccacgcctgccccagggaaccgcacagattttgcaagaacgaggctcaaggatgtgagggaca

SEQ ID NO: 85197 - DNA, 101 bp, Homo sapiens
tattaccctttgtgtcatcctccacagctccagggaaggcactcaaaagtggggggcaggaaagcacccttacccttctgaagaacagaaaaagcagttgg

SEQ ID NO: 85198 - DNA, 98 bp, Homo sapiens
ctgaacattatgtggaaggatcaacagtcaattgtgtactagcattccaaggtgatgcagaagatggggaagaatatgatgacccttttgctgggcct

SEQ ID NO: 85199 - DNA, 100 bp, Homo sapiens
cttcgccaaggacattgggaattgtgcctacgaatcccttggcaccatgtcctgtgtgcattataaattttcctctaaactcaactatgataccgtcacc

SEQ ID NO: 85200 - DNA, 75 bp, Homo sapiens
gcgggatacagtggagctacaacttctgaaggaccaagatcactccatggatgaaatgacagctgtggtgaaaat

SEQ ID NO: 85201 - DNA, 83 bp, Homo sapiens
aggacatggcctccgacgaggacatgttacaggaggttccagtggcatcgggaagtgcattgctatcgagtgctataaacaag

SEQ ID NO: 85202 - DNA, 50 bp, Homo sapiens
ctgaagggggactacaggttcgagaggttacacatcattttggaatgact

SEQ ID NO: 85203 - DNA, 90 bp, Homo sapiens
cccgtgggcctgtggactgcagcctcggcggtcagcaggaaatgctagtgagtcggaggaagaccgcagcgccggcagtgtggagagccc

SEQ ID NO: 85204 - DNA, 80 bp, Homo sapiens
cactccgtcccccgcgggtctgctctgtgtgccatggacggggctgggttacgacccctacaaccctgagctgcccaagc

SEQ ID NO: 85205 - DNA, 114 bp, Homo sapiens
gctctgaaagctagaagaaaaggtgtacttgcaagaaacctcaggacttgagtaacagcaacatgccaaagaaacttgcctttagcaattttgggaatttgagaaagaagaaac

SEQ ID NO: 85206 - DNA, 73 bp, Homo sapiens
agcggcagctccagcccggcccggcagcgacatggaaggattgttaaaatgagtcttcggaagcaaaccccta

SEQ ID NO: 85207 - DNA, 97 bp, Homo sapiens
agaaaacattgtaatggccatcgctggaaacaagtgcgacctctcagatattaggtttccttaatgacaacaaaaaagggagtaatcctacccactg

SEQ ID NO: 85208 - DNA, 51 bp, Homo sapiens
aaagtgccgctttaaggagaactgcagagctggaagtcgagtgtgctactc

SEQ ID NO: 85209 - DNA, 100 bp, Homo sapiens
tctgtgcgctaaccccggagcccggccccggggaactagggagcgtctccggctgcacagcgctcagatctcagttttccattcgtctgagaactcgttc

SEQ ID NO: 85210 - DNA, 100 bp, Homo sapiens
ccaaggaaggatgagaatagctactgaaattcgggaactggagcctctcctctgtcacagtgacaatccatctcagctcatctggacatcatctcgcagt

SEQ ID NO: 85211 - DNA, 49 bp, Homo sapiens
ctcaaagtgtgccttctcgggaacctaaaggcagacccagaagagcttt

SEQ ID NO: 85212 - DNA, 56 bp, Homo sapiens
gcctgccccgccggagcagcatcatcaagtgtacacttgactgtgaagtggctgtg

SEQ ID NO: 85213 - DNA, 50 bp, Homo sapiens
acatgagacagcagccaaacccccaggtcctagcagaagatgtgactcag

SEQ ID NO: 85214 - DNA, 88 bp, Homo sapiens
agatcacagcggaagattctcaagagaaagtggctgatgaaatttcattcaggtcgttgaggacttccacatggagattggcacagga

SEQ ID NO: 85215 - DNA, 49 bp, Homo sapiens
ccggaagccgcgccgccgccgccaggtgctcctgacctctgataaagct

SEQ ID NO: 85216 - DNA, 97 bp, Homo sapiens
ggccgccatcaaccgccagatcaacctggagctctacgcctcctacgtttacctgtccatgggccttcatcctagaataatcactgaaggatttgaa

SEQ ID NO: 85217 - DNA, 101 bp, Homo sapiens
gcctcccagagtgctaggattacaggatgggcaacactccagattcagcctcagacaacctcggtttccgctgtgctgcagacgcaggccggccgccaggg

SEQ ID NO: 85218 - DNA, 100 bp, Homo sapiens
tgaggccgcggagccggactgcggttggggcgggaagagccggggccgtggctgacatggagcaggtcacctcatcatctcaaggaggagcattcccctg

SEQ ID NO: 85219 - DNA, 75 bp, Homo sapiens
ccagcaccttctgctcctcgtgggcatccacctcctcaagggagaaaagatccatgaggacatttttgacatcat

SEQ ID NO: 85220 - DNA, 74 bp, Homo sapiens
aacagtttccggtcaatgagcactattttggattagtcaatgcctctttgcacctccacgtgccttcagtgcaa

SEQ ID NO: 85221 - DNA, 82 bp, Homo sapiens
ggatggagaagcagctgggggccttggctgtaaggacccctaaggatcttggagaaattcattcaaggcttttggatcacag

SEQ ID NO: 85222 - DNA, 100 bp, Homo sapiens
gaagaactttcagatatcttctcagaccataataaccatttgaccagccgagaactactgatgaagccacagaacagcatgcctgacatcatcatctgga

SEQ ID NO: 85223 - DNA, 75 bp, Homo sapiens
taagagtggacaggttaagggactcccaggaatatcagccttcaggctctacacacagatgatcctctcacttgg

SEQ ID NO: 85224 - DNA, 80 bp, Homo sapiens
gcgtctcggaaaccggtagcgcttgcagcatggtggggaccaaggcatactgaacacattttttagcagctgggcaacaa

SEQ ID NO: 85225 - DNA, 100 bp, Homo sapiens
tttggagcttccatcctggttcttccaaagtgcccggacccaaaacaggaaatggcccactgcgtgaccttggttcagctgtccatttcctgtgaccatc

SEQ ID NO: 85226 - DNA, 100 bp, Homo sapiens
ctggagcacttatctgcgccccctgctggttgtgcgaaccccgggcagcccgggaaatctccaagtcagaaaggatagcagtgagattcacttcaaagtg

SEQ ID NO: 85227 - DNA, 128 bp, Homo sapiens
ccaggagttcgtctcttacgtctgcggaagtgcagctgcctcagttcttagcgcagatctcacgccacctgggcaagatgtatagtgagatgatcttcgtcaatggcttcgtgcactgcgatccccac

SEQ ID NO: 85228 - DNA, 88 bp, Homo sapiens
aagcaggacatcttgaccatcttcaagcgcctccgctcggtgcccactaacaagtggcggcttatttggcctccccaggacggactgg

SEQ ID NO: 85229 - DNA, 108 bp, Homo sapiens
tcactgctctgctgtctcctgcaagaactggctcaagaaatttgcctcgaaaaccaaccactgaggcggctcccagctgcgttggcgacatggccgacacccccagag

SEQ ID NO: 85230 - DNA, 107 bp, Homo sapiens
gttccttgtggagccggagctgggcgcggattcgccgaggcaccgaggcactcagaggagcccgtggaccgggagcccgtggaccgggagccggtggtgtgccaccc

SEQ ID NO: 85231 - DNA, 90 bp, Homo sapiens
ggtgaattttgaagtcttcatcagtatatccatattaaaacgagatgacagaagccaaagtaattatgcttcctgcctgacacagctcac

SEQ ID NO: 85232 - DNA, 97 bp, Homo sapiens
ctttgttattggagaaacatgcagattatatcgcatcctatggctcaaagaaagatgattattgtcacactgagtccccgccagggcctcccgagga

SEQ ID NO: 85233 - DNA, 100 bp, Homo sapiens
actacctgtctttcgctgagatggacgaggtcagcaagaaacgcatcttctccaccatcctgggcaactggttgggtctataagaaggagaaagctcgag

SEQ ID NO: 85234 - DNA, 90 bp, Homo sapiens
aatccaaagactgtggaacttttaagtggagtggtggatcagaccaaagatggggttttgactctgggaggagggctgccttatttggag

SEQ ID NO: 85235 - DNA, 83 bp, Homo sapiens
cccgcgcctcgctcagctccaacatggtgcagaccatgaattacgtggggcagttagccggccaggtgtttgtcaccgtgaag

SEQ ID NO: 85236 - DNA, 75 bp, Homo sapiens
gtacatgggaattatggtcgagttttcagagccttcatgttgtttgcattcacttggttggaaggggagagagaa

SEQ ID NO: 85237 - DNA, 100 bp, Homo sapiens
cccacgctcatgatcgacttcctcacccgcgcctgcgacctcgccttcctctgccaggacaagtttgtcgtctgctctgagctatcaagccccttaggag

SEQ ID NO: 85238 - DNA, 90 bp, Homo sapiens
gcggagcccggctcccgcaccatggaggaggacgacagctacggtttttcgttggaatatacgttgcacatttatggcgattctgagtgt

SEQ ID NO: 85239 - DNA, 100 bp, Homo sapiens
ttaaataacaactgaatagcaaggaccttctggaacataatcttacattcacattgcccccaaaggacccaaaattgtgatgacgcccagcagagcccgg

SEQ ID NO: 85240 - DNA, 50 bp, Homo sapiens
ttttccagtgccctgaaaaataatctgtcttctaaggcagcaggtacacc

SEQ ID NO: 85241 - DNA, 75 bp, Homo sapiens
caaagcagcagccttctcgacagccttttactgtgaacaggtattgaagcccctgggtgataatttgatggagga

SEQ ID NO: 85242 - DNA, 49 bp, Homo sapiens
caggggcctggccagctacagagagaggaatatgatgaagaatgggcta

SEQ ID NO: 85243 - DNA, 100 bp, Homo sapiens
tggcatcgatggagccatgacaatttgggatttcaagtcaaaccggcacgatgtccaggcaccagaaccagaacaccatccaggagctgctgcagaactg

SEQ ID NO: 85244 - DNA, 50 bp, Homo sapiens
ctttgcatccggagagtggacaagaaattctgcaggctgggaagcccaag

SEQ ID NO: 85245 - DNA, 96 bp, Homo sapiens
ggacaagaagatactgccctggaaactggagcacccatcctaactgatgatgttagcctgcaggtgttcatggaccatttgaagaagctggctgtc

SEQ ID NO: 85246 - DNA, 100 bp, Homo sapiens
acagaaggttgcctcctcttccagtgggaacaactttgtgtccctggtgatgttggaacattaatgatggaacatggccaaacttcagtcatgatcctga

SEQ ID NO: 85247 - DNA, 51 bp, Homo sapiens
tgacagtctgcatgtgcagttttcaggttgaaatcacaaagattagacacc

SEQ ID NO: 85248 - DNA, 82 bp, Homo sapiens
ccggtgtaaatgttgagcctttttggcctggcttgtttgcaaaggttcaagggcagcaggaaagacgagatcctgggcatcg

SEQ ID NO: 85249 - DNA, 100 bp, Homo sapiens
aatacatccaggaaagacatggagattctcttaaaaagaatgacccattgccaggacgcatcaaagttgactttgtgatccctaaagaacttccctttgg

SEQ ID NO: 85250 - DNA, 75 bp, Homo sapiens
ggacgttcggccaagggaccaaggtggaaatcaaacatatccatgacgacattgaaaatgaattttttgtattca

SEQ ID NO: 85251 - DNA, 100 bp, Homo sapiens
caaacaggagctcaaaggattagatatagttagaagagattggtgtgatcttgctaaagacactggaaaggaagcagctcgagagtgtcgtagaaagaag

SEQ ID NO: 85252 - DNA, 104 bp, Homo sapiens
gagcgcactctggagggattctggcatcagggaggctttcagccggagaagcgagtttcagctggagcgggacggtatgcgggccatcctggggtcctacgaca

SEQ ID NO: 85253 - DNA, 89 bp, Homo sapiens
aactgaatgtgcaacttgcaagggaactggagacaatgaaaatcttgtcagtgtgaagcctcagtttaggtcatctggtggttcagaac

SEQ ID NO: 85254 - DNA, 74 bp, Homo sapiens
ggctcacttccctttgatgggcaaaacctaaaggtctggagggtgagcgacctgcgagactcacaagaggggaa

SEQ ID NO: 85255 - DNA, 100 bp, Homo sapiens
acagactcagatccaagtcaacagtgatcttaagattgaaagtgatgttcaagaaccaactgaaccagaggatgaccttgacattatgcttggcaataaa

SEQ ID NO: 85256 - DNA, 101 bp, Homo sapiens
gggtgaggtacaggctcagtctgcggccaagactccgtcctgcaagtgaataaccctataccttccaatttgaaatcagaagcaaaaaaggctgccaaaat

SEQ ID NO: 85257 - DNA, 75 bp, Homo sapiens
ggatgttcagagacaagtttgggattacctttttggaaaagaaatgtatcaggtggacccccaaaagtacaaggg

SEQ ID NO: 85258 - DNA, 49 bp, Homo sapiens
gagaaggagtttcagcctctggatggttcccctcatcagccaagcctgc

SEQ ID NO: 85259 - DNA, 100 bp, Homo sapiens
gggctgcctcgccgcgtctcgccacggtccacagaacgaggggaaagggtcactgtggatcaagccaggctcctctgagcagtccagggtctatttacag

SEQ ID NO: 85260 - DNA, 75 bp, Homo sapiens
gctggggaaggcgattggcatcgatctctccatcccttccgaggcccgacttcgtgatgtcttggcattgcccat

SEQ ID NO: 85261 - DNA, 131 bp, Homo sapiens
tagaaaagaaactcttcgactacttcaaccaggaggttttccgagacaacaacggcaccgcgaataccctctaccatctgctttggtcagggtgccgctcgaggatttaaaagcaacaagaagaaaaccaa

SEQ ID NO: 85262 - DNA, 100 bp, Homo sapiens
gcgtgattcactgaggagagaaacaggcctccttggagaccagctactacttttcagcatccttatgtgaggagaactgcgacacatcaccaagctgaag

SEQ ID NO: 85263 - DNA, 80 bp, Homo sapiens
cacttgtgcagaagggtgaatgccatgtcaactttgttcggaaggttctggaggacacgtgccggcggcaggacttcaac

SEQ ID NO: 85264 - DNA, 75 bp, Homo sapiens
gctagtgaagtataaggatcagatcaagaagatgagagagggtcctgcaaagtggaatgcagtagccctctgggc

SEQ ID NO: 85265 - DNA, 100 bp, Homo sapiens
tgtaaaccaaggagagagaccccaaaggaaatcaaccctgctgacaccttgatcgtggacttctagcctccagaacttcccacaggatcacatgttgaat

SEQ ID NO: 85266 - DNA, 82 bp, Homo sapiens
gggaaccctggtcaccgtctcctcagaattaaatgtgagggagtctgacgtaagagtttgtgatgagtcatcatgtaaatat

SEQ ID NO: 85267 - DNA, 100 bp, Homo sapiens
agtggcagtcgcattgtctctttttcttggatggttgggagcagatcgattttaccttggataccctgctttgggcggctgagccagaggccaactgcag

SEQ ID NO: 85268 - DNA, 82 bp, Homo sapiens
cgaggcaccgaggcactcagaggagggattacatctactacaacgacgtgtatgcctttaatctggacaccttcacatggag

SEQ ID NO: 85269 - DNA, 99 bp, Homo sapiens
atagatactaatgctctgcgtgttccgagggagaatatggaggccatttcacctctaaaaaatgggatgggcctggaatcctgctgctgaagatcagtg

SEQ ID NO: 85270 - DNA, 75 bp, Homo sapiens
agaaaatgaatgccaaatgggacacgaaatatggctacacacacctttctgcaggagagctgcttcgtgatgaaa

SEQ ID NO: 85271 - DNA, 100 bp, Homo sapiens
taagctcagcactctctaaaggagcaacagtttacagcccttccagatacagctaccagcgccagcagccctgtggtggcgacgacgatggaccaggagc

SEQ ID NO: 85272 - DNA, 100 bp, Homo sapiens
cccagcccgtggtcctgatgccaacagtgtaccagcagggcgttggctatgtgcccatcacaggccctgtttgtgctcttcgtcctggcctacatccaca

SEQ ID NO: 85273 - DNA, 75 bp, Homo sapiens
caaagcctgaacaggcagggccagacccaggaagggaaaaggccgaggcatcagcgtgtgaagaccgcaaagacg

SEQ ID NO: 85274 - DNA, 83 bp, Homo sapiens
taaaaagagatgtggggggattctcgacctgctaacagaactggaccttttcgaggaaaggagcagtggcttccggttgaagc

SEQ ID NO: 85275 - DNA, 84 bp, Homo sapiens
gagaaaaggcaacatcctgtcacaggccatgctctggcaaaaacgtcaaaatgcagatcttcgtgaaaacccttaccggcaaga

SEQ ID NO: 85276 - DNA, 101 bp, Homo sapiens
tgtcacaagattgaccacattgatcacatttggaaattttagcattcaggtgccaggaatgcagatgggacagccagtgccagaaacaggcccagctatac

SEQ ID NO: 85277 - DNA, 75 bp, Homo sapiens
ccgcggagtatacaccatgagcaaagctcaccctcccgagttgaaaaaataccagcgggcaagcagaaaacaaga

SEQ ID NO: 85278 - DNA, 75 bp, Homo sapiens
cttcgccgtcatccgcttcgaaagcatcatccacgagttcgacccgtgaacttgaagaatccagacagaaatgcc

SEQ ID NO: 85279 - DNA, 83 bp, Homo sapiens
ccggaaccagacgatgagacagagttgcgaccgcgcggcaggaggccactgtctgcagctcccgtgaagatgtccactccaga

SEQ ID NO: 85280 - DNA, 101 bp, Homo sapiens
cctttgccatcactgccattaagggtgtggggctggcctcgctcgtggcacctctgctgatctcacaggccatgggactggccctctatgtcctgccagtg

SEQ ID NO: 85281 - DNA, 100 bp, Homo sapiens
ggagaagctcttctccggggtcctcatggatctgtccaaaagcaaattcacaggcaatttcttttacaactacatgatgggcatcgagtttaaccctcgg

SEQ ID NO: 85282 - DNA, 75 bp, Homo sapiens
tcagagcgcggcggtcttcaagctctcacaggttcccagtgcccccgacaagcccctgctggtgtctccatctcc

SEQ ID NO: 85283 - DNA, 100 bp, Homo sapiens
tggcaattgaccgaccctcacagaagctgctgaaattcctgaataagcactacaatctggagaccacagtcccacagttctgggaggtgatcagtgatga

SEQ ID NO: 85284 - DNA, 95 bp, Homo sapiens
atcttctgggagctgaggaaccagatatcttgaaaagctgccagaaaggtcccttcaataatcaggagatggcagaatggtttcaggcgggctat

SEQ ID NO: 85285 - DNA, 75 bp, Homo sapiens
tcaggctggaacttgccctgtctcctcgcagatgaggtgactgcttagaaaactgcacagcatctgatgaaatta

SEQ ID NO: 85286 - DNA, 50 bp, Homo sapiens
cctgtacagcctgcagaactaacgggctcatgtcggggctgatgcagatg

SEQ ID NO: 85287 - DNA, 100 bp, Homo sapiens
tcacgactactagaaggggaggggagtggaaaggctctcagtgaaaaaggtgttggagcgggccggagagaagtagagtgggctgcgaggagaaggaaac

SEQ ID NO: 85288 - DNA, 100 bp, Homo sapiens
tcggagctcacggagagccgcctgaggagcggcacagggtgagcttgtcggccacagactgctacattgtgcatgagatctacaatggggagaatgccca

SEQ ID NO: 85289 - DNA, 82 bp, Homo sapiens
tcagggcaagggtgtccgacggctggagcggatgcctaaatcaaaggaacttgtttcttcaagctcttctggcagtgattct

SEQ ID NO: 85290 - DNA, 75 bp, Homo sapiens
ctggacggcgagcgcgagcggcgcgagaaagtctctctcctcctgggcgagccgttcttcactaccagcctgctg

SEQ ID NO: 85291 - DNA, 75 bp, Homo sapiens
ctcacggagctgggcgacgagctgaccctgggagacatcgacgatactctccattgcataatgtgaagttaccag

SEQ ID NO: 85292 - DNA, 82 bp, Homo sapiens
gaagaacggacgatctccttgaacttacagagccacataaagaagatccctaatagtcatttctcaacaattatatagtcaa

SEQ ID NO: 85293 - DNA, 100 bp, Homo sapiens
ctctctggtttccaggcagcgggggagagagccgggaagcactggggcattgccatgctgtggataatattaatgcagctgtgatggatttgaaaaaaaa

SEQ ID NO: 85294 - DNA, 82 bp, Homo sapiens
ccgatccagcctgcggagcctgtggggcagatacagtctcgctgtgatgcccaggctggagtgcaatggcgtgattttggct

SEQ ID NO: 85295 - DNA, 101 bp, Homo sapiens
agaatgtaataaacatggaggagttattcatatttatgttgacaaaaattcagctcagcttagcagtgtctgcaaaaacgaatcttttcctacaacctgtt

SEQ ID NO: 85296 - DNA, 100 bp, Homo sapiens
agctttctgctccccgaacctgctgcctctggccacagtgggtgctgacatcacaagaagttggagctgccacctgtgtctggacctgttgaaagagaaa

SEQ ID NO: 85297 - DNA, 74 bp, Homo sapiens
gtggccctcttgatccccggcttgctgaagtcaaagaggccttacatcgggaacaaatgttggaacagaagtta

SEQ ID NO: 85298 - DNA, 75 bp, Homo sapiens
ccctgcaggaactctacaacccaatccagttgactaatctccttcagaatcaagcagtgaaaggaaaagttgctg

SEQ ID NO: 85299 - DNA, 100 bp, Homo sapiens
caataaagcttctcctttgggttgtactcatagattgtgtaggcgttggtcttctgatagcaactttaatgtggatgaaaactttcggaagagaaagttg

SEQ ID NO: 85300 - DNA, 89 bp, Homo sapiens
ctcaacatctctcagagacgaaagatatgatgcttcctggtgtgtttagtggttggtgccattccaattttctgtgctgaaatcattct

SEQ ID NO: 85301 - DNA, 75 bp, Homo sapiens
gaacggctcccacagccgggcgttgggggaaagttggttgaatctggcgatgtggaacccatggatatggagggc

SEQ ID NO: 85302 - DNA, 83 bp, Homo sapiens
cttgcctgtgtcccacttgttcgcggcctatagatgaattccctctgctgacaaccaaacgtgtgttctggaagggtgttttg

SEQ ID NO: 85303 - DNA, 83 bp, Homo sapiens
cttctcttactcgtgttccctgccactgtcttgttccgaggcggccccagagttggagtcattcgttgcccagtttgcagcca

SEQ ID NO: 85304 - DNA, 52 bp, Homo sapiens
atggctcaaagaaagatgattatgcacctgaatggacagaagaggacctcag

SEQ ID NO: 85305 - DNA, 100 bp, Homo sapiens
agagactcttaatggaacaatgattctgaaaagaacggagcttgaagcaaagctgcaggttttaaagctctctctccagatcggattcaaccgcacatca

SEQ ID NO: 85306 - DNA, 100 bp, Homo sapiens
ttcgagtgaccgagaccgcggccgggaccgagggggcaagctctgtgtgattgattggaagacatcagagaaaccaaagccttttattcaaagtacattt

SEQ ID NO: 85307 - DNA, 76 bp, Homo sapiens
ggacgtgggctctgagccccgggccccaaagctgcacaaggtagggcatttgtccatgagtgggctcatctacgat

SEQ ID NO: 85308 - DNA, 75 bp, Homo sapiens
aacattggtctaaagtctttccaaaaggtcaaggttcacaagcggaggaaatatttgagagtgtaggagatcgag

SEQ ID NO: 85309 - DNA, 100 bp, Homo sapiens
agtcaccaagaaattactgtctcaagtgatacgattttcagctgaactctcatctctcaacactggcaaatattcataagatctaccacacccttaataa

SEQ ID NO: 85310 - DNA, 83 bp, Homo sapiens
aaggaagttgtggaagaggcagaaaatggaagagacgcccctgctaacgggaatgcttttgcagaaaaaacttcagcatgtgc

SEQ ID NO: 85311 - DNA, 100 bp, Homo sapiens
acgacaccgatttcctctcgccgagcggcggaaccagtgctgtggcgcatatggccctgaagactgggacctcaacgtctacttcaattgcagcggtgcc

SEQ ID NO: 85312 - DNA, 50 bp, Homo sapiens
cctagaagtcagtctcagatggtgagaaatggaagtaacagcaattcacc

SEQ ID NO: 85313 - DNA, 158 bp, Homo sapiens
cttcgtcgagaacggaggacaccggcggtccagggtcctgggcagtcgcgccagagctgagcggagggcgcggcgcgagaacattatctttctcaaggaatagatctttctggaatagaagtgatagaaaatgatctactttttattgcaagagcccg

SEQ ID NO: 85314 - DNA, 80 bp, Homo sapiens
tgaagagccagaccctcctccagaaccgatgagtgaggaggtccagaggtgtccttctaaagctggtagaggtttcacga

SEQ ID NO: 85315 - DNA, 75 bp, Homo sapiens
tcagcaggcggggaagatgaaagggtagatttcgggcagacaacttgaacaagctgaagaacctatgcagcaaga

SEQ ID NO: 85316 - DNA, 83 bp, Homo sapiens
ttgcagaagtggaaggagcagaacgtgagggtgtaacttacaaaaagggaacccgagcgtcatgttagggtgaagcagaggac

SEQ ID NO: 85317 - DNA, 77 bp, Homo sapiens
atgtcatcaagaagaatgacgatgcttgaaatccatggcccaaaatgactctaccagtggagactctcttctgtgaa

SEQ ID NO: 85318 - DNA, 111 bp, Homo sapiens
ctccgtggccttagctgtgctcgcgctactctctctttctggcctggaggctatccagctctctgctttctatccgtcaagatgataaagtcgtgtgcccgagaaccaaag

SEQ ID NO: 85319 - DNA, 99 bp, Homo sapiens
agatgcggaggctggcggccgaggagctgggggtcgtcaccatgcaggagttggcgatttcagcgtgtgggagttctctggaaatcctgtgtatttctg

SEQ ID NO: 85320 - DNA, 74 bp, Homo sapiens
ctgtcccacagggagctcaaagagtgggccaggttctccccatgacaccacctgaacgtctcttcctcccaagg

SEQ ID NO: 85321 - DNA, 50 bp, Homo sapiens
agcagtttgtggaagcgatcagtactaccattaaagataccttcttctca

SEQ ID NO: 85322 - DNA, 74 bp, Homo sapiens
gctctcactgcggagaggtgtttggtgcagaaggaatcagtgacgttcagggatgtgactgtggacttcaccca

SEQ ID NO: 85323 - DNA, 100 bp, Homo sapiens
gagataactttcgtatcacaaaagcagatgctgctgaattctggagaaagttttttggagacaagccaatatacccagtagaagaattagaagaagaaag

SEQ ID NO: 85324 - DNA, 100 bp, Homo sapiens
tgaaggagttccaccaggccgggaagcccatcgggccaagtcctgtatctgccatgtctgtggcgtccacctcaacaggctgcattcctgcctctactgt

SEQ ID NO: 85325 - DNA, 100 bp, Homo sapiens
cccggccaaagtcactgctgttaacaaggatggaagatgagaatgtgcctactgctcctgatcctccaagtcaacatttacgtgggcatgggacaggctt

SEQ ID NO: 85326 - DNA, 98 bp, Homo sapiens
ttacgtcagcgtgatgctgaggtgactcgactaagagaattaaccagctcttccaccaaagccacctaagccaatgacttcagcagttccaaatggaa

SEQ ID NO: 85327 - DNA, 89 bp, Homo sapiens
aagaacaggaagttgctgagctgatttcaaatatgcgtgcattagagaatgattttttcaattctcccccaagaaaaactgttcggttt

SEQ ID NO: 85328 - DNA, 78 bp, Homo sapiens
acaagagagcttctttgaagggaagaacatggcacttttcgaggttctgcggggagtgtctccagccctgcctgcagg

SEQ ID NO: 85329 - DNA, 83 bp, Homo sapiens
acaattttctgtacaccaatggaaagtgcgtcatcctaaggaacatcgaccaaaatgatgcttcaacacccaggccaggtctc

SEQ ID NO: 85330 - DNA, 75 bp, Homo sapiens
gtcgatgaagaggatgatgtttttggtgaagatcagctgtttcatgtattagccttgcacatgcggctttatagc

SEQ ID NO: 85331 - DNA, 75 bp, Homo sapiens
aacgctgggggtccctggaacgacgggggatgcaagctatggaggtggttggactgagtcccatgaagccagatc

SEQ ID NO: 85332 - DNA, 98 bp, Homo sapiens
gctggtggcgttcaagatgtcgaccaagaatttccgagtcagtgacggggactggatttgccctgacaaaaaactcttgtgactttacttcccatgga

SEQ ID NO: 85333 - DNA, 75 bp, Homo sapiens
ttctcggtttatgtgctcttccagattagaagcccaggacccaggaaggagacacaggaaatttattcaaagtcc

SEQ ID NO: 85334 - DNA, 75 bp, Homo sapiens
ctctcatgttcctccatgataaaggaatcatctataggcatctccttggaaacaatgccatctttgaatgtgaga

SEQ ID NO: 85335 - DNA, 100 bp, Homo sapiens
gacacgttggaagtagctgatgaagataacagtgaaatatcagattcagaggatgacagttgcaagaatctccgtatgttatgatgaagaaaaatcatga

SEQ ID NO: 85336 - DNA, 96 bp, Homo sapiens
cgtccgaggctcgcgggcggcgggcccggaaaccaatagagccatggcgactccctctgctgccttcgaggcccttatgaatggtgtgacaagctg

SEQ ID NO: 85337 - DNA, 88 bp, Homo sapiens
gaagggtgttcagtttgctcctttttctacatgcagaataacaagcctttgtattcatttgaagataatgcagactatgtttatgatg

SEQ ID NO: 85338 - DNA, 50 bp, Homo sapiens
gggggagattctgctcacggaactgcagcttccagaggagattggaaaac

SEQ ID NO: 85339 - DNA, 97 bp, Homo sapiens
actaccgcgactggctgctgcggcgcgaggctggagggcagttgtgcgatcttgattcacttcaacctctgctctccgggctcaagcaattctccca

SEQ ID NO: 85340 - DNA, 100 bp, Homo sapiens
gcccaagctactggtgccagaacacagagacagcagcccagtgcaatctgcaagctttcttcctggtggcagatgacatcatggattcatcccttacccg

SEQ ID NO: 85341 - DNA, 96 bp, Homo sapiens
aaacctggagccagaaacattaccgtcatattccacccattactaaggcttttctgatgtggatcacacctatgctcaaagaactcagctctttga

SEQ ID NO: 85342 - DNA, 100 bp, Homo sapiens
ctgtgcaagaacggatctccctctccggctcagctatgtgaaccatgcagaggacctggcctccaagctcctacaatgttccccaaagaacagactgtcg

SEQ ID NO: 85343 - DNA, 98 bp, Homo sapiens
tggaggcaggctgcggcagacggcgacagtggcggcggcgccatggcagggcttgcagacgtccttctatggccgcttcaggcacttcttggatatca

SEQ ID NO: 85344 - DNA, 82 bp, Homo sapiens
aacacgagcgagacatgcactgagcaggccgggctctcgccatgggtcactgtcgcctctgccacgggaagttttcctcgag

SEQ ID NO: 85345 - DNA, 100 bp, Homo sapiens
acgaggccgggacttggccgagcggatcctaataaggggaaaatgaaacgcttcgttaagggactcaggcagtacgggaagaacttcttcagaattagaa

SEQ ID NO: 85346 - DNA, 90 bp, Homo sapiens
gcgcaggaggcggtggagcgcagagcgggcgagcgcgggacccgtgacattaaaggatgttattgtggaattcaccaaggaagaatggaa

SEQ ID NO: 85347 - DNA, 98 bp, Homo sapiens
catcaaaacaccagagcgactttcattagaaggagagcgacagcccaagtcaccaggtgctcatggaaacaacctcattgctgttctagccaaataca

SEQ ID NO: 85348 - DNA, 101 bp, Homo sapiens
tgctcactggaaggatcataggtggcactcatgtctcactgccccactcagagctgaggcttcgaagacctcagaggacttctctcagcactcacagaaac

SEQ ID NO: 85349 - DNA, 85 bp, Homo sapiens
caaaggtgaatcttttggttggtgattttgatgatagccacaaagcaagcaggtgctctggtgctactgattgctcaagagaagg

SEQ ID NO: 85350 - DNA, 50 bp, Homo sapiens
ttacaacatggcagacattgacaaacaaatcttcctattttcaagctgaa

SEQ ID NO: 85351 - DNA, 74 bp, Homo sapiens
ccagacagcctttatctgccttgaccttcccctcctccaatgagtcccgccaatgccccaatgcccgttgccag

SEQ ID NO: 85352 - DNA, 97 bp, Homo sapiens
agcgacaaatttagagaaacctcggcaggttgaaaggattgttgacaaaaggaaaaataaaaaagggaagacagagtatttggttcggtggaaaggc

SEQ ID NO: 85353 - DNA, 75 bp, Homo sapiens
ccgtgttctagtgaaacagaagaaggccagctttgaggaaggaaggaaaatcacctcggcagtgtttgaaggaag

SEQ ID NO: 85354 - DNA, 90 bp, Homo sapiens
ccatttcccatccagtactgaagtgttaaagttagaagacatttgctaagtcaaatcacttcaggatttctctctgatcaaacggacagt

SEQ ID NO: 85355 - DNA, 74 bp, Homo sapiens
ccagccccggccccagaagagtggctggacattctgggattctgtttcactgaggccatctatccgatttcaag

SEQ ID NO: 85356 - DNA, 78 bp, Homo sapiens
cagcaaggtcggcagagcaaggggcttacgcagaaggacctggccacggtcaacaacggttccagcctcagggatgag

SEQ ID NO: 85357 - DNA, 51 bp, Homo sapiens
atcaacttgtttgcaaaatgaacagtcattgatgttgatgggacaatgaca

SEQ ID NO: 85358 - DNA, 100 bp, Homo sapiens
cctcaagtacttgcaccagcgcggcatcttgcaccgggacctcaagttggtcgtggagatgctgaaggcgctgcacgcgctgcagaaggagaaccagcgg

SEQ ID NO: 85359 - DNA, 100 bp, Homo sapiens
tcaagaaggtgccggtggtgcgagtcttcggagcgaccccggcagactgcctctttaagctatgtcccatgaaccgctactctgcccaaaagcagttctg

SEQ ID NO: 85360 - DNA, 90 bp, Homo sapiens
cggagccgcggagcctcagcttccgcctggacccagcctcgtgggagccccgcgggtcctgcccaggtattgacctgatggacatggctt

SEQ ID NO: 85361 - DNA, 80 bp, Homo sapiens
ctcgcgccggctgctctttccggttacatggacacagaacagtatgaagaagcagtacgagactatgaaaaagtatacca

SEQ ID NO: 85362 - DNA, 100 bp, Homo sapiens
cggacatcaagtattcaccagttaatagcaccagttgtatatgaacacagatcaagattagagaaatccttgcaaaaagaaagacttgaacataaaaaag

SEQ ID NO: 85363 - DNA, 100 bp, Homo sapiens
gtagggaccaaactgtatatgagcccagagcagctcatttagaggcgagttttgaggaggtagagaacaacctgctgcatctggaagacttatgtgggca

SEQ ID NO: 85364 - DNA, 100 bp, Homo sapiens
tccgacgcccgaggagaaggaggagtggattaagtgcattaaaacatgaaaggctcccggagcagcgctgactcctccaggaaacactgaggcagacgtg

SEQ ID NO: 85365 - DNA, 83 bp, Homo sapiens
tgagcggaaaggggcccggcgtctgcctcgagactgaagaccgccttatgccagcctggaccatcttggaggcagtgtaggat

SEQ ID NO: 85366 - DNA, 83 bp, Homo sapiens
gcgggagctggacggcgagcgcgagcggcgcgagaaagttgacatcatggacatatgtgagtccatcctggagaggaagcggc

SEQ ID NO: 85367 - DNA, 120 bp, Homo sapiens
tacctgtctggagcaaggaaaagagccctggaatatgaagagacatgagatggtagctaaacatttaggtcattatccagctcaggaaaacctgatgttccttgttctctgtacatgaag

SEQ ID NO: 85368 - DNA, 112 bp, Homo sapiens
ggacagcagtataaaacccagaagcagaacttgaaggttaaaccactagcccatttcacaggtgtctttcaggttgcagaaaagatggaaaaaaggacatgtgcactctgcc

SEQ ID NO: 85369 - DNA, 73 bp, Homo sapiens
ttcaagcttaggaccacccaccatgcctatccaggctctgtccagcagtgtaagctccagcaagctgttctcc

SEQ ID NO: 85370 - DNA, 82 bp, Homo sapiens
ccttcggcagtccacccaccgccgccgcctcccaggcagagtggcatgattccgactggatactctcagtgccagccaaatt

SEQ ID NO: 85371 - DNA, 75 bp, Homo sapiens
tcatccgcatcaacaagatgttgtcctgtgctggggctgacagtattggtaaaggttttcaaggtgtcatgaaaa

SEQ ID NO: 85372 - DNA, 111 bp, Homo sapiens
gtacaacgtgctggagagaccccgcggctgggcgttcatctaccacgctttcgtgtattctttaggtgatgctagaaggcctcttcatgaaacagcagttttggtagaaga

SEQ ID NO: 85373 - DNA, 82 bp, Homo sapiens
cggagggagctgaccgaccgactccaggcgaaagaagcttccggttctgaggtcctggaggtgccatttccctctctgttga

SEQ ID NO: 85374 - DNA, 82 bp, Homo sapiens
gcgaacgaccaagagggtgttcgactgctagagccgagcgaagccagcgtccgtctccaagagagtatgaagagagtgcgtc

SEQ ID NO: 85375 - DNA, 96 bp, Homo sapiens
cttcttctgatcacagatggagtggaatggcttgaagatggtgaaggtaggcaatgaagttgctacaggaacaggacctaataaaaagatagccaa

SEQ ID NO: 85376 - DNA, 90 bp, Homo sapiens
agacggaagccctgggactggctcgatcgcatggggaacagggccagatgccggaaaacatgcaagacggttgatgatgaagcgccggcc

SEQ ID NO: 85377 - DNA, 87 bp, Homo sapiens
aggactctatgacacggccggacagatcggatcaacatcaagaggaagggagcgtggccctccaccctcctgtccgtgcagaacgtc

SEQ ID NO: 85378 - DNA, 74 bp, Homo sapiens
cgaccctgagaacttacctgagatttcgtcacagcatgcagccagtaaagatcccagagaagttcgagaagcta

SEQ ID NO: 85379 - DNA, 74 bp, Homo sapiens
gagaaatctcgtctcgaccaagagctgaagctgatcggacagacatggtggttctgattgcctgggagatagcc

SEQ ID NO: 85380 - DNA, 90 bp, Homo sapiens
agccatggtatcggcaaggatgtggagtcctgccatgatatggtttattgttggccaaaaccaggctttgattgaaccaggatgaatgcg

SEQ ID NO: 85381 - DNA, 76 bp, Homo sapiens
gcgactcccatgcatcggctaatagcccggagacaagcgtgtgtgatcctgtaaaattaaatcttccaagatgatc

SEQ ID NO: 85382 - DNA, 75 bp, Homo sapiens
cgatcgaggtcaagaacacgatcacgttctagatcacatactccaagaagacaggcagctgcaatgactctccgc

SEQ ID NO: 85383 - DNA, 75 bp, Homo sapiens
gagattacagctgtgagccacctcccctggccataaagtagagacggggtttcactatgttggccaggatggtct

SEQ ID NO: 85384 - DNA, 98 bp, Homo sapiens
cctcgctctgagctgcgcctggacctggttctgccttctggacaatctttccggatgtacagttacccagcacgtgtacctcctcctcctcctattgc

SEQ ID NO: 85385 - DNA, 100 bp, Homo sapiens
gcgactagtaagcctatgtcatttcatccaccacattacttagtgtctacccctgagctggctgcccaatctgatttcatcgtcgtggcctgctccttaa

SEQ ID NO: 85386 - DNA, 80 bp, Homo sapiens
ctcaaggcaagcctattgagttaacacctctgccgctgctaaaagcaccttccaaaggacctactgttcggacaaaaaaa

SEQ ID NO: 85387 - DNA, 109 bp, Homo sapiens
ctcaaattcacaacctccggggatgcgaaaacacccggccttactgaggaacaaagggccaccagcttgggctccccacggagggcagcaagtgggacttggggaaccc

SEQ ID NO: 85388 - DNA, 100 bp, Homo sapiens
cgccctgggacaaccacgtctccggccacgagtgtgaacatggctacgcctcttcattcccgtccatgccgagcccccgactgcagcattcaaagccccc

SEQ ID NO: 85389 - DNA, 83 bp, Homo sapiens
gccaggtttactggagtaggtgttagtaagaactccatccggcacaacctgtcactgcatagtcgattcatgcgggtccagaa

SEQ ID NO: 85390 - DNA, 83 bp, Homo sapiens
tgccccttggtgggctgaagcttcatggaggtacactgatgctgaagtactatgagccttcggaacttgtggagagactacaa

SEQ ID NO: 85391 - DNA, 101 bp, Homo sapiens
atctgatccacatgcgtgtggcagcccaaggctttgttgtaggagcaatgactgttggccacctggttcttagtcccccacctccgcacacgggccctgcc

SEQ ID NO: 85392 - DNA, 74 bp, Homo sapiens
gcaaatgcagaggaagaatttttctatgagacacagctccgaattgattccttctttagattagcacaacagga

SEQ ID NO: 85393 - DNA, 75 bp, Homo sapiens
caccaaactgattatgaattgccctgaaatctgaaaaatttcaattccaatctttgagttcatgatcgagtccat

SEQ ID NO: 85394 - DNA, 83 bp, Homo sapiens
ggagctgcagtcggcactgctactgcgaagacagctggcaggaagatgttaccgagtacttcagtgaattccttagtgcaggg

SEQ ID NO: 85395 - DNA, 75 bp, Homo sapiens
gcctaaagagagcccggagccagcgtgggaggccgctgccgtcgcgcgccttggctgaaggggatgctaagggag

SEQ ID NO: 85396 - DNA, 83 bp, Homo sapiens
ctgtattctgaagacagcgccccagcatttgccatcttcaagtttgttcagatgtctttggtggacttgggaaagaggttgct

SEQ ID NO: 85397 - DNA, 100 bp, Homo sapiens
aggaccgcttcccccgagccagcagtcaccttcaggccattcagaggaggaaagagaggggaatatgaagtcagccaagccccaagtgaaccacagtcag

SEQ ID NO: 85398 - DNA, 71 bp, Homo sapiens
aagagtttgctaagcttgtgggaatgtctgtcctcctagccaaagaaagagcagcccgacggccatggagg

SEQ ID NO: 85399 - DNA, 90 bp, Homo sapiens
ttacctctgtagccatgctggaatacagtaattttcaggttggtagcacccacagaaggatcactagaatgggatattcttgaagttaag

SEQ ID NO: 85400 - DNA, 101 bp, Homo sapiens
cagaaggcggcgatcctgggctgcgggcaaggcgggaaggtgaagaaggagctggaccctgacgacagccatttgaacttggatgagacgacgaagctcct

SEQ ID NO: 85401 - DNA, 100 bp, Homo sapiens
gagcttcatctgcgatggacagaataactgtcaagacaacagtgatgaggaaagctgtgaaagttctcaagctttctgtgaagagggctgcagatacggt

SEQ ID NO: 85402 - DNA, 50 bp, Homo sapiens
cggcgttctggatctcaaagcggacagctaacccccgcatcggtgacgtg

SEQ ID NO: 85403 - DNA, 75 bp, Homo sapiens
atgaaggttctcaacttgaaacgaagggaaaaggccgaggcatcagcgtgtgaagaccgcaaagacgatcccgag

SEQ ID NO: 85404 - DNA, 95 bp, Homo sapiens
gcgcagcaaagcgcccagcctgccgcctcgctgtccctgcggcttctggggggattaaagcctgtggtttccacagaagcaccacctatcatatt

SEQ ID NO: 85405 - DNA, 100 bp, Homo sapiens
ttcctgcatggcatcaccctgctaagtgagatcgcagagctggagctggagaggaggagccaagagatgggagcacttttccagccattaactccaggct

SEQ ID NO: 85406 - DNA, 97 bp, Homo sapiens
tcctaagccatcccctggcggaaccgcccccaggtctgcttagtggcctatcttggcttgtttatgctttgtgtctcatatcaggttgacgaacgga

SEQ ID NO: 85407 - DNA, 100 bp, Homo sapiens
tcttcgacttgagcgaagttttatgcaaggtgggctcagccttctttccttcaattcctgtttcagtctcattttcatggactggtccccaaacttgtct

SEQ ID NO: 85408 - DNA, 82 bp, Homo sapiens
cgcccggccgcaggaccgccggggcctggccgccggtccggcgtgcgccaagttcaggagggtgtgaagacagagaatgacc

SEQ ID NO: 85409 - DNA, 90 bp, Homo sapiens
tgctgcggcgcggggaccgctgtgctctcggggttcggtccgagcccggtgggaggctcccggagcgcagcctgggcccagcccaccccg

SEQ ID NO: 85410 - DNA, 105 bp, Homo sapiens
accatgtcagacgcagccgtagacaccagctccgaaatcaccaccaaggattttttatcaagcagaaatgcatcgaacaacgagaatcaagatcactgagctaaa

SEQ ID NO: 85411 - DNA, 105 bp, Homo sapiens
attttactgtcaagacatttcttcggcattctgcaacagggccgttgctccagggagaactgcaaatatcttcatccacccccacatttaaaaacgcagttggag

SEQ ID NO: 85412 - DNA, 74 bp, Homo sapiens
ttcatacagaagtacctgcttcagagacatgagaagattcatactgtggtttgatgataagaacccaatttggg

SEQ ID NO: 85413 - DNA, 87 bp, Homo sapiens
cttgagcctgtcccaagccctggtgccaggtgtccatccccgtgctgaggttgcgggaacagtgccctgagctacgagctgttcctc

SEQ ID NO: 85414 - DNA, 100 bp, Homo sapiens
gcggcgcgctgctggacgaagagctctcctccttcttcctcaactatctcgctgacacgcagatttaattacaagtcttcagaatgccagagatatacag

SEQ ID NO: 85415 - DNA, 80 bp, Homo sapiens
atggctcactccccggtgcagtcgggcctgcccggcatgcagcagcgatggattttgggtggggaagtcctccttgcgga

SEQ ID NO: 85416 - DNA, 90 bp, Homo sapiens
gagacattagaggtcatccaaagcagccgtcccctctgcagcctctctgacaagtgatcataatatcaatctagtgtcaatggaagtaac

SEQ ID NO: 85417 - DNA, 101 bp, Homo sapiens
ctagcatctctcgggagccgcaaggcgagagctgcaaaggcattgaatgccccagaggagcccgaaacctcccaggcttggtgcaggaaggagagcccttc

SEQ ID NO: 85418 - DNA, 75 bp, Homo sapiens
tttcagcagcgcccccagcaaatgctccagccacagggctccagggagcagtgtcagggccagggagacgatggt

SEQ ID NO: 85419 - DNA, 100 bp, Homo sapiens
gttggagttggaatttgtgcaatgtttagccaacccaaattaccttaattaagtccaaggcttgcgagaaggtcatttccgtgggtcaaacggtcatcac

SEQ ID NO: 85420 - DNA, 74 bp, Homo sapiens
ggcaacttcgcggtggtcaagcgggccacgcacctcgtcaccaaggccaaggtgtaccttccggtttcccagca

SEQ ID NO: 85421 - DNA, 83 bp, Homo sapiens
gggactacttccacatggcctacaacgtcatcacgccctttctcttgctcaagcatggtttcatcttacctcgtgcatcatgg

SEQ ID NO: 85422 - DNA, 96 bp, Homo sapiens
ggctagcaagttcaccagcatccctgcagccttctggtataccatcgtcaccatgacaacactaggtgtgagcagctacgagaagacccagagcta

SEQ ID NO: 85423 - DNA, 97 bp, Homo sapiens
catcattgtgttaatggtgaagcacagcgattccccttcgagagctgtgcccaggagtgaacaaccagccctacctctgtgagagtggtcactgctg

SEQ ID NO: 85424 - DNA, 83 bp, Homo sapiens
ccctctaccggcggggtgaagaagcctcatcgctacaggatgtgggctctcttgatgagaagatgaagagcttggatgtgaat

SEQ ID NO: 85425 - DNA, 100 bp, Homo sapiens
gaaacctaaggaaaaacgtctgacctgcggaggatcccttggttccagtaccccattatctatgacattcgggccagacctcgaaaaatctcctccccta

SEQ ID NO: 85426 - DNA, 100 bp, Homo sapiens
ctcgaggagctaaaagcgaaggccgcggggaaggggcccttggatgctctctgtgtgggtatgtgtgtagccatcctccttctttgaagtctcatatgtg

SEQ ID NO: 85427 - DNA, 95 bp, Homo sapiens
tactattgatgtaagcaacctcaacagacagtttttgtttcaaaagaaacatgttggaagatcaaaggcacagaaatggaatctatttggaattt

SEQ ID NO: 85428 - DNA, 100 bp, Homo sapiens
atttcttccaaggttgatgcatctctctcagaggatttggagttccatggagtgatgagattttattttcaagataaagctgctggaaactttgcaacaa

SEQ ID NO: 85429 - DNA, 75 bp, Homo sapiens
ctcgtcgaccccgcctgcatcacctccatccagcccggggcccccaaggaaggtgctcgggtcttcggggcactg

SEQ ID NO: 85430 - DNA, 100 bp, Homo sapiens
cctgaatacatgatttaaacaagagatttccacagaaggtggacccccaaaagtacaagggcatatttaacggattctcagttacacttaaagaggatgg

SEQ ID NO: 85431 - DNA, 83 bp, Homo sapiens
gcgctgttctcgctccggagccgctgcacatttcgcagtgattccagcagtagttcaagtgatgattctccagctcgatcagt

SEQ ID NO: 85432 - DNA, 98 bp, Homo sapiens
aggattcagagcagatgtgatctgcgctaggtggcatctcctctcacggatgcctcgtgtgaacgagctctatgtcgatgacccagacaaggacagcg

SEQ ID NO: 85433 - DNA, 154 bp, Homo sapiens
gcgcgctttgcccggtgctgggcgcgcaccgtggccaccctgtgggcctggcgctggaggcagcggtgcacgtgcaggtgctggatgtgtctggggcagacatgttggccaagtcaattgccaactgccaggtggagcttctggaaaactgtgg

SEQ ID NO: 85434 - DNA, 100 bp, Homo sapiens
ccatgtttctggacgcggatttttggcctcatactctgttatagataaacaagctcagaggatgaaacaggaaactgagtcataaaacactactacaaac

SEQ ID NO: 85435 - DNA, 100 bp, Homo sapiens
agctccggtggactgacggcaacctctacaaggccaagttcatctcctccgtcaccagccacatctaccagggcaagcccgacctgaacacggcgctgcc

SEQ ID NO: 85436 - DNA, 100 bp, Homo sapiens
atggtgaataacttcagagctctgcgcagtgagacggagctgctgctgtctgggaagatggccctgcaggggaaggctagcctaatcagggatatgtcca

SEQ ID NO: 85437 - DNA, 98 bp, Homo sapiens
gaccggggtcatcctagggaaaacactatcctctgagatcccagatcatgaggccctgggaggagcggggacactgaggacctctctccaaattggcc

SEQ ID NO: 85438 - DNA, 83 bp, Homo sapiens
cgagcacagagcctcgcctttgccgatccgccgcccgtccacacccgccgccagagacgtctcccacaacctgctccgggcgc

SEQ ID NO: 85439 - DNA, 98 bp, Homo sapiens
tttataccaggagacttacatcgatgaccttggacacctccatgttatggacacggtctttcttattcaggtgcccctgggcgctgggattgctctag

SEQ ID NO: 85440 - DNA, 82 bp, Homo sapiens
atctctctcatctcgctcggctgcgggaaatcgggctgaagcgactgagtccgcgatggagacgcaaacatgcagatctttg

SEQ ID NO: 85441 - DNA, 100 bp, Homo sapiens
ttcagaaacagtgctgaagcctttaaatgcagcatctgcgatgtgaggaaaggcacctccaccagctgctcatgtttcccacctggagaatgtgtcagag

SEQ ID NO: 85442 - DNA, 98 bp, Homo sapiens
aagacagtggtcagtgtgaagaagctgctccaggacctcggtggacaccagccctggggacaggtgcagttcaggagcagatgagatccaagggaaac

SEQ ID NO: 85443 - DNA, 101 bp, Homo sapiens
ctcccatttctcctcacctctctgggccagctgaggacagtagctctgactcggaaatgctgacttttaacccacacaagcgaatctctgcctttcgagct

SEQ ID NO: 85444 - DNA, 75 bp, Homo sapiens
tgaacattggtctaaagtctttccaaaaggtcaaggttcacaagatatgggtaagtgtcaccttaccaaaggcaa

SEQ ID NO: 85445 - DNA, 83 bp, Homo sapiens
ctttatgcagtattgagctcaggaggcagtgagtgttaaggaatgggtgtaaaaggcacctttcacagccagcaggcattgga

SEQ ID NO: 85446 - DNA, 100 bp, Homo sapiens
actggcccagcagatggagaatagaccctctgtccaggcagcattaaaacttaagcagggtgttgaaagcagcaggggcctagaagacattaaaccgata

SEQ ID NO: 85447 - DNA, 100 bp, Homo sapiens
gcgcaagaccccctggggaagggcgagcaggtcccgctgcatgggggcagcccccaggtcactgtcacagggcccatgccgcaaggtgtgtggcctgaat

SEQ ID NO: 85448 - DNA, 82 bp, Homo sapiens
cccggacgaaggtactcgcagcacttggagcgcagaaccggccgcgcccggttaaacccatccagagtaatggctgcggcct

SEQ ID NO: 85449 - DNA, 88 bp, Homo sapiens
ctcagatgttttatcttagtgattatgataactccttgacatatctgaagagatggattaagaatgctttggattaaggattgtggag

SEQ ID NO: 85450 - DNA, 89 bp, Homo sapiens
ctatggaaagtaaactgacaattcaggagacccagctggtcttatgatgtaatcagcgcgatttcacttcctgaatttcgatgaattct

SEQ ID NO: 85451 - DNA, 90 bp, Homo sapiens
ggcacagaatatcagtattccggccaggcctcagagacgtggcatatcaatatgtgaaaaaggggtctttggccagaatgagtacctacg

SEQ ID NO: 85452 - DNA, 75 bp, Homo sapiens
tgatttcttctgacttgagcctgcagtgtgctgtgagagatctaccactagaaacccgcgctgaccgcagcaaga

SEQ ID NO: 85453 - DNA, 89 bp, Homo sapiens
gaagtctggatgtcggtgggcctctgagatatgccgtttacggaaacaggaagattggaatctgcctggaacaaagaactgcacctaag

SEQ ID NO: 85454 - DNA, 100 bp, Homo sapiens
aattaaaccaaactggacaaatccttgtggagcaaatgggaaaagtctgtgtctgtgtggagtgttgcaggacgagtggaaatgactgtttccaagttca

SEQ ID NO: 85455 - DNA, 82 bp, Homo sapiens
gttggaagcagccgatccagcctgcggagcctgtggggcagaaggtgctaatcggaagaagaacttgccccccaaagtgccc

SEQ ID NO: 85456 - DNA, 82 bp, Homo sapiens
cttgaagatagccatcagccgctacgtgactcttttctccagagctgaggcttcgaagacctcagaggacttctctcagcac

SEQ ID NO: 85457 - DNA, 50 bp, Homo sapiens
ccgccgggagtctgagctcaggttcattagagacagggtttcgccgtgtt

SEQ ID NO: 85458 - DNA, 75 bp, Homo sapiens
aagaacgggagttcagaaaacagttccccctgcatgaaaaggcagctgtgttactggagcaggaacgacagcagg

SEQ ID NO: 85459 - DNA, 100 bp, Homo sapiens
ccccatatgctccccagggatggggaaatgcatatccacactggcagcagcaggctcctcctgatccagtgaaacaaagagtcctcttcgtggaaaagaa

SEQ ID NO: 85460 - DNA, 96 bp, Homo sapiens
caccaaagtgggaaacattgaaatcaagttttctggatatgccgcagaaggatccgtgccagaagcaagcctgtgagatacagaaatgtttacaag

SEQ ID NO: 85461 - DNA, 100 bp, Homo sapiens
cagcatttcagggactggatgaggagcttacggttttttacaggtgactattatatggttaaaaagattttggaggaaaacagttcaggtgacttgaaca

SEQ ID NO: 85462 - DNA, 104 bp, Homo sapiens
cccgcgtccagcacctacgtcccgctgccgtcgccgccgccaccatgcccaagagaaaggaaggtgggagtcaatcattttgacaagtctcctgaaaggaacag

SEQ ID NO: 85463 - DNA, 75 bp, Homo sapiens
cgcgagccgacaccatgcgatccaaggcgagggcgaggaagctagccaaaacaaacggggattcagcgtccgatc

SEQ ID NO: 85464 - DNA, 100 bp, Homo sapiens
ccatcagtgccatcaaggctgagaccaagaactcaggcttcaagcgttctcgaacccttgaggggaagttaaaggtgaaagaagaacgtccagaaaaaat

SEQ ID NO: 85465 - DNA, 75 bp, Homo sapiens
ggcaacaagagctcgcagctttacctgcgcctggtggagacctcgctgaaagatcctggctctgcagagagaaca

SEQ ID NO: 85466 - DNA, 100 bp, Homo sapiens
gcgagctgagcaagctgggcaaggcagagaaaggcaatgccagggtcaagcagctcaagaggcagctggaggaggcagaggaggagtcccagcgcatcaa

SEQ ID NO: 85467 - DNA, 80 bp, Homo sapiens
aaaagacacttatactatgaaagaggcttgagtttgaagaaacagaagaacctgattttactgcattatgtcagaaatta

SEQ ID NO: 85468 - DNA, 101 bp, Homo sapiens
acagaacaaggcgtggaaaagtctcccccacggcaaaaacctattgtggacgatgaaaggctctctgcagaggagatggatgagaggaggcggcagaacat

SEQ ID NO: 85469 - DNA, 75 bp, Homo sapiens
tgggacaatagagtttaccagcttggatgcccacaagggagtaggacagtcattttgtttactcattcagccctg

SEQ ID NO: 85470 - DNA, 50 bp, Homo sapiens
ggatacgaacatgttatatgtgtgcctaagcctgtgcatcagcctgtagg

SEQ ID NO: 85471 - DNA, 75 bp, Homo sapiens
tccctggagtttctgcttcctccagagccagggtccccggcagcacacggccacagcgctccttcctctcaaggg

SEQ ID NO: 85472 - DNA, 75 bp, Homo sapiens
cccactgctggctaaggaagattcaactttttcaggtcagcccaaggccaaccccactgtcactctgttcccgcc

SEQ ID NO: 85473 - DNA, 100 bp, Homo sapiens
gtggccatgaagttcctccgggtgaggcaggcgactaatcagattgtgatgaattgtgctgatattgatattattacagcttcatatgcaccagaaggag

SEQ ID NO: 85474 - DNA, 82 bp, Homo sapiens
gacctgtagataccagcctttcaaaccaagttatgcccagccaagtcttcagtatatccaggggcaacagattttcacagct

SEQ ID NO: 85475 - DNA, 90 bp, Homo sapiens
gcaggtcctgagcctcgagccgcagcacgagctcaaattccgaggaaggatgataaagactatgctttaaaacaaatagaaggaactggg

SEQ ID NO: 85476 - DNA, 100 bp, Homo sapiens
ccggcagatatccgtgaaggctctaggactgtttggtatgagctgcaagcaagagactggcccttgaagaaccaggctgcagaggcatccatctggcaga

SEQ ID NO: 85477 - DNA, 82 bp, Homo sapiens
ttctgcactgtttacaggcacaggctcctggatttggatttggaattgcaatatctggtggacgagataatcctcattttca

SEQ ID NO: 85478 - DNA, 100 bp, Homo sapiens
ctatgcagcagcagctcctgcctattctcctaacatgtatcctggagcgaatcctaccttccaaacaggtcataactccatgcaggaagctcatcttgtg

SEQ ID NO: 85479 - DNA, 98 bp, Homo sapiens
ctggaggtttggttctcccggcagcagcccgacgcaaaccaaggatctggggatcttcgcactatcccaagaacccttaggagaaatcttgagagtgg

SEQ ID NO: 85480 - DNA, 75 bp, Homo sapiens
tggattactggtcaaaaggtcaactaaaagcattgtttctagaacatgagtacaagccagctgccatgttgtgag

SEQ ID NO: 85481 - DNA, 82 bp, Homo sapiens
gaaaagaaggtggcagacccggtttgctgatcgccccagggatcaggagatggtgggtgtctccgatgatgtcaatgaatac

SEQ ID NO: 85482 - DNA, 75 bp, Homo sapiens
cttgttaacaacacgcccctcaactggctgggtgtcaaattgagaaccaggtagatccccaccacctacagtaaa

SEQ ID NO: 85483 - DNA, 100 bp, Homo sapiens
gtagagctgctgcttccttcggccttgtccgagcaaacagaggcgctcatccacagagccacatctgttagtgcctgtagtagaagaacatccatctcat

SEQ ID NO: 85484 - DNA, 101 bp, Homo sapiens
cagcagttgagcgagcccgaggacatggagatggaagcagttggaattgatcacaccttttcagttgtacttcaatcctgaattaatctttaaacactttc

SEQ ID NO: 85485 - DNA, 74 bp, Homo sapiens
tcagttatcagtcccgtgggcaatagagtcactgtatttgaccttaaaaagtgtcgattgactgcccgtggtcc

SEQ ID NO: 85486 - DNA, 74 bp, Homo sapiens
cctcgctgctgtacttcgtctatgtggcgcccggcatagacagccgctcaggaagcaatcttgcatgcgtctgg

SEQ ID NO: 85487 - DNA, 59 bp, Homo sapiens
tgcccttgtggcgaatggggctcacgtcgagctccagtgatcattctacatatattgta

SEQ ID NO: 85488 - DNA, 82 bp, Homo sapiens
cgccctgggccgggccccaccggacgggagtgcatccgccccaacccttttccccctcgtctcctgtgagaattccccgtcg

SEQ ID NO: 85489 - DNA, 88 bp, Homo sapiens
aacattgatctctgaagatatcaagtcatattatacagtgcgacagctagaattggaaaaccttacactcctgacccctgaggattac

SEQ ID NO: 85490 - DNA, 83 bp, Homo sapiens
cgggtggctctttttccgttacttggctattggctagttgagcgttatgatgaagctgctcagctcggaggatgaggttctgg

SEQ ID NO: 85491 - DNA, 74 bp, Homo sapiens
cagccaggctgaggcctaattgggacacagcaggccaggaaagatttcgaacaatcacctccagttattacaga

SEQ ID NO: 85492 - DNA, 83 bp, Homo sapiens
atcagccctctgccctcccccacgggaaccatcagccggaaaactcaaatatatgtgaggtgtgcaacaaatggggacggctg

SEQ ID NO: 85493 - DNA, 82 bp, Homo sapiens
cgggacccggtgtctgctcctgtcgccttcgcctcctaatccctagccactatgaacccttaggagaaatcttgagagtgga

SEQ ID NO: 85494 - DNA, 90 bp, Homo sapiens
caggggaagaattggaggactatattcaggacggaaccactgcactccaggttccttgctgggtgctgagcgtggcctgagggacaggcc

SEQ ID NO: 85495 - DNA, 90 bp, Homo sapiens
aatcagtctttgacaagtgatgagaagctgtcggagcttcccaaggtggattcaccaatgaacttgaagcatcctcatgacctagtcata

SEQ ID NO: 85496 - DNA, 98 bp, Homo sapiens
gcaccacccccggagcccccctcaacacggaccgcgcccgccgggcacacaagaatggtcactgttttgggatttgagattgacgcggtgaactctgt

SEQ ID NO: 85497 - DNA, 90 bp, Homo sapiens
aacgggagcccccagaaggctgtgagaaagtgcgtgtgtttgaagaagccacgatggatgagggagatgctgcaatcatgcatcccgggg

SEQ ID NO: 85498 - DNA, 96 bp, Homo sapiens
ctgaaataacccttgatcctcctcctaattgcagctggaacgtggtgggcatccagggatccctgctcagcattttcgtggagcccatttacttct

SEQ ID NO: 85499 - DNA, 100 bp, Homo sapiens
ctccatatgctgctttctgtgggctgcttggatacttatccgctttttccccttggagtcctggcagattggcaagatagggacggtcatgactttttta

SEQ ID NO: 85500 - DNA, 84 bp, Homo sapiens
caggaacaaatagagctgccagaggttccctccgagccccttcctgagaagatcccagagatgcggtttcaccatgttggccag

SEQ ID NO: 85501 - DNA, 83 bp, Homo sapiens
gaacaggaccccgtacgtcactaccactgtctctgctcacagtgccaaggctttatcctgtggataaacgcagagtgaacgag

SEQ ID NO: 85502 - DNA, 75 bp, Homo sapiens
tatgtcagcaaaaactggagcagaaattggaggctcagcatagggaatctaagggaggaaattatcaactgtgca

SEQ ID NO: 85503 - DNA, 51 bp, Homo sapiens
gtggaatccaacttcccgaatcagggccctcgggaccaaggatcacgtcat

SEQ ID NO: 85504 - DNA, 76 bp, Homo sapiens
catagttctttgggtggggacgccacaggtgtggacaggttattatagtcaccacatcaccaagctcaaccttcgt

SEQ ID NO: 85505 - DNA, 90 bp, Homo sapiens
acttggaagcaatgtttgaacaaactcgaagaacagctgtggaaagaagttgcaaaacactggatttggacacctcccacactgagtccc

SEQ ID NO: 85506 - DNA, 82 bp, Homo sapiens
ctcagttggaagcagccgatccagcctgcggagcctgtggggcagtacaaatggtgatgatcatcaggtcaaggatagtctg

SEQ ID NO: 85507 - DNA, 88 bp, Homo sapiens
ggtgacctcatgatgcagatccacgaggatgtcttccccgagccccaggcccgggtgaggacgcttgagcggaagttagaagcaaaaa

SEQ ID NO: 85508 - DNA, 100 bp, Homo sapiens
gtcaatgggcgggtgcccctacctcacattcccgtgaccaaccacataactcgagacagggacagcgggaggctcaaacctgccctcggacgctcctgga

SEQ ID NO: 85509 - DNA, 100 bp, Homo sapiens
aggcattctgaatgggtcccgccagggtcccaacatcgatgcccatgactatgtattcaggagaagtggaggcctctcagttaagaagactgaatataaa

SEQ ID NO: 85510 - DNA, 100 bp, Homo sapiens
ctcgaaatctcctgacagtgttaatggaagtgaaccaagcattcctcaggaagaatcctgtaagtacaatcccaagtattctgttgctaatgacaccggc

SEQ ID NO: 85511 - DNA, 80 bp, Homo sapiens
accctgaaggacagtgacttattatgtacttcatagacagcagtctcagccagccaaggagagttcccctcccagagaag

SEQ ID NO: 85512 - DNA, 134 bp, Homo sapiens
ccagcggtctgacatcgcgacgctgctcaaaacctcgctccggaaaggggacacctggtggtgaaattgcctctacctttgatcacccagaactggtgaagcttggaagttgcaaacttatcgaggaagtcatg

SEQ ID NO: 85513 - DNA, 80 bp, Homo sapiens
ctctttagacccagctcctgcctcccagccttctctccaggctctgaactttctcagaacagtaagaggaccttgtgcat

SEQ ID NO: 85514 - DNA, 128 bp, Homo sapiens
gctcattgtagcctcaaactcccaggctcaagcagtcctaccatgtcagccttcccagtagctgggaccacagcctaccatctgggtgtgaatttggccaggcagatatgcagaaactggttccaaag

SEQ ID NO: 85515 - DNA, 100 bp, Homo sapiens
cgtcaaagtctacccctcctgtcggggaggcaaggtggttttggaccagacaggcgtgtctaattttcaaagaagaatggaagaaaccatgaagcttgct

SEQ ID NO: 85516 - DNA, 100 bp, Homo sapiens
aacagaatgaagaaagtcagggggactgcaaaggccaatgttggtgctggcaaaaagcttctcagcagtggaagccgatacctcattcgatcagatgata

SEQ ID NO: 85517 - DNA, 109 bp, Homo sapiens
cagcgctctcgtcttctgcggctctcggtgccctctccttttcgtttccggaaacatgacaatgcagatcttcgtgaagactctgactggtaagaccatcaccctcgag

SEQ ID NO: 85518 - DNA, 99 bp, Homo sapiens
gtggggtgctgaatggcaatggcacaaagttctctcgatcagggcatacatctttcttcgacaaagggtccctgcaggcttcagtgtggctgccagtgt

SEQ ID NO: 85519 - DNA, 75 bp, Homo sapiens
tattgatggttttgcactatttacaaatgattcgcctttgccagtctcatctcgtgtctgctttgttaagttcca

SEQ ID NO: 85520 - DNA, 75 bp, Homo sapiens
cgctgctgggtccgctgagcggggcgacccgagacagttgatattcataaagagaaagttgcaagaagagaaatt

SEQ ID NO: 85521 - DNA, 100 bp, Homo sapiens
agaatcgatggacatcaacaaccctcgggactttattgattgcttcctgatcaaaatggagaaggagaaccagcagaaatccaccaatgtagtctatcag

SEQ ID NO: 85522 - DNA, 89 bp, Homo sapiens
ccccacgcaaccccagatccatttacactttacagtttttagaacttcagccataaaaatgggcagaattttccttgatcatatcggtg

SEQ ID NO: 85523 - DNA, 90 bp, Homo sapiens
gagcgcgaacgagcgacggcggaacccgtgggcctgtggactgcagcctcggcggtcagcaggtttacccaaggtccagcctagccccta

SEQ ID NO: 85524 - DNA, 103 bp, Homo sapiens
ctgagctgaaatggcagacgatctcggagacgagtggtgggagaaccagccgactggagcaggcagcagcccaggtgatggatgtggacacactgtactaggc

SEQ ID NO: 85525 - DNA, 75 bp, Homo sapiens
caccaatcagatgtctgtctgccgggtctggtggctggttcggggtctactgaaggctgtcttgatcaggaaact

SEQ ID NO: 85526 - DNA, 137 bp, Homo sapiens
atcccagaaatctaaatccagcagcgtggctgtcggaaacgactttggcttttcctctcctgtcccaggaagttttattcagtgtatgggtctggtcaaagagcttttgatctattcaatccaaacttcaagtctac

SEQ ID NO: 85527 - DNA, 90 bp, Homo sapiens
gtgtggaaggactcctgaaccagctcgtcctggagcacctgcagctggcgcctctgcagtgggcggaaattctagaattggccggcaatg

SEQ ID NO: 85528 - DNA, 98 bp, Homo sapiens
tcgtgatccagaagtccagagctgaggactgcctgtttgcagatcaagtctcgggttctcatgactcccttagccctctcacctccgcggagtacccc

SEQ ID NO: 85529 - DNA, 75 bp, Homo sapiens
ggaggttcgagcgctgttctcgctccggagccgctgcacatttcgaagatggctgtgccacccacgtatgccgat

SEQ ID NO: 85530 - DNA, 100 bp, Homo sapiens
gcagacctcagctgcctggtgtgtgatgaatgcagactctgctaccattttggctgtttggatcctcctttgaaaaagtctcctaaacagacaggctacg

SEQ ID NO: 85531 - DNA, 100 bp, Homo sapiens
gagaactggctgccagtctcctatgtcccctattatctcccctgcccagagatcttgaatgatgagaagacagcagctgattacaagattttaggtggtt

SEQ ID NO: 85532 - DNA, 90 bp, Homo sapiens
agctgatagagaagattcttctcaacatttctgcagactgcctcaacagagtgataggtatggtctgaatatgcgttgcttggcagctcg

SEQ ID NO: 85533 - DNA, 100 bp, Homo sapiens
gtagcatctgggagaatggagacagtctggaagagctgatggaagaggagggagcaaaggagtttgctgctgctctcaccgctgagcggataaagacccc

SEQ ID NO: 85534 - DNA, 100 bp, Homo sapiens
acttcagaggactgtctttctcttttcagttagactcatggactgaggctccaaagtatgagggtgtccgcaatgttgccagtgtctgtctgcagattgg

SEQ ID NO: 85535 - DNA, 76 bp, Homo sapiens
gttgccggtgccggcctagcgtcctggaattacttcaatcaactgtatgcaggagctattcttgaagtttgtggat

SEQ ID NO: 85536 - DNA, 75 bp, Homo sapiens
agtaaggatgggaccttgtttgcctggggcaatggagaaaagcctaccccttgctcaggttcaagaagacagtga

SEQ ID NO: 85537 - DNA, 100 bp, Homo sapiens
cagatggcggatgccctgcagtacctgcagaaggtctctggagacatcttcagcagatctctgttgaggagctggcgcggaatctggtcatcaaggtcaa

SEQ ID NO: 85538 - DNA, 82 bp, Homo sapiens
tggagaccctcacggagctgggcgacgagctgaccctgggagacatcgacggtgagcgagtgctgtgctttcatgggcctct

SEQ ID NO: 85539 - DNA, 87 bp, Homo sapiens
agcagcagcagtagtaccagcagtgacaggaaacccagcgtttgctggcagaaccagttcctggcatcaaagccgaaccagatgaga

SEQ ID NO: 85540 - DNA, 96 bp, Homo sapiens
ctgggatgatgcgctgcagccagctggcccccagggccctgcaggaagctggagaagcttcgagagaaggagcgtaagaaggaagccaagcggaag

SEQ ID NO: 85541 - DNA, 100 bp, Homo sapiens
atttggtcaacaaaatccacgtcagaataacaagcctttgtattcatttgaagataatgcagactatgtttatgatgttatgtggtcacctacccaccca

SEQ ID NO: 85542 - DNA, 73 bp, Homo sapiens
tccaaccgcctcctcctcctcagtaacgcgggttctaaatgagaagaaacttcaagaggttgatagtttatgg

SEQ ID NO: 85543 - DNA, 100 bp, Homo sapiens
ccccgccaccgtcatcaacgggcagtttgtcgaacgatgttggactcatagtcactgccagaaaggacgctgtgcagagctgcaagtccgtatcactgag

SEQ ID NO: 85544 - DNA, 100 bp, Homo sapiens
ccaagcactgctcgcaggtggactcggtccgtggcttcggaggcaagtttggtgtccagatggacagagttgatcagggccatcactgtgcatgtcccca

SEQ ID NO: 85545 - DNA, 51 bp, Homo sapiens
gcgcaaagcttgcgaggtggcgttaggagaagaaactgaggcctggaattt

SEQ ID NO: 85546 - DNA, 83 bp, Homo sapiens
gcttcgaaggacagagatgttaagctatgggagagacccagtatgcagctggtctctaattaacagaagatggcaaagcccag

SEQ ID NO: 85547 - DNA, 75 bp, Homo sapiens
gtgctggccacttgcttgggatcctttatcctggtcatcttctatttccaaagaatactcccccagttgcaagag

SEQ ID NO: 85548 - DNA, 132 bp, Homo sapiens
gccggagacctgagccgacactgggggcagtccgcgagccccgcactctctcgatgagtcggagaagtcccgtgctggagaatctggtaaaagcaccattgtgaagcagatgaggatcctgcatgttaatgg

SEQ ID NO: 85549 - DNA, 100 bp, Homo sapiens
ttgatcttgaacttctcagcctccagaacgggtgataaaagaaaatgtggctgaagttacccgaagttcagcttgcagtgtaattcagaagagttaagac

SEQ ID NO: 85550 - DNA, 78 bp, Homo sapiens
ctctttgggatccggccagatgattacttggttctgcggggagtgtctccagccctgcctgcaggtgccatccccgct

SEQ ID NO: 85551 - DNA, 83 bp, Homo sapiens
gcagtgacggccggtgagattggaagtggcggcggcggcaggcggcagaggggaggtgtcgtgaaaactacccctaaaagcca

SEQ ID NO: 85552 - DNA, 83 bp, Homo sapiens
atgactttcagtggtggaaaatttacggcgttacagtgtttctgccacctctgtacaaaagacaattttacttgtgtgacaga

SEQ ID NO: 85553 - DNA, 148 bp, Homo sapiens
ctcactagtgaatggcagtgattccagttcattcctagctcagaaagcaacgttttgagccacaactgtcacaactccagagctaaagttgcagacaagatccagctcatcaataatatgctggacaaagtcaatgagatgattattg

SEQ ID NO: 85554 - DNA, 80 bp, Homo sapiens
agctgtgctcgcgctactctctctttctggcctggaggctatccagccttgctatggcatcgttcaggtgccaacgggac

SEQ ID NO: 85555 - DNA, 100 bp, Homo sapiens
actgccatctttatctgcattggcgtgttcactgggcagcttctgggcctgcccgagctgctgggaaagaagctccaccatgaggcgaggtggatggagg

SEQ ID NO: 85556 - DNA, 100 bp, Homo sapiens
ggtgcaccaagagcaacctcacacggtgtgggctgaatgaagagctgccagatcccacagaaatgcatcttctgcagacaccgggttaagagggtctctg

SEQ ID NO: 85557 - DNA, 90 bp, Homo sapiens
aaaagccagagtgcctgaacaacggattgagctatatcaggtgcccaaggaccaagtccttgacactgtctacctgttccatatgccccg

SEQ ID NO: 85558 - DNA, 97 bp, Homo sapiens
gccccggctgcctcctccctgagaacaagttgaaatcatcgcagaaggataaagttcgtcagtttatgatcttcacacaatctagtgaaaaaacagc

SEQ ID NO: 85559 - DNA, 75 bp, Homo sapiens
acaaggccttccagtttggaattcattcggctcctaaagaagtagcagtgtccaaggaacaagaagagaaatctg

SEQ ID NO: 85560 - DNA, 100 bp, Homo sapiens
atctcaagattgtatcagacagatccttctggtacttatcatgcttggaagtcttctcattcacaggttaaggctacctttccagataatccaacagcta

SEQ ID NO: 85561 - DNA, 50 bp, Homo sapiens
ccggagcatgatgcccctcagaagctcctgcccctcctaaagctgaagcc

SEQ ID NO: 85562 - DNA, 100 bp, Homo sapiens
ccagcctgctcgaaactttagtcggcctgatggcttagaggactctgaggatagcaaactttctaaaaccaatttttccaacaacaacgatttccgtgct

SEQ ID NO: 85563 - DNA, 100 bp, Homo sapiens
gtgatcctttgcaccctgcttggagacggacttgcttccgttgttacagggtagatcacccaaacctgacaagtgggaacttcttcagctgggcagtggt

SEQ ID NO: 85564 - DNA, 111 bp, Homo sapiens
tgcaacctgtggccccacatcctgagtcttcaccaaaatgggtgtcatcaaaaaccagccagccctccacctcggatgtaaggctacgaaaacttgctggagagaaggaag

SEQ ID NO: 85565 - DNA, 75 bp, Homo sapiens
gctgctcagcgtcctcatgtggggggtaaaccactcggttataaaacatggaggctggctcagtggttcgagcca

SEQ ID NO: 85566 - DNA, 76 bp, Homo sapiens
ggccctggccccgatggctctgtgcaacggagactccaagcgggtccatatggaatatttgctggtagggatgcct

SEQ ID NO: 85567 - DNA, 100 bp, Homo sapiens
tgcgcgccgctgcccgcgccacaggagcgaatacaggctgatgaagtgattgcaattctggatcaagaacagcaagggaagcatgaactgaatatcaacc

SEQ ID NO: 85568 - DNA, 90 bp, Homo sapiens
gtcaggactggggaagaagcatctcctgctcatgggggagaaatgcactcggtgatggaaagagagccactattctgaagaacacttggc

SEQ ID NO: 85569 - DNA, 82 bp, Homo sapiens
gcgaagctggccaaagcctgcccagacggctcacctgtgcgggatggaacaaaaggtggaagttaaacgagctgagcctcgg

SEQ ID NO: 85570 - DNA, 100 bp, Homo sapiens
ttctatgtcagaaagaatttgtgtcagagagtggtgtcaagtatcacatcaactccgtccatgctgagagaatatgccttctgcatcctgtgatacacta

SEQ ID NO: 85571 - DNA, 96 bp, Homo sapiens
gggagagatccctcctccccaagaccccagtgaagaatgtgtgccatgcggagctgaatgccatcatgaacaaaaattcgaccgatgtgaaaggct

SEQ ID NO: 85572 - DNA, 100 bp, Homo sapiens
tcaaggccaatgttcgaaggaagcgctacgccatccagggtctcaaatggcaacataatgaaatcactttctggtaaatcagtggcacagtatactgcct

SEQ ID NO: 85573 - DNA, 50 bp, Homo sapiens
cttcaatgagtaaacatattcctactctccagaaagagcaacagtaatgg

SEQ ID NO: 85574 - DNA, 100 bp, Homo sapiens
cccctcagcaactcctgatgaacaggcagtataactccaactgtggaactgaatgggcttgctatgaaaaggggagagcctgccatctacaggccattag

SEQ ID NO: 85575 - DNA, 100 bp, Homo sapiens
aagggaggaaatagtggcaggtgacagtctgcatgtgcagttttcaggtactgtccaagaagctggaacattattatccagcaagaatgttcgtgtcaac

SEQ ID NO: 85576 - DNA, 89 bp, Homo sapiens
cagaagacattggccaagacgatcaccaaacagatcttcctcagaactgtgatcctaacattcccctagttgctcaggaattaatgaaa

SEQ ID NO: 85577 - DNA, 75 bp, Homo sapiens
gagtcggctgagggaaaagcgaggcaaggcaggcggccacagacccctttgcttctgtttttgggaatgaatcat

SEQ ID NO: 85578 - DNA, 100 bp, Homo sapiens
tacacacttaatgaagactggctgttgtggcaggttccggaattcagtactgtggttttacagaaggcgacacatgttgttcagagtgaagtggacaaat

SEQ ID NO: 85579 - DNA, 51 bp, Homo sapiens
cacggcgccgagccgcggtccgaattaacttcatctaccttgccaagagca

SEQ ID NO: 85580 - DNA, 50 bp, Homo sapiens
aatcacctatgtttacagcgacagttagagatgtttatgattacttccga

SEQ ID NO: 85581 - DNA, 109 bp, Homo sapiens
tgattattcactgcgcgcctgcgtctacaacaacaccctcaacaacgccatgcctggggatatgagactttctactcggaatatcctgagtgttgcgtggatgtaaaac

SEQ ID NO: 85582 - DNA, 100 bp, Homo sapiens
cctcctgttccgcttctcagaggacgccttcaacaccaccttcatctccaccatcggaaaaaccatatggcatagttgaaaagaagtccagaatattccc

SEQ ID NO: 85583 - DNA, 100 bp, Homo sapiens
atttgttaaggattccaagtaactcttatttggtggtcctgggcggtggtcaggaagccatggatgtaaccacaacctccaccaggattggcaagtttga

SEQ ID NO: 85584 - DNA, 51 bp, Homo sapiens
ctggaaggagcagcgggccgcgcaggtgatcccattaagatactaatgcca

SEQ ID NO: 85585 - DNA, 89 bp, Homo sapiens
tgcgctcgcgcccggatccctcaggaagcaggtcctggggaccaaggtggacgcggagcgtgacggcgtgaaggtgcccaccacgctgg

SEQ ID NO: 85586 - DNA, 74 bp, Homo sapiens
aaatttttaagacacgctgcaacaaagcaggcccgatgagagaaagggaaagttaaggatgctggagcagaaca

SEQ ID NO: 85587 - DNA, 101 bp, Homo sapiens
gtgtgggcttcgtgcgcggctacagccgccgtttctggcagggagacaccttccatcggggcagcgacaagatgccgatcaaagtccagatctccatctcc

SEQ ID NO: 85588 - DNA, 100 bp, Homo sapiens
gctccatgaagatgccacagggatcctaaaatctctggagttaaccgaatttcatactggcctgctgatccagaaataagtttgcttacggaggcttcta

SEQ ID NO: 85589 - DNA, 82 bp, Homo sapiens
agaaagtttctcagaagtaaaatggacatacctaatactttccagaatgagtccctggaacgccagatgcgtgaaatggaag

SEQ ID NO: 85590 - DNA, 75 bp, Homo sapiens
ttggcaaatctgttactgcagacagatgggaaaaatatttgatcaagcatcaattcctgaagattgccaagcccc

SEQ ID NO: 85591 - DNA, 83 bp, Homo sapiens
ctgaacgaaacttccctttggggagttaagttttccagtttggtgccctggttgtcagatgttggaaagcagtaggacggaac

SEQ ID NO: 85592 - DNA, 82 bp, Homo sapiens
ccaccatgtcagacgcagccgtagacaccagctccgaaatcaccaccaaggccacccttaagtacaatgttctcctacctaa

SEQ ID NO: 85593 - DNA, 101 bp, Homo sapiens
cttcacatcctgagactctgacttcgcctggtgtgtccgtttctctggtgaatccccagccatccaatggccacttctcaaccaaaattgaaatcaggcaa

SEQ ID NO: 85594 - DNA, 100 bp, Homo sapiens
tgtcaatgcccgaggactcttggagtttgagcatcagagggcccctagggtctcaacacaccacagccatcagcactggaatgcaaagaccagaacaaac

SEQ ID NO: 85595 - DNA, 88 bp, Homo sapiens
cactggactcatggaggctgagcatttattcaggtgattgtgtccaggggggggcgctttctggaagcccccgtctcagggaatcagc

SEQ ID NO: 85596 - DNA, 83 bp, Homo sapiens
gaagatcatcattaaggacggaggcacgaatggcgccattttgcggtacggaagctacacagcaacacgtataggagactctc

SEQ ID NO: 85597 - DNA, 98 bp, Homo sapiens
cctagaacttgagcgctgcaagtctcctacctcagcaaaagctgatgaagcattgaaagccaaagaaagaaatgaggaagaagcaaagagaagaaagg

SEQ ID NO: 85598 - DNA, 100 bp, Homo sapiens
ggctggtccaggccttccagtacacagacgagcatggggaagggaaatcctcattgacgattcaatttgttgaaggccaatttgtggactcctacgatcc

SEQ ID NO: 85599 - DNA, 100 bp, Homo sapiens
aggttctcgcaactgttacaaaaccagttggtggtgacaagaacggcggtacccgggtggttaaacttcgcaaaatgcttactcaacttgaagatgagaa

SEQ ID NO: 85600 - DNA, 50 bp, Homo sapiens
tcaaagtctacctgagcgcccagctggttcccgagcctcatacagcagcc

SEQ ID NO: 85601 - DNA, 83 bp, Homo sapiens
aacacattcagactacaagtccagacccaggagagcaaggcccagaaagagaggaggaggtggaggaggaggaggatggagag

SEQ ID NO: 85602 - DNA, 100 bp, Homo sapiens
tttagagacaatggcaaacatgctttgatcatctatgacgacttatccaaacaggctgccccctcggtcactctgttcccgccctcctctgaggagcttc

SEQ ID NO: 85603 - DNA, 82 bp, Homo sapiens
caggagagcaacatcagtggccctttagcaggcagggccggccaaagcaagatcaggtcatcatcagatttgaaatatttaa

SEQ ID NO: 85604 - DNA, 100 bp, Homo sapiens
gaatttcagaaagagtccctcagcatggtgatcgaactgtgagaatttggaaggctcgcaatttgcaagatggtcagatctctgacacaggagatctggg

SEQ ID NO: 85605 - DNA, 75 bp, Homo sapiens
gcaagaagactgatggagcaggcttgcaatattaaagcagacctgttatcctaaactaggtgagtcagcttttgg

SEQ ID NO: 85606 - DNA, 99 bp, Homo sapiens
tgaagaagatctggcaaaagcaattcagatggcccaagaacaggctacagatactgaaattttggttgaatgatcctaaaatgtctgaaacggagcgcc

SEQ ID NO: 85607 - DNA, 74 bp, Homo sapiens
aacgatgacattttcaggaaaatcctgtataccaacagatgttttaaagattgtgtattctgtgggtgctcaga

SEQ ID NO: 85608 - DNA, 100 bp, Homo sapiens
cgactagcggcggcgggagcggcgccgagaggccgtgcgggacgcgggcgccaggaccggccgaacgcagagacacgatgaggcgagtggtacgacagag

SEQ ID NO: 85609 - DNA, 98 bp, Homo sapiens
tataaagtcaagtgtccattttctttcaactatatttgagcatacccagccctggcaggtgcccggcccgccccccaccctccggctcccagggcctg

SEQ ID NO: 85610 - DNA, 75 bp, Homo sapiens
gctccgtggaagcgtggccggcagcgtcccggacgaggaggtattatgactctgtccccctttgatcaaatgaag

SEQ ID NO: 85611 - DNA, 88 bp, Homo sapiens
gaagtcaagaaatttctagtaccggcacgtgtggttctcaaatataggcattctgatgggaacttgtgtgttaaagtaacagatgatt

SEQ ID NO: 85612 - DNA, 98 bp, Homo sapiens
cggccatggtccaaccttgaagggagacaagagtcgtccttttattacgtccagtcctacaaatggggctgaaactgttgcagaagcctgggtctctc

SEQ ID NO: 85613 - DNA, 75 bp, Homo sapiens
gagaatgaagccatccaatggatgcaggaaaactggatattgtacctgtggatgcatcttatgaagtaaaagaac

SEQ ID NO: 85614 - DNA, 101 bp, Homo sapiens
agtatctgagtaatttgcagtactttgctgtgaccaacaacaatgatgacacagcaagaaggccctcaccagatgctgagcagatgccggcaccatgcctg

SEQ ID NO: 85615 - DNA, 48 bp, Homo sapiens
tgcacttgcctgtctgggacaagggggacaacgaggtgcacatggtat

SEQ ID NO: 85616 - DNA, 92 bp, Homo sapiens
tctcagctccagagaagacaggaccaccttccaaagaaggatggatgacatggctgtggatagtgatgaggaggtggattatagcaaaatgg

SEQ ID NO: 85617 - DNA, 82 bp, Homo sapiens
caagtattgtcctatttgtgatgtccaagttcacaagaccagaccactactgaatataagactattgcagatatcatccgaa

SEQ ID NO: 85618 - DNA, 90 bp, Homo sapiens
cgtgggcatatttagtcattcatttttgatcaggagaaagaagacagccatcatttgaaagatgtgtatatctcatgattgatatggaga

SEQ ID NO: 85619 - DNA, 100 bp, Homo sapiens
ggacttcactgctctgctgtctcctgcaagaactggctcaagaaatttgcctcgaaaaccaaccaaaattgaccaagaggcagaggaaaattcactgaca

SEQ ID NO: 85620 - DNA, 76 bp, Homo sapiens
ctggagtacaccccgcagcacagccgcgacttcaagatagcagaccccacgttagctgaaatgggaaaaaacttga

SEQ ID NO: 85621 - DNA, 100 bp, Homo sapiens
cgaaatgtgcaaatgtttatgggcagcacacttctgcttttgttccttcatcaggacgaatttactcttttgggcttggtggtaatgggcagctgggaac

SEQ ID NO: 85622 - DNA, 75 bp, Homo sapiens
caacttctgaagacttcaacaaggtcaatgtgacggtggactacattagaccagccagcccagccacagagacag

SEQ ID NO: 85623 - DNA, 82 bp, Homo sapiens
ccaatcacagtccactttggacagacaatgcagatcttcgtgaagactctgactggtaagaccatcaccctcgaggttgagc

SEQ ID NO: 85624 - DNA, 100 bp, Homo sapiens
gcttttagctgaactaaggagaaagtcctacaacagtttggcgtgcaacatggggcttgagaaagggtctgtttctgtcgactgtggaccacttatgtgc

SEQ ID NO: 85625 - DNA, 50 bp, Homo sapiens
atcaactcctctctgttaatggagtggagaaaactgatgtggaaggaacc

SEQ ID NO: 85626 - DNA, 83 bp, Homo sapiens
gctactctgcctcggggacgaaagcagttgatattcactgatggactccaaagaatcattaactcctggtagagaagaaaacc

SEQ ID NO: 85627 - DNA, 103 bp, Homo sapiens
ggcacttcattggccacctacagaaacaaaatgtcaacaaattgatggatagtgtgtgtaccatatcagtggcgtgtaactatgctcatcattgttcttgtca

SEQ ID NO: 85628 - DNA, 75 bp, Homo sapiens
ggcagttgtagcttcttgaaaggacttctgcacggacctggccgtctccagtgccaacttcattcccacggtcac

SEQ ID NO: 85629 - DNA, 90 bp, Homo sapiens
gcgagccccagattattgcccagagacaatgttgaatccttggcctgaatatatttacacacgtcttgagatgtataatatactaaaagc

SEQ ID NO: 85630 - DNA, 82 bp, Homo sapiens
gaacagaggaactcttggtggaagagattgaggcgccatgtcagaaccggctggggatgtccgtcagaacccatgcggcagc

SEQ ID NO: 85631 - DNA, 100 bp, Homo sapiens
gcagctgccttcttggacgcctttcagaaagtggctgacatggccaccaacacacgtgaaactccacttggagatgttggcagaccagccacgaacaact

SEQ ID NO: 85632 - DNA, 90 bp, Homo sapiens
gctgagcaaagtgatcattgttgacaattcccctgcctcatacatcttccatcctgagaatgcagtgctgcttcgcgtaaaagaaaacga

SEQ ID NO: 85633 - DNA, 75 bp, Homo sapiens
cggctgccctgtggcctcgctcctcggaggaaaaggcgacggcggattgacagaagtatgattggagagcccaca

SEQ ID NO: 85634 - DNA, 115 bp, Homo sapiens
aggaggtggtagagggcatggatatctctactcgctccaaaggtactccaaagattcaggtttactcacgtcatccagcagagaatggaaagtcaaatttcctgaattgctatgt

SEQ ID NO: 85635 - DNA, 90 bp, Homo sapiens
ctcaaataaggaaattgacacctggcgtggagagaagatgactgaggaggaggtggagaccgttctggcaggacacgaggacagcaacgg

SEQ ID NO: 85636 - DNA, 89 bp, Homo sapiens
cccacatccaccatcaagccgaacacacgaggagatgccacagagcatcgtggaggccacctctaggcttaagaccttcaacttgatcc

SEQ ID NO: 85637 - DNA, 123 bp, Homo sapiens
tggaaccaatgatagaaatgaagaaaagagaagaaccagaatttcctgagccttccaaacagaattggtgtgcttatgtacataccaggttatctcccacagtgatattggacaaccaggtca

SEQ ID NO: 85638 - DNA, 98 bp, Homo sapiens
tctctttcaatgacaaaaagtttgtcattaaacccatcgacaagaaggcacctgttttaaaatcaaagatgggaaaatcggagaaaattgcccttccc

SEQ ID NO: 85639 - DNA, 100 bp, Homo sapiens
ataggaggcaaaatgttggataaatatatctatggagcacagttggaaaatggatataccttatttgattatgatgttggactgaatgatataattcagc

SEQ ID NO: 85640 - DNA, 50 bp, Homo sapiens
ggagagaaatcctacaagtgtgttacctggctgagcagtgctggaatggc

SEQ ID NO: 85641 - DNA, 95 bp, Homo sapiens
tcttcaagggaactgtggaagtaaaccaggggtgacatggattatcaaatattgtggatcagaatcagctgaaccaagccagttggaagttccag

SEQ ID NO: 85642 - DNA, 80 bp, Homo sapiens
ggagtctccgcgtcccgctcgctgggagagagaccctacagcttggggcctgggctcctctgaccatcctcattgagaaa

SEQ ID NO: 85643 - DNA, 110 bp, Homo sapiens
gcccatccagctgaacccggcccccgacggctctgcagttaacgggaccagctctgcggaacaatgcagatcttcgtgaagactctgactggtaagaccatcaccctcga

SEQ ID NO: 85644 - DNA, 75 bp, Homo sapiens
cacttatgagggtatcttcaagacgctaagctcaaagattgtgaagatggaaagggtccaacccctggaagagaa

SEQ ID NO: 85645 - DNA, 83 bp, Homo sapiens
ccccagtaccaagacccgacacaaggcagcttcccacagcaggttggacagttcacagcggagctggagtttgttcagatcat

SEQ ID NO: 85646 - DNA, 81 bp, Homo sapiens
cgggggcgagcagcccccgggaggccgagtgcatctgttggaccgtgcgaggtatgctgccccacaaaaccaagcgaggcc

SEQ ID NO: 85647 - DNA, 90 bp, Homo sapiens
cagccacttcaaaatcagacctctgtggcagcattttttccagaacacaaaaggtagacttcgcttgaaaagatcgagaatggaggaggg

SEQ ID NO: 85648 - DNA, 88 bp, Homo sapiens
ggagcctcagttggaagcagccgatccagcctgcggagcctgtggggcagcctggacctggacgcctggatcaatgagccactctcgg

SEQ ID NO: 85649 - DNA, 90 bp, Homo sapiens
gaagctgcggccgcacctggccaagactgaacccggtgcctggctcctaccccacacagagctgccaccctcacctgtccccaagccacc

SEQ ID NO: 85650 - DNA, 83 bp, Homo sapiens
gatattatttttcattatccttttctgggtgctatgggtgatcattccaagaggggcagctggcattttatgctatgtgggag

SEQ ID NO: 85651 - DNA, 100 bp, Homo sapiens
ctcagggccacgatccccttccagctgcagcagccgcaccagcgccgggacgggggtggccgtgcagcctcccggcgtgtggcctgccaacccggctccc

SEQ ID NO: 85652 - DNA, 115 bp, Homo sapiens
cggggcgctcggggcgacgcggcgcttgttggcggcgctgcgaggccagagcctagggctagcggccatggtgattcgcatctaggtggcggcagtcgagaaggctcgtttaaag

SEQ ID NO: 85653 - DNA, 83 bp, Homo sapiens
caagcttttcaggcatcctcatataattaaacttgagaaagatcagtctaaagaaaaggagaagaaagtgaaaaaaacaattc

SEQ ID NO: 85654 - DNA, 98 bp, Homo sapiens
gggattcaggtgtggtgccggtgggaactgaggaagcgcccaaggagtcggtgatggaggcaacgagcttgggatgggtaaagtcaaggaggctgtga

SEQ ID NO: 85655 - DNA, 85 bp, Homo sapiens
ccggaaaactgattagaaggcagagattatggatgattggccagggtatgacttgaatttattcacgtacccacagcactattat

SEQ ID NO: 85656 - DNA, 88 bp, Homo sapiens
aggacaattccatttggggaccagagatggacggtcactcagcctatggagagacatgaggctgagctggttccgggtcctgacagta

SEQ ID NO: 85657 - DNA, 100 bp, Homo sapiens
ctcccaccagtgccagaatcatctgtgaaaagactctcagctttccaaaacaggtatctgatgtgtagccatgcagaagacctacgtgcaaaagcagaat

SEQ ID NO: 85658 - DNA, 90 bp, Homo sapiens
caaattgaaacaacagcaagctgcagtggattctgagacccattgtcatgcagaaaggtgcttcctctcttggttctgcgacgacatact

SEQ ID NO: 85659 - DNA, 96 bp, Homo sapiens
tccagaggatgaggcgctgatgcttcgggatggacgcttctcagcagtggaagccgatacctcattcgatcagatgatatgatagaaacagtttac

SEQ ID NO: 85660 - DNA, 100 bp, Homo sapiens
atttgctgttggtgtccagcaagagacggtggctcagggagtaaaggaaggccagttgagcaaacagaagtgttcctctgcatttcaaaaccttcttcct

SEQ ID NO: 85661 - DNA, 100 bp, Homo sapiens
atggaagggctggaggaggcagaggccaactgctccgtggcgttcgctgaggctcagagatgggtggaggaattgaatgatctggcacgggaccctccag

SEQ ID NO: 85662 - DNA, 100 bp, Homo sapiens
tattgacaaagatgcatttggaggagtatacagtggaccaagcttgctgataagttctgaacgtcgaaaagaaaagtctcgagatgcagccagatctcgg

SEQ ID NO: 85663 - DNA, 100 bp, Homo sapiens
aagctgccctgagacggtgtcccgccgaaaggggactcattctcacagttccggtttgctgaggagaaagaatgggatagtgaagcttcttgtccaaaac

SEQ ID NO: 85664 - DNA, 87 bp, Homo sapiens
ggagctcctgacccaggagcggaaggctgcagccaacatcatcagttgaagactgggatagtttccaagctattttggatcatacct

SEQ ID NO: 85665 - DNA, 51 bp, Homo sapiens
gagtgatttcaaagatcagcagaaagctatcagtgaaaagcatgatgtggt

SEQ ID NO: 85666 - DNA, 50 bp, Homo sapiens
gtccgagcactttcagctctgcaaggcaatggacctcatcatgaccgttg

SEQ ID NO: 85667 - DNA, 75 bp, Homo sapiens
gaacaagaaagctcagctggtggtgattgcacacgacgtggatcccatcgagcaaggatggaacattactgtgga

SEQ ID NO: 85668 - DNA, 74 bp, Homo sapiens
cacggtgcagctgaacgtgaagcggtgtccgcaatgttgccagtgtctgtctgcagattggctacccaactgtt

SEQ ID NO: 85669 - DNA, 98 bp, Homo sapiens
cgagttatgcccaccctccaactttgcgacggaaatgtgtcatcgaaagccagccgagttccacagcctctgcccagacggaaagggctacacccagg

SEQ ID NO: 85670 - DNA, 76 bp, Homo sapiens
atcctccagtaccttgattcagagagaagacagatggaatggggcgagtccttgctcaagatgtatatgcaaaaga

SEQ ID NO: 85671 - DNA, 82 bp, Homo sapiens
gctgcagccagctggcccccagggccctgcagatggcggctcagcggcagcgggcgctggccatcatgtgccgcgtctacgt

SEQ ID NO: 85672 - DNA, 75 bp, Homo sapiens
gggaacgccaagaagctggaggaggagctggcagacctgaagcatgtgcatggcaagctgaagaagcagttccag

SEQ ID NO: 85673 - DNA, 100 bp, Homo sapiens
caaagcgtccatcatccgcctcaccacgagctacctgaagatgcgcgccgtcttccccgaagatggcactgtacttctgctcggggctgctgcaggaccc

SEQ ID NO: 85674 - DNA, 75 bp, Homo sapiens
accggcacggggcgggcagcggctgcctgggcactatggaggtgaagagcaaggccttcgtcaagatggttggac

SEQ ID NO: 85675 - DNA, 100 bp, Homo sapiens
gctgcggaccccgccgagtcctagcgcctggcctgcgcgccgctgcccgcgccacagctgttttcactcattagctcctgaggtaaacaaattgaaaaaa

SEQ ID NO: 85676 - DNA, 87 bp, Homo sapiens
tttccaccagctcatgaaagacacgactttgaactggaagggtttactgcgaggaaatgcgtgaagagcggcaagaccgactgaaat

SEQ ID NO: 85677 - DNA, 88 bp, Homo sapiens
ctgacccactacaaagtgtacaggacatcagtaagactaccacatatgatacaccaacttctaaaaagaaagtacgaattaaagaccg

SEQ ID NO: 85678 - DNA, 88 bp, Homo sapiens
gggaggctgagcccggggatggcgcgccagcactgtgacttctgccgtgttcaccgtgggagacaacgtggtttcaggcagcgatgac

SEQ ID NO: 85679 - DNA, 98 bp, Homo sapiens
gaaaggatgacatatttttggacctgaaacagaaattctggaacacctatatgggttctcggaccagcagtgaccttcaaagtgagcgccaatgtcca

SEQ ID NO: 85680 - DNA, 90 bp, Homo sapiens
ctacggcagcgaggaggacctatgtgctctgccctaccacgtgacctggagaaatcggtggagaagatccagagagacgtgtcccacaac

SEQ ID NO: 85681 - DNA, 98 bp, Homo sapiens
tgaaccctaaaacaattaatccggttgggataattcttcactattccacccttgccacagtactatgggtaggagtgacagctcgaaatatctacaaa

SEQ ID NO: 85682 - DNA, 97 bp, Homo sapiens
ggaagctttcaacagactggacttctcaactgccattctggattccagaagatttaactacgtggtccgggaagagctgaagagagacctgaaaatt

SEQ ID NO: 85683 - DNA, 73 bp, Homo sapiens
tttcctgtgttccctttgccgctcctggagttcactgcatcagaagagctaacaattgctggaatgaccttta

SEQ ID NO: 85684 - DNA, 103 bp, Homo sapiens
gctgagtgatcaagcaaggtacctgcaggacccatttgtgtccattgatctcttggagcagctggggatcatggtgacaatggaatggactctgatatggaag

SEQ ID NO: 85685 - DNA, 100 bp, Homo sapiens
gaacattcatgcacaaatttttatgtggagatgtccggtctgtgctacgacagcaaaatgttccaggtgcatcaggtgctctgcatccccagctggatgg

SEQ ID NO: 85686 - DNA, 93 bp, Homo sapiens
gaagacaatccaaaacaaacgctattcctctcacgaattagatacacttcaacaacaattggattcacagaacatgaaaaaagagagcctgga

SEQ ID NO: 85687 - DNA, 76 bp, Homo sapiens
cagattatggaatagttgcagatttatttaaggaaaagaatacttgagatccatttgtaaggaaagaaaaggaagc

SEQ ID NO: 85688 - DNA, 100 bp, Homo sapiens
ggaagattggggccttctgattattttggtcccagtagggatggcacaatcagcgaggacaccatccgagcctctctcatctctgcggtcagtgacaaac

SEQ ID NO: 85689 - DNA, 100 bp, Homo sapiens
ccagcttccactgacacgagcctcggcgcggcttccgcttccgcaattctgtggtgttcttggtcacacatttatggagtttctgaagggcagtggagat

SEQ ID NO: 85690 - DNA, 73 bp, Homo sapiens
acgcctccgcgggcagttaccagctttggctgctcgcgcctccccaactcggacccaacatgagtgaagtttc

SEQ ID NO: 85691 - DNA, 100 bp, Homo sapiens
tatcagggaccatcgccatcaaacattacttcagtatagttccaggtgattctagtcacaagattcctatttcaaattttgaacgtgggcataaccaagc

SEQ ID NO: 85692 - DNA, 96 bp, Homo sapiens
gcggcgcagacgaggcctgaggcggcggcgcgaggcagagcgccgccctgtgctgggctgccgggagctcgtcttcaggaacctctccaagatcct

SEQ ID NO: 85693 - DNA, 100 bp, Homo sapiens
ggaacatcaccttgcccatgtctcacgcgggacataagcagatgttcaacccaacagaggaaagccagacatttcttcagctgaccactctgtgtcaaga

SEQ ID NO: 85694 - DNA, 100 bp, Homo sapiens
cacgcaggacagaaatgaccaacagataactgaggacaatggacctgcctgggcatagacttccttaaggtggtgatgatgtccagcaactctgtgaagc

SEQ ID NO: 85695 - DNA, 100 bp, Homo sapiens
actgacctaccccctggacctggtcagagcgcggatggccgtaaccccgaaggaaatgtgtcaactctgcccgctcagttcctccttcctacccaccacc

SEQ ID NO: 85696 - DNA, 90 bp, Homo sapiens
cgcagttggaagcccatggggcagggaaatcctcattgacgattcaatttgttgaaggccaatttgtggactcctacgatccaaccatag

SEQ ID NO: 85697 - DNA, 99 bp, Homo sapiens
aagaagatgacttcctcaacaacgccatgtcctccctgtactcggagatctataaggacaggcagaaattctcagaacaggttttcaaagtggcctcct

SEQ ID NO: 85698 - DNA, 83 bp, Homo sapiens
gaaaactatccaagaatgtgacttcctggagtagagtcttttttcactgaggtatccggctgctttgatgaacctgggagcca

SEQ ID NO: 85699 - DNA, 100 bp, Homo sapiens
cacgagctagtgttggagtgcaccaagaaatggcccggcttctctaaagaagtcaggaaagctggacttctgcagtgccctctcctctcagggcagctcc

SEQ ID NO: 85700 - DNA, 97 bp, Homo sapiens
ggcggagctgtccccagagaccctatgcaacgggcagctgggctgcagtgaccccgctttcctcacgcccagcggggatctgatgagcttctttctt

SEQ ID NO: 85701 - DNA, 75 bp, Homo sapiens
actgggacttggagcagcagtgacgtttgatgcaaatgatttgtatcaggggcagaattttaacaaggtcctcag

SEQ ID NO: 85702 - DNA, 82 bp, Homo sapiens
atggacagaatcatctagaaggacaaatgaacttcaatgcagattctagccaacataaaggatcagtgaatgcttgtgaaaa

SEQ ID NO: 85703 - DNA, 101 bp, Homo sapiens
tggggatacatccctatggtcatcagccaactgctgcattcagtaaaaataaggtgcccagcagaggcagaggaccctgcggccttccgcagtgtttgtgt

SEQ ID NO: 85704 - DNA, 100 bp, Homo sapiens
ggaagggcaaggagtacctatagaaccccggaggagggtgaggagcagagctggaatcagcatgattcttcagaggctcttcaggttctcctctgtcatt

SEQ ID NO: 85705 - DNA, 82 bp, Homo sapiens
ctacgaactgtgatggcggcggccgcggtgatgggcccggcgcaggcttgcttccggcgtcatggctcaaagggccttcccg

SEQ ID NO: 85706 - DNA, 100 bp, Homo sapiens
acgggcgccgcgtccctgcacagcccgccgcagagtttagtactgctaaactaaagtagattaatgagaagggagagagagccaagaccatcaagcagac

SEQ ID NO: 85707 - DNA, 98 bp, Homo sapiens
gattcacccacagcggggcggcggcggcggcggctgcggcccaatatagattctggacaatcaggaagtccaagccacaatgatcctgccaagaatcc

SEQ ID NO: 85708 - DNA, 100 bp, Homo sapiens
caaaaactatgtacttggaggatcgaacagttactcactataaacaatatccacccaacacaagcaaagtttattcctactttgaatgccgtgaaaagaa

SEQ ID NO: 85709 - DNA, 97 bp, Homo sapiens
gcagtgacatgtccagcatgaatcccgaataatgcctgaggaagtgcaccatggagaggaggaggtggagacttttgcctttcaggcagaaattgcc

SEQ ID NO: 85710 - DNA, 132 bp, Homo sapiens
gttcctgatcgaacgcggtggtgagagcacacgtcctcgtctcgttcctgatcgaacgtggtggtgaccttggagaaggtgctgggaattacagtgtctggaggcagaggacttgcctgtgacccccgatca

SEQ ID NO: 85711 - DNA, 100 bp, Homo sapiens
cacgggggaaaagcatccggtggcctcagggagccctgaagaaaccgaagcagaatgtaccagggacacatgcagaacattgacatcaccaatttcagca

SEQ ID NO: 85712 - DNA, 82 bp, Homo sapiens
cctcaagctgtcccaggacatggacacctgtgaggatctattaggattatgtgaacagaaaagaggcaaagataataaagct

SEQ ID NO: 85713 - DNA, 100 bp, Homo sapiens
tggaggctgtggcaatggaacaggcttgagaaacaggtttgattactcaggagttggaagttcagatggtaactcagaggaaagcacactggggaaatgg

SEQ ID NO: 85714 - DNA, 98 bp, Homo sapiens
aaaagcgtcaagaagaggaggaagccatgcgtagggcaagataacccctgtgacagaaggctactgttgctgtaacaaagggcatacatacattttca

SEQ ID NO: 85715 - DNA, 75 bp, Homo sapiens
agctgcccggggatacctggctcgcagacacctggatttcattagcatcatgacctacgattttcatggagcctg

SEQ ID NO: 85716 - DNA, 59 bp, Homo sapiens
ctcaccagacagatcgctgtcaaaaccctaggcttggacttaaggatcagcaggagaga

SEQ ID NO: 85717 - DNA, 80 bp, Homo sapiens
tcagaagccagaagagaaaacaaaagaccaacccttgagggaagagaattatctctaagatccccgtcgaggtcaagatc

SEQ ID NO: 85718 - DNA, 100 bp, Homo sapiens
ccaggatctcgggctcggaacgagactgcacggccttggatggtatactgtaaattcagcatatggagataccattatcataccttgccgacttgacgta

SEQ ID NO: 85719 - DNA, 87 bp, Homo sapiens
ttcacaatccaagttccacaatatattgactactgccacaattccggtgacttaagagattaaaattaatttggttgctgttggttc

SEQ ID NO: 85720 - DNA, 82 bp, Homo sapiens
atcgtctcaggggaaaagaagccttggcgaagagcagaggtttagagtttgtgaatagcacaatggaagaagctggactttg

SEQ ID NO: 85721 - DNA, 50 bp, Homo sapiens
caagagcacattgcctggtaagatggtttaccgacaagactgtgaaactt

SEQ ID NO: 85722 - DNA, 100 bp, Homo sapiens
ggaggctgccaggataataagggatggggaagcagaatagcaaactggcccctgaagtgatggaggacctggtgaagagcacagagtttaatgagcatga

SEQ ID NO: 85723 - DNA, 50 bp, Homo sapiens
aattgaacgggtcgaggtgccaagggccagccaagtctcgggatggtgaa

SEQ ID NO: 85724 - DNA, 110 bp, Homo sapiens
gctggacacactggaggcgctgggttggggaagcttcggcaggaaaagcatcccgcagccttgcgcaacacattcctggaccaggtagtatagaagggatgaaaggcgct

SEQ ID NO: 85725 - DNA, 100 bp, Homo sapiens
gttggcggtccctgtgacctgtggagacacggccagatctgccctccagaatacggttggacagaatgaactgaagattacaagtgatcaagtgataaat

SEQ ID NO: 85726 - DNA, 100 bp, Homo sapiens
ccgccccatccccgccactttccccggagctgggccgcgaacacctcactattgatggtgtagcgctttaggggaagatcatggaagggaagtggttgct

SEQ ID NO: 85727 - DNA, 90 bp, Homo sapiens
gcgcctgcgaccccagtcggtgctccggggaggtcacctgacgaggaggtacggttcctggagcagcagaacaagatgctggagaccaag

SEQ ID NO: 85728 - DNA, 75 bp, Homo sapiens
tgaattcacctttgattccagtgtgaactgtcaatcataagggcattttgtcagtgatgctgatctttgccttct

SEQ ID NO: 85729 - DNA, 83 bp, Homo sapiens
cagacgcagccgtagacaccagctccgaaatcaccaccaaggtgatgatgaacagtctacacagatggctgcaagttgggaag

SEQ ID NO: 85730 - DNA, 75 bp, Homo sapiens
gtaggagaatgactccgattcgtgaccctcagcgccggtgcatgtcgatcttcaggatgagttagagaaaggtga

SEQ ID NO: 85731 - DNA, 75 bp, Homo sapiens
cggggaccagcagctgtcgccgccgctctcagacaatgcagatcttcgtgaagactctgactggtaagaccatca

SEQ ID NO: 85732 - DNA, 80 bp, Homo sapiens
cctggagcctcagttggaagcagccgatccagcctgcggagcctgtggggcaggtgcatggctgcctcctaatcccatag

SEQ ID NO: 85733 - DNA, 90 bp, Homo sapiens
gtcgggcgccagctgcatggtgcagatcagtattgatggtccagctgctgtcctgaaaccagacgaagttcatgctccatcagtaagctc

SEQ ID NO: 85734 - DNA, 82 bp, Homo sapiens
gtccgaaggaggaagggaaccaacccactttctcggcgccgcggctcttttctaaaagtatcctctgccttgtcaatgttag

SEQ ID NO: 85735 - DNA, 50 bp, Homo sapiens
aagttttgtgcagattgccagtctaaaggccctggccaacgtcaacattg

SEQ ID NO: 85736 - DNA, 82 bp, Homo sapiens
acttttggaccaaaggcctgtgtgctgcagaacccccagaccatcatgccgagacgcatccagagctttcgtgaccggggac

SEQ ID NO: 85737 - DNA, 75 bp, Homo sapiens
accgacacacagtgcaagcgcgtaggaacacaatgctgggtgtttgggtcatagacatgaatgactaccagagga

SEQ ID NO: 85738 - DNA, 76 bp, Homo sapiens
aaccgggtgtccacatgagtgcctctcccagcagatccaggtggagccgccaccaaaatgcagattttcgtgaaaa

SEQ ID NO: 85739 - DNA, 74 bp, Homo sapiens
gtgggacccaaatctacaatggtttgtgttgctagttaagctagcttgtattgttgtggcttccttcgttctct

SEQ ID NO: 85740 - DNA, 100 bp, Homo sapiens
accattctactttccgtctctatgaatttgactactcgaagtacctcatggaacttaggctgcggaactatgtcccggaggatgaggacctgaagaagag

SEQ ID NO: 85741 - DNA, 75 bp, Homo sapiens
agaggagaccactggaaatggagcagcagcaggcctatcgtccagatggagttttgcccttgttgcccaggctgg

SEQ ID NO: 85742 - DNA, 100 bp, Homo sapiens
acgcgctcctggctcggcccgacagcctcgcttggccgccagttcttctgcagccgaaggcgtttgaaggatgacctctaggaagaaagtgttgctgaag

SEQ ID NO: 85743 - DNA, 75 bp, Homo sapiens
tgttcgggctcctggaggacgagactctcagcgttctcatctctcttccttcaccatgaagctgatggacaaatt

SEQ ID NO: 85744 - DNA, 83 bp, Homo sapiens
gccgtcttccccaggcctgcgtccgagtctccgccgctgcgggcccgctccgacgcggaagacggagtctcactgtgttgccc

SEQ ID NO: 85745 - DNA, 88 bp, Homo sapiens
gagggcgagcgaggaggatggcggagtcggggctcctgacgttttctggatatgccgcagaaggatccgtgccagaagcaagcctgtg

SEQ ID NO: 85746 - DNA, 89 bp, Homo sapiens
ctttatggaggatttagtagattggcctggaatcctgctgctgaagatcagtgctttgacagatgccatagacttggtcagaagcaaga

SEQ ID NO: 85747 - DNA, 100 bp, Homo sapiens
gaactttttgaatctttcaagagttttgaagaatatactgatgataatgctctgattcctaagaattcttctgtaattgttagaagaattcctattggag

SEQ ID NO: 85748 - DNA, 100 bp, Homo sapiens
gacagacttctggatggttacgataatcggcttagaccaggactgggagtaccttctccaggcaaattccgttcccctgcagcaccatctcctttggctc

SEQ ID NO: 85749 - DNA, 75 bp, Homo sapiens
actacgttaagatgacgacagactcagatccaagtcaacagtttctaaatggagcccctggatttataaacttgt

SEQ ID NO: 85750 - DNA, 80 bp, Homo sapiens
tgagtgatgtggaggaaaacaacttcgagggcagacattccaaaatatgcccggtgctatccgcccagctgctcctagac

SEQ ID NO: 85751 - DNA, 120 bp, Homo sapiens
tacaatgatgaaccttggtataaccaaaagactcagaaagagcgagagaccttgaagatctttaatctcatgaagtacgacagctacagccgcttcttaaagtctgacttgtttttaaaa

SEQ ID NO: 85752 - DNA, 49 bp, Homo sapiens
gtcacactcaacatcacctctcagttggggaatggcggtcaatgtgtat

SEQ ID NO: 85753 - DNA, 130 bp, Homo sapiens
gaagatacccgccctgcgccccgctctgctgtgggcgctgctggcgctctggctgtgctgcgcgacccccgcgcatgagtgatcagcagctggactgtgccttggacctaatgaggcgcctgcctcccca

SEQ ID NO: 85754 - DNA, 100 bp, Homo sapiens
cgcctggccctggagaactacatcaccgctctgcaggctgttcctcctcgggcacattttacaatatgggataagctattggaaagatctcggaaaatgg

SEQ ID NO: 85755 - DNA, 82 bp, Homo sapiens
aaaagcatccccgaggaggaagacgaatcgttaaacatcttaggtcaggtgaccttccctccaccccaggaagctatgacag

SEQ ID NO: 85756 - DNA, 100 bp, Homo sapiens
catccactggacctaaaatatgaccctgatccagatcaatataatcatctggtattattttccttctgcctggaggacttgctttaacatttcaagtagt

SEQ ID NO: 85757 - DNA, 100 bp, Homo sapiens
ttccaggagattcaaccaggaatgaagatgacgccaacagactcggggagaaggtgatcctgcgggagcaggtgaaggaactcttcaacgagaaatacgg

SEQ ID NO: 85758 - DNA, 73 bp, Homo sapiens
aatatgctatgccaagctcagccccgaagtgcttcagatgtagaggaccaaaatgtctttgactccaagaaga

SEQ ID NO: 85759 - DNA, 100 bp, Homo sapiens
cggcggagtctgcgcgatgggcgacccggaaaggccggaagcggccgggctggatcaggatgagaacatccagtcatggataaaaatgagctggttcaga

SEQ ID NO: 85760 - DNA, 90 bp, Homo sapiens
cttcaaagctgaactgaatgagtttcttactcgggagctggctgaagatggctactctggagttgagcaactttcatcctttgaaacgtg

SEQ ID NO: 85761 - DNA, 75 bp, Homo sapiens
cgagaaccgcagggactggccgagatcaagaagttggtatatgtttacctggttcgatatgctgaagaacagcag

SEQ ID NO: 85762 - DNA, 82 bp, Homo sapiens
cgaggagtctctgtccgggggcctggctaaggaaaccctattacctccaggaacggagctttgactgtaagatctgtgggaa

SEQ ID NO: 85763 - DNA, 75 bp, Homo sapiens
ttgcttcctcgggaatatttagttcagattaaatctcttgatgaacagtgtgtggttggcaaaatttccaagcac

SEQ ID NO: 85764 - DNA, 100 bp, Homo sapiens
tttggaaatggaactagaaaaggcagagatggaacgatctacctatgttacagaagtcagagagaagaaacattcatggtgtctcaagagaaaaaatcca

SEQ ID NO: 85765 - DNA, 75 bp, Homo sapiens
ctgaggtccagatgaaagagaagtttctggtcactccccaggattatgcgcgggtgatagcacactcagataaga

SEQ ID NO: 85766 - DNA, 75 bp, Homo sapiens
gccgagcgtcgccgccgccgccgccatgaacaactcgggcgccgacgagatcggctcctggcctgcgcggcttcc

SEQ ID NO: 85767 - DNA, 83 bp, Homo sapiens
ctcccctctgagactggagtgagagggtcttctgacttaattcagtgcacaaatgagatgaatgtgaacatcccacagttggc

SEQ ID NO: 85768 - DNA, 135 bp, Homo sapiens
gtaaaaccacatatattcgtcaaggggaacagtctcttgatggtttctatagagcctggcaccaagtggaatattacagcggaaagtgaccagaagaggtgtgcagtttccaggcctggcccatacagacctcca

SEQ ID NO: 85769 - DNA, 100 bp, Homo sapiens
atgactctgactacgatgaggtcccagaggaggggccgggggccccagccagagtgatgaccaagaagaccccccaaagacacacgtgacccaccacccc

SEQ ID NO: 85770 - DNA, 51 bp, Homo sapiens
cctggccaccgactcctacaagattgcagagggaatggcatacatcgagcg

SEQ ID NO: 85771 - DNA, 82 bp, Homo sapiens
agcagcccccagcctcggacgccgtggcccttgggagagagccgcggcgagtcctttgcacatgttggcaacacacgcatcc

SEQ ID NO: 85772 - DNA, 89 bp, Homo sapiens
cggaggcggaggcggctttggcggtggtagtgccgtggtccttcagcatatctctgtgctgcagacaacacaccttcctgatggaggtg

SEQ ID NO: 85773 - DNA, 82 bp, Homo sapiens
tttgagcaatggggaacgctcacggactgtgtgactgcaaaattcaaaatggggctcaaggtattcgtttcatctacaccag

SEQ ID NO: 85774 - DNA, 75 bp, Homo sapiens
atggtctggagagacacgccaggatggagagagcaaaagtgctgggtcttcagctctaaagaggccatttgaaga

SEQ ID NO: 85775 - DNA, 82 bp, Homo sapiens
gagaagctgcctgtctacatcagcctgggctgcagcgcgctgccgccgcggggccggcagaactcccccactggaaaggatt

SEQ ID NO: 85776 - DNA, 98 bp, Homo sapiens
cggagaacctgagacaccttaagaacaccatggagaccatagactggaagcggccgcaaactgacacctcagggacaaagagatctggacagaatcgc

SEQ ID NO: 85777 - DNA, 90 bp, Homo sapiens
gtcagttccttgtggagccggagctgggcgcggattcgccgaggcaccgaggcactcagaggagatctctggaaacatggctacagaaca

SEQ ID NO: 85778 - DNA, 95 bp, Homo sapiens
gagacttggatgaggtgaaagactatgtggccaagttccaatgacaggatttacacagagagcaactattgatccagaactgaatgaaatacacg

SEQ ID NO: 85779 - DNA, 100 bp, Homo sapiens
ttatttatgtcatcaagaagaatgacgatgaaatcatgaccaccccaggaaaagagaactttcgcctgaaaagttacaagaacaaatctctgaatcccga

SEQ ID NO: 85780 - DNA, 100 bp, Homo sapiens
ggggtcagaaggacctctaccgagatgtgatgttggagaactacaggaacatggtcttgctggcattggcatcaacaaaagtcagaattcccgggaactt

SEQ ID NO: 85781 - DNA, 75 bp, Homo sapiens
ggatttgagattgacgcggtgaactctgtccagttttcaaaccacacagaaggaagaggcccagcagaagggact

SEQ ID NO: 85782 - DNA, 75 bp, Homo sapiens
gaaggacttcacctacagcaaggacgacttccaccgtgcagtttgctggcctagacctgaactcttcagataatc

SEQ ID NO: 85783 - DNA, 85 bp, Homo sapiens
ccaccaaccacatgggcaacgtcaccttcacgaatgacggactctgggttccgggaaggcctctccaaagtcaacaaaacagcca

SEQ ID NO: 85784 - DNA, 90 bp, Homo sapiens
ggttcaagaggtgctttgcgggatgtttgcctgaatccagtttacagagggtttagaagtgtacctgcaaggccgggagttccagtcccc

SEQ ID NO: 85785 - DNA, 87 bp, Homo sapiens
tcgacatgagtgatgtggaggaaaacaacttcgagggcagatgtgaagtgagggggtctctctccctccttctccttcctctgtgat

SEQ ID NO: 85786 - DNA, 75 bp, Homo sapiens
tgataacaccctgtaacagctgatgtctttctcgagaagcaggtggaaacatgagcattcagtttcttggtacag

SEQ ID NO: 85787 - DNA, 100 bp, Homo sapiens
gtgaggagggtggaaagcatttcggctcagctggaggaggccagctctacaggcggaaattaaggatgcagacactcagggcgtgtgtcttgcacagcca

SEQ ID NO: 85788 - DNA, 50 bp, Homo sapiens
atctgagctctccactaaaccagcccaccttgggacaccttgactccaag

SEQ ID NO: 85789 - DNA, 100 bp, Homo sapiens
cccctgcccgggccctcctgaagaggcggcgctcagacagagttgtggaaagtaaaaatgtagccctaccaaaaggaactattgtactggcttctccagg

SEQ ID NO: 85790 - DNA, 75 bp, Homo sapiens
gctggccctggtcactgtgctgaacgagtatgattcatccagccttccagctctgttatttaaagcaagaacact

SEQ ID NO: 85791 - DNA, 90 bp, Homo sapiens
tcatccccaaggaggacggcgtgatcacggccagcgaggacaggtggtaaattcactccagcagcaacctcaggctgcatccccttcagt

SEQ ID NO: 85792 - DNA, 100 bp, Homo sapiens
catggcggatggccccaggtgtaagcgcagaaagcaggcgaacccgcggcgcaataacggcattggaatggatacttgtgtcattcctttgaggcacggt

SEQ ID NO: 85793 - DNA, 82 bp, Homo sapiens
tggttataagggttcctgctttcacagaattattccagggtttatgtgtcagggtgagtggaagccccggcagatcgacaac

SEQ ID NO: 85794 - DNA, 100 bp, Homo sapiens
cactgctgcagtccaggctgaagacagagggctctgatctgtgcgacagagtgagaagccctaccactgcaactgggacggctgcggctggaagtttgcg

SEQ ID NO: 85795 - DNA, 99 bp, Homo sapiens
gaccccaagaagaccattcagatgggatctttccggatcaatccagatggcagccagtcagtggtggagatcttctgtctacatggtggtctctcgcca

SEQ ID NO: 85796 - DNA, 83 bp, Homo sapiens
ctgctgctgggggccttcccgccggccgccgccgcccgagacatgcaagaaagcacttcagccaagcagaagggagccagctg

SEQ ID NO: 85797 - DNA, 100 bp, Homo sapiens
gaagagggtctggaggagccttctcaagaacagagtatgccaccacgggctgttccctgaccctgcaccatacggagaaaccagaacatgaagacatatg

SEQ ID NO: 85798 - DNA, 90 bp, Homo sapiens
gcttccgccaggcggtgatgaagaatccccccgaaaggaccccccagctaaacaaccctgagatggtggagggccttgtccttatcaacg

SEQ ID NO: 85799 - DNA, 82 bp, Homo sapiens
cgcggtggtgaagctggcgcggcatcgagtcaccaaaacgcagcttaccctgaaagaagcagatcccagttcaaaagtagcc

SEQ ID NO: 85800 - DNA, 89 bp, Homo sapiens
acgaggaatcagctttgaagtgggagcccagttggaagcccgggaccgtttaaaaaactgaaatgaagctgttgtcatttctggaagga

SEQ ID NO: 85801 - DNA, 100 bp, Homo sapiens
caacagcttcatatggacagatggacttcaaatgctgtttgtattccagagactagaaaatgtggacacagacttgccaggcagcctggggcagagtgaa

SEQ ID NO: 85802 - DNA, 100 bp, Homo sapiens
cgtcggtcgccgcagtcacggagcgcactggtcaaacaccagcaacatcagagctgaacttcttaagaaaagcacagacattggaaacatatggagtgga

SEQ ID NO: 85803 - DNA, 98 bp, Homo sapiens
ctagaagtctggatgtcggtgggcctctgagatatgccgtttacgggtttaccgacaagactgtgaaactttcgggatggtggtgaaaatgctgattg

SEQ ID NO: 85804 - DNA, 82 bp, Homo sapiens
ggagctgtgcgagagcctcctcacttggatgtccagctcgccgctgtccaagaaacgtcgcgtgtccgggcctgatccaaag

SEQ ID NO: 85805 - DNA, 82 bp, Homo sapiens
tgataaaaagagatgtggggggattctcgacctgctaacagaactggaccttttcgctctgtcaggattgccacaattccag

SEQ ID NO: 85806 - DNA, 51 bp, Homo sapiens
gccgtgtatgcttcgagatgaaggaaattccgctgtcagaaatcctcacgg

SEQ ID NO: 85807 - DNA, 100 bp, Homo sapiens
ccgtgatggctgggggggctacggctccgacaagaggctgagtgaaggccgggggctgccccctccccccaggtacgccatcccaccagagcacggcaag

SEQ ID NO: 85808 - DNA, 87 bp, Homo sapiens
gtgaatgactccaacgaattaggtggtctgactaccagtggctctgcagagaaatatggctacacacacctttctgcaggagagctg

SEQ ID NO: 85809 - DNA, 101 bp, Homo sapiens
tcctactcacccaaagccccgcacccgccttttctctctctcctctggcaggatgaggcgtgcaggcctggctctagaggacaaaatcccagtccttggca

SEQ ID NO: 85810 - DNA, 75 bp, Homo sapiens
tctgtagcgacagcggcttggaagtgctctaccagagttgcggagcttgtacctccaggcccatacatccttcca

SEQ ID NO: 85811 - DNA, 90 bp, Homo sapiens
cctatgccctggcttttgcagaaagaggagcgttagttgttgagtctgaagaagaagtagaggaacctgaagaaagacagcaaacacctg

SEQ ID NO: 85812 - DNA, 100 bp, Homo sapiens
aggaagtgtcacacagcagtcaagtatgtcccaaacgtctgaaaatcctgccttgcttcgttgggcctatgcaagaacaataaatgtctatcctaatttc

SEQ ID NO: 85813 - DNA, 102 bp, Homo sapiens
gacatgagatggtagacaaaaccccagtgctgctgggggtgaaatctttgaccagtgtgttgcagacagagaagaagcctttaaagaaaaagatgttcaaag

SEQ ID NO: 85814 - DNA, 51 bp, Homo sapiens
attttacataagaagttacctttttcaggtttccctagaaagagaacgaca

SEQ ID NO: 85815 - DNA, 76 bp, Homo sapiens
aggagccctggatggttgtgagggaagagacaggaagatggtgcccagtctcagaccagtatccttcaggggttct

SEQ ID NO: 85816 - DNA, 100 bp, Homo sapiens
ctatgatgctgatggtgatggagattttgatgtggatgatgccaaagttttattagtggatcaatcttcctgtcctacaactgacaaaggatcccctaaa

SEQ ID NO: 85817 - DNA, 100 bp, Homo sapiens
gctacactctggaccccaatggcaaaacctgcagccgacagtcattttgtttactcattcagccctgttgcaggtcccaataaactcttcataaggttga

SEQ ID NO: 85818 - DNA, 75 bp, Homo sapiens
atgggtgtatgtgttcatcaaggacaattgcatgcacttacagaggattggccatttgatgatggagctccaccc

SEQ ID NO: 85819 - DNA, 100 bp, Homo sapiens
gggcccggccgccaggcgcctctactccagtgctgctcctggcatacatgaaagggaacgccaacttgtgccgcgccatcgtccggtcgggggctcgcct

SEQ ID NO: 85820 - DNA, 100 bp, Homo sapiens
agtccttgctgaagagactttccgttacatgactcagaattctgcaaatgcagattttgcaaactttgatgcatttggacagtctagtggttcgagtaat

SEQ ID NO: 85821 - DNA, 91 bp, Homo sapiens
cacacggcctgcactctgcgctttgagctactgggctgtgagctgaacggtctcctctgagcctccggcctccataagacccaaaacagat

SEQ ID NO: 85822 - DNA, 83 bp, Homo sapiens
caggtcgtggcagagaaaaccagctgagacagggcgccacttactaggattttttatcaagcagaaatgcatcgaacaacgag

SEQ ID NO: 85823 - DNA, 90 bp, Homo sapiens
gacagtgttctgctttcatggagttcacagaagagtcgaggagggctactacaaagttctgggaaagggaaagctcccaaagcagcctgt

SEQ ID NO: 85824 - DNA, 100 bp, Homo sapiens
aagactgcgactctaaacggactcatgtactttgtcaggtggtatcacggcaacctcacacgccatgctgctgaagctcttctcctctcaaatggatgtg

SEQ ID NO: 85825 - DNA, 98 bp, Homo sapiens
gtccgactctcccacctgctaaggtcagaagagatcaattctacagaaatttccagtggttctgttgaggctttatggaattcagcatgtcaaaattc

SEQ ID NO: 85826 - DNA, 83 bp, Homo sapiens
atgcccagtggggcattcgtcttggtaaacttggtgtgatccagaagaattaatgttccagtattttaaaaagtttggcgata

SEQ ID NO: 85827 - DNA, 100 bp, Homo sapiens
tggaagggatgtcgtctcagcagtgctcgggcgcagggcgaagctgtgctcaggcccgggctggacgcagagccagagctgtccccagaggagcagaggg

SEQ ID NO: 85828 - DNA, 100 bp, Homo sapiens
ctgccaaaaatgtggatttgtggtctgcttagattgttacaaggcaaaggaaaggaagagttctagaggcaccatacaggaagattacttgagagagctg

SEQ ID NO: 85829 - DNA, 98 bp, Homo sapiens
tgacgggccctcttggggaagccacggtcgttcccagtgctggagaatctggtaaaagcaccattgtgaagcagatgaggatcctgcatgttaatggg

SEQ ID NO: 85830 - DNA, 139 bp, Homo sapiens
cgtgcctgtcttcagatcttcacagcacagttcctgggaaggtggagccaccagcctctccctggtactccaaagattcaggtttactcacgtcatccagcagagaatggaaagtcaaatttcctgaattgctatgtgt

SEQ ID NO: 85831 - DNA, 88 bp, Homo sapiens
gtcagctctttccccgtcagcatcccagccgtgctcacgctcaccatggatgatgatatcgccgcgctcgtcgtcgacaacggctccg

SEQ ID NO: 85832 - DNA, 100 bp, Homo sapiens
agcgagctctccactggcccaagctttggctagatcagagtctaagagagatggaggttttaaaaataattggagctttgatcatgaagaagaaagtgaa

SEQ ID NO: 85833 - DNA, 73 bp, Homo sapiens
aaatgtgcaggaattgaagaataaccctgcaaccccttctacagccatgggtattggtaaaggttttcaaggt

SEQ ID NO: 85834 - DNA, 100 bp, Homo sapiens
ggccaccttcgtgaacgcgctgcacctctacctgtggctctttctgctgggcctgcccttcaccctctacatgggtaacaagatgctcaactatagtgct

SEQ ID NO: 85835 - DNA, 90 bp, Homo sapiens
ctttcacgaaggcaccgacgtcatcatgctgaccaccaatcagatccgtaagaccgagacatgggtgcccggcaccgcgcccgagcccac

SEQ ID NO: 85836 - DNA, 99 bp, Homo sapiens
gtgacctgaaggctgtcaagtatgtggagtgttctgcacttacacaggtcatgtccatcctgttgcatggggatgctgcatttgctggccagggcattg

SEQ ID NO: 85837 - DNA, 100 bp, Homo sapiens
caatggcctactaaatctcaaacagacagaggagccagtgcgggaaagaggagatgcttctgtgatggaatggggagaagatattaaagcagtttcaaaa

SEQ ID NO: 85838 - DNA, 75 bp, Homo sapiens
gctcaacatgccaggtcctcccaaaaaccggcagggagacgagaactccaaatgaccctgtgactaacatctgtc

SEQ ID NO: 85839 - DNA, 75 bp, Homo sapiens
cggctggaggctcgcaagaaagccaagaacaagcagctgggccatgaggaaggctcacttatgtctgtaaagatg

SEQ ID NO: 85840 - DNA, 76 bp, Homo sapiens
tggagtacagatctctgcagttacaggaacatcgtctgcttcatgatctcttgtgaaatcccatggaaggttgtgc

SEQ ID NO: 85841 - DNA, 100 bp, Homo sapiens
gtgtaactactacctgcagccagaggaagacgtgaccattggagtctgcattagtgccagcagtagttcccaagggctgtctcagccatccacccagacg

SEQ ID NO: 85842 - DNA, 75 bp, Homo sapiens
cagtttgatagtgaaaaaggagtggactttgttctgaattactccaaagcgtatctactgtgcgtttcagtcaac

SEQ ID NO: 85843 - DNA, 140 bp, Homo sapiens
tattgtcattgcaagcactattggcagctgcagagccagatgatccacaggatgctgtagtagcaaatcagtaagaagacatgttggataacaagaagaggtgtagagtttgcatatatcaactgtggccttaatgagca

SEQ ID NO: 85844 - DNA, 98 bp, Homo sapiens
aagccaatgcccaagacattataaacggaaccttctgagaagcactgattatgacctcacagatgctgctggcagtcccttccttgcagaatccttgc

SEQ ID NO: 85845 - DNA, 116 bp, Homo sapiens
ttgctggcggcaatagggaaagtgaggcagctgcaaggagggcggcgggactgcactcgagtgtccagacctgctcgatgagtccgaaattgaagttcagaggaagaattgccttc

SEQ ID NO: 85846 - DNA, 115 bp, Homo sapiens
tcactatcgccatcctgaggcatgagaagtcccgcaagtttctgcttagcaatgtcctctctgtgacctgcctgctgcctccctcaacgaccagttgccccaacatacatttcgc

SEQ ID NO: 85847 - DNA, 95 bp, Homo sapiens
gagccgtctgcaaagtgtccccggcaagaaggtgtcgtgaaaactacccctaaaagccaaaatgggaaaggaaaagactcatatcaacattgtcg

SEQ ID NO: 85848 - DNA, 75 bp, Homo sapiens
cagctacgccccaccccggcctgggaccttggcccggtggtgtcagttgtacccgaggcgttctcagcagcagca

SEQ ID NO: 85849 - DNA, 100 bp, Homo sapiens
aatggtctgaggcagagtgtggttcaggacctagagccctgtggaaaggaatgggaagtacatttattgtccagggagtcacacttggagcagaaggcat

SEQ ID NO: 85850 - DNA, 100 bp, Homo sapiens
aggagcagcccccggagacagcggcacagaggtgcttctgccagggaatgggtactgttcaaaaaggaatgccccacaagtgttaccatggcaaaactgg

SEQ ID NO: 85851 - DNA, 75 bp, Homo sapiens
ccttgtcctcagggaagctggggctggtgcaactttcagaagtggtcccaggtcatcatcagatttgaaatattt

SEQ ID NO: 85852 - DNA, 100 bp, Homo sapiens
ggacaggcttgtccatctgtaacttcattaagaaaagctttgacctggaaatactacgcaaaaaaaattctttactacctgcggcaacagaagatcttaa

SEQ ID NO: 85853 - DNA, 100 bp, Homo sapiens
tcctggaacagatgcagaaggacccccaggcactcagcgaaccccctcagaattcctggagaaccccagccagagctcccgactaacagctccattccgg

SEQ ID NO: 85854 - DNA, 100 bp, Homo sapiens
ttgaaaactttgaggatgcagcactggaagaaaatggtttggctgtgataggagtatttttaaaggttattttagtgtccgccaacaaattgactcgtta

SEQ ID NO: 85855 - DNA, 100 bp, Homo sapiens
atcctcaagggcagcaatcggagccagtgtctagaggaccacacctgggcacctccctttcccatctgcaaaagtaggctccaaatgtgaagtacaagtg

SEQ ID NO: 85856 - DNA, 97 bp, Homo sapiens
aaaaaatgaatattacgtatgataacttacgtgtacttggtaatacgtcgggccttttgcagctgttatttaacagaaatcaatggagcctattctt

SEQ ID NO: 85857 - DNA, 74 bp, Homo sapiens
gttgctgctatacaacacaattataaaatgtcagcttttaagggtcctcgatgggcttcctggaatattggtgt

SEQ ID NO: 85858 - DNA, 75 bp, Homo sapiens
cagtaactgtcctccacatattgagaattcaaactcagcgaagtccccacatattttatcgccatgatttaatca

SEQ ID NO: 85859 - DNA, 100 bp, Homo sapiens
ctcaagcgatcctcccaccacctcagcctcctgagtagctggaaccatcatatgcaccagcacgcctggctaagccctttctggttactgtggctttatg

SEQ ID NO: 85860 - DNA, 75 bp, Homo sapiens
acactgataccaaaacagtcttggaccaagctctcagagtatgtcaggtgtggtggctcacgtctgtaatcccag

SEQ ID NO: 85861 - DNA, 90 bp, Homo sapiens
acaaagcagcgtatcgatgagtttgaagcaattgataccaagaagaagcaggggatgaagaagaggagcaacagtgaagtggaagacgtg

SEQ ID NO: 85862 - DNA, 100 bp, Homo sapiens
caaacatgctgaccgctcaagagattctacatcagtttggtttcactcagaccgataagccaatggacacgtcagtgttatctgaagaaggaggagagcc

SEQ ID NO: 85863 - DNA, 88 bp, Homo sapiens
ggactctggcagagaaaaggcccgatgccagttggtctgttcggcacttgaagtactccttgtttaagaaatcactactgggcagtgt

SEQ ID NO: 85864 - DNA, 74 bp, Homo sapiens
tctcaccactagcgtctggattggaatcgggaacgcccttttgcttgtgactggcagggctgcgacaagaagtt

SEQ ID NO: 85865 - DNA, 100 bp, Homo sapiens
caagagccgtctggacaccctggcccaggaggtggccctgctgaaggagcagcaggccctgcagacggactatgaaccctgaagccaggcaccaagaggt

SEQ ID NO: 85866 - DNA, 75 bp, Homo sapiens
accgccagatcaacctggagctctacgcctcctacgtttacctgtccatgataaaccctcgtctggatggctgca

SEQ ID NO: 85867 - DNA, 100 bp, Homo sapiens
cagaagctactcaaatgcagtcggcttgtcctggctcttgccctcatcctggttctggaatcctcagttcaaggagcagtgaggagaatgaataccttcc

SEQ ID NO: 85868 - DNA, 100 bp, Homo sapiens
ctggaatgatgtcgtcagtaatgcctggaatgatgatgtctcatatgtctcaggcttccatgcagcctgccttaccggatgtggacaacaaagtagagag

SEQ ID NO: 85869 - DNA, 51 bp, Homo sapiens
acaacaaaacattcatggagggggaagttgcagtattttacagagctagcc

SEQ ID NO: 85870 - DNA, 74 bp, Homo sapiens
gggcaccttgcagacccagaccttcatgcagtaccctcttatatatggactgattcttattccctgctggtgtt

SEQ ID NO: 85871 - DNA, 90 bp, Homo sapiens
aaaataaaggaaacacatttcatatactgcaggctattcagcttgaccctgaagaaactcgtcatgctaaaagaaatggacaaagatctt

SEQ ID NO: 85872 - DNA, 99 bp, Homo sapiens
cggctcacggcggaggacgacgcgctcaaccagatcgcgcgggagatcatcattttctgggtggaagtattcagctaaagactggttgatgagtgatgt

SEQ ID NO: 85873 - DNA, 75 bp, Homo sapiens
cgacagcctcaaacaggagctggagcagctcaaagagctacctatggcctgccccacccgcatcctgtgcctgta

SEQ ID NO: 85874 - DNA, 98 bp, Homo sapiens
agacctgccaatttaccagagataattgataacaccctgtaacagctgaatataaagatgaagcgcagctgtataaagaagagcacctgaggaatcgg

SEQ ID NO: 85875 - DNA, 51 bp, Homo sapiens
gcagtcaagtatgtcccaaacgtctaatttgaatacatctggcaagacaac

SEQ ID NO: 85876 - DNA, 75 bp, Homo sapiens
gatctgaaagctgaaattgagaagctttgtgagaagggcagaagtgatgtcttggcattgcccattttcaagcag

SEQ ID NO: 85877 - DNA, 75 bp, Homo sapiens
ccctctgcccccccttccccacgcaaccccagatccatttacactttacagattttttatcaagcagaaatgcat

SEQ ID NO: 85878 - DNA, 100 bp, Homo sapiens
agaacacagttggagaaaatcggcagctgagacggccttggccgaacccgaaaacagtggccaaatgtcaggtaactcccagaagaaatgttctccaaaa

SEQ ID NO: 85879 - DNA, 51 bp, Homo sapiens
ccgacatcgacgcagtctaccttgtgaaactttgtattgcaatgattgata

SEQ ID NO: 85880 - DNA, 82 bp, Homo sapiens
gccagggaaccctggtcaccgtctcctcagctcaaactggaggattataaggatcgcctgaaaagtggagagcatcttaatc

SEQ ID NO: 85881 - DNA, 100 bp, Homo sapiens
gcttaacagagtctggaaatcgtgaaagagcttgaccgatgaaatgggcctggctgtcgtatcgttcaactttgtggggaaacttttgggtccacgtggc

SEQ ID NO: 85882 - DNA, 98 bp, Homo sapiens
cttcctcctggcttcaccatcggagccatctgcaacatttcctacctagtgaagaaggggacagccactgagtccagcagagagatcccaatgtccac

SEQ ID NO: 85883 - DNA, 98 bp, Homo sapiens
tcggcctcccaaagtgctgtgattacaggaacagatgttgttattgtaaagaatggaagaagaatatgtggaacaggaggttgtttagccagcgcacc

SEQ ID NO: 85884 - DNA, 75 bp, Homo sapiens
tgcagagcgcgcttctgatcctgggggcatacataatcttgctgctatgcttcgaagctgtagtctgaatcaacc

SEQ ID NO: 85885 - DNA, 100 bp, Homo sapiens
ttataactttttgctccagcttcaagaggagctgctgaaggaattaagacatgagacgagttgtactgctgtcacaggaaatggacgctggattacaagc

SEQ ID NO: 85886 - DNA, 88 bp, Homo sapiens
ttctctgcctcttccaaacttttcctccctgaacctgaggggacacagcattgttggttttgccatgtactattttacctatgacccg

SEQ ID NO: 85887 - DNA, 100 bp, Homo sapiens
tacctcattctcactggctcggagactcctgcctgctgaggcagctgagtatgtcccagagaaggtgaagaaagcggaaaagaaattagaagagaatcca

SEQ ID NO: 85888 - DNA, 100 bp, Homo sapiens
ggcgacccaggcatctggggagccacagaagtcgtactcccttaaaccgctgaccccgcactacatctacccaccagccatcgtgcagcccagcgtggtg

SEQ ID NO: 85889 - DNA, 75 bp, Homo sapiens
gagggcttccacctccacggggttcagattcagaacaagaaagtggacatctctaaggtctcctccaagtgtggg

SEQ ID NO: 85890 - DNA, 89 bp, Homo sapiens
cttctggatgtgcagcaatcagatttatcattcggccatgaagtcggggggcacgcagctgaagctcatcatgaccttccagaattacg

SEQ ID NO: 85891 - DNA, 88 bp, Homo sapiens
gagtactggtttgtgctgactgctgagaatctgtcctggtacaaggatgatgaggatgacgatgtcgataccaagaagcagaagaccg

SEQ ID NO: 85892 - DNA, 100 bp, Homo sapiens
gatccaaacatcgaggctctgaatggcaactgctctgacactgaggcctggaagaaacgctggtttatcctgcggagtggccggatgagcggtgacccag

SEQ ID NO: 85893 - DNA, 83 bp, Homo sapiens
ttgctgtaaaggctgctctcttcaatacaaggtgccagaaccctgtggagcatcatgaactgggaagagtagctgagccccag

SEQ ID NO: 85894 - DNA, 73 bp, Homo sapiens
gaccaaggaaaaatccaagtgatggagcagcattttcaggaatcccgttctgcttccagaagtggaagtgctc

SEQ ID NO: 85895 - DNA, 75 bp, Homo sapiens
gcctgaaggacctggaggaggaccacgcctgcatccccatcaaggaactgtggctgcaccatctgtcttcatctt

SEQ ID NO: 85896 - DNA, 90 bp, Homo sapiens
cgcggggctaccggatcggtcggaaatggtgttcatgaagtctgtgaagctggagtgggtgcaagacaacatcagggcagcccaagatct

SEQ ID NO: 85897 - DNA, 50 bp, Homo sapiens
tttgcagctgccctttgttaaagaaactggcagacctttcacttcgtatc

SEQ ID NO: 85898 - DNA, 100 bp, Homo sapiens
gcagcgtgtcaggcggagagacccgccgccaggtgagcaagacgtggaaggtgattgcagaggatgaggtgctgtggtacaggctgtgccagcaggaagg

SEQ ID NO: 85899 - DNA, 101 bp, Homo sapiens
gagtgtccagacctgctcgatgcgcgagcttcggcctcggctctgtaccatgaagaagggccccagtggctatggcttcaacctgcacagcgacaagtcca

SEQ ID NO: 85900 - DNA, 51 bp, Homo sapiens
tttcagagaccaatgatgcaattaggttcttatttgaaaaccagacaccag

SEQ ID NO: 85901 - DNA, 100 bp, Homo sapiens
cggggttctggcctgggtgaaggagaaggtgctgcagaaattggggaaagctgtagaaaccaaagatgaacgatttgaacaaagcgctagcaacttctac

SEQ ID NO: 85902 - DNA, 132 bp, Homo sapiens
ctggaacagaaccaggagggagacgcggcctacaggaaggccttggacctggcgagagagtttttacctcagataacgaaggaggcccaacttcattcaataaggagcctgacggatttatcccagacggta

SEQ ID NO: 85903 - DNA, 90 bp, Homo sapiens
agttattgaatatcaagaggaggagttgttgcttgcccagtttcgacaaagaaaagctcagtcggatgggcagagtccttccaagaagca

SEQ ID NO: 85904 - DNA, 51 bp, Homo sapiens
tattggtctcctgctcctagagccaatcctgaggcaaaagaaacattttaa

SEQ ID NO: 85905 - DNA, 100 bp, Homo sapiens
tcaacttctatggtatggactacgcgacctccaaggatgcccgtgagcctgttgtcggggccaggtttgtttgtaaaaacaatggtgtgttgtttgaaaa

SEQ ID NO: 85906 - DNA, 80 bp, Homo sapiens
tacaagcacatgataatttcttccgtgctggtatagaggactctaagaagtggggcatgctgtttctggtgaaccagctg

SEQ ID NO: 85907 - DNA, 100 bp, Homo sapiens
atgcacggaccccccatgcggaagatatggcagaactcgtgattgtcggggggaaagacatccagggctccttgcagatcacagggatgacctgcgcgtc

SEQ ID NO: 85908 - DNA, 74 bp, Homo sapiens
acgtgcatgaaccaaacccacttcgttcaagacaggtgtttaagccccacaagagtgaacagatactgaaagcg

SEQ ID NO: 85909 - DNA, 99 bp, Homo sapiens
gctgactctttggactgctccagatttcttgtggaggccccccatgactgggatttagaggaggtacttcctcctccagctggttatgttcctattcga

SEQ ID NO: 85910 - DNA, 71 bp, Homo sapiens
aatgaaaatgaagggcgccctggaataggttcgccgaagagagagtcaccaggagactaaagtccatcaaa

SEQ ID NO: 85911 - DNA, 100 bp, Homo sapiens
tcgaagaagagtccttggaacaagcaactggctattgaaaaggatggatagaatgacagaagatgctcttcgcttgaatctgttgaagcggagcttggac

SEQ ID NO: 85912 - DNA, 75 bp, Homo sapiens
taaaagtggaaagatgacggatgaaaagaatgaacactgtccttcaaaacgagtggaggcctgaattttgatcta

SEQ ID NO: 85913 - DNA, 90 bp, Homo sapiens
gagatgctggaacatgcagagtctgcacaactgagtttattgatgacattgagttaatgttttcgaactgctttgaatacaaccctcgta

SEQ ID NO: 85914 - DNA, 124 bp, Homo sapiens
ttcagaccatggaaccagcattgcccatgccccctgtggaggagctggatgtcatgttcagtgaactggtgctcctctggtgcaagtgtggtagctattgacaacaaaatcgagcaagctatgg

SEQ ID NO: 85915 - DNA, 51 bp, Homo sapiens
gaagaagtgggagctcatctgtgatcagacctgcctagagctggaacgtta

SEQ ID NO: 85916 - DNA, 80 bp, Homo sapiens
acagacatggatcctgaagtggcggccctgtattttcccaaaaactaatggcagcattagccgctgttgggcctcctaat

SEQ ID NO: 85917 - DNA, 100 bp, Homo sapiens
tgagtacttgcagccctcggccaaacggccagacgccgacgtcgaccagcagagactgggtaaataatgcttttctggaccgactccaaggcaaaagtca

SEQ ID NO: 85918 - DNA, 75 bp, Homo sapiens
cacagactggctgacattaaatgttggagggcggtactttacaactacacgtgttgcaaacaggaacccgaggtg

SEQ ID NO: 85919 - DNA, 73 bp, Homo sapiens
ttccccggcccacagtgggggtgtgcaaacccgagagaactggcctggagatttgaaaaagagaattgaatct

SEQ ID NO: 85920 - DNA, 110 bp, Homo sapiens
ccccaccgaggccccccggcaccgcgcctgctgccgggttgcgctccgtgcacctcttgcggggtatttgaagtataccatacaactgttttgaaaatccagcgtggaca

SEQ ID NO: 85921 - DNA, 100 bp, Homo sapiens
gattcttccaaggaaccagtgcgaagggtggtatttccaacattttggaggaactggttgtccagcctctgttggtatcagtcagtgctctgactcttgc

SEQ ID NO: 85922 - DNA, 136 bp, Homo sapiens
ccagggtttggtgacaatagaaagaaccagcttaaagatatggctattgctactggtggtgcactgttgggcgatcggtcacttcgtgtggacattgcagaaggcagaaaacaagataaaggtggctttggattca

SEQ ID NO: 85923 - DNA, 75 bp, Homo sapiens
gtcttcggtggactccttcggcagtccacccaccgccgccgcctcccagctgtggaaagtgaagaaggcattgaa

SEQ ID NO: 85924 - DNA, 82 bp, Homo sapiens
cttgcgggagaccgggttgggctgtgacgctgctgctggggtcagcatttaaatcaaacggtattgagatggattgggttat

SEQ ID NO: 85925 - DNA, 75 bp, Homo sapiens
ggccggttgctaagacttggcgaagcgctgcgctcgcgcccggatccctcaggtggaagttaaacgagctgagcc

SEQ ID NO: 85926 - DNA, 100 bp, Homo sapiens
cttcgctggcgggagcgcggttcggggccgcagaggctctgacgcccgctctgcggcttcggtgtttgaacaggccacagtccaggagcgcttacattca

SEQ ID NO: 85927 - DNA, 75 bp, Homo sapiens
gacgcacacccctcgggaggcgcgaagattcgggaactggagcctctcctctgtcacagtgacaatccatctcag

SEQ ID NO: 85928 - DNA, 100 bp, Homo sapiens
taaaacttcaaaaattaccattttatgatttactggatgaactgataaaacccaccagtctaggatcaaaatacttgctggatggtggactcagagacca

SEQ ID NO: 85929 - DNA, 90 bp, Homo sapiens
gagcagaggacccggcgggcggcctcgcgggtcaggaaagaccacagcaagattctttcattcgtctcctcctagcctgggggaccaggc

SEQ ID NO: 85930 - DNA, 50 bp, Homo sapiens
ctccaaagtagctgagactacagaaaacggtccggatgtaccccttccag

SEQ ID NO: 85931 - DNA, 50 bp, Homo sapiens
tccatcctcgcattgctgttgaatgcagccgagaccgacccgcccgcccg

SEQ ID NO: 85932 - DNA, 76 bp, Homo sapiens
tgggatgtgcaccacggtcaaggaacacagttcaccttcgaccaggaccccagacagggtcttgctctgttgccca

SEQ ID NO: 85933 - DNA, 85 bp, Homo sapiens
caatattaatgcttttgacaagaaagataggcgtgctatccattgggcagcatatatggacagtgatctgacacaaacacagctg

SEQ ID NO: 85934 - DNA, 82 bp, Homo sapiens
tatcgtctgtattgaaagactgtgggaggattcagctgttggactaaatgctcttccttcagaggattatccggggcatcta

SEQ ID NO: 85935 - DNA, 50 bp, Homo sapiens
ccattttcttttttggaactcatgagactctatcacagtacagcgatgag

SEQ ID NO: 85936 - DNA, 100 bp, Homo sapiens
ggccgcgcaggcaaggacaaggccacagagtcggggtcttcacgcctgacatttaccccggtaactgctgggcatttaaaggctcccaggggtacctggt

SEQ ID NO: 85937 - DNA, 90 bp, Homo sapiens
ctcccaccccaccccattaccctccacatgttcatggcctcccacgggaacgacgccgcgagagccaggtttgagtccaaagtaccctcc

SEQ ID NO: 85938 - DNA, 100 bp, Homo sapiens
gccagagcccccttgctggattatatctacaggtttctggagcaggaaactcatctcttcagcgccattaacagccatttgctgactgcgcaaccttgga

SEQ ID NO: 85939 - DNA, 123 bp, Homo sapiens
tcacaaaacagcagatttcccaagagcagcggaaaatgatccagtcacaggttgtttcagtgtgccttcccttgaaccttgacacaaagtatgaattactttacttggcggagcagtttgcag

SEQ ID NO: 85940 - DNA, 82 bp, Homo sapiens
agcagatggcggatgccctgcagtacctgcagaaggtctctggagacatcttcagcagggtcggcactcttcaccctcccga

SEQ ID NO: 85941 - DNA, 100 bp, Homo sapiens
ctaatctcacggatatcctctgttgggggagaaggtcaacatgattgtgtgaccataatcaacaatttctttcctcgagagagactggattattacacta

SEQ ID NO: 85942 - DNA, 80 bp, Homo sapiens
ggaagagccgggaaagggcgtcgccgctcatgtaggtgaaaacttttggcccgtttggaagcggcagccaggacaacctg

SEQ ID NO: 85943 - DNA, 82 bp, Homo sapiens
gtcgtggaggtggccgtggaggcagaggtggcatgggttgccgaggtactgtctgaatgccgcctgctcgcctacatatccc

SEQ ID NO: 85944 - DNA, 100 bp, Homo sapiens
gtgatggcagcagttactcgcacaaccccagttaagctgcgctccgggaggttctctacttttagagtcgaaaataaatcctaacactgcataccagaaa

SEQ ID NO: 85945 - DNA, 83 bp, Homo sapiens
gcggaaccggatcaccgagggcatttacggcaggagggcacctccaagtttgccaccctggagatgaaccccaagagagccca

SEQ ID NO: 85946 - DNA, 100 bp, Homo sapiens
gggacatacctgtaactattatggatgtgtttgatcagtatgtaaagaccagggcagaggaagaacgcagggaaaagaaaaataaaataatgcaagccaa

SEQ ID NO: 85947 - DNA, 94 bp, Homo sapiens
gcaggagcacggatgccccccggagccgcgggctggcagaataccctctaccatctgctttggtcagggtgccgctcgaggatttaaaagcaac

SEQ ID NO: 85948 - DNA, 83 bp, Homo sapiens
accgcgtggtgcttgccgcagccagcaactatttcaggggtaccaaagtctgatctcttgcacaccaaatcattaaggggcca

SEQ ID NO: 85949 - DNA, 87 bp, Homo sapiens
aaaaaggctgggtgccgccgtcccccagctgcgcaaccctaggaactctcgggggtttgttaaagttgttaagaataaggcctactt

SEQ ID NO: 85950 - DNA, 75 bp, Homo sapiens
cttttcccagaacacagagagcagagggcgtgttggagagtttcctgggcactgctgtctctggagccatctttt

SEQ ID NO: 85951 - DNA, 95 bp, Homo sapiens
cctgcacagcccggagtggagcgaggagcgcttccgcgtggacaggaagaaacttgaggccatgttacaaggtccccatcctcatcccgtgccac

SEQ ID NO: 85952 - DNA, 82 bp, Homo sapiens
caccggtcccccagcggcagccgagcccgcccgcgcgccgaaacctctgtagaggagcaggatgcaaccgacaggctgtggc

SEQ ID NO: 85953 - DNA, 104 bp, Homo sapiens
ttgagggagagctggggcctgctcccggagagatacggctatgtcgatcgaaatcgaatcttcggaagttggatgcactaggtgatgagcttctggctgatgaa

SEQ ID NO: 85954 - DNA, 100 bp, Homo sapiens
agccacccgagcggactcccgagaccaaagagaaccctgtacagtaagaaatatggtgtggacctcatcagatacactcatgcagcaaacacagttgttt

SEQ ID NO: 85955 - DNA, 98 bp, Homo sapiens
cctgttgcaacagtcgaacatcagcgagattaatcaccaggacaatgagatgtgtcttgctgaatcagggctctcttatccctgccatcgacttacag

SEQ ID NO: 85956 - DNA, 96 bp, Homo sapiens
aggtaagaaacggttgtggatcttgaagctttggaaagaagacatctggcgagttaatatccagaggaaaagacggcaagacatgcttttgaggcc

SEQ ID NO: 85957 - DNA, 100 bp, Homo sapiens
cttcaatccgctctactggaatgtggacacattcagctaacgtattttagcaggtggagtgaggttgaagattcctgtgacagcgatgccatagagagaa

SEQ ID NO: 85958 - DNA, 90 bp, Homo sapiens
gcgctcgagaaagtcctctcgggagaagcagcgcctgttcccggggcagatccaggttcagaatgccgggacattctgcttcctgtcatc

SEQ ID NO: 85959 - DNA, 90 bp, Homo sapiens
tgtttgctgtccatcctgtgcacaccgagtgtgccaggtgtggtgtcttacacctgtaatcccagcactgtgggaagccagggcaggtgg

SEQ ID NO: 85960 - DNA, 74 bp, Homo sapiens
ccgcccctcaccagacagatcgctgtcaaaaccctagagtatgctcaggtaatcaaaatgttgggaaatggacg
